United States Patent Application Publication US 2004/0123343 A1 - sequence listing, part 33

SEQ ID NO: 90771 - DNA, 148 bp, Oryza sativa
  Clone ID: PAT_MRT4530_89408C.1
cttcctctaggacgtcaagccacctccaatcagggcaatagaaataatagaagcacacagaaaatatagatcgcaaggctcttcctttaggacgtcaagccacctccaatcaatgtcgattccaggttatcaacgaactcaaccctga

SEQ ID NO: 90772 - DNA, 1678 bp, Oryza sativa
  Clone ID: PAT_MRT4530_89409C.1
atgcggcgtaagcccgccgcgtcggagggtggttggggaagcgacgccgaccccgactccgggagctccggcaatggcggtggcggaggttcgccgccgtcgtcgccgtcgccgccttcgccgccttcgccgcagccgctgctgccgacgttgccctcaccgcaggccttcgtggacgcgtacaccggctatgaggatcagggagcatgggaccccgattccttgtctctagagttgggacttgcaacgttacgagagttggaatgtatcagatatcaggaagcacaagaagactggagaaagagtgatgataacaagtctgattcctgcaagcaaaaagataaggatcagggagcatgggaccccgattccttgtctctagagttgggacttgcaacgttacgagagttggaatgtatcagatatcaggaagcacaagaagactggagaaagagtgatgataacaagtctgattcctgcaagcaaaaagataaggagcaggaagcatgggatcccgattccttgtctctagagttgggacttgcaccgttacaagagttggaatggatcagatatcaggaagcacaagaagactggagaaggagtgatgataacaagtctgattcctgcaagctaagagataagacaacatcagatgaccggagcaagagtggcgataacaagtacgattcctgcaagacaagagataagaaacctatcgtggatttggctgatgaattcgaaaacaataccataaaaaaaaagatcacgcttcttagcgaaaaatacgatttcttcagaccagttgacagagatggcagttgcttttatcgagctttcattttcagttacatggagcgtattgtagcaatgcaggatgacttggagcgcattattgaagtttcccgtatcggagaacgtattggaaaatacaagcaagcttatgcaagatttggttcttttggaatacctcaagaagaattcttgaaagctctttctgcatttgaacaattgatcaacttaattgaaaagggtgttgctgttgaacaactatatcagatagatgagactgacatcacaaaaaacagtttacgcttccttaggtttctgactgagattgagatctgcacacatgaggaccactacaagggttttcttctaacagcagattattcatctgtttttgagttttgccaggttgaagtgcgacctgagaatgctgaagcgagcaatgaacagatgaaggcacttgtggaagcactcggcatccccgtacttgtggagaatctcgatacaacctcggagactgacacccccatactaaatcagcatttcatctaccccagaccagaatcagaagagggcacgatgttgggacctctgaattcgcatgagattgtctctcctgaaagcagtggttaccatgcagctagaggtgagcttcagaatcagcctagtaccagtggctccagtacaaacagctcaacagaagcattgggactgcaatcaattggcaccagttcaactcctaatgagcgagatggaaagggagacaggaccatcaacgacctatccccagcagaaagaaggcggttagcgatcttgctgtacaggcctgggcactatgacattctttgtcccaagtagaccgacctttctctggagtctggaatacgta

SEQ ID NO: 90773 - DNA, 225 bp, Oryza sativa
  unsure (1)..(225): unsure at all n locations
  Clone ID: PAT_MRT4530_8940C.1
gttgctccatatgctatcatcattaaaggtccttctcacaactcttcaatcgaactttgcgggggaggtcnttatgcggggaggggagcttacttatatctatttggaaagcgagctccgttttctcatctaacagcagcctgatggacagtgtgagcacagctataattcctagttctctggacaacctcctgcttaacttcaacacgagcttcctgtatagcg

SEQ ID NO: 90774 - DNA, 601 bp, Oryza sativa
  Clone ID: PAT_MRT4530_89410C.1
cggcgcccggaggaggaaggcggcgtggagacggttcctctactactgctgcgcgttctaattagcctcagggatgaatcaacaacaccaaagatcaatcgagcactgctcgatcggttgctttctggcctcgccgccgcctcggttcttcccagctcggactcgatcggctcccggcgagcttcgaatgaagctcgtcgtgttcttgattcgaggctgtcccggcgaagttttgctgagaccaatcgtcccggcaaaagaggggctgcgaaccagaacgaaatggcacatattgcagaggttttgcaaacttgaaataataagtatagagacagaaacgatgatcacgatctcgagtcgatcgatcatcaaatcgagatgtaaaaagtcaaataaaaagattttggttttctttttatctatgtcagtgaaatttctgctcatcacaaccagaagatctttgtcagtacagaagagatcttccacgttctcccaacttttgcattaggtttgcttctcctattgaaaacctcgttgactatcgctgtacaggtgtacctagagaaaaaacaaaaaaaaaaaaaaaaaaaaaaaaaaaaaa

SEQ ID NO: 90775 - DNA, 317 bp, Oryza sativa
  Clone ID: PAT_MRT4530_89411C.1
ttatgttggccgccctcctttttttttttttacctaaacatatggaaaattaattaattatgaagagaggtacatacatagactctaagaaaattacaccataaataacaatggaacggcaacagcaaatggcccatggctaggggacaacagatggatcccaaataacccggtgctggccagaaccgcaatggaaaaacaaaggcgggacagcacggcagcaaagcttgaaacttgagcagaagggcggccaacccacaaaggagaatgcaacacaacaatgagcccatggaaatggaacaaaactgaaccagacc

SEQ ID NO: 90776 - DNA, 264 bp, Oryza sativa
  unsure (1)..(264): unsure at all n locations
  Clone ID: PAT_MRT4530_89412C.1
ggcctaagaaacaaaaatgggatccagaaggccaaattgcgagggtggccnataggaaccttcgggtttccatgggtcttaaattaaggcccgacacacaagggcaaaggccacccatttggtatgcaactttttgtccagcaatttaccacttccacaaaaatttgaaccacatatttgcccaaattccaaacctattccagaaataccgaaaaaatggggttggaggtcctaaaaaaaggctgaaaaatcccccgctgtggt

SEQ ID NO: 90777 - DNA, 2625 bp, Oryza sativa
  Clone ID: PAT_MRT4530_89413C.1
atgactagagaacatacctgttttactttggtaaaagctacatcactatgctcatgttctacatattttagagaagcacaactagacagagtttattacgctaggttgagtattatccagaaggcaaggataattacggagtgtttgcaccggttctgtagggactgcatagaaaaatccatgcggcttggaaatgatgaatgcccagcatgccgcacccctgcaagtagtcattccttgaaggttgatcctaattttgatgctttaattttgacgctgtatccagatcttcacaaggacgaggaagaggaacttgctttcactgaagagaagacttgtcacaaaaagatccaagcatccaccgatgaggcacctcatagacgaaaagaagcacttgggaagaagagctccgctgcaaaagctataggttcttcaaggtctcaagggaatatgctggcaaggaagagaggacacattgattttcctgatattgtcccaactaaagttcgtgatttccacaactttgaagaaggacgctcatgtaagaagtttgagtgtggacaaatttgggctttatatagtgaagttgataaattccccaagttatatggttggataagaaaagtcaagctacagccattcacagtgcttttgacctggcttgagccttgtcctcaacaggagcaggagaagcggtggttagagcaggatatacctatcagctgtggtgaaatttggtccatctacatgaactggacatttgactggactccttccagcaaagctacatgcgagttcaccatcgaggaaagaggtggtgagctttgtggcttcttagagcttgatcctggttctgttcctgacattttcctcaatagggaagaaaataacaatgatggttgcaaagggttgtcatcagttggtgatcattcagaaggtccaaagacaaaaaaagctcgcaagtttcatgtgtcacaatcatcccccgctggacataaagtcaccagcaaagtggacagccatgaggaaagaatggcaaatcgtgtagctattcggctaaagaacatcatgaagatctttctttgcaaaaaaagagctgacagacaatataatccacctcctatgacaagaaaagtagacattcaaggtaaaggaaaaacttcagacacagatgataaggacaatgccaatgctgaagctactaatactgttcgtcagaatgagcattcctgttctttagaacttccgtccccatatccagatttctatgattttgagaagctcagggatattaatatgttctcacttggtcagatatgggccctttacgacgaccttgatggcatgccaagattttatgctcgaattgaacattttgatgcatccagcttcaaagctcatctcacttggttggagtacaatgcagcaagtgaagaagagaagaaatgggctgatgaagaacaacctgttgcttgtggtttctcagttaatgatggtatcactgttatcccattagtcaggattaaaggctttgtgagtttatttgcggcagctaaagacaaatctgcagttgtgatagcatcgagtgagttgcttcgattttctcataatatcccctgttacaggacaactggaaatgaaaaagttattttcagggcaactcattggctctggttttgggcacaactacaaagtgatgttgataaattccccaagttctatggttggataagcaaagtcgagcgacaaccattcatagtgcatttgatctggcttgaggcttctcctgaatatgagcaggagaaacggtggttggagcaggacttaccagtctcttgtggtaaatttaaaatccgggactggaaagccagagcagtgttcatgcctgacaagcgaaatacagttgtggagatacctacaagagatcgtttgaggttttctcaccgaatcccctccttccttttgacagaagaaagaggtggcaggctccgtggcttctatgagctcgatccagcttctgttcctgatgttttcctgtataggaacactgttatgggctggagtggcatgagaggaactgatgcactaaattttattttttttacatattggaatgcaacagagaagaggctagctattgggcattcccaatgtttaccgctcaatgagccctcttttcattcttggttgtatgacagccataagaagatggtcaaggaacatcgccggggattcgacaccatcgcaacactggtagcgtggacgatttggaaggaaagaaacaattgggtcttcaaccagaagagcagaacatgggcggagattgcaagggttatgacgggtgaagcggagctttggcggctggctaaagccgcaatccctgttgtgtcaggactgaacaatcctgtgattgcctaccactatccagacctctgtgattttggcaagtttagagatgtcaactggattgaagttgatcagatctgggcactgtatgacgaccacgatttcatgccaagagtctatgctcgaatagatcacattgatacatccagcctcaaagttcagttcacttggctggctggagcacaaagctatgaatgcgcaagaggcgaaatggactga

SEQ ID NO: 90778 - DNA, 183 bp, Oryza sativa
  Clone ID: PAT_MRT4530_89414C.1
atggccgtgggaggtggtggatcgttggtcagcaatgaaacgggtgttggcaatggcggcaaagtggagcgagaggtaaccagagaacatccagcagtacgattaattagcgacattgaagctcatgacttggatctactcgaactagtaatctcaatgagccgagccaagttgaccttttaa

SEQ ID NO: 90779 - DNA, 2328 bp, Oryza sativa
  Clone ID: PAT_MRT4530_89415C.1
atgtctaagagaacatgcatgttttactttggaaaaagaaatgatgaatgcccagcatgccgcacccttgcaagtagtcattcgttgaaggttgatcctaattttgacgctttaattttgacgttgtatccagatcttcacaaggacgaggaagaggaacttgctttcactgaagagaaaacttgtcgcaaaaagatccaagcatccaccgatgaggcacctcatagacgaaaagaagcacttgggaagaagcgctccgctgcaaaagcaataggttcttcaaggtctcaagggaatatgctggcaaggaagagaggacacattggttttcctgatattgtcccatctaaagttggtggtaaggatagggaagaaaatgacaacagtggctgcgatgagtggtctttatttgatgagtattcacaagatataaagaagaaaagagctcggaggtgtcttgtgccacgatcatcccctgctggacataaaatttccacaactttgaagaaggacgctcatgcaagaagttttgagtgtggacaaatttgggctttatatagtgaagttgataaattccccaagttatacggttggataagaaaagtcaagctacaaccattcacagtgcatttgacctggcttgagccttgtcctcaacaggagcaggagaagcggtgcaaagctacatgcgagttcaccatcgaggaaagaggtggtgagctttgtggcttcttagagcttgatcctggttctgttcctgacattttcctcaatagggaagaaaataacaatgatggttgcaaagggttgtcatcagttggtgatcattcagaaggtccaaagacaaaaaaagctcgcaagtttcatgtgtcacaatcatcccccgctggacataaagtcaccagcaaagtggacagccatgaggaaagaatggcaaatcgtgtagctattcggctaaagaacatcatgaagatctttctttgcaaaaaaagagctgacagacaatataatccacctcctatgacaagaaaagtagacattcaaggtaaaggaaaaacttcagacacagatgataaggacaatgccaatgctgaagctactaatactgttcgtcagaatgagcattcctgttctttagaacttccgtccccatatccagatttctatgattttgagaagctcagggatattaatatgttctcacttggtcagatatgggccctttacgacgaccttgatggcatgccaagattttatgctcgaattgaacattttgatgcatccagcttcaaagctcatctcacttggttggagtacaatgcagcaagtgaagaagagaagaaatgggctgatgaagaacaacctgttgcttgtggcaaaaagaggattgcctatgaagtatatcttaataagggtgagttatgggctctttataaggattggagcatgcagtggaattcagatgcagacagccatcggtcttatgattatgaagttgttgaaatattgtcaggtttctcagttaatgatggtatcactgttatcccattagtcaggattaaaggctttgtgagtttatttgcggcagctaaagacaaatctgcagttgtgatagcatcgagtgagttgcttcgattttctcataatatcccctgttacaggacaactggaaatgaaaaagtaggtgccccggcagggtttatggaacttgacacttcttgtctccccattgacatggatatgatatttccttctgtcaccctggactcttacatctcccttggcaagaaaaagggcagtacactcattgatttgacgactgacagtagaagtagtagaaaggatcctggaaatgaacaaacggagaatctttctgaagcacaaaaggagagtctttcttctgaaaaaaactcatccttgcccaaaaatggccacgttgccaatggttttggcaataattctgggccaggctgcccttccccaaccccaactattttttcatatcctgatccagaattccataacttcgaagatgaccgcacatgtgagaagtttgaacctgggcagatttgggctttatacagtgatgttgataaattccccaagttctatggttggataagcaaagtcgagcgacaaccgttcatagtgcatttgatctggcttgaggcttctcctgaatatgagcaggagaaacggtggttggagcaggacttaccagtctcttgtggtaaatttaaaatccgggactggaaaaccaagtatgagagaaattattctttctcatttagtacatacaggatagaatggctcaaaccggcagattga

SEQ ID NO: 90780 - DNA, 534 bp, Oryza sativa
  Clone ID: PAT_MRT4530_89416C.1
tgccacggggacccgccccaatccacctcgccgccggtgggtcccagggctccggtcactgctcccgccaacgacgaccttgttagccccctagcacagctcatgttgttgctgtttgatttcctggggttctgggatggcagttggaggttgcgcgcttttgtttatcaatggaagatccaagcatccaccgatgaggcacctcatagacgaaaagaagcacttgggaagaagcgctccgctgcaaaagcaataggttcttcaaggtctcaagggaatatgctggcaaggaagagaggacacattggttttcctgatattgtcccatctaaagttggtggtaaggatagggaagaaaatgacaacagtggctgcgatgagtggtctttatttgatgagtattcacaagatataaagaagaaaagagctcggaggtgtcttgtgccacgatcatcccctgctggacataaagtacccagcaaagtggaccaccatgaggaaggaaatgcaacacataaagcagaatcactctaa

SEQ ID NO: 90781 - DNA, 1685 bp, Oryza sativa
  Clone ID: PAT_MRT4530_89417C.1
caccaacctcgtctcgtctcgtctcgtctcgcctctcgatccttccaccccacgccgccctctgccatcatcgtcgtcatcccatccggattgccacccaaccaatcgccatttgcttctcgctttccctctcctcccccaaccactccatcatcattcgcaatccaatctcgctcttggttggcgtcgattttgacgcggtctggttcgtgaatccgacggagccgggtgatctgcggcgggacttgcagatccgagcgggcggggcggggcgggttcgctcgtcggatgtgtggatcctggtgaggtgaggcgatgccgggcgtcggcgtgaagatctacagcgtcttcttcaagttcctcctccgccacaagctccagtcgctcgccgcggcggctgcggcggcggcggcgggaggggaagacgacgcggcggcgttcggggtctcctgccgcgcggacgaggccacggcgccgtcgaacccggccttctccgcggcggacggcgtcgcctccaaggacctccacatcgaccccaactcctccctctccgtccgcatcttcctccccaccccgccgccgcgcccgcacagccgccgcgccagcgagcccccgcccgccaccgccaacggcgggagcgcgccctacaggggctacctcccgcacgccgtctcctccccgcgcgccgcggcgtccgcgcggcggaggctgcccatcgtcgtccagttccacggcggcgggttcgtgtccgggagcagcagctccgccgccaacgacgccttctgcaggagggtggccaagatgtgcgacgccatcgtcgtcgccgtgggatacaggcttgcgcccgagagccgctatcccgccgcgttcgatgacggggtcagggtgctcaggtggatcgccaagcaagcgaatctcgccatgatgagcaaggtcggtggcggggtggacacgttcggtgcttctaccgtcgagccgtggattgctgcccatggtgatccggcaagatgtgtactacttggtgtaagctgtggtgccaatattgctaattttgtcactcggaaggcagtagaagatggaaagctatttgaccctatcaaggttgttgcacaggttctgatgtacccattcttcataggaagcgttccaacacactcggaaataaggcttgcgaactcatacttctatgacaagtccacatgtatacttgcttggagattatttttgtcagagaaggaattcagcctggatcatcctgctgcgaatcccctggctcctgatagaggagggccaccactgaaatgtatgcctccgaccttgacagtcatcgcggaacatgactggatgagggatcgagcaattgcatactcggaggagctccgcaaggtgaatgtcgatgcacctgttcttgattacaaggatacagttcatgagtttgcaaccctcgatgttttcctcaagacaccgcaggcccaggcctgtgccgaggacatcgccatatggatgaagaaatacatatccctccgaggacacgagttctcgtattagtagttgtcagcaaatatatcagaactgtgaaatagacttacgggaaagcatcaacatgtacttttacaactggtaatgggagcaattgcaaagtggaggccaggaacctgttagcctaatgtgagtgagtactgggc

SEQ ID NO: 90782 - DNA, 1035 bp, Oryza sativa
  Clone ID: PAT_MRT4530_89418C.1
cccacgcgtccgcccggcgcgggcgcccacgcgtgcggccgccgccgcagatagtacaccggctatctatccatctatctactcagctttgcgtcctcccgcgaattcaccgcagcaatggcgtccctcgtcgccgtccagcctgtcgccgtgaagggcctcgccggcagctccatctccggcaggaagctcgccgtcaggccgtcgccccgggcgctctgccgcaccacccgcaggccgcgcgccgccgtggtggccaagtacggcgagaagagcgtctacttcgacctcgaggacatcggcaacaccaccgggcagtgggacctgtacggctccgacgcgccgtcgccgtacaaccctctccagagcaagttcttcgagacgttcgcggggcccttcaccaagagggggctcctgctcaagttcctgctgctcggcggcggatcgctggtggcctacgtcagcgcgtcggcgtcgccagacctgcttccgatcaagaagggcccgcagctgccgccgacgcccggcccacgcggcaagatctaaattaaattcctcgtctctgcctcaccttcttcttgatccgatccatccatgcaaatcctctgtactgtactgctagtcccccatggccggatcgccatggattaattccccctgtttatgatgttgatataattgtactattcctatggctatataagttgtaaaggatccaattcgatgctgcatgcgacgtactgcgatcccatgtgttcggttttaaaaaaaaaaaaaaaaaagaaaaaaaaaaaaaaaaaaaaaaaaaaaaaaaaaaaaaaaaaaaaaaaaaataaaaaaaaaaaaaaaaaaaaaaaaaaaaaaaaaataaaaaaaaaaaaaaaaaaaaaaaaaaaaaaaaatgggggggggcccttttaggggatccaagtttactaccccgggcttgcaaggtaatagtttttttttggggcccccaaaattaaattcacgggccgcggtttaaaaccgctgggacgggaaaaacccgggggt

SEQ ID NO: 90783 - DNA, 480 bp, Oryza sativa
  Clone ID: PAT_MRT4530_89419C.1
ggcaaaaccatgctgctgactctgccacctagttttgtcaccgcagattgtgagctctcatttttccttgtgcaagtgggggtaagaagaattcacgattgtcatggatcaagattgagaggtgtgctgcaaagcttgctgttgaaaattctgtcagtcatgcaagattgatggatgctgatgatgaatcacttggtgtactagcttatatataatagtaaaaatatccagcaagaccaacaagaagcaactgcattgcatcagcatgttattcctctgctaagcatccaccactgcagagcaacctcatggacaagaaatggcaacatctgcactgctgctggtgataggtattgatgagctgttccaggtttgttgggtatcagctgataaactgggactgttccaggtttgttggtatcagcaaaaactggagctgccgcccatggtaatctcaattctggtgtgctgatgaccaca

SEQ ID NO: 90784 - DNA, 2794 bp, Oryza sativa
  Clone ID: PAT_MRT4530_8941C.1
atggcctctgagccgtacacgaggaagaagggtgtctccttgttagacgttgtcggtgtgtactatgtcgtttgccctctcgacctgtccattgctctgagggtgagaaaccgaggcgaagcagatcttgactcccagcctgatgcagtaatcctgaaaatcggcactgatgaactgggagccgttgtccgttatgatacggtggggcaatccgaatctgcagaatatccctttgatgaatttgatggcgttgtcggccttgatttccctcgtgggtgtcgcttcaatccacttagtgaatttgtcgatcgccacgaataggaacctgcagccgccctatcctcgtgggaatagcccgagaatatctagcccccagcacgagaacggccaagtgagagggatagtctgaagtgcttgcgctggtagccttgtgtgtttacatgtcgcaggcgtctttaagggcggttggccagaagaacccttgtcgaaaagcttttccgactaatgtccgaccggcggcatgtgatccacggattccttcatgtatgtcaaggaggaggtgtctgtcgtcgtcggacgagacgcattttagaagtaccccgtttggtgccttcttgtatagatcgttgccgatcatacagtagacttttgctttacgggatattttcttggcttctgtgtcgtcctcgggcaactcttcactgcctatgaatttaatgagtggggtgtgccagtcatctgtgctctcgatatcggcaacggcgcgctctgcctctgtagcccccgagctgatgttaggggtgaccgggctatcttcgccgcttgcctctttcactgatggcctggtcaggaaaggtgccaggttcaattggctgtggctctcgtctggacgcacgccgtgctagatcatccggttcgatgttgtctttgtggtatacatgtcagacctcgatcccatcgaaccttttttccagcttcctgacttctgcgagatacttggataactcggggctagagcacttgtaatctttattcacctggttcgcgactagttcggaatcccctttcacaattagtcgcctaactccgagtgcagctgcagctcttatcccggcgagtagtccttcgtactcggctgtgttattggtcgccctgaagttgaggtgaattgcatgcttgaattgatctcccgaaggtgatgtcaagatgaatcctgcccctgctccttggctgttgagtgcgccgtcgaacgccattgtccacctttcgttgtcaatttggttgtctgacctgttatcaggcatagtccaatcggctacgaagtcggcaagtacctgggacttgatggctgttcgtggcacaaagcggatgtcaaattggcttagctcgactacccatttcacaatgcggccgagaacgtctttgtttctcactacttcaccgagagggcaggaggatacaactgtaaccctgtgggcttggaagtagtggcgtagctttcttgatgtcatgattaccgcgtagagcaatttttggatctgtggatatcttgtctttgtgtcgtggagagcgtcgctaacgtagtagactggttgttgcaccttctctctctcgacaacaatgacagtgctaacggaatatggcgtggcggcaatatagagaaataattcttcattaggttggggggcaacaagtatagggggatttgataggtagcgcttgagtgcaatgaatgcctctttggcttcctgtgtccatacaaatttgtcttgcttctttagcagagcgaagaaaggttgtcctcgctctcccatcctagcgacgaacctgcttaatgccgccatatatccggttaacttctgtacttccttgagtcttgtaggcgacttcatgttcttgattgccttgatcttctcgggatttgcttatattcctctgccagagacgaggaaaccgagtagcttgcccgatggtactccaaacatgcacttctctgaattgagcatgaggcgatatcgtcggaggctgtcgaacgtttcatgtaatttgagagaaacattcctttgatcttctactcttgagtatggagttagaagggagtcgctgctcaccattacctagtgtccgtttctaattgttgaaagtcaaaatgctggaagagggtggttttaaaaaaagaaaaaaatcaaaaaaaatagtgaaggtagtgcttgatttatagtgttttatggtgaagaaatttctcaaaaaagagtaatatttattcaaatttgagagcaaaacggagaataaatttgaaaattggaaaaagaaaaaaaaatgggccggcccgttactgtgcaacccattacacatcgcgcggtaaccgcgccaaaccgcgtggttaccgcgtcaaaccgcgcggtttgcccgaatttttgaattcaaatttcgatttgtaaatttgtcgcggttttgcgcggttaccgcggttaccgccggtaaccgccgtaccgccgggtggcggtaaccgggcccccggcggtttttgaaaccctgccaggaggtcgacggcgttgatggcggcatcgacgacctcggcgacggcgggggcgatggagggggagacgacggcgggcagcttctcgggccgcgcggcgtgggccgtggaaaccaggatcaggcccacgagcaccacggacaccagcgccaccctcatgctcgccgccttccccatgcgcgaacgccctcttcttctccgaccaatttgaagtggtttgtttatttcggacgcggggtcgacccgggaattccg

SEQ ID NO: 90785 - DNA, 419 bp, Oryza sativa
  unsure (1)..(419): unsure at all n locations
  Clone ID: PAT_MRT4530_89420C.1
aaaganaaagacttttttttttttgtttttttccgcgccctaccaaattggtggggggagcagccaatcctgaatttttatcgccgcaatgcccaatttgtttgccggcggagcaacagtagtctccctgctcttttgcgggaaacctcccaacaccaccatggaggtggggaagttcttgacgccggcggagaagattttcccgccctcgcgggagatgatgaagatgctgtccaccctcccgtcgtggtttctaacgaccaacaacagaagcaccgggtggttgaagaagatcacctggttgaccaagaggtactggtgctgaaaaaggtttccccgctcccggacgccggttaaatccgccaggttggtagcgataacgcccaccatcactccggcggtggccagcaacaacccgc

SEQ ID NO: 90786 - DNA, 322 bp, Oryza sativa
  Clone ID: PAT_MRT4530_89421C.1
atcgaaatttcccctccctcccccacgagctggcgagcgggcgggctgctcgccgtcgcaccacccacctccgtcgtttcaaatttcaaatcctccccgacgcgcccccacacccccccgtgcccccgatctatgtaatccaatccatcgccgtcccgatcccccatgtctcttcttctgtgactgtgagtaggcgcgagcggtgaggcgtcttcctcgagcacatggagggcggcggccgaggcggtacggacatgaacgccgtgccggagggcgctcgtgcagcacgtcctgtcgatgcttatcaacgtcccgtgacatg

SEQ ID NO: 90787 - DNA, 4528 bp, Oryza sativa
  Clone ID: PAT_MRT4530_89422C.1
atgagacaacctgatcgtcagatctatactacaccggcggattcaaatccccaaacaggagtctcgtgcgctacctccttttattattgccgaattcatgtttcgacagttggcgcgccaggtaggggttgcgtcgagtttcctatcaacgagcgcgatggaatcaatttcatgagtcgccgacttcgctttcgctttgggagttttcacttcctttgcgtcgaccacttcttcaagctcctcttctctgacttgatccaaatcagtcagggggaaactcaatctgatttttatcattatttatcatattgatttttaatctcagattaatttcttgctattttttgttgttgttcgcatataacaacaacgacttcaccgccggcctgcctccgtcgccgccgactggtgtcatcgcctatacggttggtcggtcacaccaccgttcatgggcgtccatgtcttcaccgaccggctggccttcgccgccgccgactggtgtttccgcctgcacggctggcctattatgccgccgctgttgggcgtctacgacttcaccgccggcctgcctccgtcgccgccgagtggtgcctccgcctacacggctggcctattcactccccaccgttgatgggcatcgttatctacaccgccggcctgcctccgtcgccgccgactggtgtccccgcctatacggtcggttggtcacaccaccgttgatgggcatcgtcatctacaccgccggcctgcctccgtcgccgccgactggtgtcctcgcctacacggctggcctattatgccgccgctgttgggcgtctacgacttcaccgccggcctgcctccgtcgccgccgattggtgcctccgcctacacggctggcctattatgccgccgctgttgggcgtctacgacttcaccgccggcctgcctccgtcgccgccgagtggtgcctccgcctacacggctggcctattcactccgtcgccgccgactggtgtcctcgcctacacggctggcctattatgccgccgctgttgggcgtctacgacttcaccgccggcctgcctccgtcgccgccgactggtgtcctcgcctacacggctggcctattatgccgccgctgttgggcgtctacgacttcaccgccggcctgcctccgtcgccgccgattggtgcctccgcctacacggctggcctattatgccgccgctgttgggcgtctacgacttcaccgccggcctgcctccgtcgccgccgagtggtgcctccgcctacacggctggcctattatgccgccgctgttgggcgtctacaacttcaccgccggcctgcctccgtcgccgccgagtggtccctccgcctacacggctggcctattatgccgccgctgttgggcgtctacgacttcaccgccggcttgcctccgtcgccgccgagtggtgcctccgcctacacggctggcctattatgccgccgttgttggatgtctacatcctcaccgttggctcaccttcgctgccgtcgactggatccagatccagatatgcataaaagggattcatggctttaagcttatctcttacgctccaggaatggatcagtcagaacatcaccaccggctcgcctcgaccgccgccgactggtgtttccgcctacacggctggcctattatgccgccgttgttgggcgcctacgtcttcaccgaccggcttgccttcgtcgccgccgaccgatgtcctcgcctgcacggctggcctttatgccgccgttgttgggcgtctacgtcttcaccgaccggcttgccttcgtcgccgccgaccgatgtcctcgcctgcacggctggcctttatgccgccgttgttgggcgtctacgtcttcaccgaccggcttgccttcgtcgccgccgactggtgtccccgcctgcacggctggcctattatgccgccgttgttgggcgtctacgtcttcaccgaccggcttgccttcgccgccgccgactggtgtttccgcctgcacggctggcctttatgccgccgttgttgggcgtctacgtcttcaccgaccggcttgccttcgccgccgccgactggtgtttccgcctgcacggctggcctttatgccgccgttgttgggcgtctacgtcttcaccgaccggcttgccttcgccgccgccgactggtgtttccgcctgcacggctggcctattatgccgccgttgttgggcgtctacgtcttcaccgaccggcttgccttcgccgccgccgactggtgtttccgcctgcacggctggcctttatgccgccgttgttgggcgtctacgtcttcaccgaccggcttgccttcgccgccgccgactggtgtttccgcctgcacggctggcctttatgccgctgttgttgggcgtccacgtcttcaccgaccggcttgccttcgccgccgccgactggtgtttccgcctgcacggctggcctattatgccgccgttgttgggcgtctacgtcttcaccgaccggcttgccttcgccgccgccgactagtgtttccgcctgcacggctggcctttatgccgccgttgttgggcgtctacgtcttcaccgaccggcttgccttcgctgccgccgactggtgtttccgcctgcacggctggcctattatgccgccgttgttgggcgtctacgtcttcaccgaccggcttgccttcgccgccgccgactggtgtttccgcctgcacggctggcctattatgccgccgttgttgggcgtctacgtcttcaccgaccggcttgccttcgccgccgccgactggtgtttccgcctgcacggctggcctattatgccgccgttgttgggcgtctacgtcttcaccgaccggcttgccttcgccgccgccgactggtgtttccgcctgcatggctggcctttatgccgccgttgttgggcgtctacgtcttcaccgaccggcttgccttcgctgccgccgactggtgtttccgcctgcacggctggcctattatgccgccgttgttgggcgtctacgtcttcaccgaccggcttgccttcgccgccgccgactggtgtttccgcctgcacggctggcctattatgccgccgttgttgggcgtctacgtcttcaccgaccggccgcctcgtccgccgccgactggtgtttccgcctgcacggctggcctattatgccgccgttgttgggcgtccacgtcttcaccgaccggcttgccttcgccgccgccgactggtgtttccgcctgcacggctggcctattatgccgccgttgttgggcgtccacgtcttcaccgaccggcttgccttcgccgccgccgactggtgtttccgcctgcacggctggcctattatgccgccgttgttgggcgtctacgtcttcaccgaccggcttgccttcgccgccgccgactggtgtttccgcctgcacggctggcctttatgccgccgttgttgggcgtctacgtcttcaccgaccggcttgccttcgctgccgccgactggtgtttccgcctgcacggctggcctattatgccgccgttgttgggcgtctacgtcttcaccgaccggcttgccttcgccgccgccgactggtgtttccgcctgcacggctggcctttatgccgctgttgttgggcgtccacgtcttcaccgaccggcttgccttcgctgccgccgactggtgtttccgcctgcacggctggcctattatgccgccgttgttgggcgtctacgtcttcaccgaccggcttgccttcgccgccgccgactggtgtttccgcctgcacggctggcctattatgccgccgttgttgggcgtctacgtcttcaccgaccggccgcctcgtccgccgccgactggtgtttccgcctgcacgctggcctattatgccaccattgatgggcgtctacgtcttcaccgaccggcttgccttcgccgtcgccgactggtgtctccgtctgcacggctggcctattatgccgtcgttgttgggcgtctacgactccaccaccggcttgcctccatcgccgccgactggtgtttccacctgcacgctggcctattatgccaccgttgatgggcgtctacgtcttcaccgaccggcttgccttcgccgccgccgactggtgtctccgtctgcacggctggcctattatgccgtcgttgttgggcgtctacgactccaccaccggcctgcctccatcgtcgccgactggtgtttccgtctgcacggctggcctattatgccgccgttgttgggcgtctacgttttcaccgaccggccgcctcgttcgtcgccgactgctaccactactgatggacatcatcatcttccgtcgccgactgattatgccgccgccgactggtgcttttatcttcacaactgcgcgtcttcactgccggatttctacttggacatcttcaacacatatcttctatcaagcaatgactactcgacgacaagaagctataattctcgactctatgttcagttgtttcccaactaa

SEQ ID NO: 90788 - DNA, 609 bp, Oryza sativa
  Clone ID: PAT_MRT4530_89423C.1
atgggcctcatcgtcttcaccgaccaggcaccttcgccacctttgattggtgttttcgcctatacggaatggatcagtcagaacatcaccaccggcttgccgtcgccgccgtcgactggcgtctacgtcttcaccgaccggcttgccttcgccgtcgtcgactggtgtctccgcctgcacggctggcctattatgccaccgttgttgggcgtctacgtcttcactgaccggccgcctcgtccgccgccgactggtgtttccgcctgcacggttggcctattatgccgccgttgttgggcgtctatgtcttcaccgaccggcttgccctcgtccgccgccgactggtgtttccgcctgcacggctggcctgttatgacaccaactgatgctatcttcttcacggccggctacgtcgccgtcaccactaataggcgtcatcatattcaaacgcaagctgtctacgtctgctgccgactagtttattcacttccatggctgcatgattctgccagtgttgattggccttatcttcttcaccgccggtcatctcgtctgctgttgactagtgccctcgtctctacgtctggtttataccactaccactactga

SEQ ID NO: 90789 - DNA, 3325 bp, Oryza sativa
  Clone ID: PAT_MRT4530_89424C.1
aaatcacaagatcagttagtctttcagaaaggaaaacatcaacaacacttttaactgaagaaaagaacgacactatgaaacatattacactggtcactgttcattctttcgctaggtaacttcccctgaattcaactctctaaaacaacacccttaagaatcagcatgtaattaaaaaaacacacaaattattagcagtggtatgccaatgactctacactccttttgttgggttacattagaagcagtagcagctggtagaggtaagtgaagcatatgtacagaactttagagcaaactcctccctgatgttatatatatatatatatatatatcagaaacacacctacgaaaacttctgaattctgatctctctacaggtctatagttcatcaagggcagcgcatgcggcacaggtcatgcacctccgagctcccgaactgagcgtagtcctgctgctgctgctcccgcttgtggtggttcgactccctcttcttggaggagcgcttcgacggcggcccttcgctggccagggcattgatcggcggggcggccgacgatgacagcgggttgctgatgatcagcggcggcgccgacgtcgccgggcagtgatgccggatgctgatcgcgtgcgacttggtctcggtggaggtgctgcctctgatgtttaccgtgaggacgcactccttgtccctggtgtcctcgcaccaccagttctgtggtatcccgtccacgaactcctcctgcgtgtagaagtcctcgtgatggatcgtgatctccgccgtttctcctggtttgataagaccaaccgctggttggacctcaagccaaagagggaagccaaacgatgcccttggaagaatctctgattttgttgcatcctcctttttgcttgactggccttcacacgtgatttcgaaagctgctttgcttgtctcacatatattggtaatccgaaagacaatattttcttgattttccagtacgatctcgcttgtgctaactgtggtgtctgggacaaaagaagactcctcaagcatagaacgtactttttcattcgtttcgattatttctccatactcttgtcttcttattaactcatccactcttgcaatgtcaacgctaaatgtgcatctcacaggtttgtggtcactctctgtgacatccatgcaagctacataccaagcaggtatcctcttcttctcacccgaatcataccctcctagacctggagcgtgcttttggaatttgtaggttggagggaatttgatgagaccttcacgcattccttgaaacacctttccagctttcatttctgctcgaagctgatccttctctcttagccaatcaaaacttctttgtgagaccatgtcccttgcttcatcatatgtgataccataaagccggtagttgaaatcaccaaggaagacaatcatatcagcttcagccaagtctggcctgacctcatcgacctggttcccatttacagcttccaaatgtgcagcaaaatgattgctgacgaaacacattttacgatcatagactcttattcttaatcctacaccaccctgcagaagtatcttattgccgatagcacgtccaaaaccacatggcactgcagcagcttccacatcaccaacatatggcttaaggctctttcttgcccatgcggcaataagcaatgcggccaactgcctagaaccaactcgatggaatgatgttccctcatcaagtgctttaccaatattgtctatccaccattgcccattagcactgccttcaagtcctacagtttcttttgctgcagaaatggctaggaaacccgcacccatctcgacctcttgtaagccaacgacaaccaacccaacatcagatgatacactacccaaccatgatttaagtgactcagcagatgccttcccctgtgctacattccaacttccaaccattatatttatcttctccattctagtgtatgaaagctctttgttagtcaattcagtgcgcaaaatgtcatcaagaggtcctggtgatgtcagtggccatccccgaataccaccatggtgcgccaacgtgtaaatgtaagaacctccaattgccattcttatgactggacaactatgtccagtccatcctgcaagaaggttaccttcaacatccatgacttgaacaatgccactggcatagcccgcccacaccctttctccaagtgcctttatgcactgcacagaagaagtatgatgctggaattcttgcactctgtttccatttccatcccacagtataatggaaccatttgtgcatcctgaccaaattgttccatccattgcttgagccactgctcccgttctacggttatcttcgacaaatgttccttttgttgcaaccctgcgcaccgcatcagctgctccgatcaaggcattcctagatttctggaagaagttcaaagaaccctgggatttatctttctttgaaggttttactttgacctcctcctcgataggttgctctggcatgaccggtgtctcaagccgagctgactcaacttgcccgtccatcccaaatactttcagcaactcccttgtacgagcatcccagatagcaaatgtcatgcttgtaaccgtccacacttttgcgcgagaataatcggcaagcatgtgcttcacatcagaagcaggcaaagagcacacatttccaactgtgcaatggttcctgagatcaatgtatgctctttccaccaacaatgcagccatgtgtctctcctccggtgacaatgagagcgacttggcaatggcatcgtaaggccatgcctttatgacaccaccctcggatcccgaccatatctcgccatacgaagtgacgaccatggagagcacgggagtccggccgtacgcctgccacgtgagggcttccttgaacaccggcgcattgcttggcccgccatggttgcttcccccaacgctcccaccgccgtcgcctgcgccaccaggcggaggcgcgggcgcggtggcggccgcgtcgaggtccatgcgccacgaccggatcctcccgtccttgtgccccgtccacagcagccggttagccctgtccacggcgacgcagagcgcgggcggcgcgggcatgccctcgcggaacggcgcgctctcctcgtcgccgcgcctcgcgcctgcgccccacccggcgaacacctcgtcgagcgcccacaccctgatcccggactcggccccggcccagagataccgcccccccggctccgccgccagcgtgcggaggaacgaccccgcctgcgtctcccggagcgggtgcggccgcacctcgagcgggg

SEQ ID NO: 90790 - DNA, 1563 bp, Oryza sativa
  Clone ID: PAT_MRT4530_89425C.1
atggttggttggtacaccaccgttgttgggcgtctacgtcttcaccaccggcctgcctccgtcgccgccgactggtgcctccgcctacacggctggcctattatgccgccgctgttgggcgtctacgacttcaccgccggcttgcctccgtcgccgccgagtggtgcctccgcctacacggctggccgcctccgtcgccgccgactggtgcctccgcctacacggctggcctattatgcccccgctgttgggcgtctacgacttcaccgccggcctgcctccgtcgccgccgactggggcctccgcctacacggctggcctattatgccgccgctgttgggcgtttacgtcctcaccgccggcctgcctccgtcgccgccgattggtgcctccgcctacacggctggcctattatgccgccgctgttgggcgtctacgacttcaccgccggcctgcctccgtcgccgccgactggtgcctccgcctacacggctggcctattatgccgccgctgttgggcgtctacgacttcaccgccggcctgcctccgtcgccgccgactggtgccctcgcctatacggtcggttggtcacaccaccgttgatgggcatcgtcatctacaccgccggcctgcctccgtcgccgccgactggtgtccctgcctatacggtcgatactactcatcctatatgtttgttccgcaggatccagatccagatgtgcataaaagggattcatggctttaagcttatctcttacgctccaggaatggatcagtcagaacaccaccaccggctcgcctcgaccgccgccgactggtgtttccgcctgcacggctggcctattatgccgtcgttgttgggcgtctacgtcttcaccgaccggcttgccttcgccgccgccgactggtgcttccgcctgcacggctggcctttatgccgccgttgtcgggcgtctacgtcttcaccgaccggccgccttgtccgccgccgactggtgcttccgcctgcacggctgacttattatgccgccgttgttgggcgtctacgtcttcaccgaccggcttgccttcgccgctgccgactggtgtttccgcctgcacggctggcctttatgccgccgttgttgggcgtctacgtcttcaccgaccggcttgccttcgccgccgccgactggtgtttccgcctgcacggctggcctattatgccgccgttgttgggcgtctacgtcttcaccgaccggcttgccttcgccgccgccgactggtgtttccgcctgcacggctggcctttatgccgccgttgttgggcgtctacgtcttcaccgaccggccgcctcgtccgccgccgactggtgcttccgcctgcacggctgacttattatgccgtcgttgttgggcgtctacgtcttcaccgaccggccgcctcgaccgccgccgactggtgtttccgcctacacggctggcctattatgctgccgttgttgggcgtctacgtcttcaccgaccggccgccgcatccgccgctgactggtgtcaccgcctgcacggctggcctgttataa

SEQ ID NO: 90791 - DNA, 866 bp, Oryza sativa
  unsure (1)..(866): unsure at all n locations
  Clone ID: PAT_MRT4530_89426C.1
ccacgcgtccggctatcggcattaagggtggtgtaggattaagaataagagtctatgatcgtaaaatgtgtttcgtcagcaatcattttgctgcacatttggaagctgtaagcagacgcaatgctgactttgatcatatttaccggacaatgtctttcaacaaacctcatggatccacagcttctgcgacatccgtccaattgcacagaggagtaaatgtaaatgggaaccaggtcgatgaggtcaggccagacttggctgaagctgatatgattgtcttccttggtgatttcaactaccggctttatggtatcacatatgatgaagcaagggacatggtctcacaaagaagttttgattggctaagagagaaggatcagcttcgagcagaaatgaaagctggaaaggtgtttcaaggaatgcgtgaaggtctcatcaaattccctccaacctacaaattccaaaagcacgctccaggtctaggagggtatgattcgggtgagaagaagaggatacctgcnttggtgtgatagagtactataccgcgacagccgtcctatatcagtagctgactggttcactggagtgccctgtagttgcttcaattacatcgtatgtagcttgattgggatgtcacaagagagtgaccacaaacctgtgagatgcacatttagcgttgacattgcaagagtggatgagttaataagaagacaagagtatggagaaataatcgaaacgaatgaaaaaaatacgttctatgcttgaggaggcttcttttgtcccagacaccacagttagcacaagcgagattatactggaaaatcaagaaaatattgtctttcggattaccaatatatgngagacaa

SEQ ID NO: 90792 - DNA, 4789 bp, Oryza sativa
  Clone ID: PAT_MRT4530_89427C.1
atggaagaagatgaagtggaagacgaatatattccggactttgctcagtatgttggatttgaagaaaatcaaacgggcgaggaggaaatagctgctgatggtaacgtcgttgcggatgatctcggtcagatgttgcaggacgccagggaggactgcgaaagtgaaaaggaggcccataaattggacaagatgttagaggaccacagaacttcgttgtacccaggttgcgagcacgggtacaaaaagttggataccactctggagttcttgcaatggaaggcaaaaaatgggaggaagtacataatgatgccaattattattcaaggccccaagcaacctggtaacgacatcgatgtgtacctaagaccactggtcgaagatcttaaacagttgtggaagaaggaaggtgtccccgtgtgggacgaggacaaacaggaggagtttaacctacgagcgctgctgttcgtaaccatcaacgattggcctgcacttagcaacctatccggacagtccaacaaggggtacaaggcttgcactcactgtatggatgaaacagaaagtacgtatcttaagcactgtaggaaggttgtatacatgggtcatcgtcgattccttgcagcaaaccaccccgtacggaagaaaggcaagcacttcgaacataaggccgaccactgtacgaagcctaaacatcgcagcgagaaaacagtgtttactatggttaaagatcttaaagtagtgttcagaaaggggcctggaagccagcctatagagagcgaagatggtcacgcggcgatgtggaaaaagaaccctatattttgggagttaccatattgggaattcttggacgtacgccacgcaatcgacgtgatgcacctcactaagaacctttgcataaaccttcttggcttcctaggtgtatacggaaagtcgaaagatacactggaagcacgtaatgatctgaagcatatggaacaacgcggcgaccttcacccggaaccaaaggagaaaggaagccattacttgagtccagcaagctacactcttagcaaggcagagaaggaaatgaaagatatcggtattctcgggcctgtgttcctacgcaacatgtttcctttcgagaggtacatgggcgttctgaagaagtatgttcgtaaccaccttcgcccaatcggggtacctgaatcacgccatgaagggagactacggggaaaggggactctcggaaggaaagcaataatgacggtagacaacaatttattccgtaaatcccatttcacggttttacaacaatcttcattggtggctccttacatcgaggagcacttggctctagttcacgccagaaacatcgataagtccgatgcatggattacacggcatcacattgttactttccccgcatggctgcgacaacatctcatgggtaacgagacgattaaccagcaactagccttcctggcaaggggtccatttggctcgatcgtgacattccagggatatgggaaccagaacacattctacacaagagcccaagacatgaagagcacgaaccagaacagtgctgttcgtatcgatgccatggaacacgatggtacaactggcacatattacggtgccatcgaggagatatgggaacttgactatggacctctcaaggtccctctgttccggtaccaatgggttaggttgactggtggaggcgtaacgattgatgacagtgggatgacaacagttgaccttaacaaggttggatactcggacaaaccttttgtccttgccaatgatgtaacgcaagtctttttcgtgaaggacatgtctagcaaagaaaagaagggcagagggcctgacgagcctaagcgtcaagtggttctcccaggcaaaagaaaaatcgtcggagttgaggacaagactgacgaggattacgatcagttggatgggcaaccccctttcacggtgacgattgaccctagcatcctcctatcaaatgaagacaccccttactcacgcagcgatcacaaggagggaacaatagtgaggagaaagtacatgcggtcaaccgtcaccgccgatctttccggtcgatcggccgcgagtccactctgccggcttgtcttcgccaccgccattgctgataacaacaacgacttcaccgccggcctgcctccgtcgccgccgactggtgcctccgcctacacggctggcctattatgccgccgctgttgggcgtctacgacttcaccgccggcctgcctccgtcgccgccgagtggtgcctccgcctacacggctggcctattatgccgccgctgttgggcgtctacgacttcaccgccggcctgcctccgtcgccgccgagtggtgcctccgcctacacggctggcctattatgccgccgctgttgggcatctacgacttcaccgccggcctgcctccgtcgccgccgactggtgcctccgcctacacggctggcctattatgccgccgctgttgggcgtctacgacttcaccgccggcttgcctccgtcgccgccgagtggtgcctccgcctacacggctggcctattatgccgccgctgttgggcatctacgacttcaccgccggcctgcctccgtcgccgccgactggtgcctccgcctacacggctggcctattatgccgccgctgttgggcgtctacgacttcaccgccggcttgcctccgtcgccgccgagtggtgcctccgcctacacggctggcctattatgccgccgctgttgggcgtctacgacttcaccgccggcctgcctccgtcgccgccgagtggatcctccgcctacacggctggcctattatgccgccgctgttgggcgtctacgacttcaccgccggcctgcctccgtcgccgccgagtggatcctccgcctacacggctggcctattatgccgccgctgttgggcgtctacgacttcaccgccggcctgcctccgtcgccgccgagtggtgcctccgcctacacggctggcctattatgccgccgctgttgggcgtctacgacttcaccgccggcctgcctccgtcgccgccgagtggtgcctccgcctacacggctggcctattatgccgccgctgttgggcgtctacgacttcaccgccggcctgcctccgtcgccgccgagttgtgcctccgcctacacggctggcctattatgccgccgttgttggatgtctacatcctcaccattggctcaccttcgttgccgtcgactgtcagaacatcaccaccggccgcctcgtccgccgccgactggtgttttcgcctgcacggttggcctattatgccgccgttgctgggcgtctacgtcttcaccgaccggcttgccttcgtcgccgccgactggtgtttccgccagcacggctggcctattatgccgccgttgttgggcgtctacgtcttcaccgaccggccgcctcgtccgccgccgactggtgttttcgcctgcacggctggcctttatgccgctgttgttgggcgtctacgtcttcaccgatcggcttgccttcgccgccggagactggtgtttccgcctgcacggctggcctttataccgccgttgttgggcgtctacgtcttcaccgaccggcttgccttcgccgccgccgactggtgtttccgcctgcacggctggcctttatgccgccgttgttgggcgtctacgtcttcaccgaccggcttgccttcgccgctgccgactggtgtttccgcctgcatggatggcctttatgccgccgttgttgggcgtctacgtcttcacctgaccggctcgactcgtccggccgccgactggtgtttccgcctgcacggctgccctttatgccgccgttgttgggctgtctacgtcttcaccgaccggctggccttcgcctgccgccgactggtgtttccgcctgcacggatgacctttatgccgacgttgttgggcgtctacgtcttcaccgaccggccgcctcgtccgccgccgactggtgcttccgcctgcacggctggcctattatgccgccgttgttgggcgtctacgtcgtcaccgaccggccgcctcgtccgccgccgactggtgttttcgcctgcacggctggcctttatgccgctgttgttgggcgtctacgtcttcaccgatcggcttgcctttgccgccggagactggtgtttccgcctgcacggctggcctttataccgccgttgttgggcgtctacgtcttcaccgaccggcttgccttcgccgccgccgactggtgtttccgcctgcacggctggcctttatgccgccgttgttgggcgtccacgtcttcaccgaccggcttgccttcgccgccgccgactggtgtttccgccagcacggctggcctattatgccgccgttgttgggcgtctacgtcttcaccgaccggccgcctcgtccgccgccgactggtgtttccgccgctgttgttgggcgtccacgtcttcaccgaccggcttgccttcgccgccgccaactggtgtttccgccagcacggctggcctattatgccgccgttgttgggcctcgaccggcttgccttcgccgccgccgactggtgtttccgccagcacggctggcctattatgccgccgttgttgggcgtcgcctgcacggctggcctgttataacgccaactgatgctatcttcttcacggctggctacatcgctgtcactactaataggcatcagtatcttcaacacaagctgcctacgtttgccatggctgccgactggtttcttcacttccat

SEQ ID NO: 90793 - DNA, 281 bp, Oryza sativa
  Clone ID: PAT_MRT4530_89428C.1
ggaacaggccttggccagaaccggtgggacagggaaaaaacaaccaatttggcagaaacaaaaaaagggctacaaattcacgggtaaaaattttttttgcaccgggggattcttatctacccctatctttggaaaaccgggaggcaattgggacaaagggacttattaaaaagggaacccaaaagggggggggtcaacgggcaaacaacgaatttttcatatcggactaactaaggcccagacccccccggggaggggcgatcgccaactaaaacggcccc

SEQ ID NO: 90794 - DNA, 1162 bp, Oryza sativa
  Clone ID: PAT_MRT4530_89429C.1
gcctttgcccaaataatagcccacaccctcggaaagcgtcaccacctccttaatggctagggattttaccagtagccctacgactggctcactggccagtcactccacatctgttgggcgtctacgtcttcaccgaccggcttgcctccgccgccgccgactggtgtctctgcctgcatggctagtctattatgccgccgtcgtggggcgtctacgtcttcaccgaccggcttgccttcgtcgccgccgactggtgtctccgcctacacggctggcctattataccgccgttgttgggtgtctacgtcttcaccaccggcttgccttcgccgccgccgactggtgtttccgcctgcacggctggcctattatgccgccgttatcgggcttctacgtcttcaccgaccggccgcctcgtatgacgccaattggagctatcctcttcacggttgcccacgtcgtcgtcatcattctacttctttcgtcgccgactggttatgccgccgtcgactggtgtttttaccttcacaactacgcgtcttcgctaccggtttgcttctgttaccgccgattcgagttcacttcatcactgctatgcaactttgtcatcatggtggagcaacttcaacttcattgtcttctgcaccggcaatctctattgctgctacttcgcaagttttgctacttcaccgaccacgacgtctacatgagcctcaacatattgacgtgtcacgaaatttgacgtcgtcctaatctactactacaagtggttctacaattttcaagacttcaactcggacatcttcaacatgtatcctcactcaagcaatgagtactcgacgacaagctacagtttttgactctatattcagttgcttcccaactaaccaaagagtcgggggctatataaatacaagactcaaaatccgacaagttttatgtcaagataaagcaatcaattaatcaaggagtcaactctgggagtcattatcttcgtcttcacttccgagcaagctttctacttcatcaactccaattatttcaccggcaattttggcttctctgtcgtcgccacgatctacttcaaatttctctagtatcaagtttgagatttaatctacatattcgggaggatggagttatcaaccaatttcaacgagtt

SEQ ID NO: 90795 - DNA, 4728 bp, Oryza sativa
  Clone ID: PAT_MRT4530_8942C.1
agggcttacaccgtcgttttcgctcccttttggctgcctgtgctgccgcgttcaattcgccgctgcttggtctcgtttggttccatccgctatggcagggggccgggatttgcacggcgtggatcgctgcttccatggttcttgaacctgttcatcagcacagcaaaggtcttccgcggcggcagctcgcgtgcggacccccctatctttccttcgctttctggatcgactcgttcgtgtcttctctgtctcgtcctcctctcgtacttgcttcgtccttgttgtcccacggcgttcgcgggcctcttcgtccgaggcgctatgtttactgtgaacacgtcgcacatcctgcttttgaatgtagccacggaacgctgcatgcttccaccgccctattatctatgggagtttgactccggcgataggttgttggctggaattgagcttgtcttcccagcatatgcagccccagctagtagacacttttctgttagcctgtgacctctccaggtgcacgagcctatggaggctgtcagcgtgcctgctgctgcttctgttgtcatgcaatcacacggtttcttcgttgctccctgtttgctccaattgtttggttatgctctgcagatgtcgcaacagagtatagatagggtccgaaggcttctgctagcaggccaagcactgcctcatcagcaacagatagggaatacatccagtcgctcaagggagtgtgtttagttactgttttctgtttctatgagatatattgtctataatctatgttgatatagtggcaacatacacgttccttgttttaagtagcccccacagcctcttgacggtctaataaaagctgatgctgctgctggatcgaagagattattacgacaggttggaacatacaaatcatcctttgcatttactttgctgggataggccatcgactgataaagtaccagtgtgaacgcaccttatgtttccaaaatcgacagtcttcttttcttcaagattggcactctgtggccctcgccagatgcgacaccaaaatgtgcccagcttagcatctatgatcttgctagcgatgtccaaaattggtttaacattttcgagaaagaacgcgtttgtaacgatagtcctgaccctaaaataatcgcagccttatcggcaatgcttgacacgcacaacaaacttgttcagaattttaggtatgccaggtcacgacttgctgaacatggcgatgagaagataactttgtgtttgctaggctgcaatgctaaggatgatgttcagtataatcttccaacaagcggtgaaatagctgccataatagttggtgactttgatgcgaaggagtgcaagtttgatgtgcttgttcatgatagagatcatgggatgcgtcatgtctcatcgctacatccatcgtatttagctttgcaataccctttgctttttccgtatggcgaacgtggctttcatctaggcattaaatacgctgattatgatggggttgggattgtagatgcgattgatagaggggttacgagcggagattcagttggtaaacaccaggtactcccagctagctttactggaggcaggaggtatatggttatgaattaccaagacgcaatggcaatctgccgtctgtatggctcgattgacctgttcgtgacatttacgtgcaattctaaatggcaagagattgctgaaactatccgcttcgagcctggtcagcaaccatctgacagaccagatgtgattgttcgagtctttaacatgaaggtgaacgatttcatcactgatattagagaggggagaacgtttggtaaagtgcttgcagatatttcagcatctgtcatagatagcttcatctgtgctgagatacccgacttcgacactgatcgcctaggaaggcgaaatgatggtcgatatataactaaaaatggcatccgtttggacaataggtcggttgtaccctacaatctcaacttgctcaaaacatatgaggcacatatcaacgttgagtggtgtaacaaatcgaatatgattaaatatttattcaagtacattacaaagggacatgaccgtgcaaagatatactttgagactacttccaaaatagggaacatatcaccaaaccatgacctagctcctcctgatgaaatattagaatatatggatgctagatttctttctacctgcgaagcacttcatcgcatatttgaatttgacatacattatagaatcccaccagttgagcgtctaacagtgcacttacctggcaaaaactatgttaggatgttattgatgatagttaaaggagcacagagctacgctgacatgcgcacccataatggcattgtttacagcacttttagagaggcatgcgaagcgagagggctgcttgaaggagacaatgaatggtatcttctttttgatgaggctatagaatctgcatcatcgaaacagcttatgcagttgtttgtcactgttatcctctattgttctgttggtgatgttcgatccttgtttgataagtattggcttcacatggcagacgacatccaccataggttaaagaaagcgttagacaatccgcggtgcatcatcccacacgaacacttgcttagcatccttctccatgagcttacagctatctttgcgaatagcggtggaaatataagagattttaatctcccagtcccaacatctgcctcacatatgcctgctggtaatagattaattgatgaggagtatgcacccgatccactcatgatgtctatgcacacagattctttgatttcacagcttaatgctgaccagaaaaaaacctttgacactatagtctcctcagtttcatcgaagcaacctggagtagcgtctctgctgctacctagaggaaggacagctcactcccgatttaagataccaatcgatattgatgaaaccagcctttgcaatataagacgaggcactatgcttgctgatcttcttattgaaactgcgctgattatatgggatgaggccccaatgacgcataggcgctgtttcgaagcgctcgatcgaacgctgcgtgacatcctttctgaaactaaccctgcaaattcgattatatcttttgggggtaaacctgttgttttaggtggtgacttccgacaaatattgcctgttgttccaaaaggctcacgtctagctgttatgaacgcatcggttacaaactcagatctatggaaacatgtcacagtgctaactctaaatattaacatgagattgctaaggccagcgttggcacagaacgagagggacgaattacatgaatttagtcagtgggtgttggctgttggtgatggcacactgcccatgatcgcaaaagaaggcgaggtggaaccttcatggattacaatccctgacgatcttctcgttgtaacagacggtgacaagattgctgctattgtcgatgagagcaaatcccagattttgacctattataccccccctgaatttcttaactctattaatgttactaacttccctactcataaccttgtgttgaaagagggtgttgtggttatgctgctacgaaacttgaatcaatcagtgggtctttgcaatgggacaaggctgcgccgcctggcgcttagcgcggctttcatgaacaagacatggccgctcttgtacataaattttgccataaatatgttccatctgctcactatagcgtatatccttatttctcagcttctgtatggagacatcagcaagcagatcaagacacggctctctaggctatgggatttccacgatatcaatgatgaagaaaaaatatatcacactgaacttgtcttgctggatgaaacgggcgccagtatacatgtgcaaatctatccatccctaagaaataagttcaaggatctcttacagcaagggaaggtctactacatcgactctttctctgtcagatatgccaatagaacatataggcctgttgcgaatcctttgatgatttcatttactaaatggactaccttggaagaatgcattgagatccctgacaatttccctagcatcacgttttcgctgacaccgttccaagatgttccatctcttgtggaaaagaatcatttctatgttgatgttatgggtatcataactgaggttggtgcaacagccaccatccgccctaaatcaagcaacaccgacaacctgaaaagaaccatgcaaatttcagatgcaaggcctgactttgactggaagctcaccgtgcaaatgcgggaccgttttgtcgtcaatatcaccataaccagcatagcacagcacacttcgtggtgttacaactcctgcaaactttgctcaagaacctctaggccatttgatttcacctacagatacacccattgttcctacataggcatcgcagtaccaagcttcacagaggataccctcatgaaaaaccaggaaacattacaggtcaatagcatcatttcatctagcggtacagcacaacccctattgtcttcctcatcagatacagcagtgcagccattggctattatgccatcggcctcagcaaaacctgtgccagatgttacaggggtagctgcacagcctccaccatctgtcaacctgtccaccaaaaaaatcaccgaaaaaagggccatgcctacagcctcggccccacctgctaagaaattgttcaaggatgatagccccagcaagggcgacaacaagtga

SEQ ID NO: 90796 - DNA, 2007 bp, Oryza sativa
  Clone ID: PAT_MRT4530_89430C.1
atggacaccgacgacgccggggccgcgcacgcagctacgccgcctgcgcgcggctgcgacctccgcctcctccgctccgacgactacgtcgcctccctccccgccgtcctcctggagtcgcggatctgttcctccgccgcttcaaagttgcatcacgcgaaggagtccgagacgtcgacagatccctgctacgaccgcgacatcgctctcgccatcctcaagctcctcgtcttcgccaccggcgacatcatcaacaaccaaattcaacaaggctcccgcactcactattgccgggcatcttcgcctacatggttggctacatccgctgacactgtcgaccgtctcaacaagttcgcgattggctgcttccacgctgccgagcccgactatcgcccctgcatggctcacgctgacccggctgcgcctctcatagctcacgctgacccggctgcgcctctccattggccgttgctgatgggaatcgtcatcttcaccgccggcctgcctctgtcgccgccgactagtgtcctcgtctatacagttggttggtcacactaccgttcatgggcgtccacgtcttcaccgaccggtctgcctttgccgccgcctactggtgtctctgcctacacggctggcctattatgccgctgttggtgggcatcttcgctttcaccgtcgaccgccttcgtcgccgccgactggatccaaatccagatatgcataaaagggattcatggctttaagcttatctcttacgctccacgaatggatcagtcagaacatcaccactggctcgccgtcgtcgccgccgactggtgtcttcgcctatacagttggttggtcacaacaccgttgttaggcgtctacatcttcaccgccggtttgctttcgccgccgccgactggtgtcaccgcctgcacagctggcctattatgccgctgttgttgggcgtctacatcttcacttactggccgcctcgtccgccgccgactgctattgttgggcgtctacctcttcaccgactggccgcctcgtccgccgccgactggtgtttccgcctatacgttggcctattatgccgccgttgttgggcgtctacgtcttcaccgaccggccgcctcgtccgccgccgacaggtgtttccgcctgcacggttggcctattatgccgccgttgttgggcgtctacgtgttcaccgactggccgcctcgtccgccgccgactggtgtttccgcctacacggttggcctattatgctgctattgttgggagtctacgtcttctccgaccggccgcctcatccgccgccgactggtgtttccgcctgcacggttggcctattatgccgccgttgttgagcgtctacatcttcaccgaccggctgcctcgtccgccaccgactggtgtttccgcctgcacgggtggcctattatgccgcagttgttgggcgtctacgtcttctccgaccggccgcctcgtccgccgccgactggtgtttccgcctgcacggctggcctttatgccgccgttgttgggcgtctacgtcttcaccgactggccgcctcgaccgccgccgactggtgtttccgcctgcacggctggcctattatgccgccgttgttgggcgtctacctcttcaccggccgtctcgtccgccgccgactggtgtttccgcctgcacggttggcgtattatgccgccgttgttgggcgtctacatcttcaccgaccggccgtctcgtccgccgccgactggtgtttccacctgcacggttggcctattatgccgccgttgttgggcgtctacatcttcaccgaccggccgccacgtccgccgccgactggtgtttcctcctgcacgggtcgcctattatgccgttgttgttgggcgtctacgtcttctccgaccggccgcctcgtccgccgcagactggtgtttccgcctgcacggctggcctttatgccgacgttgttgggcgtctacgtcttcaccgactggccgccttga

SEQ ID NO: 90797 - DNA, 2892 bp, Oryza sativa
  Clone ID: PAT_MRT4530_89431C.1
atgagacaacctgatcgtcagatctatactacaccggcggattcaaatccccaaacaggagtctcgtgcgctacctccttttattattgccgaattcatgtttcgacagttggcgcgccaggtaggggttgcgtcgagtttcctatcaacgagcgcgatggaatcaatttcatgagtcgccgacttcgctttcgctttgggagttttcacttcctttgcgtcgaccacttcttcaagctcctcttctctgacttgatccaaatcagtcagggggaaactcaatctgatttttatcattatttatcatattgatttttaatctcagattaatttcttgctattttttgttgttgttcgcatataactacgcggcactattgaggcgattgatgctggtcatggactcgaggcgtctcagctttccggtcgatcggccgcgagtccactccgccggcttgtcctcgccaccgccattgctgatagcaacaacgacttcaccgccggcctgcctccgtcgccgccgactggtgtcatcgcctatacggttggtcggtcacaccaccgttcatgggcgtccatgtcttcaccgaccggctggccttcgccgccgccgactggtgtttccgcctgcacggctggcctattatgccgccgctgttgggcgtctacgacttcaccgccggcctgcctccgtcgccgccgagtggtgcctccgcctacacggctggcctattcactccgtcgccgccgactggtgtcctcgcctatacggtcggttggtcacaccaccgttgatgggcatcgttatctacaccgccggcctgcctccgtcgccgccgactggtgtccccgcctatacggtcggttggtcacaccaccgttgatgggcatcgtcatctacaccgccggcctgcctccgtcgccgccgactggtgtcctcgcctacacggctggcctattatgccgccgctgttgggcgtctacgacttcaccgccggcctgcctccgtcgccgccgattggtgcctccgcctacacggctggcctattatgccgccgctgttgggcgtctacgacttcaccgccggcctgcctccgtcgccgccgagtggtgcctccgcctacacggctggcctattcactccgtcgccgccgactggtgtcctcgcctacacggctggcctattatgccgccgctgttgggcgtctacgacttcaccgccggcctgcctccgtcgccgccgactggtgtcctcgcctacacggctggcctattatgccgccgctgttgggcgtctacgacttcaccgccggcttgcctccgtcgccgccgagtggtgcctccgcctacacggctggcctattatgccgccgttgttggatgtctacatcctcaccgttggctcaccttcgctgccgtcgactggtgtttccgcttacacggctgacctattatgccgccattagtaggcatcttcgctttcaccgtcgaccgccttcgtcgccgccgactggtgtcttcattgttattgatggacgactttgttcccacattggccacttccgccatcaccaaggggaatattacaaagctaaataagataatttattttctgctcttaataattgcaaaagtacccgagtagtaaactccgatccgtgaaactttgttccattaatgacgaactcatgtcactcatatgcatgtttgggaagtgcttaggccgactcccagtgcttggtggctatgactagtcgggcagagtgtttaaacgtaatgagtcatctgctcggggaaatcaaaattgacaagaggagaaatacatatttataaatattttaaaatacttgattttttctcgagtattatatttatatcagatactactcatcctaggattcatggctttaagcttatctcttacgctccaggaatggatcagtcagaacatcaccaccggctcgcctcgaccgccgccgactggtgtttccgcctacacggctggcctattatgccgccgttgttgggcgcctacgtcttcaccgaccggcttgccttcgtcgccgccgaccgatgtcctcgcctgcacggctggcctttatgccgccgttgttgggcgtctacgtcttcaccgaccggcttgccttcgtcgccgccgaccgatgtcctcgcctgcacggctggcctttatgccgccgttgttgggcgtctacgtcttcaccgatcggcttgccttcgccgccgccgactggtgtttccgcctgcacggctggcctttatgccgccgttgttgggcgtctacgtcttcaccgaccggccgccgcatccgccgctgactggtgtcaccgcctgcacggctggcctgttataacgccaactgatgctatcttcttcacggctggctacatcgctgtcactactaataggcatcagtatcttcaacacaagctgcctacgtttgccatggctgccgactggtttcttcacttccatggctgcatgattctgccagtgttgattggccttaccatcttcatcgccgctaccactactgatggacatcatcgtcttccgccgccgactcgtgttatgccgccgccgactagtgcttttatcttcacaactgcgcgtcttcactaccggttcacttcatcacggcaacacaactttgtcatcatggtggagcgacttcatctttattatcttcggaaccagcaaactctattgctgctacttcacaagttttgctacatcaccaaccatgacgttgttgtgaatctcgacatctcgacatgcgatgccgtgttattttactacaacaagtggctctccaatattcaggatttctacttggacatcttcaacacatatcttcaatcaagcaatgactac

SEQ ID NO: 90798 - DNA, 134 bp, Oryza sativa
  Clone ID: PAT_MRT4530_89432C.1
tatcttacttaagtgttgcggcacccagctctttcgttgttgctattctgcatctacttatcttgggattcctatcaggctagccacgtgagcaaaaacttttctgaaaatactgatgattgaggactgaatct

SEQ ID NO: 90799 - DNA, 616 bp, Oryza sativa
  Clone ID: PAT_MRT4530_89434C.1
atgtcggacgcctacaagaaagcgaagcccggccgcctcgtcttcaagggcggcgaggccgcctccctccacaagccgccgaagaagcacaagaagaacaagaagcccgcctccgacgcccccgccgacgccgaagccgacgcggaaggcgcagcggcgccctccgcggagggcgccgccgagggcggcggcgacgagtacaccatcgacgcggcgaagcggatgaagtacgaggatctattccccgtggagtcgaagaagttcgggtacgaccccgccaacgccgccaaggcctcccgcagccgcaccgtggaggaggccctcgacgaccgcgtgcgcaagaaggccgaccgatactgcaagtgaggtgagagcccttagaagctagggtttccggctccacggagcccggcgttcgatgctttgctctagtcggatctagctccggattcaattccaatcgagttctctcgacttattgtactgccgccacacatgaatttgcttgaattagcttgaatggtggagtgggttatgtttgatcgccgaattctggtttatacactgtggaatatgaagacgtgctgtaactgcaactaaaaaaaaaaaaaaaaaa

SEQ ID NO: 90800 - DNA, 4124 bp, Oryza sativa
  Clone ID: PAT_MRT4530_89435C.1
atgtttcgacagttggcgcgccagcaacaacgacttcaccgccggcctgcctccgtcgccgccgactggtgtcatcgcctatacggttggtcggtcacaccaccgttcatgggcgtccatgtcttcaccgaccggctggccttcgccgccgccgactggtgtttccgcctacacggctggcctattatgccgccgctgttgggcgtctacgacttcaccgccggcctgcctccgtcgccgccgattggtgcctccgcctacacggctggcctattatgccgccgctgttgggcgtctacgacttcaccgccggcctgcctccgtcgccgccgagtggtgcctccgcctacacggctggcctattatgccgccgctgttgggcgtctacgacttcaccgccggcctgcctccgtcgccgccgattggtgcctccgcctacacggctggcctattatgccgccgctgttgggcgtctacgacttcaccgccggcctgcctccgtcgccgccgagtggtgcctccgcctacacggctggcctattatgccgccgctgttgggcgtctacgacttcaccgccggcctgcctccgtcgccgccgattggtgcctccgcctacacggctggcctattatgccgccgctgttgggcgtctacgacttcaccaccggcctgcctccgtcgccgccgactggtgtccccgcctatacggtcggttggtcacaccaccgttgatgggcatcgtcatctacaccgccggcctgcctccgtcgccgccgactggtgtccccgcctatacggtcggttggtcacaccaccgttgatgggcatcgtcatctacaccgccggcctgcctccgtcgccgccgagtggtgcctccgcctacacggctgacctattatgccgccgctgttgggcgtctacgacttcaccgccggcctgcctccgtcgccgccgagtggtgcctccgcctacacggctggcctattatgccgctgctgttgggcgtctacgacttcaccgccggcccgcctccgtcgccgccgagtggtgcctccgcctacacggctggcctattatgccgccgctgttgggcgtctacgacttcaccgccggcccgcctccgtcgccgccgattggtgcctccgcctacacggctggcctattatgccgccgctgttgggcgtctacgacttcaccgccggcctgcctccgtcgccgccgagtggtgcctccgcctacacggctggcctattatgccgccgctgttgggcgtctacgacttcaccaccggcctgcctccgtcgccgccgactggtgtccccgcctatacggtcggttggtcacaccaccgttgatgggcatcgtcatctacaccgccggcctgcctccgtcgccgccgactggtgtccccgcctatacggtcggttggtcacaccaccgttgatgggcatcgtcatctacaccgccggcctgcctccgtcgccgccgagtggtgcctccgcctacacggctgacctattatgccgccgctgttgggcgtctacgacttcaccgccggcctgcctccgtcgccgccgagtggtgcctccgcctacacggctggcctattatgccgctgctgttgggcgtctacgacttcaccgccggcccgcctccgtcgccgccgagtggtgcctccgcctacacggctggcctattatgccgccgctgttgggcgtctacgacttcaccgccggcccgcctccgtcgccgccgattggtgcctccgcctacacggctggcctattatgccgccgctgttgggcgtctacgacttcaccgccggcctgcctccgtcgccgccgagtggtgcctccgcctacacggctggcctattatgccgccgctgttgggcgtctacgacttcaccgccggcctgcctccgtcgccgccgagtggtgtccccgcctatacggtcggttggtcacaccaccgttgatgggcatcgtcatcttcaccgccggcctgcctccgtcgccgccgattggtgcctccgcctacacggctggcctattatgccgccgttgttggatgtctacatcctcaccgttggctcaccttcgttgccgtcgactggtgtttccgcttacacggctgacctattataccgccattagtgggcatcttcgctttcaccgtcgaccgccttcgtcgccgccgactggtgtcttcattattattgatggacgactttgttcccacattggccacttctgccatcaccaaggggaatattacaaagctaagatccagatccagatatgcataaaagggattcatggctttaagcttatctcttacgctccaggaatggatcagtcagaacaccaccaccggctcgcctcgaccgccgccgactggtgtttccgcctgcacggctggcttattatgccgccgttgttgggcgtctacgtcttcaccgaccggcttgccttcgccgccgccgactggtgtttccgcctgcacggctggcctttatgccgccgttgttgggcgtctacgtcttcaccgaccggcttgccttcgccgccgccgactggtgtttccgcctgcacggctggcctttatgccgccgttgttgggtgtctacgtcttcaccgaccggcttgcctttgccgccgccgactggtgtttctgcctgcacggctggcctttatgccgccgttgttgggcgtctacgtcttcaccgaccggccgcctcgtccgccgccgactggtgtttccgcctgcacggctggcctattatgctgccgttgttgggcgtctacgtcttcaccgaccggcttgccttcgccgccgccgactggtgcttccgcctgcacggctggcctttatgccgccgttgttgggtgtctacgtcttcaccgaccggcttgcctttgccgccgccgactggtgtttctgcctgcacggctggcctttatgccgccgttgttgggcgtctacgtcttcaccgaccggccgcctcgtccgccgccgactggtgtttccgcctgcacggctggcctattatgctgccgttgttgggcgtctacgtcttcaccgaccggcttgccttcgccgccgccgactggtgtttccgcctgcacggctggcctttatgccgccgttgttgggcgtttacgtcttcaccgaccggcttgccttcgccgccgccgactggtgtttccgcctgcacggctgacttattatgccgccgttgttgggcgtctacgtcttcaccgaccggctgcctcgaccgccgccgactggtgtttccgcctgcacggctgacttattatgccgccgttgttgggcgtctacgtcttcaccgaccggctgcctcgaccgccgccgactggtgttccgcctgcacggctgacttattatgctgccgttgttgggcgtctacgtcttcaccgaccggtcgccgcatccgccgctgactggtgtcaccgcctgcacggctggcctgttataacgccaactgatgctatcttcttcacggctggctacatcgctgtcactactaataggcatcagtatcttcaacacaagctgcctacgtttgccatggctgccgactggtttcttcacttccatggctgcatgattctgccagtgttgattggccttatcttcttcaccgccggtcgtctcgtctgctgctgactagtgccctcacctctacgtctggtttatacagctaccactactgatggacatcatcgtcttccgttgccgactggttatgccgccgccgactagtgcttttatcttcacaactgcgcgtcttcgctaccagttcacttcatcacggcgatgcaactttgtcatcatagtggagcgacttcatctttattatcttcggcactggcaaactctattgctgctacttcgcaagttttactacttcaccaaccacgacgtctttgtgaacctcgacatctcggcatgcaatgccatgatattttactacaacaagtgactctccaatattcaggatttctacttggacaccttcaacacatatcttcaatcaagcaatgactactcgacgacaagaagctataattctcgactctatgttcagttgtttcccaac

SEQ ID NO: 90801 - DNA, 4136 bp, Oryza sativa
  Clone ID: PAT_MRT4530_89436C.1
atgtttcgacagttggcgcgccagcaacaacgacttcaccgccggcctgcctccgtcgccgccgactggtgtcatcgcctatacggttggtcggtcacaccaccgttcatgggcgtccatgtcttcaccgaccggctggccttcgccgccgccgactggtgtttccgcctgcacggctggcctattatgccgccgctgttgggcgtctacgacttcaccgccggcctgcctccgtcgccgccgagtggtgcctccgcctacacggctggcctattcactccgtcgccgccgactggtgtcctcgcctacacggctggcctattatgccgccgctgttgggcgtctacgacttcaccgccggcctgccgccgtcgccgccgagtggtgcctccgcctacacggctggcctattatgccgccgctgttgggcgtctacgacttcaccgccggcctgtctccgtcgccgccgactggtgcctccgcctacacggctggcctattatgccgccgctgttgggcgtctacgacttcaccgccggcctgcctccgtcgccgccgattggtgcctccgtctacacggctggcctattatgccgccgctgttgggcgtctacgacttcaccgccggcctgcctccgtcgccgccgactggtgcctccgcctacacggctggcctattatgccgccgctgttgggcgtctacgacttcaccgccggcctgcctccgtcgctgccgattggtttcatcgcctccacggttggtgtgcgccgctgccgttgctgatggcgatatcgtcttcaccgccggcctgcctccgtcgccgctgattggtgtcttcgcctatatggttggttggtcacaccaccgttgttgggcgtctacgtcttcaccgccggcatgcctccgttgccgccgagtggtgcctccgcctacacggctggcctattatgccgccgctgttgggcgtccacgacttcaccgccggcctgcctccgtcgccgccgactggtgtcatcgcctatacggtcggttggtcacaccaccgttcatgggcgtccatgtcttcaccgccggcatgcctccgttgccgccgagtggtgcctccgcctacacggctggcctattatgccgccgctgttgggcgtccacgacttcaccgccggcctgcctccgtcgccgccgactggtgtcatcgcctgtacggttggtcggtcacaccaccgttcatgggcgtccatgtcttcaccgccggcatgcctccgttgccgccgagtggtgcctccgcctacacggctggcctattatgccgccgctgttgggcgtccacgacttcaccgccggcctgcctccgttgccgccgagtggtgcctccgcctacacggctggcctattatgccgccgctgttaggcgtctacgacttcaccgccggcctgcctccgtcgccgccgactggtgtcctcgcctatacggttggttggtcacaccaccgttcatgggcgtccacgtcttcgccgaccggctggccttcgccgctgccgattggtgtttttgcctatacggttggcggacttcgccgctgttaatgggcttcatcatctacaccactggcttggttccactggcgccgactggtgattcatggctttaagcttatctcttacgctccaggaatggatcagtcagaacatcaccaccggctcgcctcgaccgccgccgactggtgtttccgcctgcacggctggcctttatgccgccgttgttgggcgtctacgtcttcaccgaccggccgcctcgaccgccgccgactggtgtttccgcctgcacggctggcctttatgccgccgttgttgggcgtctacgtcttcaccgaccggccgcctcgtccgccgccgactggtgcttccgcctgcacggctggcctattatgctgccgttgttgggcgtctacgtcttcaccgaccggcttgccttcgccgccgccgactggtgtttccgcctgcacggctggcctttatgccgccgttgttgggcgtctacgtcttcaccgaccggcttgccttcgccgctgccgactggtgtttccgcctgcacggctggcctttatgctgccgttgttgggcgtctacgtcttcaccgaccggcttgccttcgccgccgccgactggtgtttccgcctgcacggctggcctttatgccgccgttgttgggcgtctacgtcttcaccgactggcttgccttcgccgctgccgactggtgtttccgcctgcacggctggcctttatgccgccgttgttgggcgtctacgtcttcaccgaccggccgcctcgtccgccgccgactggtgtttccgcctgcacggctggcctattatgccgccgttgttgggcgtctacgtcttcaccgaccggccgcctcgtcagccgccgactggtgtttccgcctgcacggctggcctattatgccgccgttgttgggcgtctacgtcttcaccgaccggccgcctcgtcagccgccgactggtgtttccgcctgcacggctggcctttatgccgccgttgttgggcgtctacgtcttcaccgaccggccgcctcgtccgccgccgactggtgcttccgcctgcacggctggcctattatgccgccgttgttgggcgtctacgtcttcaccgaccggcttgccttcgctgccgccgactggtgtttccgcctgcacggctggcctattatgccgccgttgttgggcgtctacgtcttcaccgaccggccgcctcgtccgccgccgactggtgcttccgcctgcacggctggcctattatgcggccgttgttgggcgtctacgtcttcaccgaccggcttgccttcgccgccgccgactggtgtttccgcctgcacggctggcctattatgccgccgttgttgggcgtctacgtcttcaccgaccggcttgccttcgccgccgccgactggtgtttccgcctgcacggctggcctattatgccgccgttgttgggcgtctacgtcttcaccgaccggccgcctcgtccgccgccgactggtgtttccgcctgcacggctggcctattatgccgccgttgttgggcgtctacgtcttcaccgaccggccgcctcgtcagccgccgactggtgtttccgcctgcacggctggctattatgccgccgttgttgggcgtctacgtcttcaccgaccggccgcctcgtccgccgccgactggtgcttccgcctgcacggctggcctattatgctgccgttgttgggcgtctacgtcttcaccgaccggcttgccttcgccgccgccgactggtgtttctgcctgcacggctggcctattatgccgccgttgttgggcgtctacgtcttcaccgaccggccgcctcgtccgccgccgactggtgtttccgcctgcacggctggcctattatgccgccgttgttgggcgtctacgtcttcaccgaccggccgcctcgtccgccgccgactggtgtttccgcctgcatggctggcctattatgccgccgttgttgggcgtctacgtcttcaccgaccggccgcctcgtcagccgccgactggtgtttccgcctgcacggctggcctttatgccgccgttgttgggcgtctacgtcttcaccgaccggccgccgcatccgccgctgactggtgtcactgcctgcacggctggcctgttataacgccaactgatgctaccttcttcacggctggctacatcgctgtcactactaataggcatcagtatcttcaacacaagctgcctacgtttgccatggctgccgactggtttcttcacttccatggctgcatgattctgccagtgttgattggccttatcttcttcaccgccggtcgtctcgtctactgctgactagtgccctcacctctacgtctggtttatacagctaccactactgatggacatcatcatcttctgtcgccgactgattatgccatcgccgactggtgcttttatcttcacaactgcgcgtcttcactaccggatttctacttggacatcttcaacacatatcttcaatcaagcaatgactattcgacgaccagaagctacagttctcgactctatgttcagttgtttcccaac

SEQ ID NO: 90802 - DNA, 168 bp, Oryza sativa
  Clone ID: PAT_MRT4530_89437C.1
atgccccagtcagacgccctcctggaggctttggatgctcccaagcccattgccacccaggccgccaagaaaccacacggatgggaaatccgagaggtccggaaggacaaccatgtggacggtttaagagagacccgggaggacgttgagtactacccaatagtatga

SEQ ID NO: 90803 - DNA, 141 bp, Oryza sativa
  Clone ID: PAT_MRT4530_89438C.1
atgggccccgagagttcagaactgccctattggcccatgaagttctgggctgcccatcgagtaacgaacaatgatcataaggaggaggatgcttgtgaagatcatgttgatccgttagagtgggacagctatggtttctag

SEQ ID NO: 90804 - DNA, 304 bp, Oryza sativa
  Clone ID: PAT_MRT4530_89439C.1
tcggggcaccaatacctttatcgagtgaaacagacagttatacgcacaccggaggccaatgatgcgcacagccatacaaaaatcgtcatatatacacttgcttttgagtggacaaacgtgaaactagacaggtagacacatgccacacattggctcagggcttgcgcacaactgcacaagtgtgtggaatatagagagctgtaaaacgacgcaagccatataattgagacaatgggtatgcaactataatttgacaattgtagatagaggatcacagacagaagtcaataattgtgtatcttta

SEQ ID NO: 90805 - DNA, 1145 bp, Oryza sativa
  unsure (1)..(1145): unsure at all n locations
  Clone ID: PAT_MRT4530_8943C.1
aaaaggttttataaaaagaaaaaccctaaaaagtctttttccccccctccccctcttgggccggctcggcccagctccctccctctctctcctctcccccgcggcccatccggccttcccccgcgcgcgcgccgctgacgggcgggcccgcccgccaccctcgctgacgggtggggcccacccgtcatcccctacctcgcgccgcacccgccgcctcgtgcgtgctctagcgccgtcgccgccgcggattccgccgcatcccgccgcccccgcgcgcaataaagagggggaaatcactccccgtgattccctctccctttccccccacttttctctctctctctccctcggattcgtttggaaactctcccgcaaacttcgccggcgcatcaatggcggccggatcttccgcgggcgattccccctcatccggccgctctctccccctcccaaccctacataaacactccccgtgcctccctcctccgtttccgccactcgccgctctctctccccgtcggaatcgagctcgcgccgtcgtcctctctctccgccgtcgccgccgagctccggtccgccgccgtcgtcngcccggacctcctcccgcttcggcatcgcctgcttgcgcatcgccgcgtcctcgccgatctcgtccaccccttcgtttagcccgccgacccgccggaacgccgccgtcctagtcgacccgagccgcgccgccgcctttttccgctccggtcgccgttcccgtcgtcgccgtcgacccggggtgagccgtggaccgccgtttcgtttcccccttccctcccctctctcggccgccgctccgccgtgcctatggccgccgccggcgaccataggggcgcgggcgcgccgcctcccgtcggccgtgccggcgaggccgctttagggcgcgccccgcggctgccatgtggggcccggccgtcagccgcccgcgcccgcgggtacggctgacgcgtgggacccacggcgccggccggcgtaagccgcgtgcacccggtccaccgtggaccgtgaggctgccgcgtgggccccactcccgtggacccggtccgcgcgctcctcccctcggctgacgcaataaatctgattttaaattaaaaatttaaatgaagaaattcgta

SEQ ID NO: 90806 - DNA, 663 bp, Oryza sativa
  Clone ID: PAT_MRT4530_89440C.1
atgggccccgagagttcagaactgccctattggcccatgaagttctcggctgcccatcgagtaacgaacaatgatcatgaggaggaggatgcttgtgaagatcctgttgacccgttagagtgggacagctatgctgttgacaagttctccaagtggatagaagccaagccagtcgtcacaatcacagcggacaaggctagagatttcttcgtcaacatcgtgcactggtttggggtacccaatcgaattatcaccgataatggtactcaattcactggttgtgtgtttaaagatttttgtgaagacttcagcatcaaaatttgttatgcctccgtagcgcatcctatgagcaatggacaagttgaacgtgccaatggtatggtacttcaaggaatcaaagcacaagacttcgtcggactgcatccctacaccggcaagtgggttgatcagctgtcatctgtactttggtctctacgcactatgcctagtcgggccacggggcaatcaccgtttcttctggttcatggtgtggaagcaatgttgtcaagtgaggtagaattcgaatccttgcgatttcgcaatttcaaggaggagcgctacggagaagaccgagttgatgatctcaaccgactggaggaagcttgtgaggcagcattgatttag

SEQ ID NO: 90807 - DNA, 477 bp, Oryza sativa
  Clone ID: PAT_MRT4530_89441C.1
atggcctctctctcgctgactcgctctcttctctccctcccttctcttgctctcttctcttcctccctcccttctttgctcgccggcgaaggcggcagcggcgaccgtgccctctcctccgctagatccggtgggaggggaggcggcggcggcaggaggggaggtgccagcggcgggcggggccggaggggtcggcagcgggcggctcaaggaggtggcggcaggcagcgggctcgaggaggaggggaggtagcggtggtctcgccgccggggaggagccctcctctccgccaaatctggcaggaggggaggcggcggcaggggcggcgggctcgccggggattggtggtggcaggcggcgggctcgtgaggagatgcggcggcgagctcgccgatgggagatggcgcgacgggaggtggcgcgacggcttaaagaccgaccgtgcgacgatgacgagatgtatcctagtggtttga

SEQ ID NO: 90808 - DNA, 1119 bp, Oryza sativa
  Clone ID: PAT_MRT4530_89442C.1
atggatccggccgccgccgcgcgggggcaggcggagcagtggatgcgggtggcggagaagctcctggtggcgcgcgacctggagggatgcaaggagttcgtctcccaggcgctcggcaccgacccccacgtcccgggcgccaacgacctcctcgccgccgccgacgtcctcctcgccgcgcagcgccgccgcatccccaacggtcatccagatccctacgccgtcctcggcctcgatccctccaccccggcctcccgccgccccgacgccatccacgcgcagtaccgtcgcctctccttcctcctcaatcgctcccaccccgaccgcccttgctcgctctccttcgccgaggccgcccgcctcgtggccgattcatgggccttcctctccgatccgatacttaaatccgccctggatgctgaactcgacgccgccgccgccgcagccgcggcggcggcagctcgcgcgtaccatcctccagctccgatgcaacagccgcagccgcagcctccgccacagccaactccaccgagggcggctcccctgccaactccaccaagggcgcctccccaatcaactccaccgagagcagcgccccagtcaactccaccgcagcgggtggctccacagccacccgccactgcagcggcgccgccgattgagcctgtcgcgccgccttcgcccacgttctggacagtgtgcatgtcctgctgccacattcaccagtacgaccgcctctatgaggcgcggaaggtgttgtgccctagctgccgccagccatttgtagccgaggaaatggcggagccaccacccattgtgccgggtactgacatgtactactgcacctgggggttcttccctgttggttttcctggctgtcctggcttcgagaaactgatcagttcgcagcagcatggaacagatcagccgaatacaccttggcttggaaccactggtggtgcggaagctgatggtgtggctggtgctgagaatggggcgccggttagtgctgccgtggaggtgcaatctgtgccgaaaccagcgaaacccgtgagagtgaaggtgggcgcgaagaagcgaggccgtcccaaaggcagcaagaacaagaagaatttgtga

SEQ ID NO: 90809 - DNA, 436 bp, Oryza sativa
  Clone ID: PAT_MRT4530_89443C.1
tcggtttagatcgcgagcgccgccctttttttgtttgttttttttttttttttccttttttctttttcctttttaatttttttttttttgtgcaaggctgcaattggttcttcacttggccatgagtcaatcccaaaaaaaaagggcctaaaaataggttgggcgatgcccccaatccaaaacaaatttaaaccccggacccctacaacaggagtcccttacatggcaggcccaccccccttggttttaaaaacccttttttttttggcaaaaataaagccccaagctactagcccaacttctattgctaccaggcccacttttgtcatttaaagtggggcccaattgtttgtgaaaagaacaactttttttttcttttacccagggaaaaaggttttgtggaacccaccttctgcccactacaagggggcccaaa

SEQ ID NO: 90810 - DNA, 213 bp, Oryza sativa
  Clone ID: PAT_MRT4530_89444C.1
atgggatatggatgctcaccggaggcggaaagcagcaggacgacgggcacccaacctcgagggatacggatggaaatcggcgcagggggaggcggcgtggcgggcgaagtagcgaggagtcggccgacggcgcaggcaggaggcggatggatgggtgtcgagtgccgatggggtacgactaacaaggcccgccagcgcaaagaggagccctga

SEQ ID NO: 90811 - DNA, 240 bp, Oryza sativa
  Clone ID: PAT_MRT4530_89445C.1
atgacgttaacacgagttggcggcacagaggcaaaccgatgcgcgaagataccagtcagcgacagacgagaaggtcgtagtggtgatgaaaccagtcggcggcagacaaggcggccggtggtgaagacgtggacgcccatcaatggtggtgtgaccaaccaaccgtgtagacgaggacaccagtcggtggcagacgaagttagccggcgtttccccgagcagatgactccttacgtttaa

SEQ ID NO: 90812 - DNA, 330 bp, Oryza sativa
  Clone ID: PAT_MRT4530_89446C.1
atgccgccgttgttgggcgtctacgacttcaccgctggcctgtctccgtcgccgccgactgtttcatcacctccacggttggtgtgcgccaccgtcgttgctgacggcgatatcgtcttcgtcgactggtcgcctcgtctgccgccgactagtgtctccacctacacggctggcctattatgccgccgttgttgggcgtctacgtcttcaccgaccggccgcctcgtccgccgccgactggtgtttccgcctacacggctagcctattataccgccgttgttgggcgtctacatcttcaccgaccagccacctcgtatgacgccaactga

SEQ ID NO: 90813 - DNA, 1815 bp, Oryza sativa
  Clone ID: PAT_MRT4530_89447C.1
atggcgcaccgtgccacgcgggccggtgggaggaggaagaaaggggaggccgagacggacggcggacagcggccgagttcaccggagccttgcgggacggatttggtcttcggggagcacaccggagtgacgagggattcgagagggagcgatccaacggctcggattcgccggagagaggccggcgacgatgaatcgcggcggcgcacgccggcagcgagaaaagggggaaaatccaccagagcaatgggagttcgattcggcggggtgggagcatctccgatgttcaaggggtgcattcccggcgtcggatggggtagagaagtaccgaggagggccggcgacgagcggcggcctccgggatcagacggcaatggcggtggggccatgccgggcggcggcagggcttggggcagcatccacgcgcgttcgggagggctatcgagccgctacgcaagctggagtggaagaggaaaagcggggagggagaacgggggctaccgcgtcgggagatcgctgggaagagcgtccgacagcgcggcgggaccgcctcggcctcgagccggggaaggagatggagagaaggcgatcggagtccctttcggctccgcgcgcacgccgacttcccggcacgcggagaagaggcggtttaggagggggaaccgacttagatggtcaagggagctcggctatcgcgtatggtcaaggtgggggcggcgaacttggcagtcacgggcggtagagggggggtcgatggtgccggtcggggaaaaagcaaaaggggagggaggaaagggggctctgcccatgccattctgggagaaaggaggagggagagagagctttgcctccgggagttggacgcacgtggcttggagcggccgggcacacgtcgcagggggtgcggggccgagcggcgcaggcggcgcaggcgcggcaaggctgacggtggcggtgactggtcggtcggccatgcacgagcgcacgcgaaggcggtggcgtattgagggcaacatcccagatgagttttcaaagttgtctgcgctgaagttcttgcatttgggtatcaataagctaacaggtagctttccagaagccgtcctgaatatttctgctctaactgaacttagcttcgctattaatgatcttcatggagaggtgccaccagacctggattttcccaaagtttcttacaatgatcttgcaagagcaactgagaggttctccatgtccaatttgattggcaaggggaggttcagttgtgtatatcaaggaaaactatttcaatgcaatgatgtggttgctgtgaagagaataaacattatggtggatgtatcagatgcactggagtacctgcaccatagcaaccaaggaacaattgttcactgtgacctgaagcctagcaacatccttctagatgataacatggttgctcatgttggagactttggccttgcaagattcaaatttgattcgacaacatcatctctaagttatttgaactcaacctcctcccttgtaataaagggaaccattggttatattgctccagctatcaacttccctgacaggatacttgagattgttgatcccaagctgcaacaagaattgatcccctgttctacagataaggaagatttggacccctgccaggaaaatccaatagcagttgaggagaaaggcctacattgtctacgctctatgctaaacattggactctgctgcaccaagccaacaccgggagaacgcatcagcatgcaagaggtggctgccaagttgcacagaatcaaagatgcatatctcagggaatactag

SEQ ID NO: 90814 - DNA, 858 bp, Oryza sativa
  Clone ID: PAT_MRT4530_89448C.1
atggcggcggggccatgccgggcggcggcggggcttggggcagcgtccacgcgcgttcaggagggctatagagccgctacgcaagctggagtggaagaggaaaagcggggagggagaacgggggctaccgcgtcgggagatcactgggaagagcgtccgacggcgcggcgggatcgcctcggcctcgggccggggaagaggaaggagacggcgcccggaggtccccttcggctccgcgcgcttgccgactttccggcacgcgcaacggcgaggaaggtggtggcggcaaggcggcaagaacagaggaagagcggggagcggcttggcttttataggtggagaagaggcggtttagtagggggaaccgacttagatggtcaagggagctcggctgtcgcgtgtggtcaaggtgggggcggcgaacttggcagtcacgggcggcagagggggggtcgatggtgcctgtcggggaaaaagcaaaaaggggagggaggaaagggggctctgcccatgccattctgggaaaaaggaggagggagagagagctctgcctccgggagttggacgcacacgacttggagcggccgggcatgcggcaacagggcacgggcggcatctggacggacgcggcgacgactgagcgcggcgaccgaccgagcgtgggttggagtctggactcgaatttcgaagtcgatactcggttttgggagaatagaaaggagtcaaggaagagaacaatattcggagacgagtcaaagggagatggataatttagagaaagagagtgtaacttgggagtttgagtttgactacttgatgagatatgcgggtgaggattttgaagagaagtctgaatag

SEQ ID NO: 90815 - DNA, 693 bp, Oryza sativa
  Clone ID: PAT_MRT4530_89449C.1
atgcccataaacgccgtcataatcccccacatccctacctccgtcatgcgtgcccgcgtgagccgtcgccgtctagctcatagatccatcaccaagcaatgcttctttcgtccggtttgtcagtgcagcgataacccagtcgacgtgctcttcgggcagcggaccgccacatcaggtctatggaagcctcaagcctgggaggtgcaacgccgtcggatctggcagcggcaagtgcagtttgggtacagctgcaccccctgcaattgcatttcaagcactatcctcctggctgccgttccacctcttccctatcctcgtcgaacaaagaatgcgataaaactcatctccatggataagaagcctgcgaggaatctcaccggctttcttgccaccactgctggcactgtcgtgaataacaacaatagtggaaagttgcctggtctatcacggaagttgttacagaaggcgctgtcagagcacaagaagaacgcactgacaaaggtcaagagcagtggcaacacgcgggagcactccatggtgctgcgcgacgagtgggaggacgagatcgctacactccgcctccagttcgagcagaaggacattgaggaggaaaatgaagggaaaaataacctaaaaccacaaaggggtggagcaaacaaggagcagatccaggctggagatgggaggaactaa

SEQ ID NO: 90816 - DNA, 1832 bp, Oryza sativa
  Clone ID: PAT_MRT4530_8944C.1
ttaatcgcccggaacggccgcgacaatcccggtcaccttccgtggccgccggccgccattcccgccgccgttccccgctcctcccgtggccagatccctcccctcacctataaaatggaatccccttcctccgttctctcgttttagcctcctcccgcgtctccccgtggccgcaccacctctccccgtcgccctcgtctctatcctgtgccgccggccacctccagccgcctctgccgcctcgcctgtgtgccggccagccgtgccgtcgccatcctcggcctcgcaggtgcatcctcttccccggcgtcgccttcgtttcacggggaaaccaccggaggcgcgttcctgccgtagtccaatggcgttgccgccactgtgccgcctccagctgccccggtcgtcgcgcctaagcgccggccgacgctgccgtctcctcccttggcatggtgacgtcgccctccaccccggcctgccctcggattcgtccagagaccgccgccgccgcaccagcctctccttcctcctcgtcaacgtctcctccggcagccccttccgccgtgcccgtgcaccggccgacatcgtcgtctcctcccttggcatcgcagcggcaaggtcgccctcggtctcgcctcccctcctcccgaaccccgccggtgtcaccgtcgtcgtcttcatcgttcatcctcgccggctcgtcgtcccgcggcgccacctccgtcgtcggcattgtagcggcgtgttccacgccgtcctcacctctatgcaactgctgtcggctgccatcgtcgcctccttactggccctcgtcgtcttcgtcctctcgtcgttcccgatcgtcgtggcgttcgtccctccgtcaagccgtttgcgtttgccgcccgcgtttcgtcaagtgtgctgtagcctcctcgtcgtcttcgtcctcggctccgcgtcgtcaagccctgcgccggccgcgtctcgccttcgtccaagaatcgccgccgaagtcgtcccctcgctgttcgcctccgtcgtccccgagccatctccgccgcgcccgttcgtcgtcgtcattcccacgccttgtcgcgtgatggtaagggtccctcctcgtcctcgttctttcggtatcgccctgtgcccattgtgcggttgtcgaccccggtacccgtgtaccggtgtcggtagtcgttcgtgtgtgcgtgtggtgaccgtgttggtgtgcccgctcggtagccacgtggtttccacgtgtgcagcccgcgtggtgtctagtggagtccgtttgtcggccacttgcctcggttgacacatggggtccgcttccgtcgacccgtggaccgtctctgtgtactcggttttctttttatgtattgttattgcttctttttaggcttgtagctttgcttgtgtgcttcgcgtagctttcgtcgttccggaggttcccgaagcgtggttcgctgtcgtcgccgaaggttcggaaggacgttctctctcccccctctattcaaaactcccaaaatggttttaggctgggctcaaggtgcatggttttgctaggagcacctcggccaccataaggaccagtcttcgggcctctgttgcaaagcactaccgtactaaccacatgtctaatgggtaaggcttaactcggtgctcagtctagtcctggcaagaggacacggatagatatggacgaagttggggctcgatggacatctcccgacttttcctgggacggggattaatacactagcgttctggaaaaggtatttttccgggcgcgacacgttcctggggacgcccagaactgataaggctttgttagatgctgcagagccaaacga

SEQ ID NO: 90817 - DNA, 150 bp, Oryza sativa
  unsure (1)..(150): unsure at all n locations
  Clone ID: PAT_MRT4530_89450C.1
ggatggggatnactgctgctcttgctctctcatgncttcagcaaatagatcctgttgcaggtcaagttgctgcatctgtgcactgnctataagggatctatcctatcatatctgccctgaatttgataggctnatccagtatcctcctga

SEQ ID NO: 90818 - DNA, 327 bp, Oryza sativa
  Clone ID: PAT_MRT4530_89451C.1
atgcaaacgcgagcacatcacccgcgcggagggagccccgcctgcgatcgcgtgctacacagctactggcgcgcgccgcacggggaccgagcgcaagcgcgcgtgtggcaacgactcaacgatagcaccgtgtgcctgccttctgagaccgcaccgagaccgtacgtcttggactttgggtggaggactgcgccgattgagctagagggctggatgcctcgtacgaagcccgcgtacgtgtgtgccgcgcgcccgggccgacgcggctgggacacgggtccggactggcaggagcgcgaccgatgcatgtgggtgtggcgccaacct

SEQ ID NO: 90819 - DNA, 202 bp, Oryza sativa
  unsure (1)..(202): unsure at all n locations
  Clone ID: PAT_MRT4530_89452C.1
accagtgggaattttttnggcgatcgaaccatcccatttacatatattggacacaccgtatgcgtggacaataaacgttaccgcaagttatgaaaggtaaaggcactgacctgcaccataccgggagtttgcgcagcatatagcctggggacttgagctaacggtcttttatacaaacatctaaggctacagcgcttaatag

SEQ ID NO: 90820 - DNA, 275 bp, Oryza sativa
  Clone ID: PAT_MRT4530_89453C.1
atggggcttgtccatgcaatgaatgatgaggttgtccctggaaagaccacagtaacaaatgtccccaaacctctcatcacatcactttgctacttaccagcctccattagtcattcagatggtggaaaggattctcttcttccagtaaaaatgggcaagcaaatggctatgggaggtgaaaaatttgtcccgacacagcgccgcgtgaccattaaccaaatgcagagtactatcaagagcaacgacaaaacggaaggagcagatgaacatgaaga

SEQ ID NO: 90821 - DNA, 445 bp, Oryza sativa
  Clone ID: PAT_MRT4530_89454C.1
atggcccgcatcgcatatacatcggcggattcgcggctcgccatcccgtcggcaagcttggattcctcggcgacggcggcgtgcggttgcaagcaaagctctcggttcatggcgaacaactccaactgctgcgggttcatggcgaacaactccaactgctgcgggttcatggcgacggtcctggacttcacgtcacggttgcgggctgcagcaggtagaagaagcaacgcgccgtggctcgccggctttccttcgttgcagggtaaacaacgcgtcggtcggaggcgaacacgtcgtatatacgcgcacacagtagttacacatggtccggcggagtcggtcttcacgccagcgaagaacagccgaagtcaagatggcatcacgcgagagccagttcgatacagcgcggctgcgtactgcgttaccgggcacatgcaggaggagg

SEQ ID NO: 90822 - DNA, 990 bp, Oryza sativa
  Clone ID: PAT_MRT4530_89455C.1
atggctttaagcttatctcctacgcttcaggaatggatcagtcagaacatcaccatcggcttgccttcgccgccgccgactggtgtctccgcctgcacggctggcctattatgccgccgtctgttgggtgtctacgtcttcactgaccggcttgccttcgccgccgccgactggtgtcttcgcctacacggctggcctattatgccgccattgttgggcgtctacgtcttcaccgaccggccgcctcgtctgccgccgactggtgtctccgcctgcacggctggcctattatgccgccgttgttgggcgtctacgtcttcaccgaccggccgcctcgtctgccgtcgactggtgtctccgtctgcacggctggcctattatgccgccgttgttgggcgtctacgtcttcaccgaccggccgcctcgtctaccaccgactggtgtctccgcctgcacggctggcctattatgccgtcgttgttgggcgtctacgtcttcaccgaccggccgcctcgtctgccgtcggctggtgtctccgcctgcacggctggcctattatgctgccgttgttgggcgtctacgtcttcaccgaccggccatctgccgccgactggtgtctccgcctgcacggctggcctattatgccgccgttgttgggtgtctacgtcttcaccgaccggccgcctcgtctgccgccgactggtgtctccgcctgcacggctggcctattatgccgccgttgttggacgtctatatcttcaccgaccggccgcctcgtatgacgccaactgccacgacgtctacaagagcttgggcatctcggtatgcgtcaccaaatatgatgccgtgtcattttactactacaagtggttctacaattttcaagattcctactcggacatcctcaacacatatctttactcaagcaatgactactcgatgacaagaagctacagttctcgactctatgttcaattgctttccaactaa

SEQ ID NO: 90823 - DNA, 401 bp, Oryza sativa
  Clone ID: PAT_MRT4530_89456C.1
tccctttcttatttttactaattttttttggggggagttttttaaaaataatttggggttataaaataaattttttttatttttttggggggagccaaaacacaaaaagctcacccatttaccacgagataaagctttaactctagccaacaaggggcactactaccaacaaagtgacactatccctagcaaaccgagcaaccagacataaaccgatcgcataggtcatcaacaaaacacttcattattgaacaatcaccacactggctgcaacaaaatattcaatctcggtaagacacacaacaataatgaatccgatggcatattgaaccaaacatcaggcaaacatgtctgctctgaacttaactacgaacaagaaactgctatactagaaaagaaaa

SEQ ID NO: 90824 - DNA, 2339 bp, Oryza sativa
  Clone ID: PAT_MRT4530_89457C.1
atgggcatccatgtcttcaccgaccggctggccttcgccgccgccgactggtgtttccgcctgcacggctggtctattatgccgccgctgttgggcgtctacgacttcaccaccggcctgcctccgtcgccgccgactggtatcctcgcctatacggtcggttggatccagatccagatatgcataaaagggattcatggctttaagcttatctcttacgctccaggaatggatcagtcagaacatcaccaccggctcgcctcgaccgccgccgactggtgtttccgcctacacggctggcctattatgccgccgttgttgggcgtctacgtcttcaccgaccggcttgccttcgccgccgccgactggtgtcctcgcctgcacggctggcctattatgccgccgttgttgggcgcctacgtcttcaccgaccggcttgcccttcgtcgccgccgaccgatgtcctcgcctgcacggctggcctttatgccgccgttgttgggcgtctacgtcttcaccgaccggcttgccttcgccgccgccgactggtgtttccgcctgcacggctggcctattatgccgccgttgttgggcgtctacgtcttcaccgaccggcttgccttcgtcgccgccgactgttgggcgtctacgtcttcaccgaccggcttgccttcgtcgccgccgactggtgtcctcgcctgcacggctggcctattatgccgccgttgttgggcgcctacgtcttcaccgaccggcttgccttcgtcgccgccgaccgatgtcctcgcctgcacggctggcctttatgccgccgttgttgggcgtctacgtcttcaccgaccggcttgccttcgccgccgccgactggtgtttccgcctgcacggctggcctttatgccgccgttgttgggcgtctacgtcttcaccgaccggcttgccttcgccgccgccgactggtgtttccgcttgcacggctggcctttatgccgccgtagttgggcgtctacgtcttcaccgaccggcttgccttcgtcgccgccgactggtgtcctcgcctgcacggctggcctattatgccgccgttgttgggcgcctacgtcttcaccgaccggcttgcctttgtcgccgccgaccgatgtcctcgcctgcacggctggcctttatgccgccgttgttgggcgtctacgtcttcaccgaccggcttgccttcgtcgccgccgaccgatgtcctcgcctgcacggctggcctttatgccgccgttgttgggcgtctacgtcttcaccgaccggcttgccttcgccgccgccgactggtgtttccgcctgcacggctggcctttgggcgtctacgtcttcaccgaccggcttgccttcgtcgccgccgactggtgtcctcgcctgcacggctggcctattatgccgccgttgttgggcgcctacgtcttcaccgaccggcttgcctttgtcgccgccgaccgatgtcctcgcctgcacggctggcctttatgccgccgttgttgggcgtctacgtcttcaccgatcggcttgccttcgccgccgccgactggtgtttccgcctgcacggctggcctttatgccgccgttgttgggcgtctacgtcttcaccgaccggccgccgcatccgccgctgactggtgtcaccgcctgcacggctggcctgttataacgccaactgatgctatcttcttcacggctggctacatcgctgtcactactaataggcatcagtatcttcaacacaagctgcctacgtttgccatggctgccgactggtttcttcacttccatggctgcatgattctgccagtgttgattggccttaccatcttcatcgccggtcgtctcgtctgctgctgactagtgccctcgcctctacatttggtttatacagctaccactactgatggacatcatcgtcttccgccgccgactcgtgttatgccgccgccgactagtgcttttatcttcacaactgcgcgtcttcactaccggtttgcttctgttgccgccgactcgtgttcacttcatcacggcaacacaactttgtcatcatggtggagcgacttcatctttattatcttcggtaccagcaaactctattgctgctacttcacaagttttgctacatcaccaaccatgacgttgttgtgaatctcgacatctcggcatgcgatgccgtgttattttactacaacaagtggctctccaacattcatgatttctacttggacatcttcaacacatatcttcaatcaagcaatgactactcgacgataagaagctataattctcgactctatgttcagttgtttcccaac

SEQ ID NO: 90825 - DNA, 224 bp, Oryza sativa
  Clone ID: PAT_MRT4530_89458C.1
ggggatggggtattttttatttttttatactaacagtctatgacgatttcaaattttattcatgacacacacgaagaagggtgacactttatttaaccaactatatagatatgaaggtacacactaccaagaaccgtaagaccaatatcaactttgcatggagagcccaccaccaacgggagactccacacatagagggcaaagggaggagcccctgggcctgg

SEQ ID NO: 90826 - DNA, 2938 bp, Oryza sativa
  Clone ID: PAT_MRT4530_89459C.1
gttgctgactaacatcttcactgaccggctgcctcgtccgctaccgactggagccctcgcctgcacggctggtcttttatgccgccgctattgggtgtctacgacttcactgcccgttgggttaattccggtcgtgacattcaccgccgggcctgcctccgtcgccgccgactgttgtcctcgcctttatggttggttggtcacaccaccgttcacaggcgtccacgtcttcaccgaccggttggccttcgccgccgccgactggtatttctgcctgcacggctggcctattatgccgccgctgtcgggcgtctacgacttcaccgccggcctgcctccgtcgccgccgactgttgtcctcgcctttacggttggttggtcacaccaccgttcacgggcgtccatgtcttcaccgaccggctggccttcgtcgccgccgactggtattgctgcctgcacggctggcctattatgtcgccgctgttgggtgtctacgacttcatcgccggcctgcctctgtcgccgccgaccggtgtcctcgcctatacggttggtcggccacaccaccgttcatgggcgtccacgtcttcaccgaccggcttgccttcgccgccgctgactggtgtctctgcctacacggctggccaattatgccgccgttggtgggcatcttcggtttcaccgtcgaccgccttcgtcgccgccgactggtgtcttcggattcatggttttcagcttatctcttacgctccaggaatggatcagtcagaacatcaccaccagctcgccatcgtcgccgccgactgctgtcttcgcctatacagttggttggtcacaacaccgttgttaggcgtctatatcttcaccgccggtttgctttcgccgccaccaactggtgtcaccgcctgcacagctggcctattatgccgctgttgttgggcgtctacatcttcaccgaccggccgcctcgtccgccgctgactggtgtttccgcctgcacggctggcctattatgccgccgttgttgggtgtctacatcttcaccgaccggccgcctcatccgccgtcgattggtgtcaccgcctgcatggttggcctattatgccgccgttgttgggcgtttacatcttcaccgaccggccgcctcatccgccgccgactagtgtttcggcctgcacggctggcctattatgccgccgttgttgggcgtctacgtcttcaccgaccggccgcctcatccgccatcgactggtgtcaccgcctgcacggctggcctattatgccgccgttgttgggcgtctacgtattcaccgaccggccgcctcgtccgccgccgactggtgtttctgcctgcacgcctggcctattatgccaccgttgttgggcgtctacgtctttaccgaccggctgccttcgtctgccgccgactggtgtctccgccttcacggttggttggtcacaccaccgttgttgggcgtctacgtcttcaccgaccggcttgccttcgccaccaccgactggtgttttcgcctgcacggccggcctattatgccgccgttgtcgggcgtcatcgacttcaccgactggccgcctcgtctgccgccgactggagtttctgcttgcacggccggcctattatgccgctgttgttgggcgtcatcgacttcaccgactgtccgcctcgtccgccgccgattggcgtctccgcctgcacggctggcctattatgccgccgttgttgcgtgtcacgcccagaaatgcatggactccccagcgacccccgtgggcttatctccgccacgacgacggcggcgaggttgaagcggcggtggtcttcgggtcgacggtgacggtggtgctccggcggtcttcggcggcggcgaagcagtggacgggaacggtgacgacctcacgatgccgatggtggcgacggcgaccgaaggcggcgactgcaacggcggcgcgtcgcggctgaaccgacaacaacgacggcggcggctagggctacacggaggcggcgctacacgcgacggcgggctaagacaaaagtggcggtggagagaggaggtcccggggatctttttataggggctaggaggcggcgacgaaggcccacggcggccggcgacgggatggaaagttagggttcggagagagagagagaccgatccgaatcgacctcgaatccaacaggtttcgtcgggaggaagacgacgggcctgacccacctgtcagcgggcgaacgcgcgcgcgcgggcggcgcgtctacgtcttcaccgaccggctgcctcgtgtgacgccaactattgctatcatcttcacggctgtccatgtcgctgccatcgctaacaggcgtcatcatcttcaacgcaagctgtctacgtctaccgctgactggtttcttcacttccatggctgcatgattctaccagtgttgattggccttatcgtcttcatcgccggtcgtctcgtctgctgctgactagtgccctcacctctacgtctggtttatacagctaccactactgatggacatcatcgtcttccgtcgccgactggttatgccgctgccgactggtgcttttatcttcacaactgcgcgtcttcactaccagtttgcttctgttgccgccgactcgtattcacttcatcacggcaatgcaactttgtcatcatggtagagcgacctcatctttattatcttcggcaccagcaaactctattgttgctacttcgtaagttttgctacttcaccaaccacgacgtctttgtgaacctcgacatctcggcatgcgatgccgtgttattttactacaagtggctctccaatattcaggatttctacttggacatcttcaacacatatcttcaatcaagcaatgactattcaacgacaagaagctacagttctcgactctatgttcagttgtttcccaac

SEQ ID NO: 90827 - DNA, 464 bp, Oryza sativa
  Clone ID: PAT_MRT4530_8945C.1
atgcagctcaacccaaaagcaagaattcgtcgaaataaaacaaaagcaaaagggactctatccaagtgcggcaaccatcttgaagcaccttaattcaacctgatatcgtatacgaagttgtattgtcagaatcggctatatcaacttactcagtccgattcggatccagccgatcctaatcgtagctgatttggactcctgccgattcttgctctgttctcgaatcgatctccgccttcgactccacttcaatctaatcctcttttccgatgctgatattaccaaatttgccaactttgttctctctctctccagcgatctctccaacacacaaggcgatcccaggcgatttcatttccgatcagatctccgcctatggtgatgtcgtcttccgctagcccgtctaccgcgccatcggcagagtacgctgaggtaagttctcatcggatagatcccttttcctc

SEQ ID NO: 90828 - DNA, 416 bp, Oryza sativa
  Clone ID: PAT_MRT4530_89460C.1
cccacgcgtccggtaaaatattgttttctatagcctgtcagatgattgttattttcattggagctgtgctgaaatggaaactcaagagcagttttattaaaaaaaaaaaaaaaaaaaaaaaaaaaaaaaaaaaaaaaaaaaaaaaaaaaaaaaaaaaaaaaaaaaaaaaaaaaaaaaaaaaaaaaaaaaaaaaaaaaaaaaaggggggggcattttaaaggattaaaattttactaaccctggcttgcaacatttaacctcttttataggggaaccaaaattaaattaactggccgcctttttaaaacgtgggaattgaaaaaaccctggctttaccaaatttaattgccttgaaaaaaacccccctttccccaattgggataataaaaaaaaggcccacacctattgcctttcca

SEQ ID NO: 90829 - DNA, 612 bp, Oryza sativa
  unsure (1)..(612): unsure at all n locations
  Clone ID: PAT_MRT4530_89461C.1
tggcttgcaggattcggcacgaagaaggacaagtgtttggattgtggctgaaaaatatttgctacctgagtaaattgtctcgaantggttttcatcatcgttgaccncnaaaaaaaaaaaaaaaaaaaaaaaataaaaaaaaaaaaaaanaaaaaaaaanangaagaagtngnagcanacccanaaaaaaaaaaaaaaaaannnnggacccnaacntacntaanccacaaaaaaanccccnggggggggggggggccccnaaccccccccntnnaatttntcttanaacccccccgnnngccctttttaaannccctcnngggaaaaannccccccttccccccnntaaaaccccnnaanccnancncccttttttcncnngggggggtntanntaaaaaaanagccncccnaattccccccccanacntnntttccccccccncnangnccnaaanccccgttcatnaancccccctnnttactnctgttananccccccnncaaaanatnngnnntnncccccccctcnttttnggcccccnangaanccaaaaanccccccnaccccnnctctnnnttcnaaaanacncccnnacggcgngggttactt

SEQ ID NO: 90830 - DNA, 3033 bp, Oryza sativa
  Clone ID: PAT_MRT4530_89462C.1
atgagacaactaaatcgtcagatctatactacacccggcggattcaaatccccaaacaggagtctcgtgcgctacccccttttattattgccgaatttatgtttcgacagttggcgcactaggtaggggttgcgtcgagttttccgtcgagaagtgcgatggaaccaatttttctagagatgtgatgagattgatctcgataactatgagatcaaggcgaagcggtcggcgacctcgcacgtccggccgccgatccgaacaccatcatgttgtccagcagctgtccctgcacgcggagcagtgctgtgcatgcaccgatatatattgtactaatctattaatggtttgttgatcgtttgcatgtactcccgaatggcggttgtttatcaaatcgcctccgtcgttatcgaccggtgttctcgccttcatgattggttggtcacaccaccgttgatgagcgtctacgtcttcaccgatcagccgcctcgtctgccgccaacagctgtctccgtctgcacggttggcctattatgctgccgttgatgggcgtctacgtcttcaccaccggcttgcctttgccgccgccgactggtgtcttcgcctatacggttggttggtcacaccactgttcatgggcgtccacgtcttcaccgaccggcttgccttcgccgccgccgactggtgtctccgccaacacggccggcctattatgccgctgttgttaggcgtctacgacttcaccgccggcctgtcttcgccaccgccgactggtgtctccacctacacagccgacctattaagccgctgttgttgggtgtctacgacttcaccgccggcctgcctttgccgccgccgactggtgtctctgcctacacggccggcctattatgccgccgttattgggcgtctacgacttcaccgcaggcttgccttcgccgccgccgactggtgtctcagcctacacggccggcctattatgccgctgttgttgggcgtctacgacttcaccgccccgactggtgtctccgcctacacggccggcctattatgccgccgttgttgggcgtctacgacttcaccgccggtctgccttcgccgccgccgactggtgtctccgcctacatggccggcctattatgccgtcgttgttgggcgtctatgacttcaccgccggcttgccttcgctgccaccgactggtgtctccgcctacacagccggtctattatgccatcgttgttgagcgtcaacgacttcaccgccggcctgccttcatcgccgccgactggtgtcctcgcctatacggttggttggtcacaccaccgttcatgggcgtacatgtcttcaccgtcggcttgcctccgccgccgccgactggtgtcctcgcctatacggttggttggtcacaccatcgttgatgggcatcttcgctttcaccgaccggcttgcttccgccgccgactggtgttttcgcctatacggttgacagactccgcggccgttgatgggccttgtcatctacaccggcttgccttcaccactgctgtccggtggatccagatccagatatgcataaaagggattcatggctttaagcttatctcctacgctccaggaatggatcagtcagaacatcaccaccggcttgccgtcgtcgtcatcgactaatgtccttgcctatacggttgggtggtcacaccaccgttgttgggcgttgttgtcttcaccaactggccgccttgtccgccgccgactggtgtcttcgcctatacggttggttggtcacaccaccgttgttgggcgtgtacgtcttcaccgaccggcttgccttcgccgccaccgactggtgtctccgcctacacggctgacctattatgccgccgtttgttgggcgtctccgtcttcaccgaccggcttgcctttgccaccgccagctggtgtctctacatgcacggctgacctattatgccgccatttgttaggcgtctccgtcttcaccgaccggcttgccttcgccaccaccagctggtgtctccgcctgcacggctggcctattataccgccgttgttgggcgtctatgtcttcaccgaccagccgcctcgtccgccgccgactggtgtcttcgcctatacggttggttggtcacaccgccgttgttgggcctctacgtcttcactgccggctcaccttcgccgccgccgactggtgtctccgcctgcacagctggcctattatgccgcctttgttgggggtctacgacttcaccgttggcccgtttcgccgtcgccgactggtgttctcgcctataaggacagtggactccgcctccgttgatgggcgtcatcatcatcttcaacgcaacctgtctacgtctgctgctgactggtttcttcacttccacggctgcatgattatgccagtgttgattggtcttatcgtcttcaccgctggtcgtctcgtctgcggctgaccagagccctcgcctctatggctggtttataccgctaccactattgatggacgtcatcatcttcattgctggtcgccttgtctgacgccgactggcttattcgtcatcattgactggcgtcatcgtaatcgctggtttgccttcgccgcagctcatggtgtcttcactttcacggctggcctattttgccgccactcaaggacgtcttccttttcatcattattctacttcttccgctgccgacttgttattatcttcacaactgcgcgtcttcactaccggtttgcttctgtcaccgccgactcgtgttcactttatcacggctgtgcaactttgtcaccatggtggagctacttcatcttcaatgtcttcagcaccggcaaactctattgccgctacttcgcaagttttgttacttcactagccatgacttctacaagagcttcgacatttcggcatgcatcactaaatatgatgccatgttattaccacaaatggtgttccagtattcaagatttctacccggacatcctcaatacatatcttcactcaagtgatggctac

SEQ ID NO: 90831 - DNA, 336 bp, Oryza sativa
  Clone ID: PAT_MRT4530_89463C.1
atggcttggcccatcaatctggtgaatccccctgcggggacgcaacggcccgctgggcttcctcatggtggggtttggtgccttggcgaaacttatgccttcgggccgaggctttcgcctcaccgactccgcgtgtgtggcctcctgacggggtccttgtccagcgaagcacgtgtactcccgagctgtggtcttcgcccttggggtattcctcttcgaccttcgtcgcttgcctccggttcgagcctatcgcccaagttttcggtttcggcaggcccggccgaaggcccttcgtggtatacctccaacaagcccctcacaggcaaggatgagtag

SEQ ID NO: 90832 - DNA, 519 bp, Oryza sativa
  Clone ID: PAT_MRT4530_89464C.1
atggactcgtgcctcatggccaagacaaggggtccgtccctcgtcttgtttgcgtggccgatgtgcgccaggcttgcgtggttagttgggtggaacgggtcgcgttttggttctgttgtcgtccgtctccgaggatttggttcacatcgtaccgactaccgcgtctcgcggtttggggactgggcctggattacagccaaatgggccgcccgggccggcacgacagggcccgggacgaggtcatttgggctgccgggcctgccaaaaccgaaaacttgggcgacgggctcgaaccggaggcaagcgacgaaggtcgaagaggaataccccaagggcgaacaccacagctcgggagtacacgtgcttcgctggacaaggaccccgtcaggaggccacacaggcggagtcggtgaggcgaaagcctcagcccgaaggcataggtttcgccaaggcaccaaaccccaccatgaggaagcccagcgggccgttgcgtccccgcagggagattcgccagattga

SEQ ID NO: 90833 - DNA, 3634 bp, Oryza sativa
  Clone ID: PAT_MRT4530_89465C.1
acgacttcaccgccggcctgcctccgtcgccgccgagtggatcctccgcctacacggctggcctattatgccgccgctgttgggcgtctactacttcaccgccggcctgcctccgtcgccgccgagtggtgcctccgcctacacggctggcctattatgccgccgctgttgggcgtctacgacttcaccgccggcctgcctccgttgccgccgagtggtgtctccgcctacacggctggcctattatgccgccgctgttgggcgtctacgacttcaccgccggcttgcctccgttgccgccgagtggtgcctccgcctacacggctggcctattatgccgccgctgttgggcgtctacgacttcaccgaccggcttgcctgcgttgccgccgagtggtgcctccgcctacacggctggcctattatgccgccgctgttgggcgtctacgacttcaccgccggcttgcctccgttgccgccgagtggatcctccgcctacacggctggcctattatgccgccgctgttgggcgtctacgtcttcaccaccggcctgcctccgtcgccgccgattggtgtcctcgcccatacggttggttggtcacaccaccgttcatgggcgtccacgtcttcaccaccggcctgcctccgtcgccgccgattggtgtctccgcctacacggctggcctattatgccgccgctgttgggcgtctacgacttcaccgccggcctgcctccgtcgccgccgactggtgcctccgcctgcacggctggcctattatgccgccgctgttgggcgtctacgacttcaccgccggcctgcctccgtcgccgccgattggtgcctccgcctacacggctggcctattatgccgccgctattgggcgtctacgacttcaccaccggcctgcctccgtcgccgccgattggtgcctccgcctacacggctggcctattatgccgccgctgttgggcgtctacgtcttcaccgaccggccgcctcgtccgccgccgactggtgtttccgcctgcacggctggcctttatgccgccgttgttgggcgcctacgtcttcaccgaccggcttgccttcgccgccgccgactggtgtttccgcctgcacggctggcctttatgccgccgttgttgggcgtctacgtcttcaccgaccggcttgccttcgccgccgccgactggtgtttccgcctgcacggctggcctttatgccgccgttgttgggcgtctacgtcttcaccgaccggccgcctcgtccgccgccgactggtgcttccgcctgcacggctggcctttatgccgccgttgttgggcgtctacgtcttcaccgaccggcttgccttcgccgccgccgattggtgcctccgcctacacggctggcctattatgccggcgctgttgggcgtctacgacttcaccgtcggcttgcctccgtcgccgccgattggtgcctccgcctacacggctggcctattatgccgccgctgttgagcgtctacgacttcaccgccggcctgcctccgtcgccgccgactggtgtctccgcctacacggctggcctattatgccgccgctgttgggcgtcttcgctttcaccgtcgaccgccttcgtcgccgccgactggtgtcttcattgttattgatggacgactttgttcccacattggccacttctgccatcaccaaggggaatattacaaagctaagatccagatccagatatgcataaaagggattcatggctttaagcttatctcttacgctctaggaatggatcagtcagaacatcaccaccggcctcctcgtccgccgccgactggtgttttcgcctgcacggttggcctattatgccgccgttgttgggcgtctacgtcttcaccgaccggcttgccttcgccgccgccgactggtgtttccgcctgcacggctggcctattatgccgccgttgttgggcgtctacgtcttcaccgaccggccgcctcgtccgccgccgactggtgtttccgcctgcacggctggcctatatgccgccgttgttgggcctctacgtcttcaccgaccggccgcctcgtccgccgccgactggtgtttccgcctgcacggctggcctattatgccgccgttgttgggcgtctacgtcttcaccgaccggcttgcctttgccgccgccgactggtgtttccgccagcacggctggcctattatgccgccgttgttgggcgtctacgtcttcaccgaccggccgcctcgtccgccgccgactggtgtttccgcctgcacggctggcctattatgccgccgttgttgggcgtctacgtcttcaccgaccggccgcctcgtccgccgccgactggtgtttccgcctgcacggctggcctattatgccgccgttgttgggcgtctacgtcttcaccgaccggcttgccttcgccgccgccgactggtgtttccgcctgcacggctggcctattatgccgccgttgttgggcgtctacgtcttcaccgaccggccgcctcgtccgccgccgactggtgttttcgcctgcacggctggcctttatgccgctgttgttgggcgtctacgtcttcaccgaccggcttgcctttgccgccgccgactggtgtttccgcctgcacggctggcctttatgaccgctgttgttgggcgtccacgtcttcaccgaccggcttgccttcgccgccgccaactggtgtttccgccagcacggctggcctattatgccgccgttgttgggcctctacgtcttcaccgaccggccgcctcgtccgccgccgactggtgtttccgcctgcacggctggcctattatgccgccgttgttgggcgtctacgtcttcaccgaccggcttgccttcgccgccgccgactggtgtttccgccagcacggctggcctattatgccgccgttgttgggcgtctacgtcttcaccgaccggccgcctcgtccgccgccgactggtgtttccgcctgcacggctggcctattatgccgccgttgttgggcgtctacgtcttcaccgaccggccgcctcgtccgccgccgactggtgtttccgcctgcacggctggcctattatgccgccgttgttgggcgtctacgtcttcaccgaccggcttgccttcgccgcctccgactggtgtttccgcctgcacggctggcctattatgaccggccgcctcgtccgccgccgactgctaccactactgatggacatcatcgttttctgccgccgactcgtgttatgccgccgtcgactggtgcttttatcttcacaactgcgcgtcttcactaccagttcacttcatcacggcgatgcaactttgtcatcatggtagagcgacttcatatttattatcttcggcaccggcaaactctattgctgctacttcgcaagttttgctacttcaccaaccacgacgtctttgtgaacctcaacatcttggcatgcaatgtcgtgttattttactacaacaagtggctctccaacattcatgatttctacttggacatcttcaacacatatcttcaatcaagcaatgactattcgacgacaagaagctacagttctcgactctatgttcagttgtttcccaac

SEQ ID NO: 90834 - DNA, 189 bp, Oryza sativa
  Clone ID: PAT_MRT4530_89466C.1
atgacgtgtagtgtaccaataatggttgttggcgagagtaaacagcgccatggtgacgggcagaggctagcgcggtgtagctctggctgggacagcaaggacgaagacgtcgctgcagccgcctgcagagagaacaacgctggcaccggttcactggagcagtccggtatgggttctggagcgcaataa

SEQ ID NO: 90835 - DNA, 441 bp, Oryza sativa
  Clone ID: PAT_MRT4530_89467C.1
atgtcgaacgcagctcatcgaaaggcccgggccatctccatgtcgaacgtagctcatcgaaaagcccgggccacctcgcctggagtgttcgattccaccaacctagaacgccgatcgcgtctagcttcaatcaaccccgagcatgaggccttacatctccctgttgaaagtagctcaccggaaagttcgagccacccgcccgaagacaatggagcggtggagatggaggacggcgcggtggagggagacgccggcagtgggtcacgtggaggcagcgtcggacgcggttgccatgattcggcaatatccgcccgcacgaagatggtggacggtgatgcggtggcgaaggggaagagtggagaagcggccaacggcgaccccgcctctccggcatatcatgccagcgtcgcgagcgcacgaggaggcggcgacaaagggtag

SEQ ID NO: 90836 - DNA, 1777 bp, Oryza sativa
  Clone ID: PAT_MRT4530_89468C.1
tattatgccgccgctgttgggcctttatacaatttcaccgccggcttgcttccgtcgccgccgactggtgcctccgcctacacggctggcctattatgccgccgctgttgggcgtctacgacttcaccgccggcctgcctccgtcgccgcgactggtgtcctcgcctatacggttggttggtcacaccaccgttcatgggcgtccacgtcttcgccgaccggctggccttcgccgccgccgactggtgtttctgcctacacggctagcctattatgccgctgctgttgggcgtctacgacttcaccgccggcctgcctccgtcgccgccgactggtgtcctcgcctatacggttggttggtcacaccaccgttcatgggcgtccacgtcttcgccgaccggctggccttcgccgccgccgactggtgtttttgcctatacggttggcagacttcgccgccgttaatgggcttcatcatctacaccactggcttggttccactggcgccgactgatactactcatcctatatgtttgttctgcaggatccagatccagatatgcataaaagggattcatggctttaagcttatctcttacgctccaggaatggatcagtcagaacatcaccaccggctcgcctcgaccgccgccgactggtgtttccgcctgcacggctggcctattatgccgccgttgttgggcgtctacgtcttcaccgaccggcttgccttcgccgccgccgactggtgttttcgcctgcacggctggcctattatgccaccgttgttgggcgtctacgtcttcaccgaccggcttgccttcgccgctgccgactggtgtttccgcctgtacggctggcctttatgccgccgttgttgggcgtctacgtcttcaccgaccggccgcctcgtccgccgccgactggtgcttccgcctgcacggctggcctattatgccgccgttgttgggcgtctacgtcttcaccgaccggcttgccttcgccgccgccgactggtgtttccgcctgcacggctggcctttatgccgccgttgttgggcgtctacgtcttcaccgatcggcttgccttcgccgccgccgactggtgtttccgcctgcacggctggcctattatgccgccgttgttgggcgtctacgtcttcaccgaccggcttgccttcgccgccgccgactggtgtttccgcctgcacggctggcctttatgccgccgttgttgggcgtctacgtcttcaccgaccggcttgccttcgccgctgccgactggtgtttccgcctgcacggctggcctttatgccgccgttgttgggcgtctacgtcttcaccgaccggccgcctcgtccgccgccgactggtgcttccgcctgcacggctggcctattatgccgccgttgttgggcgtctacgtcttcaccgaccagcttgccttcgccgccgccgactggtgcttccgcctgcacggctggcctattatgccgccgttgttgggcgtcttcgccgctgtcgactggtgtttccgcgtcttcaccgaccggcttgccttcgccgccgccgactggtgcttccgcgtcttcaccgaccggccgccgcatccgccgctgactggtatcaccgcctgcacggctggcctgttataacgccaactgatgctatcttcttcacggctggctacatcgctgtcactactaataggcatcagtatcttcaacacaagctgcctacgtttgccatggctgccgactggtttcttcacttccat

SEQ ID NO: 90837 - DNA, 3299 bp, Oryza sativa
  Clone ID: PAT_MRT4530_89469C.1
atggcgtcataccgaaagaacatcgagttagcagcatctcagctttccggtcaatcggccgcgagtccactccgccggcttgtcctcgccaccgccattgctgatatcaacaacgacttcaccgccggcttgcctccatcgccgccgactggtgtctccgcctacacggctggcctattatgccgccgttgttgggcgtctacgacttcaccgccggcccgcctccgtcgccgccgagtggtgcctccgcctacacggctggcctattatgccgccgctgttgggcgtctacgacttcaccgccggcttgccaccgtcacggccgactggtgtctccgcctacacggctggcctattatgccgccgctgttgggcgtctacgacttcaccgccggcctgcctccgtcgccgccgagtggtgcctccgcctacacggctggcctattatgccgccgctgttgggcgtctacgacttcaccgccggcctgcctccgtcgccgccgagtggtgcctccgcctacacggctggcctattatgccgccgctgttgggcgtctacgacttcaccgccggcctgcctccgtcgccgccgagtggtgcctccgcctacacggctggcctattatgccgccgctgttgggcgtctacgacttcaccgccggcctgcctccgtcgccgccgagtggtgcctccgcctacacggctggcctattatgccgccgctgttgggcgtctacgacttcaccgccggcccgcctccgtcgccgccgagtggtgcctccgcctacacggctggcctattatgccgccgctgttgggcgtctacgacttcaccgccggcctgcctccgtcgccgccgactggtgcctccgcctacacggctggcctattatgccgccgctgttgggcgtatacgacctcaccgccggcctgcctccgtcgccgccgactggtgtcctcgcctatacggctggttggtcataccaccgttcatgggcgtccacgtcttcgccgaccggctggccttcgccgccgccgactggtgtttctgcctacacggctagcctattatgccgccactgttgggcgtctacgacttcaccgccggcctgccttcgtcgccgccgactggtgtcctcgcctatacggttgattggtcacaccaccgttcatgggcgtccacgtcttcaccgaccggcttgtcttcgccgccgccgattggtatctccgcctacagggctggcctattatgccgccattagtgggcatcttcgctttcaccgtcgacagccttcgtcgccgccgactggtgtcttcattattattaatggacgactttgttcccacattggccacctctgccatcaccgaggggaatattacaaagctaagtcatcatttattttattctttatatgatatttttgtcttttccttcgcctcactacatcaactggttcgccgttgactagtgagtcgggggctacagatgttatatcatatttttcataatatttatcttgattgcttgcgacataatctgagtacaaaagtacctatcgagttatggagttctatcttcctatgcacccgggggctcgttggatggactgagtaacgcaaggttctaagtattattcagaataaatcaaaagcatagagataagataaatttattttctgctctttacaatctgagtacaaaagtacctatcgagttatggagttctatcttcctatgctttccgtttggtttgccaatggatggttgcctttgggccgattcctagcacccgggggctcgttggatggactgagtaacgcaaggttctaagtattattcagaataaatcaaaagcatagagataagataaatttattttctgctctttacaattgcaaaagtacccgagtagtaaattctgattcgtgaaactttattccattaatgacaaactcatgtcactcatatgtatgtttgggaagtgcctaggccgactcccgatgcttgggggctatgactagtcggacagacttgccgtcatcgccgccgactggtgtcttcgcctatacggttgtttggtcacaccaccgttgttgggcgtctacgacttcaccgaccggccgcctcgtccgccgccgactggtgtttccgcctgcacggctggtctattatgccgccgttgttgggtgtctacgtcttcaccgaccggccgcctcgcccgccgccaactggtgtttccgcctgcacggctggcctattatgccgccgttgttgggcgtctacgtcttcaccgaccggccgcctcgcccgccgccgactggtgtttccgcctgcacggctggcctattatgccgccgttgttgggcgtctacgtcttcaccgaccggccgcctcgcccgccgccgactggtgtttccgcctgcacggctggcctattatgccgccgttgttgggcgtctacgtcttcaccgaccggccgcctcgtccgccaccgactagtgtcaccgcctgcacggctggcctgttatgacgccaactgatgctatcttcttcacggtgccctcacctctacgtctggtttagacagctaccactactgatgaacatcatcgtcttccgtcgccgactggttatgctgtcgccgactggtgcttttatcttcacaactgcgcgtcttcaccaccggtttgcttctgttaccgccgacttgtgttcacttcattacagcaatacaactttgtcatcatggtggagcgacttcatctttattatcttcggcaccggcaaactctattggtgctacttcgcaagttttgctacttcaccaaccacgacgtctttgtgaacctcgacatctcggcatgcgatgccgtgttattttactacaacaagtggctcttcaatattcaggatttctacttggacatcttcaacacatatcttcaatcaagcaatgactattcgacgacaagaagctacagtctcgactctatgttcagttgtttcccaactaatcaaagaacattctacttcaacaacatcaaatattttgatttagacgagttggacaacagcatcaactctcctccaatatttcaccttcacggttgacctactatgcaaatgttgatgagcgtctttgtcattatcattggttgctacactgctattgactggatcaccgacatcgttatcttcatcatgtcggttgcgtttgtcgtcgtcaactattttcttcatcttcatgattgatggatttcgtcatcgcctttgatcttcattgttagttgatctg

SEQ ID NO: 90838 - DNA, 2529 bp, Oryza sativa
  Clone ID: PAT_MRT4530_8946C.1
atggtgtcttcaatcctcgggaacggacgcgccaagtccggccaccaaccattgccgccggccgccattcccgtcgacgttcccgctcctcccgtggccggctctctcccccatcctataaaatgggatcctcatccttcgttctatcgttttagccccttcccgagcctccccgtggtcgtatcacctctccccgccttctccttctccctctccgacgccggccggcctccagccacctctccctcctcaccggagcatcgtccggccgtgccgtcgcctccctcggctctgcaacaccgtccccttcaccggccttaccgtctcctcgccggaaactcgccggaacggtgcccccgccggcaaccagtggcattggtgccactgtactccctccagccggctgctgttcatcgccggtgcgccgatcgacgccgccgtctcctccttcgacaccgcggcatcgccttcttccccggcatcacctcctcctcgcccgaatttcgccggaacgccgtcgcccgcgccggcctcaccttcctcctcgtcgacatctcctccggctgccccggtcgccgcgccagagcgtcggccgacgtcgccgtctcctccctcggcgacgccgcatcgccctccaccccggcctgccctcggtttcgccggaacgtcgccgcgaacctctccgtccgcctcgccggagttgttcggccgcccgtccctcctcgccgtgtaccggtcggccacctccaccaccatcttcggcatcgcagtcgcgacgtcgtcctcggcctcgcctccccttcgaccgaaccccgccgcggcgtggtcctcgtcgtcctcgtccccgtgcagccgctgccggctgtcctcgtcgcctcctcgccggtcccggtcgtcgtcgtcgtcgtcgtcctctcgtcgttcccggtcgtcgtggcccccgtcctcgtgttcgtcctcggctccgcgtcgtcaagcctcgtgccggccgcagctcgccttcgcccaaggatcgccgccgaagccgtcccctcgccgttcgtctccgttgtgcccgtctgtctccgccgcgcccgttcgtcgttgtcgttcccacgcctcgtcgcgtggtgggcaaatgaaggctacacgagctgcggcccggtagtcgagatgtcatacggcggagggttggtgcccaatgctaggggctcagttctgcctgcctgtcccgggtatcccggccgtagtgaagccagatgtgaagcaggagtgaagatcttcgagaacccgtcgcagaacctaagccaccctctaaattggaacaacccagcaggggcaaccaacgttcaagtgcctacagtccagcaacagtgcaagttatcagaatttctcaaaactgagcctccaacctttgccattgccgtcgatcctatggaagccagtgagtggttgcgcaccatcgagaagaagctagggttgattcagtgcaccgaccaggagcgggttggcttcgcaactcatcagctggttggaccggcttcagagtggtgggataactacgaagcatcacagccagaaggacataccaccacctggaacgagttttcatctgtattcaggagatcacatgttccctcgggaatgatcacactaagaaaacgagagtttcgctacctgaagcaaggagatttgaccgtcgcagagtacctgcacgggttctatcgtttggctcactatgcaccagaagatgtggaaacgggcgaagacaaacaagagaagtttctccaggggttaaaagatgagctcgcagtgcaactacttctagaggattatgaagattttgagaaacttgtggacaaagccatgcaactcgaaagtgagcataatcggatgacgaattgcaagagaaggatggttaacaacccagtatttccaggtggtaaccaaagacagcgcactgagccacttcagatcaccggatcttctgttgtgtatccagagttcctgccccaagaagatgaacgcaatgcagacaacaacaatagcaatactaatgctgatgataccaccaacaaccatggttcttgccccattcatgaccacttagatcaagcgtacaatgtcaacatcattcaccaagatatcgacgatagtatcaatgaaggcacccagaatgacaaccttagcaatttcgacactgagaaagactccaatggtgatagcaataatggcaccactgatgccgatgttagcaaggatttccaaccaccaattccaactcctaatcagaacgatcgttcccagacggacaactcagcaaagaagacgttgatttgttacaactgcaaagaaccaggtcatttctctagagattgtccacagccgaagcgtaacctgcgccatcactccggccattatgcaagaagaagacagctttcggcaaaacacttcaaggtttcactgaaaggcagcaagccaaaggacctcatcgtcaccagaagcatccacaactctcggagtgaagagtacctggtggacaaagtttaa

SEQ ID NO: 90839 - DNA, 774 bp, Oryza sativa
  Clone ID: PAT_MRT4530_89470C.1
ctaacttttcactaatctgccagtatacctctcaacagacttatttttccactccactgtagcacaaagctggtacgggcaaaccgatataaaattaacctgtggcccgacggagagtgacccatacttgaccatgcccgacccactatctatttctttctctgtgtggatgttcgatggtcggcacccactaccgaatcgcgtgcggctcgctgcctgtggcctgccagtgacgcgcctcctcccgctaacgcccacgacgcgcctcctcccgctgacgcccgcgacgcgcctcctcccgccgacgctgccgacctgcctcctcatgccgccacacctccacttgccgccgcacctccacctgccgccgacgacgctggcggccagcctccgcccgccgccgcccgtggcctgcctcctcccgccagccgcgcctccacccaccgctgccgacgcggctccgccctcctctagccaccgctgatgcccgtggccagcctcctcccgccgacgcgcctccgcccgacgcccgctgacggagagagctggtaaagggaggaaggatctgaggagagggggggatgtcacctcggagagggctgggaaggggaggaggctgggatcggagccaccgtcgccgccccacgcggcatcgtcttcgccccgcgcctcgttgacgctgccctccccgggcctccctccggccggatctgggaggggaggggaggggagccccgccgttgccgccgtcgccgccgccgccccgcgcgtcat

SEQ ID NO: 90840 - DNA, 4334 bp, Oryza sativa
  Clone ID: PAT_MRT4530_89471C.1
gtggatcccccctgttttcaccctctccctcatcgtcgtcgctgtactcggcccgctctatctagctagttccactagcgggaaggatggggtcgctagatctggaggcctaggcctccccgttggccgatgtgacagcggtactgggcagcagtggaggcgactgcaaccagcggtgttggaggcgacaacaactggcgacggactgcaagaggcgaaggctggagagcacgagcacctgttggagattggggttgcaaccaggaagttagatggggaggggagggaagatgatcgagggaaggcgattgatgctggtcatggactcgaggcgtctcagctttccggtcgatcggccgcgagtccactccaccggcttgtcctcgccaccgccattgctgatagcaacaacgtcttcaccgaccggctggccttcgccgccgccgactggtgtttccgcctgcacggctggtctattatgccgccgctgttgggcgtctacgacttcaccaccggcctgcctccgtcgccgccgactggtgtcctcgcctatacgtcggttggtcacaccaccgttgatgggcatcatcatctacaccgccggcctgcctccgtcgccgccgagtggtgcctccgcctacacggctggcctattatgccgccgctgttgggcgtctacgacttcaccgccggcctgcctccgtcgccgccgagtggtgcctccgcctacacggctggcctattatgccgccgctgtggggcgtctacgacttcaccgccggcctgcctccgtcgccgccgattggtgcctccgcctacacggctggcctattatgccgccgctgttgggcgtctacgacttcaccgccggcctgcctccgtcgccgccgactggtgtcttcgcctatacggttggttggtcacaccaccgttgttgggcgtctacgacttcaccgccggcctgcctccgtcgccaccgattggtgcctccgcctacacggctggcctattatgccaccgttgttgggcgtctacgacttcaccgccggcctgcctccgtcgccgccgactggtgcctccgcctacacggctggcctattatgccaccgttgttgggcgtctacgtcttcaccaccggcctgcctccgtcgtcgccgattggtgcctccgcctacacggctggcctattatgccgccgctgttgggcgtctacgacttcaccgccggcctgcctccgtcgccgccgattggtgcctccgcctacacggctggcctattatgccaccgttgttgggcgtctacgtcttcaccaccggcctgcctccgtcgccgccgattggtgcctccgcctacacggctggtctattatgccgccgctgttgggcgtctatgacttcaccgccggcctgcctctgtcgccgccgactggtgtccttgcctatacggttggttggtcacaccaccgttcatgggcgtccacgtcttcaccaccggcctgcctctgtcgccgccgattggtgcctccgcctgcacggctggcctttatgccgccgttgttgggcgtctacgtcttcaccgaccggcttgccttcgccgccgccgactggtgtttccgcctgcacggctggcctttatgccgccgttgttgggcgtctacgtcttcaccgaccggccgtccttcgccgccgccgactggtgtttccgcctgcacggctggcctttatgccgccgttgttgggcgtctacgtcttcaccgaccggcttgccttcgccgccgccgactgcttgccttcgccgccgccgactggtgcctccgcctacacggctggcctattatgccgccgctgttgggcgtctacgacttcaccgccggcctgcctccgtcgccgccgattggtgcctccgcctacacggctggcctttatgccgccgttgttgggcgtctacgtcttcaccgaccggcttgccttcgccgccgccgactggtgtttccgcctacacggctggcctattatgccgccgctgttgggcgtctacgacttcaccgccggcctgcctccgtcgccgccgattggtgcttccgcctacacggctggcctaatatgccgccgctgttgggcgtctatgacttcaccgccggcttgcctccgtcgccgccgattggtgcctccgcctacaaggctggcctattatgccgccgctgtttggcgtctacgacttcaccgccggcctgcctccgtcgccgccgattggtgcctccgcctacacggctggcctattatgccgccgctgttgggcgtctacgacttcaccgccggcctgcctccgtcgccaccgactggtgcctccgcctacacggctggcctattatgccgccgctgttgggcgtctacgacttcaccgccggcctgcctccgtcgccgccgactggtgcctccgcctacacggctggcctattatgccgccgctgttgggtgtctacgacttcaccgctggcctgcctctgccgccactgactggatccagatccagatatgcataaaagggattcatggctttaagcttatctcttacgctccaggaatggatcagtcagaacatcaccaccggctcgcctcggccgccgccgactggtgtttccgcctgcacggctggcctattatgccgccgttgttgggcgcctacgtcttcaccgaccggcttgccttcgtcgccgccgactggtgtcctcgcctgcacggctggcttattatgccgccgctgttgggcgcctacgtcttcaccgaccggctcgcctttgccgccgccgactgctggcctattatgccgccgttgttgggcgcctacgtcttcaccgaccggcttgccttcgtcgccgccggatggtgtccttgcctgcacggctggcctattatgccgccgttgttgggcgcctacgtcttcaccaaccggctcgccttcgtcgccgccgactggtgtcctcgcctgcacggctggcctattatgccgccgttgttgggcgcctacgtcttcaccgaccggcttgccttcgccgccgccgactggtgtcctcgcctgcacggctggcctattatgccgccgttgttgggcgcctacgtcttcaccgaccggcttgccttcgctgccgccgactggtgtcctcgcctgcacggctggcttattatgccgccgctgttgggcgcctacgtcttcaccgaccggctcgcctttgccgccgccgactggtgtttccgcctgcacggctggcctttatgccgccgttgttgggcgtctacgtcttcaccgaccggctcgccttcgccgccgccgactggtgtccacgcctgcacggctggcctattatgccgccgttgttgggcgcctacgtcttcaccgaccggctcgccttcgtcgccgccgactggtgtcctcgcctgcacggctggcctattatgccgccgttgttgggcgcctacgtcttcaccgaccggcttgccttcgccgccgccgactggtgtcctcgcctgcacggctggcctattatgccgccgttgttgggcacctacgtcttcaccgaccggcttgccttcgccgccgccgactggtgtttccgcctgcacggctggcctattatgccgccgttgttgggcgtctacgtcttcaccgaccggcttgccttcgccgccgccgactggtgtttccgcctgcacggctggcctattatgccgccgttgttgggcgtctacgtcttcaccgaccggccgcttcgaccgccgccgactggtgtttccgcctgcacggctggcctattatgctgccgttgttgggcgtctacgtcttcaccgaccggccaccgcatccgccgctgactggtgtcaccgcctgcacggctggcctgttataacgccaactgatgctatcttcttcacggctggctacatcgctgtcactactaataggcatcagtatcttcaacacaagctgcctacgtttgccatggctgccgactggtttcttcacttccatggctgctacatcgctattgactggatcaccgacatcgtcatcttcatcataggagttggtacaatgcatcttaaaaggtgtcaaacagtaaagctttatatagctgtcccgctgacttttttatatataagtcaaggtgctgtttgggtttttaagcaattgattagatacaatatcattgcttttcgccacccctccacagtcttcagatttggtaaaagtactcgggagaccatgacaaagatgattgaagcactcggctttggagtaatctggttcgagagaagattatcttttcgactgcgaag

SEQ ID NO: 90841 - DNA, 2252 bp, Oryza sativa
  Clone ID: PAT_MRT4530_89472C.1
tctttacatataaagtttgctttacaataatcgaccggtgttctcgccttcatgattggttggtcacaccaccgttgatgggcgtctacatctttaccgatcggccgcctcatctgccgccgactgctgtctccgtctgcacggttggcctattatgctgccgttgatgggcgtctacgtcttcaccaccggcttgcctttgccgccgccgactggtgtcttcgcctatacagttggttggtcacaccactgttcatgggcgtccacgtcttcaccgaccggcttgccttcgccgccgccgactagtgtctccgccaatacggccggcctattatgccactgttgttgggcatctacgacttcaccgctggcctgccttcgccaccgctgactggtgtctttgcctatacagttggttggtcacaccaccgttcatgggcgtccacatcttcaccgaccggcttgccttcaccgccgccgactggtgtttctgccaacacggccggcctattatgctgccattgttgggcgtctacgacttcaccgccggcctgtcttcgtcgccgccgactggtgtcctcgcctatacggttggttggtcacaccaccgttcatgggcgtacacgtcttcaccgtcagcttgccttcgccgccgccgactggtgtcctcgcctatacggttggttggtcacaccatcgttgatgggcgtcttcgctttcaccgaccggcttgcttccgccgccgactggtgttttcgcctatacggttggcggactccgccgccgttgatgggcctcgtcatctacaccgaccggcttgccgtcgtcgtcgccaactggtgtcctcgcctatatggttgggtggtcacactaccgttgttgggcgttgttgtcttcaccgatcggccgcctcgtccgccgccaactggtgtcttcgcctatacggttggttggtcacaccaccgttgttgggcgtctacgtcttcaccgatcggcttgccttcgccgccgccaactggtgtctccgcctgcacagctggcctattatgccgccgtttgttgggcgtctacgtcttcaccgacagacttgccttcaccgcagccgactggtgtctccgcctgcacggctggcctattatgccattgtttgttgggcgcctatgtcttcaccgaccggcttgccttcgccgttgctgactggtgtctccgcctgcacggctggcctattatgccgccgttgttgggcgtctatgtcttcaccgaccgaccgcctcatccgccaccgactggtgtcttcgcctatacggttggttggtcacaccgccgttgttgggcgtctacgtcttcaccgtcggctcgccttcgccgccgccgactggtgtctctgcctacatggctggcctattatgccgccgttgttgggcatctatgacttcaccgttggcccgtttcgccgccgccgactggtgttctcgcctataaggacggtggactccgcctccgttgatgggcgtcatcatcatcttcaacgcaagctgtctacgtctgctgccgactggtttcttcacttccacggctgcatgattatgccagtgttgattggccttatcatcttcaccgtcggttgtctcgtctgctgctgaccagagccatcgcctctacggctagtttataccactaccactactgatggatgtcatcatcttcattgctggccgccttgtctgacgccgactggcttgttcgtcatcattgactggcgtcatcgtcatcgttggtttgccttcgccgcagctcatggtgtcttaactttcacggctggcctattttgccgccactcaaggacgtcttccttttcatcattattctacttcttccgccgccgacttgttattatcttcacaactgcgcgtctttgctaccggtttgcttctgtcatcgactcatgttcacttcatcatggctgtgcaactttgtcaccatggtggagctacttcatcttcattgtcttcagcaccggcaaactctattgccgctacttcgcaagttttgctacttcaccagccatgacttctacaagagctttgacatctcggtatgcgtcgccaaatatgatgccatgttattataacaagtggtgttctagtaaagatttctacccggacatcctcaatacatatcttcactcaagtgatggctactcgacgacaataaactacagttctcgactctatgttcagttgctttccaac

SEQ ID NO: 90842 - DNA, 183 bp, Oryza sativa
  Clone ID: PAT_MRT4530_89473C.1
aaaacaaacaggctgttgatgcttttgcttcaaaaaaggaacatggcccaacgacagggcaacagcaaccccaatttgcttgaccagaaatcaaaacaaaacttgcccggattcattgcagcttgagcttatcaaaaatgcctaatcaatcactagttaaatatacaagtgttcctcgggcca

SEQ ID NO: 90843 - DNA, 216 bp, Oryza sativa
  unsure (1)..(216): unsure at all n locations
  Clone ID: PAT_MRT4530_89474C.1
tgtattactcctcaacacacataacacatcctccgccttcttttaattcctatcccccgtttccacacaccctcttcntatcacccatcaatccctcccaccttcttcactcaataccccctctcctacatccacactcaaactccactatcccaacccctccctaaaagaattagaaccccccttactatcaacaccacccacatctccttcctt

SEQ ID NO: 90844 - DNA, 468 bp, Oryza sativa
  Clone ID: PAT_MRT4530_89475C.1
atgggcgtgaggcgggagaggagatccgaccgacgattcgttgacgggcaaggccgacgctggcgctgctcgagctcctccgccgccgtccagcctgccaactccccgcaccgtggctgctgctcccgcgcctgccaccgctcccgctccctcctcatctccacggccgacgacctccttagcctcctcgacgacaacgacaacgacaaccctttccctgccgctgctacgttgtcggcaatattaggggaagataaggtctccttgggctcatatcctgttttatctctccgagttttacttggagaagaagcgcaggctggtggcggcttctccatccttccatcttccttgtcttcaacagctcccccagaaaggaatgagaaagtggaagtcgaaccggcggacggtggccacggcgtcgatgggagggcgatcaaggcggtgagggtgctgttggagacatga

SEQ ID NO: 90845 - DNA, 244 bp, Oryza sativa
  unsure (1)..(244): unsure at all n locations
  Clone ID: PAT_MRT4530_89476C.1
cccacgcgtnatgttacgcgaacgaacacgatttcacccacaccgtgggacacagagatcgataatcagttgaacacgcgcccatacttaccaaagttttagcgacctagacgtacacttttttattggtccaaccccaagagctaagccttgctggacgaaacaaaaaatacgccatatcacatgatcacgccatgacctggtgttccaggccgcgcacaatgttaatatgcatccaaccgac

SEQ ID NO: 90846 - DNA, 415 bp, Oryza sativa
  Clone ID: PAT_MRT4530_89477C.1
aaggcaggagggcccttcacaggcggacaaaaaaaaaaatccacccaattgggacaggggggcacaaaaaaacccaacccaaaaggggggacttggccccccgacttaagttgacaaacaaaagttcaaaaaaggccaaaaggggcatcacaaaccccgggcacaacaggaaccacccaacatcggtatcaaccccaacgggggcaacctcaccctccccccaaaaatccacagccgggggggcccctatctcatccccaaacgattcaccatttttaggagggggattttgcttcaaaaggcgaccaacttcaaaagcataaacaaccgggggagcttcaaattttgggtcaaagggcgggcaaaaaaaatctcacccccccgggggcccccccccatcttccccaaaggcccg

SEQ ID NO: 90847 - DNA, 348 bp, Oryza sativa
  Clone ID: PAT_MRT4530_89478C.1
ggaacaatttcggcaccattagtttgaactatgtgagctgcagtgcttgaataaattatgttgagctgatatttatttgcctttgttgattgcccttattttgtacaaggagctaactttttgtggtttgctaacttaatttacaattgcattgcactaatatgttgcctattttaatcactgttttttttgcagtactttaataatgtgaactaacctttcgatttctacctacttagaatcattttgtcattgcagcacataggcttctaacttaaccatgatttactttgtcatgtattgatataggaacatgagcacttattaaagatcctatggttctaagga

SEQ ID NO: 90848 - DNA, 523 bp, Oryza sativa
  Clone ID: PAT_MRT4530_89479C.1
cgcccggcccgtaccggaacggccgggccgggctatgctttctgtgattttagagagattcacaatctctggatggggatctgtgcatcttcagagcatctggagcatgttcatgagacagatgagagcattgtgtatgtgaaggatgagcaaggaaggggtgatagggagatgaagagtggggctaggaaggtggacttcctcttctcccagaggggcaagaaaggccctaaccaggactctgtcatcctctgccaggtaccatcttcagatatttactctctgtctctgaatctttgctatgtgtttgatgtgctcagctcagatcaatctgctcaatttctcctcttgatgaggctgcgcacgccaattgtttggttttgtactcaaaagggttcagattagttcagggcttcagggtgttcttgagtccatgatttgagcttccatgagcttattaagccagcagttagttcactaaccttttttttttttgaaggaagagttagtagagtacttggta

SEQ ID NO: 90849 - DNA, 270 bp, Oryza sativa
  Clone ID: PAT_MRT4530_8947C.1
atggcgcgggcgatagctgccaggctcggctcggcttcaagccagccggccggctatcgcgagggcggcggcgcgcgaccgccggcgacggcaagcggcggcggacagagggaggagagggggtttctcaccgtggggtcggccagcgggggaaagatgacggcgaacgacggcggcgagcggcgaacgacgaggtgggtgggtggatgtggaggccctcgaccccgcgaggccaacggcggctatggagtggcgcggcggtggaactag

SEQ ID NO: 90850 - DNA, 484 bp, Oryza sativa
  unsure (1)..(484): unsure at all n locations
  Clone ID: PAT_MRT4530_89480C.1
acctagacttgcttctttacactactgtgtggataatcaggaaagttcgagcgatacaccatcaagatctttgccatggttgccttaatcgctctttgtgcaagttgccactactgcaatcaccatctatacactatcacctaccaacattgaaccatgggccaccatgggatccgtctcggcagtacatgatgcaaacgttcagcctgggtagccacacagccttgttcatgcagcacccaatggcgctccttcagcagcaatgttgcatgcagctacaacgcatgatgccttattgtcactgtggctccagttgccaaattangcatagcatgcaacaagatatttgtgctgtactctgtcagcagcagatgatgaagatggcgattctatttccttacatgtgcaacatggcccctgttttcttccaactctctgcctgtgggtgnngctgagcaaacgttggtttacattttctctagta

SEQ ID NO: 90851 - DNA, 342 bp, Oryza sativa
  Clone ID: PAT_MRT4530_89481C.1
atgaagctgatccccaccggcgcgctcgggcttgcggcggcggcgtttgacgaaacggtggcggcgtctgcgggtccgtcggtggcgctgagggggcggtggcagcgtaaagctgactccccgccggcacccgctcgtggagacgctggagagcagatgattcactcacggatgacgggggaaatcgaccagtgcggcggcgagatcgaggcggagatcgagcgggccaaggaggtcgtcgccaacaagggcagggcgctcgacgacgaccgcgagaggttccagaaggccgccgtcgccgcgctcaacatcctcagcggcggcgccgccggcagcatctga

SEQ ID NO: 90852 - DNA, 156 bp, Oryza sativa
  Clone ID: PAT_MRT4530_89482C.1
cttgtatgctgtatttgagctgagctgagagggaagagagatctctacctacctaattagacaagcatcgcctagtgatcacagatggctgcttgtgtgtgtgtgtctgcgtgtgcccagcaggagtgaagcatccaatttcagctatgacaagag

SEQ ID NO: 90853 - DNA, 672 bp, Oryza sativa
  unsure (1)..(672): unsure at all n locations
  Clone ID: PAT_MRT4530_89483C.1
gggggcaaagcactcattcattttcaatatcgatcgtttaaattaattgttcgtcacacatacaccatcttgttcagtaatgatggctcacattgtccgtaatccctgcttaactacatattgactccctcattttatactcaacaatacacaccagactcccacactccattttcacagtgactttatttagcgcaccgcaagctgcaccagcacactcctcatgccaaggagaagcaaataagataattgctccaatgctgccttcctcgagcaatcaggggaatggcttagtgcgctcgccgggtgccaagtgccaaatggccttagaagactataatttttgtgcagctcctggtctgttcacagccgggagatgagcagtgggactgagacagtggcggtctgctcccccattgcagggtggcacatctccagcatgtccagctccctgaaccgctcaagaaccctcattcggcactcctcagctgccatcagaccagtggagaaggcgccatgcaccgtgccagtgtactggacactggtggcttctccagcaaagaataggttatcgactgggatccgcagcttctcatacaggtcacgaggtttgcccaccccatcgaaagtgtangatccaagtgtattctcgtctgagccccatgtgacact

SEQ ID NO: 90854 - DNA, 1142 bp, Oryza sativa
  Clone ID: PAT_MRT4530_89484C.1
ctccttcccaccatcttccgctgccactttcgccgtcgtcgtcggcgccagccaccgcccttctccccaaccaaccacgcgcttcccctctccgcttccacctcctctcgggttccctcccgtcgatgccaccgcgccattcctcttcttctcctcactcgccctgcggctgaagcaatggagctcccgtgcccgaggctgctgctgcttcttcgtcttcttgtgttcttggttgcggtttcttggccgctctgcggcgcagggactgaaggcctcggagttggagaggaggggttgagcagcattggtgcttcttctggttctaggaacgttagaagacttctgcagactggtggagtaaaccaaggtgcaccagctcctctaccacttgaacaatctccatcagcatcaggaccgggtgtcttctccatcaccctcgccatgggtatccccaccgaaaggctcaccatcaccatcaccatcttcaaaaatcatagcacacagatctccacaccatccattcacaacccctccacaattggttaggcctaagcctacaactcggcgagctgagcacgatcattcagttgaaactacaggtcgctcttggtttaaacgttcctggacaacttatggttttatcacagcagggattgctgctctccttatcatatcagcagctggtgcattctactgccgagctaaaaagatggggactgtgaggccatgggcaacgggacttagcgggcaattgcaaaaggcttttgtaaccggtgtgcctgcattgaaacgatcagagctggaaacagcgtgcgaggattttagcaatataattggttgtacatctacctgtacactgtacaagggaactttatctagtggagttgaaatagcagtggcatcaagtttggtaacgtctgcagacgattggtcaaaagaatgtgaatctcggtacaggagaaagatcacaagtttgtccaaagtaagccacaagaactttatgaacttgcttggctattgtgaggaagagcaaccttttaccagagtgatggtgtttgaatatgctccaaatggaacactttcttgagtatctgcatgttagagaagccgagaagctggattggatgacgcggctcaggata

SEQ ID NO: 90855 - DNA, 532 bp, Oryza sativa
  Clone ID: PAT_MRT4530_89485C.1
tcggttggtgttgctgcatctgctgcatataaaaaatgggagagagctgccatggctggtgtttctttggttgctgatgcagctgaagagcttgagcgcaacacagtgaacgctgatgcaagaatgttatctccatcatcaagcaatgcctgcacagttgatggtcttggcacaaatcatataaaggaagcagatcaacaagcacctgcaaagctaaagttgcagctatttccaataaatgaagctacacgaaaggcattagagaaggatgaacataatccacatctggaactcacattaagtgctaggaaaaaaatatcatcagtactagaacatttgaaccgcaagtggggcaactcaaacattgcatctggagagcttttgctttttccatattgtgctcatcaagaagatttagctacatatcagaggtggaccacaaaagatactgtcgcagtggctgacgttttcctttctgtgaatagcccatctgtttttcgattaaggtatggttggttttcccttgctgagc

SEQ ID NO: 90856 - DNA, 239 bp, Oryza sativa
  Clone ID: PAT_MRT4530_89486C.1
atggacagcggtactggcagggctgagaaaacaacaacgggatcagggagcaacaagggaggcacacttgtgagccgatgggataaatcagctgaaggttcaaggaaggttttgggaggaaagaaggaagcatggcaaaacaaggctggggatttaggagcatcggtgactcgaaaggaaggaagagggaaaaatgtggtaggagaagttgtcagcgagggtgatgcaaaggatcagga

SEQ ID NO: 90857 - DNA, 468 bp, Oryza sativa
  Clone ID: PAT_MRT4530_89487C.1
atggcgacgggaggtggcgacgagcttggagacgctggcggagacaatggcgacgacgacgatgcgaacctgacgatgacgacgacgacggtgcgggtggcgatagccgcgtcggcgggaggcggcagcggagcctatagccggcgggaggcggccgccggcgggaagaggcggcggtggcacagtggaaagaagtttgatgacatgatcgagaaggagctgtcaagacgatccgtaaagtgcagcgacgcagatggcgttgcgattggcgaagaagatagcattgtgattagcagcgaagatcgctcgcccgtccaccatcatccctggcgagccttccccagcaacgtcatcatcatcaccgcggcgtggccatgcatcatgacggcagtggcgcttggcaacaaggctagtggcaatgagctcctcgtcgtgatgttgcaggggatcggcgattgcctaaagtag

SEQ ID NO: 90858 - DNA, 378 bp, Oryza sativa
  Clone ID: PAT_MRT4530_89488C.1
atggtggcgaagtccgccaaccgtataggcgaaaacaccagtcagcggcggcagaggcaggccggcgatgaagtcgtaaacgcccaacagcggcggcataataggccagccgtgcaggcggaaacaccagtcggcggcggcgaaggccagccggtcggtgaagacgtagacgcccatgtacggtggcggaaacaccagtcggcggcgacgaaggcaagccggtcggtgaagacgtggatgcccaacaacggcggcataataggccagccgttcggcggtggcgaagtccaaccggttggtgaagacatgaatgccgagatgacagccattgatcttgatctcagtcggcttgacgaatccggcgacgccggagattag

SEQ ID NO: 90859 - DNA, 1125 bp, Oryza sativa
  Clone ID: PAT_MRT4530_89489C.1
atgggcgtccacgtcttcaccgatcggctagccttcgccaccgccgactggtgttttcgcctgcacggctggcctattatgccgccgttgttgggcgtctacgacttcaccaccggcctgcctccgtcaccgccgactggtgtcctcgcctatacggttggttggtcacaccaccgttcttgggcgtccacgtcttcaccgaccagctggacttggccgccgccgactggtgtcctcgccttcacgttgcctttgggccgattcctagcacccgagggctcgttggatggaccgagaatggatcagtcagaacatcaccatcggcgcctcttgtgccgccaactggtgtcttcgcctacacggttggcctattacgccgccgttgttaggcgtctacgtcttcaccgaccagccgccgcgtccaccgctgactggtgtttccgcctgcacggctggcctattatgccgctgttgttgggcgtctacgtcttcaccgactggccgcctcgtccgccgctgactgcctattatgccgccgttgctgggcgtctacgtcttcaccgaccggcttgccttcgtcgttgccgactggtgtcctcgcctgcacgactggcctattatgccgccgttgttgggcgtctacgtcttcaccgactggccacctcgtctgccgcccactggtgtttccgcctacacggctggcttattgtgacaccgttgttgggcgtccacgtcttcaccgaccggctcgccttcgtcgccgccaactggtgtcctcacctgcacggctggcctattatgtcgccgttgctgggcgtctacgtcttcaccgaccggctcgccttcgtcgctaccgactggtgtcctcgcctgcatggttggcctattaggtcgccgttgctgggcgtctacatcttcaccgaccggctgcctcgtatgacgccaactggtgcttttgtcttcatggctggccacgacgccgccactgcaaataggcgtcaccaccttcaacacaagctatctacgtctgctgctgactggtttcttcacttccatggctgcatgagtctgccagtgttgattggccttatcgtcttcaccgccggtcatctcgtctgctgttga

SEQ ID NO: 90860 - DNA, 543 bp, Oryza sativa
  Clone ID: PAT_MRT4530_8948C.1
atggtggaaagaagagtatctgaggatggtggcagatctggagccaaggtcgatggggatggccagggcattgcggcggcggaccctggcagactagcatggcatggcagcagagacaacgacaagaggcagaggaagtgggcggccaatctaggaggcacaccacccgggtcatgtattgttctgctccacatctccctgttaagcagagtgcccaacagcgctcccaagttttgctggttaattgtgatgcctggttggtttagtggctggtgttgcccaggtttccaagtccagcagctgccatcatccaaaggcactggcttggtctttgctatgctccttctccttcatcaggttgacacatatgctggaattatttttcgtgcgtgttgttcaatatatgttgatgttacttctgggaaggcatcaactgatatattagtaatcacctactactgttcgttgaaaccatataagagtacgattggaccagatggaacaagggaaaataaaattgggcataacattctgttacattag

SEQ ID NO: 90861 - DNA, 2022 bp, Oryza sativa
  Clone ID: PAT_MRT4530_89490C.1
accccatctcacccttcctcccctcttccctctccacggcgccgccgctctcgtgccaccgcgctgccgttcccgtgccgctgcgccgccgctctcgtgccgccgcgtcgccgttcccgtgccaccgcgccgccgttcccgtgccgccgtgccgccgctcccgtgccgccgcgctgccgttcccgtgccgccgtgccgccggtcccgtgccgccgcgccgccgttcccgtgccgccgcgccgccgttcccgcgccgccgttcccgtgccgccgtgccgccgctcccgcgccgcctgcatgtacgctgccgactggtatcttcgtctgcacggctggtctattatgccgccgctgatagacgtctacgtcttcaccaccggcttgccttcgccgccgccgcctggtgtcctcgtctacacggttagttggtcccacgaccgtagatgggcgtttacatcttcaccgaccggtttgccttcactgccgccgatgggtgtccatgcctatacggttggatgatcacaccaccgttattgggcatctacgtctccaccaccggctcgccttcatcgccgactaactggtgtttccgcctatacggttggaggactccgctgccattgatgggcatttttatattcaccgccggctgccacggctgcttccacggctagtgttttcgttactattaatggggcttgttctcacgaatggatcagtcagaacttcatcgtcggcttgccttcgccaccgccgactggtgtctctgcctacacggttggttggtcacaccaccgttgttgggcgtctccgccttcaccaccagcttgccttcgctgccgccgactggtgtctccgcatacacggttggttagtcacaccatcgttgttgggcgtctatgtcttcatcgctagcttaccttcgccgccgccaaatggtgtctcttcctacacggttggatggtcacagcgccgttgttgggcgtctacgtcttcaccgaccggcttgccttcgtcgccgccgactgctggcctattatgccgccgttgttggacgtctacgtcttcaccaaccggccgcctcgttcgctgccgactggtgtttccgcctgcacggctggcctattatgaccgccgttgttgggcgtttacgtcttcaccgaccggccgcctcatccgccgccgaccggtgtttccgcttacacggctggcctattatgccgccgttgttgggcgtctacgtcttcaccgaccggccgccgtcatccgccgccgaccggtgtttccgcttacacggctggcctattatgccgccgttgttggacgtctacgtcttcaccgaccggccgcctcgttcgctgccgactggtgtcaccgcctgcacggctggcctattatgccgctgttgttgggcgtctacgtcttcgccgaccggccgcctcgtccgccgccgactggtgtttccgcttgcacggctggcctattatgccaccgttgttggacgtctacgtcttcaccgaccggccgccgtcatccgtcgccgactggtgtcaccgcctgcacggctggcctgttatgacgccaactgatgctatcttcttcacggctggctacatcgccgtcaccgctaataggcacgagttgggcaacaacatcaactctcctccaattatttgtcttcacggttggcctactacgcaactgccgatagaggatctcatcgttatcatcggctgctacatcgctattgactggatcaccgacatcgtcatcttcatcaacatcttgtcaagcctcttcaacatagcccactctgctgccgttgatgggaaacttcgttatcatacgccgtcgctgcaacctggggcgagccactgtcctcaagtctgtccgcttctctccatgtcacgacgctgctatgtggaccgaccagccgaggctgttggggaggccgcctgcacgctgcccaaccttacctaccgaactgcacccacctcttaccagggcactcctttcatttag

SEQ ID NO: 90862 - DNA, 566 bp, Oryza sativa
  unsure (1)..(566): unsure at all n locations
  Clone ID: PAT_MRT4530_89491C.1
gtgcaaatttctgttgctacaatctctgctctattgttttctgaaacatgtatcccacagggcgactaattagccatagaattaaaaaattcaatacattatttcaattggaaattttctagacagctcataaattttagaaacaatgaatacccataattttaggtagtatttccagaaacatgcagcttcagtttaggagaccacatggtggtcgcatcctggcggcgatatctgcagagggtcaccgccttatggcctaaacagcgaggggctccagcagatgaggcagggagaagaggtctctacctgcacgctgagccgcccctcctcctgcgcgtttagttgccccctcgcgctgccgcacggcgcttctcatggcctggcttgctgctccgtgcccgntcaccgatgaaattagcccgccgctgctgctgttgccatgacgagagagccagggtttggtatggagaatggggtaacacacatgtaagggctgtgtggctaattgatgttgtatttgggggtataacaatccntttattctgtaaatnattttcattccc

SEQ ID NO: 90863 - DNA, 3373 bp, Oryza sativa
  Clone ID: PAT_MRT4530_89492C.1
gccttctcagcctgttgggccttctaaaatctcagaacaaagtctatttcagaccctcttgggattaaaattggcgcccccacgctgtctgcgaaggcgcttgccgaccagtccaccgtggtggcgctccacgcatagctccagcatgcggcggttgcggctattaacgcgccgcggcactactcttgccgactggtgtttccgtctacatggctggcctattaagccgccgctgttgggcgtctacgacttcaccaccgacctgcctccgtcgccgccgactggtgtccccgcctatacggtcggttggtcacaccaccgttgatgggcatcgtcatcttcaccgccggcctgcctccgtcgccgccgattggtgcctccgcctacacggctggcctattatgccgccgctgttgggcgtctacgacttcaccgccggcttgcctccgtcgtcgccgagtggtgcctccgcctacacggctggcctattatgccgccgctgttgggcgtctacgacttcaccgccggcctgcctccgtcgccgccgagtggtgcctccgcctacacggctggcctattatgccgccgctgttgggcgtctgcgacttcaccgccggcctgcctccgtcgccgccgattggtgcctccgcctacacggctggcctattatgccgccgctgttgggcgtctgcgacttcaccgccggcctgcctccgtcgccgccgattggtgcctccgcctacacggctggcctattatgccgccgctgttgggcgtctacgacttcaccgccggcctgcctccgtcgccgccgattggtgcctccgcctacacggctggcctattatgccgccgctgttgggcgtctacgacttcaccgccggcctgcctccgtcgccgccgagtggtgcctccgcctacacggctggcctattatgccgccgctgttgggcgtctacgacttcaccgccggcctgcctccgtcgccgccgagtggtgcctccgcctacacggctggcctattatgccgccgctgttgggcgtctgcgacttcaccgccggcctgcctccgtcgccgccgattggtgcctccgcctacacggctggcctattatgccgccgctgttgggcgtctacgacttcaccgccggcctgcctccgtcgccgccgattggtgcctccgcctacacggctggcctattatgccgccgctgttgggcgtctacgacttcaccgccggcctgcctccgtcgccgccgagtggtgcctccgcctacacggctggcctattatgccgccgctgttgggcgtctacgacttcaccgccggcctgcctccgtcgccgccgagtggtgtttacgcctgcacggctggcctattatgccgccgctgttgggcgtctacgacttcaccgccggcctgcctccgtcgccgccgattggtgcctccgcctacacggctggcctattatgccgccgctgttgggcgtctacgacttcaccgccggcttgcctccgtcgccgccgagtggtgcctccgcctacacggctggcctattatgccgccgctgttgggcgtctacgacttcaccgccggcttgcctccgtcgccgccgagtggtgcctccgcctacacggctggcctattatgccgccgctgttgggcgtctacgacttcaccgccggcctgcctccgtcgccgccgagtggtgcctccgcctacacggctggcctattatgccgccgctgttgggcgtctacgacttcaccgccggcctgcctccgtcgccgccgactggtgtcttcattgttattgatggacgactttgttcccacattggtcacttctgccatcaccaaggggaatattacaaagctaagatccagatccagatatgcataaaagggattcatggctttaagcttatctcttacgctccaggaatggatcagtcagaacatcaccaccggctcgcctcgaccgccgccgactggtgtttccgcctgcacggctggcctattatgccgccgttgttgggcgtctacgtcttcaccgaccggcttgccttcgccgccgccgactggtgtttccgcctgcacggctggcctttatgccgccgttgttgggcgtctatgtcttcaccgaccggcttgccttcgccgccgccgactggtgtttccgcctgcacggctggcctttatgccgccgttgttgggcgtctacgtcttcgccgaccggccgcctcgtccgccgccgactggtgcttccgcctgcacggctgacttattatgccgccgttgttgggcgtctacgtcttcaccgaccggctgcttcgaccgccgccgactggtgtttccgcctgcacggctggcctattatgctgccgttgttgggcgtctacgtcttcaccgaccggccgcttcgaccgccgccgactggtgtttccgcctgcacggctggcctattatgctgccgttgttgggcgtctacgtcttcaccgaccggccgccgcatccgccgctgactggtgtcaccgcctgcacggctggcctttctgccagtgttgattggccttaccatcttcatcgccggtcgtctcgtctgctgctgactagtgccctcgcctctacatctggtttatacagctaccactactgatggacatcatcatcttccgtcgccgactgattatgccgccgccgactggtgcttttatcttcacaactgcgcgtcttcactaccggatttctacttggacatcttcaacacatatcttcaatcaagcaatgattactcgacgacaagaagctataattctcgactctatgttcagttgtttcccaactaaccaaagagtcgggggctacacaaatacaagactctcaaaattcgacaagatgaagcaatcaattaatcagccaacgatatttcaccttgacggttgacctactatgcaaatgctgatgagcgtctttgtcattatcattggttgctacactgctattggctggatcaccgacatcgtcatcttcatcataggagttggtacaatgcatcttaaaaggtgtcaaacagtaaagctttatatagctgtcccgctgacttttttatatataagtcaaggtgctgtttgggtttttaagcaattgattggatacaatatcattgcttttcgccacccctccacagtcttcagatttggtaaaagtactcggaagaccatgataaagatgattgaagcactcggctttggagtaatctggttcgagagaagattatcttttcgactgcgaaggtgctgctgttttcttttcttttgtaagtatgtaatgttattattaagatggatttttatattaaattgtcagtttgt

SEQ ID NO: 90864 - DNA, 1516 bp, Oryza sativa
  Clone ID: PAT_MRT4530_89493C.1
gctggtgaggcaaagttcagtgatcacttgcttcaaagggtgcagcagtgtaggagaggtgaggaggcacaggaagaagacaaccacatactattgccactctctcctgtgactgtgtgtgtgtgcgcgtgtgcgtgcttgctagatccagacaagctgtggaagcaaaaggaggatggcttgtagcttccactttgttcccttgctcctcctcctcaccttgctcttgctcatctcctctgccagtagaactgctgcattgccctccatgcgcagtagcagtgaagacaccgccagtaatgctactgctgctgcaaggcttaggccagggaaggagctgcttaagtacaagaggatcagggctctcctcaagaaactcaacaagccttctctcaagaccattcagagcccagatggtgatctcatagactgtgttccctctcatctccaacctgcatttgaccatccaaagctcaagggacaaaagcttctggacccaccggagaggcccaagaactacaacctcaccattgccgtcagcagcagcagcagcagtagagtaggtgaggtggtggtgcaggcctggcatgccgccggcgaggagtgcccggaagggacggtggcgatacgccggacgacggagaaggacctgctcagggccagctccctccggaggtacggcaggaagccggcacgccggaatattcgccgtgattccaccagcaacggccatgagcatgcagttggatatgtgaacaatgataattactatggggccaaagctagtgttaatgtgtggtcaccaaggataggtgacccatctgagttcagcctgtcacagatctgggttatctctggctccttcggcaatgatctgaacaccattgaagctggatggcaggtcagccctgagctgtatggagacagtaacccaaggttcttcacatattggacagtagaatttgaagtaatttgtacatacaattttcagaccgacgcatatcaagagaccggttgctacaaccacaactgccgtggatttgtccaaacgaccaacaagatcgcgatcggcgcggctatcacgccagaatcggtgtacaacggaaggcagtttgacattaccctgatgctatggaaggaccccaagcatgggcactggtggttagagctgggcccgggtatggtggtggggtattggccatcgtatctgttcacccacctggcgcaccacggcaacatggtgcagtttggcggcgaggtggtgaacacgcggccgtcggggtcgcacacggcgacgcagatggggagcggtcacttccccggcgaggggttcgaccgcgccgcctacttccgcaacctgcaggtggtggactgggacaacagcctcatcccggcggccaacctcaagctcctcgccgaccaccctgcctgctacgacatccagggaggctccaactcctactggggcagctacttctactacggcggccccggcaggaatgtcaaatgcccttga

SEQ ID NO: 90865 - DNA, 647 bp, Oryza sativa
  unsure (1)..(647): unsure at all n locations
  Clone ID: PAT_MRT4530_89494C.1
caaaacacgatcgtcctttacgcccccacttagccgggtcgaagctctcccgctataggtgccacgccatgttcccncgcctatcatgttggcaatagcacccccctttcgtctccacaaattccacccccgtcgttctctccataccttgacgcaaaacctggcccccaaggtacatggtcagccacgccacgctgtctttgccccataccacgcgtccacgattagactcggcggtctaaacgagtgctctacttggccacggccctatttagcctagctagctctccaggtcgattgtgttcatacatgtcactacgccggactacaccagttttagactcgcgccgatcaacttcggatccacggctcaagctcaagctcaagccgtattgtttggcccctaatacttgccgttcgaatactgcggatactctacccaagcttacgaacatcatgctgccctggtagcagttccgtcccgatcggttggtatcgtgggtagttgaaattggtagcaggtagtagttagttaccaggagagaaaatataaagttcatggcgatcatcctgtgttgacaagttgaaactatcggggtgatacaaatctgaataaaaatgtcatgcaaaaaaaaaaaaaaaaaaaa

SEQ ID NO: 90866 - DNA, 1575 bp, Oryza sativa
  Clone ID: PAT_MRT4530_89495C.1
atgtagagctcatttttagatgaattttgcaagttgaatggctcaattcggagttcgaatgaattagatatgaattttagaagttgggcaggggcggcgccctcccctctataggatctagtgggaggagaggcagcggtggcgcggcgtcccaacaggcggcgcctctccccctccaccgcggcagcgccgctccccctcccccactggcggcggggccgttccccctccccctcccacggtggcgggcgggtgcggcgtcttcccctccgccggatccagcgggaggggaggctccccctcccccaccggcggcggagccgccgcgccatcaacgccgccgcgctcccccgctccggtcgccggactccaactccggtaaccctccagtacccgctgccgccgcgaatcgctgtgtcagcaggatgccacgcaaggttgtctctgggcctgactacgatgacgagtacgacgatgactatgatgagtatgatgaggactacgatgattacggtgagaccgggcacagtgacgacattcagcaccccgtgaaggaggagaaatcatcgaagaagtcctcaagtacggtgcctgtgctttggagatgctccatgtgcatgttcgataatcatgaaagcatggtgtattgtgagatgtgtggggtttttcgagaatcctttatgaaatctgccaaggatggttcaataaaagtccatgggataccaagtgattttgggacaccttcgatgccgaaatctgactgtaccaagatgccagtgaatactcgtactacagactttgatggtgaccctgagataaagaatgctagcatatctcatgagaaagttggttccacgcagtacacatctgctggtagctcatcaggcgctgggaaaaaggtgaaacacattgcacttcctgaagatgtgcctgtcgagaggacagctcaattgatttctgatcattttcagctgaaggaggaccagagtagtagggctagcagttctgcgcagaatgaggatgtggcccagaaactttcttctgacatacagaagctaggtttagaaaagaatgaagtagatactgcaaaaccttatttacctgaagaatataagcctgagaagtggatgttcgctaatgaggaatcaggagtgctgagccaactaaaccttgcaatagtaggtcatgttgattctggcaagtcaacactctctgggagactgctacatctgttaggaaggatatcgaaaaaagatatgcacaagaatgagaaggaggctaaagaaaaaggaaaaggatcatttgcttatgcgtgggctatggatgaaagcagtgaagaaagagaaagaggcgtgacaatgactgtggccgtggcttatttggagactaagaagtaccgtgtagttttgcttgactctccaggccataaagattttgtaccaaatatgatatctggcgcaacgcaagctgatgcagctattcttgttgttgatgcttgcactggttcatttgaagctggcatggacggtgaaagagggaaaagtgtttgccacacaaaaaaacatgctcagctta

SEQ ID NO: 90867 - DNA, 2301 bp, Oryza sativa
  Clone ID: PAT_MRT4530_89496C.1
atggactacttcaacgggacggacgcgcactgcggcggcgccgtgggcgccatgggctcctacgtctacaacctcacctcctcctacgccgaccagaagaacgaggtcaacatcgtcgccacctccctcgccatgctcctcctcgccgcgctcctcctcgccttcgacctcctcgccggcgccgccacgctgcgccccgccgcgcgcctcgtcctctccgtctccctcgccctcttcctccccgtcacctcctacctcttctccgaggccaagaacgacgtccccggcgccgccgccgccgacgccgagctgcccctgcgtgcgcgcctcattcttgcgtggatgctgctcgtcgagctgctccgcaagaaggtggaggccacggtcgccggcactaagggcgccagtggcggcggccccaccagccgtgccggccgtgtcgccttcctcggctacctcgtcttcttcaacgtccacggcgccggccggaaggcggtgttcggcgtgctctgggtgttcgccgctgccaagctggtgcagcgcgtcgccatcggtgagttcgtcaagcgctccttcgccttcggcaagaacccgcagctcctcgccggctacatggcgcagacgctggagcagcaggagcggcgcccgcggcgagacgacgagctcatgacgagctgcaagtacgccgtcatgggagaggagaacctggagagggaggccggcccgaacggctacctcgtcgacctgaacaagacagtcgccggcgatgacaacgccgacgacgccgtcgtcgtcaccgtgggcagggtgtggtcgctcgccgagagtgaccagctgctggtgtccaacccgaagctgaagcggctctgcctctcgtacgctctcttcaagctgcttcgccgcgagttcgaggagacgccgttgaccgccgcggaggccgccgactgccgtgagctcatcttccgaggcctgtgcaacgacggcggcgccgccgccgacagggcggcgacgctgttccaggtgttcgacgacgagctcgggttcgtgaccgagtactaccactccgtcctccccgtgatgctggcgagccccttcttcctcctcgtcaactacatcgtcttccccgtcctcgtgctcggcctctgcctcatgaccgtcgtgctctgcggcaacggcgacatcgccttcatcgccggcagcatcaagagggacaactacgccgtgtcgttcggcttgctgaggatgacgaggtgcctcctgagcagagtattccggtcgccgtcggcgctcttctcctccattgacctctccatcacgttcctcctcttcctcaccatcctctacgaggaggcgtgggagctcgccgtcttcctcctctccaactggctcaccgtctccatggtctgcgactacgccgtcaagccgccgagccggctccgccgctccgccatccgcggcgtccagtgggtgacgaacaggatgagccgccgcaattacctccgtgtcaagcagtactccgtgctctggttctgcaggctcccgctgaagctgccggcggcggccgtgccggaggaggcgaagcaatccatcgtggagtacctcgcggcgtacgacggcgccgtcgccccgctcagcgccggcaggtcggcggtggcggcgaggaacaccctgtgcaacgcgtcccggctgatctcgtcggcgtgcgagagcggcagcgtcgccgaggttatactcacatggcacatcgccaccagcctcctggaggtgaggtgcccgccgcacgcggaggaggaggcggcggcggcggcgaggtcgagcacggtggcgacgcggctgtcccgctactgcgcctacctggtggcgttccgccgggagatgctccccgacgacgtcgactgcacggcgcgggtgtacggcaccatgaccacggagctcaagcgggagctgggtctcaagggctactacttctcgacggacgccacccggtacgggaagatgatggctatcgccggcggtcaagaagacgacgaggcggcggcggaggagacgacggtggtgcgcaagggggcgaggctggggaaggcgctgatggacgaggcggccggcggcgacgaggcggcggtgtggaagctggtggccgacgtgtggacggagatcgtcgtgtacgtggcgccggcgagggacgccgagcaggtgagggcgcacggcgaggcgctggcgcgcggcggcgagttcgtcaccgtgctctgggcgctcgtcacgcacaccggcattgcccgccccgccgccgcgtcggtgtga

SEQ ID NO: 90868 - DNA, 1773 bp, Oryza sativa
  Clone ID: PAT_MRT4530_89497C.1
atggcgcctggtcataggcacggctcagtgccaccagtggtgttactcctactagtagccactgtgcttggctccctctgccttagcctcaccgcttcacccgaagcgcaaaaagggtacaattttcggttcgcgaggcacgcgcgggacgcgccgctggtgtcatattacaactacatcgtcgtcggcggcggcacggccgggtgcccgctggcggcgacgctgtcggagcggtcgcgcgtgctcctcctggagcgcggcggcctcccctacggcaaccgcaacgtgtccagcgagtaccacttcgccgacgcgctggccgacacgtcgccgaggtccccggcccagcggttcgtctccgaggacggcgtcgtgaacgcccgggcgcgcgtgctcggcggcggcagctgcctcaacgccggcttctacacccgcgccagcagcggctacgtgcgcgccgccggctgggacccccgcctcgtcaacgcgtcgtacccgtgggtggagcgcgagctggtgttccgccccgacgtgccgcggtggcagtgcgcgctgcgcgagggcctcctccaggccggcgtcacgccggacaacggctacacgctcgaacacgtccagggcaccaagatcggcggcaccatcttcgaccgcgccggccgccgccacaccgccgccgacttcctccggcgagcccacccgaggcggctcaccgtgttcctccgcgccaccggcacggcgacgccggtggcgtacggggtggtgttcacggacccggcgggcgtgcggcaccacgtgtacctgcgtggcggcgccaagagcgaggtgatcgtgacggcggggacgctggggagcccgcagctgctgatgctgagcggcgtcgggccgcgcggggagctggagaagcacggcatcctccccgtgctggaccagcccagggtcgggcagggcgtggcggacaaccccatgaactcggtgttcgtcccctccccggtgcccgtcgcgctctccctcgtccagatcgtcggcgtctcccgcttcggcaccttcatcgagggcgtcagcggctcgcagttcggcatcccgctccacggccgcgccgcctcccgccgcgcccgcagcttcggcatgttctcccccatgacggggcagctggggacggtgccgccgaaggagcggacgccggaggcgatgcggcgggcggcggaggcgatgcggcggctggacaggcgcgcgttccgcggcgggttcatcctggagaagatcctggggcccatgtcgacggggcacgtcgcgctccgatcagccgaccccgacgcgaacccggccgtgacgttcaactacttccgggacccgcgcgacgtggagcggtgcgtgcgcggcatcgagacgatcgagcgggtggtgcggtcgcgggccttcgcgcggttcacctacgccaacgtcaccgccatggaggccgccgtgcttggccgccgcgccggccacctccccgtcaacctgctgcctcgccgcgccaccgacacgcggccgctgcagcagtattgcagggagacggtgatgaccatctggcactaccacggcggctgccatgtcggcgccgtcgtggaccaggactaccgggtgctcggcgtacgtggcctccgcgtcgtcgacagctcaaccttcaagtactcgcccggcaccaacccgcaggccaccgtcatgatgctcggcaggtatatggggctgaagattcagaaggagaggtggacgaggaacgacgagacacattag

SEQ ID NO: 90869 - DNA, 2043 bp, Oryza sativa
  Clone ID: PAT_MRT4530_89499C.1
ctacgcggcactattgaggcgattgatgctggtcatggactcgaggcgtctcagctttccggtcgatcggccgcgagtccactccgccggcttgtcctcgccaccgccattgggttggtcggtcacaccaccgttcatgggcgtccatgtcttcaccgaccggctggccttcgccgccgccgactggtgtttccgccggcctgcctccgtcgccgccgagtggtgcccccgcctatacggtcggttggtcacaccaccgttgatgggcatcgtcatcttcaccgccggcctgcctccgtcgccgccgagtggtgcctccgcctacacggctggcctattatgccgccgctgttgggcgtctacgacttcaccgccggcctgcctccgtcgccgccgattggtgcctccgcctacacggctggcctattatgccgccgctgttgggcgtctacgacttcaccgccggcctgcctccgtcgccgccgagtggtgcctccgcctacacggctggcctattatgccgccgctgttgggcgtctacgacttcaccgccggcctgcctccgtcgccgccgattggtgcctccgcctacacggctggcctattatgccgccgctgttgggcgtctacgacttcaccgccggcctgcctccgtcgccgccgattggtgcctccgcctacacggctggcctattatgccgccgctgttgggcgtctacgacttcaccgccggcctgcctccgtcgccgccgagtggtgcctccgcctacacggctggcctattatgccgccgctgttgggcgtctacgacttcaccgccggcttgcctccgtcgccgccgactggtgtcctcgcctatacagttggttggtcacaccaccgttcatgggtgtccacgtcttcgccgaccggctggccttcgccgccgccgactggtgtttctgcctacacggctggcctattatgccgccgctgttgggcgtctacgacttcaccgccggcctgcctccgtcgccgccgactggtgtcttcgcctatatggttgattggatccagatccagatatgcataaaagggattcatggctttaagcttatctcttacgctccaggaatggatcagtcagaacatcaccaccggctcgcctcgaccgccgccgactggtgtttccgcctgcacggctggcctattatgccgccattgttgggcgtctacgtcttcaccgaccggcttgctttcgccgccgccgactggtgtttccgcctgcacggctggcctattatgccgccgtcacggctggcctattatgccgccgttgttgggcgtctacgtcttcaccgaccggcttgccttcgccgccgccgactggtgtttccgcctgcacggctggcctttatgccgccgttgttgggcgtctacgtcttcaccgaccggcttgccttcgccgccgccgactggtgtttccgcctgcacggctggcctattatgccgtcgttgttgggcgtctacgtcttcaccgaccggcttgccttcgccactgccgactggtgtttccgcctgcacggctggcctttatgccgccgttgttgggcgtctacgtcttcatcgaccggcttgccttcgccgctgccgactggtgtttccgcctgcacggctgacctttatgccgccgttgttgggcgtctacgtcttcaccgaccggccgcctcgtccgccgccgactggtgcttccgcctgcacggctgacttattatgccgccgttgttgggcgtctacgtcttcaccgaccggctgcctcgactgccgccgactggtgtttccgccggccgcctcgtccgccgccgactggtgcttccgcctgcacggctggcttattatgccgccgttgttgggcgtcgcctgcacggctggcctgttataacgccaactgattctatcttcttcacggctggctacatcgctgtcactactaataggcatcagtatcttcaacacaagctgcctacgtttgccatggctgccgactggtttcttcacttccat

SEQ ID NO: 90870 - DNA, 151 bp, Oryza sativa
  Clone ID: PAT_MRT4530_8949C.1
ttgaaactaaggatagatccagagattcccaaataggtaaccttttgaacttccttctgaatccattagcaggcaagagacaaccttgcgaactgccaacatcttagtagccagaggataagcggccgccgattcgatatcaagcttttcg

SEQ ID NO: 90871 - DNA, 333 bp, Oryza sativa
  Clone ID: PAT_MRT4530_894C.1
gtgtagcggaagtaagcgctaagtagccgaaggaatgtcgggaacgtagcgcgcgtcggtgtagagaaagtagtcgatcgcagcagctcgatgttatcctcctcgtgcgttctcttcgccgtgctctcacaccgatcagcaccgcaaaccagcggcacctctaccggatccatgactcgggcttccaaggcccataggacttctattcggatccctatccgaagttcacgtaaactcagctgtaacccgaaaactccttttcggtccacatgtcaacagcagcccctagcagaatgtattgacccaccggacatacataaagatcatatcggt

SEQ ID NO: 90872 - DNA, 1436 bp, Oryza sativa
  unsure (1)..(1436): unsure at all n locations
  Clone ID: PAT_MRT4530_89501C.1
nnnnnnnnnnnnnnnnnnnnnnnnnnnnnnnnnnnnnnnnnnnnnnnnnnnnnnnnnnnnnnnnnccatgtcttcaccgaccggccgcctagtccgccgccgactggtgttttcgcctgcacggttggcctattatgccgccattgttgggcgtctacatcttcaccgaccggccgcctcgtccgccgacgactagtgtttccgcctgcacggctagcttattatgccaccgttgttgggcgtctacgtcttcaccgaccggccgcctcatccgccgccgactggtgtttccgcctgcacggctggcctatcatgtcaccgttgttgggcgtctacgccttcgccgaccggccgcctcgtccgccgccgactggtgtttccacctgcacggctggcctattatgccgccgttgttgggtgtctacgtcttcatcgaccggccgccttatccgccaccgactggtgtcacagcttgcacggctggcctattatgccgccgttgtttggcgtctacgtcttcaccgccggctcaccttcgccaccgtcgactggtgtctccgcctgcacggctggtttattatgtcgcggttgtagggcgtctacatcttctccgaccggccacctcgtatgacgccaactggtgctatcgtcttcacggctggccacgtcgccgccaccgcaattaggcgtcatcaccttcaacgcaagctgtctacatctgctgccgactggtttcttcacttccatggctgcatgattctgctagtgttgattggccttatcgtcttcaccgccggtcgtctcgtctactactgactagtgccgtcgcctctacggctggtttatactgctaccactactgatggacgtcattgagcaacctcatttttattatcttcggcattggcaaactctattgcctctacttcgcaagctttgctacttcgccaaccacgacatctacaggagcctcgacatcttggcatgcgtcaacaagtataatgccatgttattttactacaacaagtggtgttccaatattcaagatttctactcggacatcttctatgcgtatattcactcaagcaatgactactcgacgacaagaagctacagttctcgactctatgttcagttgtttcccaactaaccaaagagtcggggactacacaaatacaaggctcaaaatttgacaattcgacaagctttatgtcaagatgaagcaattaattaatcagccaacgattcaactttgggagtcattagcttcgtcttcgcttcagagcaggtgttctacttcagcaactccgattatttcaccgacaattttggcttctccacgttgctacaatctactccaaatttctcaagtatcaagtttgagatttaatctacatattcgggagtttagagctatcaaccaagcaactcagttt

SEQ ID NO: 90873 - DNA, 1953 bp, Oryza sativa
  Clone ID: PAT_MRT4530_89502C.1
atgggcatcgtcatctacaccgccggcctgcctccgtcgccgccgactggtgtccccgcctatacggaatggatcagtcagaacatcaccaccggctcgccgtcgtcgccgccgactggagtcttcgcctatacggttgattggtcacaccaccgttgttgggcgtctacgtctttaccgaccggccgcttcgtccaccgccgactggtgtcttcgcctatacggttggttggtcacaccaccgttgttgggcgtctacgtcttcaccgaccggcttgccttcgtcgccgccgactggtgtctccgcctgcacggctggcctattatgccaccattgttgggcgtctacgtcttcaccgaccggccgcctcgtccgccgccgactggtgtttccgcctgcacggctggcctattatgccgccgttgttgggcgtctacgtcttcaccgaccggcttgccttcgtcgccgccgactggtgtctccacctgcacggctggcctattatgccaccgttgttgggcgtctacgtcttcaccgaccggccgcctcgtcagccgccgactggtgtttccgcctgcacggctggcctattatgccaccgttgttgggcgtctacgtcttcactgaccggccgcctcgtcagccgccgactggtgtttccgcctgcacggctggcctattatgccaccgttgttgggcgtctacgtcttcaccgaccggccgcctcgtccgccgccgactggtgtttccgcctgcacggctggcctattatgccgccgttgttgggcgtctacgtcttcaccgaccggcttgccttcgccgccgctgactggtgtttccgcctgcacggctggcctttatgccgccgttgttgggcgtctacgtcttcaccgaccggcctgccttcgccgctgccgactggtgtttccgcctgcacggctggcctttatgctgccgttgttgggcgtctacgtcttcaccgaccggccgcctcgtcggccgccgactgccgactggtgtctccgcctgcacggctggcctattatgccaccgttgttgggcgtctacgtcttcaccgaccggccgcctcgtccgccgccgactggtgtttccgcctgcacggctggcctattatgccgccgttgttgggcgtctacgtcttcaccgaccggcttgccttcgtcgccgccgactggtgtctccgcctgcacgactggcctattatgccaccgttgttgggcgtctacgtcttcaccgaccggccgcctcgtccgccgccgactggtgtttccgcctgcacggctggcctattatgccgccgttgttgggcgtctacgtcttcaccgaccggccgcctcgtcagccgccgactggtgtttccgcctgcacggctggcctattatgccaccgttgttgggcgtctacgtcttcaccgaccggccgcctcgtcagccgccgactggtgtttccgcctgcacggctggcctattatgccaccgttgttgggcgtctacgtcttcaccgaccggccgcctcgtccgccgccgactggtgtttccgcctgcacggctggcctattatgccaccgttgttgggcgtctacgtcttcaccgaccggccgcctcgtccgccgccgactggtgtttccgcttgcacggctggcctattatgctgccgttgttgggcgtctacgtcttcaccgaccggccgccgcatccgacgctgactggtgtcactgcctgcacggctggcctgttataacgccaactgatgctaccttcttcacggctggctacatcgctgtcactactaataggcatcagtatcttcaacacaagctgcctacgtttgccatggctgccgactggttccttcacttccatggctgcatgattctgccagtgttgattggccttatcttcttcaccgccggtcgtctcgtctactgctga

SEQ ID NO: 90874 - DNA, 666 bp, Oryza sativa
  Clone ID: PAT_MRT4530_89503C.1
atggatcagtcagagcatcaccatcggcgcctcgtgtgccgccgactggtgtcttcgcctggacggttggcctattatgccgccgttgttgggcgtctacgtcttcaccaaccggccacctcgtctgccacagactggtgtcttcgcttgcacggctggcctattatgccgccgttgatgggcgtccacatcttcaccgaccggccatctcgtccgccgccgactggtgtttccgcctgcacggctggcctactatgccgccgttgttgggtgtctacgtcttcaccgatcggccgcctcgtccgccgccgactggtgtttccgcctgtacggctggaggcctattatgccgccgttgttgggcgtctacgtcttcaccgactggccgcctcgtccgccgccgactggtgtttccgcctgcacggctggcctattatgccgccgttgttgggcgtctacgtcttcaccgatcgactcgccttcgccgccgctgactggtgtctccgccagcacggctggcctattatgcagccgttgttgggcatctacatcttcacccccggctcgccttcaccaccgccgactggtgtctccgcctgcacggctggtttattatgccgccgttgttgggcgtctacatcttcaccgaccggcggcctcgtatga

SEQ ID NO: 90875 - DNA, 1011 bp, Oryza sativa
  Clone ID: PAT_MRT4530_89504C.1
atggactcatctctcacagatgagcgcccgtcgttagtatggatggcgctgcagcacatcgtcgatggcgtggattgggggtggcagttgggagcagcggcgctggcggcgcacctacaggctcggtggctgcgagcggaggccggcggcaatgatacaatacaaagtttgatcaaggtaacagttgatgagttaattattcagaaaagccagctcggggggcagattgcagaacaacaacaatatcggctcggggggcaaacatatcagtatcaacatgatgagccatatcaatatcggccagaagaacttcatcaatatgggcatcaatataacaatgatttggccgatagaattgcaaaattagtagaggagcagtttggaatgagacctaaggaacagatccatatgtatcggcagccatatcctgagtggttcgatagagttccacttctgcaccgatacaagattccagatttctccatgttttcagggcaagatgatgtatctacaaaggaacacatcagccaattcttagcacaatgtggggaggcatcggctgaagaggctccgaaagttagattttttccattgtctttgactggatcggccttcacatggttttcatcactactatcgaattctatcggagaatgggccgatcttgagaagcaatttcatgactacttttttgctggcatcaatgagatgaagctttcagatttgatatcagttcagcagcaagaagaagaatcggctatagtatatatccaaagatttcgtgatgttcacagccgatgttattgtttgagtctaagtgatgagcagctcgcagatcttgcattccaagggttgtcagcacctatcagagatagattattttgccacgagtttgatggcctggctcatctaatgcagacggtatcagctcatgaaagtcgattgcaagaagcaaaagaagatcagttttggagttatcaagatcagacagaacagaattttggagcatga

SEQ ID NO: 90876 - DNA, 3956 bp, Oryza sativa
  Clone ID: PAT_MRT4530_89505C.1
atgcgattggcccaaataattagccacccagcttgcccaatcaactgcggcctgcgggccgttcccatcccaaaccttgtgtgcaggcgacgggcagcaacgagcggctccgacgcagtgcacgagcaggtgacggcgaggctgcggcaatctgccggaaattcccccatcgaccggcgcgttttaccgcctgaggtctcgtgcgctacccccttttattattgccgaattcatgtttcgacagttggcgcgccagatcgatcttctggtatattttcttgtgtcgatcttgtgtcggtcggcggagatcaagctgaagctgtcgacgacgccctcatgcatcgagactttcttcgtgttttgctgacggacatgtggtggctatcgctggctttacagctgcctcggtcggtcatctacatgctgccgactctccgaggtcgcagggccgatgatggcttccgccggctactgctgattgcggcattgcgacccaagctgatcgacgcgcacgacgtatccaagccacgccatcacgacacggccgtcatcgtcgcctattcggccactcggatgcccccggccgtgtccgagtgctcttctcctccctcccacgcggatgcccatgcataccgactgatgttaccgcctgcacggctggcctattatgccgctgttgttgggcgtctacgacttcactgccggcctgcctccgtcgccgccgactggtgtcctcacctatgcggttggttggtcacaccaccgttcatgggcgtccacgtcttcaccgactggctggccttcgccgccgccgactggtgtttccgcctgcaaggctggcctattatgccgccgctgttgggcgtctacgacttcaccgccggcctgcctccgtcgccgccgactggtgtcctcgcctatgcggttggttggtcacaccaccgttcatgggcgtccacgtcttcaccgaccggctggccttcgccgccgccgactggtgtttccgcctgcacggctggcctattatgccgccgctgttgggcatctacgacttcaccgccggcctgcctttgtcgccgccgactggtgtcctcgcctatacgctggcctattatgccgccgctgttgggcgtctacgacttcaccgccggcctgcctctgccgccactgactggtgttttcgcctatacggttggcggactccgccgctgttaatgggcttcatcatctacaccactggcttggttccactggcgccgactggtgtttttgtcaccattgatggactgcttcattcccacatcggctacttctgctgtcaccgagggaatacgacaaagctaagtcatcatttattttattctttatatgatattttgcattttcctttgcctcactacatcaactggatccagatccagatatgcataaaagggattcatggctttaagcttatctcctacgcttcaggaatggatcaatcagaacatcaccaccggctcgccttcgtcgccgccgactggtgtcctcgcctgcacggctggcctattatgccgccgttgctgggcgtctacgtcttcaccgaccggccgcttcgtccgccgccgactggtgtttccgcctgcacggctggcttattatgccgccgttgttgggcgtctacgacttcaccgccggcctgcctccgtcgccgccgactggtgtcctcgcctatgcggttggttggtcacaccaccgttcatgggcgtccacgtcttcaccgaccggctggccttcgccgccgccgactggtgtttccgcctgcacggctggcctattatgccgccgctattgggcatctacgacttcaccgccggcctacctccgtcgccgccgattggtgcctccgcctacacggctggcctattatgccgccgctgttgggcgtctacgacttcaccgccggcttgcctccgtcgccgccgagtggtgcctccgcctacacggctggcctattatgccgccgctgttgggcgtctacgacttcaccgccggcttgcctccgttgccgccgagtggtgtttccgcctacacggctggcctattatgccgccgctgttgggcgtctacgacttcaccgccggcctgcctccgtcgccgccgactggtgtcctcgcctatacggttggttggtcacaccaccgttcatgggcgtccacgtcttcgccgaccgactggccttcgccgccgccgactggtgtttctgcctacacggctagcctattatgccgctgctgttgggcgtctacgacttcaccgttggcctgcctctgccgccactgactggtgtttttgcctatacggttggcggactccgccgttgttaatgggcttcaccatctacaccactggcttggttccactggcgccgactggtgtttttgtcaccattgatggactggtcgactcccgatgcttgggggctatgactagtcggacagagtgtttaaacgtacagaaggagaaatacatatttataaatattttaaaatacttgattttttctcgagtattatatttatatcagatactactcatcctatatgtttgttctgcaggatccagatccagatatgcataaaagggattcatggctttaagcttatctcttacgctccaggaatggatcagtcagaacatcaccaccggctcgccttgaccgccgccgactggtgtttccgcctgcacggctggcctttatgccgccgttgttgggcgtctacgtcttcaccgaccggcttgccttcgccgccgccgactggtgtttccgcctgcacggctggcctttatgccgccgttgttgggcgtctacgtctttaccgaccggcttgccttcgccgctgccgactggtgtttccgcctgcacggctggcctttatgccgccgttgttgggcgtctacgtcttcaccgaccggcttgccttcgccgccgccgactggtgtttccgcctgcacggctggcctttatgccgccgttgttgggcgtctacgtcttcaccgaccggcttgccttcgccgccgccgactggtgtttccgcctgcacggctggcctttatgccgccgttgttgggcgtctacgtcttcaccgaccggcttgccttcgccgccgccgactggtgtttccgcctgcacggctggcctttatgccgccgttgttgggcgtctacgtctttaccgaccggcttgccttcgccgctgccgactggtgtttccgcctgcacggttggcctttatgccgccgttgttgggcgtctacgtcttcaccgaccggacgcctcgaccgccgccgactggtgccttccgcctgcacggctggcctttatgccgccgttgttgggcgtctacgtcttcaccgaccggccgccgcatccgccgctgactggtgtcaccgcctgcacggctggcctgttataacgccaactgatgctatcttcttcacggctggctacatcgctgtcactactaataggcatcagtatcttcaacacaagctacctacgtttgccatggctgccgactggtttcttcacttccatgactgcatgattctgccagtgttgattggccttaccatcttcatcgctgctaccactactgatggacatcatcgtcttccgccgccgactcgtcttcactaccggtttgcttctgttgccgccgactcgtgttcacttcatcacggcaacacaactttgtcatcatggtggagcgacttcatctttattatcttcggcactggcaaactctattgctgctacttcacaagttttgctacatcaccaaccataacgttgttgtgaatctcgacatatcggcatgcgacgccgtgttatttaattacaacaagtggctctccaacattcatgatttctacttggacatcttcaacacatatcttcaatcaagtgatgactac

SEQ ID NO: 90877 - DNA, 519 bp, Oryza sativa
  Clone ID: PAT_MRT4530_89506C.1
gtgtaggccaaattaactttattagcatggcttccaggtacaggtttagctgcccttcaaaataattacaaagaatatttgacataaaagaattgctatgccatttctatcattttttacgatgtcaaacaatatacagactagcgaataacctacaaactgacacagttatggcctaccaaggtacagagtgaataaattacggatgctgaagtttgcttgtaaaatctaccacttctaacgtttctatctcggtgattttgtggaaatgcatcttccgcacaagataagacttgatacagctcgtgaccttcgagacctgaccctcaacgaagatagctgtagagagatgattcaatgagtagccaacgagacaaacaaccatgtagaaacataagaaccgtaatttaatcaggattcaaatactcttcagaaacataagaaccgtaatttagcaggattcaaatactcttcagaaacataaacataagaactggtatttaagcaggactcacatac

SEQ ID NO: 90878 - DNA, 436 bp, Oryza sativa
  Clone ID: PAT_MRT4530_89507C.1
agtaacgtgtacaactccgtattaatggcacactgaacattgtggaatactccactatatttcatcaggacaaaggtgtgtataatactgttttgttatcacaaaacaaagaaaatttaatacctaattaaaaagtcctatcttgttaatttacatgatcttttgattcccataaacacgtacggatcataacccccaaaattatccaaattatcccaagaacaaaagctgcacaaacaagatcaaatatatcacatcacaaatccataaataattaaaaacgagctgacaaattcccagaagcaatttttccttgccaaaaaaaatcactccgaccatcatcagctcagagtgcaagcaacgctcccatcagcagcagcgccgccatcgtcgccgcggcggccgggacgacgggggaggcggcgccgccgctcgg

SEQ ID NO: 90879 - DNA, 1119 bp, Oryza sativa
  Clone ID: PAT_MRT4530_89508C.1
gcacgaggatctgcccggcccccgcactcggcgcgagcccctctcgcctcgccacctccccccctgttttctccatttctcctcccaatttttttctccgcatccgcagaaattctgtcccctcctcctcctcctccatttccgatgtattttattcgatttcgagatttgttttccggtgcatagagctcacgtacaaccgccgcgccgaacggtgcatgtgaactgttcggcgaaacgcgcaggtgaggagaggtcgcgaggagcggctgctgcggcggcggcggcggcttcgattcaggtgggggtgggtgccctagggtttcgctgccgggatggatggccgggagcagcagcagcagccgcgcgtgaactcgccgccgccggccggcggcggcgtgatgatgcctcagcacccctacggcgccgcgccggcgatgccgccggggtcggcgaatgttatgcacggggtgccgctctcgttcaaccccatggcgtcgccgaccgcctcgtcgcctatgaagcccgcggatatgtcggggaccatgtaccgcaccgatcccgtcgtgcagggcatgcagcagcagcccggttccggcggtggcggcacggcggtcggcggaggggagctcgtgaagaagaagagggggaggccgaggaagtatggtcctgacgggaacatcgggttgggactgaagcccgcggctgcagcagggacggaggccggcggaccttcaggtggtgcaggatcgaactcgaaccctgacgggaagcgcagagggcgacccccaggatccgggaaaaaaaaacagctagatgctttgggatcttccgggacatcttttactccccacataataacagtgaagcctaatgaggatgttgcttcaaaaataatggcattttcacaacaaggccctcgcactacatgcataatttcagcaaatggcgctctttgcacagacaacactacgtcaaccagcaacttctggtggtatagtaacatatgaggtatattcaagctaaactatctgtgtgcagtgtgcttactgctcagagcaatgcttgagctccactggtgttcttgctgtgaaatagtaatgaatatgcttaattaaa

SEQ ID NO: 90880 - DNA, 262 bp, Oryza sativa
  Clone ID: PAT_MRT4530_89509C.1
caccatggatccaccagcagtcgcagcaggatcagcggcgagtagggagaagggagggaggggaacgggttccgggaggagaggcagtcctgctcgagcaaggagcttgtggggggaggtagatggacagcgaacgcgggctcattcgtcgccgtccgccggctcgccggctccgagcgcgccgcgggagcggccgctctagaggatccaagcttacgtacgcgtgcatgcaacgtcatagctcttctatagtgtacctatc

SEQ ID NO: 90881 - DNA, 550 bp, Oryza sativa
  Clone ID: PAT_MRT4530_8950C.1
tcggtttggatcagtttacacttgcggagctggtgggcttgccatttatatgagaggatatgatctggttgcatccaagcgtttttcttgggctgggagagtgcgatgttggcatggttcaatcaaaccgggcaaacttatgcactagctaagcaagatgcagggatatgcagtatggttttgtttggtctgattgagccgggccaatatcacaagcttgcctggcttaattacatgtagtagtgtgaggatattggattcttccacaaggtatgagaattgtcatgttgtgtatttgtgctcctttatgcgtgttatttcacatgcctgcctattagatttaagtttctttatgttgtttcatgcaaagctttcagaaactattttgtctgacggttcaagctttacagatttaagttttgctgctggtactagctggtcaaatggcactaaaaggtttaaaaccatgtgaatatttatgaatatcaatgtagtagtaacataaatcttactcctatcaaagaaaaatccttcatcagcagcacactaa

SEQ ID NO: 90882 - DNA, 453 bp, Oryza sativa
  unsure (1)..(453): unsure at all n locations
  Clone ID: PAT_MRT4530_89510C.1
nnnnnnnnnnnnnnnnnnnnnnnnnnnnnnnnnnnnnnnnnnnnnnnnnnnnnnnnnnnnnnnnnnnnnnnnnnnnnnnnncccccccccccccccccccacctcacctgccaccttgcggcttgcgcgcggccggccttctccctccctcgccctcagcgccgctgtaacccgcagctgctaggtggcggcgtcgtcggcggcggcggccggggccccgggagcaggatgcggccgacgcggcgctcggcgagaagagagaggctggaggtggagaaggagcaggcagctgtcacgactcacgactcacgagacggtgacggcgacaaggggaagaagcttcaaacacctctcggttcttccccatctcccactgacacggtggggcccggaaaccgcggggtccacttgcagcgagagacacagggagagaaatggtttcttcaacggtaa

SEQ ID NO: 90883 - DNA, 3015 bp, Oryza sativa
  Clone ID: PAT_MRT4530_89511C.1
atgctgctccttgtcctgctacaaatccagctcgtcgccgcgctctcgcttctcccgccggcatcagcaccaccgccggccgctctcccatgccgtccggaccaggagtcaccgctgctccggctgaagagctccttctccgccaccgacatgtccacggcggctttccggtcatggcgacccggcacggactgctgccgctgggacggcgtccgctgtggccacggcgacggccgcgtgacctccctcgacctgggcggccgtcagctggagagcagaggaggcctcgacccagcaatcttccatctcacatccctcgagtatcttagcctcgccgacaatgacttcaacgggtctcctctcccttccagcggctttgagcgtctcacagagctcacccatctcagccttcgcagcaccaacattacaggcgtggtaccagccggaatcggccgtttggtgaatttggtatcccttgatctctccacagactttgagataatcgacacatttgatgatgtctatgtttttaaaatgaattcgagtctcgatgcccaacagctcgctgtgccaaacctggaaagcttagtcgcaaaccttagcaatttaagggagctcaaccttggcttagtaaacttatctgaaaatggcgccagatggtgcaacgctctagtcgattcctgcccaaaacttcaggttcttcgtttgtcttgctgtgctctctctggcccaatatgtgcaacacttccccgtttgcactcactttctgttattgacctatcgtttaatagtttgcccgggctaattccagatttctccaactttcctaatttgactgccctccaacttagacgtaatgaccttgaaggatttgtctctccattgatctttaagcacaagaaactagtaactattgatctttaccataatccaggaatatatggtactttgccaaacttttcatctgatagtcatttggaaaatatatatgttggtggaactgaattcaatggtataataccaagttccatcgctgaactcaaatctttgaagaatctaggcctaggagcaactggcttttctggagaactgccctcatcaattggaaacctcagatccttgaagtcattagagatttccggttttggactagtagggtccataccatcatgggttgcgaacctatcctctttgactgtgcttcagttcacaaattgtggcttatctggatcaataccatcctctgtcggtaaccttaggaatttgggaaaactactattgtataattgcagcttttcaggaaagataccttcacaaatcttgaacttaacacagctagaaatactctcgcttcattcaaacaacttcattggcacagtagagcttacctcgatgtggaaactactagacctgtttgtcttggatctttcagataataatctggtcgttgtagatggaaagggtaattcttcaacggcatccatccccaaactaggagcgttacgtttatcaggttgcaatgtttcgaaattccctaatttcttgaggttccaagatgaaatcgaatatcttgatctttcatataaccatatcgatggagccataccccaatgggcatgggagaattgggtcaaaatggacatactatccttgaagaacaataagtttacaagtgttgggcatgacccttttcttcctttaagtgatatgaaagcacttgatcttagtgagaacatgtttgaggggcccatacctatacctcgaggatatgcaactgtgcttgactactcaggaaacaggttctcatctataccatttaagtttaccaattatctcagtgatgtctcgtttttcaaggccggtagaaacaatttctctggaagaattcctccatccttttgtagtgcaatgagtttacagctccttgatctctcatacaatagctttgatggttcaattccttcttgtttaatagaggatgttgacaaactggaagtattaaatctaaaagaaaataagcttcgtggggaatttccggacaatatcaaggaaagttgctcatttgaggcactggatttcagtggcaatttgattgaagggaaactgccaagatctctggccgtttgcaaaaacttggaggtccttaatattggaagcaatcagattaatgattcctttccatgttggatgggcacacttcgtaaacttcaagttcttgtgctgaaatcaaacaagttttttgggcatgtagcacagtctctgggggaagaaaaaggtacatgtgaatttcagagcgcaagaattgttgatctagcatccaacaagttctctggcatcttgccgcaagagtggtttaacaagttaaagtcaatgatgatcaaagattcaaatttgacattggtcatggaccatgatctcccacgaatggagaaatatgattttactgttgcactcacatacaaagggatggacatcacatttactaagatcttgaggacccttgtattcattgatttatcagataacgcattccatggcagcctacctgaagctataggtgaacttgttctgctaaacgtgctcaacatatcacacaactcactgacggggccgattccacctcagcttggtcgtttaacccagcttgagtcgttggacatctcatcaaatgagctttcaggagaaatcccacagcagttggcatccttggacttcctcacagtgttgaacctgtcctacaacaagctggagggggaaataccagaatcgcctcatttcttgacattctccaatagttcatttctggggaacgatggtttgtgcggtcgtccactgtcgaaaggatgcatcaacattacatctctgaatgtgatcccttccaagaagaattcacttgacgttttgctattcctttttgctggattgggattcggctttggatttgccctttcaattgtggttatatggggaattcccatcagaaagcggtctcgagtaaggcagagagccctctga

SEQ ID NO: 90884 - DNA, 364 bp, Oryza sativa
  Clone ID: PAT_MRT4530_89512C.1
gaacggcgtgccggaattcagagatcacctagactacatgctgaagcaccatactggatagatagagaccagacgcatcatggaccacatcctcggcagcagctcgttaatgtgccacacttagaaggtgaacaagatgcaccgcgtgatgaagccgaaccaggtcaggtacgcgctgcggacgtgagcggagacgatgtgctcgcagatcaacttcatccgagccgccaccaagtccatttagcgcaagcgtaactccacgaaccacgacccggtgatcgactgtcaccggagcaatgcgctgcaaggagggtaatatcaatggactcccatccgagtgtccatggacaacgcccgtataggc

SEQ ID NO: 90885 - DNA, 257 bp, Oryza sativa
  Clone ID: PAT_MRT4530_89513C.1
ttttaaaacattgaccgggtctcacactctctaatgccttcatacactggtttccgtgtgaatcattctaattgcctaatgacacctggcattacacttcctcaaacgtctcccaatgccaatagtcgagggaatggacctttcacttctctcacattccttgttcttgtacatagtttctctgggaggctagcgcatattgacccaacctctcacatttattattccatatcgtaccttattaagacacacctctt

SEQ ID NO: 90886 - DNA, 453 bp, Oryza sativa
  Clone ID: PAT_MRT4530_89514C.1
tcggcaccaccgggtgggggcgcttcgcttggttaacggtcacccacgccacgccggcaccggcttggtttttctttttcaccattttttcttggcttccaccaccactttccccctttttcgatcccttcttccatggacgccggcaagggtaccaccggcggcggcggcgaccaaaaccctacccccaacccttccaccggcggaggttcacccgatgacttcccggcggcggcggggggggggagaccggcctttaccaggcttacccaggaggagggcgaacttggccttggccgggttcttcaggagcaggagcgggggtacatgatggttaacgcggaccaccggggggaatacgcgggcttcgatggggggagctaccagtttgaccaggaaagggaggggagggatttttaagaccaggatggggacggggaccggcaccgggag

SEQ ID NO: 90887 - DNA, 2049 bp, Oryza sativa
  Clone ID: PAT_MRT4530_89515C.1
atgaggaggcgaccgggaatcgcgggcttgcagaacgcagcggctactcgtgaccaattccggctggttggggaaaatgtggccaaggtcaggaccgatgtcatgaaggagcagcttgcgacgtttcggacacagctcgaagaatttgcacgcaagcataaggtccttggtagtggttttgaagtaatttctgttgggaagaaaaagcttgtgcgttctgttcctacagaactgaataaagatcacaatgggatacttgagctagctcaggctgaaggttttgtcaccgtagagcaagtcgagagaaagttctcgtggtcaactggccgtgccattgacgtccttgaaactttgctcaaggaagggcttgcgatgatcgacgatgggcacagggatggcaagcgcagatactggttcccgtgcgtcactctcagctctgactctactggcactgaagcacatatggcatgccatttaccagtacagctctggaagaatcatgagatagcaatacacttttcagggctgggctgccggcaaaatttttacattgtgattcgtgcatcaggattctggatgtccctcaagggcacaagctcatggccgacgcccgaggtcggaaacctccccgtcggccccggcgagtacatctcttacatccctgtcaactccgctgcatcctcccgcttggaagccgacgtcgagctcgagcacgccgaatccatggagaaaacgcaattcggggatgtgaatgggaatggattggatcttgggattatggtgtccgccgctgttgccgatcttgatggcgccagggttgagctcaccagtgggaggatgctccccggcgtaaccacggcgccgtcgccgccggtgtccacggtttcgatgcctcccaccagctccgccttgctcccctcgccgccgccgacgcccctcacctgctcccgcgtcgtcttcgccgccgccaccgccgccacgtcgccggccgccggacctcctctcccgcctcgccccggagtaattggcaagaagaaacaaaagggaaaaaaagtggcggaaaattcatttttgggaggggaaatggccaccgcagaggcgaagcgccggcgccaccactcaccgccggcctccatcgccgccggcggcgattcctccacccctacctcggcggcgcccgccgactcgtcgtccccgtcgctggatctcatccccgacatagcccgccgcctgacgtccctggaggatttcttctccctgcgcgcctcctgccgcgcctaccgcgcgctcctcccggcgtcgcgccgcctcctcgcctcgcagtccccgctcctcctcgtctccctctacccctccttcgccgaggcgctcttccacccgcgcctccgccgcctccaccgcttccgcctcccatgggggcaccacctgcccccctcgcgctacaccctcctctacgcccacggcttcctcgtcacctccaccaccgccgccaacaactacccgccaaggctcctcctcctccgcctcttcaccggcgagcagctccgcctccccagggtcttcgcgcccttctcccgcgtcatcctcaccgcggacctcctcgtcgtcatcttcttgcccggccgggccaccgtccagcactgccgccccggggacgcgctctggcgcgttgcctccgcccctgcaccccatgtgttcgacgatttgatctctgtcaatggcaccctctacgcgctggttggcctccgtcttgccacgctccagctgtcggagagttcgctggagctgtcatttctgggaggagagcatgatgacgcgaacaggccggagggggatcggttcatgctcggggagtgtggaggcgaggtgttgctcatcagcgtggagcatgaggagagggttgtgtaccgcgtgttccgttgggcatctgagaaaaggaagtgggagatgatcaccaacttgggcgggcggcgcgccacccctgaacaacagttcactgatcagaccatcagtttggatctttcccagcttgtgttgatgcaagcctga

SEQ ID NO: 90888 - DNA, 831 bp, Oryza sativa
  Clone ID: PAT_MRT4530_89516C.1
atggaaaatgtaacagaaaaaggttttggagttaccaaggtgttcacaatagagctcaaatggctcggcattgtcccactcttaggtttcggtgtgtccgtggtccttggtagtggttttgaagtaatttctgttgggaagaaaaagcttgtacgttctgttcctacagaactgaataaagatcacaatgggatacttgagctagctcaggctgaaggttttgtcacagtagaacaagtcaagagaaagttctcgtggtcaactggccgtgccatcgatgtccttgaaactttgctcaaggaagggcttgctatgatcgacgatgggcacagggatggcaagcgcagatactggttcccgtgcgccactctcagttctgactcgattggtgccgatgccaagcgctcttccacccgcgcctccgccgcctccaccgcttccgcctccctcccatgggggcaccacctgcccccctcacgctacaccctcctctacgcccacggcttcctcaccaccgccgccaacaactacccgccaaggctcctcttcacctgcgagcagctccgcctccccaaggtcttcgcacccttctcccgcgtcatcctcacggcggacctcctcgtcgtcatcttcttggccggccgggccaccgtccagcactgccaccccggggacgcgctctggcgcgtggcctccgcccctgcaccccaagtgttcgacgatttgatctctgtcaacggcaccctctacgcgctggttggcctccgtcttgccacgctcgagctgtcggagagttcactggagctgtcatttctgggggggagagcatga

SEQ ID NO: 90889 - DNA, 198 bp, Oryza sativa
  Clone ID: PAT_MRT4530_89517C.1
ggccaccgacgaccggtttattgaggacgacttctccacctacggagagatcctagactccaagacaatcaacgacagggagacggggaggtcacgctggcaagctgtgggacgcacacctaaaggtagttgacgggccaccctaggacaggcatgaacgggaaggagctccacatacgtaaccaaccgtcaatgagg

SEQ ID NO: 90890 - DNA, 2487 bp, Oryza sativa
  Clone ID: PAT_MRT4530_89518C.1
ccgtaaactcctctgtcagaagaggaaagctgatcttggatcgttaacatcagatgattgtttgcgtgcgataagtaagctgaaggtccttggtagtggttttgaagtaatttctgttgggaagaaaaagcttgtgcgttctgttcctacagaactgaataaagatcacaatgggatacttgagctagctcaggctgaaggttttgtcaccgtagagcaagtcgagagaaagttctcgtggtcaactggccgtgccattgacgtccttgaaactttgctcaaggaagggcttgcgatgatcgacgatgggcacagggatggcaagcgcagatactggttcccgtgcgtcactctcagctctgactctactggtgcggatgccaatcatggccgacgcccgaggtcggaaacctccccgtcggccccggcgagtacatctcttacatccctgtcaactccgctgcatcctcccgcttggaagccgacgtcgagctcgagcacgccgaatccatggagaaaacgcaagttttcttggcacgacggcggcggtgaagacgtccacgccaagaagccaacgagcccagcgctgccgccgccgctctccagtgggaggatggtgaatgcctggatcgagtactcgcccaccttgtcgtcgccgtcgaagccatcgccacgtacgacggcgcctttgccgccgccggaagcgccagtttcatccgccgttccgcctcccgtgagttttaatccaatgcttccctcgcctccgcagctccccggcgtaaccacggcgccgtcgccgccggtgtccacggtttcgatgcctcccaccagctccgccttgctcccctcgccgccgccgacgcccctcacctgctcccgcgtcgtcttcgccgccgccaccgccgccacgtcgccggccgccggacctcctctcccgcctcgccccggtgccggccgccggcctccatcgccgccggcggcgattcctccacccctacctcggcggcgcccgccgactcgtcgtccccgtcgctggatctcatccccgacatagcccgccgcctgacgtccctggaggatttcttctccctgcgcgcctcctgccgcgcctaccgcgcgctcctcccggcgtcgcgccgcctcctcgcctcgcagtccccgctcctcctcgtctccctctacccctccttcgccgaggcgctcttccacccgcgcctccgccgcctccaccgcttccgcctcccatgggggcaccacctgcccccctcgcgctacaccctcctctacgcccacggcttcctcgtcacctccaccaccgccgccaacaactacccgccaaggctcctcctcctccgcctcttcaccggcgagcagctccgcctccccagggtcttcgcgcccttctcccgcgtcatcctcaccgcggacctcctcgtcgtcatcttcttgcccggccgggccaccgtccagcactgccgccccggggacgcgctctggcgcgttgcctccgcccctgcaccccatgtgttcgacgatttgatctctgtcaatggcaccctctacgcgctggttggcctccgtcttgccacgctccagctgtcggagagttcgctggagctgtcatttctgggaggagagcatgatgacgcgaacaggccggagggggatcggttcatgctcggggagtgtggaggcgaggtgttgctcatcagcgtggagcatgaggagagggttgtgtaccgcgtgttccgttgggcatctgagaaaaggaagtgggagatgatcaccaacttgggcgggcggtcgctgtttcttggcttggatggattcgcagcttgcgttgatcaagatcatccagggagctcgctgccgcggcgaacgcacacaatgcaacacctcgccctcctccgtccgctcatccatccctctccccttccggccgcgagtcccctcgctgcgcgatgccgcggcggccggggccgaggccgaggccgaggcgtccgctggagatgcgcgacggggggaggcgcgggcggcggcgaggttgaggagggggagggggaggggaagcgggaggcggcggcgtggctgagctcggcggtgggggagaaggtggacgagctgctgctgcgcgaggagaaccgcgcgctggtggaaggggtcgaggccgccgagcggcgggtggagcgggcgcgcgccgcgctcgccgacatcgagcgccaggaggccgccgcccgcctcgccagcgaggaggtccgccgcctcgagaggcgccgcgacgagttgtcagttattttcataagttgtgctttgtttggagtaacattccggtatgccattaggagagatctggacaatgtccaactaaaaacaggggctgctgctgcatttgcttttgtaagaggccttgctatggtggaatctgggaggccctttgagctgagcactgatgccttaatatcacttgcccttgatggtgcagactga

SEQ ID NO: 90891 - DNA, 573 bp, Oryza sativa
  Clone ID: PAT_MRT4530_89519C.1
atggggtcgtcgaaggggaggagccaatttagactaggaagcatgaggaggcgaccgggaatcgcgggcttgcagaacgcagcggctactcgtgaccaattccggctggttggggaaaatgtggccaaggtcaggaccgatgtcatgaaggagcagcttgcgacgtttcggacacagctcgaagaatttgcacgcaagcataaggtgatcacaatagagctcaaatggcacagcatattccaactcttaagtaactttgtgtacatggtccttggtagtggttttgaagtaatttctgttgggaagaaaaagcttgtgcgttctgttcctacagaactgaataaagatcacaatgggatacttgagctagctcaggctgaaggttttgtcaccgtagagcaagtcgagagaaagttctcgtggtcaactggccgtgccattgacgtccttgaaactttgctcaaggaagggcttgcgatgatcgacgatgggcacagggatggcaagcgcagatactggttcccgtgcgtcactctcagctctgactctactggtgcggatgccaagtcatga

SEQ ID NO: 90892 - DNA, 357 bp, Oryza sativa
  Clone ID: PAT_MRT4530_8951C.1
atggctcgaaacgccgtcgtggttgacgaggtcgaacagcgcgattctctaggtgggaacagtgccgcggcgcgcgaatcggtggcggcgacagcttcgccactggcggctggtcggccgctgctcctctatccagcgggcgcccccatcgagcgggagttcaccgctggggtggtggccggtaagcccgtcaacgggaggaggcagtggcagtgtgaggtcagcgacaaggagctccgggcgaagagttgcaaccacgtggaggtgatgatggtcaagaaggtcatggatcatgcaagcgccatccatgatgaagagttgagtagagccaaggctgtggggggtggggggccgtag

SEQ ID NO: 90893 - DNA, 295 bp, Oryza sativa
  Clone ID: PAT_MRT4530_89520C.1
tatatatatatatatatatatatatatatatcacacgtgtactagtactactctagcaagggatatgatcaggaggggcaagctctgagcaatggtccctgcaagatggccagttgctctagccattgatagaggtgcttacgtatggtgtaattatacaggaagggtaggccagcattagctaggaggcagctttgttaatttagccaacatgtattgatgtataagctactgatcgattaattaacagtactactattgtagaactactgctcaaaaaaaaaaaaaaaaaaaa

SEQ ID NO: 90894 - DNA, 561 bp, Oryza sativa
  Clone ID: PAT_MRT4530_89521C.1
atgcagagcaggcaaagcatcaaacaggttgaacgcgggcagcagtcaccatacctcgtcgcggcgcctctcgaggcggcggacctcctcgctggcgaggcgggcgggggcctcctggcgctcgatgtcggcgagcgcggcgcgcgcccgctccacccgccgctcggcggcctcgaccccttccaccagcgcgcggttctcctcgcgcagcagcagctcgtccaccttctcccccaccgccgagctcagccacgccgccgcctcccgcttcccctccccctccccctcctcaacctcgccgccgcccgcgcctccccccgtcgcgcatctccagcggacgcctcggcctcggcctcggccccggccgccgcggcatcgcgcagcgaggggactcgcggccggaaggggagagggatggatgagcggacggaggagggcgaggtggaccccacaatagaccgcctgtggacctccgtagcagtagggtggtcaatgactgcaaagtgggcccacatgtcagtgactggagaggcacaggacctctcttccaggtgtcaataa

SEQ ID NO: 90895 - DNA, 178 bp, Oryza sativa
  Clone ID: PAT_MRT4530_89522C.1
ccggaactgacgacagcaggaccactgaagcatcgccgtcgagaagcagtagcagtcactaggaagactggccgatctgcggtcgagctctgcccgagacacatgagcgagggatgacttctggaagatctacattcaggctgctccatccaagctcagcaaggcagaagtgactctt

SEQ ID NO: 90896 - DNA, 365 bp, Oryza sativa
  Clone ID: PAT_MRT4530_89523C.1
aaaaaaaaaaaaacttcccggggaaacaaaggcccaaaaatcaaaggggtcttcagcattttacaacttacaagagggggcaaatataccagcccaacttttttaaagaaagctggggggggaaatggaaccctttttaacaacgggaaaaatattgggtatagaaggaaaccctttgaacaaattaatggggaaataaattgggggggagcgtttcccccccaactcaaaaaaaccggacctttgaaacctaaaaggggggtgggcatccaagtgaccgggaagacccttttggggaagagggtcttgcccgacccgggggggaccccaatggaaaagggggccttgggggggggggggggggg

SEQ ID NO: 90897 - DNA, 313 bp, Oryza sativa
  Clone ID: PAT_MRT4530_89524C.1
gagggctcaccatcggcccggcggtgctgggcgtcgggccgtcgtcggggaagccggcgggggagtcctccagggcgtactggacggggttctgcgaggccatcggcgcggcggcgctcgccgggctggtgatcccgctcgtcgaggtcgccacggcgaggtacgggcgccgcacggggcccgcggcgagggtgccgcccccctacgcgacggtgatgcagatgcaggcggtgatgggcgcggagggcacggaggtgtgcgtgctcggcatggcgatcaagggcgacttccaggcggtggcgcgggaagcggc

SEQ ID NO: 90898 - DNA, 3674 bp, Oryza sativa
  Clone ID: PAT_MRT4530_89525C.1
gcacgaggctctctctcctcctcgactcaccgtctctctctctcccctcccgtctccggcgatcgctggcggcggcgtctccggcgaccgggccaccgccgccgccgccaaggagcgctccccctcattccccagatcggtagctgtctcgtcgccgtccccgatcctcctcctcttcctttcccccagatccacacccccccccctcgcgtactcggtcttagcctccgcggcgggaggtggtggtggtgtgggcggggggtgagctcgtgagtcagatccggtgatctgtgcgctgttgcggttgccatggacgacttccagggcctcctggcccgcgactttgggctgcgcccgcaggggaaggcggcgcccatgtcggccgcccgcgccgccgcgtcctccggatccgcctggtccaactccagatccgcatcggcgtcctccgccgccgccgccaccgccccgcccgcgcccttgtacgatgacctcttcggggccgcggcgccctccgccccgccgcccaaggccgcgccctcgccctccctcgacgccatctttgactccttcaaggagccctccgccccggatgccccacccaagccgaagcactcgtccatgccggtgtttgacaagccggtctacgatgacgacatcttcgatggggttcccggggtgaagagcagctcctcggcgcggtttgacgatgtattcggtggcagccacgcgccgccgccacctgcgtacgatgatctgcttgggggatttgggagcaagccggaggtgaaggaggtgctgccggaggagaagaggaagcctgagccggccgcttcatcggctgggtttgatgatttgatcccagggtttggcgggaggatcccgatgcgtgccagggagactgttggaactaaagataagaatgtgtccatgtcaacgtctaagccagctagcatggcaagtgacccatttgatgttcttggtacaacttcaacctcaaagcatacatcttcagggatattcacggatcccttggatgaactgggcaggcctgcaaaatctcaagggaaaaaacatgataatactgctgttgacagtggcctattcgaggactcaagcacttttaatcaggtcccaaaatcagaacctctgtttacctcagagttgaatgatgacttgaaagataggaatggctccaccaaagatcgagattcaagtcctgtgcaaaatttttccagaaaaaatacaacccaaaaaccttctgtggagaacttcgaaaatatctttcctaagtcacagtctgctcgatattctgatgttcatgttgacattggtgcctctggttcagagaaatacagtgggaatggtatggatgaccagtctccaagatctgatgagtccgaagatgagatctggcttacagtttctgagattcccctcttcacacagccaactagtgccccaccaccttcaagaacaccaccacctcttgctgttaagcaaaaaccacatggatcacaagcaaaaagaaaagatgacaattatccacgccggtctaaccaaaaccacaatcatcacagaagctcgtcaaatcaagctggttcttcttcaatagatgaactggaagattttgccatgggcaagtctcaaagttctgcctatgacaatgcaaatccttttaatgaggaagaatttgagcatagttcatcagcagcagcatctgcagctgctatgaaggaagcaatggataaagctgaggcaaagttcaagcatgcgaaggttgtacgggaaagggaacgcgatgcaaaacatagaaatagagaacagcaggaacaagatgatgaagcaaggttcaacacccaggatcatgaagagagagataggcaggaaagactagaacgggagagagagatgagacaaagggaggaaaaggagagagagcaaagaagacttgaagaggagagggaacttgagaaacagagagaaagagagagggctgctaggcaagctgtggaaagggctacaaaggaagcacgggaaagagcagctgcagaagcacgtgcaaaagcagagagggaggcacgccagcgtgcagagcgggctgctgttcaaagagctcaaaaggaagcacgtgagagggctgctgtagacgctagggaacgagctgagagggcagctgctgaagcgaaggagagggctgctgctgaagccaaggagaaggttgcaactcaagccagggatagggctgcagcagaaagagctgcagtggagagagctcaacaagaagcaaggaggagagctgaaagagcagcagtagagagggctgcttctgaggctcgggaacgtcaagctgctgaggctcgagaaaggcaggctgctgctgctgctgctgctgcagcagctgcagcaaaagaaaaacagagtaaaccggacgatcttgagtccttctttggtatgggagctcgagccaatagtgcgccgaagcaaagggctccaacagcggattcgatgttcaattctcaaactcaaaatagaggggcagcatcttctgcttcagcatctatgcggaaggcatcatcaacaacaaatattgcagatgacctatctgcaatatttggaggagctcccacatcatctgaagaatttcaagaaattgaaggagagagtgaagaaagaagacgtgctaggttcgaacggcatcaaaggacccgtgaacgagcggcaaaagccctggctgaaaagaatgaacgggatatgcaggttcaaagggagcaggctgaaagacatagaatttcagaaacaatggactttgagattaagcgatgggctgctggaaaagaaggcaatttgcgtgcattgctatcaactttgcaatatgtactttggccagaatgtggatggcaacctgtatccctgactgacttgattactgctgctgcggttaaaaaggtatatagaaaggcaacattgtgcatacatcctgacaaggtgcagcaaaagggggcaaatctacagcagaaatatgttgccgagaaggtgtttgatctccttaaggaggcatggaacaaattcaactcagaggaactcttctaaacggcctgcgcaaatgaaacatattgctcaccaatcttcacctgcatgaggcaatcggggtgggacagcacctcatagaacaaccgagctggagcagtcggtcggcggacccatgaaacgatgaagtgaaagttccaccataattacaattgtattgttattaccaatattgtttgttttattatacaccctcatcttctcccttctgtatgtgttgattcaaatgacatttcacagccacatgtggtggccctgcggcagaccctcatccagtaggtgtatattagcgttctttttgctcggttgatccagggttgtgtagcagcggatttggggtggccagtgttgtggtttttggattaggcacagggtttatttaccatggagggcccaaattgcatggatcatgaatgttgccagtttgatgccatgggcttttcgtaagttcaattatcttgtttatagtgaacttctggaacacacattggggatgttcctctgattcctgtgtgattttgtataaagttgatctggaattttgatttaaaaaaaaaaaaaaaaaaaactcgagactagttctccag

SEQ ID NO: 90899 - DNA, 1296 bp, Oryza sativa
  Clone ID: PAT_MRT4530_89526C.1
atggcggggaagcacggccgcaacggcttcgaggacgacgacgtcaatcccttcgcgggaggaagtgttcctcctgccaacaattctcgactcccacctctctcccatgagccagctgatttttacaatgtggacattcctcttgactcgtctaaggatttgaagaaaaaggagaaagaactccaggcaatggaagctgaactaaacaaaagagaaagggaactgaaaaggaaggaagaggctgcagcccaagctggcattgtcattgaagataaaaattggccaccctttttccctctcattcaccataatatttcaaatgagatacctattcatctacaaagaatgcagtaccttgcattttcatcgtttttgggattggcagccggccgggtattttggaatatcatagcaaccacaaccgcatgggtaaaaggggaaggtgttattatctggttgcttgctattatctacttcatatctggtgtacctggtgcttatgtgttatggtaccgccctctttataatgcaatgagaactgagagtgctttgaagtttgggtggttttttctgttttacctgattcatataatcttctgtgtgtgggcagctgtggctcctccttttcctttcaaaggaaaatctttggctgggattttgcctgccattgatgtcataggcaggagtgctatagtggggatattttactttgtcgggtttggattattctgccttgagtcactgctgagcattggtgtcattcagcaagtatacatgtacttccgtggaagtggaaaagccgcagagatgaaacgtgaggcggcacgtggtgctctgagctccgcattctgatgaaacatgccttgagcaaaactgtagccagatgatatgagtgggaggaaacacgaaacatgagttgccaatctagcattcgcatagtgtacatccctgacggctgaacagcgtgcggatttggaatcaccgaaagcacccagccattattatcttttttgctcttctgtaatatataagcagcgttcttgtatggacgcgttcaggtgtttgtttccatttgttgacaaagattttagatgtggacgtgtgttgatagggaatagacatacatacgcgtgcgcgagtgggatcacctgttttttattacttcctttgcagcatagttgcagcacgttgtgtttatctgttgacacgattttcgtgagttataagatgattgatgtcctctaaaaaaaaaaaaaaaaactggtccttaaaaaaaaaaaaaaaaaaaaaaaaaaa

SEQ ID NO: 90900 - DNA, 2624 bp, Oryza sativa
  Clone ID: PAT_MRT4530_89527C.1
atggtcgtcctcgtccaccaccacgcctactggtccaatctacccaacgaggatgccatggtgttgcaagatggatctacaaacacgaagcatgccaaaaccgatctaatcggatgcataagagacggctgcagccacgccgatgccttcctgccgtcctgcgtcgtgctgatggacaccaacgccgcccgcgactgcgacctccgcctcctccgctccgtctcggagtcagtcgaagagatcaatctcggcgaattaatctctcttggtattttctgctgtttgcatgtaacgccgcggcactacttttgccgattggtgcctccgcctacacggctggcctattatgccgccgctgttgggcgtctacgacttcaccgccggcctgcctccgtcgctgccgagtggtgcctccgcctacacggctggcctattatgccgccgctgttgggcgtctacgacttcaccgccggcctgcctccgtcgccgccgattggtgcctccgcctacacggctggcctattatgccgccgctgttgggcgtctacgacttcaccgccggcctgcctccgtcgccgccgagtggtgcctccgcctacacggctggcctattatgccgccgctgttgggcgtctacgacttcaccgccggcctgcctccgtcgccgccgagtggtgcctccgcctacacggctggcctattatgccgccgctgttgggcgtctacgacttcaccgccggcttgcctccgtcgccgccgactggtgtcctcgcctatacagttggttggtcacaccaccgttcatgggtgtccacgtcttcgccgaccggctggccttcgccgccgccgactggtgtttctgcctacacggctggcctattatgccgccgctgttgggcgtctacgacttcaccgccggcctgcctccgtcgccgccgactggtgtcttcgcctatatggttgattggtcactccgccgctgttaatgggcttcatcatctacaccactggcttggttccactggcgccgactgatgtttttgtcaccattgatggactgcttcgttcccacatcggctacttttgctgtcaccgagggaatattacaaagctaagtcatcatttgttttattctttatatgatattttgccttttcctctgcctcactacaccaattggtcttccattgagtggatccagatccagatatgcataaaagggattcatggctttaagcttatctcttacgctccaggaatggatcagtcagaacatcaccaccggctcgcctcgaccgccgccgactggtgtttccgcctgcacggctggcctattatgccgccattgttgggcgtctacgtcttcaccgaccggcttgctttcgccgccgccgactggtgtttccgcctgcacggctggcctattatgccgccgtcacggctggcctattatgccgccgttgttgggcgtctacgtcttcaccgaccggcttgccttcgccgccgccgactggtgtttccgcctgcacggctggcctttatgccgccgttgttgggcgtctacgtcttcaccgaccggcttgccttcgccgccgccgactggtgtttccgcctgcacggctggcctattatgccgtcgttgttgggcgtctacgtcttcaccgaccggcttgccttcgccactgccgactggtgtttccgcctgcacggctggcctttatgccgccgttgttgggcgtctacgtcttcatcgaccggcttgccttcgccgctgccgactggtgtttccgcctgcacggctgacctttatgccgccgttgttgggcgtctacgtcttcaccgaccggccgcctcgtccgccgccgactggtgcttccgcctgcacggctgacttattatgccgccgttgttgggcgtctacgtcttcaccgaccggccgcctcgaccgccgccgactggtgtttccgcctgcacggctggcctattatgctgccgttgttgggcgtctacgtcttcaccgaccggccgccgcatccgccgctgactggtgtcaccgcctgcacggctggcctgttataacgccaactgatgctatcttcttcacggctggctacatcgctgtcactactaataggcatcagtatcttcaacacaagctgcctacgtttgccatggctgccgactggtttcttcacttccatggctgcatgattctgccagtgttgattggccttaccatcttcatcgccgctaccactactgatggacatcatcgtcttccgtcgccgactggttatgccgccgccgactggtgctttcatcttcacaactgcgcgtcttcactaccagtttgcttctgttgccgccgactcgtgttcacttcatcacggcgatgcaactttgtcatcatggtagagcgacttcatatttattatcttcggcaccggcaaactctattgctgctgcttcgcaagttttgctacttcaccaaccacgacgtctttgtgaacctcgacatctcggcatgcgatgccgtgttattttactacaacaagtggctctccaatattcaggatttctacttggacatcttcaacacatatcttcaatcaagtgatgactac

SEQ ID NO: 90901 - DNA, 2546 bp, Oryza sativa
  Clone ID: PAT_MRT4530_89528C.1
atgggcgtccacgtcttcaccgaccggcatgcctccgtcgccgccgattggtgcctccgcctacacggctggcctattatgccgccgctgttgggcgtctacgacttcaccgaccggcttgcctccgtcgccgccgattggtgcctccgcctacacggctggcctattatgccgccgctgttgggcgtctacgacttcaccgccggcctgcctccgtcgccgccgagtggtgcctccgcctacacggctggcctattatgccgccgctgttgggcgtctacgtcttcaccgccggcctgcctccgtcgccgccgagtggtgcctccgcctacacggctggcctattatgccgccgctgttgggcgtctacgacttcaccgccggcctgcctccgtcgccgccgagtggtgcctccgtctacacggctggcctattatgccgccgctgttgggcgtctacgacttcaccgccggcttgcctccgtcgccgccgagtggtgcctccgcctacacggctggcctattatgccgccgctgttgggcgtctacgacttcaccgccggcctgcctccgtcgccgccgagtggtgcctccgtctacacggctggcctattatgccgccgctgttgggcgtctacgacttcaccgccggcctgcctccgtcgccgccgagtggtgcctccgcctacacggctggcctattatgccgccgctgttgggcgtctacgacttcaccgccggcctgcctccgtcgccgccgagtggtgcctccgcctacacggctggcctattatgccgccgctgttgggcgtctacgacttcaccgccggcctgcctccgtcgccgccgagtggtgcctccgtctacacggctggcctattatgctgccgctgttgggcgtctacgacttcaccgccggcctgcctccgtcgccgccgagtggtgcctccgcctacacggctggcctattatgccgccgctgttgggcgtctacgacttcaccgccggcctgcctccgtcgccgccgagtggtgcctccgcctacacggctggcctattatgccgccgctgttgggcgtctacgacttcaccgccggcctgcctccgtcgccgccgagtggtgcctccgcctacacggctggcctgttatgccgccgttgttggatgtctacatcctcaccgttggctcaccttcgttgccgtcgactggatccagatccagatatgcataaaagggattcatggctttaagcttatctcttacgctccaggaatggatcagtcagaacatcaccaccggcttgccttcgccgccgccgactggtgtttccgcctgcacggctggcctattatgccgccgttgttgggcgtctacgtcttcaccgaccggcttgcctccgccgccgccgactggtgtttccgcctgcacggctggcctttatgccgccgttgttgggcgtctacgtcttcaccgaccggcttgccttcgccgctgccgactggtgtttccgcctgcacggctggcctttatgccgccgttgttgggcgtctatgtcttcaccgaccggcttgccttcgccgctgccgactggtgtttccgcctgcacggctggcctttatgccgccgttgttggcgtctacgtcttcaccgaccggccgcctcgtccgccgccgaccgatgtcctcgcctgcacggctggcctttatgccgccgttgttgggcgtctacgtcttcaccgaccggcttgccttcgccgccgccgactggtgtttccgcctgcacggctggcctttatgccgccgttgttgggcgtctacgtcttcaccgaccggcttgccttcgccgctgccgactggtgtttccgcctgcacggctggcctttatgccgccgttgttgggcgtctacgtcttcaccgaccggccgcctcgtccgccgccgaccgatgtcctcgcctgcacggctggcctttatgccgccgttgttgggcatctacgtcttcaccgaccggccgcctcgtccgccgccgaccgatgtcctcgcctgcacggctggcctttatgccgccgttgttggacgtctacgtcttcaccgaccggcttgccttcgccgccgccgactggtgtttccgcctgcacggctggcctttatgccgccgttgttgggcgtctacgtcttcaccgaccggcttgccttcgccgccgccgactggtgtttccgcctgcacggctggcctattatgccgctgttgttgggcgtctacgtcttcaccgaccggcttgccttcgtcgccgccgactggtgtttccgcctgcacggctggcctattatgccgccgttgttgggcgtctacgtcttcaccgaccggcttgccttcgccgccgccgactggtgtttccgccttgacggttgacctactatgcaaatgctgatgagcgtctttgtcattatcattggttgctacactgctattggctggatcaccgacatcgtcatcttcatcatgtcggttgcgtttgtcgtcgtcaactattttcttcatcttcat

SEQ ID NO: 90902 - DNA, 341 bp, Oryza sativa
  Clone ID: PAT_MRT4530_89529C.1
gaactacatcggcggtggtgcgccgtcgcgggggccgctggactccggcagcagcgcgcggagctctgagccggctgcggagctcgcgaggcatgcggccgggcgaccgtagcggctggtgcggggtggtcacgagagggacgcgtgcggatatctccacacgcgggcccggtgcacccggacatcgcggatgcagcgcgctgacgctacgcgggccctgagacatggtttttggtgcccatgttgggggggatggtaacttctagaataataattagcttgtaataatattaatagtatcgggtctggtataatatcgtatttgtagtagcatctatcat

SEQ ID NO: 90903 - DNA, 462 bp, Oryza sativa
  unsure (1)..(462): unsure at all n locations
  Clone ID: PAT_MRT4530_8952C.1
cggcgtgcanggtctcatgatagagcttaccgcacgctgccaccagcgtactatgcggtgcagactgcgaccatctgagcgctagcaacggatgcgctggtgccggtgaaggcgaaacgcatccagcgctctcaggccactgagtggtctttgtcgggggcaccgcctttctaggactacaagttatgctggtccacaaccaccacctactcgagctactcgtcggatccgatctcgtcgatctcgccgctcctaaatttgagtggcaccagctcggaggcacgtcggacctcccagacgatcaccttctgccgccggagaagaagtccaagcacggtcagaacggcaagaacaaacctaagaagcgtggccgcaagccgaagcagctcccaccacatccctcgggcgcggaggcgtctgcccccgcgccaggcgaccggcgctggatccactgcggagtgc

SEQ ID NO: 90904 - DNA, 2018 bp, Oryza sativa
  Clone ID: PAT_MRT4530_89530C.1
tgccttcgtataccgctgactggtgtcctcgcctgcacggctggcctattatgccgccgttgttgggcgtctacgtcttcaccaccggccgcctcgattgccgccgactagtgtttccgcctgcacggctggcctatgccgccgttgttgggcgtctacgtcttcactgttggcttgcttcgccgccgccaactggtgtttctgcctatacggttggttggtcacaccaccgttcatgggcgtccacgtcttcaccgaccggcttgcctttgtcgccgccgactggtgtctccgcctacatggctggcctattatgccgccgttggtgggcatcttcgttttcaccgtcgaccgccttcgtcgccgccgactggtgtcttcattgttattgatggacgacattgttcccacattggccacctcagaacatcaccaccggcttgccttcgccgccgccgattggtgtttccgcctgcacggctggcctattatgccgccgttgttgggcgtcttcgtcttcaccgaccggcttgccttcgccgctgccgactggtgtcttcgtctacacggctagcctattctgccgccgttgttgggcgtcttcgtcttcaccgaccggcttgccttcgccgccgctgactggtgtctttgcctacacggctggcctattatgccgccgttgttgggtgtcttcgtcttcaccgaccagcttgccttcgccgccgtcgactggtgtctccatctgcacggctggcatattatgccgccgtttgttgggcatctacatcttcaccgaccggcttgccttcgcctccgccgagtggtgtctccgtctgcatgtctggcctattatgttgccgtttgttgggcgtctacgtcttcaccgaccggctttctctcgccgccgccgactggtgtctccgcctgcatggctggcctattatgccgctgttgttgggcgtctacgtcttcaccgccggctcgccttcgccgccgccgattggtgtctccgcctgcacggctggtttattatgccaccgttgtaggacgcctacatcttctccaatcggccaccccgtatgacgccaactggtgctatcgtcttcacggctggccatgtcgccgccaccgcaaataggcgtcatcaccttcaacgcaagctgtctacgtctgctgccgactggtttcttcacttccatggctgcatgattctgccagtgttgattggccttatcgtcttcaccgccgcgcctctccggctggtttatactgctaccactactgatggacgtcatcatttttattgctggccgctttgtctgacgccgactggcttgctcacctccatggctgcgcgttttcgtcatcattctacttcttccatcgccgactgctttgtcaccatggtggagcgatttcatctttattatcttcggcaccgacaaactctattgcctctacttcacaagctttgctacttcaccaaccgcgacgactacaagagtttcgacatctcggcatacgtcaccaaatatgatgccgtgttattttactacaacaagtggtgttccaatcttcaatatttctactcggacatcttcaatacgtatcttcactcaagcaatgactactcgatgacaagaagctacagtttttgactctatgtttagttgtttctcaactaaccaaagagtcgggggctacacaaatacaagactctcaaaatccgacaagctttatcaccgactttcatcgccgacttgttatttcgtcttcacggttggcctactatgcaactgccgatagaggatctcatcgttatcatcggctgctacatcgctattgactggatcaccgacattgtcatcttcatcaacatcctgtcaagcctcttcaacatagcctgctctactgccgttgatgggcaacttcgtcatcatagccggctatctctgttgccgctaatcatcattaccgtcggatgcgtttgccgtagccgactattttcttcatcttca

SEQ ID NO: 90905 - DNA, 1823 bp, Oryza sativa
  Clone ID: PAT_MRT4530_89531C.1
ctattatgccgccgctgttgggcgtctacgacttcaccgccggcctgcctccgtcgccgccgagtggtgcctccgcctacacggctggcctattatgccgccgctgttgggcgtctacgacttcaccgccggcctgcctccgtcgccgccgagtggtgcctccgcctacacggctggcctattatgccgccgctgttgggcgtctatgacttcactgccggcctacctccgtcgccgccgactggtgtcctcgcctatacggttggttggtcacaccaccgttcatgggcgtccacgtcttcaccaccggcctgcctccgtcgccgccgagtggtgcctccgcctacacggctggcctatcatgccgccgctgttgggcgtctacgacttcaccgccggcctgcctccgtcgccgccgattggtgcctccgcctacacggctggcctattatgccgccgctgttgggcgtctacgacttcaccgccggcctgcctccgtcgccgccgggtggtgcctccgcctacacggctggcctattatgccgccgctgttgggcgtccacgtcttcgccgaccggctggccttcgccgccgccgactggtgtttttgcctatacggttggcagacttcgccgccgttaatgggcttcatcatctacaccactggcttggttccactggcgccgactggtgtttttgtcaccattgatggactgctttattcccacatcggctacttctgctgtcatcgagggaatacgacaaagctaagtcatcatttattttattctttatatgatattttgtcttttcctttgcctcactacatcaactggttcgccgttgactatcagaacatcaccgaccggccgcctcgtccgccgccgactggtgtttccgcctgcacggctggcctattatgccgccgttgttgggcgtctacgtcttcaccgaccggccgcctcgtccgccgccgactggtgtttccacctgcacggctggcctttatgccgccgttgttgggcgtctacgtcttcaccgaccggcttgccttcgccgctgccgactggtgtttccgcctgcacggctggcctttatgccgccgttgtcgggcgcctacgtcttcaccgaccggcttgccttcgccgccgccgactggtgtttccgcctgcacggctggcctttatgccgccgttgttgggcgtctacgtcttcaccgaccggcttgccttcgccgctgccaactggtgtttccgcctgcacggctggcctttatgccgccgttgttgggcgtctacgtcttcaccgaccggccgcctcgttcgccgccgactggtgtttccgcctgcacggctggcctttatgccgccgttgttgggcgtctacgtcttcaccgaccggcttgccttcgccgctgccgactggtgtttccgcctgcacggctggcctttatgccgccgttgttgggcgtctacgtcttcaccgaccggccgcctcgttcgccgccgactggtgtttccgcctgcacggctggcctttatgccgccgttgttgggcgtctacgtcttcggccccggcaaacccgaccggccggccgactggtgtttccgcctgcacggctagcctttatgccgccgttgttgggcgtctacgtcttcaccgaccggcttgccttcgccgctgccgactggtgtttccgcctgcacggctggcctattatgacgccaactgatgctatcttcttcacggctggctacatcaccgtcaccgctaataggcatcatcatcttcaacgcaagctgtctacgtctactgctgactag

SEQ ID NO: 90906 - DNA, 2092 bp, Oryza sativa
  Clone ID: PAT_MRT4530_89532C.1
atgccgccgctgttgggcatctacgacttcaccaccggcctacctccgtcgccgccgagtggtgcctccgcctacacggctggcctattatgccgccgctgttgggcgtctacgacttcaccgccggcccgcctccgttgccgccgagtggtgcctccgcctacacggctggcctattatgccgccgctgttgggcgtctacgacttcaccaccggcctgcctccgtcgccgccgagtggtgcctccgcctgcacggctggcctattataccgccgctgttgggtgtctacgacttcaccgccggcctgcctccgtcgccgccgactggtgtcctcgcctatacggttggttggtcacaccaccgttcatgggcgtccatgcctccgcctacacggctggcctattatgccgctgctgttgggcgtctacgacttcaccgccggcctgcctccgtcgccgccgactggtgtcctcgcctatacggttggttggtcacaccaccgttcatgggcgtccacgtcttcaccgaccggcttgccttcgccgccgccgactggatccaaatccagatatgcataaaagggattcatggctttaagcttatctcttatgctccaggaatggatcagtcagaacatcaccaccggctcgccgtcgtcgccgccgactggtgtcttcgcctatacggttggttggtcacaacaccgttgtcaggcgtctacattttcaccgccggtttgctttcgccgccgccgactggtgtcaccgcctacacggctggcctattatgccgctgttgttgggcgtctacctcttcaccgaccggcttgccttcgccgccgccgactggtatctccgtctgcatggctggcctattatgccgtcgttgttgggcgtctacgactccaccaccggcctgcctccatcgccgccgactggtgtttccgcctgcacgctggcctattatgccaccgttgatgggcgtctacgtcttcaccgaccggcttgccttcgccgccgccgactggtatctccgtctgcacggctggcctattatgccgctgttgttgggcgtctacctcttcaccgactggccgccttgtccgccgccgactagtgtttccgcctgcacgctggcctattatgccaccgttgttgggcgtctacgtcttcaccgaccggccgcctcgtccgccgccgactggtgtttccgcctgcacgctggcctattatgccgccgttgttgggcgtctacgtcttcaccgaccggcttgccttcgccgctgccgactggtgtttccgcctgcacggctggcctattatgccgccgttgttgggtgtctacgtcttcaccgaccggcttgccttcgccgccgccgactggtgtttccgcctgcacggctggcctattatgccgccgttgttgggcgtctacgactccaccaccgacctgcctccgtcgccgccgactggtgtcctcgcctaaacggttggttggtcacaccaccgttcatgggcatccacgtcttcaccgaccggccacctcgtccgccgccgactggtgtttccgcctgctcgctggcctattatgccgccgttgttgggcgtctacgtcttccccgaccggcttgccttcgccgctgccgactggtgtttccgcctgcacggctggcctttatgccgccgttgttgggcgtctacgtcttcaccgaccggccgcctcgaccgccgccgactggtgtttccgcctgcacggctggcctattatgctgccgttgttgggcgtctacgtcttcaccgaccggccgccgcatccgccgctgctggtgtcaccgcttgcacggctggcctgttataacgccaactgatgctatcttcttcacggctggctacatcgctgtcactactaataggcatcagtatcttcaacacaagctgcctacgtttgccatggctgccgactgttttcttcacttccatggctgcatgattctgccagtgttgattggccttaccatcttcatcgccgctatcactactgatgaacatcatcgtcttccgtcgccgactggttatgttgtcgccgactag

SEQ ID NO: 90907 - DNA, 1358 bp, Oryza sativa
  Clone ID: PAT_MRT4530_89533C.1
atggaagtgaagaaaccagtcggcagccatggcaaacgtaggcagcttgtgttgaagatactgatgcctattagtagtgacagcgatgtagccagccgtgaagaagatagcatcagttggcattataacaggccagccgtgctagcggtgacatcagtcagtggcggatgcggcggccggccggtgaagacgcagacgcccaacagcggcagcataataggccagccgtgcaggcggaaacaccagtcggcggcggtcgaggtggccggcggaaacaccagtcggcggcggtcgaggcagccggtcggtgaagacgtagacgcccaacaatggcggcataaaggccagccgtgcaggcggaaacaccagtcggcagcggcgaaggcaagccggtcggtgaagacgtagacgcccaacaacggcggcataaaggccagccgtgcaggcggaaacaccagtcggcggcggcgaaggcaagccgtcggtgaagacgtagacgcccaacaacggcagaataataggccagccgtgcaggcggaaacaccagtcggcggcggtcgaggtggccggtcggtgacgacgtagacgcccaacaacggcggcataataggccagacgtgcaggcggaagcaccagtcggcggcggacgaggcggccggtcggtgaagacgtagacgcccaacaacggcggcataaaggccagccgtgcaggcggaaacaccagtcggcggcggcgaaggcaagccggtcggtgatgttctgactgatccattcaccagtcggcggcgacgaaggcggtcgacggtgaaagcgaagatgcccactaatggcggcataataggccagccgtgtaagcggaaacaccagtcgacggcaacgaaggtgagccaacggtgaggacgtagacatccaacaacggcggcataataggccagccgtgtaggcggaggcaccactcggcggcgacggaggcagaccggcggtgaagtcgtagacgcccaacagcggcggcataataggccagccgtgtaggcggaggcaccactcggcggcgacggatgcaggccggtggtgaagtcgtggacgcccaacagcggcggcttaataggccagccgtgtaggcggaggcaccactcagcggcgacggaggcaagccggcggtgaagtcgtagacgcccaacagcggcggcataataggccagccatgcagacgggaacaccagtcggcggcgacggaggcaggccggtggtgaagtcgttgttgcaatcagcaatggcggtggcgaggacaagccggcggagtggactcgcggccgatcgaccggaaagctgagacgcctcgagtccatgaccagcat

SEQ ID NO: 90908 - DNA, 687 bp, Oryza sativa
  Clone ID: PAT_MRT4530_89534C.1
atgtgggacccacgtgggtcccacgctgactcagtttgccacgtcagcaaaaactgggtacaatattatctaggacctcgggacccgaccatcatcccgctgggcttgtttggatctcttccattagtatttgtggatctcaagctacgagattatctccaatattgggtttctctgaatttttttcctgctcgactagcaattgcaactaaggaagtgcggacacccaagacattttttggccttggcgccaacaatggtgaagatattgagatgggtggtggtgacagtgactctgaacatgttgatctcacatatgagcatgtgaatccagtaattcaagctttaacaaggaagttcagatccaaggcatggaaagaatttgtaccgataatcattgataatgaagttggcgcaggaaaatatatgtggacttcgaatcaaacaatgggatgcatgtgtgcgacatgtcatttcattgacacggattggaagtttgtggaatttcggcttgggcaagcctttggtgaaaatgctaaagaaaggattgacaaagttaggaagatattgaacatgttgtttaaggagtactctgataaactcaaggataaccatgctaactcactgcgccaagctgaacatgttatggctatctctgaaaatgatcctatagctgattgggtttag

SEQ ID NO: 90909 - DNA, 2873 bp, Oryza sativa
  Clone ID: PAT_MRT4530_89535C.1
atgccgccaggcggcaacctcatccccgcgtcggccgcgtttgttgctatcgtcaaccgcgtttcggtcgtcgtgcacatggtcgccgagttttgcggagtttctggttgcttgcaggcctggcctattatgccgccgctgttgggcgtctacgacttcaccgccggcctgcctccgtcgccgccgattggtgcctccgcctacacggctggcctattatgccgccgctgttgggcatctacgacttcaccgccggcctgccttcgccgccgccgactggtgtttccgtctgcacggctggcctattatgccgccgctgttgggcgtctacgacttcaccgccggcctgccttcgccgccgccgactggtgtttccgtctgcacggctggcctattatgccgccgctgttgggcgtctacgacttcaccgccggcctgcctccgtcgccgccgagtggtgcctccgcctacacggctggcctattatgccgccgctgttgggcgtctacgacttcaccgccggcctgcctccgtcgccgccgagtggtgcctccgcctacacggctggcctattatgccgccgttgttggatgtctacgtcctcaccgttggctcaccttcgttgccgtcgactggatccagatccagatatgcataaaagggattcatggctttaagcttatctcttacgctccaggaatggatcagtcagaacatcaccaccggctcgcctcgaccgccgccgactggtgtttccgcctgcacggctggcctattatgccgccgttgttgggcgtctacatcttcaccgaccggcttgccttcgccgccgccgactggtgtttccgcctgcacggctggcctttatgccgccgttgttgggcgtctacgtcttcaccgaccggccgcttcgtccgccgccgactggtgtctccgcctgcacgtctggcctattatgccgccgttgttgggcgtctacatcttcaccgaccggcttgccttcgccgccgccgactggtgtttccgcctgcacggctggcctttatgccgccgttgttgggcgtctacgtcttcaccgaccggccgcctcgaccgccgccgactggtgtttccgcctgcacggctggcctattatgtcgccgttgttgggcgtctacgtcttcaccgaccggcttgccttcgccgccgccgactggtgtttccgcctgcacggctggcctttatgccgccgttgttgggcgtctacgtcttcaccgaccggcttgccttcgccgccgccgactggtgtttccgcctgcacggctggcctttatgccgccgttgttgggcgtctacgtcttcactgaccggccgccttgtccgccgccgactggtgcttccgcctgcacggctgacttattatgccgccgttgttgggcgtctacgtcttcaccgaccggccgcctcgaccgccgccgactggtgtttccgcctgcacggctggcctttatgccgccgttgttgggcgtctacgtcttcaccgaccggcttgccttcgccgccgccgactggtgtttccgcctgcacggctggcctttatgccgccgttgttgggcgtctacgtcttcactgaccggccgccttctccgtcgccgactggtgcttccgcctgcacggctgacttattatgccgccgttgttgggcgtctacgtcttcaccgaccggccgcctcgaccgccgccgactggtgtttccgcctgcacggctggcctttatgccgccgttgttgggcgtctacgtcttcaccgaccggctgcctcgtccgccgccgactggtgcttccgcctgcacggctgacttattatgccgccgttgttgggcgtctacgtcttcaccgaccggccgcctcgaccgccgccgactggtgtttccgcctgcacggctggcctattatgccgctgttgttgggcgtctacgtcttcaccgaccggctgcctcgaccgccgccgactggtgtttccgcctgcacggctggcctattatgctgccgttgttgggcgtctacgtcttcaccgaccggccgcctcgtccgccgccgactggtgtcaccgcctgcacggctggcctgttatgacgccaactgatgctatcttcttcacggtgccctcacctctacgtctggtttagacagctaccactactgatggacatcatcgtcttccgttgccgactggttatgccgccgccgactagtgcttttatcttcacaactgcgcgtcttcactaccgcctcgtaccgccgactcgtgttcacttcatcacggcaacacaactttgtcatcatggtggagcgacttcatctttattatcttcggtaccagcaaactctattgctgctacttcacaagttttgctacatcaccaaccatgacgttgttgtgaatctcaacatctcggcatgcgatgccgtgttattttactacaacaagtggctcttcaacattcatgatttctacttggacatcttcaacacatatcttcaatcaagcaataattattcgacgacaagaggctatagttctcgactctatgttcagttgtttcccaactaatcaaagaacattctacttcaacaacttcaaatatttcggtttagacgagttgggcaacaacatcaactctcctccaatatttcaccttcacggttgacctactatgcaaatgttgatgagcgtctttgtcattatcattggttgctacactgctattgactggatcaccgacatcgttatcttcatcatgtcggttgcgtttgtcgtcgtcaactattttcttcatcttcatgatggatggatttggtcatcgcttttaatcttcattgttagttgatctg

SEQ ID NO: 90910 - DNA, 418 bp, Oryza sativa
  Clone ID: PAT_MRT4530_89536C.1
caatatttaaagattcttcaattctgcatttgactatcattttagtttgtttctccagatgcccattcgagaggcttgtcatgttgctattcagagaagtaatcctatgaagcagaagctatggaagcatacacaagctaggcaactagcaaatggcagagcagtgccgttgttacaaattgtatcatttggttctgaattgagtaatcgtgcaccaacctttgatatggacctgtctgattttatggatggtgacaaaccaatatcctatgataaggccaaagaatatttctctcaggacccatcccaaaaatgggctgcatatgttgctggaaccaatccttgtgttgatgaccgagctaggtgtggtcttcacagacagcatgagcattctggtttcttcatcagttcctgaagg

SEQ ID NO: 90911 - DNA, 3491 bp, Oryza sativa
  Clone ID: PAT_MRT4530_89537C.1
atgtcgtccaattttgaggccaacaacaacaatggcgagaagcagctggtctgtgtgaccggagcaggtggcttcattgggtcgtgggtggtgaaggagctcctcatccgtggctaccacgtcaggggaacagccagagatcctgctgacagcaagaatgctcacctgcttgagctggagggagccgaccagaggctctccctctgccgtgccgacgtcctcgacgccgccagcctccgcgccgccttcagcgggtgccacggcgtcttccatgtcgcctccccggtgtccaacgaccctgacctggttccggttgcagtggaggggacgaggaacgtgatcaacgcggcggcggacatgggcgtgcggcgcgtggtgttcacgtcgtcctacggcgccgtgcacatgaaccccagcaggagccccgacgccgtcctcgacgagacctgctggagcgactacgaattctgccgccaaaccgacaacctgtactgctgcgccaagatgatggcagagatgacggcgacggaggaggcggcgaagagggggctggagctggcggtggtggtgccgtcgatgacgatgggtcccatgctgcagcagacgctcaacttcagcagcaaccacgtcgcccgctacctcatgggcaccaagaagtcgtaccccaacgccgtcgccgcctacgtcgacgtccgcgacgtcgcccgcgcgcacgtcctcgtctacgagcgccccgacgcacgcggccgctacctctgcatcggcaccgtgctccaccgcgccgagctcctccggatgctcagggacctcttcccccagtaccctgccactgcaaagtgtgaagatgacgggaagccgatggcgaagccgtacaagttctcgaaccagaggctcaaggatttggggttggaattcactccactgaggaagagtttgcatgaggcgctgccccggtcggtcatctacatgctgccgactctccgaggtcgcagggccgttgatggcttccgccggctactgctgatcgaggcattgcgacccaagctgatcgacgcgcacgactcgagatcaaacaatcattcactgcttgcggcctcgctgccacggttggtgtgtgccgccgccgttgccgatagcgacatcgtcttcaccactggcttgcctccgtcgccgccgattggtgcctccgcctacacggctggtctattatgccgccgctgttgggcgtctacgacttcaccgccggcctgcctccgtcgccgccgagtggtgcctccgcctacacggctggcctattatgccgccgctgttgggcgtctacgacttcacgccgccggcctgcctccgtcgccgccgattggtgcctccgcctacacggctggcctgttatgccgccgctgttgggcgtctacgacttcaccgccggcctgcctccgtcgccgccgattggtgcctccgcctacacggctggcctattatgccgccgctgttgggcgtctacgacttcaccgccggcctgcctccgtcgccgccgactggtgtctttgcctatatggttggttggtcacaccaccgttgttgggcgtctacgacttcaccgccggcctgcctccgtcgccgccgactggtgtcttcgcctatatggttggttggtcacaccaccgttgttgggcgtctacatcttcaccgaccggccgtctcgtccgccgccgactggtgtttccgcctgcacggctggcctattatgccgccgctgttgggcgtctacgacttcaccgccggcctgcctccgtcgccgccgagtggtgcctccgcctacacggctggcctattatgccgccgctgttgggcgtctacgacttcaccgccggcctgcctccgtcgccgccgagtggtgcctccgcctacacggctggcctattatgccgccgctgttgggcgtctacgacttcaccgccggcttgcctccgtcgccgccgagtggtgcctccgcctacacggctggcctattatgccgccgctgttgggcgtctacgacttcaccgccggcctgcctccgtcgccgccgagtggtgcctccgcctacacggctggcctattatgccgccgctgttgggcgtctacgacttcaccgccggcctgcctccgtcgccgccgactggtgtcttcattgttattgatggacgactttgttcccacattggaatggatcagtcagaacatcaccaccggctcgcctcgaccgccgccgactggtgtttccgcctgcacggctggcctattatgccgccgttgttgggcgtctacgtcttcaccgaccggcttgccttcgccgccgccgactggtgtttccgcctgcacggctggcctttatgccgccgttgttgggcgtctacgtcttcaccgaccggcttgccttcgccgccgccgactggtgtttccgcctgcacggctggcctttatgccgccgttgttgggcgtctacgtcttcgccgaccggccgcctcgtccgccgccgactggtgcttccgcctgcacggctggcctattatgccgccgttgttgggcgtctacgtcttcaccgaccggccgcctcgtccgccgccgactggtgcttccgcctgcacggctggcctattatgccgccgttgttgggcgtctacgtcttcaccgaccggcttgccttcgccgccgccgactggtgtttccgcctgcacggctggcctttatgccgccgttgttgggcgtctacgtcttcaccgaccggccgcctcgtccgccgccgactggtgcttccgcttgcacggctggcctattatgccgccgttgttgggcgtctacgtcgtcaccgaccggccacctcgaccgccgccgactggtgtttccgcctgcacggctggcctattatgctgccgttgttgggcgtctacgtcttcaccggccggccgccgcatccgccactgactgatgtcaccgctagcacggctggccttgttgattggcctattatgccgctgttgttgggcatctatatcttcatcgtcgctaccactactgatggacatcatcatcttccgtcgccgactgattatgctgccgccgattggtgcttttatcttcacaactacgcgtcttcactaccgacattctacttcaacaacttcaaatatttcggtttagacgagttgggcaacaacatcaactctcctccaattatttgtcttcacggttggcctactacgcaactgccgatagaggatctcatcgttatcatcggctgctacatcgctattgactggatcaccgacatcgtcatcttcatcaacatcttgtcaagcctcatcaacatagccaactctgctgccgttgatgggaaacttcctgacctgactgttgccgactggtttcttcgcctccatggttatgcaacttcattacctttgattggtgtcactgtttttactaccactgacatcttccgttacttctga

SEQ ID NO: 90912 - DNA, 414 bp, Oryza sativa
  Clone ID: PAT_MRT4530_89538C.1
gggatgatatggtgctacgcgtgcccggcgcgtcggcggcgcggacgaccgaggatgaacccgcttgcgcctggcgcgccggcgctggagaagctcgcgtgcgagaggatgctggtggcggcagggcagaccgacgggctggcggcgagggaccgcgcgtactacgacgccgtggcggcgagcccctggcgcgggacggcgacatgggtggagtcggagggggaggggcacgtcttcttcctggagaagccggagtgcgacaaggccaagcagctcatggaccgcgtcgtggagttcatatccgccgggtctcctgcctgattaaaaattagctccatccggatgcgccccgcgttgaagtcgtcgtaatgtatcgaacttatggctcgaataatttggactgatcatcttttc

SEQ ID NO: 90913 - DNA, 4587 bp, Oryza sativa
  Clone ID: PAT_MRT4530_89539C.1
ttaccaccacgcgacgaggcgcgggaacgacaacgacgaacgggcgcggcggagacagacgggcacaacggagacgaacggcgaggggacggcttcggcggcgatccttgaacgaaggcgagacgcggccggcacgaggcttgacgacgcggagccgaggacgaagacgaggacgggggctgcagcgacttgcttgactgatgcggacgacggatgagaacggcttgacggagggacgaacgccacgacgagcgaaaccgggaacgacgagaggacgatgacgacgacgaccggaaccggcgaggaggcgacgaggacagccggcagcggctgcacggagacgaggacgacgtgggacacgccgctgcgatgacgatgacggaggcggtgccgcgagacgacgagccgggcgaccgacgggacgtcgacgacgagaacgatcggagacgacgatgatggaccgcggaggggtttggatggaggggaagcgaggccaagagcgaccttgccgctgcgatgccggaggtggtggaggtgcagcgagccgacgagccggggaggaggaaggggcggccgaaaggacaccggcgacgaagaggatggagagaccggcgcggcgacggcgttccggcgaaaaccgaggagcagccggggtggagggcgatgcggcgacgccgagggaggagacggtgacgtcggccgacgctcaggcgaggcggccgggacagctggagatggtggagtggtggcgacaccactagtcgtcggtgaggacgcgtctccggtgatttccccgcgaaacggaggcgaagccgggaaagaggaggcagctgcgaggccgagggagaagacggcgcggccgggcggcgctcgggcgaggagaggaaggcggctggaggtggccggcgcgaaggaaagaggagggcgacggcgggaacgtagttccgggggtctcctcgcgaaacggagggcaggccggcgtggaggaggtggcggcgacgctggaggaggcgatggcgcggccggccggcgcacgggcgaggcggcacaggcggcactcggcggcgacggaggcaggccggcggtgaagtcgtagacgcccaacagcggcggcataataggccagccgtgtaggcggaggcaccactcggcggcgacggaggcaggccggcggtgaagtcgtagacgcccaacagcggcggcataataggccagccgtgtaggcggaggcaccactcggcggcgacgtaggcaggccggcggtgaagtcgtagacgcccaacagcggcggcataataggccagccgtgtaggcggaagcaccactcggcggcgacggaggcaggccggcggtgaagtcgtagacgcccaacagcggcggcataataggccagccgtgcaggcggaagcaccagtcggcggcggacgaggcggccggtcggtgaagacgtatacgcccaacaacggcggcataaaggccagccgtgcaggcggaaacaccagtcggcggcggcgaaggcaagccggtcggtgaagacgtagacgcccaacaacggcggcataaaggccagccgtgcaggcggaaacaccagtcggcagcggcgaaggcaagccagtcggtgaagacgtagacgcccaacaacggcggcataaaggccagccgtgcaggcggaagcaccagtcggcggcggacgaggcggccggtcggtgaagacgtagacgcccaacaacggcggcataaaggccagccgtgcaggcggaaacaccagtcggcggcggcgaaggcaagccggtcggtgaagacgtagacgcccaacaatggcggcataaaggccagccgtgcaggcggaaacaccagtcggcagcggcgaaggcaagccagtcggtgatgttctgactgatccattcctggagcgtaagagataagcctaaagccatgaatcccttttatgcatatctggatctggatccagtcggcggcggacgaggcggccggtcggtgaagacgtagacgcccaacaacggcggcataaaggccagccgtgcaggcggaaacaccagtcggcggcggcgaaggcaagccggtcggtgaagacgtagacgcccaacaacggcggcataataggccagccgtgtaggcggaggcaccactcggcggcgacggaggcaggccggtcgtgaagtcgtagacgcccaacagcggcggcataataggccagccgtgtaggcgaggacaccagtcggcggcgacggaggcaggccggcggtgaagtcgtagacgcccaacagcggcggcataataggccagccgtgtaggcggaggcaccaatcggcggcgacggaggcaggccggcggtgaagtcgtagactcccaacagcggcggcataataggccagtcgtgtaggcggaggcaccaatcggcggcggcagaggcaggccggcgatgaagtcgtagacgccaaacagcggcggcataataggccagctgtgcaggcggaaacaccagtcggcggcggcgaaggccagccggtcggtgaagacgtagacgcccatgtacggtggtgtgaccagccaaccatataggtgaggacaccagtcgacggaggcccaacaacggcagcatataataggccagccgtgctggcggaaacaccagtcggcggcgacgaaggcaagccggtcgatgaagacgtggatgcccaacaacggcgccataataggccagccgtgtaggcagagacaccagtcgacagcggcgaaggcaagccggcggtgaagtcgtagatgcccaacagcggcggcgtaataggccagccgtgctggcggagacaccagacggcggcgacgaaggcaagccggtcggtgaagacgtggatgcccaacaccggcgacataatagaccagccgtgtaagtggagacaccagtcaacggcggcgaaggcaggccggcagtgaagtcgtagatgcccaacagcggtggcgtaataggccagccgtgcaggcggagacaccagtcggcggcgacgaaggcaagccggtcggtgaagaggtggatgccaagcaacggcggcataataggccagccgtgtaggcggagacaccagttggcggcggcgaaggcaggccggcggtgaagtcgtagatgccgaacagcggcggcatattaggccagccgtgtagacggagacactagtcggcggcgacaaatgcaagccgatcggtgaagatgtggatgcccaacaacggcaacataataggccagccgtgtaagcggagacaccagtcggcggcggcgaaggaaggccggcggtgaagtcgtagatgcccaacagcagcggcgtaataggccagccttgtagccggagacaccggtcggcggcggcggcgaaggcaggccggtcggtgaagacgtggttgcccaacaacggcgtcgtaataggccagccgtgtaggcggagacaccagtcggcggcgacgaaggcacgccggtcggtgaagacgtggatgcccaacaacggcggcataataggccagccgtgaaggcggagacaccggtcggcggcggcgaaggcaggccggtcggcgaagacgtggttgcccaacaacggcggcgtaataggccagccgtgtaggcggagacaccagtcggcggtgacgaaggcaagccggtcggtgaagacgtggatgcccatgtacggtggtgtgaccagccaaccgtataggtgaggacaccagtcgacggacgcccaacaacggcagcatataataggccagcagtgcaggcggagacaccagttggcggcgacgatggcaagccggtcggtcaagacgtgcatgcccaacaacggcggcataataggccagccgtgtaggcggagacaccagtcggcggtgatgaaggcaagccggtcggtgaagacgtggatgcccatgcggaaacaccagtcggcggcgacgaaggaaagccggtcggtgaagacgtggatgcccaacaacggcggcataataggccagccgtgtaggcggagacaccggtcggcggcggcgaaggcggagacaccagtcggcggcgacgaagccaagccggcggtgaagttgttgatgttcaacagcggcggcataataggccagccgtgcaggtggagacaccagtcggcggcgacgatggcaagccggtcggtcaagacgtgcgtgcccaacaacggcggcataataggccagccgtgccagcagtgcaggcagaaacaccagtcggcggcgacgaaggaaagccggtcggtgaagacgtggatgcccaacaacggcggcataataggccagccgtgtaggcggagacaccggtcggcggcggcgaaggcaggccggtcggtgaagacgtggatgcccaacaacggcggcgccggcggtgaagtcgtagatgcacaacagcggcggcataataggccatccgtgcaggcggagacacaccagtcggcggcgacgaaggcaagccggtcggtgaagacaccggtcggcagcgatgaaggcaggccggtcggtgaagacgtggatacccaacaacggcggcgtaataggccagccgtgtag

SEQ ID NO: 90914 - DNA, 1422 bp, Oryza sativa
  Clone ID: PAT_MRT4530_8953C.1
gaacttcaaacttttttgtatagaatagttcaattcccttttagaggaaatgatctaacagaaagatttgtttacattatgaattcctaccttagcaagcaacaatgaatgcttaaagtgtaagtacatgtgattaaccgcataaaaataggggggtctgcataacatcttctgtagacccaaaaaaagtaattctaagaaaggcataataacctaaacaattttcagcaacaatattaatgggtagcagaatgaagcaaggtcaatcaccaaaagttcccgccacgagttcttgtcctcaattcgtcatccagaaacttacaggcagcagaggtgcatatcatcatctatgccattcctcctggaaattcttctagagttctagttaccatcattcgtggcaacatttgaaaagttgtggttctttgcaaggaatctcaggttctccatcagctcagatcgggttaagaagcgcatatcatcgttcttggtcgacgttgttaatgtgcgaggccagtttcatcagccaagtgaagctttgtgagtgacctaagattgtcggtcagcatagctttgctgaagtgatgcggaatgctgcttactgatgatctttcaaaagggctgggtggcacgtcattgatagtcggcttatgccgtgccagtgggctctcgccagggtcactgttagctttccgcttcttctggtgaatggccttcgccgcaatcgtggcaggcttttgggtggctgtatgcggtgtgatatccttgactaacttgagctgggacaacttctgagggatcgccacagccgtacgatagtcaactttgacagcagcactgccaagtctcgaggtgagcatctgcggggtgacatccttcaccaacttgacccagggcacctgccgagagatcggcacagcagtaccatggcttgcactggtggcaatgctagctggcttcccagtgaccatctggagggtggtgtccctcactaactggagctgaggcacctttgcagagatcatcggatcgttgcgatcacctgtattggaagtagagccaactagcttttgggtgttcgtttgttggctgatgtccttaacaagcttcacctgcgacaccttctgagggatcagggtaccagtagaaatgattgcattggaaatatcaccagctggtcttgggatgtccttcgtatgggtgatagcactgccggactcgaattgtgtcgccttcacaggaaccaagacagatgtacccatgccagcactggcagcagttccagcattactcaaggtgtcatgtggtgcagaaccttttaatctaccctttctttcagttggttgaaacatttcagaaccagcatggttgaggccagagcccactggaggctctggagtggcactcctgtcattagacagt

SEQ ID NO: 90915 - DNA, 343 bp, Oryza sativa
  unsure (1)..(343): unsure at all n locations
  Clone ID: PAT_MRT4530_89540C.1
acgtcacgcccttttccccggtccccgacctcgcctctccttcctcctctgctcccactccgcctcgccgccgcctccaccatgtacggcgtcggcggcggcgaggcggagtagaagcagaggaagaaggagaggcgaggtcggcgcaagcagaggtacgaggacgcgtaggacgacgaggagtccgaggagaggagaaagctcctgctttatagcgcncgnacgcggacgaccggncangggaggcgcggcaggaggacgaccccccccggcngcgnccgancgacaccaagacccncggccacgcgcagngccgaaaaaaaaaaaaaaaccgcncngccgc

SEQ ID NO: 90916 - DNA, 3945 bp, Oryza sativa
  Clone ID: PAT_MRT4530_89541C.1
atgggtataaatatgtacacccggggcaattgtctagtctacgtcggcgtcgttcaagactgcatcagtacgttcgacctcttggattgctccgcggcacgggcaagggataaggcggcggaggatgacgacaacaacgccggccctgtggacaacgctgagtctaggttcttcgacctggacacacgacggcaacgacggggcaacgacagctcgacggatttgatggtcgtcctcgtccaccaccaagcctactggtccaatctacccaacgaggatgccatggtgttgcaagatggatctacaaacacgaagcatgccaaaaccgatctaatcggatgcataggagacggctgcagccacgccgatgccttcctgccgtcctgcgtcgtgctgatggacaccaacgccgcccgcgactgcgacctccgcctcctccgctccgtctcggagccgccgctgttgagcgtctacgacttcaccgccggcctgcctccgtcgccgccgattggtgcctccgcctacacggctggcctattatgccgccgctgttgggcgtctacgacttcaccaccggcctgcctccatcgccgccgactggtgtccccgcctatacggtcggttggtcacaccaccgttgatgggcatcgtcgacttcaccaccggcctgcctccgtcgccgccgagtggtgcctccgcctacacggctggcctattatgccgccgctgttgggcgtctacgacttcaccgccggcctgcctccgtcgccgccgagtggtgcctccgcctacacggctggcctattatgccgccgctgttgggcgtctacgacttcaccgccggcctgcctccgtcgccgccgagtggtgcttccgcctgcacggctggcctattatgccgccactgttgggcgtctacgacttcaccgccggcctgcctccgtcgccgccgagtggtacctctgcctacacggctggcctattatgccgccgctgttgggcgtcaacgacttcaccgccggcctgcctccgtcgccgccgagtggtgccttcgcctacacggctggcctattatgccgccgctgttgggcgtctacgacttcaccgccggcctgcctccgtcgccgccgagtggtgcctccgcctacacggctggcctattatgccgccgctgttgggcgtctacgacttcaccgccggcctgcctccgtcgccgccgagtggatccagatccagatatgcataaaagggattcatggctttaagcttatctcttacgctccaggaatggatcagtcagaacatcaccgaccggccgcctcgcccgccgccgactggtgcttccgcctgcacggctggcctttatgccgccgttgttgggcgtctacgtcttcaccgaccggcttgccttcgccgccgccgaatggtgtttccgcctgcatggctggcctttatgccgccgttgttgggcgtctacgtcttcaccgaccggcttgcctttgccgccgccgactggtgtttccgcctgcacggctggcctttatgccgccgttgttgggcgtctacgtcttcaccgaccggcttgccttcgccgccgccgactggtgcttccgcctgcacggctggcctattatgccgccgttgttgggcgtctacgtcttcaccgaccggccgcctcgtccgccgccgactggtgcttccgcctgcacggctggcctattatgctgccgttgttgggcgtctacgtcttcaccgaccggcttaccttcgccgctgtcgactggtgtttccgcctgcacggctggcctttatgtcgccgttgttgggcgtctacgtcttcaccgaccggccgcctcgcccgccgccgactggtgtctccgcctgcacggctggcctattatgccgccgttgttgggcgtctacgtcttcaccgaccggccgcctcgcccgccgccgactggtgtctccgcctgcacggctggcctattatgccgccgttgttgggcgtctacgtcttcaccgaccggccgcctcgcccgccgccgactggtgtctccgcctgcacggctggcctattatgccgccgttgttgggcgtctacgtcttcaccgaacggccgcctcgtccgccgccgactggtgcttccgcctgcacggctggcctattatgccgccgttgttgggcgtctacgtcttcaccgaccggctgcctcgcccgccgccgactggtgtctccgcctgcacggctggcctattatgccgccgttgttgggcgtctacgtcttcaccgaccggccgcctcgcccgccgccgactggtgtctccgcctgcacggctggcctattatgccgccgttgttgcgcgtctacgtcttcaccgaccggccgcctcgcccgccgccgactggtgtctccgcctgcacggctggcctattatgctgccgttgttgggcgtctacgtcttcaccgaccggcttgccttcgccgccgccgactggtgcttccgcctgcacggctggcctattatgccgccgttgttgggcgtctacgtcttcaccgaacggccgcctcgtccgccgccgactggtgcttccgcctgcacggctggcctattatgccgccgttgttgggcgtctacgtcttcaccgaccggccgcctcgcccgccgccgactggtgtctccgcctgcacggctggcctattatgccgccgttgttgggcgtctacgtcttcaccgaccggccgcctcgcccgccgccgactggtgtctccgcctgcacggctggcctattatgccgccgttgttgggcgtctacgtcttcaccgaccggccgcctcgcccgccgccgactggtgtctccgcctgcacggctggcctattatgccgccattgttgggcgtctacgtcttcaccgaccggccgcctcgcccgccgccgactggtgtttccgcctgcacggctggcctattatgccgccgttgttgggcgtctacgtcttcaccgaccggccgcctcgcccgccgccgactggtgtttccgcctgcacggctggcctattatgctgccgttgttgggcgtctacgtcttcaccgaccggccatctgccgccgactggtgtctccgcctgcacggctggcctattatgccgccgttgttgggtgtctacgtcttcaccgaccggccgcctcgtctgccgccgactggtgtctccgcctgcacggctggcctattatgccgccgttgttggacgtctatatcttcaccgaccggccgcctcgtatgacgccaactggtgttatcatcttcacggctggcctcgtcgccgtcaccgctaatcggcgtcatcatcttcaatgcaagctgtctacgtctgctgccgactggtttcttcacttccatggctgcatgattctgccaatgttgattggccttatcgtcttcactgccggtcgtctcttctgctgttgactagtgccgtcgcctctactgctggtttatattgctaccactactgatggacatcatcattctacttcttccgttgccgactggttatgccgccgccaactggtgtttttatcttcatgactgcgcatcttcgccaccggtttgcttctgttgccgccaactcctgttcacgtcatcacggctatgcaactttgtcgccatggtggagcgacttcatatttattatctttggcactagcaaacactattgcctctacttcgcaagttttgctacttcaccagccacgacgtctacaagagcttgggcatctcggtatgcgtcaccaaatatgatgccgtgtcattttactactacaagtggttctacaattttcaagattcctactcggacatcctcaacacatatctttactcaagcaatgactactcgatgacaagaagctacagttctcgactctatgttcaattgctttccaac

SEQ ID NO: 90917 - DNA, 2250 bp, Oryza sativa
  Clone ID: PAT_MRT4530_89542C.1
atggcgcccggccggttcgtcaccagcagcatggaggccttctccaagctggtgatgatgccgatcgcgcgccacagcccgcttcgccgccacgccatgagcgccgccagcgaaatcctcaccgtcaggcgaaggatttctgaccgctccgactccgagctggtgtgcgggcaccctccatgccgccaccgcagcaacgccccgagcgccgccgggctgcctccacctcgctgctgctgtgattccacggaggaattcgcggcggggagaggattcattcggcctcgcctcgggctcggcaacctcctcgtcgacgttcgcctcgggctcggcaacctcctcatcgacgtcgagagagaagggagcgatcgccgcgccgacacggggccgtctccacctcgccgctgcgatttcacggaattcgtagcggggagtcgcttcatgcgtcgtcgcatcgggttcggcgatcgccgcgccgacgcggggccgcctccacctcgccgctgcgattccacggcattcgtagcggggagtcgcttcatgcgtcgtcgcatcgggctcggcgatcgccacgtcgacgcggggccgactccacctcgctgctgcgattccacagaattcatcaccgggggacgcttcatccggcgtcgcgtcgggctcggcgacctcgtcgtcgagagcgccgccgtggggccgtgtccacttggctgccgcgattccacggaattggtggcggcgcggatacgctacattcggcgtcacctgggcaacctgttccttgaggcggttgggaggatgaagccgcctgacgagatcatcttcagtatttgcctggatcatcgcctcctctcctcgagtctccctcctcgccgcctccacggcatcctctcccagggctccgcgccgccgccggatctccgcggcgtcgctggtcagtaccaactcgcggcgctgaaacgcatgaagcgaatcttgtggagggcaacgccgatggcatcagaattcagagcctcagccaaatcacaccgtgtcgtagaaatccatggcgagccacccgaacaagagaggattggactgcgtgtgttgctgcggaggcaatcatcatcgccgccacgacgacaccaaccactgagagcaagcgctagccatctgcaggtcctgaggaggtggtgttcaaattcacatgtccccaatgtgccaccatcgtcgtcgtcgccgccgccgccgccgtcgccgcctcagccaactaatcctgctgatttttggaaaattaacactcctctgaatcctagtgctactaaaactgagaagagtacaattgatgaaacacttcttcagctgaaattcgatccaaaagagtttgctagatgcaataagttgatggagacatacaatgtgttaggtcaagaatggacattcactaagctgaaggaacagaccaaatatctctttgattcattgattgtgctggttgagtcgtttcacgaggcaggctattgtttctctcagatatccacaagcaccgttctggtaacatcatcttggaaatttgttctgctagaggggtgttttgctcttaataactggagtgttgaaggggttagaaaggactacagagatattgctgttttgttcaggaagctcctatccgagtccatgggtgaagagacagttcatccccctgattttgggatgctactcagcttgatggaaaaggatggctttcggtacaagtacttgattggtactcacgtatcattgttacctgatgataacattaacattgcttatatgaagattcatgagttcattcggaaaattttgctggctgaagagaaggataaagccaggcaactgaaactcggtataacacgttacagtacaattagcacaagaataagaagacgcattccttacaagaatatctggttgaccaaggctcgaagcaattcattcatgacagcattcttggagcaaaacgaaagaaatatggagttaggagggacatattttgaactgcttgacactattagacatttcgtatgtcacaggctggacttgctgaagctcggtttcagatataaggcaaacgaggtagaccgcatgtggtatgcagagtttcctacacttttagctgagttgcagttagctctgttcctggttggtcgacttgaagaactggaattggagaagaactttatgaacagaaaaccaatgcgacccaaagtgtcaagccatggtactttctaa

SEQ ID NO: 90918 - DNA, 228 bp, Oryza sativa
  Clone ID: PAT_MRT4530_89543C.1
accacccgtgcttccacactacaaatctcctttggttccgtattacaattcttgattatctgcgacagtgaattcttcaacacaggcaaaaaattctcgacaaaacaacggaaaaaattctacattagacacctgatgcaacgcatcatttgttactctacgcaacgaatccgggacgataactcatactgatcatctgactctaactgaaacacttgatcctatcat

SEQ ID NO: 90919 - DNA, 1811 bp, Oryza sativa
  Clone ID: PAT_MRT4530_89544C.1
gaggatcccaaatacaccaatcgtgtcttggattttcccaaacgtccggcgcactctcgcccttcacctctcctccctctcacccttccattacatggatcagggagggaggaaggaggcctgaagtggcgcagagtaggcgcttgtaaacaaatccccccatttgcttcttttgcactgaagaatccctgaagaatccagcaggatggagaagaaggcgtccatcctcatgaaccggtatgagctcggccgcatgctcgggcaaggcaccttcgccaaggtgtaccatgcacggaaccttgcatccaaccagagcgtcgccatcaaggtcattgacaaggaaaaggtattgcgtgtcggcatgattgaccagatcaagcgagagatctccatcatgcgcctcgttcgccaccccaacatcgtccagctgcacgaggtcatggccagcaagagcaagatatactttgcaatggagtatgtccggggtggtgagctcttcagcagggtagccagggggcgactcaaggaggatgctgcgaggaagtacttccagcagttgataggggctgtggacttctgtcacagccgcggtgtctaccaccgagacctcaagccagagaacctcctcgtcgacgagaatggcaacctcaaagtgtcggactttgggctgagcgccttcaaggagtgtcagaagcaggacgggctgctccacacgacgtgtggcacacctgcatatgttgcaccagagataatcaataagaggggctatgatggagcaaaagcagacatatggtcttgcggtgtcatactctttgttctgcttgctggctacctcccattccatgactcaaatctaatggagatgtaccggaagataagcaaaggtgatgtcaagttcccacagtggttcactactgatgtccgaaggcttctgtccaggctgcttgatccaaatccaaacattaggatcaccgttgagaagctagttgagcatccatggttcaagaaggggtacaaaccagcagtgatgctatcacagccaaatgaatcaaacaacctcaaggatgtccatactgctttcagtgctgatcacaaggacaatgaaggcaaggcaaaagaaccagcaagctctttgaagccagtgagcttgaatgcatttgacatcatctccctctccaaaggatttgatctgtcaggcctgtttgagaacgacaaagagcagaaggcagactcacggttcatgacacaaaaaccagcatcagcaatagtgtcaaagctagagcagattgctgagacagagagcttcaaggtgaagaagcaggatggactggtgaagctccagggatccaaagaagggaggaaagggcagctcgcgatcgatgcagagatctttgaagtgacaccatccttctttgttgttgaggtgaagaagtctgcaggggacacgttggagtacgaaaaattctgcaacaagggcctaagaccttctctcagggacatctgctgggatggtcagtcagagcatccatcactggcacagtcatcaactctgactcagtcctctaagtcaatctcgagacatgccatttaagtgcaacctcataagagatgcagtaacaatccattttcctctctccttttccctttcatcaaagtgctgagcctgagagtattctcacttgagcatcaggcttagggctctttgatgataatttttgccagttttccttgtatagtagcagtttgtctacatggatctcctgttctttcaccaatagaaacagggagattgacaaaaaaaaaaaaaaaaa

SEQ ID NO: 90920 - DNA, 406 bp, Oryza sativa
  Clone ID: PAT_MRT4530_89545C.1
aggagaggggatttgccaaaattaccaaaggaaaggaaagcagcccaaacaaaacaaaagccaaaagaaaccttcgggggcccggcaccgataccccaaagaggggggccaccaaaaaaaagcgaatgggcttctccaaaaattccaaactctcaagggcccaaagcatacttcccaaacacaatcccaattctatattcaacaggacccctgcactgcccccgcaattttcaccaaccccccaaagaacagaaccctgtatcaaccaacccagggatggggggaccccagccggtttcattggccgggcaacacaacttccatctgaaaaatccccaccaaaaggccccccttggccccagggcataccggccccgttaaaacaatatcaggcctgaaaaccccc

SEQ ID NO: 90921 - DNA, 650 bp, Oryza sativa
  Clone ID: PAT_MRT4530_89546C.1
ggggcgcgagggcgccagacttcggctgcggctgcgacttcgccgccgtcgccgaactcctcccgcgcgctccgagcccatggtggcagacgtaaaactcgaaacagaagtcgaacgtcggagcacagccaaagaagaggacgttccgcaagtgcagataccgagacgtcgacctcgacgcgctgctcgacatgtacaccgatgacctagggcagttcttccgcgtgctcgcccgtataatggtccaaagggggctgaagatgaagccacatggcgctcatgatgaagctgaccatggcgaaaaaggatgcctctgctggacacaagccatagccagtgaggacccagctccggaacatgatcattgatcctgacatgatcgtatgcctcgctatggtgtacaatggcaagaccttaaaacagcttgagattataccagagatgatggtgcactaccttgcggagatgttcatctgctacaagccgattaaacacggcatgcccggaattggcgccacccactcctctaggttcatctctgtcacttgagcaatgcagagttctatgcatgcagaatgggtattgagcggtaagcgctcatggccttgtgcttgcagtatcacttgatgtttgcatcactgtatgtacct

SEQ ID NO: 90922 - DNA, 159 bp, Oryza sativa
  Clone ID: PAT_MRT4530_89547C.1
atggtgaggcggagccagcggtgggcggagtcggaatctgggagagaggcggtgaagagaagcttcgacgccgtcttccacctgctcccgtgctctcgtgctgtcaaccacccgccgcttgccgtcggccacctcacccctcgtgccgctcagcgttga

SEQ ID NO: 90923 - DNA, 2142 bp, Oryza sativa
  Clone ID: PAT_MRT4530_89548C.1
ttttttttttctaggaattgcatagagacatttctgtcacttgtatcaaacagggtaacagccgaaacaaaaagaagaaaatgtcagtagcaaagctaagcaaatgtttactgtgctataaaatcgcgaagacaaacacatatatttttcctatataacaaagcaaaaaattgacagttacattctgaggcctatccgattagcatagtttggaagggagaggattaactacatcaattttggtggcggaggtccagagagatcatgatgggtatgtttgagcttctggacccagtgagctagccaattcttgtgatcatgagttccttgcaagtttaagcatggcatattgtccagtgttccatctttatctagaaccgccttaaacttgtccaatatctgtactatttgccagaattcaggccttttatctggttgcgaggcccaacattgctcaattagaagccgtagtggcgcagggcagctactggggatgaccggcctctcgttcttatcaaaaacagcaaaagctgcctggaatggattcaagtcttcataaggtaccgacccggtaaacatttcccataagataaggccaaagctgtaaacatcaacctttcgaccataaggtttgtgcttcatcatctctggagccatccatctgaaagtcccagtgtcattcgccagagggtcacactctgcttcttcacaagatattccaaaatcaacaatcttcgcacaaaattctgaatcaaatatgatgttctctggtttcacatcacgatgaacaactccttgtgagtgaatatatccaatgccatttgcaatatccaaaccaattgaaatgatcttctctaaaggtagagatttgtgctcctgcttgtgcagaaatgttcttaaagaacccccagaaagaaactcggtgatgacacaaaagacaggtgggctactgcatgctccaatcagcttaatgacattaggatggttcaggcgggacagtgtggtgacctccgtgttgaactgcttttcaagctgcgcggccagctctgcatcttcctcatcctcaggttgcctgatgaacttcacggcgacaggctgctccttgtagattccatggaacaagcgactgtgcgccccggaggcgaacctgtgcccgatgagcagctgcgagcgatcgacggtccatttctcgagcacctcaagtgcggcgaccttcgcccttccattggcagaggaatccttcttatgcttcggcttgccatgcgctctcgccgtggcaaagacatgaggagggctcctgctcggcgccggtggagacgaaggcttccggcgcggtggcggtgtggaaaacctcttgcttgacgatttggcctccttgaacagctcaggaacgtcacgacgcaggggaggggaccttgctctctgcttcggcttcggcttcggcccctcgccggcaaccttgagagatgagctacgtgctgcagcatcagccaccagcatgttcttgttgcttgggaaaggaacagggctggaacacgccctctgcagcctcaaggtttgctcatcaggatggaaggagaactcgagaggcccagatgtggctgttgccttcgtgtcattttcagccttatcatcctgcttggtggacacttcttgcgacggctgatgatcacgaggcttctcttgctgctccggtttggcgtccgaggaggacgaagctgtctttgtctctgacaacggctgggcattcgacgatcctgtcgtccacggaacagaggaattcgccgaggtggtggccgagagcctcgtccttggttccaagttgaggctcttctcgtgctgctccagtttggcgtccgaggacgacgaagctggcttcgtctccgacgatggctgagcattcgacgatcctgtcgtcctcggaacggaggaattcgccgaggtggtggctgggagcctcgccctcggttccaagttgaggccatggagcatgaaccctgaaccgggccctctctgcctccgtgccgcgccgcggttgaactgctcgacgaatgcaccgaactgctccctgccggacttggagcggacgacggagtgggagaaccttgtccgccgaacccacgagtaatcctcctcgtccat

SEQ ID NO: 90924 - DNA, 1540 bp, Oryza sativa
  Clone ID: PAT_MRT4530_89549C.1
tgttaaaaaccccctcgaaacccaaggcggcgggcgtggtggtggactggacttttttcacctcactccgcctcgtccccgccccaaaggccacgctcccctccctcccaccaacccaccaccagcgtcacccatggcggcccagcgactcgccgccctccacgccgccgcgccgtcggccttctcctccacctcctccgcctcgcatggccgccccgcggcgcgatccagcaccaccgctctcctcccggtggccctcccgcgcgcctccgccaccctccgcgccgcaccttctcggctcctcccccaggaggcgaaggcggcggggagcggcaggtcggtgatgtgcatggcgtcggcgtcggcgtcggcggccgtcggcggcggtggcgtcgggcgcggcggagctgaaggccgctcgcgaggacatcagggagctcctcaagacgacgcactgccaccccatcctggttcgtcttggatggcatgattccggtacgtatgacaagaatattaaagagtggccacaacgaggctggagctaatggaagcttgagatttgatgttgagttaaaacatggagccaatgctgggctggtaaatgctctaaagcttgtccaacctatcaaggacaaatacccaaatatctcatatgcggatttattccagctggcaagtgctacagcaattgaggaagctggtggtccaaagattccaatgacatatggacggattgatgtcacaggtcctgagcagtgtccacctgaggggaagcttcccgatgctggcccaagtgcacctgcggatcacttgaggaaggtattttacaggatgggtcttgatgacaaggagattgttgtgctgtctggagcacatacacttggaaggtccagacctgaacggagtggctgggggaaaccagaaacgaaatatactaagaatggccctggtgcacctggtgggcaatcgtggacagctgaatggcttaagtttgataacagttatttcaaggagataaaagagaaaagagatcaggatctcctggtcttgcctacagatgctgcattatttgaggacccaacattcaaggtctatgcagaaaaatacgcagaggaccaagaagcattctttaaagactatgccggagctcatgctaaactgagcaatctgggtgcaaaattcaatcctcctgagggattcacgttggacggttaatgcgatgcgcatgagccagatcgctgaagtggccaaccacttttacagaaaggatcaagagagaaacactacacaatccaatttcctgctccaacgttgtgtcatcattccagatgaagcttttcctgaccacgagtcatattggatttggaaactgagtattcgaataaaaaaacagactggctagagaggcaaatttgagccgaacttgcggaccaaattcgacgagaaaccaaaaagaaaaacattttaatactattctttacttattatgctttaaaaaaaaaaaaaaaaaaaaaaaaaaaaaaaagggggggcctcgtgc

SEQ ID NO: 90925 - DNA, 391 bp, Oryza sativa
  Clone ID: PAT_MRT4530_8954C.1
gggacccaatgattagggatcactttttcattataggttttccatgctggtttaccaaaaaaaaacgttttaaacacccttaaaccaaacttaaggatacccattacaggtaaatagtacacaatgaaacgggacccgaccaaggaccaaaccaaacaacctttgtttctttggggaaaaaaaataggcaaacttgtgaaccctaaaacaaaagcagctccatgggtgaggacttactggccaccacggagggggagcaccagggggaggggggactccttttggatgttgaaatccccaagggggggggcattcttaaactgtttaccaaaaaaaaacaaaacctttttgtccggggggaagccctccttggcctggatttttgccttca

SEQ ID NO: 90926 - DNA, 651 bp, Oryza sativa
  Clone ID: PAT_MRT4530_89550C.1
atgaagccgttagggagaatgactgatgatccagttcagttagttgccgatctcatgttgcataatacaaaccaatgggatgtggagaaggtgcagcggattttccttccattggatgcggctgctattctgaacatgccaaggccgagaacagagcaagatgaattttgggcttgggcatgggacaaaacgagcatatttacggatctttttgatctcaagatgccacggttaaacccagctacatggtcgtgggacgtgttggatgcagatatcatgagcaaacgggaggcggcaattgcagtctctgtaatgtggaccatctgggggagccgaaacagctacaaccatggcgatgtcaagtaccagtcgttaaggtctgttgaattggttgatgagctcattaaatctctggagattccatctcaggaggacccatcggctgtggttcagaagtgggctccacctgctttgggatggatgaaactgaacactaatggagcactgaacttgaaggatggagttgcgggtgcaggaattgttgcacgggataatacaggaaactttgtcactgctgagtgtcgaagatataccatatcagtgatccgagcacagtggagatgctggcgtgtagagatgcagtcatgttag

SEQ ID NO: 90927 - DNA, 1041 bp, Oryza sativa
  Clone ID: PAT_MRT4530_89551C.1
atgctggccaaacaagcttggcgattgctggacaggcccgatagtctttgtgcacgtgttttgctggggagatacagcaaaggaggagatattctatctgctaattgccctcgaggtgcctcgtctacttggatcatcaaaggaagagagaatacaaaccaatgggatgtggagaaggtgcagcggattttctttccgttggatgcggctgctattctgaacatgccaaggccgagaacagagcaagatgatttttgggcttgggcatgggacagaacgggcatatttacggtgagatctgcgtacagggaactcattcagcgctgtggcctgtctgaacctgctacgggatcgtccacgggtgacgaggctacctggaaagcactgtggagactccggataatgcctaagataagagtgttctggtggcgggtggtgaaaaatttgctaccctgtgctgctgaactccgcagaagccatatgaaagaaataagtaattgtcctctctgtggcaatgacaatgaaacaaagtttcatgcattagtcgagtgtgagcatgcaaaattgttttggagtgcggctcaggatctttttgatctcaagatgccacggttaaacccagctacatggtcgcgggacgtgttggatgcagatatcatgagcaaacgggaggcggcaattgcagtctctgtaatgtggaccatctgggggagccgaaacagctacaaccatggcgatgtcaagtaccagccgttgaggtctgttgaattggttgatgagctcattaaatctctggagattccagctcaggaggacccatcggctgtggttcagaagtgggctcgacctgctttgggatggatgaaactgaacactgatggagcactgaacttgcaggatggagttgcgggtgcaggaattgttgcacgggataatacaggaaactttgtcactgctgagtgtcgaagatatgaccatatcagtgatccgagcacagtggagatgctggcgtgtagagatgcagtcatgttagcactgtaa

SEQ ID NO: 90928 - DNA, 1035 bp, Oryza sativa
  Clone ID: PAT_MRT4530_89552C.1
atggtcgccggcggcggccataggcacgtcggagcggcggctgagagaggggagggaagggggaaacgaaatgggcggtccacggctcaccccgggtcgacgacgacgacgggaacggcgaccggagcggaagaaggcggcggcgtggcacgggtcgtcggggacggcggcgttccggcggtcggcgggcgaaacggaggggtggacgaggtcggcgaggacgcggcggagccgaaggaggcgacgccgaggcgggagaaggtccgaggcgacgacggcggcggaccggagctcggcgggtatttttggccgacaatattagaggattgcttccgatattacaagggatgtcaagattgtcagaagtttggagcaattcaaagagcaccagcgttggctctgaatcctatcatcaagccgtggccattcagaggatggggtatggatatgatcggtcagattaatcctccttcaagtaaggggcatagatttatattggtcgcgaccgattatttcaccaagtgggtagaagctattcctttgaaaaaggttgatttaggggatgctatacaatttgtcaaggaacatatcatctaccgatttggtatcccttggaccataacaacagatcaaggttcaatctttgtgtccgatgaatttgttcagtttgccaatggtatgggtatcaattgcttcaagatctcttctttcatgtcgatcggcaattctattctaggctttttgaagcttaagccgatgttgctcaagaaggagtattctgcatccaggactatttatttccacttgtttgagtcggggttcatgccaagctataattgttggacatcccacggagagcaaggtgttgaaatggaggaagatgaagtggaagagaacaatattccggactttgctcagtacgttggatttgaaggaaatcaaatgggcgaggaggaaagggatgctgatggtaacgacgctgcggatgatcttggtcatatgttgcaggacgccaaggaggactgcgaaagataa

SEQ ID NO: 90929 - DNA, 375 bp, Oryza sativa
  Clone ID: PAT_MRT4530_89553C.1
ctttttggacctgacactgtgcggattcatcgtatcggtgttcttgggagccaggacggacttctacgagtgagtgcattaccgtgtcagcctcatgcgatccgacattctatacagcgttccctggctgatggtgatcaatgggcgcactgatctgatcacattaagtgtcccatctgtgggctatgaggatgcattgcgatgaatatactcagtcctgagaggggcgacacttacactataagcatagaggatagacgatgctttgatgtcaatcacgcctggtacacaggttgatggtacatggggtggtgatgatggactctggagtctcagaggtgctttggagtggatccttggcatccatgctcatgc

SEQ ID NO: 90930 - DNA, 120 bp, Oryza sativa
  Clone ID: PAT_MRT4530_89554C.1
ctctcgtgggtatatttagttctttgtgtccatcttttatgaacagaaaaacctccgggttcattatttgttcataatacatgcttccggaccccagggcaggatccggggcggccccta

SEQ ID NO: 90931 - DNA, 717 bp, Oryza sativa
  Clone ID: PAT_MRT4530_89555C.1
atggcgcctacccgcgcgcacgagccgggaggcgacggcggcggcggctacccgcgcgcgcgagtcgggaggcgacggcggcagcggatccccgtgcgcgcgagccgggaggcgatggcggctatcgacgacgcagacgactacggtgacgacgcggctggcgacgacggcgatcgcaagttgggagcagcagcagctagcagatgcgcgggcaacagagccggcgacggcgtagatgacaatgtccgcgcgacggtgactgcgcggacgacagcggtggtggctcacgacgaaaacctcgacgacgacccagggtgtgaaggcggaggcggcggcggccccgaatccatgccgctggccaaatccgcgcgagggcggagatcgcgtggaggcggcggcgcggccccgaatccatgccgccggcaaaatccgcgcggggcggagatcgcgtggaggtggcgaaggggtggatgccgcgcgggggcagagtcctccagacgacggcagccggggctagcgccgacgcagacgacagcggcggtggttggcgatgatgaccttggcaaacacagtcgatgggcgacgacgagcgtacgggaggctggggcggcgtcggatagtgttgacgaaaaaatcgaacacaccggcctgggggatctgcttagctcctgtgcaggtccaaagattggtgagatgcgggcgtgccagtcagtttga

SEQ ID NO: 90932 - DNA, 1112 bp, Oryza sativa
  Clone ID: PAT_MRT4530_89556C.1
tttttctgtccaggtgtttctggctgagcaatacacaccaacatcatagatattgcaggttccctccagaagcttgtttcctgagtaaatcaccaatgctgggttcaatgaatgcatctttggtatgttgtgccaacccaagcaataataggccaaggaattcagatatatcgaggcaacaaaaagatggcctgctttttgggaaaaaaaaagctttaccaagaaatatatatgactgtgagaacatttatgattttgattgttatatagtgttctccaaaggtggtccagccatctctgtcctctggggcaagcaattcacgcccgctggcaacatcaactccagggataaggtagaagattgtagagctatttgaaatgatccaggcacaactgtgagcgaggtcaacatccggagcacaaaaggcctgaacctacagaagatcagtgggagaggggcagtgttgatccaatccttaatttgctaaggaaacactcatggaactcaaaaggaagatcaacgatgggaaagaactgagttctgatgaaacgtggagaggcaatgattctgggaattaacagaactcaaggatctttggtgtgaaaaatgacatttaggaagagcgaacgtcctactgcatacaaggccaactccaaattgcaggcgaaggtctcttgttcgtggagtgaggttccagcctgttgttaccaatggcgatatgcagttgcagatgccaagtctatcacagatagcatggttgataatgacaagtctgtcgcagatagcatgattgattattgcaatgatatcaccaggcatgtttttccatacgaaatatgaccagaaaacatgtctttggatgactttggcattattccagatgatgattaatctgattcttcggatactaaaccttacgatggaactttctgatgttactggtagcaatgtatctcatgataagatcatggaattttcttgtgcagaagctctgatataaataagctctttcaaggttctggagctaagagaacttgcgaaatcttgaggaatcaagggctattaaaaaacgagtaaaaataaattggttgaactgttgagcaacatggtc

SEQ ID NO: 90933 - DNA, 686 bp, Oryza sativa
  Clone ID: PAT_MRT4530_89557C.1
ccggccgggcacaaaaagatttagcagagttggctttcaaagagaagaaaaaacaggagcagtgttcttataatgtgattgcgtacaaggataaaccacgtctccgaacagctttggagatgctgagaaccacaaaggaaatcgagagtcgtttggaggaggtttcgctgcccattatcattttgcatggtgagggtgatttggtcacagacccagctgtgagtaaagctctctatgataaagcgaagagctcagataagacgcttcgcctttataaagatgcatatcacgctatcttggaaggtgaaccagatgaggcaatttttcaagtcctcgatgatataatttcttggctggatcagcattctacaaagaaagttccatcgtcataaactgcaaaggcagcattgggaaaatttctttgctactgatgtatccttcgttgccgttgatccaagattccaacagttgcgattccattttggcaccagccctgtcatgtttcttttctgattgcaaatgtgcctgttgctcatcaagctgtgtacataatgtatattatccatcacaatttgtttcacaaaatttaggtaaggttttgcatgccacatataaatttgtaatatattcaaatgtttttctcgttatgtaatattttttagatttgattggcatatgtttgggtt

SEQ ID NO: 90934 - DNA, 335 bp, Oryza sativa
  unsure (1)..(335): unsure at all n locations
  Clone ID: PAT_MRT4530_89558C.1
aataaatctcctccattcccccaaatccatccatcatggagttccctcatcgccaccaccaccacgggcaccgcggcgacgacgacgacgacgatcgccgncgncattccgctccccgctccccgcctacgggncacgactcagcccnctncggcggggtccctacggggcaaagcgcctnctncgggctgggatccctacgctcgccaccccggcttncccacgactacgctcatnctnctncggcgtatgggggagggggctacggcaacgtcgtccacgtntcccacgaggtctncgccaccagagccacgccgactacgtggatcgagaca

SEQ ID NO: 90935 - DNA, 324 bp, Oryza sativa
  Clone ID: PAT_MRT4530_89559C.1
tcccgattggtaacactaaccgggaaaaaagatgcctactatctttagttccggttggtattgtggcggagagtacgaggcatctgccatctgagagatcgaggaggaggagacgggcagccttatctcttcacctcttcctgcactgaccttatctcttcatcccatctcttgctcttcctactccttctgtgctctaactcctttccttccctcccccatcaccccttcctcttcctcctctctaacttctcctctaactcctctccttccctccccatcatcccatcggcggccggcgggctcccagatggcggtggtggc

SEQ ID NO: 90936 - DNA, 792 bp, Oryza sativa
  Clone ID: PAT_MRT4530_8955C.1
atgctcgcgctccgcggccgcgccgtgtgcctcaactttgccaaccccgcctggctgctcgccgtgccgcccttggctaccctccgcagcgccgccgacgtctcgagcagcgggagtcgtcgtcgctgtctgtgtttccactcgccatcgacgccctgtccgccacatccgctccgccccgcttgtcacccgctccggcctcgtccgtcgcccatcgccgtcgtcgccttgagccccgtccgcgcgtcgtcaccccgcgcccgcgtgcccgcgtgctgccgccctcgcgtcgcctcctcgcgccccgccccgacgagctgtgcgtgccaccgtcctcacctccgtgtgcgtctcggccatgccgccgtcctcgccaccgcctccggccccgtccgcgtgcgtgtgcgccgccgcccccgcctgctgcagtgcgcgatcttttgcgcatttgtcttggtgtggccggccgtagttgtgcagatgatggaaaacctcgccggccggcggcggctcgggtggggagaacgaataacggcagtgctactgggggccgacgtcgccgcgggtgacggccgccgcgccggcgaggagtgcaggcggcggcgttggtgggggccggcggcgcggcgggcgacggccgcttcgccggcgaggagtggaggcggcggtgttggtgggggccggcggtgcggagggcgacggccgctgctccggcgaggagtggggacggcggcgctggtggggaggaggaataacggcggcgcctgtgaggagttagggcggcggcgctag

SEQ ID NO: 90937 - DNA, 1912 bp, Oryza sativa
  Clone ID: PAT_MRT4530_89560C.1
atggcatgcaaaaccttacctaaattttgtgaaacaaattgtgatggataatatacattatgtacacagcttgatgagcaacaggcacatttgcaatcagaaaagaaacatgacagggctggtgccaaaatggaatcgcaactgttggaatcttggatcaacggcaacgaaggatacatcagtagcaaagaaattttcccaatgctgcctttgcagtttatgacgatggaactttctttgtagaatgctgatccagccaagaaattatatcatcgaggacttgaaaaattgcctcatctggttcaccttccaagatagcgtgatatgcatctttataaaggcgaagcgtcttatctgagctcttcgctttatcatagagagctttactcacagctgggtctgtgaccaaatcaccctcaccatgcaaaatgataatgggcagcgaaaccaaaggaactgagatggtaatagatcggaaaagtagaccattggcaattctgcaacttgtaaaaaactcctccaaacgactctcgatttcctttgtggttctcagcatctccaaagctgttcggagacgtggtttatccttgtacgcaatcacattataagaacactgctcctgttttttcttctctttgaaagccaactctgctaaatctttttgtggaacaagcttctcttttggaagaagtctagccataaaaattagaacttgcttgcacatgggcgcaactagtattgcaccatcccattcatttggttgcttaaaatgaatcttcaatgcaactgctccacccatagattgaccaaacagaaagcttggaagacctctatgttcaggattttctttgaccttagtaaaatgttctgctacatcatcaacaagagtgtcaaaacttggtataaatccatgaagtccttccgagagaccaaaaccagggtaatctaatgcaaacactccatatccagctgaagcaatcttcctagcaataccatcgagaaaaaaggtacaggtatctccataaccatggcagagacaaacaattgcttttatgcgatgattctctggataccaacattttgagaaaatctccacgcccctggagtttttctcgtatgaagtgccactaccttgcgaaccacaaccaatgatcattaaaatagcaagctttgcatgaagaaactgtaaaataatagctagagcaagaaatagcacctcctttgttccaatatcgctatactgtcccttgaagaggcagtggtcgatgctgaccatcgagaaaaaagatgcaggtatctccataaccatcgcagaggcaagcaattgcttttatgcgatgattctctggatacccacattttgagaacatctccacgcccttggagtttttctcgtatgactcctttgttccaatatcgctatactgtcccttgaagaggcagtggtcgatgctgagctgcacgtccttgaacgcgtcgcggacgcggcggcgctcgggcgcctgatcgaggcacgccctgagcaccatccgctccagcgcctggtccaccccttcccacctcctcggcgcgggcgccgacgccgcggacatccccgccgcggtcgccgccgcaggagctgactgcacgtgtggcatatcccacacgaaaccaccccccggagcctgcacggatggatctccgctcctctcaacaagagagagaaagagtagtagtagtagtagtagtagtagtagtagtagtagtagtagtctagttgtctccggcgcacggaggccgccgcggccgttgtggccgtgccctcgccggcggcgtggggagggatcagaggaggaggagaggtggcgaatttgggagagaagcagaggagagagagagagaggaggaggaggaagaaaccgcggacgcgtgg

SEQ ID NO: 90938 - DNA, 228 bp, Oryza sativa
  Clone ID: PAT_MRT4530_89561C.1
atggaccgcatcgtcggccgcctctccgccgtcgatggcctctactacccgaccaccttcctcctcgctgacccgccgccgtccgccccgcaccgcaagaccgccctccccgcgtttctctcccacgacgcccctcgcctcctcgactgtgttcgttgcggagtggaaatagacgtgctccaacgcggcgagtcagcgaggaggacaagaaccctaactcggatctag

SEQ ID NO: 90939 - DNA, 440 bp, Oryza sativa
  Clone ID: PAT_MRT4530_89562C.1
tcgagcatattgagcttcgatcgcagccaggggaactctcgcgcgcgcagccggcaatggcgtcgctgtctgacccgaactcgccgccgcacgcacgtagacgaggactgccgcggtgcgctgcagctgctcagcgacggcacgggtgttcgagccgccgagccgccgccgccgatctacgtacgctcggacattgacgacggccgtgaccagtggaaggacgttgtgtacgacgccgcccacggcctcggcggtcggatgtacaggccggcggcgacggggggagcggaggacaagctgccggtggaggtgcacttccatggcggcgggtactgcatcggatactgcacctggcccaacttccacgccggatggcttcgggtcgacggcgagctacccgccgtggtgatctccttagactaccgcctagcgccggagca

SEQ ID NO: 90940 - DNA, 2047 bp, Oryza sativa
  Clone ID: PAT_MRT4530_89563C.1
atgggcatcgtcatctacaccgccggcctgcctccgtcgccgccgactggtgtccccgcctatacggtcggttggtcacaccaccgttcatgggcgtccacgacttcaccgccggcctgcctccgtcgccgcagagtggtgcctccgcctacacggctggcctattatgccgccgctgttgggcgtctacgacttcaccgccggcccgcctcgtccgccgccgactggtgtccctgcctgcacggctggcctattatgccgccgctgttgggcgtctacgacttcatcgccggcctgcctccgtcgccgccgagtggtgcctccgcctacacggctggcctattatgctgcctgggcatcttcgctttcaccgtcgaccgccttcgtcgccgccgactggtgtcttcattgttattgatggacgactttgttcccacattggccacttctgccatcaccaaggggaatattacaaagctaatcagaacatcaccaccggctcgcctcgaccgccgccgactggtgtttccgcctgcacggctggcctttatgccgccgttgttgggcgtctacgtcttcaccgaccggcttgccttcgccgccgccgactggtgtttccgcttgcacggctggcctattatgccgccgctgttgggcgtctacgacttcaccaccggcctgcctccgtcgccgccgactggtgtcctcgcctatacggtcggttggtcacaccaccgttgatgggcatcgtcatctacaccgccggcctgcctccgtcgccgccgactggtgtccccgcctatacggtcggttggtcacaccaccgttgatgggcatcgtcatctacaccgccggcctgcctccgtcgccgccgagtggtgcctccgcctacacggctggcctattatgccgccgctgttgggcgtctacgacttcaccgccggcctgcctccgtcgccgccgagtggtgcctccacccacacggctggcctattatgccgccgctgttgggcgtctacgacttcaccgccggcctgcctccgtcgccgccgagtggtgcctccgcctacacggctggcctattatgccgccgctgttgggcgtctacgacttcaccgccggcctacctccgtcgccgccgagtggtgcctccgcctacacggctggcctattatgccgccgctgttgggcgtctacgacttcaccgccggcgtgcctccgtcgccgccgagtggtgcctccgcctacacggctggcctattatgccgccgctgttgggcgtctacgacctcaccgccggcctgcctccgccgccgtcgactggcgtcctcgcctatacggttggttggtcacaccatcgttgatgggcgtcttcgctttcaccgaccggcttgcttccgccgccgactggtgttttcgcctatacggttggcggacttcgccgccgttaatgggcttcatcatctacaccactggcttggttccactggcgccgactggtgtttttgtcaccattgatggattgtttcgttcccacatcggctacttctgctgtcaccgagggaatacgacaaagctaagaatggatcagtcagaacatcaccaccggctcgccgtcgtcgccgccgactggagtcttcgcctatacggttggagtcttcaccgaccggccgccttgtccgccgccgactggtgtttccgcctgcacggctggcctttatgccgccgttgttgggcgtctatgtcttcaccgaccggcttgccctcgtccgccgccgactggtgtttccgcctgcacggctggcctgttatgacaccaactgatgctatcttcttcacggccggctacgtcgccgtcaccactaataggcgtcatcatattcaaacgcaagctgtctacgtctgctgccgactagtttattcacttccatggctgcatgattctgccagtgttgattggccttatcttcttcaccgccggtcatctcgtctgctgttgactagtgccctcgcctctacgtctggtttataccactaccactactga

SEQ ID NO: 90941 - DNA, 386 bp, Oryza sativa
  Clone ID: PAT_MRT4530_89564C.1
tttttgtacaactatgctttcatttggatttgaaggcccgacaaggtggcactactatctaacacatgtattccgaagaaccactgtggtacgcaggttgggagtaactatatgaacaagatcggcttcgggatatggtcgacaaaatgaaaaccgaaaactagggttacaaacaaattgcagagctctgtatgagctgagagaactgcttctactaaacgcatgcacggagcatctgaccagacccgtacggggttatgaacctgaggaggaaggaggcggaggtgcaaggtacgttggtcgatgtaatacagggtgccggccattgttctccttgacactatgaggagcttattgtcagggaagcagttgtggtcgaaggccag

SEQ ID NO: 90942 - DNA, 1011 bp, Oryza sativa
  Clone ID: PAT_MRT4530_89565C.1
atgagggcgggctcctttagtggtgccaactacgaccggggtgtctggatctatctctctggcgagcaaggggtagtggtgacgaaggaggagagacatatcgttgtctttgatatcgccggatgcggattcgaggaggaaggttaccctgttgtcgactacgagtcagcacttgagatcgccaagtcgacaacagattttgacgagatgggttcaagagatggattcttcgccagcaaactactcaacgacttcgtatattgggtgatacgacctgagcgaagtgcgttctccgatggatcgggatcttcgtcaagcttcaccaagcggcgcggcgagggcggcagtccggagcagggaggcggcggccggttgcgggaggggcgaccgctggagggctggtcgctggatgggtggcacgggagcggcggcgtcagagcaggcaagcggccagaccaatgtatgctagaaatgtttgtcaagaatgccaccaccaaggaaatatctatgttgattcaagttcatagcaacaatgagccagttgtagctcttccacttgctgattggccaacacctgaaaagatagctagtgggacagtacataatgcggctgacatacatgaggtgccatccactccatctcttgcagtgccatctcaggctactatatctcagcctagcagtagcacacaacttgttgataagtacttagcaaatccatttaaacaaaatgaacatgttggtgttgatgatgaaggcatctactccgatgatgaaattgttgcggttactgctgatggtgagcatgagcgtactgatgtgcctaaggtcaagggtccaagagccttatccttcgagaacgattctccgacgacaaggctgggggctagggagagtgagagacatagcgttgtctttgatctcgccggatgcggattcgaggaggaaggctactctgttgtcgactacgagtcagcacttcagaccgccaagtcgacaacagttagatag

SEQ ID NO: 90943 - DNA, 457 bp, Oryza sativa
  unsure (1)..(457): unsure at all n locations
  Clone ID: PAT_MRT4530_89566C.1
gtgaggtgctgcgttccttgcttcttctactccgatcttcaaccggagcgcggccctctccgagcccgctgaacaaaattctccaggacggcaagggaacacctagctctcagtgagcagcacaagcaaatcagcgaggggtaaagttagagggacggtgcacaacgtcacactgaattgatcaataatatcccaggagatgtatggtgtctaactggtgacgcataaggggacagagaatgagagcttataagatctaggctaacactctgatcgatgcgaggaaatagtataagacatggcgaccgtggcttagaacactggagggaaagatatcacctctcgatgaccatgacctgctatcggtggcttacagaaacatgatccagtgcctgacactcatctgnggaagaacatctattatattgtacactaggacgagagccgtcactatgag

SEQ ID NO: 90944 - DNA, 1173 bp, Oryza sativa
  Clone ID: PAT_MRT4530_89567C.1
atgggagcctgcctccgtcaccgccgactggtgtctctgcctacacagctggcctattatgccaccgttgttggacgtctacgacttcaccctgaacctgcctccgtcaccgccgactggtgccctcgcctatacggttggttggtcacaccaccgttcatgggcgtccacgtcttcattgatcggccggacttcaccaccgccgactgctgtccacgcctaagcggttggttggtcacaccaccgttcatgggcgtccacgtcttcaccgaccggcttgactccgccgctgcctactggtgtttccgcctgcacggccggcctattatgccgccgttgtcgggcgtccacgacttcaccgccggcctgcctccgtcgccgccgactggtgtcctcgccgatacggttggttggtcacaccaccgttcatgggagcctgcctccgtcaccgccgactggtgtttccgcctgcacggctggcctttatgccgccgttgttgggcgtctacgtcttcaccgaccggcttgccttcgccgccgccgactggtgtttccgcctgcacggctggcgtttatgccgccgttgttgggcgtctacatcttcaccgaccggcttgccttcgccgctgccgactggtgtttccgcctgcacggctggcctttatgccgccattgttgggcgtctacgtcttcaccgaccggcttgccttcaccgctgccgactggtgtttccgcctgcacggctggcctttatgccgccgttgttgggcgtctacgtcttcaccgaccggcttgccttcgccgctgccgactggtgtttccgcctgcacggctggcctttatgccgctgttgttgggcgtctacgtcttcaccgaccggccgcctcgtctgccgccgactggtgcttccgcctgcacggctggcctttatgccgccgttgttgggcgtctacgtcttcaccgaccggccgcctcgaccgccgccgactggtgtttccgcctgcacggctggcctattatgctgccgttgttgggcgtctacgtcttcaccgaccggccgccgcatccgccgctgactggtgtcaccgcctgcacggctggcctgttataacgccaactgatgctatcttcttcacggctggctacatcgctgtcactactaataggcattag

SEQ ID NO: 90945 - DNA, 1508 bp, Oryza sativa
  Clone ID: PAT_MRT4530_89568C.1
gagtcgccgacggccatggcgccggcggtgctcgtccccatcgacgaaggcagcgacggggagggcggtagcgccacggacgtcgcagccccctcccccgctcccatggacatcgacggcgacgacgacgggcgcgaccgcggaggagaaggcgatggcgctgcggcgagcgtcccggccgccgacggaagtagcgccgcgctctccctgacgctgggtctccacgtccacggcgacggaggcggcgcggaccgcctcagcgatctccacgaagacatcctcgccaaaattctgggccatctcagggacatccgcaacgtcgccaccaccgccgtcctctccaggcgctggctcgacctctggaccctggtcgacatcatcgtcttgcagtatgacgagccccccgactccagaatcgtgcaggaagttctcgccgcccgcgcgaggaatggttccacggccacggacatccgcctgctcgaggtcacctccctcaacagcgccacgccggacgccacggcctcctggctccgcgtcgccgcgccccgcctcaccggcgagctcttcttccgcaacaggtcctcggttccgtccgaaattctcaacgaggagatggacgtcgtggagcagctggtcgaggagcttggggacttggtggtggacgaatcgggcgccttcgagctgccctgcttcatgagggtcaccaagataacgctgagcctggggtttctcggcctatcgctaccaccatcgggtgtcttcgccaagctcagggagctgcacctggtgcacgtccagttcaatggcgaactcaccatggaagatgccatgctcccgtccttggaatggctagagattcgccattccagtggcttggcctccctgacgctcaggctggcgcctctgacccagatgactctgtacaatgtgcggcggttgcgtcggctcaacgccgtgcttccagggctcgaggtgttgtctgtaacggaatgcttcctcgaggatctggagggtgtgagcattgtggcagaggagctggaggacctgcggtggctagatatgatccagatccagatatgcataaaagggattcatggctttaggcttatctcttacgctccaggaatggatcagtcagaacatcaccgactggcttgccttcgccgctgccgactggtgtttccgcctgcacggctggcctttatgccgccattgttgggcgtctacgtcttcaccgactggcttgccatcgccgctaccgattggtgcttccgcctgcacggcagacttattatgctgccgttgttgggcgtctacgtcttcaccgaccggccgccgcatccgccgctgactggtgtcaccgcctgcacggctggcctgttataacgccaactgatgctatcttctttacggctggctacatcgctgtcactactaataggcatcagtatcttcaatacaagctgcctacgtttgccatggttgccgactggtttcttcacttccat

SEQ ID NO: 90946 - DNA, 414 bp, Oryza sativa
  Clone ID: PAT_MRT4530_89569C.1
ctccttctcgtcgcgggggggcccgtctcggctgcggcggcggcggcggagtaggccacggtggtggtggtggtggtgagtggggggaccatcgccgctggtggtcggttcagtcgggcgggcgggcgggctcaccggtcgttgacgaggagtttggttgaggggggccctgcggcatcagcggcggcggcgggatgtacgtgccgcagccatctctctccgatgcggccggccgcgacgccggcgaccagcctagggtttaccaggtttggcggggaagcaacgaattctttttgcgagggaggtttatatttgggcctgatgtgagatccatatttattactatgttcctcatctatgcaccagtggtggccctttgcgtgtttgtcgccagacaccttattgatgactttt

SEQ ID NO: 90947 - DNA, 1095 bp, Oryza sativa
  Clone ID: PAT_MRT4530_8956C.1
atggggcgtgtgctcgagaacagcgacaacgaggtcgatggggactcaacgactatgcaccttgcacaccctgccccccttttcttcctcttgagcgattctaagttccccttcctgctcatccttggcgagacattgatggcgtcgaacggacctcggcacctcgctaccaacttccacacgacgcaacatgtaaaaataaataaaacggcgtggcttcctgtgcaaggagaggaggaggaggagcacagggcacatgcggatgcggcgatgtggcagccaagagggaggatagctgggtcccacggtagtaacggccggcttcaccagcagccagcagccagcagcccaatccatccaccagccaaccacaccatcaccatggcgaaccgctgcgtcagcctcgacgccacctgggcccacctccccgcgccgcctccgccgccgccgcaccacacctggctctcccccgccgccgacgacgcgatcaccgccgcgctctgggcctccatggcgccgtcctccgcgtcctcgtactgtggctccgccgcctcgccgacgccgtcgacctccaccaccaccacctcctcctccgccgcgtcggcagagatcctcgcgggcggcggagcgcgggcggcggcggcggcgacgcggccgagcgggcgcgtgtcgaagcggaagccgcgcccgtcgcggcgcgcgcacaccacctacatcaccgccgaccctgccgacttccgccgcatggtgcaggagatcaccggcttccccgtccccggcgcccacaccgcctacccctccgcctccgcgtcgtcggccccggcggccccgcacgccgccgcagcgctcgcgtgcgtgctcccgactctggacacgtccgcgttcctgctcgaccgcgcttcacctccgccgccgccgccgcagccacagccggggcggaagaacgacaagacgcccaccaccacaatggcctccacgccgccgcagccgccggcggcggcggacgaggcggcggcgtcgtcgctgctgctgcaagagctggaggagttgatcggcgcgtcggccttcccgacattggagagctgggggatgatc

SEQ ID NO: 90948 - DNA, 789 bp, Oryza sativa
  Clone ID: PAT_MRT4530_89570C.1
atgacaataaagaaaggaggtagcgggcgagccacgaaggagtacaatggcaaagccactgacggtttggtgggacttatagaaagtcggctccagtttccgggcatagatcctctgtatattggtactaacaaccgagaggagagctactgctacagtatctatactaccgtaaggaacaataaaagcgtcgatcgatggatattttgtgaacatgtacgtggtttagaaatgaagcttgtacaacacaaaaaaaagaaacatcctgtccgtgtcgctctcaaggacgaccggggagtgtttgagaggcgaggaaaaaagaagatacgcaaaacgatgaagatccatatagatgcagtactacggatcgaagaggcgcgaccgatcggctgggtcaccggccggtcatgtcgtcgatcgtactgtcatctcaacgaaccaaccagccgatttgttgcactgtccatcgcttgcttctacctgtggttcatcaagtacgcttgtattgtacgtgaaggcgaccagacagccgtacgttgcgatgaattatcccggtttatctggatgcctgcctacgcccgccgaggcgtccagtctccatgggaaatgaagagaagcacgaccaactgcgtactcttctgcagtctatccggtctccttggctaccgcgaggttgcgaacttgaatgacaagtcaacaagtcgatcgaaagcagtgcaatccagacgccagcatggacaacgaggccggaagggactgcatgaagacctgcatcctaaggcccctctc

SEQ ID NO: 90949 - DNA, 2398 bp, Oryza sativa
  Clone ID: PAT_MRT4530_89571C.1
atggccaccgtgcaaagatcgactccaccgttctacaacttcctcaaggaaggtttcctcctccctagccgcaaccggagcttgttcgtggcggtcttcttgctcgtcgtcgcctccacgtcggttctcctccttgtcaatgacctcgccgtccagcccatcgccatggagatcctcctcgacgccaaggctctcaacaccaccgaccccctgaacctggactgtatagcattttaatttgcaagctggccatggccaccgtgcaaagatcgactccaccgttctacaacttcctcaaggaaggtttcctcctccctagccgcaaccggagcttgttcgtggcggtcttcttgctcgtcgtcgcctccacgtcggttctcctccttgtcaatgacctcgccgtccagcccatcgccgtggagatcctcctcgacgccaaggctctcaacaccaccgatcccatgagcccggacttcaccaagctcgtcaaagaaatccaggacgacacccgggagctgatgatcgccaccgcggcctactcactgttcgccgtcgtcatcggcttcgccatccgaatcatcatcctctttggcgcagtggccacgttctccggcgagcagcacacctttggcacgctgttgggcaaagccaggacgcagctcaagggcccgttgctgacgctggcctttgtattcgtcctggagatcgcctacgtcgcgcttctggtggccatggccggactcctcgccttcctcatggtgaagaagtactacgttccgtttcttctgctgtcgctgttcgtcctcgtcgggttcatcttcctcgtctacttctccgtcctctgctccttcagcgtcgtcgtatccgtggctgagccctggtgcgccgattggtgcctccgcctacacggctggcctattatgccgccgttgttgggcgtctacgacttcaccgccggcctgcctccgtcgccgccgagtggtgcctccgcctacatggctggcctattatgccgccgctgtggggcgtctacgacttcaccgccggcctgcctccgtcgccgccgattggtgcctccgcctacacgttgggcgtctacgtcttcaccgaccggcttgccttcgtcgccgccgactggtgtcctcgcctgcacggctggcctattatgccgccgttgttgggcgtctacgttttcaccgaccggcttgccttcgccgctgccgactggtgtttccgcctgcacagctggcctattatgccgccgttgttgggcgtctacgtcttcaccgaccggcttgccttcgccgccgccgactggtgtttccgcctgcacggctggcctttatgccgccgttgttgggcgtctacgtcttcaccgaccggcttgccttcgtcgccgccgactggtgtcctcgcctgcacggctggcctattatgccgccgttgttgggcgcctacgtcttcaccgaccggcttgcctttgtcgccgccgaccgatgtcctcgcctgcacggctggcctttatgccgccgttgttgggcgtctacgtcttcaccgaccggcttgccttcgccgccgccgactggtgtttctgcctgcacggctggcctttatgccgccgttgttgggcgtctacgtcttcaccgaccggccgcctcgtccgccgccgactggtgcttccgccggcacggctggcctttatgccgccgttgttgggcgtctacgtcttcaccgaccggccgccttcgtcgccgccgactggtgtcctcgcctgcacggctggcctattatgccgccgttgttgggcgtctacgtcttcaccgaccggcttgccttcgccgccgccgactggacgcagctcaagggcccgttgctgacgctggcctttgtattcttcctggagatcgcctacgtcgcgcttctggtggccatggccggactcctcgccttcctcatggtgaagaagtactacgttccgtttcttctgctgtcgctgttcgtcctcgtcgggttcatcttcctcgtctacttctccgtcctctgctccttcagcgtcgtcgtgtccgtggctgagccctggtgccacggagccggcgcgttcgggcgggcgtggaggctggtgaaggagaagaagcggcgcgccgtgctcttcgtcgccgccatctccgtgcttgctgccatagtctcggcggtatacaagctctccatggcaggcgcgcggagcagcatcgtggctgggttgcttcttggcctcgtctacgcgatcctgatgggcgccgtggagttgttcggtgtttgctccctcaccgcgttctactacgagtgcaaggggagcaacgaggtggtgactactgatcagtacgtcagagtgtccactgatgaacaacctaagccttga

SEQ ID NO: 90950 - DNA, 775 bp, Oryza sativa
  unsure (1)..(775): unsure at all n locations
  Clone ID: PAT_MRT4530_89572C.1
cggacgcgtgggcggacgcgtgggcggcgatggcggcggcggtggagacggttcttgatgtgttcgctcttgatgtcttcttgatgagatatgatgttgatgtgctcttgattaatgatgttctatacgacaggaaactgcctctgtacctcctgccactctcgacgacgaccgtaagcaactactagagaagcttcctgnttggcagtttgaaatggaatgctaaagacacccgcctcaatcggtttgatcatctactgcttcctttgtgtatggtttgttggcggtctttctgtcttccattgctattcgatgagaaaaaaaaaggaaaatcgtgtctcgtctcgtctcgtcttcgtctcccccgattcccgagcagcttctcgaaaccctcgcggcctcgattccggcgatggcggagcccaacccgcaagtggagagggaggtggaggtggaggaggtgaggtattctgcagccgtattcctccttcaaagaacaatttgcgggcaagggtcacagttgagcaagggctacagcaaacccgtgtagcatcaagaggttttatgagccccaacatgggcaaacctgttggggatcttgaaatgggcaggaagccggtgccttgggatgaaccgaggacagcagctgatattagggacttggaagcaggtctcgggggctttttggatgaaaaagaaggtagacttaacgcatgcatccccagatctggagcaggacgaccttccaactgatcctatgaaaggacgagctggc

SEQ ID NO: 90951 - DNA, 1363 bp, Oryza sativa
  Clone ID: PAT_MRT4530_89573C.1
acgatggggcgggaaggcacggtgccgcagaatggggctgcgggatcgcttcggtcacgcggcctctactcggtgccgcacattggggctgcgggaccgtttcggtcctgcgcctgctggccgtccgatccccgtccagtcccgcgggcaaagccttcccgcatagccgcgccgcgggaccgactcggttctgcgcttccagcctgcgtgaccgagtcggtcccgcaacgccaatccgcgttaccgcccgaaccccacctccctaccccatcccccgcgcgcggcccccctccctcttgcgcaccctcctccgggcgccgcttttttctctccctcctcccgatctctctctcctatcccgccacctccgtttttctctccctcctccctccaccccttcccactctctcctctcctcccagtccatctcccctccgtttttctctccctcctccctccaccccttcccactctctcctctcctcccaatccatctcccatcctcccgccgctatctcgaactccctccatgactcgacctcgcccttcaccctgaccgccgccgttgccccttccgtcctccccgagacaggcggtcatcgcgtgtctcatccccaagctccgccgcttctcccagtcctcctaaccctagcagctcccatgccctgcggccgttgccaccatcggaagaagtggtcgttggcagctcctgcccacctgtcgtgctcccgtccgccgccggatccctccagcgccggccactcaggctcgccccgcaccccacgcgatgcccatcctcccatctccctcttatcctcctccccatcctcccatcacgcacgcgctaccattaatcctcctctccatcctgcccatcctgccctctccctctcctcctccccatcctcccatcaccctctccctgtccctctcctcctcgacgacggcggcgccctcggttagggcggcggatccatctccggccgccgtgtggaggccggattcgtcaccagccaccgcggggatgctggatccgtcaccggccactgcagggaggccggatctgtggtgtgccaccgcggggaggccggaaccgtcccctgccaccacgaggaggccggatccatcgccggtgatcgcggggacgacagtggcgggcctcaggcatggtggcgacgatgcgctttcgtcttcttcgttgcttcccacctccacccacccatccatgtcgcgtcgcatcgcatctcctcccatttatatagggtcgaaatggtgggagattgagtaggagtacgacgaggagaccacgtggggacgatcgagggcgatggtgatggcaaggtggaatcggaatcggggtcgt

SEQ ID NO: 90952 - DNA, 3213 bp, Oryza sativa
  Clone ID: PAT_MRT4530_89574C.1
actacgcggcactattgaggcgattgatgctggtcatggactcgaggcgtctcagctttccggtcgatcggccgcgagtccactccgccggcttgtcctcgccaccgccattgctgatagcaacaacgacttcaccgccggcctgcttccgtcgccgccgaccggtgtcatcgcctatacggttggtcggtcacaccaccgttcatgggcgtccatgtcttcaccgaccggctggccttcgccgccgccgactggtgtttccgcctgcacggctggcctattatgccgccgccgttgggcgtctacgacttcaccaccggcctgcctccgtcgccgccgactggtgtcctcgcctatacggtcggttggtcacaccaccgttgatgggcatcgtcatctacaccgccggcctgcctccgtcgccgccgactggtgtcctcgcctatacggtcggttggtcacaccaccgttgatgggcatcgtcatctacaccgccggcctgcctccgtcgccgccgactggtgtccccgcctatacggtcggttggtcacaccaccgttgatgggcatcgtcatctacaccgccggcctgcctccgtcgccgccgactggtgtccccgcctatacggtcggttggtcacaccaccgttgatgggcatcgtcatcctcaccgttggctcaccttcgctgccgtcgactggtgtttccgcctacacggctggcctattatgccgccgctgttgggcgtctacgacttcaccgccggcctgcctccgtcgccgccgactggtgtttccgcctacacggctggcctattatgccgccgctgttgggcgtctacgacttcaccgccggcctgcctccgtcgccgtcgagtggtgcctccgcctacacggctggcctattatgccgccgctgttgggcgtctacatcctcaccgttggctcaccttcgctaccgtcgactggtgtttccgcctacacggctggcctattatgccgccgctgttgggcgtctacgacttcaccgccggcctgcctccgtcgccgccgagtggtgcttccgcctacacggctggcctattatgccgccgctgttgggcgtctacgacttcaccgccggcttgccttcgtcgccgtcgactggtgtctccgcctacacggctggcctattatgccgccgctgttgggcgtctacgacttcaccgccggcctgcctccgtcgccgccgagtggtgcctccgcctacacggctggcctattatgccgccgctgttgggcgtctacgacttcaccgccggcttgccttcgtcgccgccgactggtgtcctcgcctgcacggctggcctatcatgccgccgttgttgggcgtccacgtcttcgccgaccggctggccttcgccgctgccgactggtgtttttgcctatacggttgacggacttcgccgctgttaatgggcttcatcatctacaccactggcttggttccactggcgccgactggtgtttttgtcaccattgatggactgcttcgttcccacattggctacttctgccatcaccaaggggaatattacaaagctaagatccagatccagatatgcataaaagggattcatggctttaagcttatctcttacgctctaggaatggatcagtcagaacatcaccaccggccgcctcgtccgccgccgactggtgttctcgcctgcacggttggcctattatgccgccgctgttgggcgcctacgtcttcaccgaccggctcgcctttgccgccgccgactggtgtcctcgcctgcacggctggcctattatgccgccgttgttgggcgcctacgtcttcaccgaccggctcgcctacttcgccgccgactggtgtccacgcctgcacggctggcctattatgccgccgctgttgggcgcctacgtcttcaccgaccggctcgccttcgtcgccgccgactggtgtccacgcctgcacggctggcctattatgccgccgctgttgggcgcctacgtcttcaccgaccggctcgcctttgccgccgccgactggtgtcctcgcctgcacggctggcctttatgccgccgttgttgggcgtctacgtcttcaccgaccggcttgccttcgccgctgccgattggtgcttccgcctgcacagctggcctattatgccgccgctgttgggcgcctacgtcttcaccgaccggctcgccttcgccgccgccgactggtgtttccgcctgcacggctggcctttatgccgccgttgttgggcgtctacgtcttcaccgaccggctcgccttcgtcgccgccgactggtgtcctcgcctgcacggctggcctattatgccgccgttgttgggcgcctacgtcttcaccgaccggctcgccttcgtcgccgccgactggtgtcctcgcctgcacggctggcctattatgccgccgttgttgggcgcctacgtcttcaccgaccggctcgccttcgtcgccgccgactggtgtcctcgcctgcacggctggcctattatgccgccgttgttgggcgcctacgtcttcaccgaccggctcgccttcgtcgccgccgactggtgtcctcgcctgcacggctggcctattatgccgccgttgttgggcgcctacgtcttcaccgaccggctcgccttcgtcgccgccgactggtgtcctcgcctgcacggctggcctattatgccgccgttgttggacgtctacgtcttcaccgaccggcttgccttcgtcgccgccgactggtgtcctcgcctgcacggctggcctattatgccgccgttgttgggcgcctacgtcttcaccgaccggctcgccttcgtcgccgccgactggtgtcctcgcctgcacggctggcctattatgccgccgttgttgggcgcctacgtcttcaccgaccggctcgccttcgtcgccgccgactggtgtttccgccggcttgccttcgccgctaccgattggtgcttccgcctgcacggcagacttattatgctgccgttgttgggcgtctacgtcttcaccgaccggccgccgcatccgccgctgactggtgtcaccgcgtttgccatggctaccgactggtttcttcacttccatggctgcatgattctgcccgtgttgattggccttatcttcttcaccgccggtcgtctcgttgtagccgactggtttcttcgcctccat

SEQ ID NO: 90953 - DNA, 2074 bp, Oryza sativa
  Clone ID: PAT_MRT4530_89575C.1
cccacctcctcgtcgcgggggggcccgtctcggctgcggcggcggcggcggcggcggagtaggccacggtggtggtggtggtggtgagtggggggaccatcgccgctggtggtcggttcagtcgggcgggcgggcgggctcaccggtcgttgacgaggagtttggttgaggggggccctgcggcatcagcggcggcggcgggatgtacgtgccgcagccatctcgctccgatgcggccggccgcgacgccggcgaccagcctagggtttaccaggtttggcggggaagcaacgactagagggcggccgcacccgtcgtcctcctgcagtgtagtagtggcgggccgggcgccatctggggcggcggcggcaggaaacccgcgtagcatcaacacggtgttgcgggccccaacatgggcacacctgttgcggatcttgaaatgggcaggaagccggtcccttgggatgaaccgaggacatcagctgatatcagggacttggaagcaggtctcggggcttttttggatgagaaagagggtagactaacgcatgcatccccagatttgagcagggacgaccttccagctgatctcatggaaggacgagctggcacacattcaaggcggtcaagttgggttaatagaactggaacttcagaatcagtggacagtatgaatgcgcaaataattgctgcttgggaagctattcagagtgaccctgtgcattgaactaccatgaagtacaatttgtttaccatgtgcgccagggtaaaggtcctggatcatctgtgtaattccaaacacgcttcctgttgctttgtctttggtagtgcatgatatcacacgaagcttccatgcgctgtatgtgtgtctggtgttttaagaaaagtagcccaagagcttccggtttggatggggtatctgtatatatatttgttggaacagacgtattttggtttatttgctaaaaaaaaaaagtacataatcaagattagaaatgctgagagtttgtcagtttggaaggcaatgctaaagacaccagcctcaatcgttttgatcatctactgcttcctttgtgtatggtttgttggtggtctttctgtcttccattgctatttgatgagcaccaaccagacaacttatgagaacttcaggtatcgctacgatagacgggctaacccgtataacagaggcgttctgaacaactttctagagatattctgcagccgtattcctccttcaaagaacaatttccgggcaagggtcacagttgagcaagggctacagcaaacccgtgtagcatcaagaggttttatgagccccaacatgggcaaacctgttggggatcttgaaatgggcaggaagccggtgccttgggatgaaccgaggacagcagctgatatcagggacttggaagcaggtctcgggggctttttggatgagaaagagggtagactaacgcatgcatccccagatctgagcagggacgaccttccagctgatctcatgaaaggacgagctggcacacattcaaggcggtcaagttgggttaatagaactggaacttcagaatcagagtgaccctgtgcattgaactaccatgaagtacaatttgtttaccatgtgcgccagggtaaaggtcctggatcatctgtgtaattccaaacacgcttcctgttgctttgtctttggtagtgcatgatatcacacgaagcttccatgcgctgtatgtgtgtctggtgttttaagaaaagtagcccaagagcttccggtttggatggggtatctgtatatatatttgttggaacagacgtattttggttttctcttgatgcttcccaggatgccatttacggcctgtttggttaaaggtttttggagggattagaagtttagagggatgatgctattaatcgttggggagttgttttatttggttgggagatatgagaattttggtgggaatgcggaattgaggaaggaactccctccttttgaatacctggtggaggttccctccttttgaatacctggtaaaggtggtaattgggagagaattcctcctttagtttgcct

SEQ ID NO: 90954 - DNA, 2099 bp, Oryza sativa
  Clone ID: PAT_MRT4530_89576C.1
atggagttctatcttcctatgctttccgtttggtttgccaatggatggctgcctttgggccgattcctagcacccgggggctcgttggatggaccgagtaacgcaaggatccagatccagatatgcataaaagggattcatggctttaagcttacctcttacgctccaggaatggatcagtcagaacatcaccaccggctcgcctcgaccgccgctgactggtgtttccgcctgcacggctggcctattatgccgccgttgttgggcgtctacgtcttcaccgaccggcttgccttcgccgccgccgactggtgtttccgcctgcacggctggcctattatgccgccgctgttgggcgcctacgtcttcaccgaccggctcgcctttgccgccgccgactggtgtttccgcctgcacggctggcctttatgccgccgttgttgggcgtctacgtcttcaccgaccggcttgccttcgccgctgccgattggtgcttccgcctgcacagctggcctttatgccgccgttgttgggcgtctacgtcttcaccgaccggccgcctcgtccgccgccgactggtgcttccgcctgcacggctggcctttatgccgccgttgttgggcgtctacgtcttcaccgaccggccgcctcgtccgccgccgactggtgcttccgcctgcacggctggcctattatgccgccgttgttgggcgcctacgtcttcaccgaccggcttgccttcgtcgccgccgaccgatgtcctcgcctgcacggctggcctttatgccgccgttgttggacgtctacgtcttcaccgaccggcttgccttcgtcgccgccgaccgatgtcctcgcctgcacggctggcctattatgccgccgttgttgggcgcctacgtcttcaccgaccggcttgcctttgtcgccgccgaccgatgtcctcgcctgcacggctggcctttatgccgccgttgttgggcatctacgtcttcaccgaccggcttgccttcgccgccgccgactggtgcttccgcctgcacggcagacttattatgctgccgttgttgggcgtctacgtcttcaccgaccggccgccgcatccgccgctgactggtgtcaccgcctgcacggctggcctgttataacgccaactgatgctaccttcttcacggctggctacatcgctgtcactactaataggcatcagtatcttcaacacaagctgcctacgtttgccatggctgccgactggtttcttcacttccatggctgcatgattctgccagtgttgattggccttatcttcttcaccgctgcacctctacgtctggtttatacagctaccactactgatggacatcatcgtcttccgttgccgactggttatgccgccgccgactagtgcttttatcttcacaactgcgcgtcttcgctaccagtttgcttctgttgccgccgactcgtgttcacttcatcacggtgatgcaactttgtcatcatggtggagtgacttcatctttattatcttcggcactggcaaactctattgctgctacttcgcaagttttactacttcaccaaccacgacgtctttgtgaacctcgacatctcggcatgcaatgccatgatattttactacaacaagtgactctccaatattcaggatttctacttggacaccttcaacacatatcttcaatcaagcaatgactgctcgacgacaagaagctataattctcgactctatgttcagttgttccccaactaaccaaagaacattctacttcaacaacttcaaatatttcggtttagacgagttgggcaacaacatcaactctcctccaattatttgtcttcacggttggcctactacgcaactgccgatagaggatctcatcgttatcatcggctgctacatcgctattgactggatcaccgacatcgtcatcttcatcaacatcttgtcaagcctcatcaacatagcctactctgctgccgttgatgggaaacttcgtcatcatagtcggctatctctgttgccgctaatcatcattaccgtcggatgcgtttgtcgccgccgattattttcttcatcttca

SEQ ID NO: 90955 - DNA, 330 bp, Oryza sativa
  Clone ID: PAT_MRT4530_89577C.1
ccaacgggagacctttgtaacaaaattgccagatatcccaggaaaagatggacaccaccctattttagctgcaaactgaccagagctttggccaatatttgcagttttccttagggttaaaccactggcccccatttttgggggtgcttggggaacagatgccaaaccaaaaagaagaaatggggagggaaacataagactaacattataccctaggggggggggaaccaaatctttttcctccagcctataaggaactctagggggaagcccaaaaaaagcctcttttttttttccccatataaacccccttggaatctttggctccca

SEQ ID NO: 90956 - DNA, 3097 bp, Oryza sativa
  Clone ID: PAT_MRT4530_89578C.1
atgagacaacctgatcgtcagatcaatacacactcggcggattcaaatccccaaacaggagtctcgtacgcaacccccttttattattgccgaattcatgtttcgacagttggcgcgccaggtaggggttgcgtcgtattacccgtcgagaagtgcgatggaattaacttcaaaagaaacgttgagatcaatttcaacgtgttcaatggctcgtcaaatctttgatcttcatccgggtttgccgctccaatttattttattattagattaatttctaacaacagattgatcgatgatttgttttgcgagatgacatgctcaacagcgcacgtgggcacaccatcgctatcgcatcgattttgtgcatggcgaactgttccatctacatggcgccgcgagagttgccgccgggtgcactgcatcacgtcaggagtccagccggccgctgtgtgctcgccctggccctggtcaaagactattggttctttacagggttgacttgcatgcacgttcagcacctgcaagaggatggataaacccatgttgcatatttgcatgcatgcatcgatcaacatatatacttattgagttgtttctgtagttgctactaatttgatcaatctgggtttttttggctggctggccgattcttctggctgcttctactgctgcagggaggcctcaccatctcagtgtcgattgcttgattagtcctagtgacacagtgcaacaccaacgaccaattttctccgtctcggagtgagtccggtcgaggaaatcaatctcggcgagttgaatgatttaatcttcgactttgctaggtgatctatgctggtcatggactcgagacgtcccagctattcggtcaattggccgcgagtccactccgccggcttgcctttgccaccgccgctgatagcaacaacgtcttcaccgaccggcctgcctccgtcgccgccgactggtgtcctcgcctatacggttggttggtcacaccaccgttcatgggcgtccacgtcttcaccaccggcctgcctccgtcgccgccgactggtgtcctcgcctatacggttggttggtcacaccaccgttcatgggcgtccacgtcttcaccaaccggcttgcctttgccgccgccgactggtgtctctgccgacacggctagcctattatgtcgtcgttggtgggcatcttcgctttcaccgtcgaccgccttcgtcgccgccgactggtgtcctcattgttattgatggactgtttcgttcccacatcggctacttctgctgccaccgagggaatacgacaaagctaagtcatcatttattttattctttatatgatatttttccttttcctctgcctcactacaccaattggtcttccattgagtagtgagtcgggggctacagatgttatatcatattttttataatatttatcttgattgcttgagatgtaatctgagtacaaaagtacctatcgagttatggagttctatcttcctatgctttccgtttggtttgccaatggatggttgcctttgggccgattcctagcacccgggggctctatgcatgtttgggaaatgcctaggccgactcccgatgcttgggggctatgactagtcggacagagtgtttaaacgtacagagtcatctgctcggggaaatcaaaattgacaagaggagaaatacatatttatcaatattttaaaatacttgattttttctcgagtattatatttatatcagatactactcatcctatatgtttgttctgcaggatccagatccagacatgcataaaagggattcatggctttaagcttatctcttacactccaggaatggatcagtcagaacatcaccaaccggccgcctcgtctgccgccgactggtgcttccgcctgcacggctgacttattatgccgccgttattgggcgtctacgtcttcaccgaccggcttgccttcgccgccgccgactggtgtttccgcctgcacggctggcctattatgccgccgttgttgggcgtctacgtcttcaccgaccggcttgccttcgtccgccgccgactggtgtttccgcctgcacggctggcctttatgccgccgttgttgggcgtctacgtctttaccgaccggcttgcctccgccgctgccgactggtgtttccgtctgcacggctggcctttatgccgccgttgttgggcgtctacgtcttcaccgaccggccgcctcgtccgccgccgactggtgcttccgcctgcacggctggcctattatgctgccgttgttgggcgtctacgtcttcaccgaccggcttgccttcgccgccgccgactggtgtttccgcctgcacggctggcctttatgctgccgttgtttggcgtctacgtcttcaccgaccggccgccgcatccgccgctgactggtgtcaccgcctgcacggctggcctgttataacgccaactgatgctatcttcttcacggctggctacatcgctgtcactactaataggcatcagtatcttcaacacaagctgcctacgtttgccatggctgccgactggtttcttcacttccatggctgcatgattctgccagtgttgattggccttaccatcttcatcgccgctaccactactgatggacatcatcatcttctgtcgccgactgattatgccgccgccgactggtgcttttatcttcacaactgcgcatcttcactaccagtttgcttctgttgccgccgactcgtattcacttcatcacggcaatgcaactttgtcatcatgcctcgacatctcggcatgcgatgccatgttgttttactacaacaagaggctctccaatattcaggatttctacttggacatcttcaacacatatcttcacggttgacctactatgcaaatgctgatgagcgtctttgtcattatcattggttgcgacactgctattgactggatcgccgacatcatcatcttcatcatgtcggttgcgtttgtcgtcgtcaactattttcttcatcttcattgttagttgatctgtctgccgccgactggtttcttcgcctccacggctgtgcaacttcat

SEQ ID NO: 90957 - DNA, 1167 bp, Oryza sativa
  Clone ID: PAT_MRT4530_89579C.1
gaaaactgaaaaggtcagaatgttggtgattctaccagtgactctccaatggtgaagctgccaaaagcctgttgactcacagcacgaaaaaggaaagacaatcgaaaagcctgctaatcctaaagtaagtcgtggacagaagggcaagcttaagaagataaagagaagtatggagagcaggatgaagaagaaagagaaatccggatggctttacttgcgttctctggaagggcctcacaaaaggataaaccttcataagatgtagatggagccactgcagcttaatcaaaaccatcgactggtgaagatgacagatcaaaaatttgttataaatgcaaaaaatctggacatctttctcgtgattgccctgaaagtacatctgaggtggatcctgctgatgtcaatgttggtagagccaaagatggtatggatagaagcagcgcccctgctggtagcagcgttaccatggatgaagatgacatccatgagctcggtgatgaagagaaagagaagttaattgatttggactacctaactggaaatccactgccaagtgatattttgctatatgctgtaccagtttgtgccccttacaacgcattgcaggcatacaaatatcgtgtgaagattaccccgggaactgcaaagaaaggaaaagctgccaaaactgcaatgagtttgttcctgcacactgctgacgccacaaaccgtgagaaggagctaatgaaggcatgcacggaccctgaattggttgctgccattgtagggaatgccaagatcaccgcacctggcctcactcaactgaagcagaagcagaaacagaaggggaaaaaatctgcaaaagaaaactagttcaaagctatcagagaccaccccgttttgtcaagaaaagtatttttctctgcagaaacaatgcaaatgttttggtatgttgtcaggcgcatttggatggaggtgtcacatggattggccctcattcttgtaaagtttaaacatctctttggcattcatagccataggacaggatataatgtaaacagatacggcagaacattggaaccgattgacaagcttcatacgcttacaaagggacgctgagtccccttttggtgtgtcttgtgatgtatgaaagctacaaaaaaaaaatcatagatttcactttagcac

SEQ ID NO: 90958 - DNA, 483 bp, Oryza sativa
  Clone ID: PAT_MRT4530_8957C.1
ggcacgaggttaagcgccatggctgttacttgagtaacgtaggttcgaatcctgctccctccacctcctccccgcttacccgtggcaaggataacccggctggctatcgacaacaaccacccgcctgtgccgtcgagcccacacttgttgggaacttcgtctccatggctacaaacgaccgacagctccgctgtttggacacaggcccctctcgatgaagagccgtcaactgccgtcagacgaatcctccgtgcgcctgaaggcacggggtcgcgtcagtgaacaaacctgtaagcaggaccgggcacgaacccggtcaggctcgattcgcttctatgcccttgttttccgctgtgtaaatagagaaaatagaaagcgcgccgagatacccctcgggaggttgctaacggccggctaatgagccgggccgagcccggcgttaaataatactactactactactaaaaaaaaaaaaaaaaaaaa

SEQ ID NO: 90959 - DNA, 2598 bp, Oryza sativa
  Clone ID: PAT_MRT4530_89580C.1
atggagttctatcttcctatgctttccgtttggtttgccaatggatggttgcctttgggccgattcctagcacccgggggctcgttggatggaccgagtaacgcaaggatccagatccagatatgcataaaagggattcatggctttaagcttatctcttacgctccaggaatggatcagtcagaacatcaccaccggctcgcctcgaccgccgccgactggtgtttccgcctgcacggctggcctattatgctgccgttgttgggcgtctacgtcttcaccgaccggcttgccttcgccgccgccgactggtgtttccgcctgcacggctggcctttatgccgccgttgttgggcgtctacgtcttcaccgaccggcttgccttcgccgctgccgactggtgtttccgcctgcacggctggcctttatgccgccgttgttgggcgtctacgtcttcaccgaccggccgcctcgtccgccgccgactggtgtcctcgcctgcacggctggcctattatgccgccgttgttgggcgcctacgtcttcaccgactggctcgccttcgtcgccgccgactggtgtcctcgcctgtacggctggcctattatggcgccgttgttgggcgcctacgtcttcaccgaccggctcgccttcgtcgccgccgactggtgtcctcgcctgcacggctggcctattatgccgccgttgttgggcgcctacgtcttcaccgaccggctcgccttcgtcgccgccgactggtgtccacgcctgcacggctggcctattatgccgccgctgttgggcgcctacgtcttcaccgaccggctcgccttcgccgccgccgactggtgtcctcgcctgcacggctggcctattatgccgccgttgttgggcgcctacgtcttcaccgaccggctcgccttcgccgccgccgactggtgtcctcgcctgcacggctggcctattatgccgccgttgttgggcgcctacgtcttcaccgaccggctggccttcgccgccgccgactggtgtcctcgcctgcacggctggcctattatgccgccgttgttgggcgcctacgtcttcaccgaccggctcgccttcgtcgccgccgactggtgtcctcgcctgcacggctggcctattatgccgccgttgttgggcgcctacgtcttcaccgaccggctcgccttcgccgccgccgactggtgtcctcgcctgcacggctggcctattatgccgccgttgttgggcgcctacgtcttcaccgaccggctcgccttcgccgccgccgactggtgtcctcgcctgcacggctggcctattatgccgccgttgttgggcgcctacgtcttcaccgaccggctcgccttcgtcgccgccgactggtgtcctcgcctgcacggctggcctattatgccgccgttgttgggcgcctacgtcttcaccgaccggctcgccttcgtcgccgccgactggtgtccacgcctgcacggctggcctattatgccgccgctgttgggcgcctacgtcttcaccgaccggctcgccttcgccgccgccgactggtgtttccgcctgcacggctggcctttatgccgccgttgttgggcgcctacgtcttcaccgaccggctcgccttcgccgccgccgactggtgtcctcgcctgcacggctggcctattatgccgccgttgttgggcgcctacgtcttcaccgaccggcttgccttcgccgccgccgactggtgtcctcgcctgcacggctggcctattatgccgccgttgttgggcgcctacgtcttcaccgaccggctcgccttcgtcgccgccgactggtgtcctcgcctgcacggctggcctattatgccgccgttgttgggcgcctacgtcttcaccgaccggctcgccttcgccgccgccgactggtgtcctcgcctgcacggctggcctattatgccgccgttgttgggcgcctacgtcttcaccgaccggcttgccttcgccgccgccgactggtgtcctcgcctgcacggctggcctattatgccgccgttgttgtgcgcctacgtcttcaccgaccggcttgccttcgctgccgccgactggtgtcctcgcctgcacggctggcctattatgccgccgttgttgggcgcctacgtcttcaccgaccggcttgccttcgccgccgccgactggtgtttccgcctgcacggctggcctttatgccgccgttgttgggcgtctacgtcttcaccgaccggcttgccttcgccgctaccgattggtgcttccgcctgcacggcagacttattatgctgccgttgttgggcgtctacgtcttcaccgaccggccgccgcatccgccgctgactggtgtcaccgcctgcacggctggcctgttataacgccaactgatgctaccttcttcacggctggctacatcgctgtcactactaataggcatcagtatcgtcaacacaagctgcctacgtttgccatggctgccgactggtttcttcacttccatggctgcatgattctgccagtgttgattggccttatcttcttcaccgccggtcgtctcgtctgctgctga

SEQ ID NO: 90960 - DNA, 463 bp, Oryza sativa
  Clone ID: PAT_MRT4530_89581C.1
gcacgaggtggagggaaacctctagtttagccacacagcaacactctgtttgtcagcggggattataacttctctcgccaaacaaacatgacatcttcttcttggagtttcttgggctacgcgtttcttctccatggagttacggccggtgattgggtagtacgtgggttgaaatatggtagagttggtgatcccggcggatttggttggagttattcggaattttctatcattagcgcagcttcttctggtcaaagtctactcttgattctttttttcaccacgaaccagacggttgagtgttctcaaaaaaaaaaaaacagacggtacgttcgaggaaattcttcctgatgccacagcgggaatcaaattgtttcgctctaaacaggtatgtgtaaaattcattggtgccacgagcccattacggggcttatgctatggtgcatatcttattgattcgggg

SEQ ID NO: 90961 - DNA, 7266 bp, Oryza sativa
  unsure (1)..(7266): unsure at all n locations
  Clone ID: PAT_MRT4530_89582C.1
atgccgccgctgttgggcgtctacgacttcaccgccggcctgcctccgtcgccgccgagtggtgcctccgcctacacggctggcctattatgccgccgctgttgggcgtctacgacttcacgccgccggcctgcctccgtcgccgccgattggtgcctccgcctacacggctggcctgttatgccgccgctgttgggcgtctacgacttcaccgccggcctgcctccgtcgccgccgattggtgcctccgcctacacggctggcctattatgccgccgctgttgggcgtctacgacttcaccgccggcctgcctccgtcgccgccgactggtgtctttgcctatatggttggttggtcacaccaccgttgttgggcgtctacgacttcaccgccggcctgcctccgtcgccgccgactggtgtcttcgcctatatggttggttggtcacaccaccgttgttgggcgtctacatcttcaccgaccggccgtctcgtccgccgccgactggtgtttccgcctgcacggctggcctattatgccgccgctgttgggcgtctacgacttcaccgccggcctgcctccgtcgccgccgagtggtgcctccgcctacacggctggcctattatgccgccgctgttgggcgtctacgacttcaccgccggcctgcctccgtcgccgccgattggtgcctccgcctacacggctggcctgttatgccgccgctgttgggcgtctacgacttcaccgccggcctgccttcgtcgccgccgattggtgcctccgcctacacggctggcctattatgccgccgctgttgggcgtctacgacttcaccgccggcctgcctccgtcgccgccgagtggtgtcttcgcctatatggttggttggtcacaccaccgttgttgggcgtctacatcttcaccgaccggccgtctcgtccgccgccgactggtgtttccgcctgcacggctggcctattatgccgccgctgttgggcgtctacgacttcaccgccggcctgcctccgtcgccgccgactggtgtcttcgcctatatggttggttggtcacaccaccgttgttgggcgtctacgtcttcaccgaccggccgtctcgtccgccgccgactggtgtttacgcctgcacggctggcctattatgccgccgctgttgggcgtctacgacttcaccgccggcctgcctccgtcgccgccgagtggtgcctccgcctacacggctggcctattatgccgccgctgttgggcgtctacgacttcaccgccggcctgcctccgtcgccgccgattggtgcctccgcctacacggctggcctattatgccgccgctgttgggcgtctacgacttcaccgccggcctgcctccgtcgccgccgattggtgcctccgcctacacggctggcctattatgccgccgctgttgggcgtctacgacttcaccgccggcctgcctccgtcgccgccgagtggtgtcttcgcctatatggttggttggtcacaccaccgttgttgggcgtctacatcttcaccgaccggccgtctcgtccgccgccgactggtgtttccgcctgcacggctggcctattatgccgccgctgttgggcgtctacgacttcaccgccggcctgcctccgtcgccgccgactggtgtcttcgcctatatggttggttggtcacaccaccgttgttggccgtctagtttttaccgaccggccgtctggtccccgcccaatgggggttacccctgcccggttggcctatttgcccgcgttttgggcgtttcaacttcacccccgctttgcttcttgggcgccaaatgggccttcactaacagatggaannnnnnnnnnnnnnnnnnnnnnnnnnnnnnnnnnnnnnnnnnnnnnnnnnaaagaatccccttcaccaccggcctgcctccgtcgccgccgactggtgtccccgcctatacggtcggttggtcacaccaccgttgatgggcatcgtcgacttcaccgccggcctgcctccgtcgccgccgagtggtgcctccgcctacacggctggcctattatgccgccgctgttgggcgtctacgacttcaccgccggcctgcctccgtcgccgccgagtggtgcctccgcctacacggctggcctattatgccgccgctgttgggcgtctacgacttcaccgccggcctgcctccgtcgccgccgagtggtgcctccgcctacacggctggcctattatgccgccgctgttgggcgtctgcgacttcaccgccggcctgcctccgtcgccgccgattggtgcctccgcctacacggctggcctattatgccgccgctgttgggcgtctacgacttcaccgccggcctgcctccgtcgccgccgattggtgcctccgcctacacggctggcctattatgccgccgctgttgggcgtctacgacttcaccgccggcctgcctccgtcgccgccgagtggtgcctccgcctacacggctggcctattatgccgccgctgttgggcgtctacgacttcaccgccggcctgcctccgtcgccgccgagtggtgcctccgcctacacggctggcctattatgccgccgctgttgggcgtctgcgacttcaccgccggcctgcctccgtcgccgccgattggtgcctccgcctacacggctggcctattatgccgccgctgttgggcgtctacgacttcaccgccggcctgcctccgtcgccgccgagtggtgcctccgcctacacggctggcctattatgccgccgctgttgggcgtctacgacttcaccgccggcctgcctccgtcgccgccgagtggtgccgccgcctacacggctggcctattaggccgccgctgttgagcgtctacgacttcaccgccggcctgcctccgtcgccgccgattggtgcctccgcctacacggctggcctattatgccgccgctgttgggcgtctacgacttcaccaccggcctgcctccgtcgccgccgactggtgtccccgcctatacggtcggttggtcacaccaccgttgatgggcatcgtcgacttcaccgccggcctgcctccgtcgccgccgagtggtgcctccgcctacacggctggcctattatgccgccgctgttgggcgtctacgacttcaccgccggcctgcctccgtcgccgccgagtggtgcctccgcctacacggctggcctattatgccgccgctgttgggcgtctacgacttcaccgccggcctgcctccgtcgccgccgagtggtgcctccgcctacacggctggcctattatgccgccgctgttgggcgtctgcgacttcaccgccggcctgcctccgtcgctgccgattggtgcctccgcctacacggctggcctattatgccgccgctgttgggcgtctacgacttcaccgccggcctgcctccgtcgccgccgattggtgcctccgcctacacggctggcctattatgccgccgctgttgggcgtctacgacttcaccgccggcttgcctccgtcgtcgccgagtggtgcctccgcctacacggctggcctattatgccgccgctgttgggcgtctacgacttcaccgccggcctgcctccgtcgccgccgagtggtgcctccgcctacacggctggcctattatgccgccgctgttgggcgtctgcgacttcaccgccggcctgcctccgtcgccgccgattggtgcctccgcctacacggctggcctattatgccgccgctgttgggcgtctgcgacttcaccgccggcctgcctccgtcgccgccgattggtgcctccgcctacacggctggcctattatgccgccgctgttgggcgtctacgacttcaccgccggcctgcctccgtcgccgccgagtggtgcctccgcctacacggctggcctattatgccgccgctgttgggcgtctacgacttcaccgccggcctgcctccgtcgccgccgagtggtgccgccgcctacacggctagcctattaggccgccgctgttgggcgtctacgacttcaccgccgacctgcttccgtcgccgccgagtggtgcctccgcctacacggctggcctattatgccgccgatgttgggcgtctacgacttcaccgccggcctgcctccgtcgccgccgagtggtgcctccgcctacacggctggcctattatgccgccgctgttgggcgtctacgacttcaccgccggcctgcctccgtcgccgccgactggtgtcctcgcctatacggttggttggtcacaccaccgttcatgggcgtctacgacttcaccgccggcctgcctccgtcgccgccgactggtgtcctcgcctatacggttggttggtcacaccaccgttcatgggcgtctacgacttcaccgccggcttgcctccgtcgccgccgattggtgcctccgcctacacggctggcctattatgccgccgctgttgggcgtctacgacttcaccgccggcttgcctccgtcgccgccgagtggtgcctccgcctacacggctggcctattatgccaccgctgttgggcgtctacgacttcaccgccggcctgcctccgtcgccgccgactggtgtcctcgcctatacggttggttggtcacaccaccgttcatgggcgtctacgacttcaccgtcggcctgcctccgtcgccgccgactggtgtcctcgcctatacggttggttggtcacaccaccgttcatgggcgtctacgacttcaccgccggcctgcctccgtcgccgccgactggtgcctccgcctacacggctggcctattatgccgccgctgttgggcgtctacgacttcaccgccggcctgcctccgtcgccgccgagtggtgcctccgcctacacggctggcctattatgccgccgttgttggatgtctacgtcctcaccgttggctcaccttcgttgccgtcgactggatccagatccagatatgcataaaagggattcatggctttaagcttatctcttacgctccaggaatggatcagtcagaacatcaccgaccggcttgccttcgccgccgccgactggtgtttccgcctgcacggctggcctttatgccgccgttgttgggcgtctacgtcttcaccgaccggcttgccttcgccgccgccgactggtgtttccgcctgcacggctggcctttatgccgccattgttgggcgtctacgtcttcaccgaccggcttgccttcgccgccgccgactgccgcctcgtccgccgctgactggtgcttccgcctgcacggctggcctattatgccgccgttgttgggcgtctacgtcttcaccgaccggcttgccttcgccgccgccgactggtgtttccgcctgcacggctggcctttatgccgccgttgttgggcgtctacgtcttcaccgactggcttgccttcgccgctgccgactggtgtttccgcctgcacggctggcctttatgccgccgttgttgggcgtctacgtcttcaccgaccggcttgccttcgccgccgccgactggtgtttccgcctgcacggctggcctttatgccgccgttgttgggcgtctacgtcttcaccgaccggccgcctcgtccgccgccgactggtgcttccgcctgcacggctggcctattatgccgccgttgttgggcgtctacgtcgtcaccgaccggcttgccttcgccgccgccgactggtgtttccgcctgcacggctggcctttatgccgccgttgttgggcgtctacgtcttcaccgactggcttgccttcgccgctgccgactggtgtttccgcctgcacggctggcctttatgccgccattgttgggcgtctacgtcttcaccgaccggcttgccttcgccgccgccgactggtgtttccgcctgcacggctggcctttatgccgccgttgttgggcgtctacgtcttcaccgaccggcttgccttcgccgccgccgactggtgtttccgcctgcacggctggcctttatgccgccgttgttgggcgtctacgtcttcaccgaccggccgcctcgtccgccgccgactggtgcttccgcctgcacggctggcctattatgccgccgttgttgggcgtctacgtcttcaccgaccggccgcctcgtccgccgccgactggtgcttccgcctgcacggctggcctattatgccgacgttgttgggcgtctacgtcttcaccgaccggccgcctcgtccgccgccgactggtgcttccgcctgcacggctggcctattatgccgacgttgttgggcgtctacgtcttcaccgaccggccgcctcgtccgccgccgactggtgtttccgcctgcacggctggcctattatgccgccgttgttgggcgtctacgtcttcaccgaccggcttgccttcgccgccgccgactggtgtttccgcctgcacggctggcctttatgccgccgctgttgggcgtctacgtcttcaccgaccggcttgcctccgccgccgccgactggtgtttccgcctgcacggctggcctttatgccgccgttgttggacgtctacgtcttcaccgaccggcttgccttcgccgccgccgactggtgtttccgcctgcacggctggcctttatgccgccgttgttgggcgtctacgtcttcaccgaccggcttgccttcgccgctgccgactggtgtttccgcctgcacggctggcctattatgccgccgttgttgggcgtctacgtcttcaccgaccggccgcctcgtccgccgccgactggtgcttccgcctgcacggctggcctattatgccgccgttgttgggcgtctacgtcttcaccgaccggcttgccttcgccgccgccgactggtgtttccgcctgcacggctggcctttatgccgccgttgttgggcgtctacgtcttcaccgaccggccgcctcgtccgccgccgactggtgcttccgcctgcacggctggcctattatgccgccgttgttgggcgtctacgtcttcaccgaccggcttgccttcgccgccgccgactggtgtttccgcctgcacggctggcctttatgccgccgctgttgggcgtctacgtcttcaccgaccggccgcctcgaccgccgccgactggtgtttccgcctgcacggctggcctattatgctgccgttgttgggcgtctacatcttcaccgaccggccgcctcgtccgccgccgactgctaccactactga

SEQ ID NO: 90962 - DNA, 2016 bp, Oryza sativa
  Clone ID: PAT_MRT4530_89583C.1
atggccagtgctagcatacttttggaggaggatactgagaacaagtcaagcggcattactgaggcgattgatgctggtcatggactcgaggcgtctcgctatccagtcaatcggccacgagtccacttcaccagctatgtgcgccgctgccgccgctgttgggcgactacgacttcaccgccggcctgcctccgtcgccgccgagtggtgcctccgcctacacggctggcctattatgccgccgctgttgggcgtctacgacttcaccgccggcctgcctccgacgccgccgagtggtgcctccgcctacacggctggcctattatgccgccgctgttgggcgtctacgacttcaccgccggcctgcctccgtcgccgccgactggtgccttcgcctacacggctggcctattatgccgccgctgttgggcgtctacgacttcaccgccggcctgcctccgtcgccgccgagtggtgcctccgcctacacggctggcctattatgccgccgctgttgggcgtctacgacttcaccgccggcccgcctccgtcgccgccgagtggtgcctccgcctacacggctggcctattatgccgccgctgttgggcgtctacgacttcaccgccggcctgcctctgtcgccgccgactggtgtcctcgcctatacggttggttggtcacaccaccgttcatgggcgtccacgtcttcgccgaccggctggccttcgccgccgccgactggtgtttctgcctacacggctagcctattatgccgccgctgttgggcgtctacgacttcaccgccggcctgcctccgtcgccgccgagtggtgcctccgcctacacggctggcctattatgccgccgttgttggatgtctacgtcctcaccgttggctcaccttcgttgccgtcgactggtgtttccgcttacacggctgacctattatgccgccattagtgggcatcttcgctttcaccgtcgaccgccttcgtcgccgccgactggtgtcttcattgttattgatggacgactttgttcccacattggccacttctgccatcaccaaggggaatattacaaagctaagatccagatccagatatgcataaaagggattcatggctttaagcttatctcttacgctccaggaatggatcagtcagaacatcaccgaccggcttgcctcatccgccgccgactggtgttttcgcctgcacggctggcctttatgccgctgttgttgggcatctacgtcttcaccgaccggccgcctcgtccgccgccgactggtgcttccgcctgcacggctggcctttatgccgccgttgttgggcgtctacgtcttcaccgaccggcttgccttcgccgccgccgactggtgtttccgcctgcacggctggcctttatgccgccgttgttgggcgtctacgtcttcaccgaccggcttgccttcgccgctgccgactggtgtttccgcctgcacggctggcctttatgccgccgttgttgggcgtctacgtcttcaccgaccggccgcctcgtccgccgccgactggtgcttccgcctgcacggctggcctattatgccaccgttgatgggcgtctgcgtcttcaccgaccggccgcctcatccgccgccgactggtgtcaccgcctacacggctggcctattatgccgctgttgttgggcacctacatcttcatcgccggtcgtctcgtctgctgctgactagtgcccttacctctacgtctggttatacagctaccactactgatggacatcatcgtcttccgtcgccgactggttatgccgccgccgactggtgcttttatcttcacaactgcgcgtcttcaccaccggatttctacttggacatcttcaacacatatcttcaatcaagcaatgactattcgacgacaagaagctacagttctcgactctatgttcagttgtttcccaactaatcaaagagtcgggggctacacaaatacaaggctcaaaatttgacaaa

SEQ ID NO: 90963 - DNA, 208 bp, Oryza sativa
  unsure (1)..(208): unsure at all n locations
  Clone ID: PAT_MRT4530_89584C.1
catctcaaatgtaatctatggcctctattagactaatatcagacccaaggatcaaacaaaattcttatccgtctcgtgcaggaacaaacgtggaacagatcagaacagcgtgtgatgcggcggcaaatccaaattggagggggggggcttccctgtncctttctgcttnttccctccccctcctttcctcctgccccctccccccccc

SEQ ID NO: 90964 - DNA, 651 bp, Oryza sativa
  Clone ID: PAT_MRT4530_89585C.1
ccggccggcaatcaattaccttaagtttccagtagagcaagtacaaatagttatggcgagatccgctttctctcggttttctatatactgttgtggtcttctattatgacatgcttctatggcccagctatttaatcccagaacaaacccatggcatattcctcgaaaaggagagttttacgtgagtgtagactttgatagactaccagcatttgaaccacttcgaaaagtgaggtcagaacctggggagactgagtacttctatgagaataatgaattattccagtgcacggctacttttgtgatccgacgaggcattcaacctcaaggacttttgggacctcgatacacaaatattcctgtgcgtggtctacatcatcccaggaagaggtgctatgtgattaaacttccccggatgtcctgcgacttaccaacaacaattccaacaatgtttcatctcaaggtcgaagtcagagacaaaagattactacatgagcaccacaggattcatctgtttacgccaggagacattgttgcactcccagctggagctgcacattgcatctacaatgaaggcgatgcacctattgttgccgtatatgtatatgacgcaaacaacaacgcccatgagattggacctaggtgaaagga

SEQ ID NO: 90965 - DNA, 482 bp, Oryza sativa
  Clone ID: PAT_MRT4530_89586C.1
tcacctttccaccccataaagcctcccttggcacccctatcccactaaggagcaaaaagagaaccaaaccaaggcagctgctgcagaggcagtagtagtagtagtagaagtagctgctgtgatctagcctcttgtggtggtagctctagctctagcaagtggtattgtggtgataagcttaagcttaagcttattagtgatcgctctcccttaaaaagaagaaaagctccttgcagttatggcactggtcaagagccaccaccaaatgttggcctcttcttccacctcgtcctcctcaccctcctcccagcagcagcagcctccaccgccggcgtcgaactcctccagcctcgccgccgccgacgacgaccagccctcccccgacaagcgcaagaggcgccctcccggcacgccagacccagatgcggaggtggtcgcgctgtcgccgaggacgctgctggagtcggacaggtacgtgtgcg

SEQ ID NO: 90966 - DNA, 279 bp, Oryza sativa
  Clone ID: PAT_MRT4530_89587C.1
atgggggagccaccagatgtgggaatcctcgtactaggcctcgcaactgtcagcgccagatctggcggtgaagccatcggttctggaagtccagtcactgtcgaggaggaggaggaggcggtggtgagggagggggatgaggagacgaagcagcgggtggtagtggtggttagttggttgctcgcccctctgcagccgcactcgtgctcatacagtggttcgcataaccccaccgcccacgataggcgcttgatctccaccgctggtggtgcgacatag

SEQ ID NO: 90967 - DNA, 1666 bp, Oryza sativa
  Clone ID: PAT_MRT4530_89588C.1
ccggctcgcacatggttcgccgcctttcggtgagatccccgcggctgcagcgagctcgcaggccgccgccttccgcgccgccgaccaccgcgcccatggaccccccctcgccgccgccgccgccgccatatcctcctgctgctgctgagggcggtccggcagcggatagccaggccgctgagctgccccggctgactgtgacgcaggtggagcagatgaaggtggaggcgaaggtgggcgaaatctaccgcgtcctcttcggcaacgcgcccaacgccaattccctcatgttagagctgtggcgtgagcagcatgttgagtatttgacgagagggctgaaacatcttggaccaagcttccatgtgctcgatgccaatcgaccttggctgtgctactggattattcatgcacttgctctgttggatgaaatacctgacgatgttgaggatgatattgtggacttcttatctcgatgtcaggacaaagatggtggttatggcggaggacctggacagtttcctcatttcgttacaaattttgctgctgtaaatacatttgcaactttagggagtgtaagggcactataatctgtaaactgggacaacctttccaagttgaggcttcggatgaaagatacatcgggagctttcaggtgtgcattttctcaagtagtaaacagtggggagaaaatagtttctttccatgtcgagttccttacaccttatatctgccactcattttattatcctttgaccagaatgcatgatggtggtgaaatagatgttcgtgctagctatactgcaatatcggttgccagccttgtgaacattcttgatggtgaactagcaaaaggtgttggaaattacataacaaggtgtcaaacctatgaaggtggcattgctggggaaccgtatgctgaagctcatggtgggtacactttttgtgggctggctacgatgatcctgcttaacgaagtggacaaacttgatttggctagcttgattgttaatgccatacctgttttttttttcctggcatcctccactctatctgacaaacttctggtgtatgaccagggagctgctcttgctttaacacaaaaactaatgacagttgttgatgagcaattaaaatcatcatattccagcaaaaggcctccaggagatgatgcttgtggtacgagctcttctactgaagcagcatattatgctaagtttggatttgattttatagagaagagcaaccaaataggcccactgttccacaacatcgcgctgcagcaatacatcctgctttgcgcacaggtgctggatggagggttgagggataagcctgggaagaacagagatcactaccactcgtgctactgcctgagtggtctgtcagttagccagtacagcgccatggttgattctgatgcgtgccccttgccgcagcacgtgcttggtccttactcaaacttgctagagccgatccatccgctctacaatgttgtactagacaaataccatacggcctatgagttcttttcaagctagtgatacaactgtctaggacatgtatgatatgtatgagctctacaatgttgcgccttacaagttacaactgtctaagacatgtatgatatttcattcttttttacactgactgaacggccccagatacc

SEQ ID NO: 90968 - DNA, 350 bp, Oryza sativa
  Clone ID: PAT_MRT4530_89589C.1
aatctcttgatatttttactctttttttttttggggaaaaggacaaatgcaaaattatcctgcagttatgtttcttttgacacaaaacccccaaccgacatggggaggggggaacactggttaccccattgggtttcggaagctttaaattaaacccccatcctttttgtccttttggccaacagctgtgcatttttgggttgacaacaagccattgtggccaaaacacttcatgtcacggggagggggaataattttcccaggcacttggtacacaaaggccggggggacccacaaaaaaaaaaaatctttttgggaaaaagtggaactttggttgggaaaattaatat

SEQ ID NO: 90969 - DNA, 606 bp, Oryza sativa
  unsure (1)..(606): unsure at all n locations
  Clone ID: PAT_MRT4530_8958C.1
gttttagcttgacgggaaaggcgacgacgggaccggagaagagagaggctggtgcggcgagaggagaggagcgacgaagagggagaggaagacatgagggaggagagggaggcgacggagagcgagaggagcttgaggtcgaggccgcgccaccgaggtcgatccggagccggcgggggaggcgacggagagggagaggacctcccgagattagcagctcggtgccaccaccgttccgccgccacgccaccgtcgtccacggcttccgcccctcgcggacctcgcacgtcgcccgctgccgtgccaccgactccgctgaactcgccgacctcacccgtccctcgctcccactccgctgaccccgccgctgcttcgggggaggagagaggggtggatctggcgagcaccgacgccttccttcgcctgctgactcagtctgctagtggggaatggattagaggagagagagagagggggggagttagaagtaaaaaagatagtactagtgcacccatctattatctatctatctatgctctatcttctatctatctatctaatatatactaaaagtccattaaacatnctacaaacgttctcaagccg

SEQ ID NO: 90970 - DNA, 4002 bp, Oryza sativa
  Clone ID: PAT_MRT4530_89590C.1
gaagaagaaaaggagccaagcaaaaaaaaaaaaaaaaagcgagcacgcgaacgccgcgtgatccaaatcgaatcgaatcctcctccgccgccgacgagggcacccgccgcccgccggtgagcccgcgcgagcccggccggattcgattcggccgccgcccggttgatccgcccccccgaggcggcgggtggtggttccgagatctcccggcgagccggaggctcctccgcgtcggatttggcgccgcgggggaggaggatgggctcgcggataaaggagatggtgcgggtcgccaccgcgcggctcggcggggagccgtcgccgcgtgggggcgcggggaactccgcgttcggccgcggggagtcgtcgaggacggcgcggctcggcggcggaggggccagcctgaggcggcagccgcagccgcaggcgccgtccgtgcggaccatctgctgcaacgaccgcgaggccaacgcgcccgtcgggtacaagggaaattctgtgtcgactacaaagtataacgtcctgacttttctacctaaagggctgtttgaacagttcaggcgggtggcaaatctgtactttctcatgatttctatattgtcgaccacaccaattagtccagttcatcctgtcaccaatgttgttccacttagtcttgtgcttttggtttctctgatcaaggaagcttttgaggactggaaacgtttccagaatgacatgtcaattaataacgcacatgtcgatgtgttacaaggtcaaaagtgggaaactactccatggaaaagactacaagttggagatattgtgaggacagcaaatcttgatggggaaaccaacctgaaaataaggaaggctttggagaaaacctgggattacaaaaatcctgaaaaggcttttgaattcaaaggtgaaatacagtgtgagcagccaaacaattcactgtatacatttactggaaatcttattgtggacaagcaaaccatgccactctcaccaaatcaagggtgtagccttcggaacacagagtacattgtgggggttgttatattcacaggtcatgagacaaaagttatgatgaattccatgaatgttccctccaaaagaagtacattggaaaaaaagctagataaacttatccttgctctatttgcaaccctgttcacaatgtgtgttattggtgctattgggagtggtgtgtttattaatgagaaatatttctatcttggcttgcgtggaaaagtggaggaccagtttaatcctaagaacaaatttgtggtcaccattttaaccatgtttactctaataactctatattcaacaatcatccctatttctctttacgtgtccattgagatgatcaaattcattcagtgcacacagttcattaacaatgatctgcatatgtaccatgctgagagcaacaccccagctttggcccgaacttctaatctgaacgaggaacttgggcaggttgaatatatattttctgacaaaactggaacacttacaagaaacttgatggaattctttaaatgttcgattgctggagagatatatggaactggcatcacagagatcgaaaaaggtggagctgagcgagctggaatcaagattgacggtgatgagggtaaaagatcaggtgctgcagtacacgagaaaggattcaactttgatgatgccagaatcatgtgtggtgcatggagaaatgaacctaatcctgaagcttgtaaggaattcttcagatgccttgcactctgccatacggttcttcctgagggtgaggagacaccagaaaagatcagttatcaagctgcttctcctgatgaggctgcacttgtggctgcttcaaagaactttggcttcttcttttatagacgtacaccaactacagtcattgttcgtgaatcacatgttgagaggatggggagcatacaagacgttgcatatgaaattctgaatgttctagaattcaacagtacaagaaagcgtcaatcagtggtctgccgtttcccaaatggaaggcttgttctctattgcaaggtggctgagttgattgaaaaagaccttgtattggtagggtgtactgctattgaggacaaactgcaagaaggggttcctgcctgcattcaaactctttctgcagctggcataaaaatttgggttttaacaggagataagatggaaacagcaattaatatagcatatgcctgcagcctggtgaacaatgatatgaaacaattcatcatcagctcggagacagatgtaattagagaggctgaagacaggggagacccagtggaaattgcacgtgttataaaagaatcagtaaaacagagccttaaaagttaccatgaggaagcccgcggttctctaattagcacaccgggacaaaaattggcgctcattattgatgggagatgcttgatgtatgctctagacccaactctgcgtgtagatcttcttggtttgagtttaatttgccactcagttgtatgttgccgggtttctccattgcagaaagcacaggttgctagcttagttaagaaaggtgcccataagataactctcagtattggtgatggtgctaatgatgtgagtatgattcaagctgctcatgtggggattggcatcagtggacaagaaggaatgcaagctgttatggctagcgattttgccattgctcagtttcgatatcttaccgacttgctccttgtacatggaagatggtcatatttgagattgtgcaaggttatcacatattttttctacaagaatctgacatttacgctaactcagttctggttcactttccaaactggtttttccggtcagcgattttatgatgactggttccagtccctttataatgtcattttcacggccctacctgtaattatggttggattgtttgataaggatgtgagtgcgtctctgtcaaaaaaatatccgaagctttaccaggaaggaatcaggaatacattcttcaagtggagggtgatagcagtgtgggctttctttgccttctatcagtcgatagtgttctattacttcactgcagctgcaagtcggtatggtcatggttcatccggcaagattcttggtctttgggatgttagtacaatggctttcacctgtgttgtggtgactgtgaatctccgacttctaatgtcatgcaactctataacaagatggcactatatcagtgtagctggcagtataacagcctggtttatgttcatcttcatctactctgcaataatgacatcattcgacagacaggaaaatgtatattttgtgatttatgttttgatgagcacgtttttcttctacctcacactattgcttgttccaatcatcgctctctttggcgacttcttatatttatcaattcaaaggtggttcttcccctatgactaccaagtaatccaggagatgcacagggatgaaccccacgagtacagcaggatacaacttccagagacaagccatctaagcccagaagaagcaaggagctatgcgatctccatgcttccccgagagagctcgaagcacaccgggttcgccttcgactccccgggatacgagtcgttctttgcatcgcagcaaggtgtcggtgtgccgcacaagccgtgggacgtagcgcggagagctagcatgaagcagcggcagaaaacgggaggatcataaccctagtagcgcccctaccttcctggccccccccattttgtgtaaagtttttgtacatcacatgcttttgctggcagaccacaggagagtgtgtataagcttgtagctttgtagccatttttcgtgttttgtcaccgatatgttgtgttggcgatgttagcagaggccattgatccagttggctgcagaattacttaggacacgccctttagttaaaaacaaagttggaaactgggaatgcagttagtagtgaaattctttctgacgctaaaaaaaaaaaaaacatattctgctgaaaaaaaaaaaaaaaaaaaa

SEQ ID NO: 90971 - DNA, 342 bp, Oryza sativa
  Clone ID: PAT_MRT4530_89591C.1
atggcgcagacggaggctcgccttggcgacgagctgcgcgacggcgaggccagcggggccgccgccgacgacggggtgggccgcgcgaccaacgagactgcgagacgcgtctgcctctgctccttgccgtgcatcgtcggcccaatcaagtggtggagcggcgtcggcgtcggcgcacgacgcttcacggagcacgcgcagctcatggccgctctcggcagcgacgaccgtgacaacaacacggtggacatgctttcctggacaagagcgtcccacgccaccaccgccgtgtcttccatgggcgccggcgacgagcagaaggacctcgagctgcgtctgtag

SEQ ID NO: 90972 - DNA, 387 bp, Oryza sativa
  Clone ID: PAT_MRT4530_89592C.1
atggagtgcgtgcgccgacagcgcgctctccccgtcctgcagcacggctacgtcccccacgagctgtccagtgagccgctgccgctgggcatctacatgggcccgccgtcgccgccgacacctagtgggaggtttcgcatctcgaggaggccgccactggttcaggtggatggccagctcaacccgaccaccctggcgccatcaacgattacgaacatagagaggaacttaaacctaccgtttgtcctggccgacgacatcagcagcgacgacggcctgctccgggcggcggcgcaggcctgcgccgagcgtggcccaaaatgttacaggcaaagcatcaacatcgaacatatcacaaaccagaaaccgactcgtccgcgtcgctag

SEQ ID NO: 90973 - DNA, 1530 bp, Oryza sativa
  Clone ID: PAT_MRT4530_89593C.1
atggagcttgtatgctatctcgacgccgatgacgtcctcaactacaacacccccgaggacgccatcctgatgagctcggcctccggtgagaagtacgactacatcatcaacttcgccattaacatcgggtggtcactgatgaggccgacactgaccagccatggtagggtggtggagataaccccaaaccccgggaactacatccaaggtgggcccactatgactcaaagttcaaagtccttggcccgcgcccctggctacatcgtgaccgtgctgaccatgtttgccaataagaagataacatgcatgtccatgagaaacgaggagatgagatttacgatggagctcgccggagaagggaagctcaagatggtggccaactcatggcatccattcgaggaggcggcggagccgtgggagaagagcaccggtggtcatgcaacacggaagccggaacattttttatctgacagctacaggattaacgagaccatgacaacaggagaaattcaggaattgctcgggattatggccgccggcggcgggattccggccaccatgcgcgcggtgcagtacaccggctacggcggcggcgccggtgccctcaagcacgtggaaatccctgttccttcggtgaagaaacatgaagttcttattaaagtcgaagctgcaagcgttaacccgattgattggagtattcagaaagggatgctacgcccatttcttcccaagtttccatttattccagtgactgatgttgccggggagattgtggaggctggttctgcagtacatgagctcaaagttggtgacaaagttttgtccaaactgaacttctggaaaggaggaggcctcgctgagtatgtcgctgcaccggagagcctcaccgtcgtccgccccgccggagtttccgccgtcgacgcggccgggctgccggtcgcaggcctcacagctctcaaggccctcatgtccatcgggaccaaattcgacggcaccggcggcaccggcgccaacgtgctgatcaccgctgcctccggcggcgtcggcacctacgccgtccagctcgccaagctcggcaaccaccgcgtcaccgccacctgcggcgcccgcaacatggacctcgtccgctccctcggcgccgacgaggtcctcgactacaataccccccaaggcgccgccctgacgagctcggcctccgacgagaagtacgactacatcatcaacaccgccatgaacgtcaactggtcggcgatgaagccgaccctgagcagccgtggtagggtggtggacataacaccaaaccccgggaactacgtcgcggcgatgctgaccatgtttgccaggaagaagataaccatgatggccctcatgtcgctggggaaggaggagatgaggtttctgatggagctcgtcggagaagggaagctcaggacggtggtcgactcgcggtgtccgttcgagaaggcggcggaggcgtgggagaagagcatgggcggccatgccacgggtaaggtcatcgtggagatgtga

SEQ ID NO: 90974 - DNA, 272 bp, Oryza sativa
  unsure (1)..(272): unsure at all n locations
  Clone ID: PAT_MRT4530_89594C.1
caaaaccaacccgcgccaccacccacctttccccaatgcattcgcngcagcgaaaacccgccggggcgggcttgttgctcgccccaatgcgaccatctaccccgcggcgaggccccacatgtacttcttcggccaccacaacccccattagaccgcccaatgggaaaagaacaactacccccggaatcgtaacctgaccccgatggcagcttacaacctatccaaaggccacccccactttcacaagccgccggcgaacccctatctgcaca

SEQ ID NO: 90975 - DNA, 817 bp, Oryza sativa
  Clone ID: PAT_MRT4530_89595C.1
atggccaggatgagcttgagaccgagaggccggcggccgcgggaggcctgcggcgacgaccgcctcagcgcactccccggcgacctgctcctcctcgtcctccgccgcctctacacccgcacggcacttgccaccggcatgctctccaggagctgggcgcatctgccccacgagctcccggccctcgatttcagggtcagcgacatactccgccgcgctatcaccggtgaccggtgcatcctccgccaccgcggcgtcgtcggcgcgtcaccagtcgccagccgccgccatcgtgtcgcccgtcaccggccgccggcgacgccctcgtcctctcccaccttgccccgccgaaggcagcagcccgccgacctgtcgtccatgcctcctgatgtgaccatggctactacggatacaaccattgcttacatcatggatgaacaacaggagatcaagttcaagacctccaagcgcgaccggggggcctcggggtgccaggtcatgcccctcggggtgcggcgtcaggcccctcgggccctcgcgctgcggcggcccgaggccctcgcccaactgccgcgtggcggggggagcgccgtgccgggccgtgcctgctacaggttcggccgtgccccgggccgcccgtttggcccggcccgtttggccacctctgtggctgagcagccatcaatgcgcggcgccccaaccgtccctcaccatgtttaatgcggtaaggatgaacgtgcggtgccgcaccactggcccacgtcaaatcgggtgtgaccagtctgtgatcggcctatcgccggtcacgtccgattga

SEQ ID NO: 90976 - DNA, 658 bp, Oryza sativa
  Clone ID: PAT_MRT4530_89596C.1
ctgtcggtgatatgggaccgggagtatcataaccagaggcttgaggcagacataatcgcccacgtggcctggcaccttcggggacgtcgggcccgagggtgaggtgtccgccctcctcctgatttcccccgagggggggtcggggtgcgcttgccccgaccccgagggccgaggtgccccgaccccggtcaaatcgcgagttaggtggcggcaggcggtctgacgcacgccttgccccatcccgtcaggacgagagcctccaagcactcgtccctagccggagccggcgtgttagctcctggagatggcacgttggttccggtcagatatatgccagggcttctcagcggcccgaacctgtatacatcgccggcgtcttgtgtgcttcctgtctcgcgaaccttccacagattgggagcttagagtctcacccagggtccccggccgaaccggcaaaggggggtctgcgcggtctcccgaaagaaccaattaaactgaaaattgttatagtatgtttgcagttatatttgttatttttgttacagtttttgaaaattaaatttggccttgcatgtctgtgaagtaatatattttatattaatctatcttgtgatttttttttggagggggagaggaaccgtcgccgccgttgtggtcg

SEQ ID NO: 90977 - DNA, 383 bp, Oryza sativa
  Clone ID: PAT_MRT4530_89597C.1
ttgtttttttttttttttttttttttttcttttttttttttttttgaaggaaaggggggcccccaggggcgaatgaacgccccttagcatttcctttattgaagaaccacttaccaacaacaactgagcccaattacaacccgcacgaatgaccatttgacagaaatcagccgcacttacggattctttaattcgccagccgactaattggccacaaagccctaagagtccggcctccgcctgtctcacgatgtaatttttcttactgccatatatgctagggcaggcccatgaccggatccttctacctgccttgaaacatgttaccacctgccaaggtttaacgaccatacaagtttactcccctctccctcttgcggggg

SEQ ID NO: 90978 - DNA, 354 bp, Oryza sativa
  Clone ID: PAT_MRT4530_89598C.1
gttccctctcaagttgaacacactgggagaaaatataagacgcacactttaccgggcctgcaaagggacgcaaacttgcggggactcgagaacagtagacaacatacactgttatcctggagggatgtccaaatggctatacacaggctgccatcaggaaagtgcatggctagccccaaaagccttctacaaaggctcttgaaaagtttatgtgatgacggtggcagcagatcggccagtgaactcttgcatctttgacagcttcagggcaacatcaaccagaggagcaagggcatcctgcgaatccctgccggtcttggaagaaaccttctcatactgctcgacgtagacacg

SEQ ID NO: 90979 - DNA, 183 bp, Oryza sativa
  Clone ID: PAT_MRT4530_89599C.1
gcacgaggcttgtctaccaagcattgcctccatcaccctcatcgcgcccctccgcccatcgcgacgaaccacaccggagtcgccgtccccgcccctccgcgcaagaaagagaagcgagcgagctcggatgatggatgatgatgatgatgaatcccctctcctcggcaagctagctagagatga

SEQ ID NO: 90980 - DNA, 129 bp, Oryza sativa
  Clone ID: PAT_MRT4530_8959C.1
atggggacgaggatttttatacagattcgggcccctgaactgtcaggatccgacaaggccttatctgctctggacgtcctcagccgaagttcccttaggttcctcagaggccttgtcaggacggcgtaa

SEQ ID NO: 90981 - DNA, 372 bp, Oryza sativa
  Clone ID: PAT_MRT4530_895C.1
atggcggagttggttgggccgcgggtgtacagctgctgccattgccggaaccacgtctgcctccacgacgacatcatctccaaggcctttcaggcttctgatgtgcgtagtgccggattgatttggtatattatgctaaagaaggggaggaacggccgtgcgtttcttttctctcatgctatgaacatatctatgggtccaaaggaggacaggcagcttatgacagggcttcacacagttgctgatatctactgccgtgattgccgtgaggtattgggttggaagtatgaaagagcatttgaagaatcccagaagtacaaggaaggaaaattcatatttgagaaggcaaagattgttaaagaaaattggtaa

SEQ ID NO: 90982 - DNA, 358 bp, Oryza sativa
  Clone ID: PAT_MRT4530_89600C.1
aaaaaataagagccttttttatatcagggacatgtccctacgtttttacacgaagcaagacagtttatagcataacagccggcctatgtttttcatgagggtaaatttttaccagacctacttaaggaccagtttatttcgaaaagacacttcataaaaaataagagccttttttatatcagggacatggccctacgttcttacacgaagcaagagcccttatagcataacagccgaattatgtttttcccgcgggtagattggtaccaggctttttgggacaaaaggccttttttttaggattatcccctttttggaatggaggagaattaccacgcccccttggaaaggcccttgg

SEQ ID NO: 90983 - DNA, 106 bp, Oryza sativa
  Clone ID: PAT_MRT4530_89601C.1
ggaataccactaatttaagtgctctcgagttaaagaagatagcaagctcggatgagaaccatgagtacaagcagcggaaggatgcatcaatctacaactgccacag

SEQ ID NO: 90984 - DNA, 1977 bp, Oryza sativa
  Clone ID: PAT_MRT4530_89602C.1
atggtggctcagggcgacgacattgacgacaatggtgagccagcgacggcaggcggcagcaacggcaggcggaaggcgtgcccactgggtatccaccgggcatacctgtgcccgtcgggcataggttggcttaggttgagatgctcaaccagcccattagcctggcccgccgatcgatccagatcaaccaccctcctggccctcgcgtcgtgcggggctgcgcgcctagagaaggtcgtaattaggctggagaagcgcttgcttggcccaagcatgttgtcgcctcctgatggtttggaacttctcgtctcctacttggctgtaaaaaagagcaaagcagtggttgtctcaggcggggaagcagctgagaggcggctccttagggatcagagaatgatttactgcccaggcaagcaccttgaacgtgcatgcatccgctggctcaaagtgctcgataagctagcggttgagcttgttgaggatgtgcttgagggcctctggctcacagagtggctcaaagtgctcgataagctagcggttgagcttgttgaggatgtgcttgagggcctcctcccctttttctttttcctcctctcccccccccttcaccacagcgggcgccggcgagcggcgaggccgggccggatctcgccgccgcccaccgcttgacctccctccgtggcgctgcctccagccaaatctctaaaagctcgggaagaaaataacaaaagcagcaatggacgtcgatttttggggagtggtaattgagccgtgcaataagaaggagatcttttgtcctgaggataccctgtatcatctaacatcggtagcccttgatgaggcttacgggctaaaagactccaatgtgaaagtatttgtcgaagttaatgatgagaagtttgcgattgggacgctttcctccaaaaggcatccgcatatcaaggttgacttctgtttcaagaagaactttcaactattccacacctcactaatcagcaaagttgccttttgtggctatcaagtaaagaatttgggaaaattcactgattctgaaggtgatgaatctgatgaggaggttccaccagataatatgatcaaagaagcacagaaaagtaaacttcctgcaaagtctgctacagttgcatccgccatgcaaaaggcttttgtaaaggaaatagagcactatgagaaatcaaaagctgatgatgacaacaatgaacgataccgtgatatttcagtagttggtgaatctactggtaatgaggattcaagtgatgatgctgattatgaaggtaagagttctgatgaagaagagactactgcaaaggaaggtgagagtactgatgaaaaagagactcctgcaaaggaaggtgagagttctgatgaagaagagactcctgcaaagaatactaaagaggaaaatgaaccagtggtaacacccttgaagacatttccacatgagatggcaagatagaagcaccaattacggacaacaaaactggtactaatactagcaagagaggtagtcatcttcaagttacaaaccctcacccagcaaaacaggcaaagaggacgcccataaagaacgacacgcctaagcgttctgctagctatgtctgcaactcatgcaaaaagactttcaactcctctggtgctctgaaggatcattcaaaggcgaaacaccctgcaaccaattgatacgagataacactagtctgtgttagattgttagtgataggtaactgaatatttttttttcgccgggagagagagagtatttttgaagcagctatttcctagcctcatctgaaacaatattaggattcgagacgatggtctcttcaacataattttggaacactttatgtgaaaagattctggaacgtagataccacagtttctttatgaatgagtgctgaacggtttcattgttcaaaaaaaaaaaaaaaaaaaaaaaaaaaaaaaaaaaaaaaaaaa

SEQ ID NO: 90985 - DNA, 132 bp, Oryza sativa
  Clone ID: PAT_MRT4530_89603C.1
atggctgcaatggccatattctttttactaccaccaagcaagatccacttacaaacttacaatggctgccgctttggcccgcatcagtcaaggcaggcatggttagtgatgcgggccagcccgttgggttag

SEQ ID NO: 90986 - DNA, 325 bp, Oryza sativa
  Clone ID: PAT_MRT4530_89604C.1
gcaaagcctttcatgccaagcacacacaccatctgcatcttctcttctaccattcttgctttctccttggagcctctttcttttggtctttcagagaagagaaacatatttgtgcaagctttggcttttttcatgggaggggctatagaggctccggtccatgttctggctgtggatgataaccctcctgacagggagctcatcgagagggttctcaagacctcttcttttcaagtaaccactgttgattccgggagcaaggctctggagttcttggggctccatgatcatgaggacagcccaatttctactcaatcagatcagc

SEQ ID NO: 90987 - DNA, 939 bp, Oryza sativa
  Clone ID: PAT_MRT4530_89605C.1
atggctgcaattgaaggaggcaatggttcagaagaaaaaccattttttaatctcaagggatacattgctggaaatccagtgacagattacaagattgatgaagatggtagaattccatttctgcatggcatgggacttatatctgatgaactttacgaacatgcaaaggagacctgcggagaaaaatacagtgctccgagcaatgctcaatgtgcgcattccgtccaagcaataaacgataaagcttcccacgtgttattaaaaatatgggcaaatgatgaaacagtaagggagagtcttggtgtgcaaaagggaacagttggagagtggaaacgatgcaatcgcgatatagattacaatagcgatgtccgtagtacagtggaatatcatttgacgctaatgagaaagggataccgagcaatcatatacagcggtgatcatgattctagagttccctccattagcacacaagcatggattagattacttaacctttctattgctgatgattggcgaccgtggtacgttgatggacaagttgccggattcacacgaagctttgcgagtaataacctgacatacgcaactgtgaagggcgctgggcatactgctgcagagtataaacccaaggagtgtcaagagatgtttgcaagatggatttcaggcactcctctctgacgtatattgttcaagtcacctgtaaaaacataatcaaacgatcatatgagaggtaaaataaagatttgctgcttgtaataattactccgttcgggctgataatacttgtcgttttggacaagagtgaagttaaactctagaatctttgattatgaatcattttaaaaatatttgtcttccaaatatgatgactacatgtatagattagtcttaaaaaatactttaataagatcatatatttgctaaaaaaaaaaaaaaaaa

SEQ ID NO: 90988 - DNA, 117 bp, Oryza sativa
  Clone ID: PAT_MRT4530_89606C.1
atgggctttgaagacccagaagaactactgcccaccaacaatcctgggaactacttcaggccttcagggcttcatgcagcttcctcaacttctgatcttgtgtccattgacaggccg

SEQ ID NO: 90989 - DNA, 492 bp, Oryza sativa
  Clone ID: PAT_MRT4530_89607C.1
atggcgacgatgacagccgctgcactggtgaggcggcacaggcggctggaggcggtggagtggtggcgacaccactggtcattggcgaggacgcgtctccggtggtttccccgcgaaacggaggcgatgccggggaagaggatgcacctgcgaggccgagggtggcgacggcgcacggtcgtggtgggaggtgcggctggaggttggccggcgccggagagagagaaggagaaggcggggagaggcggggcggccacgggagagcgcgggagggggctaaaactggagaacggaccgagggggttccattttataggatgggggagggagccgggcacgggagaggtgggaacggcagcggaaaagtcggccggtggccatggaaagcggccgggattggcgcgggcgttccgggtgattaaaagcacgaatcaagggggaaatatgggggaaagagagaggaataaatgggtattacttccccctatttaa

SEQ ID NO: 90990 - DNA, 3909 bp, Oryza sativa
  Clone ID: PAT_MRT4530_89608C.1
atgcgggttggggatgaccgcgtgaagaagacggcggcgcagaacctccgacacaagttcgatctggcaacattcaacgatggcgaggccattgaagactttcgtgctacacttcaacggcatggccgcgactctagctactttgggccttaccgggcggctccggcagtggaagatgcagacgaggagccaccagcgttgctgtacctcactgaggagcaatgggacgcacgatgcgagaagctggaagcagagaaccactccggcaacggcttcaacggcggcacagggcaagaagaaaggggaggccgcgctgcttctcctgaaatcgtcgccaactctatccccttctcctgcggtggcggtatccctgcaagacatgagcgcgtcggcgctgcccgcaccagtggatcccgagcggcgttcgcgaagctggacacggcggtgcttgggccggtgcgcttcggcgacgactcgatggcatggatcgagggccgcgggaccatcctcgatgaggcccggtgcaaggtcgacatcgatgacagcgtgatgtggattcgggagccctaccaacggttgctggcgaagggatcgctggagatcgggcagctcgagcagctgtgcgaggcgtgccaagccgggaaacaacgacgtaccttgtttcctgtgcaggccgagtaccgtgcacgacagctgttggagctggtgcacggcgacttgtgcggtccaatcacgccggcgacaccatgggggaacaagtatttcctgctgttggtggacgaccttagccgatacatgtgggtagccgcgattccttcaaaggattgtgcagcggctgccgtcaaggacacccaggcgtgtgcagaaggcgaatccggacgaaagctcaagggactctgtactgatcgcggaggtgaattcacctcgatcgagttcgtggagtactgtgtagctgaaagcatacatctaaagtggctttgggagaggtacatgaaggaatttgtggaactcatcaatcggttgcttaggagagcggggttctattggccgaggatgattgaagattgcttcaaatattataggggatgcgaagcatgtcaacgattcggcaatgttcaattggcgcccgccgccgtgttgaatcctatcatcaaaccaaggccattccgaggttgggctttggatttcattggtcaaatttatcctccgtcatcaaaggggcataggttcgtactagttgcaacggattacttcaccaagtgggccaaagccatgccgctcaagaatttgactcatacggaggctaatggacaagccgagtccaataataagacgttgaaattagtcaaaaagaagatcgaggaacacccaaagaagtggcatgaagtgctttctgaggcattgtgggcgcataggatatctaaacttggtgccactaaagtcactccttttgagagtatttatggtcaagaagccattttgccggttgaggtgaatcttggctctcttcggtatatcaagcaagatgatttatcaagtgaagactacaagaccttgctgggagacaatcttgatgaagtcatcgacaagcgcttgaaggctttggaagagatagagaaagagaagaagagggtggccaaggcatacaacaaaaggattgaggtggttggcgactctgagatcgccgcaaggcgtttaggtgctgcgatcgtgcttgtcaacttgtcacaaaaagttgccaacaactgcgccctacagctcgcagcagaatggcgtcgtcgagcgccgaaacgacatggtggtggtgacgacaaggagcatgctcaagttgaagggactgcccggatggttctagggagaggcggtaagcacagctgtgtatgtgctgaacagatgttcggctgcatcatctacatccggaacacaacgccgcacctgacgaagctcgaggatcgtggccgcaagatgatcttcgtcggctacgagtgtgggtctaaggcgtactgcgcctacgatcccgtcacaaagcgtgttcatgtgatgcgtgacgtggtgttcgatgagcaagcccagtgggactggggcactagcagcgatgatggagagctaggtggtggcgacaacatcttcacggtggaggctggtggcgaggagccgacgtcaggtgagcaatcaccgcatctcagtggggatcgcgacacggagctggaaaccggctcaccagcaggcatcgacaatgactacctggacgctgaccacgatgatgatgccccactccggttctgcagcatcaacgacatcatcgggccagcctcgccatgtggcttcgcaccatgtgcattggtggcggaggagctgtatgcagtgagctctgatgagcttgccttgttcgatgaggcagagcgattgatggcgaagatggaagcgattgaagacaacaagacttggtcgctggcggatcttccacctggtcgatgtgcgattgggttgaaatgggtgttcatggtgaagagggatgagcatgtagcagtgtgcaagcacaaggcgcgtctcgtggtgaagggctatgcgcaacggcaaggcatcgactacgacgagctgtttgctccggtggcgcggttggactcggtgcacctgctcatcgccctcgcggcgcacaaggggtgggagctggaccatatggacgtcaagtatgcgttcctcaatggggacctgcagaaagagttctatgtggagcagccggccgggttcgtcatcgccgacaaggagcacaaggtgctcaagctacggaaggcgttgtacgggctgcatcaagcaccgcgcgcctggaacgcgaagctggacaacacactgcagtcactcggtttcaagaggagtccatcggagcacgccatctatgtcaggcggaacggcaacgcacagctggtggtcggggtctacgtcgacgacctcatgatcactggctccaactacgacgacatcaggcaattcaagaaggagatggctgctgcattcaagatgagcgatctcggtcaacttcactactacctgagcattgaggtgaagcagagcgcaagtggaattttgctcagccaaggagcttatgctaccaagaacctggaaaagtgtggcatggaagggtgcaatcaatgtcaagtgcccatggagacacggttaaagcggagcaagttcagctcggagccgtcggtcgacgcgacggcatatagaagcatcgtcaggagcctgaggtacctggttaacacctgtcttgatcttgcttttgctgttgggtatgctagccggttcttggaagatccacgagaggaccatctcgctgctgtgaagcacatcctacactacgtggcgggaaccaagaatttgggagtttggttcagcaggaaggtggaaaaggaggcgtacctgagggggttcagtgacagcggttatgctggtgatgtcgatgctaggaagagcatgactggggtgatttttttcctcggcagcagcccaatcacttggcaatccatgaagcagaaggtggtggtgcagtcaagctgtgaggtggaatacatagtagccgcaaatgctgcttgtcaggcattgtggcttgctcgtgtgctggcagaagtgcaaggatcgacaccgagagcgccaatgctaagggtggacaacaagtctgccatttccttgaccaaaaatccagtactccatggacagagtaagcacattcaagtgaagtatcatctagcccgggaggctgcggaaaatggcctgatcaatgtggagttcatcaggagcgaagaacagctgggcaacattctgacgaagctgctgggcaagaccaagttccatgagctacgttcaaagatcggcctgatcaacatcagtaatgagcacagcaagtcttag

SEQ ID NO: 90991 - DNA, 1904 bp, Oryza sativa
  Clone ID: PAT_MRT4530_89609C.1
ccccgggctgcaggaattcggcacgaggcctcgctgtactctttgctcttgctcgggctcccgctctgctccgagtactccgccgcgtcgccgcgcgcgccatgccgccgccgccgccgccgctcggccgcttcggcgtcgaggtcaccgcccggacgttggtccgggcgtccgacccgccgccgggcttccccgccgtgctccccgtctccaacctcgacctcatcctcggctccttcaacgtctccctcatcgtcgtctacccggcgccggcgcgcgggttcgccgcggtggccgcggcggtgcgcgccgccctgcccgcgttcctctcccgcttcttccccttcgccggccgcgtcgtggccgacgccgccacgggcatccccgaggtcgcgtgcgacaacgccggggccgagcttgtcctggccgacgccggcgtcgcgctcgccgacgtggacttcgccgacgccgaccggtcgttggggaccatccagttgccgtacgagcagggcatcgcgctgtcgctgcagctcgtgcggttcaagtgcggcggcttctcgatgtcgtggggcaccaaccacctgctcgtcgacggccatggcctcaccgcgctgcccaccgcgtgggcggagatgctccgcaccggtggcctctcgtgggagccccaccacgaccggcgctccctcttccggccgcgctccccgccgcggcacggcgcgtcgctcgacgccgagttcacgcggtacgcgccggggagcctcgtcaacccgctcctcgccgccgctctcgtgcggcgcaactacgtcgtcggcgccgacgacctcgaccgcctccgcgcggcggccagcaccgcctcccgccgcgccacgcgactcgaggcgctctccgcgcacgtctggaagctcctcgccgcggccacccacggctccgacgcgcgctgccgcctcgcgtggctcgtcgacgggcggaggcggctcgacccggccaagtacgatccaaccctcgtgagcagctacctcgggaacgtggtgacctacgcttcgagggagtctccggtggaggcgatcacgtcctcaccgctcgccgacgtggcggccatggccggcgcggccatcggcgaggtgttccggcaggagcggtacgaggagctcgtggactggatggagctccgcaaggcggcggcgttcaagaatggcgagaagtggacggagacggtggggatcggcacggggagcccggcggtggtggtctcggcgttcgtgccgttcagggtggacggcgacttcgggttcgggtcgccggcgctggtgatgccatgggtgcggccgggccggctcggatcggcggcgatgacggtggcgcggagccccagggaggacgggtcgtgggtggtgtcagccaggctatggccgcggctcgccgacgccatcgaggcggatccggacgccgtgctcaagccggccacggcggcgcggctcggcctcgctcgccgcgcgccggcggccgccgacgtggcgcgccatgcgagccgcttttttatatggtttttacggttaccgcgcgataaacgtgcttaccgtcggggcgcggtaaccctggcagccgcacttgatcttgaatccttgaagaaggtgaatttttttgagacaactggcagagaggtcgaggaagtgaagggtgctgaatacagtgagggaggaggggaaggggttggagaagtggttgtcagtcaaggtcaatgtggcggagggtgtggcaggtggtgttgggggatggggtcatcgagcactgtgttcgacatggtcagcgcggtgctcgctgtggagattatgggtaccccatacctacacggcatggttatccgactagttataggggatagcttatatctatggaatatgtaa

SEQ ID NO: 90992 - DNA, 1137 bp, Oryza sativa
  Clone ID: PAT_MRT4530_8960C.1
atgggtcgtatcattagatggctcaagaagctactgactggccggaaggaagcacacaaaggcctcaaggagaaccacgccgtgagcgacggggcggagaaggagaagagcaggtggagcttcgcgaagcacaggaggagtggggtagacagcggcaggcggccatcggaggccgccttagccgccgtcgccgcagtagcagtagagccttcggaagtgaggcggccgtgccattgtggcgaggtggaaaatgccatagctcggcgggagaaggcggccatggtgatccagaaagcttacagaggctacctggctaggaaagcgcttcgcgctctcaggtctctcgtcaagctgcaggctctggtccgtggctacctcgtgaggaagcaggctgccacgactctgcacaggctgcaggcgctcatgcggcagcaggcctcctcccgcgccgccacgagagcttcctaccggaaatccatggagcaggagaggatctctgtggaggagacccggttgaagacgacgacgccggggcaccgccggaggctctccgacagcgcggactccaactacgagcgcagcccgcggatcgtcgagatggacacgtgccaccgccgctctcggtcctcccggatagccatccggcactcccgcgatcactcgtcggactgcctcaccccggcgcccatgccgccggcgccgctgtcgtgctcgtcgccgatctccatcaagcagcccccacgcctgtcgatccagcggagccagcaccacgagcgcgacacccggcacgccaagacggcgcacaacaccccgcgcctcggcgccccgccgtacggcagctcgcccgccaacaagagcgtcgacggcatggcgagggcgcggctctcgcaccgggacgcgctcggcagcccgcgctacatggccggcacggcctcgtcagcggcgaggacgcggtgccagagcgcgcccaggcagcgacaggccgccgaggcgccggcgaggtcgaggagatcgtgctcgcggacgacgcaggacagcggcttctgcttcgagtgctccgaggactcccgccccggctactccgaggagctcagcgacgaggcggccagagattactacttggacagaatgtggtga

SEQ ID NO: 90993 - DNA, 253 bp, Oryza sativa
  unsure (1)..(253): unsure at all n locations
  Clone ID: PAT_MRT4530_89610C.1
ccggcgcactgtgtggatgtggatgattttctgtgcgccccgatctgtgcgatgtggatgattttctgatttgtgcgatgtgcgatgtgtggatgatttgtgtaattttgttgtagattttggaaatgtttttgtgattttgtgagagttgtgatgtatttggtaaacagagaaaatgcagcttgttgtatttatagggattttgtgaatnatttgtggtgctcgaatgatttgaaaaaaaaaaaaaaaaaaa

SEQ ID NO: 90994 - DNA, 958 bp, Oryza sativa
  Clone ID: PAT_MRT4530_89611C.1
atattaggaatatataaatggatgaactgaatccgaaatctctgaatggacctttttcattggaagaaattaaaccacatgttttatttagaagagaaagaataaggccgcccatggtcctaatagcttcctacaaatattttaccaattcttctaggaagtgatcacataggatcttctgaaagtttttgagggtttttacaatgcggttttagatatagagagattaaactatgtataaccttgatacattgatactttgaccatatagaaatttaggcctatttgtgtactcgacgtgatgagttataaaattctcaccaaaggggtgataagtaggttggttagagtgatccaaaaggttgagttcaatagtcaagttgcattcttgaaatattggttcataatggaaagggatattaagtttacatgaaataattcaagaagttcatatgggaaaaaatgtatgggtgctttttaaggtaaactttgagaaagtatgtgacgaaatgcgagatggttcttttgtataacaaatttatggccaaaaatgttttggagatagataaatggtgtggttcgatttttaaggtggtaaggggaggttgtgttgcaactatgcttaatgaacttataagcatgtgtcttacaaggttttaaggcaagaatatatattgctccactcccttttaacatagcgggggatgttgcattgactttgcttattaaccaaacaattgaaaaggtttgatcaaaggaagggtgtcacattttgctgaatgctatagggtctcaattctacagtatgttgatgacatcgtctttataatggaagatgataaagaaaagttctttgaacatgaaaacaattttgtgtttatttgcacatttgtcttatttgaaaataaaatttcatagaagtgattatatcatttggggagaagcaaccgatagagct

SEQ ID NO: 90995 - DNA, 4629 bp, Oryza sativa
  Clone ID: PAT_MRT4530_89612C.1
atggcgaggccattgaagactttcgtgctacacttcaacggcatggccgcgactctagctactttgggtgaaaagctggaggagagcatgatcgtcaacaagatcatccgcagcgtgccaaaacatctcaagcatatcgtggtcgtgatcacaactttgctcgatgtgtcgatgctcaccgttgaaggccttaccgggcggctccgggcagtggaagatgcagacgaggagccaccagcgttgctgtacctcactgaggagcaatgggacgcacgatgcgagaagctggaagcagagaaccactccggcaacggctccaacggcggcacagggcaaggaggaaggggaggccgcgctgcttctcctgaaatcgtcgccaactctatccccttctcctgcggtggcggtatccctgcaagacatgagcgcgtcggcgctgcccgcaccagtggatcccgagcggcgttcgcgaagctggacacggcggtgcttgggccggtgcgcttcggcgacgactcgatggcatggatcgagggccgcgggaccatcctcgatgaggcccggtgcaaggtcgacatcgatgacagcgtgatgtggattcgggagccctaccaacggttgctggcgaagggatcgctggagatcgggcagctcgagcagctgtgcgaggcgtgccaagccgggaaacaacgacgtaccttgtttcctgtgcaggccgagtaccgtgcacgacagctgttggagctggtgcacggcgacttgtgcggtccaatcacgccggcgacaccatgggggaacaagtatttcctgctgttggtggacgaccttagccgatacatgtgggtagccgcgattccttcaaaggattgtgcagcggctgccgtcaaggacacccaggcgtgtgcagaaggcgaatccggacgaaagctcaagggactctgtactgatcgcggaggtgaattcacctcgatcgagttcgtggagtactgtgtagctgaaagcatacatctaaagtggctttgggagaggtacatgaaggaatttgtggaactcatcaatcggttgcttaggagagcggggttctattggccgaggatgattgaagattgcttcaaatattataggggatgcgaagcatgtcaacgattcggcaatgttcaattggcgcccgccgccgtgttgaatcctatcatcaaaccaaggccattccgaggttgggctttggatttcattggtcaaatttatcctccgtcatcaaaggggcataggttcgtactagttgcaacggattacttcaccaagtgggccaaagccatgccgctcaagaatttgactcatacggaggctaatggacaagccgagtccaataataagacgttgaaattagtcaaaaagaagatcgaggaacacccaaagaagtggcatgaagtgctttctgaggcattgtgggcgcataggatatctaaacttggtgccactaaagtcactccttttgagagtatttatggtcaagaagccattttgccggttgaggtgaatcttggctctcttcggtatatcaagcaagatgatttatcaagtgaagactacaagaccttgctgggagacaatcttgatgaagtcatcgacaagcgcttgaaggctttggaagagatagagaaagagaagaagagggtggccaaggcatacaacaaaaggattgaggtggttggcgactctgagatcgccgcaaggcgtttaggtgctgcgatcgtgcttgtcaacttgtcacaaaaagttgccaacaactgcgccctacagctcgcagcagaatggcgtcgtcgagcgccgaaacgacatggtggtggtgacgacaaggagcatgctcaagttgaagggactgcccggatggttctagggagaggcggtaagcacagctgtgtatgtgctgaacagatgttcggctgcatcatctacatccggaacacaacgccgcacctgacgaagctcgaggatcgtggccgcaagatgatcttcgtcggctacgagtgtgggtctaaggcgtactgcgcctacgatcccgtcacaaagcgtgttcatgtgatgcgtgacgtggtgttcgatgagcaagcccagtgggactggggcactagcagcgatgatggagagctaggtggtggcgacaacatcttcacggtggaggctggtggcgaggagccgacgtcaggtgagcaatcaccgcatctcagtggggatcgcgacacggagctggaaaccggctcaccagcaggcatcgacaatgactacctggacgctgaccacgatgatgatgccccactccggttctgcagcatcaacgacatcatcgggccagcctcgccatgtggcttcgcaccatgtgcattggtggcggaggagctgtatgcagtgagctctgatgagcttgccttgttcgatgaggcagagcgattgatggcgaagatggaagcgattgaagacaacaagacttggtcgctggcggatcttccacctggtcgatgtgcgattgggttgaaatgggtgttcatggtgaagagggatgagcatggagcagtgtgcaagcacaaggcgcgtctcgtggtgaagggctatgcgcaacggcaaggcatcgactacgacgagctgtttgctccggtggcgcggttggactcggtgcacctgctcatcgccctcgcggcgcacaaggggtgggagctggaccatatggacgtcaagtatgcgttcctcaatggggacctgcaggaagagttctatgtggagcagccggccgggttcgtcatcgccgacaaggagcacaaggtgctcaagctacggaaggcgttgtacgggctgcatcaagcaccgcgcgcctggaacgcgaagctggacaacacactgcagtcactcggtttcaagaggagtccatcggagcacgccatctatgtcaggcggaacggcaacgcacagctggtggtcggggtctacgtcgacgacctcatgatcactggctccaactacgacgacatcaggcaattcaagaaggagatggctgctgcattcaagatgagcgatctcggtcaacttcactactacctgagcattgaggtgaagcagagcgcaagtggaattttgctcagccaaggagcttatgctaccaagaacctggagaagtgtggcatggaagggtgcaatcaatgtcaagtgcccatggagacacggttaaagcggagcaagttcagctcggagccgtcggtcgacgcgacggcatatagaagcatcgtcaggagcctgaggtacctggttaacacctgtcttgatcttgcttttgctgttgggtatgctagccggttcttggaagatccacgagaggaccatctcgctgctgtgaagcacatcctacactacgtggcgggaaccaagaatttgggagtttggttcagcaggaaggtggaaaaggaggcgtacctgagggggttcagtgacagcggttatgctggtgatgtcgatgctaggaagagcatgactggggtgattttcttcctcggcagcagcccaatcacttggcaatccatgaagcagaaggtggtggtgcagtcaagctgtgaggtggaatacatagtagccgcaaatgctgcttgtcaggcattgtggcttgctcgtgtgctggcagaagtgcaaggatcgacaccgagagcgccaatgctaagggtggacaacaagtctgccatttccttgaccaaaaatccagtactccatggacagagtaagcacattcaagtgaagtatcatctagcccgggaggctgcggaaaatggcctgatcaatgtggagttcatcaggagcgaagaacagctgggcaacattctgacgaagctgctgggcaagaccaagttccatgagctacgttcaaagatcggcctgatcaacatcagcgacgggaatggcgacatgatcccacggctgcgctttgacgacggtgtggccacgctccagagctcccgtggcgagttatggagtcatcccgacggccagcaagaagatgaaggcgaggagagcaaggggaaactctcccactttgatttcttggctctgggggacacgggtgaaggtttgagagttgatgggaaagacatgcggagggcgtcgggcccctcgggagtgatggagatgggttaccacaaaggcccaagacctaacttcaagggaaaggacaacattctttacagcccctgcttcttcccgctcatcctcaccgcagcgagcacctcaacgagcgcctccgtcttcgcgtccctctcctcgccggactccccgacggcgccatccacgaacgcgaagacccggctgcacgactcaatcttgataatcagacaatcctcctcgagctccggcgacgatggcgggagcattgcaccaacaacatcgggcggtgcatcgctgccgacgcagcaggaggcggcgatggtggtgggggaaggaggaggtggccggcggccaaggcggcggctgtgggcgacgacgccgcagcgagtgagtcaggcggcgactggattgacagccaagggcggcggggatggcagccgagggcggtgcgtgcggccgtgggctggcgcggcggcgcttggcgtctag

SEQ ID NO: 90996 - DNA, 185 bp, Oryza sativa
  Clone ID: PAT_MRT4530_89613C.1
taagggttgtaattgttcctgtattcgtactctggtaacgcacttcatggttattatgtacctgtctttgtagtatcccatcggagttacctgacattacgtgtagtgtgtgcctgctgcataaatgtgtatcagtggaccacttatgtctggacttcccttcattatcaaaaaaaaaaaaaaaa

SEQ ID NO: 90997 - DNA, 1437 bp, Oryza sativa
  Clone ID: PAT_MRT4530_89614C.1
atgagggatgagacggcacgacaacgccctcaggaggggaatgacgctttgagcgtcatcattgccggcccggccgaggctaggctaggttttcacccgccactcatcacctacaagtccacggctggcgcccagatgctccaccaccgtccaacctctgccaacatgtgggtccactgcaccagcgcccaccgcatctaccggcagctcctcctcctcacaccgtgcccggctccgtcgccgccggccgcgcctcgtcgcgtcgtgcctcaccgcgccaagctagtctcgtccatcgccggctgcgcctcatcgcgccaagctaggctcccattgccgaccgcgtctcctcgcgccaagcccgcctccaagcgccgagccggcctccgctgccaccgaccacggctctacgcgtcaagctagcccccgagcactcctcctttgataccgtgtccgcacccaccatgctgccattgcaacatcctccattgttgccgacgacgcgtccaccgccgccgccaccactactggagctgccccagccgctgccaccacccctgcagctgccaccaccacagcagctaccgccgtcgccgccgccgccgccgccgtcgccttccaccctgccgccatcaccagacgtcactgccgccatcaccagacgtcactgccgccgtcgccaccaccagcggacggccaccactagaagccgccgccgcctcaccacgctgccccaccgccggccgcctccccaccagatctagccgcggcggcccagatctgggcggtcttcacaccgtcccgtgctgccccccactgccggcgcgacgagagaatgaagccccgccgccgccatccttgcggccgccgccaccgtccctcccatcactgtctccgcctcccctccgctacccccttccgccaccatccctcccgccaccgcctccacccccctcccttttccagttgttgcctccgctgcccccttccgcttgttgccccgccgtccctcctgctacagcctcccctccactgctaccatcctcaaccccgcatggggaaagccgccgcgcctgctttgccaacggcgtgccgttgtcgccccccccccccccccccagcggccgccccgttctatctcatcccacgccattgtccctcccaccactgcctctgccttccctcagctactgccctcaaccccgcgtgatgaaagcctctgcacctgctccgccaccggtgcattgtcgtggccctggcggccaccccgctccgtctcatctcgtgccacctcccccctctccaccgtctcctccgcatcgccgcccgtcggtcgccgccgccgccgcggcggccgcctcaccggcagaggcacattgctgcgagcccagcgatgaaggcggcggcagaaggcccacgttgccgggccaactcagg

SEQ ID NO: 90998 - DNA, 373 bp, Oryza sativa
  Clone ID: PAT_MRT4530_89615C.1
gttatttaagcgggggctcccgaccggcagcccaggacaaactgtatatggtctgagcgacaggatggttcggggtgcgatggctgctgcagaccagagctggcgagcgacagatgcttaacatgcgaccagctacggaagcagttatgggccggcacatggagcgaggtgatgatggacttcctctccggaaggaaaacgacgcaacagcatgagactaccggaggcacgctaacgctgtgaatgttgtggacatgggtggtggcctccaccggaaggatgaaatggagaggagagatgttatgtcaagaggggtgacatccacggacccgaagctgatgatgttgaggctgatgctgtctctaacgaagca

SEQ ID NO: 90999 - DNA, 282 bp, Oryza sativa
  Clone ID: PAT_MRT4530_89616C.1
tgctcctcctcctcctcctactcgattcgcatccgcacctcgtcgtgccaatggaggccaccgtcgccgtcgtcgcagcgcccgcgagatccgcgctccccttacggagccgcgtagccgccgcagcacgcccaggacgcgcgccggcgctgtcggccgccccgggaaggcgcctcgccacgcgccgcgccgcggtcgacggccaggcggcggaggcttcaagaggcgctccccatcgagaaaaggttcccttcctttccgaggcgtatggacattaaccag

SEQ ID NO: 91000 - DNA, 435 bp, Oryza sativa
  Clone ID: PAT_MRT4530_89617C.1
atggtgacctgcgacggcaagccgcgggcgtggctgcctacggtggaaggcgacggcggcggcggcggcggcgacggcggtagctgctgtggtggtggcagctgcaggggtggtggcagcggctggggcagctccagtagtggtggcggcggcggtggacgcgtcgtcggcaacaatggaggatgttgcaatggcagcatggtgggtgcggacacggtatcaacgcctggaaatgggcgacggcgactgcgagaggaggcacgaacggcgacagccggggaggcatggcagatgactgtatttgcgcggcagcggcaggaggagtgctcgggggctagcttgacgcgtagagccgtggtcggtggcagcggaggccggctcggcgcttggaggcgggcttggcgcgaggagacgcggtcggcaatgggagcctag

SEQ ID NO: 91001 - DNA, 219 bp, Oryza sativa
  Clone ID: PAT_MRT4530_89618C.1
atggcgccctccgccgccgccgccgtctaccggccgtccgcgctctccatctcgccgccggcgcacgacgacgcgctacagcggcggcggcggtggcggcgcacgacgacgcgctacagcggcggcggcggtggcggagctcctctccaactgcacctcgactccttccagaagcttggcaaggaagacggccaacagcgcagcattgttgctgtttaa

SEQ ID NO: 91002 - DNA, 2526 bp, Oryza sativa
  Clone ID: PAT_MRT4530_89619C.1
atggccaacataatatcagctactataactgaatctcatgagcagtgcgaaggctttcagagagaagggagagccagtgaatatattgataagttgatcaggaatacaaagtttccaccaaaaggatcctttgatgagtatattggtaggcatatgtttcctgatgttagtgggaataggagcaaagcactcttcttgggatacatggtgagatgtcttctattggcttcctctggcaatcggaagagtgataatagggatgatttccgcaacaagaggctggatttggcatgtgaattgctccagagagagctatgggtacatattatgcatgcccagaaacgtatggtcaaggtcatgcagagacatttgagtggtgatggtgacctacaacctcttgagtgttatgtccatgcatcaattgttaccaatggtctcaaccgtgccttctccactggttcctggtgccatccatttaataaaagagagaggtgttcagggattgttgcaacccttaggagaacaaatcctcttcaaatgatgtctgacatgaggaagacacgacaatgggttgcatatgctggaaaggctggagatgctagatatccggagccctcggttgacgcacttgtttcttgtgggatgaagaaactggatgaactgcttctacaagagatcagcgggaaagacagaatcttcttgaatggaaacttggttggagtttgtgcagactcagtcgagtttgttttgcacttaaggagcatgagacgcaggaagcaaattgatgcacaggtggagatcaaaagggacaagcaaaacaaagaagttcgtatattttccgatccaggaaggattctaagacctcttcttattgtcgaaaatctacgaaacatcatgaatcgaaagaatggatcatactccttccaggaacttatggatcaaaatataattgagctgattggtgttgaagaagaggaggatatccggtgtgcttatggaattaggcatctctttgcaggggacgaagaaaagaatttctcattctatactcattgtgaacttgacccttctttcttgctaggattgagttgcagtatcattccctttgccaaccatgatactgctaagagaattctaatgcaagctgaaaagatatcgcaacaggctattggctactccactacgaatcctctctttagagttgatacacattcccatcagctctattatccacagagacctctgttcaaaactgtagctgctgattgtcttggtaagagagactatacatctggaagcaaacatgactttgccagaccagagtatttcaatggccaaaatgcaatagtctcaatcagtgtccatcagggatttaaccaagaggattctttggtattgaatagggcctctttagagcgtggcatgtttcgaacacaacattttaagagctataaagcactgatagaaaacaaagagatcaccaaacgattaaaacacaaggaaaatatcaattttggaaaaactcctagcaagaaaggcctggttgacagtttagatattgatggcttaccatatattggagcaagtcttcagagtaatgacattatcattggaaaggtctcagactctggtgaagatcatagcatcaagctgctacatactgaaaaaggaatagtggagaaggttgttctttcagctactgatgatgggacaaattctgcgtttgttactctaagacagactcgctcgccacgcattggagacaagtttgccagcatgcatggccagaaaggagtcattggcttcttggattcccaggagaacttcccttttactcaccaaggcatagttcctgacattgtgatcaatccccatggctttccaactcgtcagactcccggccaacttcttgaagctgcactaggcaaaggaatcgccctcggcggtgccacccggtatgcgacaccgttcacaagtccatctgtggaagtgatcacagagcagctgcacaaggctgggttctccaggtggggaggggagagcgtgatcaacggccgcaccggcgagcgtgcggcgtcgccggtgttcaccggaccgacgttctaccagcggctccaccacatggccgaggacaaggtcaagttccggaacaccggcccggtgcacccgctgacgcggcagccggtggaggaccgccgccggtacggcggcgtcaagttcggcgagatggagcgcgactgcctcctcgcccacggcgccgccgccaacctccacgagcgcctcttcctcctcagcgacgtgtcgcgcctccacgtctgccgccgatgccagcgcgccgccgtcgtcgtgtcgcccgccgtcgccgccgacggcggcggcggccggaaggtgagggggccgtactgcaggttctgcaggtcggcggaggaggtggtgagggtgagcgtgccttatggcgccaagatcctctaccaggagctcttctccatgggcatctgcctcaagttcgacaccgagctcatctag

SEQ ID NO: 91003 - DNA, 422 bp, Oryza sativa
  Clone ID: PAT_MRT4530_8961C.1
tttttttttttttttttttttttttttttttttttttttttttttttttttttttttttttttttttttagaaaaaactggcgttcggtggaaaaaaaaaaagggtcgggaaaaaggggactagtacaagaaagaccgtttagggcaaagagaaattatttttgggatttttacaaacaggggtttaggaaaccaggatacatactggcaaaaaagccctaattggaattttggatggatttccataactgaaaaaggagccaggtgaaaatgggttaaaaaggccacccgggtttatgacccatccattttcacgaccacaggggcaaacccataattttaataaattagattcaccggattggtggcaagatcccatccaaatgggggttccaaaagggattttaggtttggaggccatg

SEQ ID NO: 91004 - DNA, 651 bp, Oryza sativa
  Clone ID: PAT_MRT4530_89620C.1
atggactccccagcgacccccgtgggcttatctctaccacttctcagtctggtgctctgcaatgaaccatgctatacgaaaggtaaagccgttgcccacactggcttgtggggcacggcggcggttcaagggaacggacggccgagatcaaccctatccaaaacggactgccgagatcgaacggtccacgaccggctcacggggaacggcaacgatgacgtcagcgatgacggcagcgatgacgtcagcaccggcggcgactcgggcggctcggacgcgcatgctcgccggcgaatgacagcgcggcgacgcgaacggagggcaccaacgggtagagggcgacgcggcgaactcaccggtgaccaaaacaacggcggaaaagcaacggacggcgccggcgacgaggaagaagcggcggcggagatcgggtcgacggcggcgacggtgctccggcgatcttcggcggcggcgaaggggcggacggggacggcgactacttggcgatcccgatggtggccttcccgagtgacgactacgaccggaacggcggcggcgcacggctggagcgacggcggcgacggcggcgctagggcacacggagctagggcgctacggacgacgagaggtgaaggcgagggtgccggcgggtag

SEQ ID NO: 91005 - DNA, 3264 bp, Oryza sativa
  Clone ID: PAT_MRT4530_89621C.1
atgtgggatgagaaggaaaggcgccgggtcttctgtctagcaccacaagatggagaagctgtctggtggttagcgatggaagatcctgaaattactggtcagcagtcaccaaatgccacaagtattgtgacggatctcatggatttggatgacattattgttgagggcaatgaggtacagtttgctatggatgtggatttgagagcaataccatctctgaaagatggagggcacacagacccactggtacaaatcccaggtgacatgtctcatatggatgtggatttgagagtgataccatctctgaaagatggagggcatgcagacccaccagtacaagtcccagttgacaagaggattgcaagcctagagaagctctgtaaagaagcatcaagatcatttttcagggaaactaggctagttagccatcagataaactcctacaatgattttgtctctcatgggctccaaaagatgtttgattctctcgatgaagttactgtcgagcctgactatgatccttcaaagaaagtaggcccctggaggcacgcgaccatcaagtttggtcgagtggagcttgaggagccggtgttttgggtcgacaactgtgatcttgatgtggaaacactcaaactgaagcctaaacatgctcgcctccagaagatgacatactcttcaaagatgaaagtagaaatgactgttcaggtctattcactccacaaaagcgacaaagctaaaactggcgaggacccatatatacaaagaaaagatataatgaaagagactaaatgggtcactattggcaagttacctgtcatggaaagcgaatgcgagtatgattttggtggatattttcttatcaagggaatggaaaaggtattcgttgctgaagagcagagatgcctctccaggatttggatcaatgacagccccacctgggaggcttgttaccaacggtctcaaatccgacgagaaaagatctctataaaacctgttcagtctaatgatggtttcagaaaagtcattaacctgtactttttgggtgcaactataccaatctggataatgttttttgcactaggtgtatcatcagacaaagaagcttttgatattattgacatacaagaatgtgatgcttccatggccaacataatatcagctactataactgaatctcatgagcagtgcgaaggctttcagagagaagggagagccagtgaatatattgataagttgatcaggaatacaaagtttccaccaaaaggatcctttgatgagtatattggtaggcatatgtttcctgatgttagtgggaataggagcaaagcactcttcttgggatacatggtgagatgtcttctattggcttcctctggcaatcggaagagtgataatagggatgatttccgcaacaagaggctggatttggcatgtgaattgctccagagagagctatgggtacatattatgcatgcccagaaacgtatggtcaaggtcatgcagagacatttgagtggtgatggtgacctacaacctcttgagtgttatgtccatgcatcaattgttaccaatggtctcaaccgtgccttctccactggttcctggtgccatccatttaataaaagagagaggtgttcagggattgttgcaacccttaggagaacaaatcctcttcaaatgatgtctgacatgaggaagacacgacaatgggttgcatatgctggaaaggctggagatgctagatatccgaatccatcatattggggaaagctatgtttcttgtccactcctgatggtgaaaagtgtggatttgtgaaaaatcttgccattactgctatcgttagttgtttggcaagggagccctcggttgacgcacttgtttcttgtgggatgaagaaactggatgaactgcttctacaagagatcagcgggaaagacagaatcttcttgaatggaaacttggttggagtttgtgcagactcagtcgagtttgttttgcacttaaggagcatgagacgcaggaagcaaattgatgcacaggtggagatcaaaagggacaagcaaaacaaagaagttcgtatattttccgatccaggaaggattctaagacctcttcttattgtcgaaaatctacgaaacatcatgaatcgaaagaatggatcatactccttccaggaacttatggatcaaaatataattgagctgattggtgttgaagaagaggaggatatccggtgtgcttatggaattaggcatctctttgcaggggacgaagaaaagaatttctcattctatactcattgtgaacttgacccttctttcttgctaggattgagttgcagtatcattccctttgccaaccatgatactgctaagagaattctaatgcaagctgaaaagatatcgcaacaggctattggctactccactacgaatcctctctttagagttgatacacattcccatcagctctattatccacagagacctctgttcaaaactgtagctgctgattgtcttggtaagagagactatacatctggaagcaaacatgactttgccagaccagagtatttcaatggccaaaatgcaatagtctcaatcagtgtccatcagggatttaaccaagaggattctttggtattgaatagggcctctttagagcgtggcatgtttcgaacacaacattttaagagctataaagcactgatagaaaacaaagagatcaccaaacgattaaaacacaaggaaaatatcaattttggaaaaactcctagcaagaaaggcctggttgacagtttagatattgatggcttaccatatattggagcaagtcttcagagtaatgacattatcattggaaaggtctcagactctggtgaagatcatagcatcaagctgctacatactgaaaaaggaatagtggagaaggttgttctttcagctactgatgatgggacaaattctgcgtttgttactctaagacagactcgctcgccacgcattggagacaagtttgccagcatgcatggccagaaaggagtcattggcttcttggattcccaggagaacttcccttttactcaccaaggcatagttcctgacattgtgatcaatccccatggctttccaactcgtcagactcccggccaacttcttgaagctgcactaggcaaaggaatcgccctcggcggtgccacccggtatgcgacaccgttcacaagtccatctgtggaagtgatcacagagcagctgcacaagtaa

SEQ ID NO: 91006 - DNA, 577 bp, Oryza sativa
  Clone ID: PAT_MRT4530_89622C.1
caataatcgtgttacatctcattatctaggagaaaaatctattactgaaaagaaaaaaaagtagtgaaaataaaccatacagtctcaagggtctgttcactttgatgaaaaaaaaacccttttggcaggatttgcggtcagaccggcgcagcccgcggtctgaccggccgacactgtgtcggttttggtttcgggttgtttgtttggatatccgtgattatttcatgattatgacttctagatggatactatacgtgactcgatgtctcgggagaatatttgcgttgatggaccgagagtcggcttggagagaatcaataaagttgtcatctactttaagagttcttcgatttgtgtttcatcgggtttcggcggtctaaccgacggcacaccgacggtcagaccggcggcatcgcggcggtcagaccggcgggtacacggtggtcagacctgtgtcggtgacaggtgtcaggagcagatctcggaggtcagaccggagattcaacaccggtcagaccggcgaatctactccggtcagaccgatctcatcgaaattgagggtaacttttatttccgc

SEQ ID NO: 91007 - DNA, 714 bp, Oryza sativa
  Clone ID: PAT_MRT4530_89623C.1
ggagagagaggagagagaactagtctcgagtttttttttttttttttatacaaacggtcgaggtgaatattaactaatgcaagcacagagatacacaatcattaatcttatcttgtacagaatataacatatcatctcagttgatcgagatacttttgattatcctcattcgggcgacatcagtgcaaaactgagaacctaccactatgaatgacaacgaataggatacaagctatcaaaaactgatacctgcagacatgcagtatcattacactctcccacctcaaaaaaattaatccatgaaaccttgattcagatgaacagtgcttctgtagaaatctatgcgtcagcttctcgaatggttgtatcgatgttgctgggcatcaacatattgaatccatcagctgccgtagatatgatcatactaggtatctgtgggtgccagtgcaattctttcaagtctttctggccctgatgaacaaagagaagttgtgggggtaaatcttcaggggcatcagcctgttctctcatccttgccctgaactctgcctcctcttcagcatctttttccaatgaaagatcccaaattgtcagttgatggtcagctgatgatacagctagtgttgacggttcatgtgggctccattccacagatgtaattgggtgcttgtggtattcaaaatgggcgaccaaggagtcatccttgattaatct

SEQ ID NO: 91008 - DNA, 258 bp, Oryza sativa
  Clone ID: PAT_MRT4530_89624C.1
atggagacggtggtcgcctttggcgtgacccgctttgggagcggcgacccgcgtgccggcgacggagaggccagcgagacggttttccctgcctcaactgtgagttgcgtcccatcgctggttgtgagcatagtggattgctatttgtctagggggtgggttctgccaatgttgggtggaaagaccaatctggcaatcgtggttgaagataagattgaggtgcacagagaaaatgcgaaaatgttgcgtgtcgggtga

SEQ ID NO: 91009 - DNA, 240 bp, Oryza sativa
  unsure (1)..(240): unsure at all n locations
  Clone ID: PAT_MRT4530_89625C.1
agggactctgttatccttatatgtgtatctgcgtgtataggtttatgatcctttatctccatgtatatatagtatttgatctgatgcaatcactcaacattattgttccacttcaatgcaaagacaacaatagtgtggagaactgaaggggattcaaattaaatgatcaaatcaacagcttcaggaataaaaaaaaaaaaaaaaaaaaaaaaaaaaaaaaaanaaaaaaaaaaaaaaaaa

SEQ ID NO: 91010 - DNA, 246 bp, Oryza sativa
  Clone ID: PAT_MRT4530_89626C.1
atggccgccctcccccgcgtggccgtgtggcggcagaaaatccatcggtgtgaaggcgcggcggctgtcacccgcgtggatccgatgacggctgctctcaccacacatggcggcggtggatctggtggtggggatgggcgacagcggcggatctggtggtggggatatgcggccgcggtggatctagctgtggtgaggagcgatggcggcacggcaatgggagcgggcggacccggccgcccctag

SEQ ID NO: 91011 - DNA, 1681 bp, Oryza sativa
  Clone ID: PAT_MRT4530_89627C.1
accacgcagctagctgatgccgcagctgccaccggccgaacttgtgctccctccgtgtggggcgacttcttcgtcacctacacccctcccagccagatgtcagagaagtggatgagggaacatgtggatcagctaaagaggcaggtgcgctgcaagctgtcgaaggccacgagtatggcctacacggtgatgctagtggacgtgctcgaacgcctccacatagacgaccacttccgcgacgagatcaccgtagcgttacagcatgtattattattgcaccataaggagcacgccgacagcgttgctgctgctgacttgctccaccttgaatcccttaggtttcgtctacttcgccagcatggtttcttggtatctgcagatgtattcgacaagttcaaagatagcacgggttgtttcagagaaaacctgagcacggacgcaaggggcctgctaagcctctacaacgcagcgcacctcgccatgccccggcgaagaagcggcgctcgacgacgccatcgcgttctcgagacggagcgtcaagtccttgcaaggtaagctgggatcgccgatggccgagcaggtctcccgcgccctcgacatccctctcgcacgggcgcccaagctgctggagacgatgcgctacatcaccgagtacgagcgggaggaggcgcacgacggcgtggtgctggagctcgcgaggctggacttcgagcttatcagacctctttacctcaaggagctcaagaccctctccttgtggtggagacaactttatgacagcgtaaagctgagctacgctcgagatcgtctagtagagtcttacttctggtcctgtgccatattccacggggagaagtactctcgctcgcggatcatattcaccaaggtgttttaactgatgactctgatggatgacacttacgacatccacgccaccctggaggagtgttacaagcttaacgaagctatgcagagatgggacaaaagtgcggtttctattctaccagaatatttgcgtatcttttacataaagttgctcaatgactttgatgagatggaggacagcttggagccggatgagaagtacagcatgtcttacgcgaaaactacgttcaagcagatgtcggaatactacctccgtgaggcccaatggtcaagcgacaagtacatgcccagcttcgtcgagcacctggatatctctctcatgtcgtccggcttcccggcgatggcaccggtgctgctgctcggcgtgcgcgacagcggcggtgcggcggcgacaaccaaggaggcgttcgagtgggcgaccagcgtccccgtccccgccctggtccgcgccggcggggagctcgcccgcttcctcaacgacaccgcctcctacaggatcgggaagagcggcggggacatggcgagcacggtggagtgctacatggcggagcgcggcgtgggcgggggggaggccgtggcggcggtggccgcgctggcggagcgcgcgtggaggacgatcaacggggagtgcgccgccgtcgggacgatggatgccgccctgctgccggcggcgcggctgatggtgaacctggcgaggacggtggaggtgatctacctcggcggcagggacgggtacaccgtcggtggcgacctcaagggtctcgtctccaacctctttcttgatccccttcccgtg

SEQ ID NO: 91012 - DNA, 1101 bp, Oryza sativa
  Clone ID: PAT_MRT4530_89628C.1
cccacgcgtctagagaggccacaggcggcggcggcagcagcggaagtctctcgtctcgtccgtggagaaagggggaagacgaagatgtcgacggaggcggagaccaccagcgccgccgcccccgcccccgcccccgcccccgcatcggcgccggcgcggtgccagcggataggctgcgacgccacgttcaccgacgacaacaaccccgacggctcctgccaataccacccctccggacctatgtttcatgatggcatgaaacagtggagttgctgtaagcaaaaaagccatgattttagcctatttttggctattcctgggtgcaaaactggaaagcacacaactgagaaaccaatcacaaaagcagttcctactaaaccatcaaaggcagttccagtccagacttcgaagcagagtgtgggagctgacacttgctcaaggtgccgtcaaggtttcttttgctctgaccatggatcacaacccaaggcacaaataccaaccgctaccagtgatactaacatggtacctgttgagaagcctgcagttccaccaccaaagaaaaaaattgatctgaatgagcctagggtttgtaagaacaaaggatgtggtaaaacctacaaggagaaggataatcatgatgaagcatgcgattaccatccaggacctgcagtttttcgcgacaggattagagggtggaaatgttgtgatattcatgtcaaggaatttgatgaatttatggagatccctccgtgcacaaagggttggcacaatgctgatgccgcatgaattttcaccatgccccatcttggaataagaaccctattagcataaggttctcttgtatctcgtagtgcataaggtgcaatttttatggagaattttacttggagttggggagtgtggcaaagataccgagaataggctgttttaccgtgctctgtgtgactgctgcaaaagtgtgcgtggtgtttcattttttgtctgaaacggggacttgaaattgtgtgtggagacttcggtctcgttcgttggctcgttgccaattcttcatagttagaaaatcaaatgctccatctaaatgctaaaataaagactaaaggt

SEQ ID NO: 91013 - DNA, 332 bp, Oryza sativa
  unsure (1)..(332): unsure at all n locations
  Clone ID: PAT_MRT4530_89629C.1
atgttaatgaagatacttacaacatgagatcaagaggcacgtaggatccactcgattgtcctgagaactcaagcaatccaggattaaaaccttttggggactaggagcatccatggccctatcaggcttcttgctgctgtgagggcagcctaccccgttggggatgctccagaaatgcgcaaaattctttgatccagtaccgaaggctttcgtgcggcttaagctnggatcggtggcttatatactccggatgtgtaccttgataaaggtgtgataatcatgaaggaacccggtgcctcttctgtgtgaggggaacgggcggcatatgctct

SEQ ID NO: 91014 - DNA, 258 bp, Oryza sativa
  Clone ID: PAT_MRT4530_8962C.1
atgaggcccttcggctggacctgccgaaacccaaggaccagcgaggatccaagccaaagacatcagagccaatggggcgaagccctatggcgaaggctatgggcgaagatgctgcaggctaacaagccgcgtcgggtccatgcgaagcaaaagcatcttgggcgaatggcatacggcgaagggtgcatggcgaaggcgcaaggccttcgtcaggacgggttcggcatgcaagcgacctcatgggctgctccggcctga

SEQ ID NO: 91015 - DNA, 503 bp, Oryza sativa
  Clone ID: PAT_MRT4530_89630C.1
gcgcagttgttcgaggaggcacaccggtgaccgcccctcggccactgccttcggtcccaggcactcagcacaagtacccgaagaaggtgatccgcaaaggtactcaggctgaaagtaagacggcagtaagaagtcgagggtcaagtggcttcacgcaaagctcgtgcaaactgtgcacccacatgcatggcccacccagctgacacacactgcgacgtgcgacttgcaaggacgtgggcactcacgggggacccggacgccactgcggccacccagcgacaagaaggtggcgcacagcactgcaagccgcacaaggctcgcctcgaggagaggttcaagaccgcaagaacagtggttcttcacacaagctccgcttttgagcgccacttcttgttctctatcacctaatctatctcgcttttttgtatcgtgccccatgaagacttgttttttatatggattaaaataaaaacaggagaagcctcatgttttaaaaaaaaaaa

SEQ ID NO: 91016 - DNA, 864 bp, Oryza sativa
  Clone ID: PAT_MRT4530_89631C.1
atgtcgacggaggcggagaccaccagcgccgccgcccccgcccccgcccccgcccccgcattggcgccggcgcggtgccagcggataggctgcgacgccacgttcaccgacgacaacaaccccgacgggtcctgccaataccacccctccgatattggtaccttgaagctgcctcttgatgaggcatcatgggcaatgtgtctgatgtgtggcgagggatttttttcccctttggatatggctcacatgagtgctgactatttacaaaaagcaaaaggaaaagaggcaaagaactacctttcccttcagagaggacctatgtttcatgatggcatgaaacagtggagttgctgtaagcaaaaaagccatgattttagcctatttttggctattcctgggtgcaaaactggaaagcacacaactgagaaaccaatcacaaaagcagttcctactaaaccatcaaaggcagttccagtccagacttcgaagcagagtgtgggagctgacacttgctcaaggtgccgtcaaggtttcttttgctctgaccatggatcacaacccaaggcacaaataccaaccgctaccagtgatactaacatggtacctgttgagaagcctgcagttccaccaccaaagaaaaaaattgatctgaatgagcctagggtttgtaagaacaaaggatgtggtaaaacctacaaggagaaggataatcatgatgaagcatgcgattaccatccaggacctgcagtttttcgcgacaggattagagggtggaaatgttgtgatattcatgtcaaggaatttgatgaatttatggagatccctccgtgcacaaagggttggcacaatgctgatgccgcatga

SEQ ID NO: 91017 - DNA, 574 bp, Oryza sativa
  unsure (1)..(574): unsure at all n locations
  Clone ID: PAT_MRT4530_89632C.1
ttgagctcgtgccncaacgaaccnagtcacaccgatcgatcgaaacaacagtaatagtgaaccatggcccgtgcacagttggtgttggtcgccgttgtggcanactctgctcctcgccgccccgcacgccgccgtggacatcanctgcggccaggtcaactccgccgttgggccctgcctcacctacgcccgcggcggcgccggnccgtcagcggactgctgcancggcntgaggancctcaangccgcaccaacaacacgctganangcgcaccgcgtgcaactgcctcaagaacgcggcccncggcatcaangggctcaacnccngcaacnccntcnncatcccctctaantgnggngtcagcgtcccctaaaacatcancncttccatcnantgntccanggtganctaactatcnatcngattgatcatttntttcatcnnaancncnanggtgggtcaanttttnaaacnatnaaatnctntttccaannttannnantntcnnttcntnttctngaaataaaaaaataactancnaaggtcaatnaatcaccatnctnnntntttttt

SEQ ID NO: 91018 - DNA, 669 bp, Oryza sativa
  Clone ID: PAT_MRT4530_89633C.1
atggcggtggcaagcagcgcttccagttctggtagcaaccaggcccaatcaaagagagcaccagctcttcacatgttccaagagattgttgccgagaaggattttactgcatcttcactggaagatcagatctacaccggcatcttcttggcagggaaaacaaagaagtactgggtggatgagagaactaggaacaactgcttcatgctgtttcccagaggcttgtctatcacttggagtgaagaccccagattctggacttggaaacctctgaaagaaggaagcagtgatgctgacactgacacccagatcgaagtgccgtcgctgcagaacgtctgctggttagagatccatgggaagcttgaacggtcctatcttacaccaggagtcacctatgaggttctctttgaagtaatgcttattgatcctgcatacgggtggtctgtcccagtgaaccttcagctcaagttccctgatggaacagtccagcagcgtaaagagaatcttgaggagaagatcaggatgaaatggctggagctcaaggtcggggaggtgaaaacccagcaggggcagaagggagagattgagatatccatgtttgagtatgatggtgggctgtggaagagagggctactaatcaagggaatcaagattctcccaaaacaatga

SEQ ID NO: 91019 - DNA, 408 bp, Oryza sativa
  unsure (1)..(408): unsure at all n locations
  Clone ID: PAT_MRT4530_89634C.1
gcccgagcgaaggagtctttctctagctctagggttagggtttgcggtcggaacggaagttagtcgaatcggcgcaaatcgatccgatccgatccgccgtcgattcgaccactccgccctccttccttccttccgacgcagacgcaatccataatactactactctagatcggatcccctcctctccctccctccctccctgcatacgaacaacaagagactactccattactatattagattgattgattaggggaggggattgctgattaatttcatctctctaaccctagcagcagatccctctctcccctagcaactagcaagcagagagaagcagccgcctccatggatcctaatcagatgatgggccgaagcttccccatgtgggccgncgncgacgaccct

SEQ ID NO: 91020 - DNA, 1097 bp, Oryza sativa
  Clone ID: PAT_MRT4530_89635C.1
cccgggctgcaggcagtcctcaccgtcggattctccgccgacctcggccgaatcttcggcgattccatcaccccgggctccacccgcctcggcgccatcatcgtctacctcgtcggcttctggctcctcgacgtcggcaacaacgctacacagggaccctgcagggccttcctcgccgacctcaccgagaatgacccaaggaggactcggatagctaatgcttacttctcattgttcatggccctgggaaacatacttggatatgccactggagcatacagtggctggtacaagatattcccgttcaccgttactccatcatgtagcatcagctgtgccaacctcaagtctgcctttctacttgatattatcattttggtggtcactacatgcatcactgtagcatcagtgcaagagcctcaatccttaggaagtgatgaagcagatcaccctagcacagaacaggaagctttcctctgggaactttttggatcattccggtactttacattaccggtttggatggttttgattgttactgccctcacatggattggatggtttccatttatcctctttgataccgattggatgggtcgagagatctatcgtggaagtccagatgatccaagtataactcagagctatcatgatggtgtgagaatgggttcttttggtctgatgctgaactcggtccttcttggattcacttctattgtactagagaagttatgtcggaagtggggagctggactggtgtggggtgtctccaatatcctaatggcgttgtgctttgtggcaatgcttgtaataacatatgtggcaaagaatatggattatccacctagtggagtaccaccaaccggcattgtcattgcttccctggtagtttttacaattttaggagcgcccctggcgatcacgtacagtataccatatgcaatggctgctagtcgggttgaaaatctgggacttggccaaggtactgttccttttgagtcaatgctatcattttgggttcctgtacttaggaagtctttgtttcacatgcaggtctagcaatgggcattcttaatttggctattgtcataccacag

SEQ ID NO: 91021 - DNA, 544 bp, Oryza sativa
  unsure (1)..(544): unsure at all n locations
  Clone ID: PAT_MRT4530_89636C.1
ggcaggcttcggcangaggtgcctcgaaaccttgtaccaagcttaaattcctaccagataaatcaaatgccatttgtggcaacaagaaaaggaagaagatggaaactgaaacgaaggtatcatatttttcaactgtcttctttctatttaagctttttttttactattcctattttcatctaatagtttgctgacaatactaaagaaaattaaattaggtttcagtgcacaatcagaagcaggtcattaccttcagctgctactcgagccgcatgtgcaaaatagcatctcaactttcacctgttcagactcagtttgtgcataatgcttgttttgagaatttactgtcaatgcaagtttgtagtatgtccaaaagcatgacaccgtggcttgtcaatacaatgagaaccaggccaactatgtagtggtaccatcattttttttgtttttaaccatgtgaatatgtgaacaaatgtcaccatgtaatggctactgccatgtcaccatgtgaaatacatcccagcttacctttcgtttgcagcaa

SEQ ID NO: 91022 - DNA, 473 bp, Oryza sativa
  Clone ID: PAT_MRT4530_89637C.1
agcacacacaatgatccaaggaaaatggattaacatcaatggcagtcgttttcagcacgcggaactcaggaggcagatcggcaaggcgatcgtcgtcgtgagtagtctgaagctctgaaacgaactaatcgacgagcggcacatacaggagaagataatcggtggagagagatctcatgagctgttgctatcgcattcaagcgccatgaccagtacgccgttgctatcggttttggggaggctttgcaacctccggcaacggcgtcgtcggcgtcaacagcggtggcggcgcagtcggaaatcctcctcggggtggcgctcccggacgacatcgccttcccggctggaggtggagcacggcgatgggatcggggcggccaccgcttcagctcccgccggctgccaccactccagcccccgcccgccgccgctccagcccatgctccccgcagctggccgagaggaagaagaaa

SEQ ID NO: 91023 - DNA, 217 bp, Oryza sativa
  unsure (1)..(217): unsure at all n locations
  Clone ID: PAT_MRT4530_89638C.1
atctgccaatctggataagagtacttgcgcaagttctgtttcatcaaatgctggatgcttcttttgtctagactatagggtgctgcagccaagagaacccattattagtcatgggtcctgtgtttgtggtctagattactgtaactaaccggaatccttntgcgcacttctgcaagttaaatggtatgatccgtaagcgggatcctgnttcagcctc

SEQ ID NO: 91024 - DNA, 337 bp, Oryza sativa
  Clone ID: PAT_MRT4530_89639C.1
aattctactcggagagaattgggtttatattatatcgttttctcctagttctacttggagaccaaggtgattcacggtataaaaaggcataccctgtgaggggtccagatcaccgaatcttatggccaacactaccaccatagtcttcaagccggaggatgcaaagcctactcgctgggagatctcgtcgaatcatctcgacaaggatctcctggattagggctattaccttacgaggggtctgaaccagtataatctttgtcttcttgtttgcttgatatcgtattgtgtatatcctcgtaccaacataccccaatcgtcacatataagggtcctc

SEQ ID NO: 91025 - DNA, 1874 bp, Oryza sativa
  Clone ID: PAT_MRT4530_8963C.1
ctattctacactcatcaccttgcgtcgcggccttagccttgcctccagcggggttgccatctcgcacgacagcttcagcacctccgacagatcgacgccgcgcgacttatctgacaagggaagccaatcgaactcgtgtagcaacgtggcaacccagaatccgacagtggcgatggcgagcgacttgccggggcagcttcgccttcctgacccgaatagcgcgatccttagatccctattctttattgctaattccgtggttaggacgtgcaaaacacacaaaaatacaagcattacatgctacaagtgtacaatactacctggtccaacgtaggggcccttctacgcacctctctggtttgaactcgttcgggtcgggccaaacggaagggtaacactttacatttagggacatgtacacatcccgccaagctctacaaccaagtggaagacgcgtgccctctagagcagtgggcccggcgggtggaggcgcaggacctctttgatcaccgcttggaggtagaccagcttggacgcgtccgactcggtcactgcccggtccgacccgaccactcggtccagctcgtcatggaccctggcctgcacgtcctggtgcagcaccagcctcgccgccacccactcgatcaggaccgccaccgtgtccgtccctcgaaagatcatctcccagaggacggcgaccatgtcggcgtcggagagcttgtcgccgccgtggagggagagaaggacgtcggtgaagtcgacggcggcgtcgacggcgaggctgaggcgagcacggtgctcgtcgatgatgcgggtgacgaagcggttgacgcgggggacaagggacgagcaccttgaccgcgtcttcttgaggtcaaagggtgcgagccatgggaggtggtcggaccagttgagctggccgaggaggtcgtagccttcgtccaccatgctcctcagctccgccgtctcctcgctctccggcgccgccagctcgtacttcctcccgaacaccgaccacatcacgttgtgcagcgacgcgcgcttcaggaacggcctcgccgccacgccgccaccggcggcggcggcggcggcggacctcatggcctccaccatctggcgcgcgatcaccgcgcgctgcgcggcggaggcggacacctgcctcggcgagaagaggtgcgtggacgcgacgcggcggagcgcgcgccagtacgtgccgtagggcgcgaacccgatggcgcggtggaacagcatcccgtacgcggactccttcacacgcggcggagcgcgcgccagtacgtgccgtagggcgcgaacccgatggcgcggtggaacagcatcccgtacgcggactccttcaccggccggtcggcgaacgccgcgctggcgaggagctcccgcgcgacgccggggtcggcggtgaccaccacccgtgtctccccgagagacagcgccatgaggcgccgcctcgccggcgagccccccgccgccgcggcgagcttccggtgcgcgagtcccgccatgagcgacatgctgccgagcacgggcaacccacggggcccaggaatggcggcagcaatgcccagaccacccctcctgttccaccaatacctcccccacgccgggccaccgggcgacagccagtgcaggagcgacgtgacggcgaaggcgacgacggcaacggcgacgaagccgacgacgcggcaagggtcgccgccgcatttggcagcgagggagacgtacagcagccagccgccacagtcctgtgtcgacggcgacgagtccatccccatgatcaggcacgttacctgtacgtacgtgtgcagagaggatatggaaaaatcggctgaaattgagattggagaagagctgaaaag

SEQ ID NO: 91026 - DNA, 856 bp, Oryza sativa
  Clone ID: PAT_MRT4530_89640C.1
atgtcggaggcgccggcggtggcggcgccgaggccgagggaccctgggttgttcggaagcttcgacctccccgccgcctgggggtgccgcaggcccatggctttctgcagggaccttgacgccgccgccttggtcggctccgaacccaacgccgccgccgccgccgctgctgctggagacgccgtggagcccaagcgtaacgcctcccgatcgccgcccaaaggaggcgacgctcctgtggcggcggcggcggcgcaggaagctccgcggaagcagtggaacctgcggtatcggaagggcgggcgggacggcggcgaggacgcgctgcagaacaagaagctctggaacatggaagccgccggcggcggcggcggcggcggcgccagggcgagccgcgggttctcggtggagctgacgcgccaggagatcgacgccgacttcttcgcgatcaccggccggaaggcgccgcgcaagccggcgaagcggcccaggagcgtccagcgacaagtcgactcgatttgccctgggaactcgctctgggaggtgagccgcgatcgctacaaggtgaacgagaaagcagaggattcatgctcagaaactgaagcagaatcacttgaaatgaatgttggattcatgcgaactcaggaccatttgactgttcaaacagtactccagattcatgctgagacttcagaggaaacatttacccaatcaggaaaaaaaacgctgaggtttcagaatgtgtaattcaactcttgatttctggatgtgagacatggatacatgataggttcttcgttaattctgggtggtatgaaatctttggcattggcttcaaaaaaaaaaaaaaaaaaaa

SEQ ID NO: 91027 - DNA, 396 bp, Oryza sativa
  Clone ID: PAT_MRT4530_89641C.1
atgcccacggccgcacgccgccccccatctctatcacctcccactccagcggcgcaacctccccttcaccccgacaccggcgccggcgcctccctctcctcagccatcgacctccttgccgcgccttctgcggcggctggggaatgcggacctccggcgccggcccgcctcgttccagccatgctagcccgacgcaaaccccgcatcgacgaggccatggagccgtacgagtacgagaaggggtggaagcctggaagggagaaatttgggcaagaattggtgttcaaagcctggcagacattagtccggtcacagtgcaagccactcaaaagagtttctctagcggctgggcaactcagagattggcctaagcaacctcatcccacagtgcagtga

SEQ ID NO: 91028 - DNA, 765 bp, Oryza sativa
  Clone ID: PAT_MRT4530_89642C.1
aaagagaaaaacacaacaccatcaacccccgcatccgccaccgccgccaccaccccctaactccgatttgaagcgaccagaggccgcggctaaggtccgggatgtcggggcgcaaggagacggtgctggacctggccaagttcgtcgacaagggcgtccaggtcaagctcaccggcggcaggcaagtatcattttacggacagagtgttacagggactttgaagggctatgaccagcttctaaacttggtgcttgatgaagcggttgaatttgaaagagagcaagatgatccattgaaactatcagggaaaaccagacagcttggtcttattgtctgtaggggtacagcggtgatgcttgtatcgccaaccgatggaacggacgagattgccaaccccttccaatctgatggtgcataaacctgcaggagctgatggttctcctagtcaagatccatgctctcccagtagagaggcctttgtattaactcatgtaatctggtgccacagtctcttatgactcgtgtctcttatgaacaccaggtggtggtctgttctgtaccactcgaaactgatttctgaagatccttgctttgtgtcagatatatgaatcgcattatgctcttgttcggtttgttcaaaaaaaaaaaaaaaaacccccggccccccccccttttctcccggttgtgggtcctattacaattcactggccgtcgttttacaacgtcgtgactgggaaaaccctggcgttacccaacttaatcgc

SEQ ID NO: 91029 - DNA, 1401 bp, Oryza sativa
  Clone ID: PAT_MRT4530_89643C.1
atgaggaagaagagagatgtatgggtggggaaaaatgtggtggaagagaaggaagaagaagccggcgaggcggcgagccggagaaggatgaatccgccggagctgatggacgacctcgtcgacgagatcctcctccgcctcccccccgacgagcccgcctgcctcgcccgcgcctccgccgtctgcaagcgctggcgccgcctcctctccgaccgggccttcctcctccgccgccgacgccgcgcgccgcctcccctgctgggtttcctccacaacctcgacaacgccgaccaccccgaccgcttcgtccccaccaccgccctcccgatccccccgccgccacccgagctccactgcgggatggccctcgactgccgccatggctgcgccctcctcgacgcctacccctccaggatcgacctcgtcgtgtggcaccccatgacgggccacctgctgcggcggcttccccgccccgacgtcccgtacctcttgtactacaacgccgcggtgctctgcgccgccgccgccgccggctgcgaccacctcgactgccacgagggccccttccgcgtcgtcgtggtgggcaccgaggaggacaacgaggcgtgggcgaccgtgtactcgtcggagtccgacgagtggagcccaccgacctccgctcgcctcgcccgaggacccgagttctgcgtcgagggcaagcccgccaccctcatcggagattcgctctacttcgccctcgtgtttggtatcggagtcgtcaagttcgacatgaagcgccatcgcctctccctcatcgatccgccggctgagctcgacgatggcttcgtgctcatgccgctggacaacgatggcgtgcttgggctcgcggccgtggaggatcacagcctcctctctgtgtggtcaatggatgtgagcctggatcatggacatggtgtggcaaattgggagaagtgcagggtcattgagctagacagtctgctaccaaatcttgatcactctaccccagtgctaccaattggatttgtggagggtgccaatatcatcttcctgagaacagatgcgggtgtcttcacacttgagctcagatcaatgcgtgtcaccaaggtgtgcaagaatgggttcttctacgctgtcgtgccgtacacgagcttctacattcctggtgtccatctccagcagcagcacagcggacctcagatcagtaatggccgggcatggggatcgcaggctgctaacatgaggcgtggcagcagtgagcagccgagagagcgtgctccactgcatcagcagcgacgggcaggacggccggtgaacagccaacgtcctactggtgatatggtccgttcttcaggccgtgctagcagattggcatctcaagtgcggcctccatggagaccctaa

SEQ ID NO: 91030 - DNA, 222 bp, Oryza sativa
  Clone ID: PAT_MRT4530_89644C.1
atgcggacggcggcggcggtggacacgaaggggaagcagcgatgggtgcaggtggtggcggcagaggactttgccacgcctcttttgttcagcctggtgggccgggccgacgccgatgcggtgaaatctttcaaggagaaaaagtcttctgaggaaccaagatatgaagcacatttcaatcttacaaatgaagcaagacctgaggttggaagttctcagtag

SEQ ID NO: 91031 - DNA, 174 bp, Oryza sativa
  Clone ID: PAT_MRT4530_89645C.1
atgccagtgcgcatggaggtcaggagtgcaacattggctctcactggcgcttttgctggagagctggaaacagcagtatgcccccaagaagaagggcatagtcctgaagcagaagtcatggaagggatccgtgcatcggcaaccaaagaagaaggtggaagcttagaaccttga

SEQ ID NO: 91032 - DNA, 268 bp, Oryza sativa
  Clone ID: PAT_MRT4530_89646C.1
tggccggctacccgccaaatcccagctccggctacccctacggcggcgccggcggctacggcgccgcggcaccgacatacggccgctccaccgcccccttcgccccgccgcacgacacgaagacttccaaggaaggaacagacctacccctctggcgccccctaactacaccggcggacgcggatacgctgcccagccatccacccagccctacggcagaggaggcaggtacggcgccccgccctcaaaccagccgcacggcgcgcca

SEQ ID NO: 91033 - DNA, 462 bp, Oryza sativa
  Clone ID: PAT_MRT4530_89647C.1
atgggacggggcatacctgcccccacgccgcctgacgtgaatcgggacgtgggtgcgctaccacccgtcccttccatccattgttgggtcacaaacggtcaaaaggcggtcgccagacacacgtccatctgtgagcggcgcacgccctgccctgtcgcattaaatgcgacgggagcggttggcgcgctgctcatgaatgcgcctggtagacagcgcatccgcccgctcaggctctccacatggccaccacgtggcagccatgctagggcctcggagcgatccagcccctcgggcctgaggggtggcacggggcaccccaagccggggggaggggggacggctgctctctttctgagggcgcgacccatacatggggactggacctaccgtacgtgccacacagggagggccttcttccccctagaccagggaccccagggccatatcgtcgacacagtttga

SEQ ID NO: 91034 - DNA, 5613 bp, Oryza sativa
  Clone ID: PAT_MRT4530_89649C.1
atggcgaaggcaacgactggcatctgcctcgttgacgtcatcctcttctcgttcttcctcgttgctcccagagccttcgccgccgccgcggccgttaccgacacgctccgcggcggccggaacatcaccgacggcgagacgctcgtgtcggccgacggcacgttcactctggggttcttctcccccggggtgtcagccaagagatacctcggtatatggttcacggtctcccctgatgccgtttgctgggtggccaaccgagacagccctctcaacgtcacctccggcgtgctggcgatcagcgacgccgggagcctcgtcctgctcgacggctccggcggcggccatgtcgcgtggtcgtcgaactcgccctacgccgcctcggtggaggcgcggctgtctaactccggcaacctggtcgtccgtgacgcaagcggcagcaccaccacgttgtggcagtcgttcgatcacccgtcgaacaccttgttgccgggcatgaagatgggcaagaacctgtggaccggggccgagtgggacctcacgtcgtggcgctcgccggacgacccgtcgccgggggcctaccgccgcgtgctggacaccagcggcataccggacgttgtcctgtggcaagacggcgtcgagaggtacaggtcggggccatggaacggccggtggttcagcggcaacccggaggcggcgacgtacacgacgaacctgatcacgttccaggtgaccgtcagcccgggggagataagctacggctacgtctccaagcctggggcgccattgacgcgctccgtcgtgctcgacaccggcgtggtgaagcggctggtgtgggaggcgacgagccggacatggcagacgtacttccaggggccgagggacgtgtgcgacgcctacgccaagtgcggggcgttcggcctgtgcgacgccaacgcgccgtcgacgtcgttctgcggctgcctcagggggttcagcccgacgtctccggcggcgtgggcgatgaaggacgcctccggcggatgccggcgaaacgtgccgctgcgctgcggcaacacgacgacgacggatgggttcgcgttggtgcagggagtgaagctccccgacacgcacaacgcgtcggtggacacgggcatcacggtggaggagtgcagggcgaggtgcgtggccaattgctcgtgcttggcctacgccgcggcggatatccgaggaggcggcggtggtagcggctgcgtcatttggaccggcggcatcgttgatcttcggtatgtcgaccaagggcagggtctgttcctgaggttggcagagtctgaattagaaggtatacctcataatcctgctacaacagttccttcagttgatctgcagaaagtgaaggcggccactggaaatttctcacagagccatgtgattggccaaggaggatttggcatagtttacaagggccagttacctgatgggagaatgattgctgtaaaacggctacaccaatcaaccctcaccaagaaaggcaagaaggatttcacaagagaagtggaggtgatggctaggctcagacacggcaaccttcttcgtctccttgcctactgcagcgaaggcagcgagcgtgtgctgatatacgactacatgtcaaacaggagtttggatctctacatatttggcgattctggcctccgactcatgctcaactggagaaaaagattgggcatcattcatgggatcgccaatggtgttgcgtacctgcacgagggatcaggcgagtgcgtcatccacagggatctgaagcctccgaacgtactgttggacgacagtttcagacccaagattgcagattttggcaccgccaagctattcacagcagaccagccagagccttccaatctcaccgttgtggtttcaccctttggagtcgttcttctcgaaacccttagcggacagaggaatggtcccatgtacagtctccttccacatgcatgggagctgtgggagcagggcagggtgatgtccctccttgacgcgacgatcggtctccctctctcagtctcagggcctgatcacaccgagatggaagatgaactggcgaggtgcgtgcagatcgggctcctgtgcgtgcaggatgcgccggaggaaaggccggccatgtcggcggtcgtcgcgatgctgaccagcaagagctcacgggtggatcgtcccaagaggccaggggttcacggcggcagaagcaggccaccgttgcgcgagtcggagctgctgggcgccaccgacattgacgacgatctcacaacaactacaggtgcagagctaggtgacactcttggcaagggccggaacatcaccgacggcgagaggctcgtctccgccggcggctcattcacgctgggcttcttctcgccggcgtcgtcgtcgtcgtcgagcaccagccggagatacctcgggatatggttctccgtctccgacgacgtcgtctgctgggtcgccaaccgcgaccgccctctcacggacacctccggcgtgctggtgatcaccgacgcggggagcctcctcttgctcgatggctctggccacgtcgtgtggtcgtcgaacacgacgaccgggggcggcgcgtccatggcggcgcagctgctcgagtcgggaaacctcgtcgtcagtgaccgcggcaatggcggcgcgggcgctgtcgtcgtgtggcagtcgttcgaccacccgtgtgacacgctgctccccggcatgaagatcggcaagaacctgtggaccggcgccgagtggtacctctcgtcgtggcgttcgtccggcgacccgtcgccggggaactaccggtacaggacggacacgaagggcgtgccggagaacgtgctctgggacggcgacggcgaggtgtaccggacggggccgtggaacgggctgtggttcagcggcatcccggagatggggacgtactccgacatgttcagctaccagctgacggtgagccccggcgagatcaccttcggctactccgccaacgccggcgcgccgttctcccgcctcgtggtgacgggcgtcggcgaggtccagcggctggtgtgggagccgagcagccgggcatggaagaacttcttccaggggccgagggacctgtgcgacgactacggcaagtgcggggcgttcggcctgtgcgacgccggcgcggcgtcgacgtcgttctgcagctgcgtggagggcttcaccccggcgtcgccgtcgccgtggaagaagatgagggacacctccgccgggtgccggcgagacgccgcgctgggctgcgccacggacggcttcctggcggtgcgcggcgtgaagctccccgacgcgcataacgcgacggtggacaagcgcgtcacggtggaggagtgctgggcgcggtgcctcgccaactgctcgtgcgtcgcctacgcccccgccgacatcggaggcggcggcggcggcggcgccgggagcggatgcatcatctgggccgacgacctcgtcgacctgcgctacgtcgatggaggacaagatctctacgtgaggttggcgaaatctgagttagctgctactgctgctgttcatgctcgtcctaatcctgctttggctgccccttcaattaatctgtctagtgtgaaggaggctacagggaatttctctgaaagcaatatcattggcagaggtggtttcggcattgtctatcaggggaagctgcccagtggtagaaaggttgctgtaaagaggctcacacagtctcttgttactgacaaacgcaaggaggatttcataagagaggtggagatgatgtcgaacacaaggcacgcctaccttgttgagctgctctgttactgccaagaaggaggcgagatgatactagtctatgaatacatggagaacatgagcttggatctctacatatttgacataatccgcgggatcgccataggtgtcgagtaccttcacaacgtgaaagttattcacagggatctgaaaccatccaacatactcctagatgacaatcggagacctaaggtagcagactttggcactgccaagctgtttatcaacgaccagactgatccaacattagttctgtcagcgggctacatagctccagaatatgcagctcaaggaaatctgacgctcaagtgcgatgtgtatagctttggagttgtgttgctagagataatcagtggtaaaaggaacaggacattaccaacttttcttcgtgagacctgggagtcttggaaacagcatgagatcgaggacattcttgatttaggactgatcaaacctgagcctgatctcctgcttgggctagacaggtgcatccaaattgggcttctctgcgtacagcaatctcccgatgacaggcctaccatgaatcagctgacacaagcaaagcagctccacccaggcgacgtgcttggctccaagagcggggtgtttgcgctcgggttcttctcccctggaacctccaacaagagcttatatcttggcatatggtaccacaacatcccgcagcgcacatatgtttgggttgccaaccgagacaacccgatctccacaccttcatcatccgtgatgctcgccatcagcaatagctctaaccttgtcttgtcagattccgaaggccgaactctttggacaacgaacatcaccataactggaggcgacggtgcttatgcagcgttacttgacacaggaaacttggttctccagctgccaaacgaaacaatcatatggcaaagctttgatcacccaactgacaccattctgcccaacatgaagtttttgctgaggtacaaggcacaagtcagcaggcgacttgtcgcttggaagggcccaaatgatccatccaccggggaattctccttgagtggcgaccccagcttagacattcaggccttcatctggcatgggaccaagccatattaccgcttcgtcgtgattggtagtgtgtcagtgtccggcgaagcatacggcagcaacaccacctctttcatatatcaaactctggtgaacacacaggatgaattctatgttaggtacacaacctctgatggctcagcaaatgcacgcatcatgcttgattacatgggaaccttcaggttcctgagttgggatgatagctcgtcatcatggacagttcgcttacaacgcccagcgagcaccatcgactgctatacctacgcctcatgtggcccattcggctactgtgatgccatgctagccatcccaaggtgccaatgcctcgatgggttcgagcctgacaccaccaactcttcgagaggatgccgaagaaagcaacagttgagatgcggagatgggaatcattttgtgaccatgtccggaatgaaggtccctgacaagttcattcctgtcccaaacagaagctttgatgagtgcacggctgagtgcaaccgcaactgctcgtgcacggcttatgcttatgcaaacttgaccatagccggcaccacggcagaccaatcaaggtgcttgctttggactggggagctagtcgacacggggaggactggttttggtgatggtcagaacctgtacctccggttggcctactctcctggtatgcccaccttttttcccctgcagttgcaatataactcttag

SEQ ID NO: 91035 - DNA, 1000 bp, Oryza sativa
  Clone ID: PAT_MRT4530_8964C.1
ttgagtagagtgcccactagttggggtttggtttattctagggtgaacaagccagggggagggggcgcgcggaccgggtccacgggagtggggcccacgcggcagcctcacggtccacggtggaccgggtgcacccgggctcacaccggccggcgccatgagccacacacgtcagccgcacccgagggcgcaggcggctgacggccgggccccacgcggcagccactcggcacgcccgagggcggccatgccggcgcggttggcgggaggcggcgcgcccgagccccgatggtcgccgccggcaaccaccggcgcggcggagcggcggccgagagatgggagggaagggggaaacgaggcggcggtccacggctcaccccagggcgacggcggcgacggaggaggtggtcggagcggagggaggcggtggcgcggctcgggtcaacggggacggcggcgctccggtggtcggcgaccgaaacggagaggcggacgaggtcggcgaggatgcggcgaagccgaaggaggcggcgccgaggtgggaggcggtccagggcgacgacggcggcggaccggagctcggcggcgacggccgagacagagagcgacgtcgcgagctcgaatccgacgaggaggaagggcggctagaggcggaaacggacgggggaggcacggggagggtttaaatagggttggaagggggagagggcggccagaggggaaggaaaccggcgcgggaggtccggccgccatcaatggcgccggcgggattaggggaggggtttccaaacgaatccaagggagagagggagggaaaatttggggaaagggagagggaatcacggggaataattcccccctattgattgcacgcggggacgacgggatgcggcggattcggcggcggcggcggcgcttggcgcgggcggagcggagggagcggcgggaggtcggggatgacgggtgggccccacacgtcagcaagggtggcgggcgggcc

SEQ ID NO: 91036 - DNA, 579 bp, Oryza sativa
  Clone ID: PAT_MRT4530_89650C.1
tcacgctgcccgtgtagctggggatagagcaaacgggtcaccggagccgagctcgtcgtccggcgaccggcgttgagcgatgagggcgagggcaacgacatgacggtggcagccgtggccgaggcggacgaagttggcggcgacagctgcggtggacaaggtcggcggcagcggcatacagaggtgacgagcacggttgacaaggacgagggtagcggtggtcgcagtggacaaaggcggcagcggcggcggacgcggacgtgcgcgacgatggcggcgcggccctggacttggacgctccgacgcaggcaacggcgagtagcacggctaggcgcctgtggtgacttcgtcaatctcaagatatgccggcccagtcttccggaggtgctcataggggtaggcccgctgtcataccagatcaaggttgattttggggccttcctaaggaacaagtacccggagtttggtatgctctcttttctgaaccattgctattcatacgcaaaccttaactcctgcaaaattcctttccctaacaccggaactatcaacatctctcgcagatggatgaggcaatag

SEQ ID NO: 91037 - DNA, 381 bp, Oryza sativa
  Clone ID: PAT_MRT4530_89651C.1
atgtcgcctcgctgctgcgtcgtttgcgtcatgccgtcttgtatcctcgtcgatcctcgcccaggcgttgccctgcagcgactcgacggcagctgttaccgtcccatccatcgtcgccacaagcaagtgtcggcggcctgcctccgcctccccaagccgacaccatcccagccacaaccgctcccaatcgcgtcggcggccagccccaaccgtcgctccgtcgtcaccgccaacatctatccctgcccgggcgtcgactacctgttctccctctttcctcctgccgtcctgcgagcgccggccaagccacggccgccacctacccgtgatcttcaagggaaacgaggaatcctcatcgaggatggagacggggtggcatag

SEQ ID NO: 91038 - DNA, 558 bp, Oryza sativa
  Clone ID: PAT_MRT4530_89652C.1
gggggatcctctagagtcgacctgcaggcatgcaagctttgggctctcttggtctctctctttaacttgctctccatggccacggtagacgagagccgcaacatcgaccgatgagggcgagggcaacgacacgacggtggcagccgtggccgaggcagacgaaattggtggcgacagctgcggtggacaaggtcggcggcagcgacatacagaggcgacgagcacggttgacaaggacgagggtagcggtggtcacaatggacaaaggcggcagcggcggcggacgcggacgtgcgcgacgatggtggcgcggccctggacttggtgctccgacgcaggcaacggcgagtagcacgggtgcatcgttcgctacgggcgggcccacgtcctcggcccatgcatacagccgggcgactaattagtcgcccgcttgcgccctctcccctcccctctctcctccagttcaacagaaaatcctacgtggatcttctaacgcccattattatcagagcatgcacagaacagagaacagtttccttctgctttcatgtctgcaat

SEQ ID NO: 91039 - DNA, 185 bp, Oryza sativa
  Clone ID: PAT_MRT4530_89653C.1
ccaccgccgctgccaccacgggcgctgccgcggctgtctcaggccacatccgtagctgtctcagccgccgccgctgtcacccatcaccagccgcgtggtcggccaccattgtctccgcgacggcggcagggtgcagggagttaggaggtgcaatggaggtggaggaggcagaaagccatggatga

SEQ ID NO: 91040 - DNA, 695 bp, Oryza sativa
  Clone ID: PAT_MRT4530_89654C.1
ccgtgtagctggggatagagcaaacgggtcaccggagccgagctcgtcgtccggcgactagcgttgagctagccttctgcacgcggaacggtggaagatagaagtgaagcaaccgggcaaaccatcaagctgattcataagcacaagccctcagaactcaatccaagctttgggctctcttggtctctctcttctactttgctctccatggccacggtagacgagagccgcaaacatcgaccgacgagggcaagggcaacgacacgatggtggcagccgtggccgaggcggacgaagttggcggcgacagctgcagtggacaaggtcggcggcagcggcatacagaggcgacgagcatggttgacaaggacgagggtagcggtggtcgtagtggacaaaggcggcagcggcggcggacgcggacgtgcgcgacgatggcggcgcggccctggacttggacgctccgacgcatgcaacggcgagtagcacggtgtctggccctggacgcacatggtgatatattctatgatagtggtgatgagttaccgcgtcagtgtgaggaagaaacagtattgacatggactgtccgccgcatcaggaaaatggctgtcatggcactgtttctaacctacaacggcctaactatacgctggtcacttcagagcaaaacccctttcattgacagcatggagtga

SEQ ID NO: 91041 - DNA, 519 bp, Oryza sativa
  Clone ID: PAT_MRT4530_89655C.1
atgcccctgacactgttcttctttcttctctctttcctgcccctgacacgggtcgcgttcttcgctgcaggtggcggcgccgtgcgggaggtgctgctcacgcggtgggaggggcgggacgaccaggtgctgctgtacggtctcctcccggcaggggtggaccacggcgagctcatgggcagagcgcggttctgcctgtgcccgaccggcgacgacgagggcgcggccgcggcgagccgccgcgtcgtggaggccatcacggccggttgctgcgccgtgggcagcgccgtctccttcctgcgccgccgtcgccggtgccatgatgaggactttgttttgctgttccatgactggcatcggctgctccagcatggcagtggcttcaagctttcaaccacagttgagtttgtatgcttctgtaatcttaggacaccgatgccggccggaggaggtcctagaggaaccactgatcctgttgctcaaattcacttgatgatgaagacattgtacaatggatag

SEQ ID NO: 91042 - DNA, 2700 bp, Oryza sativa
  Clone ID: PAT_MRT4530_89656C.1
ccggccgggagctatcaccacacctggcaatactcctaattgagcaggattatgtcatttattccattattaatattaattaatgaatttggcagctaagaaatacattctgccctgctggatctgcattccccatatccccttccataaaggacccctcattccccttctgtgcctggtcatatttgcgcactccatttcgatctgcctgtgcgcaggaaagaagtcgagcaaatcaatccccaaatcctctcatataattcgcaagcaccttgccaccaccgttcttcgaccggatcctatcaagagaaaaactcttctctttccactattggagatctgactactttccttgggttcctttcacgggcactcgtctgtgcttctatgtgctgattttggtggattccagtgtaccgagcttttcgtcgacaaggatgcctggcctacctttgactgaccatgatgcagtgaataccggatgtgaatttgattgtcagaggtcttcggaccagatgtgctgtgagcactctgtcgctcagttctcttcagatcaacaacttaaccctgaagaaaatttagctttatactgcaagccacttgagttgtacaactttattcgacaccgagccattgaaaatcctccttatcttcaaagatgccttctttataagatacgtgcaaaacaaaaaaaaaggatacagataactatatcattacctggaagtaacaataaggaattgcaagcacagaatatctttcctctgtatgttctgtttgctagacctacttcaaatgttcctatagaaggacattctccaatatatcggttcagtcaggcccgtttgcttacttcctttaatgactctgggaataatgaccgtgctgaagccacatttgttattcctgatctggagactttaattgccacccaagcttatggtcttacttttatccttgttagccgcggtaccaaaaaaaataaagggcgaactggacaaaatctttgtgaaaatgactgttctgagaaacatgtggactactcttctctccgaaagcttgcagggaaatgtttctggggtaaaattccgatcactttacttaattcatctttggagacttgtgcggatttaattttggggcatatagtggagtcacctatcagtatatgtatgagcccaggctacttagagccaacatttcttgagcatgacaattgcttgtcattttgttcccgtaaagctgatgctatggttccatatcagttgcaagtaaaagtatctgcagcagaggctggtgcaaaagacatactcaaatctccgtataattccttctcatatagtgacgtcccaccatccttattactgcgtattgtaagggcactgcagtactatgctaataccatgaagttctttttgtacaggctaagagttggaaatgtgctctttaactacaagaacacacaaatgagtgaagtaacggaagattttacttgcccgttttgcttggtacggtgtgggaacttcaagatatctgaagactaccaggctgttaatgttacgctgaagaaagataacatgagaacagagtttgtggcagcagaagttgataatagccatcggatcttttactaccgatcaaggtttaaaaagagtagaacagaaatacttccggttgcgcgtgcagatgcacatattatggaatcaggatcacctgaagaaacacaagcggagtctgaggatgatgtccaagaggaaaatgaaaacgctttgattgatgattctaagaaattacatggtagcaatcattcacaatcagaatttctggcatttgggaaatcaaggaagctatcagcaaatcgagctgatcccagaaatcgtctacttctgcaaaaacgtcagttcatccattctcataaggcacagacccctctaggagatgacaaggtgaccaacttggtgacggcggatgccatgtcggtaccaatgacattcgaagaagttctctcagataatgatagtgaagatgaagtagatgatgatattgctgatttggaagatagaaggatgcttgatgattttgttgatgttacaaaagatgagaagcgcattatgcacatgtggaattcatttattcgaaaacaaagtatactagctgatagtcacgtaccttgggcttgtgaggcattctcccgacatcatggagaagaacttttagaaaactccgctttactatggggatggcgcatgtttatgatcaaactctggaatcacagtctactctctgcccgcacaatggacacctgcaacagaattcttgatgacataaaaaatgaaagatcagatcctaagaaacaatgacgtgtaggaaatattggccaacttgtgtaccatggtgttgattctgatcatttcaaagtttcttaaaaaaacataagctttctctgaagcctgaatgatccaaagttagaaacatatatgctgaggttgtcattgtttttacttggagaagcagagaactattctcaattcgattcattgattaaaactgaagggccaggtccagggcctgataacaaactttcttaaaaaggatgacattcagttccagccaacacctggataacgtgagtttacatggaccattctttgttcagctctgtggagcattaatttttttttaattttcttattcagcacc

SEQ ID NO: 91043 - DNA, 643 bp, Oryza sativa
  Clone ID: PAT_MRT4530_89657C.1
ggctgcaggaattcggcacgaggtcaggcggttctttgaggcgtacatcaaggctttctcaaaggtgactccactcaccattaggcaagtgaaggcatccaacatcgggcagcttgtcaaaatatctggaatcgtgactcgctgctcggatgtgaagcccttgatgcaagttgctgtttatacatgtgaagaatgtggttttgagatataccaggaagtgactgctagagtatttatgcctctctttgaatgcccatctcaaaggtgcaagctgaacaaagccaaagggaatctaatccttcaactgcgagcatcaaaatttctgaaatttcacgaggtgaaactccaagagttagcagaacatgtaccaaagggtcacatcccacgttctctgactgttcatctcagaggagagctgactagaaaggttgcacctggagatgtggttgagatgtcaggcattttcctccccatgccttactatggattccgagccatgcgtgcaggattggttgctgatacctacttggaatcaatgtctatcacccatttcaagaaaaaatatgaagaatatgaacttaaaggtgatgaacaagaacaaattgaccgtttggctgaggatggtgatatctacaataagttg

SEQ ID NO: 91044 - DNA, 798 bp, Oryza sativa
  Clone ID: PAT_MRT4530_89658C.1
cgaagaggcagtgccgtaaatccgaaagaaacaagaaacacggcccgagtctagtcgaccacgccccgcgtccgtcttcccccccaaaacttcagcaaaagcaaacgaagtcttctcagattaattctcgcgtcgtgtcagaccacgctgccgcgggggatctgccgggtggcgaggctgcggagatgtcggacgcgctgatcaacggcgtcgccggcgccggcggcgggatcatcgcccagctcctcacctacccgctccaaaccgtgaacgcgcggcagcagacggagcgcgacccctccaagccggcgttcaaggacggcgccgtccgccagatgtgcctggtggtgaagcatgaagggtgggagcggctgtacggcggcctcatgccctcgcttgttggcactgcggcctcccagggtgtctactattacttctaccagatattccggagcagggcggaggccgcggctctccagcgatccaggagaggaatcggcgatggatccgtcgggatgctccaatccctcactgtcgctgcgctttctggatgtgttaatgtacttctcacaaacccaatttgggtaattgttacacgaatgcaaactcaccggaaggcaaacaaacagcagagtcctctggatttgacgtgtgttcttgacaggccctacaagctcccgctgttgaaaactacctcacaagactatccatgttattcaggacctttacaaagaagctggatttttgggcttctgggaaggtgtagttccagctcttattatggttagcaaccctgca

SEQ ID NO: 91045 - DNA, 1314 bp, Oryza sativa
  Clone ID: PAT_MRT4530_89659C.1
atggcgatgtcggcggctcacggcgaggactcgccgtactttgcagggtggagagcctatgatgaggacccctatgaccccatcaccaatcctcaaggtgtcatacagatgggccttgcagaaaaccaggtttcctttgatcttctagaggaatacatgagggagcacccggaggcgtcggattgcggcgccggggttcgagagaacgccctgttccaggactaccatggcctgaaatcattcaggaaggcaatggcgagcttcatggagacgataaggggaggcaaggcgaggttcgacccggaccgcgtcgtcctcaccgccggcgccaccgccgccaacgagcttctcaccttcatcctcgccgaccccggcgacgccctcctcgtccctaccccttactacccagggtttgacagggacttgaggtggaggaccggcgtgaacatcgtcccggtgagctgcgacagcgccgccgggttccaggtcaccgccggcgcgctccgggccgcgtacgacgaggccgtggcggcggggacgcgcgtccgcggcgtgctcatcacgaacccgtcgaacccgctcggcacgacggcggcgcgtggcgtcctcgagggcatcctcgacttcgtggcgcgccacgacatgcacctcatctccgacgagatctactccggctccgtgttcgccgcgccggacctggtcagcgtcgcggagctcgtcgacgagcgccgccgcgcgcgcggcggcgccgccgacgccgaggacatcgcccggcgcgtccacgtcgtgtacagcctctccaaggacctgggcctcccggggttccgcgtcggcgtggtctactcctacaacgacgccgtggtggccgcggcgaggcgcatgtcgagcttcacgctggtgtcgtcgcagacgcagcggacgctcgccgcgatgctgtccgacgcggcgttcgcggcggcgtacgtgcgctccaaccgcgaccgcctccgggagcggcacgcgcgcgcggtggccgggctgcggcgcgccggcgtggcgtgcctccgaggcgccaacgccgggctgttcgtgtgggtggacatgcgccgcctgctgggcgacggcgaggccaccgtcgccggcgagctgaggctgtggcggcgcgtggtcgccgaggcgaagctgaacatctcgccggggtcgtcgtgccattgccgggagccggggtggttcagggtgtgcttcgccaacatgagcttggagacgctggacgttgcactccatagactgggctgcttcatcaagaaatgggagcaagaacaacatgagaattaa

SEQ ID NO: 91046 - DNA, 429 bp, Oryza sativa
  Clone ID: PAT_MRT4530_8965C.1
atgacctcggcgatgacgtcaccaccggcggcggcggctcggacggctcggacggcgcacgctcgccggcgaacggcggtgcttcagcacgaacggagggcaccaacgggtagcggacagcacggcgatctcaccggcgaccaaagcgacggcggaagaccaacggacggcgacgacgacgaggttgaaacggcggcgctcttcggcttgacgacggcgacggtgctctggcggtctttggcggtggcgaagcggcggacgaggacggcgacgacttggcgaccccgacggcggtcttcccgagcgacgacgatgactggaacggcggcggcgcacggctggagcgacggcggcgacggcgacgctagggcacacggcgctagggcgtttccgacgacgagaggcgaaggcgaaggcggcgacgggtag

SEQ ID NO: 91047 - DNA, 525 bp, Oryza sativa
  Clone ID: PAT_MRT4530_89660C.1
atggcatgcagtagccgctgtcggcgtggacggacacccaaagtagctcgccgtgataatcgatgccagtcgcttcctcctgcgcctccgcacgcgttccacctcttcctccacccggtccacagtgtcctccacgcccgcctcaccccgtgcgccgccacggcgctctacctcgaggccgaccggcctccaccgcaccatcgccatctccgccgccagaatcatgctccgcgaccgctcgtcgtcgcctcaccgcttgaacaaggaaggagagcgagagaaaaggccgaggtcgtcgtcgcgctgctccagcgcccgcccagctcccgcctgccgccgagtgcgctggcaacggctccgcggggaggggtgggggaggccgacaacaacccgcgggccgtccgtggcagcggccaaggcggtggccaacggcgagtcggcgcagactccatcgtccgtgcctccgtgaggggagagaagggaggaggaagacggggaggagaggattatgtgggctccacataa

SEQ ID NO: 91048 - DNA, 1070 bp, Oryza sativa
  Clone ID: PAT_MRT4530_89661C.1
atggactgaagttggatgtactgtattcagtgttcgaccccagagtatagggagggggtcacagaattcgtatattttgcagataatgataggaaaattaggatgagtaaatatatgttgtgtccatctgcggactataaaaatgagaagatattcgatgagagttcatgggtacattctcatttgatccatagaggattcgtggaccactacagatgctggagcaagtatggagagcaaaagacactagatgttgcaactaatgaggtgccagatgtagtgaacaacccagtaggttgagatggtattttcatcccttcgccattaggcggagatgccatagatttcgagccacaaactctatcagaaatgttgcatgatattgaagacccagatcataatgagagggatttgagaagttcaataagtcggtggcagattctgaaatgccattgtgtctcgggagtaagccaaagcactccaagttatccctttgttagaactcatgaagcttaaggcaagtaatgactagttagacaagagtttcacataacttcttgagttcttgaaggggttgttgtcaaaggggtaccaaattctgtagacaacatatgaagcaaaacaagtcttatgctcattgggtctggaggtcaaaagaattcatgcttgtcggaacaactgcatattgtattagaaatagtattctgatttggacgcttgccctgtttgtggggcttctacatacaagcgagacataagtgaagatgaaagtcataagtcaaagaggggtgacccaacaaaagtggtgtggtatttccctattgccgaccgcattaagagaatgtttgtgaatcctaagcaagctaagttagtatgctacacgcgcgctgaagaacagaaggttgatgctaagctgaggcatccaacaaactcagtgcagtggaggataatcgatatgtttcgccatgtgcactgatggcattaatacatttggtgatttgagcaatcgtcgtagaacatggtctattctttgtgaggattatctcttagttcctattagcgtactggaa

SEQ ID NO: 91049 - DNA, 289 bp, Oryza sativa
  Clone ID: PAT_MRT4530_89662C.1
tgtttttgctggtggtattgccgagatggctggtaggagccttttgaatccgtgagagagctgatgcccttgatgctgctggcaacacaactgctgctatcgtgaagggttatgccattggatcagctgctctggtgtcccttgcactttatggtgccttcgtcagcacagctggagtgaaggttgttgatgacctgtctacacaggtctacatcggcctgatcgttggagccatgctcacgtactggttctatgccatgaccatgaagagcgttgtaagtgccgtcct

SEQ ID NO: 91050 - DNA, 531 bp, Oryza sativa
  Clone ID: PAT_MRT4530_89663C.1
atgtcgtgggcagcggtgactagcgacactgtagagaaaggcgtcgacgtcggcggaggagggatggggatcggacaatggctctggtggcccaaccaactggtcaggggagcaagacgtcacgtcgtgacatctgctttccccttatcctctccgaccatagctaccacctcgcgtcgcgtgatgacacctgaattgatcctccctcgtgatctccacttcccgctcactcaccaccaccgcgggacaagctactccggcaggcatggtgacgtgacccgctgcaactacgtacgcgcactgcaccccacccacccctcctctcatcgcattgggccaggccagccggcgcagggtagcaccgacgtgctcgccggctccgcatcattgctgctgtcatcggccatttgctgcgacagcttgccccgccagagcatgcattgtcacccagatactgacagagcgtccctgcgtccgttcgccccggcaacacccttttggcacaccaacccagagctgtgcgtggtgtga

SEQ ID NO: 91051 - DNA, 432 bp, Oryza sativa
  Clone ID: PAT_MRT4530_89664C.1
atggcccgagaaaaacagatagggaagaatagagggtggtcggagacaacggatagggaatgttggatgtcagtaagatggggaaggatggaagcaaccggagatggggattattgggagctggtggagcagatcaacaggaacacagcgatacgccagcgccaccaggtgtcggagctgcacgtcctcgcagcgaggaccattggccacagctgtcgcgctgccgcaagcctccaccggaccgtgcctcccgaatcgcgccaccacgccaccgcgagcttgccctctcctaatttggccgtagggggagcatttctgcccgatgcccactccggctgccgcctcctgtcagaaacgcgccgctccacctcccacgctgaggagaagctccgccgccaccttcccggccgaccgcttgcttccagcggttag

SEQ ID NO: 91052 - DNA, 2029 bp, Oryza sativa
  Clone ID: PAT_MRT4530_89665C.1
tcctgatccaactcacgaattggggagcacacaacaaaattccgatccaaccctaagcccgatccgccctagcacgatcccctcccccctccccgtctccgatccccctcctccacctcagatctccggcgagccgatcgaatcggcggctgcggcggcggcggcggcgcgatgtcggggcagacgcagcgcctgaacgtggtgccgacggtgacgatgctcggggtcatgaaggcccggctcgtcggcgccacccgcggccacgcgctcctcaagaagaagtcggacgcgctcaccgtgcagttccgcgccatcctcaagaagatcgtcgccgccaaggagtccatgggggaggccatgagggcgtcctccttctccctcgccgaggccaagtacgtcgccggcgacggcgttcgccacgtcttcctccactcctccgctcgccgccatctgccgtcgagagccccggttgcccacccccgcggggacgatggccgatcccgtcccccctccccgggcgggcatcccccgcgtccacctcagatctccgagcgagcccgatcgaatcggcggctgcggcggcggcgcgcggcgtcgatgtcgggcccgccggggcggcgcttcccaatctctccccagcgccgccgccgccgccatcctccccgagccctagctctcccctatccctcgccgcacgcaccaccaccaaccatggccggcgcgcaggagtctctggtgttggccggcgtgatgcacggccacaacgacgtggtgacggccatcgcgacccccatcgacaactcgccgttcatcgtctcctcctcccgcgacaagtcgctgctggtgtgggacctcaccaaccccgtccagaacgtcggcgagggcgccggcgcctccgagtacggcgtgcccttccgccgcctcaccggccactcccacttcgtccaggacgtcgtcctcagctccgacggccagttcgcgctctctggctcctgggacggcgagctccgcctctgggacctctccaccggggtcaccacccgccgcttcgtcggccacgacaaagacgtcctctccgtcgccttctccgtcgacaaccgccagatcgtctccgcctcccgcgaccgcaccatcaagctgtggaacaccctcggcgagtgcaagtacaccatcggcggcgacctcggcggcggcgagggccacaacgggtgggtctcctgcgtccgcttctcccccaacaccttccagccaaccatcgtctctggctcctgggaccgcaccgtcaaggtgtggaacctcacgaactgcaagctgcgctgcaacctcgagggccatggcggctacgtcaacgctgtcgcggtcaaccccgacggttctctgagcgccgtccggtggcaaagatggcgttaccctgctgtgggacttggctgagggcaagaggctgtactcgcttgacgcgggttccatcattcactcgctctgcttctcgcccaaccgctactggctctgcgcggcgacccaggactctatcaagatctgggatcttgagtcaaagcacattgtgcaggaccttaagcccgagatccctgtctccaagaaccagatgctctactgcacaagcttgaactggagcgcagatggaagcaccctctatgctggttacacagatggaaccatcaggatctacaagatctcaggtttcagctacgccggctagagatggggagtgttgttttagttatcgcgttctggtaaacgactgtggtatcaccctagtgttctttttggctgtttgaaaggcattaatctgcctgagtacttctgcttaatttacccatctatgtagtagctccagtactgagctcatggatactgtggaatagggatctgttttgcaccatgttttgttttgacttccttttcaatatattgtctgatgaaccatgcgatccatggtgcttctctctttttaaaaaaaaaaaaaaaaaaaaaaaaaaaaaaaaaaaaaaaaaaaaaaaaaaaaacaaaa

SEQ ID NO: 91053 - DNA, 1515 bp, Oryza sativa
  Clone ID: PAT_MRT4530_89666C.1
ccacgcgtccgctctgcgtcgccgaggagagaaggaatccgatcgagcgtttcccgagcagtagcgacagaaaatggctgtgacgatggacaacgtcatcaggttcatgttcatccttagcgtcgtctacggcgccgcatatgccaaaaagtctgaggccaaggtcgctagtgctcctggcctagcagcggcggtcaacacggtcttcgacatcaccgagctcggcgccgtcgctgacggcaagacagatagcaccaaggcggtccaggatgcatgggacgcggcgtgcgggttggccgggtcacagaaggtggtgatccccaagggagaattcatgaccgggcccctcaacttcagcgggccgtgcaagggctacgtcaccgtccagatcgatggcaccatgtttggctccaacgacatccccaagtacaacaagggcaactggatcgagatcctccacatcgacaacgtcctcgtcaacggctccggcaccctcgacggccagggcgccgccgtctggaaagacgaatgcaagatcttgcccaacacgttggtgctggactacgtgaagaacgggaccgtgtcggggctcaagctggtgaacgccaagttcttccacatcaacgtgtacatgtccaagggtgtgacgatcaagaacgtgaccatcaccgcggtggcgaacagcccgaacacggacggtgtccacatcggcgactcgtcggagatcagcgtgtcggacgcgaccatcgcgacgggggacgactgcatctccgtggggccggggagctcgcggatcagcatccaggggatcacctgtgggcccgggcaggggatcagcgtggggtgcctgggcaggttcaaggacgagaaggacgtgacggacgtgacggtccgcgactgcgtgctccgcaacacctccaacggcgtccggatcaagtcgtatgaggacgtgctgtccccgatcacggcgtccaggctaacgttcgagaacattcggatggacggggtggccaacccggtgatcgtggaccagaagtactgccccgagaaggactgccccgagaagaaggggagcaagacggtgaccatcaagaacgtgacgttccgcaacatcaccggcacctccaacacgccggaggccgtcagcctactctgctctgaccagctgccctgcagcggcatggagctgctcgacgtcaacctgaagtacgacggcaaggacaacaagaccatggccgtctgcaccaacgccaagggcatctccaagggctcgctccaggccctcgcttgcctctgatctcgatccatccatcgtcgaccggcgttatatcatctctctatctatcgtcgtctgatatatgtataattcgcttatatagtatgtactagaaacacaacggggctttgccgagtgtacatgcgccagcccaattgggccaaatagaggtattacctgttacatttatatgaacaggagtgaatggcaaaaaattaaaaatcaaaaaaaaaaaaaaa

SEQ ID NO: 91054 - DNA, 1657 bp, Oryza sativa
  Clone ID: PAT_MRT4530_89667C.1
ctaccacgacggccattgccagttcatggaagcaaacacctcctcggctaggggcgcaagcgatcgcgccgaccggtcgacctcatgcgccgacaaccgagaacgtcgaaaacccccacgcaggaacccgagatccatttgcggacgatgatcttggacgcaagcaaggacgtggcccctagcgcagcgcctcgcacgacgacactcctccttgaggctgatgtcgatgcgctgtcctatgtccttcaactgacgacagacatcagccatggcactacagcagctcttgaggtatgagttcacccagacctcgcgaccacgaagcacctccacggcttggtcttttttcacaaccatgagtgatcgctcaagcttggcgacttcaaactttgtcttccagtagtcgatacgcctatctcgctcagcgacgacactatcgaggtctgagctcgcacgtgggaacccgacttcaccggcctcaagcaggcagcaagtcgcgtccaatcccccatccttgacggcgtcgtccgaggaaggcagtccaaccatctcgacatgaggatgtccgccttgctggacgtcctcgggatctacacagctacggaaggcaaaggaacgcgacaaatcaacacataattcatgaaaggaagctgcttggcgctgcatctcgttgctggccacgatttccttcatcttctgaaggtcctcgtgggcaaccacgagttgcgcctccagctgtgccacccttccgtccgccgccgtcgcgcgagcctccacacggtccatttgggccaccaccacccgagaacccctctcgagaaggcggtggcactcggccaccatgtcagaccaagtggtcatcttaggtggtggcgcggccacaggagcagcggcacatcccacggactccgcgacgatgggagcaacctctacatgaggagcgacagcgacaggggacccactcatcgccgcctcactcccactctcccggcgggcagcttcaatgtcctcctcttcgggggaggagccagactgcccgtgtcccacgtaagacagtaaatcatgaccccatttttgacatcgctttgtcccgctgcccccagcgatggtgggagcggaggagatcttggcgacttcgtcgtcgaccttctcctttagcgaagcggaggcccggtgatcgacaagaggaccgattacatccgtcaacggcagaatattgatggcggtagccttctcggctgccgacttgtcgcaaagcggggccggcaccccttccgccgtggagggcgcgctgatcaggacctcctcgactcgctgcgccaccgtatcgtcaggaagatctcctgcctccctcaccatggtttgcttcggagggatggctccttcgttgtacagcttcttcagcgtggcggcatcggaggaagactgctcgaggtccgccatcggaagaagattgccggtggagggtgttgaagattggggaacgaagagtccgaagaagttgaggaacagagaagtcgcgtgcgagaacatgaattcatttaagttaaagtcgggggctactgtcagggttacggataaggcataccctctatcctacgacttatggaatacaccaataaggtgtatttttgatatttttgaaaagaagatctag

SEQ ID NO: 91055 - DNA, 1145 bp, Oryza sativa
  Clone ID: PAT_MRT4530_89668C.1
tttttttttttttttttatcatctgaaacatgatggtttcttttctttaggcctcagataacaagtacaaaaatgcatactctgccatcatatcccaatttttcagtcgtgcgaatgaaaaacaaacaaaacagcattttaagtcagactcccagatgctccaactacatggaaattacaggatttgggcggcggtgttcaacttctcggctatgctaatctgtgtccttgtgatgcttgacaggtacaccagtgcaagattatcctgaatcctgtcattgaaaagcttgtcaaaagcagctggtgacaattttggcattgaagcaacagcatcagagatgaatctcccaattttattgtccggtgctacacgcccctccacgacatcatcaacatatttgtagatctcgtcaataaggacatacagcttttccatggaggattccattccttccagatcattggggagcttctccacaattgtagatttcaggatgtcaaatccaacttttcctgcttcaagcatcctcagatcaaggggaatctcttggaactgcgcagcaaggtgcctatctccaagagacaggttggatgagatataggctttgattgaagcatcgccccttgtgaacccagtgtcaacagtgagatgaatggggctctgtacttctcttgagtaaaaatcatggataagcgtacttcccccagaaacaccgaagccagtcgagaaccatccaacaatgacttccttggggttgaccttgtggtgcgacgcatacatgttgtggtggtactcgatgtcgagagcaacctggtcgggggactcgttgtgggggacgacgtaggagttgcggacatggacggtgccgtcggggaggacggagccgaggagggtgccgatgacgcgctccgcctggtcggggcggcgcacgtagctgtcgcagatgttgaacacgacgaccgcctccacccgggcggacgtcgacgaggtagaggggaagaggagaacggggccctccgccgcagccatcgccaatgcttctttcttctctcttcttcctcttctgcttcggcggcggcggaaggaaggagacgagcaaagcttctctttccgattagggttttattcgttggttcccggccgg

SEQ ID NO: 91056 - DNA, 1335 bp, Oryza sativa
  Clone ID: PAT_MRT4530_89669C.1
atgacgccctccctccaggcttttgtcgacatcgtgagtggtcttcgcgagcgaggactgactggctatgaaattgttgaggatttcgttagtcgtcggatccaaccgctgcaagctcacgctcaccccgcattcgactacgccggaaccgaggacataactcagatttcttcgcgggatcttcctgacgatacggtggcgcagcgagtcgaggaggtcctgatcagcgcgccctccacggcggaaggggtgccggccccgctttgcgacaagtcggcagccgagaaggctaccgccatcaattctggctcctcccccgaagaggaggacattgaagctgcccgccgggagagtgggagtgaggcggcgatgagtgggtcccctgtcgctgtcgctcctcatgtagaggttgctcccatcgtcgcggagtccgtgggatgtgccgctgctcctgtggccgcgccaccacctaagatgaccacttggtctgacatggtggccgagtgccaccgccttctcgagaggggttctcgggtggtggtggcccaaatggaccgtgtggaggctcgcgcgacggcggcggacggaagggtggcacagctggaggcgcaactcgtggttgcccacgaggaccttcagaagatgaaggaaatcgtggccagcaacgagatgcagcgccaagcagcttcctttcatgaattatgtgttgatttgtcgcgttcctttgccttccgtagctgtgtagatcccgaggacgtccagcaaggcggacatcctcatgtcgagatggttggactgccttcctcggacgacgccgtcaaggatgggggattggacgcgacttgctgcctgcttgaggccggtgaagtcgggttcccacgtgcgagctcagacctcgatagtgtcgtcgctgagcgagataggcgtatcgactactggaagacaaagtttgaagtcgccaagcttgagcgatcactcatggttgtgaaaaaagaccaagccgtggaggtgcttcgtggtcgcgaggtctgggtgaactcatacctcaagagctgctgtagtgccatggctgatgtctgtcgtcagttgaaggacataggacagcgcatcgacatcagcctcaaggaggagtgtcgtcgtgcgaggcgctgcgctaggggccacgtccttgcttgcgtccaagatcatcgtccgcaaatggatctcgggttcctgcgtgggggttttcgacgttctcggttgtcggcgcatgaggtcgaccggtcggcgcgatcgcttgcgcccctagccgaggaggtgtttgcttccatgaactggcaatggccgtcgtggtag

SEQ ID NO: 91057 - DNA, 1266 bp, Oryza sativa
  Clone ID: PAT_MRT4530_8966C.1
atggcgcccccaatcgccgggaacgcccgcgttttctccggccaccaaccattgccgccggccggctttcccgccgccgttccgaccttccccgtggccggctccctcccccattctataaaatgggatccccgcactccgttctaccgttttaaccccatcccgagcctccccgtggtctctagccccatccccgccgtcgccctctctctcccacgccgccggcgacctccagccgcctgtgccgcctcgcccgtgcgccggccggccgcgccgtcgcctcctctagcatcgcagccgcctcctcttcgccggcctaccctccgtttcgcgcgccggctgctgttcatcgccagtgcgccgatcgacgccgccgtctcctccttcgacaccgcggcatcgccttcttccccggcatcacctcctcctcgcccgaatttcgccggaacgccgtcgtctccgcgccggcctctccttcctcctcgtcggctcgtcgccccgctgcaccaccaccttcaccaacatcgcagcggcgtgttccacgccgtcccctcctccgctcagccgctgctgcctgccatcattgtttcatcgtcgtctccgatcgttctcgtcgtcgacgtcccatcggtcgcccggctcgtcgtctcgcggcgccgcctccgtcgtcggcatcgtagcggcgtgttccacgtcgtcctcgtccccgtgcagctgctgctggctgcccctcgtcgccccctcgccggtcccggtcgtcgtcgtcgtcgtcgtcctctcgtcgttcccggtcgtcgtggcgttcgtccctccgtcaagccgttcccgttcgtcgtcctcgcttcgtcaaggtcgctgcagcccccgtcatcgtcttcgtcctcgcctccgcgtcgtcaagcctcgtgccggccgcgtctcgccttcgtccaaggatcgccgccgaagccgtcccctcgccgttcgtctccgttgtgcccgtctgtctccgccgcgcccgttcgtcgttgtcgttcccgcgcctcgtcgcgtggtggtaaggatccgtcctctcgcttccccgccctcgtcctttcggtgtcgccccgtacccgttgtgcggtcgtcgaccccggtacccgtgtaccggtgtcggtagtcgttcacgtgtgcgggtggtgaccgggtagtgtccgtgttagtgtgcccgctcggtagccgcgtggtttccacgggtgcaggccgtgtggtgtcgtggtcctttaggttgacatgtggggtccgcat

SEQ ID NO: 91058 - DNA, 339 bp, Oryza sativa
  Clone ID: PAT_MRT4530_89670C.1
atggtgggagcggaggagatcttggcgacttcgtcgtcgaccttctcctttagcgaagcggagcccggtgatcgacaagaggaccgattacatccgtcaacggcagaatctgcaagagttgaagtcactttggcccttcaaaggaataaaagatataaggtgtcctggttctcgcttacattgatggcggtagccttctcggctgccgacttgtcgcaaagcggggccggcaccccttccgccgtggagggcgcgctgatcaggacctcctcgactcgctgcgccaccgtatcgtcaggaagatctgaaacaaacaaagatggaaggaagcatggttag

SEQ ID NO: 91059 - DNA, 429 bp, Oryza sativa
  Clone ID: PAT_MRT4530_89671C.1
atggcggcggcagaagagaagaagaagaagaagatgatcaaggtgatgagctccgacggggagaccttcgagatgacggaggcggcggcgagcatgacggctgcgccgacggcggcgccggcatccctctccaagatcatcgagtactgcaccaagcacgccgccgtcgaaggccgcagcacggcggcggcggagctgaagaggttcgacgaggagttgatcgacgtggacacggacacgctgtaccacctgctgatggcggggaacttgatgggcgtggagggtgtcctggagctggccgtccagcgaacggcggagctgatcaggggcaagtcgccggaggagatcagggacaccttcaagatcgccaacgacttcacgccggaggaggaggagatcatcaaggagaacgcgtgggccttacagtaa

SEQ ID NO: 91060 - DNA, 1092 bp, Oryza sativa
  unsure (1)..(1092): unsure at all n locations
  Clone ID: PAT_MRT4530_89672C.1
nnnnnnnnnnnnnnttttttttttagtatatcagcatttgttgtttcaattaagttgatgaaatcagatacaagtcatgagtcaattcaccaaggaagcaacatatagagacagagagcagcaaaggaaggaagcccttgagaatggaatggggaagaagttgcactccaatcgaatccaaaaaaagagggataattaagtcgtctaatcattcattcattcattcacttgatgtgcaggtcacactgcaagcactagtagttctagtactagaagatcaccaccaccagaatcaatcgatactgctgctcccactagcatactagcaatgtgatggatccgccatttacaaaaagagaaggaattatccatccatccatccattggaccggtggcctagatgtcgtcgtctagctcgttcttctcttcctctgcaccatcttcatcttcttggtcgtcttcatcagtgcctttcttgggtggctgatctacctcctgctcgcctgcgttgccaccaacattgttctcgtcgctgcgctcgccattgtggtactcggccttgagctctgcagccttgtccaagtaaggcttcttgtcctcgtcagacatggatttccacctctcccctccttccttggcgacagcggagacgctcttgttgtcagggtgctccgccttgtactccttcctgaagtcactcatgaagaggaaaaaggcagtgggtgggcgcttgccctttttggccccctcgccattgttgttgttgttcttgccgctcttcttcttgctcgctgccacctccacggcctgctccaccacctgagcctctaggctgatgcggatcttgtcgtcgaggctgcagttgtgcatgtcgatgaggaccacggagacgctcttgccgcaagcctcgcagcgggtgaaggcgctgccgtcgcgcgcgcgcttcaggacggcggaatccgtcgcctccacgcgcttcctcgtgcgtgcgccggatttccccgccattacagaggagaggaggagggctatggatttggaggagatggaggtttgccccggccggcgcagtaccaatcgcccctataggag

SEQ ID NO: 91061 - DNA, 178 bp, Oryza sativa
  Clone ID: PAT_MRT4530_89673C.1
aagctcagcgccgccccgccgcttgtcccatgatcgcctgcgtgctgccgactgccgatcccaccctttagtttctgcgcatccagtggcatgcatgccaaacctgtgttcatttgcttggatccatgtggtacgttgaacgtgacccctgaagtggtggacctttgggaacccctgt

SEQ ID NO: 91062 - DNA, 725 bp, Oryza sativa
  Clone ID: PAT_MRT4530_89674C.1
gttgttgtgatgatttctggaaggtaggaagaaatagagtgtctgcactgcagaacaacaactcgaagttcattagtcctggactgcttcagcaacaagttgcaagatggacagcaccttcaacagctgatgatttatttgggtcaccagagaacatggtgtcagctacagctattgtgcaagaaggaaagagcaagcctgtctatgtaaggcagagcaatctaaagtaccagaaacacactgctatgccacaacctgcattaacatgtattgtagacatgggcgatgcaaatgatgataccaccgaagaggatggcgtacataatagtaatcaagctgctaaaagaagacttcgtccgcaaactaattcacatgctccaagtgatggttctcaatcagttaagcgcagtagctgtggcaaaaacaaatatactgagcaagatgtaattgaacgagtccaggtgcagagtttgaatggtaccttacaaaatggtactaaaatggttcagcacaagggccgtggcaagaacaaatgtaaggaagttgccaaactcaaggagaaccaaaaaattaaagttgagttttacaacaattgtgctctttcgaatagtttttcacgtcatctgggtagaattgttcgtgatcggaacattactccgatcaaagtgaagaaatggtcagacattagtaacacagagcaggaacacatatttgcctcgattacg

SEQ ID NO: 91063 - DNA, 175 bp, Oryza sativa
  Clone ID: PAT_MRT4530_89675C.1
tcaggaacggaccagtgtgcaggaaaaccatgcgataaagaacatgtaggaataggcgatgcgactagacatagagggatgttagaaggacgacgaacggaggatggatcgagatcacaaggaggtcagggtcaggagcgaggcctcggagatggccatgggggaggacgcatac

SEQ ID NO: 91064 - DNA, 454 bp, Oryza sativa
  Clone ID: PAT_MRT4530_89676C.1
atggggatgcctagtatgcaagtcgcagtgcgccgcctaccgccactaaaccggccgcactgtgcctttgttaaccccgctgcactacgctgcctcctactgctaatctcaccgtcgaggccgctacagttatgtgcgaaggtatatgtggatggggctgagcacaaaagtgttgcctacgtagcatgccacattggtggtcaaacatggtcaaaggacgattggaccgggggtggtacattaaaccaagttcacggacctaaacgtgcaattttcaagttcacggatctaagtgacaccacaccataagtttaaggaccggccatgtatttcactcttacatatattatagtaacttagaacaaaactaaggtaactttggcatatcatttaaagtaaatccgttgtagagataaaaacatggctctatctataaactaaattaatcagcaca

SEQ ID NO: 91065 - DNA, 1018 bp, Oryza sativa
  Clone ID: PAT_MRT4530_89677C.1
ctcttgcccaaacaccatatatattgcataatcatcccaattccctccttccacaatatatacttcggacccagccaatagcaccatgtagaccgtgtgcctacaaagattcttaccaaaagaaacttaaaggccaaaatcccatgagtaccgcatatgaatatctccaacccagattgagcttcaagacagagcaaattttatcttgctttgggcaagacatcctcgaccttgtttggcaaaagtttaaagagagacaaatgaaaatatttcaagattatttctttcatctcttataaggcagagaaagaaacccagccatacaagtaatcatatacatgcttcctatcttaaggttagatgatcatcaggtaatctctgacccatcctatagattcatggttctcaaagccgaaataaatctccaaagattccgaaacttacccacatacaaccatgatgaaatatctctccaaaccattatagatcatggtcttgtcaattctatctatgcaacactagatcggattcttcaatttgatttaggaagcgctgtaaaagatgtctgtagaagacttagaaatggaagatacaggattatcttctcctccataccacctaaattcacaccacatgctcgtccagcaattcactatatatatataatgaataaacaatttaattttcaagaaggcggtcctagcaaattatcagatgaacaagaagaaatgtatacaatgattgcaaatcatgagaattggagattattttctgaagctgcagaaattgaagaagctattaccatagattatgaatatcagttggttttccaaaacaagatcacaaggatttttattagcagatattataaccaaagttgtgaatatttcaagggagcaggacgtataattaaaccagattttactacagaagcctggctcagtggtatcagaaaacagagccatcaaaaattgacatgatgcaattggcacccatgatatacagtgaagataatgaa

SEQ ID NO: 91066 - DNA, 248 bp, Oryza sativa
  Clone ID: PAT_MRT4530_89678C.1
gttcgatttcatcttgctcatttatctcattttggacttccaacaaatgcagccaatgctacagcaggttcatcgatttcctgctctactggttccgtgtatcaatgccaagaaatctccttccacctgatgctgctaacagggagagctgctggtatggtttcatgtgccgaacccagcaccaccggcctgaccatgctaagaagctcaaccatgtctgtcgtccaacaagaggcaacccctagcct

SEQ ID NO: 91067 - DNA, 4911 bp, Oryza sativa
  Clone ID: PAT_MRT4530_8967C.1
atgtctttcatgattagtctcacccttctcaccacagtaaatgatgctataactggtaatagtttgattagctcctggtttggaatgatgccgcgctacaagcctgagtacttgtttggtgttgagggttttgtccaagagttgcgtacgatatcctttgtcattggatttgggactgcccctttttatgcccagattcctcatgatcgtcatgaagagaagtgccgagtcaaagtcaccttgaacagtaatagtgaagatatcccctcagtgatgttcgaagctggaggaagaaactacatccatgcatgtcaggaggtggcaaggatcgccataggagagctccgcgatcgttatagtgatcagttggccgacactgagtatcgctaccatcctcgtcaaccccagggaagtgaccgtggcagttaccttgagactgaaggaattgagaatgatgctaccacaaggcatttggtcgagatgctgtgggctatggatgaaagtcgtgcggagactgtgttagcggctcaagatcgtgaagaccggaatcgtggtaagatttgcaagttagaagacaaggtggatcgtttggagaaggaattagccgcgttgaagggagaagcaccaccgcagaaggccaggattcgtcttaccgcaaggaagagagctctatttgtccctcgctatcaattggcgccaaagtttcccccggtgtctcttcttgtgccctgtccatgccagatggtgaacactcgcagcaatgggaatggccccagtaacaataacaatgaagggaatcccactcttgctcaagttcttgctcaacagactcagttaatgaacatgatgatgcagcaacttcagaaccagcagaaccaaggaaataaccatgcacctccccataacaagttagcagaatttcttcgtgtgaggccgcctattttctctagtaccactaatcctgttgaagctggtgattggttgcatgccatagagaagaagttggatttgcttcagtgcactgatcaggagaaggcctcatttgcatcacatcagttgcatggccctgcctctgaatggtgggatcacttccgtctgaacaggactactgctgaacctatcacttggcttgaattcaccgctgctttccggaagacgcatataccatcgggagtggtgtccctcaagaagaaggaattcaggtcgctcacccagggatctcgctctgttacggagtatttgcacgagttcaatcgtctggctcgttatgctccggaggatgtgcgcaatgatgaagagcgccaggagaagttcttagaaggacttaatgatgagctttcttacccactcatgactggggattattctgatttccagaagttggtggataaggctattcgtcaagaggacaaatacaaccgcatggagcagaagaaacgccggattgctcaattcaagacacaacaggggaataatcagaggccgcgtcttactttaggaccccagtccatgccacatggaggttcttcgtctgttgttcgtccgcagcgtcagttcttcaacaacaatgctggcaacaacatccgcaatcaagctctacgccctgttgcagctccaacacagcaacagcctgccaagagggagcatggcagcaagcccgtggtgtgtttcaactgtggagacccaggacattacgctgacaagtgtccgaagccccgacgcatgaaggttgtccctgtccagagcaactctaccgcaccagcatcaaaggctcgtgtcaatcatgtcgctgcggcagaagctcaagatgctccagatgtgattttgggtacgttccttgttaacttagttcctgcaacagtgcttttcgattctggtgctacacattcattcttatctatgagttttgcgggaaatcatgggatgaaagtagaagatcttagacgtcctttgatggttagtaccccaagtaatcaagcactctctttgcaacgtagcccctctgtcagaatagaaattaaaggagtaccatttctggccaatcttatcctgttagaatccaaagacctagatgtcatcctagggatggactggttagccagacataaaggtgtgatagactgtgctaacagaaaagtaactctcaccagcaatgatggtcgagtggtaactgttcatgcattgtcttctgaatctttaaggtcaagactgaaccagataactttggaagagattcctatagtccgggagtatcccgatgtgttcccagatgatttgcctggtatgccgcctaaaagggatatagagttcagaatagatttggtaccaggaacaactccgatccataagagaccttatagaatggcagccaatgagttggcagaagtcaagaggcaaaaagatcatacccagaggatgtgtgtagactatcgtgcactaaatgatgtgactatcaagaataagtatccactacctagaattgatgatttgtttgatcagcttaaaggtgctactgttttctccaagatagatcttcgatcaggatatcaccagttgagaatcaaagaggaagatatacctaagacagcttttaccactaggtatgggttgttcgaatgtactgttatgtcttttggacttaccaatgcccctgctttcttcatgaacttgatgaatcaggtgtttatggaatacctagacaagttcgtggtggtctttattgatgatattcttatctactctcgaaccaaagaagagcatgaagaacatcttcgccttgcactagagaagctacgagaacatcaactgtatgctaagtttagcaagtgtgaattttggttgtctgaagtgaagttccttggtcacgtcatctcagccggaggagttgccgttgatcctagtaatgtggaatccgtaaccaactggaaacaaccgaagacagtttcagagatccgcagtttcttaggcctcgcaggatattaccggaggtttatagagaatttttccaagattgctaagcccttgacacgactgcttcagaaagatgtgaagtacaagtggtcggaagaatgtgagcagagttttcaagagttgaaaagtagcttaatatcagctcctattttgattttacctgatccaaagaagggtttccaggtgtattgtgatgcatccaaacttgggttaggttgtgtactgatgcaagatgggaaggtggttgcctatgcatctcgtcagttgggtccgcatgagaagaactaccctactcatgatattgagttggccgcagtagttcatgcgttgaaaatttggcgtcattatcttttcggtactcgtacagaggtatataccgatcacaagagtttaaagtatatctttactcagccggatctgaacatgagacaaaggagatggttggaattaattaaggattatgacatgggaattcattatcacccgggaaaggctaatgttgtagcagacgctcttagcaggaaaggctattgcaatgctacggaaggacgacatttgccattggaattatgcaaggaatttgaaagattaaatttgggaattgtcagtataggttttgttgcagccttagaagcgaagcccactctaattgatcaagttagagaagcccaaattaatgatcctgatattcaagatatcaagaagaataggagaagaggaaaagctatcggtttcttggaggatgagcacggaactgtatggttgggtgagagaatctgtgtccccgacaacaaagatttaaaagatgcaattctgaaagaagctcatgatactttatactccattcaccctggtagtactaagatgtaccaggatctcaaggaaagattttggtgggcaagtatgaggcgtgaaatcgcagaatacgtagcagtatgtgatgtttgtcagcgagtcaaggcagaacatcagaaacctgccggtttgctgcagcctttgaagattcctgaatggaagtgggaagaaatcggtatggattttatcactggtttacccagaacgtcatcaggccatgactctatttgggtgatagtcgacagacttaccaaagtggctcatttcattccagtaaagacaacctattccggaagtcgcttagcggaattgtatatggcaaggattacagacggacaaaccgaaagggtgaatcagattttggaagacatgttgagagcttgtgctttagacttcggtggaagttgggataagaatctaccctatgcggaattttcgtacaacaacagttatcaagctagtctacagatggctccttacgaagcactatatggtcagaagtgccgcactccgcttttgtgggatcaaacgggagaacgtcaagttttcgggacggatatcctaagagaagcagaagaaaagtctcgtcataagagttatgccgacaatcgccgcagagatttgagttttgaagaaggagattatgtgtatcttcatgtcacgccttttcgaggagttcatcgttttcataccaaaggaaaattggcaccgcgttttgtgggaccttataagatcgtcagtagaagaggagaggttgcttatcaattggaattacctcaatctttggcaggagtccataatgtgttccatgtttcgcaattgaaaaagtgtttaagggtacctaccgaagaagctaatcttgaacagatagaagtccaagaggatctgacctatgttgagaaaccaatccgtatcttggaaatagatgagagaagaaccaggaatcgggttatccgtttttgcaaagtccaatggagtaatcactcggaagaagagtcaacttgggaacgagaagatgaattgaagtcagctcatccgcatctgttcgccagttcttccgaatctcgaggacgagattctgtttaa

SEQ ID NO: 91068 - DNA, 225 bp, Oryza sativa
  Clone ID: PAT_MRT4530_89680C.1
atggctctaaagctcgatgtcaccacgatggctctcaggcttgagctcgccctcgccatggcgcaccaccgccaccagctgtcggagatatgggaaccggggtctccatctccctcaggtcaccagggcgctgcagaatacgacaagacatacaagacacatatattcaagccaccaaggttaaaacacccaaagaggaccgctaagtctccaggcgtgccctga

SEQ ID NO: 91069 - DNA, 412 bp, Oryza sativa
  Clone ID: PAT_MRT4530_89681C.1
agcagtcatacaatccctggtgacctaatttgtatggagacggtgagtctgaggctgtgattggttcccacagcttagctcgaccggtgtgagccacagttcgcagtgagcccgagcaacaatcagcaggcaggccgcagacccagtcactgatctccctccagcgcacccatgccacgccgccgacattgcatgccgccgccagtaaccccatggttgtacataggctatattttcccttgattaaccaactagttcacatatccctgcactttttaaacttccattgtattccctcatgcgtcccaaccaaagctttatcccctggggccttggaattttaggttttcctgggaaatttttgctttccaagattccccttaaaacaatgttccatatttttttccttttc

SEQ ID NO: 91070 - DNA, 494 bp, Oryza sativa
  unsure (1)..(494): unsure at all n locations
  Clone ID: PAT_MRT4530_89682C.1
nnntttgttttttttttttttttttgacaggaaaggactgaaaatgcgatactcctataaggatgaccaaagtacactgcctagtcttcatctggcaaattggtacacactgcacactataaacctgcagttctactctaactgaagacctatttacagagttacactactactacggtactaccacaaaaaaaaaagaagggggagggggatctgtacacagccaaaccagctgaccaaggccgtatgccccgtatccacattcacatattacaacgacaatttataggcttgccatcaagttgatttcagccggtccaatctgaacttcgccatcatggcatggatatcgtcaaggaagggcttaagcaactttgcgagctttcgaatctcctccttcagagcagcacaatcttggcatttgccaacgagcaggttgatgaacatcttcctgtcaggaatgagtttcattgcgatcttgtaggctgctgaag

SEQ ID NO: 91071 - DNA, 316 bp, Oryza sativa
  Clone ID: PAT_MRT4530_89683C.1
tgaattaaccaaaaggataaaatggctcaattatcgattgaatattcgactgaaaactgtacaatggtggacatagaagaattttttgtccggaaaaatcacctaacgtgccttctctgaagatgaatttgtgaacgatgatgtcaccagtgcatacatacactgcacgaggtagcaagcaaataacaataggaaagtgtattatgaaaacccatttctttctgacatacttaaaggggctggggtcaatggagtagacgaagatagtgataactttattacaaaaatagtgaataattaccttttcaataaactg

SEQ ID NO: 91072 - DNA, 162 bp, Oryza sativa
  Clone ID: PAT_MRT4530_89684C.1
atggcgccggcctcgcgtgcagacatgaccgtcgcagcgaggcctcccttctactcgacgacggtggggatggtgagcggcgggcagatctgcaacagcgaaggcggatctgacgcagtggcatggacatcagcgcatcgaggtggagtccctggctgttga

SEQ ID NO: 91073 - DNA, 1954 bp, Oryza sativa
  Clone ID: PAT_MRT4530_89685C.1
agtggatccccgggctgcaggcaaacactcgaacaagagtctctcagccacggagtcgatggggtctcgtcctcgcgtcgccttcctccaccaccaccaccaccaccaccacctcctcgccgtcgccgtcgtcctcctcctcctcgcgcgcggcgccgagccgatcgccgccggcggtggcgccgccggccggcacctgacgacggaggagcggtggatggaccagcgcctcgaccacttctcccccaccgaccaccgccagttcaagcagcggtactacgagttcgccgactaccacgccggcggcggcggcggcggcggcccggtgttcctgcgcatctgcggcgagtcctcctgcaacggcatccccaacgactacctggccgtccttgccaagaagttcggcgccgccgtggtgacgccggagcaccggtactacggcaagagctccccgttcgagagcctcaccacggagaacctgaggttcctgtcgtccaagcaggcactgttcgacctggtcgccttccgccagcattaccaggaaatcttgaatgctaggtacaatcgatcatcggggtttgacaatccttggttcgtcttcggggtatcgtactcgggtgctcttagtgcatggttcaggctcaagttccctcacttgacatgtggaagccttgcgagctcaggggtggtgcttgctgtgtacaatttcactgactttgacaagcaggtaggggattcagctggccctgaatgcaaagctgcccttcaggaggtaactagacttgtcgatgaacagcttcggttggacagccgctctgtgaaggttttatttggagcagagaagttgaaaaatgatggtgatttcctgttcttcctggcagatgcggcggccataggattccaatatgggagtcctgatgctgtatgctcccctctaatcaatgcgaagaagaccgggagaagtttggtggaaacatatgctcagtatgtgcaagattttttcattagaagatgggggacaactgtatcttcatatgatcaggaatacttgaagaatacgactcctgatgatactagttctagactttggtggttccaagtttgcagtgaggttgcctattttcaagtggcacccaaaaacgatagcattcgctctacagagatcaatacagggtaccatttggacctatgcagaaatgtctttggtgaaggtgtttatcctgatgtgttcatgacaaacttgtattacggaggcacaagaattgctggtgacccttcaaattgctcatccccggcagccgtgagcacagtgaggaagcagatcgccagccacatcagcttgtggctatcacaatgccaagaaccaacaagctcccgtagaacatctgatgatagtgctcatggagatttgaccccttgctccatcctgaacgcagggcatggtgatgatgactcgggagtcggggctacaataaacacagttacacagaccaatctacggtatccattgatctactctagtacaattaaggtggtgtttgaatgtcctgaagatgaagctgaatcaataattgttattgatgagaaaggatcaacaagtgcagcaacactgtcaaaagctgtcgcccgagcgaacacgaaccaagctggccctgcagcagcctggttgaacaatcacatgcggtggggttttgcaattgtactgcgacgctgtgacactgatgatcgatcgagagatgagtatggcgtggctcagttaaagctggagacatttcagactcattgcgccgctgtggcagggaccgcagaaggcaacctcctgtgttctgtcgtgctgcggatggagctggactcctgtctctccagtgcggctggacctggagctggacggctcctcgtctcatcgctgtcccatggcgcgtcggcgccttttaccgggggcgtgacgccgtga

SEQ ID NO: 91074 - DNA, 1062 bp, Oryza sativa
  Clone ID: PAT_MRT4530_89686C.1
ccggccggggccgccgccgcctccctacctccatctccatctccatgaccgcctgcgcctcctcctactcaagtccggtccggcaacaacctccttcactcataaagcccggaaactactgagacctcctctttcacatctcaaacagagttcatgggtagtacagctgcagcgggtggtaacctgcgaaccgccctctcgtactgtgtgcagcaagttcgcaactatgattatcaccactatctctgccttctccacctacctccagctatgcgcaaggctgcattcgccttccgagccttcaacattgagacggcaaaggccatggatgttgtctcggaccctaagactggccttatgcgcctcctctggtggaaagatgtagtcgacaaggtctttgcaaacaagctggttgagcaccctgttgcccaggtgctctcttctgttgtgtccgagcacaagattagcaagcattggctcaagaggtctgtggaggcaaggataaacgatgcaaaccgggatgattatgccattcctgagacaatttctgaattggagaggtatgcagaggacacccaatctaccatcctttacatgacgttgcaagctggtgggatacagtcaactatcgctgatcatgccgcctcacacataggcaaagctagtgggctgctactgctactcaaggctttgcctcaccatgtgagtaagcaagggaggataccgtatatcccagcaagtatagctgaggagtgcggtctgcttacacgggaaggtggccgatcagaggtcaggatgggagatgagctcccagatgcagttttcaaggttgcatctgttgctgatgctcacctgcagaaggcgcgggagctggcctcttctgtgccagcggaagcaatccctgtactcctcccaggggtaccagcccaggtccttctggactccttacgacgccgtgaattcaacgtctttgattcacggttgtcaaggggagttcatgggatatctcctttgtggtaccagataaagctcatctggcactcggtgcggaagaagtactga

SEQ ID NO: 91075 - DNA, 279 bp, Oryza sativa
  Clone ID: PAT_MRT4530_89687C.1
atggagccttcaggcaagctctcctcttccgccgtcgtcctcgtcctcctcctcgtcgtcgccaccgagatgacggggatggtggtggtggtgcaggcgaggttgtgcgagaagccgagcagccatttcaaggggttgtgcttgcggtcgcagaactgcgacaacgagtgcatgctggagggctacatggacggcaagtgcaagtacttgactcgacgctgcatctgctccatggagtgcgccaccatgagcaacgttggcctgacgccgacgaagtga

SEQ ID NO: 91076 - DNA, 666 bp, Oryza sativa
  Clone ID: PAT_MRT4530_89688C.1
atggcggggttccctctaggcggaggaagccacagccgagacaacccggcgccgcccgtcccgccggtgcaccccgccgacgccgcctcgttcctgtacgccacgaggggcgggagcttccagctatggcagcagcaggagcagcagccgttctacgcctccaacatcatccgcttcgccgatgacgcgcccccggcgccgtcgttggcgggggcgtcgtcctcgtcctcgtcgcgcgggatgcggtcgagcggcggcgggggcggagatcagcagatggtgacggtggcggagaggttcccgcgggaggtgagctcggaggcggtgttccggtgcgtgcggctggggccggtcgaccaggccgaggcggaggtcgcgtaccagacggccgtcagcatcggcggccacgtgttcaagggcatcctgcacgacgtcggccccgaagccctggcggtcgccggcggcggcggcgccagcgagtaccacttccgcctcaccggcgacgggtcctcgccgagcaccgccgcggccggcgaggcaggctccggcggcggcggcaacatcatcgtgtcatcggctgtggtgatggacccgtacccgacgcccgggccctacggcgcgttccccgccggcacgccattcttccacggccacccgcggccgtga

SEQ ID NO: 91077 - DNA, 1053 bp, Oryza sativa
  Clone ID: PAT_MRT4530_89689C.1
atggcggggttccctctaggcggaggaagccacagccgagacaacccggcgccgcccgtcccgccggtgcaccccgccgacgccgcctcgttcctgtacgccacgaggggcgggagcttccagctatggcagcagcaggagcagcagccgttctacgcctccaacatcatccgcttcgccgatgacgcgcccccggcgccgtcgttggcgggggcgtcgtcctcgtcctcgtcgcgcgggatgcggtcgagcggcggcgggggcggtggcggcggcggcggcatcagctgccaggactgcggcaaccaggccaagaaggactgcacccacatgcgctgccgcacctgctgcaagagccggggcttcgcctgcgccacccacgtcaagtccacctgggtccccgccgccaagcgccgcgagcgccagcagcagctcgccgcgctcgccgcctccgccgccgccaccgccggcggcgccggcccatctcgcgaccccaccaaacgcccccgcgcgcgtccctccgccaccaccccgacgacctcctcaggagatcagcagatggtgacggtggcggagaggttcccgcgggaggtgagctcggaggcggtgttccggtgcgtgcggctggggccggtcgaccaggccgaggcggaggtcgcgtaccagacggccgtcagcatcggcggccacgtgttcaagggcatcctgcacgacgtcggccccgaagccctggcggtcgccggcggcggcggcgccagcgagtaccacttccgcctcaccggcgacgggtcctcgccgagcaccgccgcggccggcgaggcaggctccggcggcggcggcaacatcatcgtgtcatcggctgtggtgatggacccgtacccgacgcccgggccctacggcgcgttccccgccggcacgccattcttccacggccacccgcggccgtgaccggcgcccactccggtcgccggccggccgtccggccaacgtcgccgccatgctgtaacgccactacaatctctcactcgctgcaactgtcaattgctttggtcg

SEQ ID NO: 91078 - DNA, 644 bp, Oryza sativa
  Clone ID: PAT_MRT4530_8968C.1
cggacgcgtgggggatgatgcaaaatcggctttagtcacttatatttacagggaaatgatgggagcaaacgacgcgatccagccacagttagcattggacaaacaccacaagattccagatgagcttagtggggaggcaaacatggcagcacaagatggcaatcacactgctactgcagccgcagcttctggttttgctggaagcaacggtgaggatgccatcttgcacaaggagggcgatccagtagagaataataggctggggctggccagcattttcttcaatgacatggcctggaccaggaaagccctgcagcagttgctccgaagccttggtttccaaatcggcacgagaaaaacatgaagtaagcatcagagacgctgacctgcagttttggctgatcacacggtctcgcggtgccttcattcaaaactcgaaagcttctacatgctgcaaacctacaaggaacaagtgtattgagaactgcaacaaaaaaccctttacgttgctaaggtctgcaacaccagcagtacttgttagcagtgcaaaaagagcaggaaagctgttagcagtgcaagtatgtttaggaccagtaatgactaagctaccaaaaaactcaattagtgaaatgcatattgtggtt

SEQ ID NO: 91079 - DNA, 1199 bp, Oryza sativa
  unsure (1)..(1199): unsure at all n locations
  Clone ID: PAT_MRT4530_89690C.1
agctctcgtggagcgtataaaaggagggctggtgatcgatcagctcaagtgctcaaaccctctcaagtttcatcatcacccaacacaatcgcaagcagctagcaacagggccaacccgacgaacgtgagatggcggcagccgtagaggaggccttcccgatcgggttcacgaaggggatacggtcctactggcgaagccgcaagtaccatagcgtggacagcagcgcggcgggccgcggcacgagcaacctggtgcggctcgggggcggaagcggcagcggcagcgacggcggggcgtgggccgtgcggctgggaggcatgttccgcacgcgcgtcaaggcggcggcgcccgcggcgacgacgaccgccgtggcgaaggtacccgcgcgcgtgctggggcgggtacgggacgcgtacgtggacgccatggtcggcgtggccaagaagcaggcggccgcggcgctgtcgcagccgggagccgggacgacggaggcgctgtggcagaagcgcgtgccggtacgacggtcgcgcgggcagagcaagaagcagctgcggcagaaggcggacgagctcgggcagagactggtcatggagatgtacaagtccgtcctcgcgtcgagggacctctccagcatgctccaggcatcaagggcgcaatagcatgcaacactacatcgtgcaaaagtgatgcatccgcgcaagcttaacgtgaactaacggctgtatataaggagatgtacatatgtttgttgcacaatatgcatggccagacccccacgcgtccgcttattagacgctcataacccttggattccctttcatccctagaaaagaaaatccgtgttcccttctgttgctttttaagttgcttctgcttcatctatatatgtccaggatcccttcttgtctgtatatccaattttaagcatggttggcgctgccgtgccacctacataacgtgagttgaattgatctttctttctagaggtgaatttgctctgaaattttggtttgctcttcaatcatcatagtggccaataaatccaagttgctattatcccccccccccccaccaaaaataataatccaagttgctaattggaagcccacgtcaacatttaggctgagttcgttttcttcctttcacagcccacatgacccccggtgacctgtctaaaaaaaaaaaaaannaaaannnn

SEQ ID NO: 91080 - DNA, 1601 bp, Oryza sativa
  Clone ID: PAT_MRT4530_89691C.1
atgtcggcaacgcgcgagatccctcatgttcgtggacaaacgcaatttgtcgctacacagcgagtacctgcgtggttccccttccccaccgcgcttgctgccgctcggcaccggcatgctcccacagatttgacgctgatgatggagagggcagatccggtgggcgccttgccgctaccaccgccactttcctaccgttttcctcttcctctgacttgtcttgaaggcgtcgatgtcagtgctgccgccttcgccgcttcccccgctgctttccttgtctaccctggagaggacgaagagagggaaggattaaaaccaccttctacaggattgatgggggttatttgtccggagcgaggggaggaggcaaaggcaataaatggaagcttaggtgagcgcaggctccatggcggcgtggcagggcctctctgtcgcctcaccgtcttaactcgcggcagcgcagcgagctgagctgagctgatccggccgccgcggattaactcctcctggccgcgcgtgctagctactagctagtggtctacacgatcgagagagaggtttcggtttcttgatcggttcttgatctgctgctgctgcttcgtggtcgtcgtcgtcttcttcttcttcttcttcttcttcttccctagccgggggtacgtacggccgcctatggatttgggcgcatggcggggttccctctaggcggaggaagccacagccgagacaacccggcgccgcccgtcccgccggtgcaccccgccgacgccgcctcgttcctgtacgccacgaggggcgggagcttccagctatggcagcagcaggagcagcagccgttctacgcctccaacatcatccgcttcgccgatgacgcgcccccggcgccgtcgttggcgggggcgtcgtcctcgtcctcgtcgcgcgggatgcggtcgagcggccccggtggctccggcggcggcggcaccatcagctgccaggactgcggcaaccaggcgaagaaggattgcacccacctccgctgccgcacctgctgcaagagccgcggcttcgactgcgccacccacgtcaagtccacctgggtccctgccgccaagcgccgcgagcgtcagaacctcctcgcctccgccgccgagtcctccaagcgcccccgcgactccgccgccgccgccacctccaccacgcccaccacctcctcaggggagcagcagcagatgatggtgggcgagaggttcccgcgggaggtgagctcggaggcggtgttccgctgcgtgcggctggggccggtcgaagaggccgacgccgaggtggcgtaccagaccaccgtcagcatcggcggccacgtcttcaagggcatcctccacgacgtcggcccggaacactcgtccggcggtggcggcggcatgggcggccgccacgcagccgcgggcgaggcgggctcctccccgagcacggccgcggcgccgcacggtggcggcgaaggcggcagcagcggcgtcgcggcggcggcggcggccgtgtcgtcatcggctgtggtgatggacccgtacccgacgcccggcccgttcggcggcgcgcacttcttccacggccacccgaggtga

SEQ ID NO: 91081 - DNA, 1239 bp, Oryza sativa
  Clone ID: PAT_MRT4530_89692C.1
atcatcagagccggccgggatccgacgctataatggtcaaacgtgactcctcctcatcttcttcctcctcctaccttttcttcttcctttcaattcctcctgctcttcctagtctcttcctgctgctactgctgctgctctcgtattgggggtcacttgttcttcttcttttactgaccttgttgaattgaacgcaacaattttcttggtcggaatccaggagggagaggattagagcaaggagcagcgtcctgaggcgtgaaggacccacctttgctgctgttcttggagcttccctgccgaaatggcccataaaggagttcctaaatttggaagctgggaggatgaagaccgtggtgaacacctctacacacagtatttcgaaaatgcccgcaagggtaaatctccagggaggtctgttaatccaaacaatcatcatggagatactgaagcactctctaaggcctctcccctgcacgctggatctgatccagccatgagaaagcccaaggatgacagacgctcaaaccgagaaggtgatcttcgtcagcacgaaaccactgttcgaaaaccatatgctgagtcacctaatcatagatatggggatcataccaactatgacaatgctgtgagaaaaaccggcatagagaagtcacccgttcatccccgtcaccaggcaagagctgcaaacaagggtggagtttcgtctccttcacgtgaccgtaggggttcattggaaggaaaccgtggatctgctcccactacacctggaaggtccaagttcagatcaactggccgtggtgatgagacgcctgatagaggatcagccgtgccaaagtttggagaatgggatgagaaagatccttctacaggtgaaggtttcactgacatatttgagaaggtgagggaggagaaacagtctggtaccggcaacgctcccgtcatgaccagcgaggcagattatatcaaacgctatcaacaacgcaaatatgaatccacaggctgctcatgcttcagttggttcaagaactgaactgacagccatccagccaagtcctgtcagcgaggcctacataaatttgtgttgaaatgtatcattgtgagatgaatacctccaatctgttgtcattgttgagatattgtttggtagcgagacatgacatgtatttacacgaatttgaagcttcttgttgagcattttgtgcttttttttgtataatgagggattcgtttatcttg

SEQ ID NO: 91082 - DNA, 363 bp, Oryza sativa
  unsure (1)..(363): unsure at all n locations
  Clone ID: PAT_MRT4530_89693C.1
gcggntccgccgaccggacgatctccgtgtggcggcgcgaggagggcgccgaccacgcccgcctcgccgtgctcgccggccacacgggccccgtcaagtgcgtcgccatggacgaggaggacgacaccgccggcgacaagcggtgggtggtctacagcggcagcctggacggctccgtcaaggtgtggcgcgtctcgagcacccccgacgcggcggcggcgcggacgccggcgcacgggtggaaggcgacgccgtcgccgctgggcgcgtggacgccgtacgccgcgacgccggcgcggaagcgcatggccgcggcgtgagcggagaatgcncggagcacacacntggcccaatgagagagca

SEQ ID NO: 91083 - DNA, 1257 bp, Oryza sativa
  Clone ID: PAT_MRT4530_89694C.1
cccctcttttccctccaccgcggcgcggttttttcccctctcccgcgcatccgccccgcgccatggccgcctccagctcctccgcccccgccctcgccgacgcctacgacatcccgtgggtggagaagtaccgccccacccgcgtcgccgacgtcgtcggcaactccgacgccgtcgcccgcctccaggtcatcgcccgcgacggcaacatgccaaacctaatcctctccgggcctccgggcaccgggaagactacgagcatcctgtcgctggcacacgagctgctcggacctagctaccgcgaggccgtgctcgagctcaatgcctcggacgacaggggcctggatgtggtgcggaacaagatcaagatgtttgcgcagaagaaggtcacgctgcagccggggaggcacaagatcgtcatcttggatgaggctgacagcatgacatcgggagcacagcaagcactgagacgaacaatggagatttattctaacaccacaaggtttgcgcttgcatgcaacacttcatctaagatcattgaacccattcaaagccgttgtgctattgtacggttctcaaggctttcagatcaggagattcttggccgactcatgattgtggtagcagctgagaaggttccttacgtgccagagggacttgaagctatcatctttactgctgatggtgacatgaggcaagctttgaacaacttgcaagctacagttagtgggttccgttttgttaatcaagaaaatgtgttcaaggtgtgtgatcaaccacatccgttgcatgtcaagaatatggtgaaaaatgtgcttgatggaaagtttgatgaggcttgctctgctctgaagcaattatatgatttgggctactctcccactgacataatcactactctcttccgggttatcaagaactacgacatggctgaatatctgaagctggaattgttgaaggaaaccggatttgctcacatgagaatctgcgatggtgttggctcatttcttcaattatcaggccttctggcaaagtttgcgttggtgagagaaacagcaaaagcatcatgaacttgttgcagatggtaatagctgtacgtgcaactgtcctggcacggtaacctaatgatcttagttaacaatattctggcttgctgagtacaatcatgtcatcttttcaatgtgtaagatagtgtctcgcttaaagtagaacatctatgttatgtgcaatggaagatagcgcctcgcttgagtaaaa

SEQ ID NO: 91084 - DNA, 463 bp, Oryza sativa
  Clone ID: PAT_MRT4530_89695C.1
ctgtatattttaatcattgggtaataaccacaataactaagtgggaatcacttatatagatttataaaataagtgtaagcagattcctataaaaggtttgattaaagaaatgcatgctagtaatttattgtgctgcctttgctaggcacaatgtttgttttggaaggataggcacaatattagtggggaattttttttagaagtactatactattattaaaatatctcagattatggggacatgccaaaaaaacatatgcaagagtaatatctgaggtatgaaacattcaacaagtagtgaagaccaaaactattcctgatttttatctttcctatttttaatatcatatctcacaaacaaagttgactttactctttaattttatatttctatggttgtctaatatgaccttagttatatgtgggattcatttttagaactatcatggttcccacatataga

SEQ ID NO: 91085 - DNA, 735 bp, Oryza sativa
  Clone ID: PAT_MRT4530_89696C.1
atgggcgagcggtggctggagcgggctatgggcggggcggatcgggcagggragggaggaggcggggcggccgcaacggccggcgccacccacagcgtcacgtcaggtcctttccacagcgcgtgcacctccagcgcccaggcccgcgccgcggcggagcacaggcgagaggcaaggcggctgaggacaacgacaacaaccggcggcgtcgtcgtcgtcctcagtggcggcggggactggggggacgacgacaacggcagcggcgacgaccgtgaggcggtgccacagcgcgaggagaagcacccgaggacggccacaaccttcatgttgtcgggccgcccgccgcgggcacgcgagaatggggaggaagacaataagctgaagaatgagtttgctatgagggaaattgcctctactgcaatctccacagcagccaagcgcacggtcatctctacggaakaggggaagagagaatatggtcccaaggcagcaacacctaatgatgcttgtggattcctggaaagtggaatggagtacaatttgcctcatagccccttctcatctcccaccaaggcttccaatgttgcagcaacagctcacactagtaacatcagcagcagtagtagccctcataaggtggcctcatctctattccccccaacatgcacccttgagctgccccctacaactcatgcttccttcaagcgccaagattctccccttgctgaggagtag

SEQ ID NO: 91086 - DNA, 591 bp, Oryza sativa
  Clone ID: PAT_MRT4530_89697C.1
atggcccacgcggcggtgatgctaacggcggcggtggcttggcgcggcggaggccctagcggcgacggcgcgtggccggagatggcggcggcggcgcgggagctcgggtgcacggccccgagggcggtagaaagcgtgggagaggacagcgaaatgggggaaacgagagagggagctcgggtgagggtttttatgggcgcgggaggggcggacgtggccaaaaccgccggcgacgtggggtggagagagatagagagaggggtgggattcgaaatcgaatcccgccctctcgagcgcgcgcgctgggcgggagcgacggggcgagggtggcgttgtggggaggacgcgggaacggcgcggcgtgggagcgggaggagcggaggaggtggggcagcagcggcggttgctggcgacggcacacggctggaggttgtggacgacccgataggtggggcccacatgttggcgtcccgaagggaggaggagggggcgcgggccggcccaagaaggagatgggcgcgggcgggcggcagggtggactgggccgacggcccaagaaggggaaaaaggaggaaaaagaaaaagaaatag

SEQ ID NO: 91087 - DNA, 273 bp, Oryza sativa
  Clone ID: PAT_MRT4530_89698C.1
gtcaaatgacaagatttttaaataaatgaaaaatgcaagggtgctacataattacaaagagcctctttaacggaaataaagcatgcacacttgtagacacagatttctgcaccatgcagtatcttcttgtgcatctcattaccactccattggatgatgaagcctttatgcaggtacaacagggcgagcttactcaagtagctaagggactcaatgccttgagggaccattgccagctatggcagcaacacaatgtacaaacatgtaatgcat

SEQ ID NO: 91088 - DNA, 378 bp, Oryza sativa
  Clone ID: PAT_MRT4530_89699C.1
atggcgcgctcggcgcagttcgtggccgccgccgctctccctgcgctgctcccgacgccgtgcggtcgtacgtcgtcgagccgcgcgtcctccgacgagcgctgggacatccagaagaagccgtggctgcaggcggacgcgctccacggcgaggaggaccgcaacgccgccatgaccatgaggctgacgacgaacaaggagatcagcaagccacggcacgcggtgttcgccggaccgtccttcgtcgcgccggagccgtgcatgcttcctctcccaaaggcctgggtcccccgcgggggtgccgaaaaaaggattacgtaccctgatcctcctaacggcctgggaagtcttgaaggaacaaaaccagagagtctttag

SEQ ID NO: 91089 - DNA, 1536 bp, Oryza sativa
  Clone ID: PAT_MRT4530_8969C.1
atgactggtttcaacttgttggaaaacttcaaagaaaatccagaagctttcttccagagcgtcaagccacgagtcgttgctccgcaaaaaactctaccgacaaagaaatcagccataccagcgccaccgactttcaagactatggctgacaagacccttcgcgagttcgctgctctctctgctgacaatgtgaccattagggcgcagatcaacatgggagacgatctcatttttgcgcaagctaaaaccactgatgctttaaggaaaaagctagctgccaacgacaaggtcctagagaatattaatgttaagctagatggctttgcttctgcgctccaaaaccagctgtgcttcaataaaatgatagaaacccaattagctcagttggcttcattagtccctgcaaatgaatctgggaggattctggggcaacctgattcctccattgaaaatgtcaaggcgatcacaatgaggggaggcactaactggatcgccagagaagcgccatctagtgactcggctgacaaagaggttcagctagagaaggatattctcaacaacaaaagactgctcccaacaatggaggtggtcaagctgacggagcaatgcaacaatgttatactccacaagctcccggaaaagaagaaggatccggggtgtcctatgatcacttgctcgatcggggcacagcaattcgacaaagctttatgcgacctaggagccagtgtcagcgtcatgccaaaagacgtttttgacaaactcaacttcacggtgttggcaccaacaccgatgcgcctacaattggctgactcgtcagtccgttacccggcagggatagcggaggatgtgccagtcaagatacgggatttcttcatcccggttgacttcgtggtactggatatggacacagggaaggaaacgccactcatgttggggcgtccgttccttagcaccgcaggggccaacattgatgtggggacgggaagtatctgtttccatatcaacgagaaggaggaaaagtttgagtttcagccgaggactgaacaatactccatggtcagaataaagtacgggccaaacccgcagaatattcaagtggtcgaagtggagccacccaagacggatagcctggtaaaattcatgcaaaattttttggacaaggaaacaacgatgcccaggaaccgctattggaagacgccggtaaaatcaagtacaccggccaaaaagctagagcaaccggctcagaggaagccatcttccgcaccgaaaccaaagaagggatccggctcttcatcaagccatcatgacgagtctagcgctcgttcatcagttgatatctcaatggaggacactgaagctccgcgacatctcctgaacgacactgaccttgaccttgtagatgatcgagaaagacaagccaactacatgctgagtgaccaggagtatgctcacacgcgagaatactctctggagctgctgaaaaagataggtatggatgttgatattcgtgctatttggaaaactgttggttggtag

SEQ ID NO: 91090 - DNA, 1697 bp, Oryza sativa
  Clone ID: PAT_MRT4530_896C.1
cggacgcgtgggctcatctctctctctctttcactgtttcttcctcctctgcacttggcgcagacaaagtcgattcctttcccgctcagcggcgccgcttgttttcgatcgagcctcgcgagaagcagcccgccgcctggggtttcgtgccgattttgatttcctttttcttggccgcctctgcctctctctctctctctctctctccctttcttggttcgattgttcctggttcttggcctgattggttgaacctgcttcttctggaatcaattaggggagaaatatttgcaggtgcggggcggtggcgatgtctcttgatctctggccgcgggggtacagctgctgccattgccggaaccacgtcttcctttattttttcatcatctccaaggccttttaggtgagaaacgtcggctccttgattcttttgtcttggtgaatcggttgcaggagaggggcggtaggacaggcggagttggttgggccgcgggtgtacagctgctgccattgccggaaccacgtctgcctccacgacgacatcatctccaaggcctttcaagtgaagaagaacttgagttcttggggatttgtggggctgattggctcaagtgacaaatactaatcttaggtcatgtactgacaatctagattgaattggatttaatcactaggcttctgatgtgcgtagtgccggattgatttggtatattatgctaaagaaggtaaaaacatggcatagccgcttactgtaggagccatgagtgcccttaatttactgtaggagccattgattatagtatcatggttcagtaatctaaagattggcaaatgctgcattcttaggatcttgtaggtttatgtttccaacaaaaactcgtttgttttatttatgatacatcgatccgaggaaataatgaatgtgcagaaattgctatagtggagtttcaattattacagtatttgtacaagaagttaactagaaggcagattgttagtttgttaccaaagtttggaacacccaatatttggcacaagcattgctgttagcctgttagcaatcaattgttcgtcatttagacaaagaccatatttctgaagtatctcttggattatggctgtatttgactgtttagaggatgaaattatctcttttgctcttttggctattctaggggaggaacggccgtgcgtttcttttctctcatgctatgaacatatctatgggtccaaaggaggacaggcagcttatgacagggcttcacacagttgctgatatctactgccgtgattgccgtgaggtattgggttggaagtatgaaagagcatttgaagaatcccagaagtacaaggaaggaaaattcatatttgagaaggcaaagattgttaaagaaaattggtaatgactggaaagggttggcgtgccaaactttcctgtgaagctaaaattcatacctttgtacatagctgtcgtctgtaaattcgaatgtttagcctgcatgatgttgctcatgccatttgtaatgtgcacttgttttgctgttcatttctgtgaagaagacaggcctctgtttatttctttgtcaaccattttctcattgttcataaatggatagcttgtacataattattttcctgtctaaatgttgaatgtttgtcatcaaagtaattccttgtgagttacaatgacatctatt

SEQ ID NO: 91091 - DNA, 255 bp, Oryza sativa
  Clone ID: PAT_MRT4530_89700C.1
atggggactagagttcatggaacaggtaaagcatacatctactgcagaatgaatatccttgaatctattcgaatagccgtgctcacggatctgagcattgggactcatatggagcaacttctatttgtcagaggtgcagtattagaccaaaatcgatcggtatcatgcctgataccaaaggagtatcagcctggtgtcaacagggtatcagctggtgtcgatgggtatcagttagtatcgatgggtattagctag

SEQ ID NO: 91092 - DNA, 1943 bp, Oryza sativa
  Clone ID: PAT_MRT4530_89701C.1
ggccgcccctttttttttttttttttacatttcaaaggatacaggctctttattttcccgaatagaatagaatatatcgtcatggctacatattattgttttacaaagtctcaggccagggaaacacacatcataagcaatggaaacagttgcccaaagcaactttatacaacaagcgcatcatagatactataagttctggagacatcaccgaatgcacaacaacttaacaatctcccagcagtgtgctataaaaattaggatgtgtacaataacaatgctcaggtttctacatctggttacgttattatcaatcaagatgaacggtgcactggttccgccttaaatcgatcccctttttgtcctgcgatggctcttgctgtgcgaactgcggaagttgaaccctttttgaaccatctgctagccgcttgcatggaagatgtggttcagctgcagcgaactcattcagaacatcaacttggatggcactaattcctaagatgatgacaattgacataaggtagacaaacaccatgaaagaaggattgtaattgtccaaaattccatatttatcctccattttaaacggggcctggtttctgattgctccaatcaacatatcatgacaaccagatgcatgcacattctttaattttggacaatctattgctgagcagccccatagactgagcttcttcagattgccatgcttaatgataagcttttggttagtagactgttttttcgaggtgggcaattttggacaaaatctaatggcaccgttaatttcaccaaaataaggcccctgtttttcattctgcaaactagcacataaggtcattccacagtccattagctgaagaagtggtaattgtgctgttgcaaattggatcccacacgtcgtcacatttgggcaaagagcaaggagtagccttgataaagtatgaggaaatgccttgcagatcatcccgacaccattatcactgatactagatccgcttaaatcaagcaattccaagcttgcacaagatcgaacaatagatgcaacagctgcatctgttatttttgaccctagaatcaatgatagcatgcacaagcccctgaggctagcaccctccagagcaaacacagcttcattggataactgagcagatgatatgtgcatgttttttaagttaggacaggtacgacccaggccatccatcaatgtgacaagatcagtacagtcgttactttgctgtgtgaagcacagcgagatttcgctcatgttaggacagtttatgaccgattttgaaagggaacaaagatctgacagccaaagaattgacaggcttgaggagtttagattaagaaaaccaaggttacagcaaccaccaattttgagaactgagagagaatgcttttccgaaacaaaccgacttagttcctccctgttgagaacagaaacagctttatttgaaacaggtcctggaagtgggaggccagtcatcctgttgactgcgttgtcagacatgctgatctcaagagttcctaaacttgggcaggaaaaagcaagacaggccagtatagtggcatcaacatcactttccattcgcagggagagccgcgagagcgcggggcaccgcgggagcagcgcgccgacgaggctgaccccagcggcgcggaggcgcagctcctccgccgcgcgccacactcgccccgcgcagtcgcgccagccgcggctgaccgcggcggcggccatgacccccctgggccccaggcggcgcagcacctccgccatgagctccctcggcacggccctcccgcccagctccaccgcctcctcctcctccttcaactcctcctcgccgccctgcccctccaccattaaatttgcaccggagttggaggttttgatctttcacctctggccaatttagttttcgggcatttattggtttttt

SEQ ID NO: 91093 - DNA, 354 bp, Oryza sativa
  Clone ID: PAT_MRT4530_89702C.1
atcattctgttagagggaaaatatggacaggtttaatcttcctcaggcatcaactctttttttatgtacccctcctccggtcgcccaaaaaaaaaggggctaatttgctaatgtccgacgtaccctcggacactctcacggaacataaaccggtagagctttccctgtacatcccccccccaacaacgactcgggcccacatttacgcaccctcgccctcgggtccccgcagctggttctatcaaatggactggaccaagggcctttttttgcattcggagaactatccggtgcaggggcatgaaacccccgccacctgggtgaaacccccctccgggcacaatttccccaggt

SEQ ID NO: 91094 - DNA, 3600 bp, Oryza sativa
  Clone ID: PAT_MRT4530_89703C.1
cttcggccacggcggcggcggcggcagcttggttcggttgaaccccgtcgatctctatccctctcttactctctatcgtgttcctcttcactaccacttctaattctagaagcttcctctacttcttccatctcaattcctcttctatttttctgagattgtatttgaatttgattgttcttgagattactgagttggaagaagaggctgttaacaatctggtatcagagccgttcggttcactgggatttttatcatggaggtgttggggaggcagcatgagccatgcaagatggagcaagaattgagttgggaaggttttcatccaagcatcgcccaccaactgctcgatggaatgcccaagccaacctgggatgtccaaggaagatcagaggatatctgagcccgttctcatcaataccaccatgaataaagaggagaaatggctagatgaagctttggatcggatattggagaagtttgaacaaatggaggccaagcgccggcaagaggacaagctcaatcaaaattttcagaagttggaggagatagaggctcgtaggagcaaggcttccgaggagacgattgctgccatcagggcaaccaccgccattctcaaggctgcatcatcttcgacacctatggcaccacctcctccagcgcccaccaactgtttgatggaatgccacaacaacaacttcacttgggtggcagtgaattcaagtcacatccgcgaggtacctgccccgatggttgccttcgagcttggggacgtcgaggacaaggatcctgtcccctacattgccgccaaggaccttcccaaggtcacgcccaccaagtgttcgacgatatgttccagctccgacaccaagcctgatcacactgtggctactgtggttacttgcgccacccttgtcgtgtcatcaatggagttggtagctattgacggcaccactggcagcaccaacattgacacccctgatagtaccaaggcgatgcccgccaactgttcgacagttggccttgatgtcaagggtggtgcagaccacgccagggtcacatgccagatcatgatgggtgtgcctgagggtgttgtattacctgatgcatcatccgaagtcttgtcgccatggttgatcgctgaaatggaccttgccaagctgatgcccactgagtgtttgatgaaatgcctcaaagctatcaagaagttgctggtggggcatcccaagagagatccttggccacctccctggtcaggtggtgtggttagaggaggggaggtgtggcacatcccatgcctatggctggtccagaattcaaactcaattggtcaagggtacatcatttgccaccttggctgccacctaccgaaaaatacttttgttcaggctgcgcaatgcaagtgctggaaaactagagtgggaatgagtctatgtgctaggatggagcagtggaatttgttgaatcaggaaagttgcacaatggttgcagtatctagcctgcaggagcatattaatgggcaagaacaaatcttatgcaaaccttggaatccaagagacaacaggacctcaattgacataattctgttgaatagttggtctctagtgcactgctatcatctggggcatattgttggccttacatgtcttgaagctttggccattctagtttgccatgagatggttaagtttgggtgggctggtactgtgtacagtgaccaagacaggcatacatgttgtcaggccagcaagagcatttgtcaggcatgagcttggcatcgggaatggttcacatatactacatgtttcagaggctggagcaagatgtgggtccatgaggaaattgcttgaactgataaggaatgagaggactttccaaattaaaattatggtgaagaacttattgcaagaggatatggatcatgaggatcggctctcaatgctaactgatgacattttactgtctatcttggggagagtggacataatctcggctgtaaggacaagtgtcgtgtcaacacgctggaaacatctgccttggttgctccctgagttcaccattgatgtcaaggattttctacctgtcccacaaccgaaccgcatcaaggttgaacatatggatgaagcaatggcatctctaaccaaagggatcaggagcttattgactatagctcggagcgaatttcccatcaataggtttcaactaaagctttacctgatcaataattactcacgtgttgtcggtcctatgcttgataaggcaattgaggttggcattttaaaagatatggacctttctgttctggacgaggaggagattgtagattgcaccgataagcacattctacagcaagcttcatctgtgaaagaccttttcagtggctatcctagtgtgcttactcgcctcacaaggctctctctttacaatctatgttttgcccgttgggacttgcaccatcatctgtttgaatgctgcaatcaactacgatacctgagtctatccaattgtgatgtggggaagaatgcgatatggaaaataagtgcaccaaattcgaacatcattgttcttgaacttgatgtatgctgcttggagaaacttgaggtgctctgccttcccaaattggagcgactaaattgggacacttggctttgcccttatgccccgctgtcattcgatgttgtcccgaatcttcaggaagtatctcttatctgcggtgcaacaaataaacatgaaggatttattttaagtgaggttccaagtggtactacaaatatacatactctaacattggatttccaaggagaaaagctatggataaagccagaaggaaaacaactcttccgtgcattcagcaatctaaggaagctatctatacatagcatcttttctgaatttgaattgttatggacaacaaacctccttgaagctgcaccatcacttgagatgtttgatattgagatatgggagcacacatgcgatgttgaccgggaaccaaaagtttttggggagagaccgaatcctgcatggaaagcgcctgatgttacaagcttcaggaactctcttctgaaagagctccaaattgttgcttttagaccactaaaacaacagttagagttcatcagggttgtgatgcagcaagctcccaacctggggacgatcattctgaaatacgacgatccttgtgaatactgcgaagcattaggcatttttccacctcgttcttcaacagaatgtgtattccctaagagcaaggatgagcaagatagggtgatcaatcttctcaaagatggggaagccgacgatgacgatatgctctccatgttgaacgatgatatttcgttgtctatcttagaaagagttgatataaaaacggccgtaaggacaattgtcctctcaaaacgctggaaacgtctcccctggatgcttcctgagctctcaattgatgtcaaggatttctttctgtaccacagccgaaccgtattgaaggtagtccctctcgaaatattcagagggaagctgggaattgagcatgcaattgaattgatcagacttgaagaagatcaccaggttattcagcagccattatctatcataacatga

SEQ ID NO: 91095 - DNA, 420 bp, Oryza sativa
  Clone ID: PAT_MRT4530_89704C.1
gttgacggtcattatcaatcagtttcgcccgtcaatactacctacataaaggagaactagttatgcttgcaatgagtatttgtgtttaattaataaatattccactagcactaggattactaacctcttgcagagaatgaacataaaatggaggagaatcgacatcaaaaaaggcgatcaatcaatcggacgatgtcgagaatcagacttatcaatgaatgggacaagaacgcagaaataacatgaccaattggaccaaaattcacaagtctgcatatgggaacaaaagaggaggccacctgccgaaattgggccacgctggcccagcccatagttcgggcgaacccaccgtgactccgttcgatgcagggttttgatggatggctaggattgatccccaatgacggttggagggtatta

SEQ ID NO: 91096 - DNA, 291 bp, Oryza sativa
  Clone ID: PAT_MRT4530_89705C.1
ggctgcggcgacatgggaggcaatccctgccgttgcacccctgccaccacaccactaccaccgcctctagggttcatgcgagatgtcaaggatttcgggacgacaacacgatgctgcgacggggaaggcggcgtctgtggcttctcccgcggcctggacaacctgtggctaggcctccccgatggtgcttggcaaggcctccctcgacggcgcagcacggaaggcaggaggcgcaaagggcagtccaaagttggaggcagcggtgccgacttgttaggttgtaggggctag

SEQ ID NO: 91097 - DNA, 469 bp, Oryza sativa
  unsure (1)..(469): unsure at all n locations
  Clone ID: PAT_MRT4530_89706C.1
tttctcatctaactcagttactgccttgctaccctaccccagctgcacgctcaggtccactgccagcgtgcgatcgatgactacgattaccgtaggggccgcgcggtgaggtgaggcgaggaaaagaggattcgcaccctcctcatacggaccaattcacctgatcggagccatggccttggctagccgggccacgcccacgagcataatcttctacgtgtcggaccacgatcgccaggaacaccagctccaccacttgaagtacttgggaggaagcacgaccatagcacaaagaggtagtactgtaagcatgcatgatcctgaaagccaagatgacattagcataaaagtcgtacctgctgatgaatcaccactagaggagacatatgcagtcacctactaaagagcaggaatccactgctgctgactcanaaggtttttcaagagaggagcttggtcgcctggtagc

SEQ ID NO: 91098 - DNA, 489 bp, Oryza sativa
  Clone ID: PAT_MRT4530_89707C.1
atggaggtcttgcgtttatatagcctcaagggaggttgtgggtgcagctcaaccgtcatacttccgcccctacaacctaacaagtcggcaccgctgcctccaactttggactgccctttgcgcctcctgccttccgtgctgcgccgtcgagggaggccttgccaagcaccatcggggaggcctagccacaggttgtccaggccgcgggagaagccacagacgcctgctgcaacactctacctgccttccggcactgccggtcaggttctgtccgccagaacaactcccgtgtcgcttggatgtgctcgagctggctacacatctatcactgccccgactttcactagtgagccaccgccttccccgtcgcagcatcgtgttgtcgtcccgaaatccttgacatctcgcatgaaccctagaggcggtggtagtggtgtggtggcaggggtgcaacggcagggattgcctcccatgtcgccgcagccctag

SEQ ID NO: 91099 - DNA, 192 bp, Oryza sativa
  Clone ID: PAT_MRT4530_89708C.1
ccgggctgcaggatagatcgtctctttttctttctttccttccttcctccacaactactccctcctcttctctcctcttctcctccctttcgcttcaagaaacgcagccaagctccgcttcgcttgcctccacgccaccatctgcgcgctccattccgcatcgcatcgcatcgcatcgatgggttcttccga

SEQ ID NO: 91100 - DNA, 888 bp, Oryza sativa
  Clone ID: PAT_MRT4530_89709C.1
atggcgggcgacggcgaggcgatcccggaggcgtggaaggagcttgttcgctccctgggaaccgagcagctcgtcggcgccatctacgtcgccctcgacgacttcaacgcgcgggagcgcgacacgatcccgcccgagctatggcggcggctcggcgaccgcagcgccgcctacaggaaccctttcgtgagcgatggaggatcgagctccggctccggctccggcgaggttgagaggatcaaggtcaagctcgtggccgtgggcggggaagacggcagcggcggcggcggcggcggcacgagcgccgactcgtcggaggatgccgtggtcgacttgctacgcgacctgcaggccgtgccgatgacgttcgagacgctggaggcgagcaagatcagcaagaccatcagcggcctgaggaagcactcgtcgtcggagaaggtgcgccgcctcgccgccgcgctctacaagagctggaaggctatcgtcgacgagcacttgagcaggagcagcagcaagccgccgacgccgacaaagaccgcctccgcacccgccgcggctgatcacgccaagaaggcaaacacggcggcggctggccacgtcaagacgccagcggcggcgccgaagacggcggcgtgcagcaagcgcaaggaggcgcccgcgccgccggagatggacgaggcgaagctggaggcggcgaggaagaagctgagggagcgttacacagaggaagagacggcgaagaggcagaggaagatacagatcatcaacaacgcgccggggaaggcgaagcagcgccccgccgtcgtcgagcagcggcggcgcgtggtccgggacacggtggtcgccgtggcgagccgtgctcctgtgcgttcctctctccggatgtag

SEQ ID NO: 91101 - DNA, 795 bp, Oryza sativa
  Clone ID: PAT_MRT4530_8970C.1
acgggcgggcccgcctgccaccctcgctgacgggtggggcccacccgtcatctcgttcctcccgccgctcccgccgcctcgcccgcgcctagcgccgccgccgccgcgaatcccaccgctccccgtgatcccctctccctttctccccattttttcctctctctctctcgcattcaaacgggcggatttgttcccgcaaatctcgttggcgccattgatggcggccggacctcccggccggtttccttccttccccggccgccctctcccccttccaaccctatttaaaccctccccgcacctcacccgtttccacctttgccgcgccgtctcctcgctggaatcgagctcgcaccgtcgccctctctctcctctgtcgccgacgacctttggccggctctctccgctcgccgggaccgtttcccgccccggcgtcgcctcctccggcttcgccgcaccgtcgtcgtccccgtccaccccctcgtcgagctcgctgaccgccggagcgccgccgtccccgtcgacccgagccgcgccgccgccttcctccgctccggccgcctttttcgtcgttgccgtcgacctagggtgagctgtggaccgccgcctcgtttcccccttttcctcccctctctcggccgccgctccgccgtgcctatggccgctgccggcgaccataggggcgcgggcgcgccgcctcccgccggccgcgtcgacgtagccgccttcgggcgcgccgagtggcttgttcaccctagaataaacaaaaccccaactagtggatactctattcat

SEQ ID NO: 91102 - DNA, 465 bp, Oryza sativa
  Clone ID: PAT_MRT4530_89710C.1
tgtgggtacagcgggatcagtcaaggtgtaagttcgacagcggtccgcacgatggaatgcgctcgcggtcccggccgaggtgcggtaggagcagtcggtgccgagcagggatctgtccggggcgccgtgaaattgattagagagacggggacgccgcggtgtgtagacgcacacccaagggtcaccaggggacgggggtcaggggggtggagcacgcgagtttggcggatgaatggacggaagagcaggacggaccggccaggcaggagtcgaggcggaacagagtgggagcggcgttggaagcgcgaaggggatggggtaagtccgggtggcgcggggggcgggagagtcgcgggcagcggaatatgcgagttggcggggcccgtacacgtggagggcgcggggcggacgtggaggagggctgagtctagaccactatgggccacgggcagtccgttcatatga

SEQ ID NO: 91103 - DNA, 365 bp, Oryza sativa
  Clone ID: PAT_MRT4530_89711C.1
cggtcctccattcccggggggagcgacgcgtccgaaggaggcaatatcgtccaatgcttcatgaatttacacaagccactgcttaatacggggggggatataaggccggggggacagtctacattcatctactaacaaggatcgacaactggatgcactggaacagtgcgtactgcacggggcgatcacggatcttggtacagctaatgatgaaataggtaggctagaactcatggatgacccatttgtgttcctcttggacagtctttacctgatggacctatctaatgatctgagctaagtattgctagctaggaccacttaacatatgtgattccagggagaagaagataatgttctgtgtt

SEQ ID NO: 91104 - DNA, 303 bp, Oryza sativa
  Clone ID: PAT_MRT4530_89712C.1
atggtggcagtggtgcgcgataccaggagcgtgcgcgacgcgttggtgtggtcatcggcgagggcgagcatgtcgtcgtccagtggacacggactctgtgccgacgaccccagtgattccatcctcgggaagccatcgatcgaggtggcatgggcgtccaccaggcagaggccctttggcctgacgctggcgacacggttggatgacgagacttgctccaccttggcgccggtggacggtggacacggtggcgtttgtgtttcgattgttgagttcacgccgctgcacagcagccgtgtgtga

SEQ ID NO: 91105 - DNA, 390 bp, Oryza sativa
  Clone ID: PAT_MRT4530_89713C.1
atgggagcaaagagtgaaagagagatggaacgagcaagaaacacgcaagaagatgaaatctgcaatgccaagagtgaaagagagatgaaacatgtgatgatgcttgtgagagagactggcttgcttgtgaggcagtggcgagagctcctcgtcggcgcgatgcactgcctttacgtgttgagctggggcggcctcggcctcgactacgaggggctagtgagggtgatccctacaatggaggatgatgatgatcccaattatcatggcacggattttgtgggtgtgggagagggagaggacgagcgcaacgagtacaccgacgaaggcaacaatgtcgacgaggaggaggatgaggcggcaacagacgtggcgagaaagagggagatgtag

SEQ ID NO: 91106 - DNA, 367 bp, Oryza sativa
  Clone ID: PAT_MRT4530_89714C.1
ccggccgggcaacgctgtttaccccaaatatttatgcagatgtcatcatctgcttggatatcctacaaaatccctggagccctatatatgacgatgctcgcgatattgcctctatccagtcgcctgctctgtgatccaaacccaagctcccctgcacactccaaagcatgcataactgttctatgtaaaacaagtagctaccacaatacgcacctaccgagatattgcgcagcacatctcgacgagcaactaattcctggacatgaatgagttgcattatctgcgactagcttcatcgctaaagatatgtgatccaggctttcccagcctgtatcacctactaaatccaaatgaaaatatacttttc

SEQ ID NO: 91107 - DNA, 389 bp, Oryza sativa
  Clone ID: PAT_MRT4530_89715C.1
ctcagtctatggatcgagaccgaatagttcagatcgattggcactgttcattatattgcacaagattgcaggcgcgaatgaccctgaccaacagactatctacatggacagaactatttaccaaccttgcatagtacatataagcaattcattgttcagacacaataacattgtacgttgatctggcaggccctgcttacaaatgtaataatcgaggtatctagattgacattttcttgaacctaaatgccggccgccagaagtcttaagcagataacagccctgaacatactgggttcatgatggcacatgtgattcttgctggggggaattgtatgttaagaagtgtaaagatatccgtagacctcactttctactgttatgatctc

SEQ ID NO: 91108 - DNA, 2422 bp, Oryza sativa
  Clone ID: PAT_MRT4530_89716C.1
tcaactggcacacagtggatatggcatgcttatgccatcgcaacgaaagaaagagcaagaggagtctccactggctaaggtaactcgggatagctcaaaaattactagctgaacaggtccatggtctcatgtcacaggtcattaaggatatcctcttcaactctgtgcacccgtcaaacaaggcaagcacaagcgcaccagattcatccgggcctgagcctatggttgaagcatgagtgttctacagaattccttcattagttagccttttgttgatgctggattcacatacactgggtgcctagttagttcatgactaaaagctgtgtccagcataactagcagagccagaaggcgctagacgggcctagatcgactgggttaactcgttatctccctacggtaacccgccttacgctgccgtcgtcgcttgtcagggatctcatacaccagctccattcgagcgtcatcacggccaactgtccacacgctcgatccatcctgccgcatccatggcgtggcctatagtggtcgcaacaggcttcattcgctaggcttacttcccttgtctctagattaacatgcacaaaatgccaagggcccgctggtcgaggcgatccccaaagcactctttccacccgctacacacgtcaagcgtcgtgggcgcgcgttctcccgactcataccggctgatacctagcggtgtgttccgttggtctccttgagtctgcccgcgtggtgtcctctgggatacgctaaaatcgcgcgcccaggacacacagaaaaaatagcacggtcccatatgaccagctgacccacaatccgccaattgcggtcgccgcggtagaacattccggtcatcacggcaagcggtgccttcctcgccttctgactcctttcgcggccgtcctggatctgcgtcgccttcatcaacttcccccgccctactgggtcaatacgttatcttcatcacctctcccgcgcagcccggccggggaagcagaccccggccggccgggaaacccctcctcttctcttccccttcctcctgcgttctagggttttgcctcccagcggcgactcggcgagcgagaccaccggcaagctcgtcggcgatggagcccacctcgtcggcggcgatggcgaggcagacgtgggagctggagaacaacatcccggcggcggcctccgacccggacgccctggacgcgatctaccgctacgacgaggcggcgcaggcgcgggtgcagcaggagaagccctgggcgaacgacccccaccccttccgccgcgccaagatctccgccctcgcgctcctcaagatggtcgtccacgcccgcgccggcggcactatcgaggtcatgggcctcatgcagggcaagtgcgagggcgacgccatcgtcgtcatggacgccttcgcgctccccgtcgagggcaccgagaccagggtcaacgcccaggccgacgcctacgagtatatggtcgagtactccaccatcaacaagcaggctggaaggttggagaatgtggttggctggtatcactcacaccctggttatggatgctggttatcaggcattgatgtgtctactcagatgcttaatcagcaatttcaagagccattcttggctgttgtgatagaccctacaaggactgtttctgctggtaaagtggaaattggagcttttaggacatatccaaaagattacaagccaccagatgaacctgtgtcagagtatcagacgataccactcaacaagatagaagattttggtgtccactgcaaacagtactatgctctggatataacttatttcaaatcatccctggattctcatctccttgatctactttggaataagtactgggtcaatacgttatcttcatcacctctcctgggcaacagggattatgttgctggccagatatttgatttagctgataaactagagcaagctgagggtcaactggcacacagtcgatatggcatgcttatgccatcgcaacgaaagaaagagcaagaggagtctccactggctaaggtaactcgggatagctcaaaaattactgctgaacaggtccatggtctcatgtcacaggtcattaaggatatcctcttcaactctgtgcacccgtcaaacaaggcaagcacaagcgcaccagattcatccgggcctgagcctatggttgaagcatgagtgttctacagaattccttcattagttagccttttgttgatgctggattcacatacactgggtgcctagttgtttcatgactaaaagctgtgtccagcataactacccgattcaaaatgcgttagctgcgttttatcgtcaaatcataactgatatgtaattatgagttgccttctgaatctttcggctgccattgtgaaaaaaaaaaaaaaaaaaaaaaaaaa

SEQ ID NO: 91109 - DNA, 1260 bp, Oryza sativa
  Clone ID: PAT_MRT4530_89717C.1
ccggccgggacgcagcgatctgaagtgaaacacgcaaaaaaaatcaaacaaaaagaaaaaatattccccatctgtgaaattcgcaaaaccctagcgcggcggcgatgtcgaacacgagggtgttcttcgacatggcagacgtgggagctggagaacaacatcccggcggcggcctccgacccggacgccctggacgcgatctaccgctacgacgaggcggcgcaggcgcgggtgcagcaggagaagccctgggcgaacgacccccaccccttccgccgcgccaagatctccgccctcgcgctcctcaagatggtcgtccacgcccgcgccggcggcactatcgaggtcatgggcctcatgcagggcaagtgcgagggcgacgccatcgtcgtcatggacgccttcgcgctccccgtcgagggcaccgagaccagggtcaacgcccaggccgacgcctacgagtatatggtcgagtactccaccatcaacaagcagattggttcgcaccatgctattgatcataatgtttctgaggtctcagtttttgctaacacattgatgactgatttggctggaaggttggagaatgtggttggctggtatcactcacaccctggttatggatgctggttatcaggcattgatgtgtctactcagatgcttaatcagcaatttcaagagccattcttggctgttgtgatagaccctacaaggactgtttctgctggtaaagtggaaattggagcttttaggacatatccaaaagattacaagccaccagatgaacctgtgtcagagtatcagacgataccactcaacaagatagaagattttggtgtccactgcaaacagtactatgctctggatataacttatttcaaatcatccctggattctcatctccttgatctactttggaataagtactgggtcaatacgttatcttcatcacctctcctgggcaacagggattatgttgctggccagatatttgatttagctgataaactagagcaagctgagggtcaactggcacacagtcgatatggcatgcttatgccatcgcaacgaaagaaagagcaagaggagtctccactggctaaggtaactcgggatagctcaaaaattactgctgaacaggtccatggtctcatgtcacaggtcattaaggatatcctcttcaactctgtgcacccgtcaaacaaggcaagcacaagcgcaccagattcatccgggcctgagcctatggttgaagcatga

SEQ ID NO: 91110 - DNA, 896 bp, Oryza sativa
  Clone ID: PAT_MRT4530_89718C.1
gctccaggcgtgccgctcccggcgccgcgcctcgcccccctcccgaccccctccggcgccgtccagggcctcccgcccccgctccggccgcggcgcgcgcggccgcaacgggctcgagcccgggttgctgccgccgccctcgaccgggagggcctccgctcacggccgccccgtccgctctcggtccctgactcgcgtcgcccccctgtcgcccctctctcctgctgccggcccccccctccgccccccctcgctggtgctgcatgcctcctcatcctctccctcacgcgactgcaagatttgaatcactccggtgaacgagaaaggcgtccagccaaccacttctcctcgttgactgtctttgtcttccctccagccctggcagcaatagagcaagctcatgtcaccatagtcccatgctcttggggaaggagatactagcatcccgcctacggaaatcgccatcgccgccgcgccctcgaggtgcgcaggggtgttccgggcggacgcggtccttcgggaatctgttatggacaataaaccataaagggagagtttcttttacaagaataaatcataaaccatttccaatttaccattattattccgcaatatagaacgacaaaagcctgagttcacccgatctgaaattttttcagcttttatcttatttgacagttcaagaactggtgtaatagttgatagaactatacttgcagaaaatagaaaacatgacctctgcgtgcagtcgagattctcagtggtgatgcggacggaggcagtacaacattcacagtggtaacatgacactaaggtttggttgattgggcgaagaacaatagagtttggtcaggatgcagtgtttcctctgagaaaattgttgcaaaaagcagctg

SEQ ID NO: 91111 - DNA, 288 bp, Oryza sativa
  Clone ID: PAT_MRT4530_89719C.1
atgacgacaacgaggcctggagacgtagaggagaagttccggcgccgcgaatctagagatgccgtgctcatggccgcggcagcggcaagagggagcggacgacgtcacgtggaggtgcggagtgaagagaccgtggaggtggggtgcgaccgtggagcgagcagcggggagtgcaaccatggaggcatggtagcacgcacccgcagaggcgatgtggtcggcttggtgcggcagggagctgtcgtacccttcaccgggtggcagcacggtggaggatgcttggggtag

SEQ ID NO: 91112 - DNA, 1843 bp, Oryza sativa
  unsure (1)..(1843): unsure at all n locations
  Clone ID: PAT_MRT4530_8971C.1
ttttcttctctcggtggtgtggtgtccactgtgcagctcccgtgcaggcgttccgctttgatggaaaccgccgcggccgtggtgtgccgaggcggcgggctgcgcgcgccggcgcgtcgcggtggcagtgacagcagcacgacgcgcgcgggtggcgttgctgcctccccggcgccctccaccaccgcgcgacggaggccgctgctcgtcgcgtcgctcggggagcccctcatcacggcgcaacccttgtcgtcgtccctgggagatggcgccgcggtacacgagacgctggctcgctccgattcggtgatcccgtcgctgaagccgtctcactgcgttgatcactcggtccaggttgacgccgacgaggagaccggctccaccaagacactcccacctcctgatgacgttcctacgaagacagtgcacgtcaaattcgtgctgcaaaagcggtgcgcgttcgggcagcgcttcctcgtcgtcggcgacgtcgcggcgctcggtctctggaatccggcgaaggcggctgctctggattggtccgaagaccacgtgtggacagtgaagaaggaattgccagcagaaagatcgatcgagttcaagttcttgctgcaagatcgatcgggacatgtcgaatggcagcacggtcgtaacagaatactggatgtagctgacacctcgaacaccttgattgtctgcgaggactgggacgaggcgaagaatcagcaagtatcagaagagattggtgacgcagatgggatattttcaggaagcgatggcgtcttccaggaagatgagcttcaactgggtgaagaacaagagaccaacaagggtgtgactgtaggtgtggatgatgcaaaatcggctttagtcacttatatttacagggaaatgatgggagcaaacgacgcgatccagccacagttagcattggacaaacaccacaagattccagatgagcttagtggggaggcaaacatggcagcacaagatggcaatcacactgctactgcagccgcagcttctggttttgctggaagcaacgctatccaactacgccagtatcctgtgaagattacagctttggttgtatggagcaaacggtccagtagagaataataggctggggctggccagcattttcttcaatgttctagatcgcgagcggccgctcgcgatctagaagctccgaagccttggtttccaaatcggcacgagaaaaacatgaagtaagcatcagagacgctgacctgcagttttggctgatcacacggtctcgcggtgccttcattcaaaactcgaaagcttctacatgctgcaaacctacaaggaacaagtgtattgagaactgcaacaaaaaaccctttacgttgctaaggtctgcaacaccagcagtacttgttagcagtgcaaaaagagcaggaaagctgttagcagtgcaagtatgtttaggaccagtaatgactaagctaccaaaaaactcaattagtgaaatgcatattgtggttaaatttatctgttcgataaattctgtagaatacatctagaataagagccaggaaaagctgaaagtctggagatttggcataacatgtgctccataaccacaacgtataagctcaaccacatgtactttaatccaccagatttacgttcatttctcaatcatttcagttgtaatgctaatatgctcttgttctggtgatctagtaaaaatgatgtccatgatttgcaatgctttctttaatttacatnagaaagctggcagcatttaaaacatgtaaacgtgaaatatcagcgtggacattccactttaattnaaaaaaaaaaaaaaaaaaaaaaa

SEQ ID NO: 91113 - DNA, 1429 bp, Oryza sativa
  Clone ID: PAT_MRT4530_89720C.1
ctatccccccctcgccatggcagccgcttccttggctccgcccaccgcctccttctcgccggcgccggcgccggggagggttaaggcggcggcgcctttgctctccaggaggcctcccgggcggttccttctcagggtggctagcgaatcctcctcgatttctggtgacacgctgctgggattgtatgagaaagagaggttaagccactcgctatatgctaacgaagattacgacaaagagatgttctgggacaacttggatgcggatttgcgctactggaccagatccctgcgcccagtgcagtggtatcctggtcatattgcgaaaacggagaaggaactgaaagaacagctaaagcttatggatgttgtcatagaggtccgcgacgcaaggattcccttggcaaccagccatcctaagatggatgcctggctaggcaatcggaaaaggatcatagtcatgaatcgcgaagacatggtgtcaaatgaggacagaaatgcatgggcctcttactttgctaatcagggtaccaaagttgtttactcaaacgggcagctgggcatgggtacaatgaaattaggtaggatggcaaaatcactagcatctactgtgaacacaaagcgcagagagaaggggttacttcctcgtgcggttcgagctggaatagttggatatccaaatgttggcaaatcttccttaattaatcgcttgctaaaacgaagaatgtgtccagcagcgcctagaccaggtgttacaagagagctgaagtgggttcgttttggaagtgatttagagctattagattcacctggcattttgccaatgcgaataagtgaccagacagctgcaatcaaacttgctatatgtgatgatataggagaaaggtcgtatgactttgctgatgtggcagcgattctcgtacagttattagtgagacatccagctgtaggccctgaagcgtttcgaagacgctataggcttgacatggacagcgattgtggtaaaatgtttgtgacaaagctctctgttcacttgttcaatggagatgccagccaagcagccttccgcatcttgtctgactaccggaaaggcaaatttggctgcgtggccctggagagacccccaacatgagcaatggagatctcagatattcttagatgttaatagctgctctttgttcatagtaccacacacaacaattacagtgccctttgtagcaaccgtcacagcacgaactttcagatgtaggaggatgcaaaatgaattggcaatatggccccctctgtctagaggaaatgtagtgtggtagtaggtagttatttgaatgtaaatgaactgagctgatttgtaccaagatctttgtaggttgctacaatatcatgtgtggatctctagtttagagcgtccttgacttttttttttttaaaa

SEQ ID NO: 91114 - DNA, 144 bp, Oryza sativa
  Clone ID: PAT_MRT4530_89721C.1
atttcctatttatttttcccaattaactcctccaaaaacaagcgtgattacgtaataccattcattttttttattgtcaacgaatttataagatttgctcctagatacaaatctttgtgggaatattaggccgggagcttttgt

SEQ ID NO: 91115 - DNA, 431 bp, Oryza sativa
  unsure (1)..(431): unsure at all n locations
  Clone ID: PAT_MRT4530_89722C.1
ttgggnntaccctcgggccggccgggnaccagcccagtttccaataacatcctcaaatagctatggcgaccatagctttctctcggttatctatctacttttgtgttcttgtccagtgccatagctctatgagacggctatttgggccgaacgagaatcgcatgtacaaccctgggcctggcgggtttaagcggtgaccgttccctagactacgggggggggaaccaatggcgagagcgctcgactccaagatcatcagcgacagggagacggggaggtcacgtgggtttggcttcgtcaccttgtcctacgagcagtcgatgcgcgacgccatcgagggcatgaacggcaaggagctcgacggacgcaacattaccgtgaatgaggtccagtcccgccggttcggcggcggaggcgggggctacggcggc

SEQ ID NO: 91116 - DNA, 690 bp, Oryza sativa
  Clone ID: PAT_MRT4530_89723C.1
agcttctctagaagttagtgcggagtttataaaaaaagaacgctatttcagttacactgatcagaagatgtgctgtgataattagtagaaaacacaatcaagttgtagggtaatttcagggttcaggtaaaatgcaatcttctcagtactataaaatgactactgaaagccagtaatgttgatcagaaacaatcatcatgtactagagaagtaaagccaagcatagatcggcagcatatataccccatactatgcacagttcgcaagacctatatcacttcattctgagtattgcattactagtttcttatcacttttttttttgaccaggagtttcttatcacttaatcaatgccatacaaaagactggacgaagtgcctaaaaagacttatacaactagtagacagagtttcaaaagatacaagtaagaatataagattgatgatgagtggttaagaaatttatttctttagtgaagataaaaaatgagggtctttttcgaaaaaaaaaagatcaaagacgagggaagagcctagacaaaagcctagtagacagagtttcaaaagatacaaggaagaatataagattgatgataagtggctaagacatttatttttaagtgaagatcaaagtcgagggaagagcctagacaaaagccaggaccatcgaattatagagttatatccttt

SEQ ID NO: 91117 - DNA, 1026 bp, Oryza sativa
  Clone ID: PAT_MRT4530_89724C.1
ggagacgaggaaactcgattggcataaaaactgaattagttgattttacatcacaacaacgaggacggccaataaggctttcctagggaatcagcatcccggaggcaggcaggtgagctacaagaacccagcttaagcaaaaaaaaacaactagcctctgaaaccagctgatctcaattctcaagctctaagcatcgggtccaaatggcccaaagctaacaaagtctttaagggtgaagtttaacagaaaccttgaggttatctttggaaaagaaacaccaaagggggcctgtcaaatgtcatgtgattggttaatttcactttcttcttgatgctacctctgctgcccatgcttttccaacgtctgtctgaaatttccctgctgttgactggaaaaactcttctaggtccagcccttgctccttttcatactccaatgcttgaagaatcatctcaaccttgtcaaaatctttcacaacctttgcttccaaagtggcattctgctcatattccatccaaagttcacggatttcttcagctctcggaccaccaccgagcaaactgcacatatggtccaatgcttcttgctctctgcggctcttttcttccttcggcacgccatctgaaggggtgatatcaccaacaatagcttcggctatgtcgtgcacgatcgccatcttgacacacctgtcgcggttcacgccgctgggcaggtcggcggcgacgagcgccatgacgcccatccggtacatgtggtcggcgacggactccggcccctgcaccccgcgcctcacccacccggccctcttcgtcgtcttgaggcggtagcagagcgtgaggaagtcgatggcggaggcggaggccggagcagcgggagagggggaaggggacgacgacgacatggaggcggcgaggcggagcgggagggggcggtggtggaggaggggggatttggtggcggcggcgaggagggaggagaggggaagggctcggctcccacccatcgctggggtttattagaaggag

SEQ ID NO: 91118 - DNA, 981 bp, Oryza sativa
  Clone ID: PAT_MRT4530_89725C.1
atggcacaaagcaatgtactgtcagtcatcttcctcgacgttgccccgtgctccggcgtcgtcttcctcagtgttgaaggaaagacggcaaagcagaaaaatcagatcagcatgagaagggataaccaatggcttggggcacgacgtcaccggagatcgacggcgcggcgcggaagcggcgggcatgtggagggcagggcgggggggtggagctgggagggccgtggagatggcgcaggtgagggcggtgtggggaggaggagaagcgatggcacggtcggcctcggcgagcgccgcgcgggcgagtgggccggggggcttcttggtccccgcgccagtggaagcggcggcggcgcgcgcacgggcgaggagctgggcgccctgcgcgaagtgacggcgacggcggatgacctcccagcgctagtagatgagaagaacggcgtcggcggttggatcgggaaccggagtccgcggcggttcgacgaaggcggtaggggtgggggactggacggcgtgggggtaggaggcggcggcggcgatgtggcccgctcgatgacggctccggcgggaggtagcgggctaggggaatcgggagcgcagcccggcgagcggagttggggcggcgggctcgcacgagaggcggcggcgggaggcagcgacccggcgacgcgtgaggggcgggcgcagccgcgcgcgagcggagcggcgccggcggccgcgcaggaggatagatctgtcatccccaaccacactgagagcatccacggtggcagatggagccggcgtggaggaatcgtcaaccacgacgatcacccgtttcaatcagttgccgcctattccctccattaccagcaccggcagtttccaccgacacgggcagcatggagcgtcattggaccgcacgtcgcagctgttggatacaccgtccctaggatggaacctcactgccaccaccgccgtaactggatctgctcgcgctga

SEQ ID NO: 91119 - DNA, 219 bp, Oryza sativa
  Clone ID: PAT_MRT4530_89726C.1
gttcttgctcgtgagcgggcgcactacttggttgatgcttgacaacacagactcagcggttatgaagcatgtgtccatgactgacgttacatttgctagaaacaacgcgcggaacagaaccagctgtaggaaaacagattgtggtgcaagtccgatgatctaattatgactgcaatatcttgaatctagcaaaacggcgctgaaacaaatggagtcagg

SEQ ID NO: 91120 - DNA, 747 bp, Oryza sativa
  Clone ID: PAT_MRT4530_89727C.1
gtcaggtttccgttccgcctccgcctctgctgctcctcctcctcctcgccgccgccgccgccgcgacgaggcatggagctcgcgcgatcggcctgctccaaggagcaccacaagatctacgccggctggttcgccgtcgccgacccagatggagatgggcgtgtcacgggtgctgatgctaccaagttcttcgccatgtccggcctgtcccgcgccgacctcaagcaggtctgggcgatcgcggacaccaagcggcaggggttcctcggcttcggcgagttcgtcgccgcgatgcagctcgtgtcactggcgcaagcgggggaggagatcactcaggacagtctgaagcgcgaagacctgagtagtttggatccacctgtgatggaaggtcttgacgaactacttgcgagatcaaaggctggggtaaagagagtacacccagaagaaaatggcgcccctcaggttcaagtgcattctgctaatagctggttcagttcaaaatcagcaaagaagatgcaggtccccctgactgctgttacttctgtaattgatggcttaaaaagactatacgtagaaaaactgaagcctctggaggttgcataccggttcaacgattttgcttccccgttattgacaagcagtgattttgatgcaaaaccaatggttatgctcttgggtcaatattctacagggaaaacaactttcattaagcatctgctgcaaacaagttatccaggagctcatgtt

SEQ ID NO: 91121 - DNA, 2186 bp, Oryza sativa
  Clone ID: PAT_MRT4530_89728C.1
ttttgttttttttttggtccaacgttgctcgagcgttaattcccggggcccatcatcaggctgttccccacaacgaatatatactcaattcttaaaaaacaaaagacgatgtgcgtcatattctttcatacagcgcttcccgttttacattgccttccaacagttcacatcttcgttgaaaagaattgagcaatggctctcagattcttatgcatgcagttatacaacaaggtaaagtatgccacaataaacgccctacaagagttacaagacctaaacctcagcaatcccagatttctgacagttgcaaaactatggaatgcagcgcatccctattccctccgaatatgactagtctctcatcatgataaaaagttgaaaaccatggtcataatttaaaggtgttcattcactcgtatgggttcctgaagttcttgaggagttctggaatgtcgtatccaagcatatcatccacggcctgcaccagcttgggcttcatcttctcgaacttgtcgatgttgtacccacccaacacctccttgaagtgctcaacgtcagggaagtctccggctggaagatggtactccctttggacctttgcaaactcatcacccaggttgtctatgagtcgctgttgagccttagctttccccatcattgcaggcatctccttctttagatggccaattatgtaagcatgaatcttagcagctctagcacgtttaacaaactcgttgacccgacgatcacaggccttcttgggtatgtctttcagatcacagaggagatcatcttgctctttctcaaacaagtcctttccaattggtccaacagctgattcattcactggtttgtcattgaatgacccgatataaacacgcgcgacctcaggggtattgagtactttcccaagagaccacatcagtgcaccatacactctcataagctgctgagtgtcaacttggtctgccttattcagcactacacgtattttgtcatcatggccacgtaaagatgcaatcacacgtttgaactcatcactgatatcaagcttatgaggatcaaacagaagaagaataaggtcacacttagcagcaaaccatgaagttatgccggtgaaatcatagctacgctgcgtccgctgcttttcaccagacaggacaccgggggtgtccacaaaggtgatatgatcgagcagcggatgtggcatctgagagcactcgaactttgacagaaaagcaccgccaaatgtcgtaagaccagtgaatggcatatcagcttgaacagcaatagtattgccaggaatagtcctttcatcagatccagacatgacaacaacaaatcggtcagtagtgggctctggtccaacatgagctcctggataacttgtttgcagcagatgcttaatgaaagttgttttccctgtagaatattgacccaagagcataaccattggttttgcatcaaaatcactgcttgtcaataacggggaagcaaaatcgttgaaccggtatgcaacctccagaggcttcagtttttctacgtatagtctttttaagccatcaattacagaagtaacagcagtcagggggacctgcatcttctttgctgattttgaactgaaccagctattagcagaatgcacttgaacctgaggggcgccattttcttctgggtgtactctctttaccccagcctttgatctcgcaagtagttcgtcaagaccttccatcacaggtggatccaaactactcaggtctgcaagaatcaccataaattcaggggacatccacacaaacactgaaatacagatcgcagcatcgcaagagaaacaaccttcgcgcttcagactgtcctgagtgatctcctcccccgcttgcgccagtgacacgagctgcatcgcggcgacgaactcgccgaagccgaggaacccctgccgcttggtgtccgcgatcgcccagacctgcttgaggtcggcgcgggacaggccggacatggcgaagaacttggtagcatcagcacccgtgacacgcccatctccatctgggtcggcgacggcgaaccagccggcgtagatcttgtggtgctccttggagcaggccgatcgcgcgagctccatgcctcgtcgcggcggcggcggcggcgaggaggaggaggagcagcagaggcggaggcggaacggaaac

SEQ ID NO: 91122 - DNA, 353 bp, Oryza sativa
  Clone ID: PAT_MRT4530_89729C.1
cactcctgcactaccggtcccgaatttcaatggcgggggaggcgtacgcgcacgctttcgatcacgcgtgcaaccactcgttcgtaataaaaaaaataaaaacgaggaggggggaacctaagagtaggtgggatcaaatgctaacctaaataatatgcgagcaggctaagaaaagctcagttcttctgttcaacctattcttttggagccacctccagttatgagtgtcgtcgaccatcgttataacggcgattcgggcttctcatttttaccatgtactgaagaagaataagaagaagaagaagctgacagcagcataaggaagcgtacaagaaggagatagatgaacgaac

SEQ ID NO: 91123 - DNA, 2875 bp, Oryza sativa
  Clone ID: PAT_MRT4530_8972C.1
ctagaggattactaagattttgagaaacttgtggacaaagccatgcaactcgaaagtgagcataatcggatgacgaactgcaagaggaggattgtcaacatcccagtatttccatgtggtaaccaaagacagcgcactgagccacttcagatcaccggatcttctgttgtgcatcaagagttcctgccccaagaagatggacgcaatgcagacaacaacactagcaatactaatgatgatgataccaccaacaaccatggttcttgcctcattagcgaccactcgaataaagcgtgcaatgtcagtagcattcaccaagatgtcaacgatagtatcaatgttggaatccagaatgacaaccttagcaattttgacactgagaaagactccaatggtgatagcaactatggtaccactgatgccaatgttagcaaggatttcaaccaccaattccaactccaagtcaaaatgatcgtccccagatggacagctcaacaaagaagacgttgatttgttacaactgtgaggcctcgagttaatcataacccatagtagaaacaatgtaccgatgttaagcatcttccctttttgtttaaggtagtgcctgttgatggcgaagaaaatcaagtgatcaaccaaagagacatttgtttggactaagagtttcagatgtgtcttctcatcgtccccagaagcgtccgcaatccacattaaagaataccacctgggtaaaagtgtttctatgaaggcaaggagtgaaatcttcaactcagtatcagatgctacacggagtgaaaactgcaagcaccggttaccaggcaatgccatgtcttgggagatgatccaatgggaaggaactcatcaaggtcaaaggtgtaaaggaatacggtgaatgctaaataatgacaacctgaagataatagttgccacatcccagtcgaagtcagctagaggtgcaaccagggaaaagtcaggtgaagagaagattccatttgcaacaggagatcgagccaagcagtccagagtggagaagttttgttaggcaagtttgttatagaagatggagcggaagaagtcagacaagaagagaagaccacccaacctatcttcatgctagcctcctcgaatctcggggacgagattcctgtaaggggggtggatttgtcacgtcctgataaattcatcccgagaataaaaatcattcggccccatccccgccgtcgccctctctctcccacgccgccggcgacctccagccgcctgtgccgcctcgcccgtgcgccggccggccgcgccgtcgcctcctctagcatcgcagccgcctcctcttcgccggcctaccctccgtttcgcgcggtgaccgccggaggcgcactcccgccgtcgcccttctcattcctccttgccggccacctccagccgcctctccctcctcaccggagcatcgtccggccgtgccgtcgcccccctcggctctgcaacaccgtccccttcaccggcctcaccgtctcctcgccggaaacccggcatcacctcctcctcgcccgaatttcgccggaacgccgtcgtctccgcgccggcctctccttcctcctcgtcggctcgtcgccccgctgcaccaccaccttcgtcgtctccgatcgttctcgtcgtcgacgtcccatcggtcgcccggctcgtcgtctcgcggcgccgcctccgtcgtcggcatcgtagcggcgtgttccacgtcgtcctcgtccccgtgcagctgctgctggctgcccctcgtcgccccctcgccggtcccggtcgtcgtcgtcgtcgtcgtcctctcgtcgttcccggtcgtcgtggcgttcgtccctccgtcaagccgttcccgttcgtcgtcctcgcttcgtcaaggtcgctgcagcccccgtcatcgtcttcgtcctcgcctccgcgtcgtcaagcctcgtgccggccgcgtctcgcccgtgtaccggtgtcggtagtcgttcacgtgtgcgggtggtgaccgtgtagtgtccgtgttagtgtgcccgctcggtagccgcgtggtttccacgtgtgcaacccgtgtggtgtctagtggagtccgtttgtcggccactcgcctcggttgacacacgggatccgcttccgtcgacccgtggaccgcctctgtgtacccggttttgtttttatgtattgttattgcttcttcataggcttgtagctttgcttgtgtgcttcgcgtagctttcgtcgttccggaggttcccgaagcgtggttcgcggtcgtcgccgaaggttcggaaggccgttctctctctcttcctctttcaaaacccctaaaacctgttttcggtggggtttgggtgcatgccagttgtgggaagtagcaccccggccactataaggactaaagctcgggcctctgttgcaaagcactaccgtacttccacatgtctaatgggtaaggcttagtttgtggctcagtctagtcataaacaaaagtacacggattggagatggatgaagtcgggcgtcgatggacattctccagggcaaatgaaggctacacgagctgcggcccggtagtcgagatgtcatacggcggagggttggtgcccaatgctaggggctcagttctgcctgcctgtcccgggtatcccggccgtaggtaggattgggtcggtactcttgtctaaggctaggatgggttggaaactatgtcacgtcttccgtccgtataccgtggtggtatgtggcacgtggcaacacgtgaggaagatgtgtcttgtggcattcgtgggtgtgtcttgttgagtacggtggttgtactcagtcttgcttaattttcccaagcccagatgaggagttcctggaagatgaaggcttcggtgtc

SEQ ID NO: 91124 - DNA, 421 bp, Oryza sativa
  unsure (1)..(421): unsure at all n locations
  Clone ID: PAT_MRT4530_89730C.1
acgtcggtgaggctaccttcaagtctggagtggctcgaagaccgaggaatatcctgtctgttgcaaagacctagcaatacttgatgatgaatgtatacatgttcttttaagagaacaaattacagcgacaaggattggaaggtccatggacgtcaaaaggtaggaacttgcagtggttgtctaccggagggtgtttcgctaggagccatctatggcctcagcggggattaattacttgtaaaataatgatatatatttaccagtggaggtgctccctcaggtganggggccggcangcacagaccagtnttaagaaaagacctcangtcgccgccctgaacctcgactcgcggcttggacaagaacgccgaggggaatactcgtgggccgttgaacaccttcttttttggancttaagtcc

SEQ ID NO: 91125 - DNA, 285 bp, Oryza sativa
  Clone ID: PAT_MRT4530_89731C.1
atgtcggtcttgcaacggcaccaacacaccttggggcctcatcactgcgtgtgcagtgagctgtgcatgcacacacagatacactacacagaggagacacacacaggcagagaaagaaggagagagcaggtgagatgcagctggggctatgtcgtatggaaggcagtggatggagttgcagcaatagcatcagaaaatcaggaattcaggattgctactgggagtacgagtcgtcaactactgatcgtccggagtgcagtcgaacaggtgatgtcgcacatgtaa

SEQ ID NO: 91126 - DNA, 452 bp, Oryza sativa
  Clone ID: PAT_MRT4530_89732C.1
gctcttcttgtttttgtctcgtttgcaaagacttatcgagggcggagttagagctatgatatcctcaaaagcagatgtggaaagcaccaaaaaaacaaagctcattttttttttgtcggcagccttgggcaccgggggaccaccctgcgtccttcttctccacgaaaaaaaaaaaaccaacagccaccgtttgtcttataaaaaacaccgcacaaaaacaagacgacgccctcataaaaagactccacaaccatgggctagaggggaatcttcttaaccataccaaaataaccggtcttgaagaacttgggctccttctccagcttcttaccagaccgtctgtcaatcttggaaaccagctcaccaaacttgacggccctgcgggaggagaggaagtccaccactggggcggagccggtgccgatctggccagggggggggatgatgatcac

SEQ ID NO: 91127 - DNA, 747 bp, Oryza sativa
  Clone ID: PAT_MRT4530_89733C.1
atgggtgagatggaagagaggttgttggcggcggtggaaaaactggcggagaaggtggagaaggtggggctgattcaagagaaactggaggtgatggacaagaagttggaaaagcaaggagagaggctcgatcaagtgcaggccaaggtggatttgtcgctagaatcgctggggcaagttcttcaagaacagatccatgtcatgcaagctgtgaagcgcaccgtgcctgcgacgctggtgattccaaccaggacaatggaagcaacctcatctgtgacaagggagcaacctcaggtaaccattcccatgcctacactcacaccaccacctagggttgagacaggagaaacacatgcgccacacttgggagagggaaacaggggagtagcccatgagaaccatttcagaagaaatatgccaaaaatggatttcccgaaatttgatgggccagatgctagtgtgtgggtagacaattgtgagacatactttgctatgtatcagatcccagcaggttttaaggtgtcagctgcatcactgaacctgttaggaaaagcatcgcactggtataaagcctggaaacagaaagttggccttcatgtttgggaagagtttagagatgctgttgtgaaagagtttgactgtggaacccatcacatcaaagccaatgccatgttcgaattgaaacaaacgggttctgtggatgaacataagagccaatttgatgacttaatgtacaagctttgttga

SEQ ID NO: 91128 - DNA, 237 bp, Oryza sativa
  Clone ID: PAT_MRT4530_89734C.1
atgggcttggcgttgacggagtcggagacaaggggaagagcgcggaagggtcgtggaggagatcgggagacggcggcgtggaatcatcgcgccggcgtggtcggcgcggtgtggagtcacggcagcacgattggcgacaatggagtcgtcgagtggcatggaggatgccaggtggcacggtcggcggcatgtatttggggaggaaaggaggagttcgatggaaatgattataggtag

SEQ ID NO: 91129 - DNA, 1109 bp, Oryza sativa
  Clone ID: PAT_MRT4530_89735C.1
gcacgaggaaaaaagtgatcattgatctgaagtacttgacagagttacacacacgtatgtactcacacagctatgagctacagatagtactccagtttcacttaggctacatcaatcaaggaaaattaagcttagcaacaaccagctagcttccatggcggcaaagctccccactgtcgtcctcctcgcctccttcgccgccgtcatcctctccctcgccgcgccgttgctcgccggcgaccccgacatgctccaggacatctgcgtcgccgactacaagtcgcttcaaggcccgctgagggtgaacgggttcccgtgcaagccggaggcgaacgtgacggcggaggacttcttcttcccggggctgggaaagccggccgacgtgtactccggcaacccgatggggtcggcggtgacggcggcgacggtggagaggatcccggggctgaacacgctgggcgtgtccatggcgcgcgtcgactacgcgccgtggggcggcgccaacccgccgcactcccacccgcgcgccaccgagatcctcttcgtcgccgacggcctcctcgaggtcggcttcgtcgtcgccacggcggcgccggcgagcagcaggctcatcacccgcgtcgtccccaagggcggcgtcttcgtcttcccccgcggcctcctccactacgagcggagcgtcggcgagaagcccgccgtggcgatctcagcgttcgacagccagctccccggaacgcaggccgccgccgacgcgctgttcggctcgtcgtcgccggcggtgcccaccgacgtgctggcccgcgcgttccaggtcgacggcggcgtggtcgagaacatcaagtccaagttccagcacaagtagggcgcccggagtgtgccggcgtcgtgaacacgatcaagctagctagtggtacatgtacgtccgtacggtgccttactagctactccctctgtttcacgatgtagaaatgctagaatgacttacatcgtgaaacagattaagtagtaataagaaaatgcatacgtaattgtgtgccctaatttcttatttggtgtacggttgtaatggtgtatatacacactccaaattatttattcaaacatgaata

SEQ ID NO: 91130 - DNA, 358 bp, Oryza sativa
  Clone ID: PAT_MRT4530_89736C.1
ccgcccttttttttgtgtttttttatttatgtggggtccccccggcagatttcatatttgtcaattttttaatggataaaaaaaaatggttttttcaaaccaaataaagttgttacactgtcaaggtaccggggaagcggggacaagcacaaaacggtgggactgattgtgccattttggggggggggggtttaaggcgaacccaaaaaaagggtggtgggatgggacaataaaaaaaagccgtcaacttcacttggaaaaggggtaaggggggcaaaaggttattaccagccttcttaaggtggacgagaaaaaagggcgctgcataattgttggcagatcaccgggactaaacagc

SEQ ID NO: 91131 - DNA, 665 bp, Oryza sativa
  unsure (1)..(665): unsure at all n locations
  Clone ID: PAT_MRT4530_89737C.1
tttttttttttttactgataaattcgactgcataaaaccttggaaagcaatacagcaccaacaagataggttggtttttacatcatatcatatcgattgtttggcatccacattcctaagatcggaaacaattgcatacagaatctgattgctgatacacgctaaattaagagggtgataatgggcaagagatcttgccatctttacaacaattgagtaattttacaatttgtttttccttatcacttgttatagtgattgactggcatgagaggacttctaggagtacgtgtcccttgatccacatatcgctttcctttgtccacttcatccaaattgttctctgatctgaatttcaccaccaaatctggtacaggggttctcaattgctcgattgattctaaactgtacgcattagtcattagctcccctggacgacgccgaactggactattcgccttataatccctttcaagacatttggctgtcatgcttcttatagattcggtgccttgactgtgttttgtgtctaacatttccacgtgccctgaggaagtggcaaacacagtttctattctcantctactttcantaatcgcgcaagtggagaatccttgacagcagtcaacatgtcagatgtaatngcggcaaactttgcatcattc

SEQ ID NO: 91132 - DNA, 487 bp, Oryza sativa
  Clone ID: PAT_MRT4530_89738C.1
tctcgggcctcgtcgccggcggcgaaacaacctcgcgggctgcgcggcgccgccgcgaggccattgactccgacgaggactagctgtccacctcggcagcaacgccactactaccaagtggaggagtagtagtactccaccaagtcgcctctcccctctcccatctcgccaccaccactacgcccaaaaatggcgagttccagatgccgcgtggcctacgtcgtcctcgcggcgctcgcggcggcgccgttcctgctgctcctcctctacggcggcgggtccccgtccgcgctctgcctcgccgccgtacgctccggcggagcgtcgcgccggctccagtacccgtctgttgccgtggtcgctgcgtgccccctcttccggtgctcccgtcctcgccgctcccgtcgctgcgcgcctcagggtggatcatcttcgccgggggtggcccaccacccgggccaccgtccgttgccccgggtccccgggt

SEQ ID NO: 91133 - DNA, 1771 bp, Oryza sativa
  Clone ID: PAT_MRT4530_89739C.1
cgacacgacagatcggcatcggcgggcagggtagagtgagatggccgccgccaccgccgcggtttttgcgctgttgatggcgtcggcgctcgctggggctgcggccggcggcgacatcgttcaccacgacgacgaggcccccaagattccaggatgctccaacgacttcatcctggttgggctgctttccaatcaccacgacgacgaggcccccaagattccaggatgctccaacgacttcatcctggtcaaagtgcaaagttgggtcaacggcaaagaggatgatgagtatgttggtgttggtgctcggtttggcccgcagatagtgtccaatgagaaacatgcaaatcgaactagacttatgttggcagatcctattgattgttgcacttctccaaaagaaaaggtttctggagatattcttctagtccaaagagggaaatgcaagttcacgaaaaaatgcaagttcacgaaaaaagcaaagtttgcagaagctgctggtgcttctggtataataatcataaaccatgtccatgagctgtacaagatggtctgtgaaaagaatgaaacagatcttgatataaatatacctgcagttcttcttccaagagatgctggcttcgctttacatacggttcttaccagtggtaactcagtttctgtgcagcaatactctccagatcgtcctgtagttgatactgcagaggtattcctttggcttatggctgttggtactgtcctttgtgcatcatactggtccgcatggagtgctagagaagcactttgtgaacaagagaagctcctcaagggcctgcaaacatgcctagtggctctattatcaaggtggtttagagctgcttcagaatccttttttaaagtgccattctttggagctgtttcataccttactcttgcagtttccccattttgcattgtatttgctgttctttgggctgttcaccgtcatttcacctatgcctggattggacaagatatccttggtattgcactgataattactgttatccaaattgttagagtacctaacctcaaggtgggttcagttctcctcagctgtgccttcttttatgacatcttctgggtgtttgtctccaagagatggtttcatgagagcgtgatgatcgtggtagctcgtggtgacaagactgatgaagacggcgtccccatgttactaaaaattccacgaatgtttgatccatggggaggatacagcatcattggattcggtgacatccttctacctgggctgttagttgcatttgcattaagatatgattgggctgccaagaaaagcttgcaaactggttactttttgtggtcaatggtggcctatggttctggtgcgctgatatcacttgggtggaaaagaggagaactgtggaacctatggtccaaaggggagccagagagagtatgccctcatcacatgcatatgcagcctcagccgaagacgcccccactagtccagtagatccgtcatcttgttaattagtactgtagctatccgtcaccatctgcatccctttcgcgtccgcccacgcgtccggtaaaaaatcgtctcctgcatgttcttaattagtaagtattaatctcaatgagttggtcgtttgctgcttctctatagtgaaagatgtttttggttcgataaactagtcatgagtagaattctctgtaatttacaactacagaagagaagggaactatatatgcaagcttatggttgataggaaaatgtttatcggttttttct

SEQ ID NO: 91134 - DNA, 528 bp, Oryza sativa
  Clone ID: PAT_MRT4530_8973C.1
atggcatttgggaatacgccattcaagaggatggcaaatagtccaaaatccccaccaagtccgaatcgctgccgcaaacatcgccgacctcacgacgaatggccgctacaaccatcgccgagttctccggcgaatggcatcctgccaatgccccgccgtcgcatcgaggctgcctcgcaccaaggccgccgtgcccgtcgtcacagcaaggccgccgcgcccgtcgtcgcatcaaggccgccgcgcccgccgtcgccccaaggccgcctcgcccgctgtcgccccaaggccgccttgcttgccgtcgccgatgaaactccgatagccggccttccgccgttcaactcgaccaatccgccttgccgttcaacaccgctgtacggttccctcgccgatttagggttaagctttccccctcacacgataacagatgacgcacgcgaaattacaaagttaccctcccacccacggtaccgcgtcaaacagaaggagcggtaccatgaggtaccgacgaatcctgtccattag

SEQ ID NO: 91135 - DNA, 243 bp, Oryza sativa
  Clone ID: PAT_MRT4530_89740C.1
ttttaaataaaaagggcataaagccaaaaaataatgtacagggatcaatctcatcaatctcagagtaggaactctaataacatgagcaaccatcaaatgcttaacactatcacgaggaatgctaaaatctgagtttcattccttttcctttccttttccttttggcttccgagtcgagaaattcccctagcttttctttttttctatcgttgaccctgcgcgtacatttacgaatttaccttc

SEQ ID NO: 91136 - DNA, 700 bp, Oryza sativa
  Clone ID: PAT_MRT4530_89741C.1
cccacgcgtccgcggacgcgtgggtttgcatatgcagggcctgcaaacatgcctagtggctctattatcaaggtggtttagagctgcttcagaatccttttttaaagtgccattctttggagctgtttcataccttactcttgcagtttccccattttgcattgtatttgctgttctttgggctgttcaccgtcatttcacctatgcctggattggacaagatatccttgtgcgtgcaactagctgtagacctgtagtattttaaatgagttctaatgtaaccaactgctacatcaattgacatcagggctttgtattgtcagggtattgcactgataattactgttatccaaattgttagagtacctaacctcaaggtgggttcagttctcctcagctgtgccttcttttatgacatcttctgggtgtttgtctccaagagatggtttcatgagagcgtgatgatcgtgctcgtggtgacaagactgatgaagacggcgtccccatgttactaaaaattccacgaatgtttgatccatggggaggatacagcatcattggattcggtgacatccttctaccttggctgttagttgcatttgcattaagatatgattgggctgccagaaaagcttgcaaactggttactttttgtggtcaatggtggcctatggttctggactccttattacatatgtcg

SEQ ID NO: 91137 - DNA, 1127 bp, Oryza sativa
  Clone ID: PAT_MRT4530_89742C.1
gccttggtcctctaacttcgtcttcagctcagaagcactacacttctaaaaaagaggaaataatagtaagactgagtacaaccaccatactcagtaagccacaccaacgatgcatatgtgcaaggagagacaaaggaaggttgtggctatttgcataaaggcagttgtaaaatatttatagttgcaaacagtaaaacagttaattaattaaggcaagattaaatttccactgaacaacgctacaccacgttgaacaggcccaaccaaaccacctgaacacacgtcaccatgtcgagtgattgtgacaagacccttcgcataaccctcccctaaccatccacaccacactgaggtttcacccccaccactaaaccggtagtgggcagtccccccgtgcgtcgcggtgaatccggaagctggacaaccggacaccccggtcgacccaactccatcacgcccaccctcaccaccagtgctcctgcatgtggtaagcattgtatgtcttccagggtttcccgcgaaccggtccttaattgccatgggcacgactagcaaaaccatgcacccacagcccaccatgaagtcacattttagttggataattacgacgatgaagcatggccagatgtctcgagcacgcagctcattctgatactaaaaaggtctaatattgtaattatcccatcaactaagctagtggtgggaagggcgccgacaggtgggccccacatggcagtgactctgggagggcggtccacggcggaccgggtccacagaccggggaggagcggcgcaccacacggcagccgaaccgatggccccgatctacccggtagatcggacggcggcgggagctcgcggccggcgtgcgcgggcacggcgcaaaccggcccggcggccatggcgcacgacggcacggcgcgcatgcggcagcggcgcgagacggcggccggcgacggagagcggcggcgtcgcggcgaagcggcggctacgcggctaagcagcggcgcgacggctaaacggtgcgggagagagagaggaagaggaggagaggcatcaccgacgacgatcgatgacggcgagcgacggaggacgatggcgacggcgggacgagctccggaacctcc

SEQ ID NO: 91138 - DNA, 417 bp, Oryza sativa
  Clone ID: PAT_MRT4530_89743C.1
atggtgttcctccatgagggaaggggcaacagtgccggggacgagcgggaagaggaagagcccaagttgccaacgactgatgcaatgtcaaggaatcttccatcagttgagtttggcaatataacggaaattccaaaggcatcaaagcttcgtcaactaaaggttttgctgccacgcaagaatgcagcctttgctgacgtggcgctgatgacccgccagtcgaagcgcctcgtcacgcacgtatgccgcgtgccttcagttaacgcgcgtgttgggctcgggctcggctccgcccgcgagggcgacaggccggagcggaggacgccctcgcgcggtcgcgcccacttcgggtgggcgcgcgttggcagctcagctcacggccaatctgaaaatacacaacacaaacacaacacatga

SEQ ID NO: 91139 - DNA, 472 bp, Oryza sativa
  Clone ID: PAT_MRT4530_89744C.1
ggaattcggcacgaggctccatctgactgctcgaccagcagcaataggctctggtttcctcttcttgcaagttgcatgctccctagtccctagacttgaacagttgagcccttcctgattttgtggttctagaccacctctggcttgcagcgagaagcaacgttcgctcgcatgacgttccagctccaagattaggggggggtcgccgatgtcggaggctgtctgccgcgcgccgccctgcggttgcggcccgtcccgggggttggtccccgccggcggcccgcgccggcggccggggcgcgtcggcgccctggtcgttactacctctttcgatgcgaaaagtatgccaatttggccgtacattacgccaagttgtgctcttgctctgatgttgatcggtcccctacgaaccaagggataagagttttgcttccttttgtccctccactgtgtttgcgatcggtgtggcgct

SEQ ID NO: 91140 - DNA, 174 bp, Oryza sativa
  Clone ID: PAT_MRT4530_89745C.1
atggaggtgcaagcctccaggcgatggcgaagtagccgtccaccacggggacgacgccacccggtggcggcgaaggtggccggcgtggaggcagctggcgtggaggtgcaagccttcaggtggcgacgaaatagccatcctgcatggagacgacgtcacccggcagcggcgtag

SEQ ID NO: 91141 - DNA, 921 bp, Oryza sativa
  Clone ID: PAT_MRT4530_89746C.1
atggtcggcgcagtgacagagggggagagaggtggccggcagcgggagagggagagagagacggtcgacgtgatagcggcggcgggagaggaggagaggtggcggccggcgcgacggcgagctcggtggtggagatgttctaacgcgccgggtgctcgaccacgggccccgccgccgcctgccgacaagcggcgcgctctccccatcgaccctctctccctccccaaggcggtggggctgctccgctgccgaaagagctgctgcctccactggatgaactacctcagccccgacctcaagcgcggcaacttcaccgacgacgacgacgagctcaccatcaagctccacgcccttcttggcaacaagtggaacacgcacatcaagcgcaagctcttgagccagggcatcgatccgcagacgcatcagccggttagcgccgggaccagcgttgccgcggcaagcgagctgactacgacggccatcactgtcggcttcccgtccctggcgtcgtcgctagtggcggaggggtctctggcggaggccgagtcagcgacggaggtgagctcgagctccgtgtcgaggagcgccgcgaagtcgtcgttgccggtcgatggcgacggggaggacagcgacttggcggtgaggcttacggccgagggcaaagggcgtgctttggttggctggggtggggtggatgcgcctccgtgctcgcccaccaccgctctgctgctccacccgtcgccgcgctcgcccatcgcctcttcgctgccgcactcgccctctgcttctctgcccgcggccgctctcgcccgtcgccgcgctcgcgctcacacccgccgctccgctaccgcgctcgccctctgctgcgccacccgcatctgcgcgctgctccgcctgccgccggcctccctcactgaataa

SEQ ID NO: 91142 - DNA, 356 bp, Oryza sativa
  Clone ID: PAT_MRT4530_89747C.1
caataaatcacggctcaatctgccactctgattcatcatctcattgcctcgaggcctgctgctgctgctagtagtagtagtacattcatttgaactgcctaccaattttgaaagcacccaaagtgccaagtgtcctttccttatctctttcgttgctggcctcatccatttggccaccaaaagaatcctaaaatggtctctccaaaaaagaaaaacagaaacctacccgtacccttcagaaaaatgccaaaaaggggaaagaggagactcttcgacgcgttggcctcccgggggggggaggagtgatcccacccgcgccatgtgaggaggaagcctaacggcgtgcttgatccacg

SEQ ID NO: 91143 - DNA, 3831 bp, Oryza sativa
  Clone ID: PAT_MRT4530_89748C.1
atgcgtcgccgcgttcgctggctccctccccactgcggcaccggccggcctgcagccgcagcgctgccacgtggccggcacgacgcgagagctgacacagcctacaaagcaaccggattgcacagcctgctaaacaatgaagccaatcaccatgatttcgattctaagagatcagtttctccattttcaacggctggatttttcagcaagatgttgttttggtggatgaatcccttgattaagaagggttatgagaagcctcttgaagagacagacatacctgctttgggtattgaggatgaagcaggcacacaatactcaatgttcatgaacaaaatcgatgccagtaaatcatctcttttctggataattgtttcgtgctacaagagggagattcttgtttctgggttctttgcattgctcaaggtgcttactctgtctgctggtccattattcctgaaggagttcatcaatgtgtcttcaggaaaagaagctttcaagcatgaaggctttgtcatagttcttggacttcttttctccaaatgcctagaatcactagcccagagacagtggtattttcgcacgcgaagagtgggtgttcaagtgagatcactcttgtcagctgcgatttatcgaaagcaacataaattgtcatgctctgccagcacagagcattcttctggggagataatgaactatctcatggtggacacctacaggattggggaattccctttctggttccatcgtacatggactacaggactccagctttgtattgccttgatggtactgtataatgctgtcggtcctgcaacagtagcatctgtttttgttatagtgctgactgtgatgttgaatgcccctctagccaagcaattgcaaaacatccaaagtaaactcatggaagctcaagatatgaggttgaaaactatgtccgagtcactcacaaacatgaaggtcttgaagctttatgcatgggagaaccatttcaagggtgttatagaacaattgagggagttggagctaaagtggttgtcagcattccagctgggaaaagcgtatactagtgttcttttctgggcatcacctgcacttgtttcagctgcaacatttctagcatgctactttctaggagtcccacttgatcccagcaacgtgttcacctttgtagctgcactgcgtctcgtgcaggatcctatcaatcatattccaaatgtcatcgggtctgtaatccaagcaagggctgccttcaatcggttaaacgaatttcttggtgcatctgagctacaaaaggatcaagtttcgatggagtattctgcacatagccagtatcctatagcaatcaaatctggctgtttctcatgggatagctctgaaaattataatctgaggaatattaatttgatggtgaaatcagggacaaaggtagcaatctgtggtgaggttggttctggaaaatcgtctcttttggcagctattctgggagaagtcccaaggacagatggagtgattcaagtttctggtaaaatagcatatgtttctcagaatgcatggatccaaacaggatctgtgaaggacaatatactttttggttctaccatggacaagccaagatatgaagagactcttaagttttgttcactggtgcatgaccttgaaattttgccctttggtgaccttactcaaatcggggaaagaggagcaaatcttagtggagggcagaagcaacgcattcaattagctcgtgcattgtatcacgatgcggatatttatcttttagatgaccctttcagctctgtcgatgcacatacagctacaagtctttttaatgaatatgtgatgggagctttgtcggaaaagacggttctgctagtaacacatcaagtggagttcttgcatgcatttgattctgttctattaatgtcccaaggacagattatgcatgctgcttcttaccaagagctcctattatcttccagagaattccagaaccttgtgaatgcacataaagatattgtcaactttccaaacgataacatggtggactacaatggagataagagccccttcaaaagggagactgctgttgttcttgatggggggaaagaatccatcaagaatgcagaatttgatcaactaattaggagagaagagagggaaattggtggcactggtctgaagccttatttgatgtatttgggccagaataagggctacatatatgctactcttgtagctatagctaacattgcattcacatctggacaattagcacagaactcatggcttgcagccaatattcaaaatcccggtgtaagcacatttaatctggttcaggtgtatacggccattggaattggttcaatcatgttcttactatttagagctctgttggcagttgatctaggtcttcagacatcaaggtctttattttcccaactacttactgccctatttcgtgcaccaatgtctttctttcattccactccaattggaaggatacttagccgtgtatcttctgacttaaatgtaatcgatcttgatgtcccgtttactttatctttcagtattagtgccacacttaatgcttatatcaatttgggtgttttatgtttctttacctggccaattttgtttattgctgcacccataatcattatggccgtcagattgcagagatactattcagcctcttcaaaagaattgatgcggatcaatggcactacaaaatctcttgttgccaatcaccttgcagaatcaatttcaggagcagttacagtaagagcctttaagcaagaaggtcgtttttttgctagatttttggagcttattgacaataatgcaagcccatcatttcattgtttcgctgcaactgaatggttgactcaacgtttggagataatggctactactattctttcatcatctgctttcgtcatcactcttcttccccagggaacattaagtcccggtgttgcagggatggtgctttcttatggtctttcactaaacatgttattccttttctccattcaaaatcagtgttcccttgcaaaccaaataatttctgttgaaaggataagccaatacatggatattgttaaatatactcaagatgcttctccagtactgaaaggaatttcttgcacatttcaaggcggggataaaattgggatagttggtcgaacaggaagtggaaagacaactttgataaatgcaattttccggcttgtcgagccttctggaggaaagataaccattgatggtcaagacattacaacaatgggcttacatgacttacgatctcgaattggtcttattcctcaagatcctatacttttcaatggttccataagatacaatttggatcctcatgggcatttctcggacaaacaaatctgggaagttctaggaaaatgtcaacttgatgaagtaattaatgagaagaaagggttggattcacttgttgtggaaggaggatcaaactggagcatgggccaaaggcagctactttgcttgggccgtgccctcctgcgacgaagccgcatcttgatccttgacgaggctacagcatcaatggacaatgcaactgatgctgtcattcagaaaaccgtcaggacagaattaaaagacagcacaatcatcacaatcgcgcatcggattccaacagtgatggactgcaccagggtacttgttgtcaatgatggggaaatggtcgagtatgaagagccccagaaactgatgcagactgaaggatcctttttcaaggaactcctcaatgaatacaggctgcagatatcaagagcaggcttgcagatttcctcctga

SEQ ID NO: 91144 - DNA, 338 bp, Oryza sativa
  Clone ID: PAT_MRT4530_89749C.1
gaaaaaaacaggagcaacgtttgcaacaccagactcagcaacattggaattcaaaggatgaaacggggtgttccagtgtaacggggaatttaaacaaattacaaatcggggcaccaaacatagcaacgtttcaacgaatgtcccaccccccccccaaaaccaaagctaaaagagtccataattatttgggtttgcacaaaaaatttaaattgtaaacgcactagccgtttattattaacgtgagatttggctttggtttctttttaggaaagcgtcctttttaaggcccttgaggaccttatcctggttgttcaatttggccacctcattgggggttt

SEQ ID NO: 91145 - DNA, 276 bp, Oryza sativa
  Clone ID: PAT_MRT4530_8974C.1
atggggagcgggattgacgtcaaggggtgggacttcgagctgctgccatttggctccggctggcagatgtgccccgggtacagcctcggtctcaaagtcatccagctcaccctcgccaacctgctgcacgccttctcctggagcctccccgatggagtggctgctggcgagctgagcatggaggagatcatcgggctcaccacgccacggaagatccctctcctccccatcgtcaagaccaggctgccggacaatctctatgccgagccattatga

SEQ ID NO: 91146 - DNA, 482 bp, Oryza sativa
  Clone ID: PAT_MRT4530_89750C.1
tgcccatcaggtgtcagctgtaattactggagaattctacactagagatcaatcccctggatttggaaggccctttgtgttcaacgcagagatattaaaaaggtatcggactaatggtgtacatggaacagtataattctgtgtttttctcatctagcaatagcatcttttagctgaatgattgtatttttctgtcaataggctatcactatgtagttatgctacatatgaacatgtattttatactgcttatcagttgcaaaatatgaggaatttgttctcaggcaattctacattgtctggccattccactgcgagcacctgctgtaaacctggtcttgcatgtctttagttatggctgcttagactgacaagtctttgcgcaaaatgtcgatgcacaccatgtaattctgatgagatttctctattgagcaatctttatgtatggcgtcaaaatcagaaagtcggaaagttttctaaca

SEQ ID NO: 91147 - DNA, 510 bp, Oryza sativa
  Clone ID: PAT_MRT4530_89751C.1
accgtgaaagcgggcctatcgatcctctcgaggtgggtacttcacgccagaggtgtcaagaaaagttaccaccagggataactggcttgtgccagcccaagcgttcgtagcgacgttgctttttgatccttcgatgtcggctcttcctatcattgcgaagcagaattcgccaagtgttggattgttcacccactaatagggaacgtgagctgggtttagaccgtcgtgagacaggttagttttaccctactgtttttagtatcttaatagtaattcaatttagtacgagaggaaccgttgattcaagtatatacgaaaggggctggtggaaacaccattaccccgatggcacgcttgctgggttatggctgaacgcctctaagtcagaacccactctagaaagggtacacaagacctgaatggtgtgttaacacgataaacaattgataaccggccaagtccgactggggtcgctacccgggaggatagaacccaaaaaaaaaaaaaaaa

SEQ ID NO: 91148 - DNA, 413 bp, Oryza sativa
  Clone ID: PAT_MRT4530_89752C.1
ccccacaaaccctaactgatcgagagggggcgcagccagtgacgggaaacgccaccgccgcgccacgcctcatcaggcaacggcagcgagcagcaaggattggtgacaggcacaagcccttgtgcaacggcttgtggatgaatcatcgtccgacgatgatgattttctttggggggcgcaacactaaacctgcatcgctattgacactttgatgatgcaccaaaacactgtgtgtctatgatgggacatgaagtggttgatcgcaaaagaagaagcacgtcaattgagattataccaagaccatttttctgataatcctacctatagcccagttttattcaggcacaggtttgtattaagccaatttaatttgatctatctttattatatgaatagatacgtatgccttatta

SEQ ID NO: 91149 - DNA, 883 bp, Oryza sativa
  Clone ID: PAT_MRT4530_89753C.1
atgtctgatgtttttctatttgctaatcggattcctaatttcctgcggcgattatttgctgaaggcgctttttcaaaagcatttgtgccagtgttagcagaatataatgctgataatgatttagataagactcgagaatttattgcgaaagtttcaagaaccttagggcttttagtaacggtggttactttagttgccatgttgatttcaccaataattgctgcgttatttgggaccggttggtttattgattggtttaatgatggcccagatgcacaaaaatttacgcaagcgtcattgctacttaagattacttttccttatttgtggtttatcactttcattgccctttcaggagccgtgttaaatacaatagggaagtttggtgtaatggcattttcaccagtattactcaatgtggctatgatcagcatggcattatttggcgcagattattttgaacagccagatattgcattagcttggggaatttttctaggcggtttattgcaatttttatttcaaattccgtttatgataaaagaaaggttattggttaaacccaagtgggcttggaaagatgaaggtgtgacaaaagtacgccgtttgatgattcccgcattgtttggtgtatccgtcactcagattaacttactattaaaccaagtgatcgccagtttcttagtgaccggatcaattacttggctttattactctgatcgtctaattgaatttccattaggattatttgggattgccatttcgacggtcgtattgcctaatctttcacgtattacgaagaaaaaagcattaaatgaagaacaacgtgcaatagcatttaagcaaacattagattggggcgtccgtatggttgtggcgttag

SEQ ID NO: 91150 - DNA, 453 bp, Oryza sativa
  Clone ID: PAT_MRT4530_89754C.1
aataacctcgcgatcgcgcagaggcaaaggcagatcgagcatgtcggcgttggcggtgggagacgcggacggcggcgtggtctcgccgggaggagggctgcaggcaagtccgaccgtggtggtcgacggcgacgtcgtcctgtccggcgtcgtcctcgtcctcgtcgccctcgcgttcgtcttcgtcatgcaccactttctcgccgcgatgcgccgccgcgacagcgacgcgggtcgtcgtggcgtcgagtggcgccacgcgcgccgtgcgtgatggtgcgtcgtcgataatgcgcaagctgcgcaggcggtgaccgcgtctgggcctgcgtacggcaagcgagcggcgcgccgcgtgatgcggtctggaggagacgaggcgtctgcagcgcagtcagcaggctatggtgtcacactgcgttgcctcgggcacccgcgccctccgtgttcttg

SEQ ID NO: 91151 - DNA, 438 bp, Oryza sativa
  Clone ID: PAT_MRT4530_89755C.1
atgaaaaaacctttttttaaggggggctttcaatattgtacagtgatgggacacgtttttcaaaaaaatggggcttaaaattcccccaaagcaacccctcctatgaaacaacctacccaaatcatcagagggacaaaaaaaaaaatccccccaagagcgaaaaaaaaaaaatcccctaattgccatccccaacctggccttaggggcaaaaaccccgcttagcagatcccaacctttaacccaaaaaaaccacctgcttttaaaaactaaggtatccaactgaaaaacgaaaaaacagttttaattggatagtcccaatgaatgctccccatgcttccaaaaaaaaacaacaccttttacgggacttcctgtttaaaccgttcaggaagcaagccaaatgaacccgacgatggcccaggcatagagcgccctataagg

SEQ ID NO: 91152 - DNA, 1518 bp, Oryza sativa
  Clone ID: PAT_MRT4530_89756C.1
atggctaataagactcttcgcgagttcgctgctccctctgctaacaatgtggccattaggccgcaggtcaacataggggacgtggatttcgacttgaagtccagcctcatcacgatagcgcaggctagcccattctgtggcaagcctaatgaggatgccaatgctcatctacaacagttcctggagatctacagcacgtataccatcaagggtgtcagtcctgacgccgtcaggctacgactgtttctgttctcccttctcgggagagcgaagcagtggttctatgccaaccatgctgctgtcaacacctgggataagtgctctacggcattcctcttgaaattcttcccgatgggcaaaaccaatgcccttcgtggaaggatttccagtttccagcagacaagatatgagtccattcctgaagcatgggagcgtctgcaagaaacttataatggactcaccccgatgtcccgcgatcagctggacacggcagttggaggagctttcttctctaaaacgattcaaggagccattgatctaatagagaagatggtctccaatatgggttggagcgaggaacgactccaaacccgacagcgaggcatgcacaccatcaaagagacggaattacttgccattaagctggacctcctcatgaaacgcttggacgaccacgagaaatggccacaaggcaccatcaaggccttggactctcacgtcacgaaaccatcagtggacgagcaattcgctcgttttgttgaagtcatccagaagatccacatcaacatgccgttgttggatgccatgcaagtgcccacatacaccctttatctcaaggacatactcaacaacaagagaccgctcccaacaacagagttcgaccaggccttgtgcgaccttggagccagtgtcagcgtcatgccaaaagacgtctttgacaagctcaacttcacggtgttggcaccaacaccaatgcgccttcaactggctgattcatcagtccgtaacccgacagggatagtggagaatgtgccagtcaagatacgggatttctccatctcggttgattttgtggtgctggacatgaatacagggaaagagacgccgctcatcctggggcgtccgtttcttagcaccgcaggagccaacattgacatgggaacggggagtatccgtttccatatcaacgggaaggaggaaaagtttgagtttcaaccaaggacggaacaatgctccatgcctggtgaaattcatgcaaaatttcctggagaaggaaacaacgatgcccaggaaccgttattggaaaacgccggtaaaaccacccataccggccaagaagctagagcagccggctcagaagaagctgtcttccgcaccaaagccaaggaaggtgtggaaggagaagccaaagacgcccgctccatcaccttcggagatgggtggaatatccacgaactgaatcagaaggaggtacggtcttgcacgtcggaatttaaacgacgcgaccttcgccaatag

SEQ ID NO: 91153 - DNA, 192 bp, Oryza sativa
  Clone ID: PAT_MRT4530_89757C.1
atggcgccgggcgccctgtggtgttggtgttcagagggggcgcaaagcggaatgtcgcccagcccacaagacaagagtgccgatgtggagttcatgcatggtgtggtcgacatggatcagaactggagcctggagctgcctcctgccgggcgaccggttgctcgcggttccactgcagatgataaatcatga

SEQ ID NO: 91154 - DNA, 565 bp, Oryza sativa
  Clone ID: PAT_MRT4530_89758C.1
ggcaaaaaactggggggtgggaaaatttcgctggccccgtccttttccccggaaaagcgggaaaaaaaggccccggggggggggggggaaaaacccccaagggggttaccccccccaaaaagggaaacccggggaaattttgggggcgaaccctttttaacaatgggaccgccccaaaaaccccgttccccttccaagaaaggaacaagtcccataaaaacccgggggacaaagctttccccctcccggttctggaaaaacaacccccccccgcctcctgggcctggggggggaacccgtcccccggggcccccccccgatgggaacccccccccagggaacccagggaatcttttcccccggctttggggggggcgggaaacccgggcttcactcgggcccttttagggggccggcccccttggatggcccccaccggggcggggggggggtccccaatccccagcccccatcctttttcctggggcttgggaaaccggggggccgggccgggcccccccccaaatggcagcgggtctgccatttggcgctttaggggccccgg

SEQ ID NO: 91155 - DNA, 904 bp, Oryza sativa
  Clone ID: PAT_MRT4530_89759C.1
atggaggcgaagcgggtggctggcagcgggaggcagagctcgcccgcgcaggttcccgtgcaggttaaggcgacggaggagcgctgtcgttgtgtgttgctgccttgtcgtcataaaacaagcttctcttccctcaccttttgcgtggccttgcctgcccttgttcacctcacctcagctacgtctctctaactttgatctcgtcgtcccgagttcaccggacacgcccacgtccaccacggcggcgatggagggcgccgtgctctgcgccgccaaccacgcgccgctcacccccatcaccttcctcgaccgggccgccctcgtctaccccgaccgccccgccatcgtcgcctcctcctctggactcacgcgcacctggcgggagacgcgagaccgctgcctccgcctcgccgcctccctcgccgccctcgacgtccaccgccaccacgtggtcgcggtgttcgcgtagaatattccagtgatgtgcgagctccacttcggcatcccaatggccggcgccatcatctgcacgctcaactcccgcctcgacgcttcccggcgccctccgccgtcggctcccgccctcgcgtggccgccacattggtggggtccactgacgtacagagggagacattgggatagagtagagagatagagaggggtgaagaactgacaggtggggtccactgattcttttttaaaaaaatactgactggactgccacgtgaatccaaaaccaccccgaattgaattagagggattatttgtccggtttcaatagttgagggtgtagaatgtctggattttgagttcgagagtataattcgatcgacctcaataattcggaggataattaaaaaaaaaaaaaaaaaaaaaaaaaaaaaaaaaaaaaaaaaaaaaaaaa

SEQ ID NO: 91156 - DNA, 606 bp, Oryza sativa
  Clone ID: PAT_MRT4530_8975C.1
gggggaaaaaaccaaaaaaattttccccaggaaaataacccccccccggtttaaaaaaccaaaccgagattttttccccccccccccccggaccccaagggggaaagggaaacccgggccccccttaggggccccccccccctgccgaagccgcccaaaaggggcaaacccaggcccattttttccccccaaaccccccccaattggggggggaaaaaaacccaaaaagaacccgggcaaccccggggggggcccccccccaaggacccaaggccggggccccgggttttttcccaacaaccccgggccgggcccctgaagaaaaccatattcccccccccccccaaaaacaagccggtaaaaggcccccaaaccaggggttcccacaacccaaaattcccccgggggcccctaaaaaaacccaaaaaaaaaattccggggatccccctcccaccctttaaaaaaaggattccccccccggggccaaaaccccccggccctttagaagacccccaaggggcccttttttagggccccccccccaaacgggagaacatccccgggccccgggcccgggaggcccaccggggaggcgggggggggcct

SEQ ID NO: 91157 - DNA, 462 bp, Oryza sativa
  Clone ID: PAT_MRT4530_89760C.1
ctagtgtacgtgtgtcaaagaaggcacccaagagaaggatgctgcattacaaatgtgcagttcaagacacaaccctaactgctcatggctaagcaccccttgccaggaaacgacgttccatcgttccgatgcgtctctccaaactgagtgtttctacgcaaaatgcatatcgcatctcacagagaagaggcctcagaggctcagagcactaacagaggagactgagtctcgggtgcaattcactcccctccaaatacacagagctaccaagacaggtttataactgatggcggaatcctcttaaggttggccatccagataagagaatagacctaatataaataaatcaaataaattgcaaccaattgcttcctctatgtactgtaaaatttcttataatatcattctgaatctcaaggacatccctcaagatggtccttctaaaaaaaaaaaaaaaaaaaa

SEQ ID NO: 91158 - DNA, 1634 bp, Oryza sativa
  Clone ID: PAT_MRT4530_89761C.1
cccccccctttttttttttttttccgggctgctggtttcggctctgcgggcctcctctcttttttttttttttttttttttttttttttttggtactaatactcttgcactttgtattagcagtggcaaaatgatacatctcagtgagtatcaatacaaaattttgatgatttagcagggcacccagcactaacaaaatgggcataatacagcaatttcatgttcctcctgaattcgccacacacgcagcattccctccagttcattctttctgaaggctgatcatcatgtaaacgatggcaagaatggtaaactgtgagcgactcgcaaaattgaagcgatcactcgtcatctgaatcgttgaacttgatcgagtgggtttgtaaatcgatctgcccacccctgtaggttccacgcttcttcttggtcttctcatgtctaaagccccttcctctaacttgcccaagaacctcttgtgcctttgcaccatacccagagtctgcaccacccttagcccaatatgagttatcctgaagcctatcatcagcaaatttaacatcctctagtttcacccgttgaaatgcattcacagttttgggttcagatgattttttctgccttttattcggtttggcaccatcatcctctgaagaaccattgctgagcttctggctagctgtgttatcttctttagcagggaggttgcttccttcgacttcttctagtttccgctttttgccaactaccgcattatcacttggaggcattccattttcccccttctcagtctccattccactattgttctcatcatttgatttaggagctgaatctttccctgcaacttctttgttttcaaccacctcaacgttttccttggacttcttcagcttctttttacttttcttttcattgttgtctttctccatctctgcagcatcaccctttcccttggcacaatcagccccagcatctgtacttcctgtgtcaaccttatctgatgtctcaggagttgattttcctttcttctttttcttccctttctccacaggagcaacatcaaccaaaccattcttgctatcctccttcaatgtgtccacggtctcaaatttgttaatgatagccgattctgccttttccagcctagcttcgacatcctcgtcgttttcttgtttcttgcttttcttcttctgtttcttttctttggtctcgacatccgcattttcactgggcttttccacggcagaaggctcagccaccttgttctcagcttcactcactttcgtgtcactgcctttctttttcttcttcttgccagcatcttccgcgacaacggcggctgttttctcgtgctcgatactcccattgatgctggctcctggagcataattgctcgagtcctccaagaatccggaaaccaactcttccaggctcaccggcgacgaccgccaagaacccgcctcgaggttggcctcggactggagcgcggcgagcgcgcgggggaagccgctggactcgaggaaggcggcgaccgcggccaccacggcggccctcctcgcgtcggggacggcggcggcggaggacgccgccttggtcttggccttcttctccttcctcgactcctccttggccat

SEQ ID NO: 91159 - DNA, 272 bp, Oryza sativa
  unsure (1)..(272): unsure at all n locations
  Clone ID: PAT_MRT4530_89762C.1
gcgtccacgcgtccgcccaatatntgagttattacgcgtgcaagggagccttcgcgaaagcctgagctggcagctaatcgggtaaagagccttgtgccaaaggcactgaggtcatgttnttcagcagatgctccaataaatagggatttagacattgaatctacagttgcaggagcatgatcacaaatacatcccacacgaaaagagctgcggaatgtataccctatcgaacctgccaacaataaaggccgggtagagctgcagaggtacaa

SEQ ID NO: 91160 - DNA, 756 bp, Oryza sativa
  Clone ID: PAT_MRT4530_89763C.1
cactcactgacaccaacgctgctgccgccgccgccgtcgaagccgatcacgagctctcccgttccggcgagcagcggcgcgttctcgccgccgccgttcatggagccttcgaccgcgcagggaacatcggtggcgccggtgccatggcagaggctgggccaagagccgcgccagcgggacgggcggtggcgcgcacggtgcgcgctccagctcgccgccttcgccggcgcgaccgccgccttcgccgccgtggcgtaccgcgtgcgccaccggccccgcgacatcgcgttcctggccgtcacctactggctcgtcgcgctgctgctttgcctcgtcgagaagctcgaggccctgcggctcgacgcgtccccgccggcgagggagaccgagctgcggcgcgtcaggctcggcgtgtgggcggtcgccgtgacgctgggcaacacggtggcgtggcgcgtctgcgacgcgatgccgttcctggcgctgaagctgggcgtgtggggcgtcacgctggtggtactgggcttcgcctactacttcgtcttccgttccaaagccggcgagtgccacgacgaggagcacggccatccctcaagctgacgccggcggcagtcgtccgccgtcggataaagctttccgcgagttgcactggagggctgaacttggtatgatatattactacagaaattattgaacgtgaatgatgaaattatttttctaaacatttttaaatatttgaatgaaatgttttgtttg

SEQ ID NO: 91161 - DNA, 1992 bp, Oryza sativa
  Clone ID: PAT_MRT4530_89764C.1
atggcgcagtacaggcagtcgggcggcttcttcgactaccgcggcggccaccaccacgcgctcccggagtaccaccggcccctcccgcacgcctccaagccgtcccggatccgccgccccgggaagcccgcgcgccgccgctcgccggccgcggccgccgccgtcgcgtccgcgctcctcctcgccggcgtgttcctcctctcgcgccgcctctcccgccaacccgcagagatcagccaagatttgggcggcggcggggaggggttaccggagtggaaccggagcaaggagctcaagttcggccatggcggtggaggccggagcgcgcaggattcgaggtactgggaccgggacgatcggaggcgggacgaggactactcggaggacgagaaggagaagatctcgggtgcaagtggaaataatgccggtgtcagtgataaggttgtgacctctgatcctgctgttgaggagaaagggttgaccatggataccggcggtgccgccgataaggaggctgctgaggtagctgaaggtgggaaaggagggaccttgtacaatgaagggggcaggaaagagctcgagcagtatgaggcggctgcgatgggagctgcgggtactgggatcagggaggttgatccggatgatgagtatgacgatggcattgatgcacaggacgatcttgatgatgctcagtcgcattcatctgatggcgggaggaagcttggcgacagtagtcatgagagcaccgagagtaaggaaaatatagctcatgatagcaccggcaataaggaaagcatcgccttagagagacgcacggaaacaggtgcgggtattagtgatggtgtcgatgttattgatgctgctaatgtgaaccaaaagaaggtttcggcgactggtgataagaaacacgcgtcaaaaaagaaatcaaagcgcaagaagactggttcaacttgtgaaatgaggtttctgaactccactgctcaactcgtagagcctgctaaaaatgagaaatttgctagttttaatttggaatatgtggaagttgaagacaaacctcttggatcagagtattgggagccaagatttgctggccaccagagtttacaagaaagagaggaatcatacttagctcatgaccaacaattaaattgtgcttttgttaagggtcccaatggtacaagcactggttttgatatctcagaggaaaacagaaagtacatgagcaaatgccacattgcagtatcttcctgcatctttggaaattctgatcgtctgaagactccttttgggaaaacaattacaagtctatcaaagaagacagtatgctttgctatgtttttggatgaaatcacattacgaactttggaatctgaaggccaaaaaatggatagttcaggtttcatcggtatatggaagatcatattgattaagaatatgccttataatgacatgcggagagtcggcaaaataccgaaatttctggcacatcgtcttttcccatcatcaaggttctcaatctggttagacagcaaattgcgattacaaaatgatcctatccttatcctagagtattttctttggcggcatggctatgaatatgctatttccaatcattatgatcgacactgtgtttgggaggaagtggcacagaacaaaaagctgaacaagttcaaccatacaataattgatcagcagtttgagttttaccaagcagatggactgacaaagttcaacccatcggatcccaacaagctgctaccaagctatgtccctgaaggttctttcatcgtgagggaacacacaccaatgtccaacttattttcatgcctatggttcaatgaggttgatcgattcacacctcgtgaccagctcagctttgcatatacatatttgaagcttagaagaatgaacccggagaagccatttcgccttaatatgtttaagcttgctgcaattgagcattccttcaacaatgaagaagtgaccatctga

SEQ ID NO: 91162 - DNA, 381 bp, Oryza sativa
  unsure (1)..(381): unsure at all n locations
  Clone ID: PAT_MRT4530_89765C.1
ttcttcgtccaggccatcgtcaccaggcaagggccccatcgagaacctcttcgaccagtcgccgaccccgtcgcacaatacaacgcctgggcatacgccaccaaacttcgtcccccgcaagtgagcacacacgacacgatcgagatggtgccaaaccaaacgtaccatgtgtacacttgtagtagccacgcaccgaccctccaagttcaagtgnccacaggcatgtatgtatgtccttaattggtggtgtgtgttgtgatcgatcgaggagatttcttagcttaattaatttctgtcgtcatcatcttggcttcttgggatcgagattaatgtaacccccagcccncatcccaagggatgattccgaaaaaaaaaaaaaaa

SEQ ID NO: 91163 - DNA, 285 bp, Oryza sativa
  Clone ID: PAT_MRT4530_89766C.1
atggcgaggcagaacggcggcactcgagctcttgcggcggcggatctggtggcggcggggagcagcggtggcgccggcggtgtgctgtcgatgacgcgcgcctactggcccacgaggacgatggtggagatgaggaagacggcgaagcggcgcgagtccggcctccacaccggcggtgggtgcttcgatcggttcttctgcaagatcactgtcagcctgcgagaccaccagcgggagtgccagctcggctcggcttcgacgtggagctgtgagaccacaagttag

SEQ ID NO: 91164 - DNA, 239 bp, Oryza sativa
  Clone ID: PAT_MRT4530_89767C.1
gccaccagacatgtgaaattaagtgacctggtggggtttcattatgaaggggttgcacacgcacatcacttcattctaatgaacctctgactaaaacgtctcgcatagcatgtcactgatggacccggtgaacggaactacctacagtgtctcaagtactcgtacgtgaatgcgttaggaagtttacacacaatcttggggtactccatggaggaccgtatgctgcaagcaaaattgtc

SEQ ID NO: 91165 - DNA, 273 bp, Oryza sativa
  Clone ID: PAT_MRT4530_89768C.1
atgacgccaagtcccggcgaagccaccgctagcttcgtcgtctcctcctatccctcggccacgccttcattgagcttggcaagcctcggagctccatccccgacgtcaacccgagccggcatcatcctcttcctcatcgccgtcgttgtttcctcaccgttccagccgtttggggtgcttggtttcgctagtcgcaccctggccgtcattaggacaggtcttcgaacctccgttgcaaagcatatgctgtacagccacctgtctgatgggtag

SEQ ID NO: 91166 - DNA, 330 bp, Oryza sativa
  Clone ID: PAT_MRT4530_89769C.1
atgagcacgacaatagttgttccaagctcttcggtcaagaacatcaactcgttcatttgcattgaagttgggggctactgtcaggggggcatctatgggtataaatacaatcccctacgaggagaggggacacgccacaaagctataagacacaacatacacacaagccaacacacgccgtcggatatcaacatcatatataagcctagacatactccattcggtgcctacggaagccggcaaaagggatctagcgccctctctaatctcgacaatttcgtacttaaggaggaagactaccctgtcgtcgactacgagttggttatctag

SEQ ID NO: 91167 - DNA, 6444 bp, Oryza sativa
  Clone ID: PAT_MRT4530_8976C.1
gtcggcttcctgcccgcggcggtcgccaactgagaagagggcgaccggcgacggtgagatgccgagatgggcaagtgctgactgggattggctgattgagagcagcggtgtggaagccaaacagacgcgaggcggagttgtcaagactggcggcggcgcggcacacgatacaagaagtcgagaggagaaaacatcgatctggcttccaccctacggcgaacgagcgcgccaatcgactggcgcgcgatctggcggaggttcgcgaggacctccagaagatgagggaactggtgcccggcaacgagcgataacggcagggggattttgaatgcgcctggccgcagaacttgtgtgatcgtgtacggtccttcccatttgggtgagagcttgttgcgtcctgcttggctttgaacccgtcggaggacgtagtcgccgatcgaaagcgtgcgtgcttggatgcgcttctcgtggtaacggcgaagggcttgttggtagctggctgctcgaacagcaactcgttcgcgatgttcctcgagtagattcacatcgtcgtatcgctgctcctcctgatccttatcggagtacttatgtactcgtgtactttgatgtcatagctcggtggggaggatggcctctgagccgtacacgaggaagaagggtgtctccttgttggacgttgtcggtgtagtacgcacggcccatagtactgatggaagttcctcgacccacttcttgtcgtttgacatgagcctgtcgtagacgcgggtcttgattccttgtagtactatgccgtttgccctctcgacttgtccattgctctgagggtgagaaaccgaggcgaatcagatctggactctcagcctgatgcagtaatcctggaaatcggcactgatgaactgggagccgttgtctgttatgatacggtggggcaatccgaatctgcaaaatatccctttgatgaatttgatggcgttgttggccttgatttcccccgtgggtgtcgcttcaatccacttggtgaatttgtcgatcgctacgaataggaacctgtagccgccttgtcctcgtgggaatggcccaagtatatctagcccctagcacgagaacggccaagtgagagggatagtctggagtgcttgcgctggcagctttgtgtgtttactgtggaattgataggcttcacaccgctgaaccatgtcgcaggcgtctgactccgagtgcagctgcagctcttatcccggcgagtagtccttcgtattcggctgtgttattggttgccctgaagttgaggtgaattgcatgcttgaattgatctcccgaaggtgatgtcaagatgaatcctgcccctgctccctggctgttgagtgcgccttcgaacgccattgtccacgtttcattgtcgatttggttgtctgacctgttatcaggcatggtccaatcggctacgaaatcgacgagtacctgggacttgatggctgttcgtggcacgaagtggatatcaaattggcttagctcgactacccatttcgcaatgcggccgacaacgtctttgtttctcatgacttcgccgagagggaaggaggagacaactgtgaccctgtgggcttgaaagtagtggcgtagctttcttgatgtcatgattactgcgtagagcagtttttggatctatggatatcttgtctttgcgtcgtggagagcttcgctaacatagtagactggtcgttgcaccttctctctctcgataacaatgacagtgctaacggaatatggcgtggcggcaatatagagaaataattctttattaggttggggggcaacaagtacaggtggatttgataggtagcgcttgagtgcaatgaatgcctctttggcctcctgtgtccatacaaatttgtcttgctttttcaatagaacgaagaaaggttgtcctcgctctcccatcctagtgacaaacctgcttagtgctgccatgcatccggttagcttctgtacttccttgagtcttctaggtgacttcatgttctcgattgccttgatcttctcgggatttgcttctattcctctggcagagacgaggaagccgagtagcttgcctgatggtactccaaacgtgcacttctctggattgagcacgaggcgatatcgtcggaggttgtcgaacgtttcccgcagatcgtcaatcaatgagtcgcttgtcttggtcttgacaacaatgtcatcaacgtaggcctcgacattgtttccgagctggtcgctaagtgcaccttggaccgtgcgctggaaagtgtttcctgcggttattagtccgaacggcatcttaacgtagcagaataccccgaacggcgtgatgaatgctgtcttctcctcgtcctcttttgctatgcttatttggtcgtaaccggagtaagcgtcgaggaagttcaacaactcgcaaccggctgttaagtccaccagttggtctattcgaggaagaggaaagtgatccttgggacacgccttgttgaggtcggtgaaatcgacacatattctccactttccgttggccttccgtaccatgactgggttggcttgccactctagatggagtacctctctgatgaaaccggctttgagaagcttgtcgagctcttctcgtatggcttgttttcgatctggtgcaaatctccacagtttttgctttactggcttggcattgggtcgcaccatgagtttgtgctcaatcacttccctgggtactcccggcatgttggacggctgccaagcgaacacgtcagcattgttgcggaggaaggtgatgagcgcgagttcctatttctcgcttagtgatgccccgatcttgacggtcttgtcggggttagcactggagagtggaacgatcttgattgcgccgtctggtttcggcgtcttgtttgtcttgctcactttcttgggtggctctgctgtggtaggcgggctgggcgtgttctcgaccatgtcgaggctccgcttgtcgcattgtactgccagcttagcgttcccttgaatagtgattgttcccttcggtcctggcatcttgagcacttgatacgcatagtgagatgcggctataaacttcgcgagtgcagttctcccaatgatggcattatatgctgtatcgaattcagcgacatcaaaggtgatctgttccattcggaagttgtttgcttggccgaaagtcataggcaacgtaattttgcccaattgtttggacgataactaaggagtgattccatggaagggttgatcggtgggtgtcaactcgcttcatgggatccccatcgcgtccaaggcgctggtgaagagaaggttgattgagctgccgccgtcgatcagtactcgggcgaccttgatattacaaatagtgggttcgaccacgatcggatatcgccctgggatgacagcagtcttggggtcgtcctcttctgagaattctatcttctgctcggaccacttcatcttgggtgcagccccctgccacgttgaacagacttcacgttccactttcttgtattctcactttgaggagtatgccgtggaacctccgaagatgtgtgagacatggagatcggaatctgggtatgctgggtccaattcctgagtaggcgcctcagcatctttctcaaccacgcgtactcgcttgcctttttccgatgccatgtgttttgcgagcgactttttgaagacgaggcaatcttctagagaatgtttgtccgtcttgtgtatagggcaccatgctttcttcgtgtcgctgccttgtgggtctgggtgcttgggagggtccgcgtattctgttgcgagaacttctgattgagctttccttttcccactcttgcgatttttctttttgcttgacttaggtgcgtccttggctggtttcttctctcctccggtcttcggtttgtcgttcttgcgtctcaatgcgtcatccgcatgagcgcatcagtcgacaattttgaataatctccgagtagtcgtgatgcgcctcgttgccaactcttgagtagtatagcaatctctgacatcggatttgaaagcgcgaattatagaagcattggtgatctcggggattgtgtttctgcactcgttaaagcgccgaacataatccttcaaggattcgcccgggttctgtgtcaacgcatgtaggtcgtcttcgatcgcgtggcgtttgtaagttccttggaagttggctacgaattgctgccacaagtctgcccacgaagagattgagtagggggggaagatgcatcagccatgaacgtgtagagcctttcaatgcggttggcaagtaattcgccaacgcgttgtcgtccgctccggcagcgtagagtaccgtggagtaaacctgaaggaactcttctgggtcggtgctcccatcgcatttctctattgctccaggtcagaatctttcgggccatcggacatcccgaagtgaacgaccgaaagctctacacccagcgctgggagcggtgggttgtcggcgatcatgcgtccttcgtggatgtctatccgatgatgaagatgacgaggatgattgtcacgaccggaaataacccaacgggcgttccttacgtgcgtgtattattccttgtcccaggaggcaaggtacaccaaaagttgatacaattcagagtttaacaagcggaagcgtaaatagataatttattacatgggcaacgaaggcccagcacacacaaagacaaacgagaaacagcggaagactagggcgacgaccacaggcgcttgacggcaggcacgagctagacaccaaagccttcatcctccaggaactcctcttctgggtttgggaaaaattgagcaagactgagtacaaccaccgtactcaacaagacacacccacaagtgcagaataaatgcaagggagtacaaaggagttataatataaagttagttgcgcaaagctattttggaaacacgattctagaactatacaatattatttatcaaggccgtgaacccacacgaacctgccttaacccaaggcctacgatgattcagaccgaactggcaacccgaccctgggtcccagctcgtcccaagccaacccaggccaaccattccacattttagttgttaagcaggttttaagaattaaaacactaacttgggtacattgctcggcttgcccataaccgagggcgcggctattcgaatagattttactctgatcagaggtgtacatcgacccaatcccacctacggccggaacccccgggacaggcaggcaggactgagcccctagcagcaggacaccagccctgtgccatgacatctcgattaccgggccgcagctcgtgtagccttcatttgtcccactagacatgtggaagtacggtagtgctttgcaacagaggcccgaagaccggtccttatatggccgaggtgggtccacggtggaccgggcgcacccaggctcgcaccggccggcgccgtgggtcccacgcgtcagccgcacctaagggcgcgggcggctgacagccgggccccacgcggcagccgcggggcgcgcccgaaggcggccacgccggcacagccgacgggaggcggcgcgcccgcgcccctatggtcgccggcggcggccataggtacggcggagcggcggccgagagaggggagggaagggggaaacgaatcggcggtccacggctcaccccgggtcgacggcgacgacgggaacggcgaccggagcggaggaaggcggcggcgcggctcgggtggacggggtcgacggtgctccggcggtcagcgagcgaaacggaggggtggacgaggtcggcgaggatgcggcgaagccgaaggaggcggcgccgaggcgggagatggtccggggcgacgacggcggcggaccggagctcggcggcgacggcggagagagaaagcgacggcgcgagctcgattccggcggggagagagagcgacgagtggcggaaacggtggagggaggcacggggagggtttatagagggttaagagagggagggggtggccggaggagggggaaacaggcgcgggagtcccggccgccattgatggcgccggcgaggttagggggaaagtttccaaacgaatccgagggagagagagagggaaaaatggggggaaagagggagggaatcacggggaatatttcccccctcttgattgcacgcggggcggacgggggcggcgggattcacggcggcggcggcgctagggcgcgggcggggcggcgggagcggcgggaggaaggggatgacgggtgggccccacccgtcagcgagggaggcgggcgggcccgcccgtcagcggcacgcgcgcggggaggaggccgaatgggctgcgggggagaggagagagagggagagaaatgggccgagccggcccaagagggggaggggggaaaaggactttttagggtttttcttttta

SEQ ID NO: 91168 - DNA, 249 bp, Oryza sativa
  Clone ID: PAT_MRT4530_89770C.1
atggtgataggtgtttggagcgctacccgagcaatgcttgccggatccagtgcctccactgccgcccctagctccctcccttccctgtcgccgctggatccggaggtaccgagcaccactacaccggatctaatgcctccactgtcaccgctcatccttttgccgctgccgctgtctcttccctccccttacccgccaccgccggatacggcgcctacaccgctgcccctctccgtcgccgctgtcgtg

SEQ ID NO: 91169 - DNA, 1354 bp, Oryza sativa
  Clone ID: PAT_MRT4530_89771C.1
tctcttctcacgcgttcggtcctttgttaaatggtgtatatgtaagagtgtgagggtagttgagggtaaaataaggagaaatttaaatgagaagtgattaatgaaaccattattattctattgtgataactattttgggacaaattcaaatcctaaaaatacaattattatgggacagaggtagaacatgtattaatattccactggtataaataagtatggaatttcctaccatggcggagccgtctaaggtgatccacatccggaacgtcgggcacgaaatcgctgaggcacttctccaaatgcaagacttgcataattcagtgagtgcgctgcaatactacagtactgttcaacctagcgtaaggggaaggaatgtgtacatgcaattttcgtcccaccaagaacttaccactgaccaaaactctcatggacgaaattcagatcaggagtcagaacccaaccgaatcctcttagttactattcaccacatgatgtatcctataactgtggaggttctacatcaagttttcaaagcttatggatatgtggagaagattgtcacatttcagaagtcagctggttttcaagcccttatccagtatcagtcactccaagaagctatggatgcatttggtgctttgcatggatttcacaaacccatcattgcctacagaacagcgtccaagggcctctcagcttcatatgcacacataggccgagctccagtcttcacaggttcaacagcagaagtaatcccagacctaaccgtcactgctgcgctccaacccaaatgaaccacatttcagccctcccacaagagatcacggaggatgcgattcttaaccatgtttcagagcatggttctgttgtaaacacaaagctgtttgaggtgaacggcaagaggcaggcgctcatccagttcgagagcgaagaggaggcgaccgaagcccttgtatcaaaacatgccacctcgctggagggtaacacgatcaggatctcattctcccagatgcagagcatatagaaactcatcgtggggaaacttatccagctaatcggatgacgagtagcaagttttatttaggaaagcattgaactttagatgtgaatcctgttctgtcttctcctgtaggccgatgctttgtcttttgctgtaccatgctgtgagactgactgaacaagcttgacgttggggcctttagctgcaccaaatggttttaagcttcttttctttcccttgttggttttaggcatccaaggattgtgtctggatattgtgctgttctaagagagagttctgccctgccatgaacaaatcgtgcctgttgatctaaaaaaaagttgtgttatt

SEQ ID NO: 91170 - DNA, 346 bp, Oryza sativa
  Clone ID: PAT_MRT4530_89772C.1
tttaccactcgaactaaagagaatggtcaatttgagtgtagttcaaattcattcggtgatggacaaaaaggaaaacattcgtaacatgtctgtcatcggtcacgtataccatggaaaaagtaccttaactgattcccttattggcgctgctggtattatagccagtgctaaagttggtgaacaaaggtatactgatactaggcaagacgaacaagatagatgtattaccatcaagtgcactggtgtatctctgtattttgaactcgaagagtccaaagtacctgctggttctaatggaaacgctcttctgattaacttgattgatttcccgggacacgttgacttc

SEQ ID NO: 91171 - DNA, 120 bp, Oryza sativa
  Clone ID: PAT_MRT4530_89773C.1
atggccatgtgggacatcaagaacatcatacaagcacctcaccagcacatggctatgatcaagagggggcaacatattggctccggctctgggctcaactacaaaggtctaacgaagatg

SEQ ID NO: 91172 - DNA, 982 bp, Oryza sativa
  Clone ID: PAT_MRT4530_89774C.1
ccggccggggaaccaatccaaacagcttccttcctcccccctcctggctccgctcgctggatctctcctctttctctctcgcaccctctccccggcgaggtaggagggatggggcgggaggtggcggagagctgcgtcgacggggtggtcatgcagatggtggcggcctactgcggcggcttctacgccgccaagccggagctcgccgcccgtcgcatcgaggccatcggcttccaggtcggccaccagctcaccgagagatatactatggagcgccctcgatttagtgatcatcttgaagcaatcaaatttatctgcaaagacttttggtcagagttattcaagaagcaaattgacaatctgaagactaatcataggggcacatttgttcttcaagataaccatttccggtggcttactcgtgtttctgtagatccatctgtagagagcatggatgcaactgagaatgattctacaacactaggtgatagcgcagcccaaacaacaagcatgcttctgtactttccatgcgggataataagaggtgccttgaccaatttggggatttcttgttctgtcactgcagacatgtccaaccttccagcatgttcttttgttgtgcgcataaagacatgagctgcaataaatgatttgaataccattatatgcatgcttgtggtataaagtggtctgtacattcaaggaggggggaaacccgccgtgtagctggtcttttttttttttcctttcccctcttgttcttactggcacatgtttacttttcctcatacctgccttgtgcgcttattaagattggtgtaattctgtgatccaaaatgttgacaagggaagacaaatgtaatatttctcctgagagactggctatagctaacttttgttgtctagcagtggagagtgatttataatttattttgctgacttatattttctatattccataaaaatatatacatttagaatt

SEQ ID NO: 91173 - DNA, 399 bp, Oryza sativa
  Clone ID: PAT_MRT4530_89775C.1
atgcgcaaggaggctgaggtgaagctctccatatttgaggatgcaaaatcagcgtttgatatagcagagatggcgggggaggccagatcggaggtgcagaagacaaggatggctgctcttgctgctggcagccgattcatatacgctaaaaggattctccaagctcttgagcaggcgggcgaggttgcactgtccctgatagagtccctcaagcacaaagctacatctgtggttgctgccaccactaagtcaacgttcatgggatgtggttcggtaccatctgcgcggggccaacaggatgacaacgacgctggtgaagatcagaagctagatagtggtcctcttcatacccatgctactggacctacccatgctgttggacctaccgaccagcagtag

SEQ ID NO: 91174 - DNA, 1116 bp, Oryza sativa
  Clone ID: PAT_MRT4530_89776C.1
gctcgggccgggatcgcgcgattcctaacaatgctcctcaaccggacgtcttcctttccctcctctccccgtcttcccgcatctctctcctcttccctctcctctccgctctccatatccccgtccatctgccgctctgctcgcctcctctgccctaactctacttatttccagtccctctcaaacactgtctccattgacggctgctccttggggtacacatgcacctttgaatacgaacatgaccacttccccactttaaagcctggtatattgttttcgggagcaagtaattgaaagaggggaatgtggtcaggaccccgagatataccgaacgggtcgacgacggctccttcgtcggtcctccccccgatcgatcgccgataggatcccattggaggctgaggctgtcaagtccctcttcgggctggaacccagctcacccttggcactggctgtggatgaatcggtggcgcattgccagagctcgccaagcaagggcgagacgaagcggtgcgtcacatcagcagaggacatgatcgtctttgcgctgcctctgttcggtcttgtcttttgcggtccggctaccgcactgccaaatgggcccggcgagtcgatcatgattggtaaggtcaagggaataaaatggtggcaagattaccagctcggtatcatgccacgaatacttatttccatacatggtatactactgccactcggtgcctaaaatcagagtttatgaggccgagatcctgtccgtccagacgaaggagaagatcaacagcggtgtcgccatctgtcacattgacacgtctgcctggaatgctgggcatcctgcttttgtggcactaggtgggaagccaggtcagaacaaggtctgccactggatatttaatggctctatgacctgggtcatcgccgacaaatcctaattacacacacgtttcgatctgaatcgatgaaccatatatatatgcagcatcagacctatcttagtatatattgctggtctgctactgcacttctccagtgcgatgtatccgtgtgttttcaatataaataaatataaagtaattttatatgaaaaaaaaaaaaaaaaaaaaaaaaaaaaaaaac

SEQ ID NO: 91175 - DNA, 345 bp, Oryza sativa
  Clone ID: PAT_MRT4530_89777C.1
atgactcaagacgccggcgacgccgttctcctggcctcgcgcatcacgatggatagacacttgagtctcgtccacaagttcatgccggagggcgccgtcgtgagggcgggggagtcgcggccaaggccgcggtacccggatcggtccgtgcacctcctgtccttcgccatggcggggttgattccacccttctccagcttcttccatgaggtcctggatttctacaggatccacgccttgcatctcgcctccaacgctatgatgacactggccccactaaaacctcctcgcctccgccctcctgccaccttttctttttcaagaaattctcatgttgtagcttaa

SEQ ID NO: 91176 - DNA, 444 bp, Oryza sativa
  Clone ID: PAT_MRT4530_89778C.1
acaaacttggtaacaccttacaataaaatcttacaacattaccataataaaataaatattacacatacttattgactaacatattacaaacttattgaaatacaacgtcatgccgcgaacatatcatgaccgaacaataaataaccggacaggggaaggtttaactaccggagggtttctttcttccttatgggaacccccttagaagcccttttaattcctcctccaacgtggtggattaggttcatgggtgaaaaaggacccctccttgttattcttgcaatttttagggcggggcccgtcctgaaaacagttttaaaatcgccttaagggccttcccgtttgggatgcttccatataattttttaagcgacgggttggttttttaccttaacgggccttcaccaaatccaagtttggcccataaaccctgtattaaccccc

SEQ ID NO: 91177 - DNA, 342 bp, Oryza sativa
  Clone ID: PAT_MRT4530_89779C.1
atggcgacggcggtccggcgaggcggcgcgcgcgcgcgcggcgacaagcgccgcagcggctccatctcggccggctggggggtgcgcccgaagggcggcgccaagccgtgtgcaatggcgtcggcggtccggcgaggcggcgcgcaggcgacgtcgaacgtcgacacggccggagcttgtcggcgggggaggggggggggcggagcccgaaggcagccgccaagctggcgcttcccgtccccggcgagggacggtggagggacgctccaagacggcgcgcgcacgagaagaccgatgcggccgcaaggaggtgaagtggcggcgctgccgcttccgatttag

SEQ ID NO: 91178 - DNA, 318 bp, Oryza sativa
  Clone ID: PAT_MRT4530_8977C.1
atggagaaggcagaggcggccacacggacgcgcgtaggaacttcgcgcggcatcgacgacggcagcagcaagctccgtgcgtcttcgatgacggtggacacacggacgcagctgagctccgcggcgtcgacgacgttggctaagctccgtgcgatgctaaggacggtggcggagctccgtcgtggaggttcacaaggaacaggatacaagaaagtttggtggatcacctgtgacggcttctatctaccaaagaccatcacctctgacggcctttctttacatgcccatcagagatgggtcacctgtgatgggtcctaa

SEQ ID NO: 91179 - DNA, 210 bp, Oryza sativa
  Clone ID: PAT_MRT4530_89780C.1
atggcggacggctatcgacggcgggtgctcacggcggcttcgaccctcgtcccggccgcgtgtggtagcacgggaggcatgccgtgcgtaccggtggcgaggggaggcgggcgcggcggcggcggcgcatgcaggcgcctgaccgcggtgcctcgcgcggcggcgcaggcggtagatcagcaagccgacggcggacatgcaaaacaatag

SEQ ID NO: 91180 - DNA, 1677 bp, Oryza sativa
  Clone ID: PAT_MRT4530_89781C.1
ggatggaggaggaagaggggaagcgggctggttgtgcgggcagagatgtttgggcagctcacgaccgggctggagtccgcgtggaacaagctgcggggaacagatcaactgacgaaggacaacatcgctgaaccaatgcgggatatcagaagagcacttttggaggcagatgtgagtttgccggtagtgagaagttttattgagtccgttactgaaaaagctgtaggcactgatgtgattcgaggtgtcaagcctgagcaacagctggtgaagaccagtctcaggttacaggggaagagttgcatgctgattgctgcggatgtctacaggcctgctgccattgatcaactcactattctggggaaacaggttggggttccagtttactctgaaggaactgaagctaaaccttcacaaattgccaagaatggcataaaggaggcaaaaagcaagaaaactgacgtaatcatagtggatactgctggaaggctgcaggtagataaagccatgatgagtgagttgaaagaggtaaaaagggcagtaaatcctacagaagttctacttgtggtggatgccatgactggacaagaagctgcatttgccctacgacttacccgcatttcttttctgatatggccagcattggttagcaccttcaatgttgagattggtattactggtgctatactgacaaaactggatggtgattccagaggtggagcagcactaagtatcaaagaggtatctggaaagcccatcaagtttgtagggcgaggagaacgcatggaagatcttgagcctttctatcctgatcgtatggcacaacgaatcttgggaatgggagatgtactttcatttgttgaaaaggcacaggaagtgatgcgtcaagaagatgctgaggaattacagaagaagatcctgagtgcaaaatttaacttcaatgacttcttgaagcaaacacaagctatcgcacaaatgggttcatttagtcgtataattggcatgattccaggcatgaacaaggttacccctgctcaaattcgtgaagcggagaaaaaccttaaatttatggagtccatgatcaacgtaatgacccctgaggaaagggaaagaccagagctacttgctgaatcacgcgagaggaggataagagtggccaaggaatccggaaaaaacgaacgacagaaaatgatgggtgctatgcaagggcaagacacccctgatatggaaggcctcatggattccatcaaggcagaagagcaggcgccgaagaaggacaaggccccgccgccgtcctcgaagccggccaagtccggcggaggcaagcagaagaagaagaagtggagcaaggggaagcagaaggagaaggtgaacaactcggtgctgttcgacaaggccacctacgacaagcttctctccgaggtgcccaagtacaagcagatcaccccctccgtcctctccgagaggctcaggttttctattacattagagttccaacaatcacaggtatcagttccggtactcaactataaagtttggtacctacgagaaaattggcattttgtgattgtcaaaagtgggtatcgttggaatttcattccacaaattggtttcgctaaaataccactatcaaacgggggcaatacactagaatgctatttcttcttaattgaatga

SEQ ID NO: 91181 - DNA, 330 bp, Oryza sativa
  Clone ID: PAT_MRT4530_89782C.1
tctttacaaacacaagccccatccccgggaagacgaggctgtgtgtggcacgtcacgtgccccacccccctacccacccacccgtcttgacacccacccatctccaaatccatggcccccctccccgccatcgtcaccgccaccgtcttcttcgtcgacacccccgccgacgacaaggcccactccctccttccttccaccccctccaacgaggaggatgacgacgacctcgtggagcgcgcctaccaggcgaccgagaaggatatcttttcgatctaggacttccccgacgcctactactatgaggaggagtccggtctcgtcacctcc

SEQ ID NO: 91182 - DNA, 451 bp, Oryza sativa
  unsure (1)..(451): unsure at all n locations
  Clone ID: PAT_MRT4530_89783C.1
gataaaaaaatttgtggnaaatttttttttttttgtgtttggcaaaacgaggcttttagggctttttttttcttttaacgaccaaatggggggttctttttccctttagggcccattgggtttttttaaacattgggggggccgttttttttttgggcttttgggaggttttcccccgggaaagggaaaaaattttggggccggtttttcccaatgccaaaggtttaaaacccccaattccggggacctttttgccgggcaccactgggggggtgcctgggggccccccggccgaaaggattgggtcaaaactacaaaaccccttttgttccaaaaagggggcccaagtttcgtttcccccccagggtccgagggcaaaagaaaccccccccctggccttttggggaggccctgccttggcaaaaaaaacagggcccggccccccggggcc

SEQ ID NO: 91183 - DNA, 1638 bp, Oryza sativa
  Clone ID: PAT_MRT4530_89784C.1
atggtgtttgaggagatggggattactttcagtgtggagccatcttgcatcctgagggagaacgatgcttaccccggcggcgagtggttgcccggcgccgtgctgaatgctgctgcgaattgcctgaccgcgaagcccggaaggagttccgacgacgttgctatcgtgtggagggatgaggggaaggattctgagcccctcaactttgttactcttgaggaactgaggaaaaaagtttgcctggtggcaaatgcgcttgatgcactcaacctggctaagggatccgcgattgccattgacatgcccatgaatgtgaatgctgttgtgatctacctggcaattgtgttggcaggctatgtggttgtctcaatcgcggacagctttgctgctcccgcaatatcaatgaggctaaagatatcagaagcaaaagcaattttcacccaggattacatccttcgagatgacaaggaattgcctttgtacagtagagttgtggaagctaaggcccctatgacaattgtgatccctgtaaggggatcaacaccaataaaaggactgcgtgctgatgatctgtcctgggaagattttcttgcaaaagttaaccatgccaaggctgataattataccgctgttgagcaacctgcctatgccttcaccaatatcttgttttcgtcagggactacaggggagccaaaagcaattccatggacacacttaacacctctgaagtcagctgctgatggatggtgtcacatggatattcgcagaggtgatgttgttgcatggcctactaacctcggttggatgatgggcccatggcttgtttatgcctctttactgaatggagcttccatggctctttataatggctccctgaatagttcaggctttgcaaagtttgtacaggatgcaaaggtgactatgcttgggttggtacccagcattgctcgttcatggaaaagtacagattgtacagctgggtttgattggtcaaccattagatgttttagctcatccggggaggcatccagtgtggatgattatttatggttgatgggaagagtttgctacaaaccagttatagagtactgtggaggcacagaaattggtggtggatttgttgctggatcattgctgcaacctcaagcattatctgcattcagtacacctgcaatgggttgtaacctgtttattcttgacaacaatggaaatccattagtccttcggaggcatggggatgaatttgagcgtactccagatgggtattatagggctcatgggcgcgcagatgacacaatgaaccttggtggaattaaggtgagttccatcgagatagagcggatctgcaacagggtaaacgacgccatccttgaaacagcagctattggggttccacctctagggggtggccctgaacagctgaccatagccgtcgtcttcaaagaccaaagctcacaaacagaggatttgaatcagctgaaactggcattcaacactgctctgaagaaacttaaccctcttttcaaggtttcttcagttgtggtagtcccttcgctccctagaacagcctcaaacaaggtcatgaggagagtcctccgcaaggagttcacccagcagccaaagcactccaaaatctag

SEQ ID NO: 91184 - DNA, 2506 bp, Oryza sativa
  Clone ID: PAT_MRT4530_89785C.1
cgcatctgccgcagcttcgcagcagcagcagcatcatgggccacgccgccgcagccgccgcggcggcgcacgtgccgctgggcgcgatcaccgtcgacgacctcctcgccgcgggggtggcgggtggtgcggcggcggagctgcacgaggcggtccggcgcgcggtgggcgcgcgcggcggggacggggatgcggcggcggtgtggggggagctctgcagggccgcgctccgcccgggcgtgccgttcgcggtgcaccggatgctctactacggatgcttcgccgggttcccctccgccacgccgccggcctggacccccgacccggaggaggccgtattgaccaatgtcggccgcgtcctcgaggcgcgagggagggagttcctcggcgacaagtacaaggatccaatcgctagcttcaccgacttccacaagttctccattgagaatccagaggcgtactggaagatggtgtttgaggagatggggattactttcagtgtggagccatcttgcatcctgagggagaacgatgcttaccccggcggcgagtggttgcccggcgccgtgctgaatgctgctgcgaattgcctgaccgcgaagcccggaaggagttccgacgacgttgctatcgtgtggagggatgaggggaaggattctgagcccctcaactttgttactcttgaggaactgaggaaaaaagtttgcctggtggcaaatgcgcttgatgcactcaacctggctaagggatccgcgattgccattgacatgcccatgaatgtgaatgctgttgtgatctacctggcaattgtgttggcaggctatgtggttgtctcaatcgcggacagctttgctgctcccgcaatatcaatgaggctaaagatatcagaagcaaaagcaattttcacccaggattacatccttcgagatgacaaggaattgcctttgtacagtagagttgtggaagctaaggcccctatgacaattgtgatccctgtaaggggatcaacaccaataaaaggactgcgtgctgatgatctgtcctgggaagattttcttgcaaaagttaaccatgccaaggctgataattataccgctgttgagcaacctgcctatgccttcaccaatatcttgttttcgtcagggactacaggggagccaaaagcaattccatggacacacttaacacctctgaagtcagctgctgatggatggtgtcacatggatattcgcagaggtgatgttgttgcatggcctactaacctcggttggatgatgggcccatggcttgtttatgcctctttactgaatggagcttccatggctctttataatggctccctgaatagttcaggctttgcaaagtttgtacaggatgcaaaggtgactatgcttgggttggtacccagcattgctcgttcatggaaaagtacagattgtacagctgggtttgattggtcaaccattagatgttttagctcatccggggaggcatccagtgtggatgattatttatggttgatgggaagagtttgctacaaaccagttatagagtactgtggaggcacagaaattggtggtggatttgttgctggatcattgctgcaacctcaagcattatctgcattcagtacacctgcaatgggttgtaacctgtttattcttgacaacaatggaaatccattaccacaagattctgttggtactggagaacttgcgcttgatccaaccttcctgggagcttcaacaacattgctgaatgctgatcatcatgaggtgtacttcagtggaatgccagaatggaacgggaaagtccttcggaggcatggggatgaatttgagcgtactccagatgggtattatagggctcatgggcgcgcagatgacacaatgaaccttggtggaattaaggtgagttccatcgagatagagcggatctgcaacagggtaaacgacgccatccttgaaacagcagctattggggttccacctctagggggtggccctgaacagctgaccatagccgtcgtcttcaaagaccaaagctcacaaacagaggatttgaatcagctgaaactggcattcaacactgctctgaagaaacttaaccctcttttcaaggtttcttcagttgtggtagtcccttcgctccctagaacagcctcaaacaaggtcatgaggagagtcctccgcaaggagttcacccagcagccaaagcactccaaaatctaggtagttacaaaaaagcaaaattggttctattgcatcatacgtacacccaaaaggaaaaaacttcggcacagcaaactgtgaatacacatgtctggttaaaaatcactaaatcagttgtatagcaaggcttttgttctctccggtgtgaaatgagatgatagatcaggtcatgatgaggtactgaaagtgttattgctacattttcctgtcatatgtttttcgctatgtgaataaagtctttgtgggacttcagtgaaaaaaaaaaaaaaaaaaaa

SEQ ID NO: 91185 - DNA, 153 bp, Oryza sativa
  Clone ID: PAT_MRT4530_89786C.1
atgaggcggagcgatgagggcgggcagagtctatatgaaggctacgtcaccaacaccggcgcacagaccgatgagattgtggatatgttgtcggagcccacatatatattccatcttcaccaacattcatcatacatggagaacgtgaagtga

SEQ ID NO: 91186 - DNA, 210 bp, Oryza sativa
  Clone ID: PAT_MRT4530_89787C.1
atgagctcatgcggtggagtcctcggcggtggcgcagacgacctcattgaattcggacgcaatcttgctagatccggccatgaccttggcaagcgacgagcttgtgcggtggagttcgtggcggtggcgcagacgaactcgccggatctggacgcaggctcgtcaaatccggatggcgggcagtgcagccgtcatggccccaggcgttaa

SEQ ID NO: 91187 - DNA, 219 bp, Oryza sativa
  unsure (1)..(219): unsure at all n locations
  Clone ID: PAT_MRT4530_89788C.1
agagtccgccaagagaataantgtttctcgcgggttgatccaanacattattccgataaagcccacggggtgatatatgaaaagcccacgcctccgcaaggaaaagagcggacaggtaccgttaagcgcaagtgtggacaaagagagcgccgaaaggagttccaaggggaaacggcgggtatctatatattcgtgtcgggtatcacaacctctgactga

SEQ ID NO: 91188 - DNA, 496 bp, Oryza sativa
  Clone ID: PAT_MRT4530_89789C.1
agcctgggttctttaaaacgggcggcccttttttttttttttttttggtggtttggggctttttcggggggagaaaaaaaaaaattttccctttggattggttccgggcctccagttccgaaaaacctaagttttttgggattattcccttaagctttgaaaaagtccaccacagttttttggggttaccctattcttaagctgggaaaaagtccctcgactgaaaaaaagaattttgcagttggctcccacgtccttggaaggggggattcgggcttgtttggccgaaattggggcccagttggatgcttttttttcgtgaagcttttaagcacaacttacaccgtacacaattggctgttttccgtggtaccagttttccagtccaaaaccgaccaaagatgacgggtccagctcacatctgaaagttgatgggtccagcttagcacacagctaatacattcttcaggagtttgatgagcagggcagttttctg

SEQ ID NO: 91189 - DNA, 2148 bp, Oryza sativa
  Clone ID: PAT_MRT4530_8978C.1
atggagccgagatcgccgcgccggtttccttcccctccggccgccctctctcactcccaacactatataaacgctccccgtgcctccctcctccgtttccgccgctcgccgctctctctccccgtcggaatcgagctcgcgccgtcgtcctctctctccgccatcgccgccgagcttcggtccgccgccgtcgtcgccccggacctcctcccgcttcggcatcgcctccttcggcttcgccgcgtcctcgccgacctcgtccaccccttcgtttcgcccgccgaccgccggaacgccgccgtcctcgtcgacccgagccgcgccgccgcctctctccgcttcggtcgccgttcccgtcgtcgccgtcgacccggggtgagccgaggaccgccatttcgcttcccccttccctcccctctctcgggcgccgctccgtcgcgccggtggtcgccggcggcgaccatcggggcgcgggcgcaccgcctcccgtcggccgtgccggcgaggccgccttcgggcgcgccccgcggctgccatgtggggcccggccgtcagccgcccacgccctcgggtgcggctgacgcgtgggacccacggcgtcggccggcgcaagccgcgtgcacccggtccaccgtggaccgtgaggctgacgcgtgggccccactcccgtggacccgggcaaatgaaggctacacgagctgcggcccggtagtcgagatgtcatggcacagggctggtgtcctgctgctaggggctcaatcctgcctacctgtcccggaggttccggccgtaggtggggttgggtcggcacttttgtttatggctaggatgggttgggaactatgtgacgtcttccgtccgtatgccgtggtgatggataacactggtaacaaaggctatgtgaatgatggatccgatgactcaagaacccaagccaatgggaatgagaaaagcatcaacgaaacctcaccagagctaatccaaattgtggttaaccaaaccaacatgttggcaacagcatttcaactattacagaattggaacaacccagcaggggcaaccaacgttcaagtacctacagtccagcaacagtgcaagttatcagaatttctaaaaactaagcctccaacctttgccattgccgtcgatcctatggaagctagtgattggttgcgcacagtcgagaagaagctggggttgattcagtgcacagaccaggagcgggttgtctttgcaactcatcagttggttggaccagcttcagaatggtgggatagctacgaagcatcacggccagaaggacataccatcacctgggatgagttttcagccgtgttgaagagatcacatgttcccgcaggaatgatcacactgagaaaacgagaattccgctacctgaagcaagaagatttgaccgtcacagagtacctgcatgagttccatcgtttggctcactatgggttaaaagatgagatcgcagtgcaactactcctagaggaatatgaagattttgagaaacttgtggacaaaaccatacaactcgaaagtgagcataatcggatgaagaactgcaagagaaggattgtcagcatcccaacatttccatgtggtaaccaaagacagcgcactgagccacttcagatcaccggatcttctattgcgcatcaagagttcctgccccaagaagacggacacaatgcagacaataacattagcaatactaatgatgatgataccaccaacaaccatgcttcttgccccattagtgaccactcgaatcaagcgtgcaatgtcaacatcattcaccaaggtgtcgacgatagtatcaatgatggcacccagaatgacaaccctagaaattgtgatagcaactatggtaccactgatgccaatgttagcaaggatttccaaccaccaattccaactccaagtcagaatgatcgtccccagacggacagctcaataaagaagacgttgatttgttacaactgcaaagaaccagggcatgacttgagggactgtctacaaccaaggcaaagtcggcctccacattaccgccaatttacacgaagcagacatcctaatcgtattgtggtcactggagcaaacgccatacctgtgaggcctcgtgttaatcataacccatag

SEQ ID NO: 91190 - DNA, 216 bp, Oryza sativa
  Clone ID: PAT_MRT4530_89790C.1
gatttttccttattttttcactctcttttttattattttatgtttactcatagtttccctttgcatatctatggtacttttagaggtcgagcgccaagccaagaggccaggggccagctaaacggaccgaacgtaaatccatggcacatttttcgacaaggaggagacagccagtcaacacccgagagactacaatcatttgaaccaatacggaga

SEQ ID NO: 91191 - DNA, 1167 bp, Oryza sativa
  unsure (1)..(1167): unsure at all n locations
  Clone ID: PAT_MRT4530_89791C.1
nnnnngnnnnnnnngnaagtgtttttcgtctctcttttgggcgttttgggttccgggcccccaacataaataacaaaaaccttaactgacgcttcaatgtcaaggtacattctatttcagtgatgagatttctgcctctcacacaggttagatcacttggaacagaaacacagcatgcatacgatctgtttctctatcaggtctccatatgcacacaagtcctcgaaaaatggataacggaatacaatcacaagtgcgggttgtcaaggtaatcgcctagattgttatcttggatttggcaactgcagatcatgcaaaaagatgtgccttgatggaaacctccagctcccatctcatggaattgtctcacctccattgctacctatgtatctgtgctcaaatggctgatgatgcttgctgattagttccggtgctgtcatcgatgggcattcccaattctttagctccaagtttaagctgatcaatctgattctgcagatcaacacatgcagcttgaatagctatatttttctgacacagctcctgccattccgtcgtcaaggcatggagttgaccaccttagtaaaactggtgaaatttcctctcgcggttgacagtttctatcttctcattgtattcgacagccatcttttgcatcctagacaaaactgattccatttgtctattctgaagcttccaaacctcaacaccatacttcagcataagctccagattctctatccttatgatttgatggtgcagctggctctgagcatttcttagagcctgcctccatgcagcaacatcattcctcttgttcgctgggggtggctccaaaccatagcgggacatctctatggtagcaggaggtttcccagctctaacacgctcgtactctttagcaagcataggatgattctcgaacccgatggcggggacgggggggaggtcgcggaggaagtcggcgggcttgcggctcccgcgccgcatctcctcctccaccatccggtccacctcccgcttcaccgccgggtcgccgtagtcgccgtcgatgtagggcagcgcgtccacggcctccgcgtccggcggcgcgcgccacggcgccccggagggcgccggcggggcctccagcatgagcacctccctcgtccccgacgacgacgccat

SEQ ID NO: 91192 - DNA, 1198 bp, Oryza sativa
  Clone ID: PAT_MRT4530_89792C.1
ccggccggggcccggccactggtttcagtggtactatgtgtttgctgacggttttgtttttgtgtgttggggctgttcctataaattcgatgcgatagcatcccatttctcatcactcacctccactcccccgcggcggcggccgctctacaatgatgggtcccccgggctgcaggagttcggcgcactcactctcactcccaaatcacatcctcaaattcagattcagagtcgtcgaaatcagtagtattcatcaggaatggagcggctgagctcatcggtgcagtcgtgggtggaggaacacaagctcgccagcaaccacatcctcagattcagagtcgtcgaaaatcatcaagaagatggagcggctgagctcatcggtgcagtcgtgggtggaggaacacaagctggccagcatcggagggctgtgggcgacggcggtgggcgcatcggtggcgtacgggcggaggaagacgccgcagatgcggctgatccacgccaggcttcacgcgcaggccctcaccctcgccgtcctcggtggagccgcccttgcgcaccactactacaacccatcatccaacaccaacaacagcagcagcttggactacgacttctactcgcagctgccgccggccaccaccgacgacggccaggagaacgagaggtggagctggtagtgctacccttccttcctgctgcaagatgcagacaaatgaagatgatgacgatcacgatgatcaattagtaataatctaatcggctccattagttttatcttatcttaataatagagtatgtcctcctcctaatccatccacctaggatggtcttatccactccaacccatcctctgctctgtactatgtaattatccattccattccatccggaccctgcttttccgatgccttgattacaattgatgtcagtggtatgcttatttgttcctccaaaaaaaaaaataataaaaatccggactggagtcaagaaacaatgttaggcccgcctggtctccacgccttctccgcaaggactaccaaggagcgcgcaggactgccttaattccccactagtgtagaccttctgtaagcccagggctgtctattcctcatgcatatgtttgttcctgctacaatcaaattattaagaagtcctacagtaaaaccattttgaaaaaaaaaaaaaaaaaaaaaaaaaa

SEQ ID NO: 91193 - DNA, 233 bp, Oryza sativa
  Clone ID: PAT_MRT4530_89793C.1
ataggaaagaaattcgattgctttgggtttgctttttttgccttacaagttttgctcttcgaagagtttgtccaaattttttggggaaagcttgggtctccttcgagctttgattcgggaaaggttacagatttttgttttggaacagggggaaagcttgtttgaaatattttgccttacaaggttcgctcttcgaaggatagcacatattttttgttgaaagctagagtcac

SEQ ID NO: 91194 - DNA, 1567 bp, Oryza sativa
  Clone ID: PAT_MRT4530_89794C.1
atgaacggtggcattggcgacgcgctgatgcagccgcagcacgtgcaggtcatgtcgtcgtcgttgccgatggtggcgtcgacgttcgtggcggagccggcggcggcggccaacaagccgagggccgcggggctgccgcccacgccgccgcaggtgttcgccgcccagcgcgcggcggcggcggcgggcggcgacgtgtgcatggaggagtcggcgcaggggggtggtggcgggctgccgccgcgcaaggcgcaccgccgctccagcagcgacgtgccgttcgggtacctggccgggcagcaccagctcctgccgcccaaggtggaggccgggtggggccacctcggcgccggcgccggcggcgcggcggccgccgatgacctgttcaacgcgtacctgaacctggaggggctggacgggctcaactcctccgacgaccgccacgacgaaggggacagccgcgggagcagcatcaagaccaacggcgccgacagcagcgagaacgagtcggaggagtgcgccgacgacacccgcggcgggatccgcctctggtccgccgacggcggcgagaggagggagggcgtcaagaggaacgccgcgggggagccggccaccgcgccgctggcccgtcacgccaggagcctctccatggacagcctcatcgggaagttcaacttcacggcggggacggcggcggctgcggggaacggtgtcgcgttggggccgaacaggttcagcctggaattcggcagcggcgagttcaccccctccgagatgaagaagatcatggccgacgagaagctggccgagatggcgctcgccgacccaaagcgcgtcaagagggtgctggcgaacaggcagtcggcggcgaggtccaaggagaggaagatgaggtacattgcggagctggagcagaaggtgcagatcctgcagtcggaggcgaccaatctgtccgcgcagctcacgatgatgcagcgcgactcggcggggctcgcgacgcagaacaacgagctcaagttcaggctgcatgccatggagcagcaggcgcagctgcgcgacgcgctgaatgaggccctgacaaccgaagtccaacgcctaaaactcgccaccgctgagctcggcgattcttgctcgtccagcagtctagctcagcagatccaactcaatgctcagaatcagatgtttcaactgcagcagcagcaggctacgcagataccattctatcaactgcagcagtcacaacagaacggtgcagcgaagaacaatgaatcaaaagaatgattccagaggcattttgggctggttcatggaaagagaatattggtttagatgagcgcaattcgcatattcctaactcatttgttttaatgttgttaataatcaccttgcatttttctagtaggtggtggttggtgaacctccttttacctttctatgttcattgattctttgggtgatacagttgtcatttttaaggtaccaaactgatggaagttgtaggtgatggttattctttggtactaatatctatggcgggtattttgagtaaaaaaaaaaaaaaaaaaaa

SEQ ID NO: 91195 - DNA, 412 bp, Oryza sativa
  unsure (1)..(412): unsure at all n locations
  Clone ID: PAT_MRT4530_89795C.1
ttcacattcagtgcaccccaaacaccaagaactcctcctttttttctcctgtaataatcctgtaccctctctctctatctccctgcagctgctgcctagctccagtacggccaccgtcgtcgatcggtctctctctctcaccggatccgagaagcaaagaaccgatcttttttcttcttttttcccctgcgtgatgcttcttgtttactactacgtgggtgcagtgcaggtttgttgatcgatcttggggcggggcgggatcgagcatatgaaaggcgagattgttgacagaagagagtnagcacacggcgcggcggctagccatcggggngatgcctgccccngccgcgtgctcgctcctctttctgtcagcatctctcatcantccctcccgcatcccccgccccgatct

SEQ ID NO: 91196 - DNA, 336 bp, Oryza sativa
  Clone ID: PAT_MRT4530_89796C.1
atgggggcaatttcttgtgtcttcccggtgcagcccaaccggcaccatcatcccaggaatctgcttgtcctgctcgacttggaaggtggggacccaccctaccttgaccagaacacgatccgtgccttcgcctggaaaccaagccgcagctcgcccttgagcgggacccagcgccatcccccgcctgacacgggaggcagccctgtcattccctcattaatgggccggtcacagaccggtcatttcctaactgacgcgcgccagtcgggcacgccgcacgtctgcctctaccgcattgaacgcggcaaggggcaattggggcgctgcgcgcattaa

SEQ ID NO: 91197 - DNA, 930 bp, Oryza sativa
  Clone ID: PAT_MRT4530_89797C.1
atggcgcactcccactctgcggcttcgctgcacgccgcccggctactaccgcagcagcgcacgcccaccgcgccacggacactgttgccggcgggcggtggcctcttgctccgccgcccccacccaccgctccaccagcagcgccgcagccgctcctcctctcgtcctgacctccgctgccgccgccgcctcctcaccgcgcggggtgactacgacttctacgagaactatgccgatgaagaaggagatgaggaggaggagtcggaagtcataggtgggagcttcgacgcggcggtggcgctgttcaacggcggcgagttccacgcgtgccacgacgtggtggaggagctctggtacaccgccgaggagcccacccggacgctgctccacgccatcctccagtgcgccgtcgccttccaccacctcttcaaccaagtatatattttcatcgtctcatttccacatttgactatgcatagtaaattagtaattactccagtaaaatttgtgattagacatgatcgtgcacaaacacagaaccaccgtggcgccatgatggagctcggggaaggcctctgcaagctccgcaagctgcgtctcgacgacgacaccacgagcccattctctcggttccaggaggaggtcgccgcggcgctcaacttcatctaccgcacacagaaggagctcgcggcgtgcaccgacgatctctgcctcaccatggatggctccgcgacctcctaccagctgcttggcaacttcgccgctggccagaagctctaccggcttgaaacaacaaccagtgcagatggagatggcgttccaactataatcttctctgcttcttcacgactcgtcagggtgaagctccccacattgagcgccacggagcatcatctagcagcgcttcaatgtacaagcgagtatatttag

SEQ ID NO: 91198 - DNA, 569 bp, Oryza sativa
  unsure (1)..(569): unsure at all n locations
  Clone ID: PAT_MRT4530_89798C.1
ggggtgtttgttttttctttttttttttttttttttttttttttttttttttttttttggtggttttttttttttttttttttttgggtcggtcggtcncgccccgccccatttttttgcccccccttttttcattttccaagtngcaaatggggggggggggggggcttgcctgcttttgccggctccttgcctgcgggcccggggtgggttgcccatttggctggctggggtcctcccaggggtgccgccttgtttcttccccggtcggtggggtggcctggcgggggcgcggggttcgggcgggggttttttggtgggggggttccggggcccttgggggggcccccgggttttccgggccgggccctgggggcgtcccgggtttccctttggggggccgttttngggcttggggtnntcgtggtctttgctgttccctgggggcctttggtttccgctttcttttccccccggcctccggcgcgcgggggcttgtggtgggtgggctggtgggcccctcttggggggggtgcctggggttgtcttggtcgtcggctctcctgggg

SEQ ID NO: 91199 - DNA, 483 bp, Oryza sativa
  Clone ID: PAT_MRT4530_89799C.1
atggcaatcaccgtggagtggaacggacgtgagggagctcgattcacagagagacccggaggtgatgcactgaaaatcgaagatattaggatggaggatggcgagccatcgaaaaccaagggagcaaaggggcgaagtggcgtcaggcattgggggctcgccaaagatgatcacggcacgacaaggatccacggcttgggtccatcgcgtgacgtcgagcttctccattggcctatttctcaggcattgagagaacggcgtacgagtagtggctgcccactgcttagatacaccaaaagagtatggacgctcctagcctcctgggtggcttaccagcagttggacccaagccaatgggagccttgcctatctgtacaaggctggtgggagatgcttgctaacaaaagagaggttcctaagaaagggctgcgtagcttgattcttctggtggtctgggaaatctggaaagaaaggaaccaatga

SEQ ID NO: 91200 - DNA, 3075 bp, Oryza sativa
  Clone ID: PAT_MRT4530_8979C.1
atggccgagcaaggaaaaacacacgacctctcgccgagtgtgagcggcgacgacggggagccgaatccgcgccgtcgagctcgtactcctccacctcctccgcgccaaagccctaagcagggggaggcgcttgagagggtcgacaaatccgcggcgtcaccagccgcaggtgatgcaggagaacggcgagatggggagcgtcgcctcctcgtctacggcgacggcagcacacctcagggtgcgcttcaggctgctggcgcgctcctacgacacccgcctgtcgtccatgacccggagtctccagcccaacgatggctggaagacgtggccaacttggtcatgacggcacagcagcgcctgggtgctggtggacggtccgccaccaccaccaagacctccggcgccgctaccaccggctccgtgtcatcaaggcggagggcgcggcgagcggcggcggctgcacgtcattcggccgccactccctcgtcgacacctccaactcgggaggatcagcatggggagccggatgcccgcctcgacatcgagcgccggcgtaataaccggcgtactccccgtgcaacggagggcgcctcctcgtccggagtgtcacctcgacatggacgtgaggatcagccctccgtgcccccggctggtggtgtcggctgtagagcctttgtggcgagtcttcggaatgtccgttggcccccaaggttccggcccaccatcaccgagaagtacgatgggagcgtcaaccccaccgagtttctccaggtctatacgaccgggatcgaggccgctgggggtgacgacagggtcatggcgaatttctttcccatggccctaaagggacaggcgcggggttggctgatgaacttgccacccgcgtcggtccactcctgggaggatctgtgccaacagttcaccatgaacttccaaggcacatatccgcgcccaggcgaagaagcggacttgcatgcagtacagcgaggcgatgatgagtcgcttcgctcgtacattcagcggttttgccaagtccgcaatactataccatgcatccctgcacacgcggtgatctacgcgttcaggggggcgtgcggcacaaccgcatgctcgaaaagatcgcttccaaagagccccagaccaccgcggagctttttcagctcgcggaccgagtggctcgtaaggaggaagcgtggacatggaactcctccggttccggagtggcagcttcggccgcccccggatccgccgctcagacagggcggcgtgacaggaggaggaagaagaggtcggtccattccggcgacgagggtcatgtcctcgccgtcgagggcgctccgcgggccacccgaaaggggaggcctgcgagcgacaaaaagaaagaggccgacgctccctgacctcggctacttggaagagcgaaggcggcgcgcggcccttcgagccgcgcgctaccagcagagcctgcggcgctaccatcagcgccacgtccgggcccgatcactctgcgtcgacgacctcgtcctacgccgcgtccaaacgcgtgctggattgagcaagctctcaccaatgtgggagggtccgtatcgagtgattggcgtcccccggccgggctccgttcggctggccacgggcgacggcacagagctgcctaacccatggaacatcgaacaccttcgtcgcttctacccctatctatacaagaagggggcccgaaggcctcggaagaagaaagaaaaagctattcaagattggcgggggcctgggggctcactccgacgcgcccgggtcaccagccttgtcgtcgctgtcgtccgcaccaccgtcgccgccctcctcgtcggagtcgagggcgaacgcgagccgaggggccgtaccctcgaagctgtggacgatgtggtcggcggcgtcccggacctgcgcgcgtgcgccgtcctcggttccgaaagggaactcttccagcgccgcccacggggagaagtcagggtccgagaggcccccaagccgaacggcggcccaaggcccccgacggccggagttggccctccgcctgcttgtccgacggtgtcaggcgcccccgaccctcaggatagcctcggggccactgcgggaaggccgcgcctgtcgccctcttaccccgaggatatcggcgcagaagccgagggcgccccgcgctgcctctcggatgaagagcgccctggagatgcggcccctagcgaagaggatcggccccgccgaaaggtgcagcggcccgtctactttgttagtgaggccctccgggacgccaaaacccgataccctcgggcccagaagatgctatacgctattctgatggctccgagaaaagcaccatcaccatatctccaggcgaagcaaatcggctcgcccagattcgtgcgctgctcagaccggtcccacctgtcaccaggctttaggagtggcgtcacacctgaccgcttcccttgggaagggaaattgctctggcataacgccgggggctactgtcggtgatatgggaccgggagtatcatgaccagaggcttgaggcagacgcaatcgcccacgtggcctggcaccttcggggacgtcgggcccgagggtgaggtgtccgccctcctcctgatttcccccgagggggggtcgggttgcgcttgccccggccccgagggccgaggcaccccgaccccctttaggaagtctaacagcatttattgcagtctggtcaagcgtgtcgcgctgcatgcagtgcagcacggcgcgtccctttatccggttggcggtctgacgcacgccatgccccatcccgtcaagacgaaagcctctaggcactcgtctcaagccggcgttaagcgtgttatctcttagagatgacacgttagacccggtcgatatatgccaggcttcatcctgtatagatcgccggtgtctcgtgttttctggctggcagacgatatttccacatacagagagagcgagagcttgagatttcaccctaagcccccggccgaactggcaaaggggggcctgcgcggtctcccggtgaggagccacgagctccgtcacccattgtaacat

SEQ ID NO: 91201 - DNA, 423 bp, Oryza sativa
  Clone ID: PAT_MRT4530_897C.1
aaggaactcaaactccccaagtgtgttttactcaacaattttgtggctgcatgcattattgtgaaactaccttcttcatggagaaattttagtataatgtctcaaacacaagagataggagacaggagtactccattgagtggttgatacttgatagtataatgtctcttaatgttgaggagaaagcttaaggaaaagacgttgtgtctaagggcgatggtaggtagtctagtgctaatgtgatgcacaaagcccaaaacaagaacaaagaaaaattcttcaaagttcaacagaccactgacttcaagaaaaagaagaagaagaacaatccgaactaggatgacagatttgctatgtgtgtgatttgtccggtcatttgataattttaatcttctcttctctctttcctactcatctttttat

SEQ ID NO: 91202 - DNA, 379 bp, Oryza sativa
  unsure (1)..(379): unsure at all n locations
  Clone ID: PAT_MRT4530_89800C.1
aaatccatntcttataaatgaatcttgcnnaaaaaaaaaaaaaaaaaaaaaaaaaaaaaaaaaaaaaaaaaaaaaaaaaaaaaaaaaaaaaaaaaaaaaaaatnaaaaaaaaaaaaaaaaaaattttttttcnnccgctggggagggatccaancnaactttcccgtttttaaaaaaaaattttttttttatagggccccctaattttatttcacttccccccgtttaacaacttcttaactggaaaaaccctgtctttccccaactaattttcttttcataaaattccccttttttctttttggggaaaaacaaaaaaggcccctaccttttttttttccaaacatttttncanccnaaattgttaatggtacccccc

SEQ ID NO: 91203 - DNA, 2883 bp, Oryza sativa
  Clone ID: PAT_MRT4530_89801C.1
atgccgttgtttgatcgggatcggtaccagcggctggatggcaacggcggcggcggcggcggaggacgccgttcttcgccgtcgtcctgctcgacggcgaccatcgtcctgttcgtggcgctctgcctcgtcggcgcgtggatgatgtcgtcgacgggaaacgtcccgatggccgtgtcgccggaggacaagccgccggcggtggtcaaggaggacgacgcgtcgtccatcgacgtcaccgacggcgtcaagggtcgcggcggcggcggcgatggcggcgacacgccgcgaactacggacgaggcagccgacgacgttggcaagaaagtccaagatgccggcgacacggcgaagacgacggacgacgtcggggacaccggcgtgaaaggcggcggcgttgacacgcaaacggcgacggatgcggtcgccaagaccaccaccggaggcacgggggcgggggagtccggcaagcccgccggcgacaaggtaggcgacggcgagacgacgacgacgtcgaagaaccagacattctccgacgagaacggcaagacggagggcggcgaggtggtgagcccagaagatcccgacaagcagagcgccgacgatgcgccaaccgacggcaaggacaccggcgaccaagccagcggcgatgccgacgaggcgccgtcgacggacacgaaggggaaaaagaacagcacggcggaggagcccagggacaccaaggacgccggcgagaacgccgatgaggcttccaccgagactaaggctgacaagagctccgacgatacgcccaccgacgcgaaggcgaccggcgacggcggcacgccgtcgaagaaccagacgtcattcgacgacgagaacgggaagatggacggcgtcgagacggtggcagaggacggcaaggtcacggagaagagctccgaacaagttcccaccaatggcgacgacggcggcggcggcggcgaggcgcaaaccaccgacgacgacacggccaccggcgcgtcatcgaacaaccaaactatcagcgacatgaacgacgactcgaacacgacgacgacgacgacgacgacactcgcagccgtggacagcagcaatggcacagtctcccaaacaacagaggacgacgcgccggcgaacagcgccgccgccgccgccgccgccaccgaaaagatcaatccggcggcggagcaggagctcctcccgagcggccaggctgagctgctgaacgagacggcgtcggcggtggcgcagaacggctcgttcccgacgcaggcgtcggagtcgagcgccgagaagaaggcgcgcgacagaaacaagaacaagagcaacggcagcgacacggcggcggcggcggcggtggcggtggcgcacgggtggaagctctgcaacgtgagcaccggcgaggactacatcccgtgcctggacaacgaggcggcgatcaagaagctcaagacgaccaagcactacgagcaccgtgagcgacactgccccgccgcggcgccgacgtgcctcgtcccgctccccggcggctaccggcggccgatcccgtggccgtacagccgcgacaagatctggtaccacaacgtgccgcacaccaagctggcgtcgtacaaggggcaccagaactgggtgaaggtctccggcgagcacctgacgttccccggcggcgggacgcagttcataaacggcgcggcgcactacatcgacctgatcgaggaggcggtcccggcggtggcgtgggggcggcgcagccgcgtcgtgctcgacgtcggctgcggcgtggccagcttcggcggcttcctgttcgaccgcgacgcgctcaccatgtcgctggcgcccaaggacgagcacgaggcgcaggtgcagttcgcgctggagcgcggcatcccggccatctccgccgtcatgggcaccaagcgcctccccttccccggcggcgcgctacgacgccgtccactgcgcgcgctgccgcgtgccatggcacatctggggcggcaagctcctcctcgagacatggcggcgctcaccaagtccatgtgctggaagatggtgaagaagacgaacgacaccgtggacgagacggccatggtgatcttcaagaagccgacgagcaacggctgctacagcaaccgggagaagccggagccgccgctctgcgacgccgacgacgaccccaacgccgcgtggaacatcacgctgcgggcgtgcatgcaccgcctgcccaccaacaagtccgtccgcggcgcgcggtggccggagctgtggccggagcggatgtcggcggcgccctactggctgtcgcacagccaggtcggcgtctacggcaagccggcgccagacgacttcgcggcggacgaggagcactggaaccacgtcgtcaacagctcgtacctcgccggcgtcggcatcgactggagcaacgtcaggaacgtcatggacatgcgagccgtgtatggcgggttcgcggcggcattgaaggacatgaatgtgtgggtgatgaacgtggtgccagtggactcggcggacacgctgccgatcatctatgagcgagggctgtttggcatgtaccacgactggtgcgagtccttcagcacctaccctcgatcatacgacctcctccacgccgaccatctcttctccaagctcaagaaaaggtgcaagctgttgccggtgatggtcgaggtggaccggatcctgcggccggaggggaagctgatcgtgcgggacggccgcgacacggcggcggaggtggagagcatcctgaggtcgttgcactgggaggtgaggatgacggtgtccaagcagggagaggtgatgctctgcgccgagaagacgatgtggcggcccaaggaagtcgagaaggcggcgacgacggcgagctag

SEQ ID NO: 91204 - DNA, 585 bp, Oryza sativa
  Clone ID: PAT_MRT4530_89802C.1
atggcgacgagcgccgagcggcctggacctcatcggcgggaggggcaacgccaagccgacgcttcccgtcttcggcaagggacggtgaaggggtgctccaggatagcgcgcgcacggggaacccgacgcgactgtgaggagggtgaaggtgcggtggtgcccttcccggaaagctccgagagtgtagtaggctggaggaaggtacgccctgccggactccgtggttatgggatgtggcactggggccacgtcgtcaatagctcgtacctcgctggcgtcagcatcgactggagcaacgtcaggaacgtcatggacaagctagccgtctacggcgggttcgcggcagcgttgaaggacatgaatgtgtgggtgatgaacgtggtgtcggtggactcgccggacacgctgccgatcatctacgagcgagggctgttcggcatgtaccatgactggtgcgagtccttcagcacctaccctagatcatacgacctcctccacgccgaccattttttctccaagctcaagaaaaggtgcaagctgttgccggtgatggtggaggtggaccggagatgttcttctagctaa

SEQ ID NO: 91205 - DNA, 303 bp, Oryza sativa
  Clone ID: PAT_MRT4530_89803C.1
atggcaccagatgaccagagttacgcagcagcagctagccagaccgagctcacaggcgactactatgcagctcagctggagctaccggcgatcgatcagcagctccctcagtcttcgtcgtcgtcgtcgtcgtctccccttggcctctactgcccaacgactactactgctgcttctgaaaagcacagtggtatagctgctgctgctgctgctgctgttgttgcagctgcagctgcaatgcttgcaattgaaggtggctgtggctgtggcactggccctgggccggctggggctgtggtttga

SEQ ID NO: 91206 - DNA, 2973 bp, Oryza sativa
  Clone ID: PAT_MRT4530_89804C.1
atgccgttgtttgatcgggatcggtaccagcggctggatggcaacggcggcggcggcggcggaggacgccgttcttcgccgtcgtcctgctcgacggcgaccatcgtcctgttcgtggcgctctgcctcgtcggcgcgtggatgatgtcgtcgacgggaaacgtcccgatggccgtgtcgccggaggacaagccgccggcggtggtcaaggaggacgacgcgtcgtccatcgacgtcaccgacggcgtcaagggtcgcggcggcggcggcgatggcggcgacacgccgcgaactacggacgaggcagccgacgacgttggcaagaaagtccaagatgccggcgacacggcgaagacgacggacgacgtcggggacaccggcgtgaaaggcggcggcgttgacacgcaaacggcgacggatgcggtcgccaagaccaccaccggaggcacgggggcgggggagtccggcaagcccgccggcgacaaggtaggcgacggcgagacgacgacgacgtcgaagaaccagacattctccgacgagaacggcaagacggagggcggcgaggtggtgagcccagaagatcccgacaagcagagcgccgacgatgcgccaaccgacggcaaggacaccggcgaccaagccagcggcgatgccgacgaggcgccgtcgacggacacgaaggggaaaaagaacagcacggcggaggagcccagggacaccaaggacgccggcgagaacgccgatgaggcttccaccgagactaaggctgacaagagctccgacgatacgcccaccgacgcgaaggcgaccggcgacggcggcacgccgtcgaagaaccagacgtcattcgacgacgagaacgggaagatggacggcgtcgagacggtggcagaggacggcaaggtcacggagaagagctccgaacaagttcccaccaatggcgacgacggcggcggcggcggcgaggcgcaaaccaccgacgacgacacggccaccggcgcgtcatcgaacaaccaaactatcagcgacatgaacgacgactcgaacacgacgacgacgacgacgacgacactcgcagccgtggacagcagcaatggcacagtctcccaaacaacagaggacgacgcgccggcgaacagcgccgccgccgccgccgccgccaccgaaaagatcaatccggcggcggagcaggagctcctcccgagcggccaggctgagctgctgaacgagacggcgtcggcggtggcgcagaacggctcgttcccgacgcaggcgtcggagtcgagcgccgagaagaaggcgcgcgacagaaacaagaacaagagcaacggcagcgacacggcggcggcggcggcggtggcggtggcgcacgggtggaagctctgcaacgtgagcaccggcgaggactacatcccgtgcctggacaacgaggcggcgatcaagaagctcaagacgaccaagcactacgagcaccgtgagcgacactgccccgccgcggcgccgacgtgcctcgtcccgctccccggcggctaccggcggccgatcccgtggccgtacagccgcgacaagatctggtaccacaacgtgccgcacaccaagctggcgtcgtacaaggggcaccagaactgggtgaaggtctccggcgagcacctgacgttccccggcggcgggacgcagttcataaacggcgcggcgcactacatcgacctgatcgaggaggcggtcccggcggtggcgtgggggcggcgcagccgcgtcgtgctcgacgtcggctgcggcgtggccagcttcggcggcttcctgttcgaccgcgacgcgctcaccatgtcgctggcgcccaaggacgagcacgaggcgcaggtgcagttcgcgctggagcgcggcatcccggccatctccgccgtcatgggcaccaagcgcctccccttccccggcggcgcctacgacgccgtccactgcgcgcgctgccgcgtgccatggcacatctggggcggcaagctcctcctcgaggtcaaccgcctcctccgccccggcggcctcttcgtctggtccgccacgccggtctaccggaagacgccggaggacgtccagatctggcacgacatggcggcgctcaccaagtccatgtgctggaagatggtgaagaagacgaacgacaccgtggacgagacggccatggtgatcttcaagaagccgacgagcaacggctgctacagcaaccgggagaagccggagccgccgctctgcgacgccgacgacgaccccaacgccgcgtggaacatcacgctgcgggcgtgcatgcaccgcctgcccaccaacaagtccgtccgcggcgcgcggtggccggagctgtggccggagcggatgtcggcggcgccctactggctgtcgcacagccaggtcggcgtctacggcaagccggcgccagacgacttcgcggcggacgaggagcactggaaccacgtcgtcaacagctcgtacctcgccggcgtcggcatcgactggagcaacgtcaggaacgtcatggacatgcgagccgtgtatggcgggttcgcggcggcattgaaggacatgaatgtgtgggtgatgaacgtggtgccagtggactcggcggacacgctgccgatcatctatgagcgagggctgtttggcatgtaccacgactggtgcgagtccttcagcacctaccctcgatcatacgacctcctccacgccgaccatctcttctccaagctcaagaaaaggtgcaagctgttgccggtgatggtcgaggtggaccggatcctgcggccggaggggaagctgatcgtgcgggacggccgcgacacggcggcggaggtggagagcatcctgaggtcgttgcactgggaggtgaggatgacggtgtccaagcagggagaggtgatgctctgcgccgagaagacgatgtggcggcccaaggaagtcgagaaggcggcgacgacggcgagctag

SEQ ID NO: 91207 - DNA, 933 bp, Oryza sativa
  Clone ID: PAT_MRT4530_89805C.1
atggctttcttggtggagaggtgcggggagatggtggtgtcgatggagatggggccgcacggcggcggcggcgcggcggcggggaagccggtgccggcgccgttcctgacgaagacgtaccagctggtggacgacccctgcaccgaccacatcgtgtcgtggggcgaggacgacaccaccttcgtcgtgtggcggccgccggagttcgcccgcgacctcctccccaactacttcaagcacaacaacttctccagcttcgtcaggcagctcaacacctatggtttcaggaagatagtagctgacaggtgggagttcgccaacgagttcttcaggaagggagccaagcacctcctcgccgagattcaccggcggaagtcgtcgcagccgccgccgccgccgatgccgcaccaaccctaccaccaccaccaccacctcaatcccttctcgctgccgccgccgccgccggcgtaccaccaccaccatctaatccaagaagagcccgccacgacggcgcactgtactgtcgccggagacggcggcgaaggcggggacttcctggcggcgctgtcggaggacaaccggcagctgcggcggcgcaactcgctgctgctgtcggagctggcgcacatgaagaagctctacaacgacatcatctacttcctccagaaccacgtcgcgccggtcaccaccaccaccaccaccccctcgtcgacggccatggcggcggcgcaacaccaccttccagccgccgcctcctgcaggctgatggagctcgactcccccgatcactcgccgccgccgccgccgcccaagactccagcaaccgacggcggcgacacggtgaagctgttcggcgtgtcgctgcacggcaggaagaagcgggcgcaccgggacgacgacgacggcgtccatgaccagggaagcgaggtgtga

SEQ ID NO: 91208 - DNA, 1032 bp, Oryza sativa
  Clone ID: PAT_MRT4530_89806C.1
atgaagaggggttgtgaagatgaacttggagctggtgatgtgattctacgaggggtggaggaggtagaagaggaagatgatgatgacctggttctccccggattccggttccatcctaccgacgaggagctagtgacgttctaccttcgccggaagatcgccgagaagcggctgagcatcgagatcatcaaggagatggacatctacaagcatgatccctccgacttcctcaagacgagcacggtgggcagcgagaaggaatggtacttcttctgccttcgagggaggaagtacaggaacagcatccgacccaaccgggtcaccggctccggcttctggaaggccaccggaatcgaccgcccaatctgctctgccgccggcggcggcggcggcgactgcatcggcctcaagaagtcgctcgtctactaccgcggcagcgccggcaagggcaccaagaccgactggatgatgcacgagttccgcctccctccgccgcccgccgacgacctcgccgccggccgctcctcccctcctccgagcctccaagaagcggaagtttggaccatctgccgaatcttccagaggaacatcacccacaagaagcagccgcagccgcagctcgccgtcgccgccgccgcggtgccggcgccggtgccggacgcgacgagctcgatcaccggcagcctcgagtccgacagcgccggcgacgacgtcgtcgagtacatgaacaccctccagccgccgccggcgagcaacgtgaacggtggctacagcaaccagcgctacttccaggagcaatggaacagtagcagcaatgataataccacagtgtttcatcagcatgcggcggcggcgccaccgccggagccttcgccggcgacggcgatggccggattcggccatgatcagagcgttctcagctcgccggcgccgagcgatttctactacaaggatggatgcaacgatgacatttacaggatggtgatggagctcgccgatccgagcttgttctatgatcatatatatgcttaa

SEQ ID NO: 91209 - DNA, 474 bp, Oryza sativa
  Clone ID: PAT_MRT4530_89807C.1
atgaaagggagccgtatgcggtgggtgaaggcgttcactccccgttctccctccttcctcttcatggtgtccttgagaaagcggatccacaacactgacctagccatcatgcctgtagtagctgcacgcaaggctgcccgccaagcgtgtgtgacaagagcacctatcctccctgacctccggatccacctaccacaaggtgtgtgtctctgcggcaatgtcaggcttctctacccacagggtgctgacatccccttccttgctgccataccctgggactctgccatcattgagggaatggggctctccatgtcactttgcccctccttgcccgctgccggcctgagcatcaggagacctccgccttcacccccagatactcgaatctctctacgacaacgacacgaccttagaccacctctgacacctcccaacgcatgccgcatccagggacctcttcactgcccacagtag

SEQ ID NO: 91210 - DNA, 621 bp, Oryza sativa
  Clone ID: PAT_MRT4530_89808C.1
atggcgcgttcctgcagcagcagcggcagcgatcatagtagctacgacctcgcgttaacgttgcggcggaagctcctgctcctcgacatcctcgccgtcctccgcttcctcgcggcggccctcctcgagcgtctcggcgtcgtgtcctgccaggaggacaatgagctccccggctgccactcctggtgcgacagcgacgtcgtagacaccggcgcgatggagcgcctcatgcaggcgaagctcagtacgtcgtggtacaggctacggcggcgtgcttcgcggggcggatcagacaacatggcctcgccgcacggcgacacgagcgcggacatctgcacgatttgcttggcggaactggaggctggaggtggaggaggaggatgccagcgccaggtcgcggagctgagcagctgctcgcacgcgttccacgccgcgtgcatcgacggttgggtggtggaggcgggaacctgccctctgtgccgcacgccggagtacatttttatagcttcaacaatcatgcctgttggcaacttcccgtgttctagctgcaacctggacgatcttcagaatttgtatagcggcaacgatagctggtcggtgcaccagctaggcatccactag

SEQ ID NO: 91211 - DNA, 5196 bp, Oryza sativa
  Clone ID: PAT_MRT4530_89809C.1
gaacccccacccgacgcggaggaaagcgccggcccggttcgggtcggcgaggacgccggtgctccggcggtcggcgggcgaaacggaggagcggacgaggtcgacgacgacgcggcgaagccgatggaggtgacgccgagacgggaggagatgaatttatcaggacgtgacatgccccaagccgcttcgtcacagccgacaacaacttcgaccgcgttcgccgttgcgccagtcaacaccaaccccgaagcacaagccgaagccaatatggaggccatgcgccaaaacatgactcgactccaagacgtgcttcgctaggtgcaagagcagcaacaggcgtatgaggcagcgcggcaggccaaggtcgcttcgcccccaatcctctagtattcagcaggctacgtcccaccccaagtctatccgctagcaccgatccagccccttccagcacaagccgtacaagtgccagtatacttcgccgggcagccttcgaccgcggcggttcatccgacctctcattcgctgcaagctcagccggccgtggtccaagcacactcttagctgccgggccaagtgtcacaagcaatggcggaaggggcttcggctttgcaagtgcagcttcaagctttcctccagcaattaagccaaccccacagtatttcaggtacagccccttcggcccagccggaggggaattcgagtcaaggtgcgcctagttggttgccgtcgaaccagccgggtccaggggcttcgccttggagtcaaggaccacagttcgacttcctcaatgcagctccggcaccaaccgctcggccacaagcaccgacaccaggcttcggggcaaaccaaacgccaaatcaggccaccatggtgtggccccagcctgcgttcgacctatcaacgatggctcaccaagcaccaccaatcggagccgggcagtcgaatgccacggctcgacctcacgcgcaagccgcgacttcgcccttcgccacgccgtacccacagcaaggtgccgtgaatagggcagggggcgaaaaggggctaccactaagtgggggaatcaagacccgtccaatcccaccccagttcaagttcccacccgtcccacgctacataggcgaaactgacccaaaggaattcctctccatttacgagtccacgatcgaagcggctcatggtgacgaaaacaccaaggcaaaggtaatacatctcgctctagacagcatcgcccgttcttggtactttaatttaccagccaatagcatttactcatgggagcaattgcgcaatgtctttgtccttaactttcgagacacttatggggagcagcatctactcggcatttgccagacgcccggggagtcgataagggagtacatgcgtcgcttctcgcaagcccggtgccaagtacaggacataaccgaggtgtctgtcataaacgccacttcggtcgggctactcgagggcaaactcacaaggaagatcgacgaaccacctcctctcgctgttcgtcagccccaaacggcaatccaaggacaaccgccaaggcaaagccaagcccccatgacctggaggaagttcagaacagaccgatcgggcaaggccgttgcggcgacgcgatgggcgtgatggcagtcgaagaagttcgatgcctagcaagcaagcaaccatcagcagcctgttcgcaagaaatacctgaaccagcaaatctccttcggatcagaagacgctgaaggggtcctaatcccacatcaataccccttggtgatctcggccgaggtagctggctttgaagtccggcgaatcctggttgacaggggaagttcggccaacgtcattttcgccgatgcatatgccaagatggggctgccaaccctagccctcacccaagcaccagcctcacttcgtggtttcggcggcaaagcagttaaagtctcgggccaagtgcagctggctgtagccttcggcacaaatgagaacaggcgtgaagagcaaatactattcgatgtcgtcgacatcccatacagctacaatgccatcttcggccgcgcaaccctgagcaagttcgaagccatctcccaccataactatctcaagctcaagatgccgggtccaacaggcgtgatcgtcgtcaaggggcttcaaccttcggccacatcaaagggcgatctggccgaaatcaacatagcagtgcacaatgttgaggctgaaccacataatcatgctaaacacatgccgaagcccgcccctcatggcaaggtaatcaagaagcagatcgacgacgccgatcctacaaagcttgttctgctcgggggcgatctaggcgaagaggaagctgaaaacatccttgaggtgctcagaaggaacattgacatcttcgcctggagccccgacgaaatgggaggtgtttcgacggacctcatcatgcaccatctggcagtcaagccagatgccaagccaaggaaatagaagctgcgcaagatgtccgccgattgccaagaggcagcaaaggctaaagtgcaaaagctgctaagcgcgggggtgatccaagagatcgaccacccaaagtggctggcgaatccggttctggtgaggaagtcaaacggcaagtggaacatgtgtgtcgatttcacagacctcaacaaggtgtgcccgaaagacgactttcccttcccgcggatcgaccagcttgttgattcgacagctggctgtgagctcatgagctttctcgatgcatattccgtctatcaccagatccacatgaatccggcagacatcctaaagacagccttcatcacgccgttcggcactttctgcctcctcaggatgcctttcgacctgaggaacgctggagcaacatttgccaggctggtgtacaaggtcctttgcaagcagttgggacgaaatgtggaggactatgttgacgacatcgtcgtaaaaagccacaaggctttcgaccatgcgttcgacatgcaggagaccttcgacaacttgcgcgcagctggtataaaactaaaccctgaaaagtgtgtttttggtgttcgcacgggcaagttgttgggttttcttgcagccgaaagaggtttactcttcttcaagacccttcgaggcgtgggaaagttcagctggacacctaaatgccaagaagcgttcgacgagctagaacagtatctgcaaagaccgcccgctttggtcagcccaacactgggaagcgaacggctgctctatctagcagcttcgctagtggcggtcagtgcagctctcatccaagagactgagtaagccagaaacaagtgtatttcttctctgaagctctgcaagcggcgaagataagatacatccaaatggaaaagctcgtttacgccttagtaatggcttcgcgcaagcttaagcactacttttatgccctagttactgtgccgtcgcagtatcctttgggcgaagtgctatgtggcaagaagatcactggccaactcagcaagtgggcagcagagttatcacccttcgatttgcattttgtcgctcgcacggccatcaaatcccaagtcctagccgacttcgtggccgaatggacaccggcgttcgcccccgagcccgagcccgtcgaacagccttgggtaatgcactccgacggctcgtggtcgcacaagggagcgggcgccgcggccgtactcacttcgccaaggggcgcgcccattcggtatgccgcaaggctgcagtttgacatgaccaacaatacggccgaatacgagctatgcttttgggcctaagaatggcgaaagctttgggggttcggcgcttgctcatccgaacagactccaagctggtggcaagtcatgttaacaaatcctttgaggcaaaagaagaaggaatgaagagatatctggaggctgttcagtctatggaacagtgctttgccggcataacggtcgaacacttacctagaggccaaaatgaggaagcggataccctggcgaaatccgccacctgtggaggcccgcattcgccaggcatcttttttgaagtcttgtacgcacctagcgtgcccacagaaagcctggacatcatggcaatcaaccaggcagagctaggtgaagacctagaggactggcaaacaccgttcgtcaagtacctcaggaacggctggctcccagaagaggaagcagaagcgaagcgcttacagctcagagccacaagatgcaagcttgtctctggccagctgtatcactccggggtgctccaacccttacttcgctgcatttccttcgccgaaggagaagaaatggcgaaagaaatacaccaggggctgtgcggtgcacatcaagccgcaagaacagtcgcctccaaagtgttttgccagggagtctattggcctaccgtgctgaaagtttgtgtcgagcaagccaagaagtgcgaaagctgccagcggcatggccgaagccaaactgcacctcagtatgagctgcagcctatcgcgctaatatggcctttcgccagatgggggctagacatcatcggcccattccctgtggcaagaaatgggtacaagttcacaattgtagccatcgaatacttctcccgctagatcgaggccgaaccgctcggtgcgatcacttcggcagctgtacagaagttcgtgtggaaaaacattgtctgtcgtttcggagtgccgaaggaattcattactgataacggcaaacaattcgactctgacaagttcagagaaatgtgcgaggggctaaacctggaaatcaggttcgcctcggtcgcgcactcacagtcaaatggggcggccgaacacacaaatggcaaaatccttgaggcggtcaagaaaaggcttgagggggcggcgaagggcaaatggccagacgaaatgctatccgttctttgggcccttcgaacgacccccacaaggcctaccaagttcagcctgttcatgctcctttatggcgacgaagcaatgaccccaactgagctaggggctaattcgccaagggtaatgttctcgggaggcgaagatgggcgcacggtgtcactcgaactccttgaagcggtaagagtcgaagcactggaacacatacgcaaatacgcaacaggcacttcggcaacttgtaacaaaaaagttcgaccgacagagctattgcctggccatcttgttctaaggaagaaggcgaacccggtggcagtcgggaagct

SEQ ID NO: 91212 - DNA, 192 bp, Oryza sativa
  Clone ID: PAT_MRT4530_8980C.1
gacaggggaaccaaattacccccattattttaatggttttgaattcacccccaagttagggcgaccattctgggggttatttttgttcaaaaggataacaaggtggtaacttggcacaaaaattttggtacattttgaacagggttaattgggtttttaagcaagaattcccgggatatgaaagtttttggg

SEQ ID NO: 91213 - DNA, 1080 bp, Oryza sativa
  Clone ID: PAT_MRT4530_89810C.1
ctaaccaagaagcccaataacaacgtcgaggaaccgctgcaccttgcaagcctgcaattggcggattggaagctggcctacatacaatggaggaataagttcatataggtatgtcattttgtcatcgaatctcagcaccattttgttcacttcatactcgatgtcaccctttttcaagtaatccgttaatggggggcctttaccatttctttgggcttctttgccggtctcgacggcgacgagcttctggaggaggaggagaggcaggtggttatcggtgatgagcatgtcgcggcggacgtacggcaccatgtacagcgcgccgtggcggccgaacaccgggtcgttgtgtgcgtatccgccgccgctgatcaccttcgtcgtcctcatcatctccagcagaccaccagggagcacccgttggtgaacatcaccggcaagaatctctcgccgcgccactcgccggcgaggtccacggcggcaacgaactcctccaccggcctgcgtggagatgggtgcgtggcggatgggtgctcaccgggatgcggcggaagcagctggacagacgacggcggcgcccccctgctcagctcgcgggatgaaggatcggcgcagcctgctcagcccgccgtcggcctcggctcctcgcccgctgcccgcagccgcctccgcgcccgcccgcctccagcctcggctcctatcccgccgtccgcagctatctccgccaccggccgcccgtcggcgtcgattcctcgcccgcccgctgtccgcagccatccccgccgtcggccgcccgtcggtgtctgctcctcgtcttctcagatctcaacggcgcggctagggttcggcggaggcggcgcatggagggggctgcggcggcggcgcgcggtgagggcttcggcggcggcggcaggacgtgcggtggtgacgacgcgcaggtgcagctgcgacagcgacgcgcaggtgctgctgctgcacggcggcacggcgacgaccgacagaaagaatgacgtgatgggtgacgaggagaagggcggtggctggtggccacaggagaggagggcggccaatatatcgtag

SEQ ID NO: 91214 - DNA, 885 bp, Oryza sativa
  Clone ID: PAT_MRT4530_89811C.1
atggtgggacccacttatcaacccagtcggcggagacaggcggtgggtagcgccggtgggcgtcggcgcggggacggccggtgggcagcggcgcgcggggtcgagccgatcgtcagcgcgcacggcggcgcacggggatggccggtgggcagtggcgcgcgggagtgggctgaccgtcggcgcactcggcggcgcgcggggagggggagcggaggtggattgggaaggggaggaaatggaagtggaatgagaggtcgaaggggagcgagctccgcgcacggcggaggacatggcggtgaggcgggcgccggcctccatctccgttggccatcgccgactgcccggtccgccttcgcctcatccactggtgcgaagcctcgctccctagctgctacttcggcagccgccttcctcccgccacagcgccgcaccccgcggcagcctcccgcgacgccgccggtcgccggccgcccgagctcgccccgcaccccaccgcggcctcctcgcctgtcacttgccgcccgcagccggctccgcacccgccgcggcggccgcctccgtgcccgcctgccctccggcctcggcccctttgcccgccacctgccagccgccttctacccggccccggccgactttcgcctctgccacccgcccagccggcggccttgggctcctcgccccggcctgcgggcctgggccgcctccgcacccgccgccgccgccgcctccgtgcccgcctgcctccggcctcggctccttgcccgccacctgcagccgcctctacccggcccgccgacctcgcctctgcacccgccagccgcggccttggctcctcgcccgcctccggcctcggctccgcgcccgccagctgcctctgctcgctga

SEQ ID NO: 91215 - DNA, 195 bp, Oryza sativa
  Clone ID: PAT_MRT4530_89812C.1
atggagacgacagtgaacagctgtggcacgaggttgcgatggaaggggattatgagcggcgcgtttccattcatggcggcgtccgacacactcggcatcacggatatccagggaggaacgatggccagcgatggaggaaagctgctaccgcgccactgcaagcgaggtgatctgacggtgccgttatcaccgtga

SEQ ID NO: 91216 - DNA, 281 bp, Oryza sativa
  Clone ID: PAT_MRT4530_89813C.1
cgcgtatttttttgaggcgggcgccagcgtttaggtaatgagcgctttggttggagatagactcacctaactgagcctgacggggagactgcacaagtactactgggacgctcgcacaagttatgtttcgctatctcggagtgtgatcaccttgtcaagtataaggaaccggagtaagctctctttattcgtggcaagggtgagagcttgccggtgactatcgctgagacgatggcccacgtgatcacagtcagcagactggaggctcccggtgcagcaga

SEQ ID NO: 91217 - DNA, 257 bp, Oryza sativa
  Clone ID: PAT_MRT4530_89814C.1
gttctgtaaccaggaacagaaataacagcgaatctaaaagacgggcaagaattataacaagagacacacattcaaccatcgacacttatcatactaacaacagcattgaccgtgcatgaataaaaatgtgcctaaatactgatgcaaggagagcaactagagattaccgtaccaatcaagcaacaccaagggtgtaatgcctgaacctctcaaaccttgcagcaagggccaagggtggcgaatgtgttcttcacaag

SEQ ID NO: 91218 - DNA, 900 bp, Oryza sativa
  Clone ID: PAT_MRT4530_89815C.1
atggcggcgcaggtagtcgccgagcagtgtggctcgcaggccggtggggcgctgtgcccgaactgcctctgctgcagctcctacggctggtgcggctccacttccgactactgcggcgacggctgccagagccagtgcgacggctgcggcggcggaggtggcggcggtggcggcgggggcggcggtggaggtgggggtggcggcgcggtggaggcggtcgtgtcgaaggagctcttcgagcagctgctgctccaccgcaacgacgcggcgtgccccgccagagggttctacacctacgacgccttagtcaccgccgccgccgcgttcccggacttcgccgcgacgggcgacgacgaggcgcgcaagcgtgaggtcgccgcgttcctcgggcagacctcccacgagaccacgggcgggtgggcgaccgcgcccgacggcccctactcgtggggctactgcttcaaggaggagatcggcgccacggcctcctactgcgtccccagcgccgacaactacaactacgggccggcgggagaggccatcggcgaggacctcctgaacaacccggagctggtggcgtcggacccggtggtgtcgttcaagacggcgctgtggttctggatgacgccgcagtcgccgaagccgtcgtgccacgacgtgatcacggggcagtggacgccgagctcgggggacatcgcggccgggcgggtgccggggtacggcgtgatcaccaacatcatcaacggcgggttggagtgcgggttcggccccgacgaccgggtggcgaaccggatcggcttctaccagcgctactgcgacgtgctcggcatcggctacgggagcaacctcgactgctacgaccagaggccgttcaacagcgggttgacggcggcgcagtga

SEQ ID NO: 91219 - DNA, 897 bp, Oryza sativa
  Clone ID: PAT_MRT4530_89816C.1
atggcggcgcaggtagtcgccgagcagtgtggctcgcaggccggtggggcgctgtgcccgaactgcctctgctgcagctcctacggctggtgcggctccacttccgactactgcggcgacggctgccagagccagtgcgacggctgcggcggcggaggtggcggcggtggcggcgggggcggcggtggaggtgggggtggcggcgcggtggaggcggtcgtgtcgaaggagctcttcgagcagctgctgctccaccgcaacgacgcggcgtgccccgccagagggttctacacctacgacgccttagtcaccgccgccgccgcgttcccggacttcgccgcgacgggcgacgacgaggcgcgcaagcgtgaggtcgccgcgttcctcgggcagacctcccacgagaccacgggcgggtgggcgaccgcgcccgacggcccctactcgtggggctactgcttcaaggaggagatcggcgccacggcctcctactgcgtccccagcgccgagtggccgtgcgccccggacaagaagtacttcggccgcggccccatccaactctcctacaactacaactacgggccggcgggagaggccatcggcgaggacctcctgaacaacccggagctgtcgccgaagccgtcgtgccacgacgtgatcacggggcagtggacgccgagctcgggggacatcgcggccgggcgggtgccggggtacggcgtgatcaccaacatcatcaacggcgggttggagtgcgggttcggccccgacgaccgggtggcgaaccggatcggcttctaccagcgctactgcgacgtgctcggcatcggctacgggagcaacctcgactgctacgaccagaggccgttcaacagcgggttgacggcggcgcagtga

SEQ ID NO: 91220 - DNA, 1282 bp, Oryza sativa
  Clone ID: PAT_MRT4530_89817C.1
ctcccatctcgaaatcaagcacgaggactcccaagtccagccatgaaagccacgacgacagcagtggccctcctcgtggccgccgcggccatggtggcgcaggtagtcgccgagcagtgtggctcgcaggccggtggggcgctgtgcccgaactgcctctgctgcagctcctacggctggtgcggctccacttccgactactgcggtgacggctgccagagccagtgcgatggctgcggcggcggaggaggtggcggcggcgggggcggcggtggaggtggtggtggcggcgcggtggaggcggtcgtgtcgaaggagctcttcgagcagctgctgctccaccgcaacgacgcggcgtgccccgccagagggttctacacctacgacgccttcgtcacagccgccgccgcgttcccggacttcgccgcgacgggagacgacgaggcgcgcaagcgtgaggtcgccgcgttcctcgggcagacctcccacgagaccacgggcgggtgggcgaccgcgcccgacggcccctactcgtggggctactgcttcaaggaggagatcgccgccgcggcctcctactgcgtcgccagcgccgagtggccgtgcgcccccgacaagaagtacttcggccgcggccccatccaactctcctacaactacaactacgggccggcgggggaggccatcggcgaggacctcctgaacaacccggagctggtggcgtcggacccggtggtgtcgttcaagacggcgctgtggttctggatgacgccgcagtcgccgaagccgtcgtgccacgacgtgatcacggggcagtggacgccgagctcgggggacatcgcggccgggcgggtgccggggtacggcgtgatcaccaacatcatcaacggcgggttggagtgcgggttcggccccgacgaccgggtggcgaaccggatcggcttctaccagcgctactgcgacgtgctcggcatcggctacgggagcaacctcgactgctacgaccagaggccgttcaacagcgggttggcggcggtgcagtgaacagctgagcctcgccggcggcgaccggctataaaataagagtgctttgccactcactccctgtacgtgtcgtcgtacacagtacgtacttacaacgtactagtattgagtcgaagtatatatggtgtgtcataaacttgtaaccgggctgaaaccgatatatatgcatgtggcacagtgtcagtccaatatttcagaataaataaatggacaataaaattctcttttaatcatgcag

SEQ ID NO: 91221 - DNA, 2162 bp, Oryza sativa
  Clone ID: PAT_MRT4530_89818C.1
atggccggaggaggtgggggagggggaggggcggcgccggcgccgaagcacgacgagctgacgccgcaccccgtcaaggaccagctccccggcgtctcctactgcatcaccagccctcctccgtggcctgaggccgttcttctttctccactccactccactctcctgctgtaccaccgcggcactagtctcgtctcgtctcgactcgactcgcattgcgcctgtgctgtgctgtggtggtggccgcgcggggggcgagatggccggaggaggtgggggagggggaggggcggcgccggcgccgaagcacgacgagctgacgccgcaccccgtcaaggaccagctccccggcgtctcctactgcatcaccagccctcctccgtggcctgaggccattcttcttggtttccaacattatctggttatgctgggaactacagttatcataccaactgcactccgttccgcagatgggaggaaacaatgaggacaaggctgttgttatccaaacattgctgtttgtggctgggattaacacccttttgcagagtttctttggaaccagattacctgcggtgattggtggatcatacacatttgttgtaccaaccatctcaatcatccttgctggtcgttatgccaacgaaccaaatccacaccacaaaattcctccgaatcatagcgtggaacacaaggtgcattgatcgtggcttctgctctacaaatcatatttcattgccgaactgaccgttctggaataattggtggtgctccttggataagagttccctatccctttcaatggggtgctccaacttttgatgctggtgaagcttttgcaatgatggctgcttcatttgttgctctggtggagtctactggtgctttcattgctgtttcaaggtatgctagtgccacacctctcccaccctctgtacttagccgtggaattggttggcagggcattggcattttgttggatgggctatttgggactggaaatggttcttctgtatcagttgaaaatgctggattgctagctttgacacgtgttggtagccgaagagtggtgcagatatcagctggtttcatgatattcttctctattctgggaaaatttggagctgtctttgcatcaatacctccgccgatctttgcagctctctattgtatcttctttgcatatgtcggttctgctggggttggtttccttcagttctgcaatctcaatagtttcaggaccaagttcatcctcgggttctcagtttttatgggcctttctgttcctcagtacttcaacgagtacacatctgttgctggttatggtcctgttcatacacactcaagatggttcaatgacatcgtgaatgtcatattctcgtcaaaggcattcgttgctggctttgttgcatatttgctggacaacacgattcacaggcatgatagttctgtcagaaaagatcgaggacacgcttggtgggataaattccgatcatacaggactgacacaagaagcgaggagttctattccctgccgttcaacagtttcaggaccttagttcatcctcgggttctcagtttttatgggcctttctgttcctcagtacttcaaccgagtacacatctgttgctggttatggtcctgttcatacacactcaagatggttcaatgacatcgtgaatgtcatattctcgtcaaaggcattcgttgctggctttgttgcatatttgctggacaacacgattcacaggcatgatagttctgtcagaaaagatcgaggacaccattggtgggataaattccgatcatacaggactgacacaagaagcgaggagttctattccctgccgttcaacctgaacaagttcttcccatcagtatgagcataccgtggctaatgcaagagtaggttactgtgtactgtctgtcccttatgaacaggttccctggaagtggcaaactgttggcctgaattctctaggtatgtggaaatcgtagacctttaaacaaaagggaatcctgtggtatgaacaaaaaaatattggtggaattatggcacggatgtatattttaacctatctgggggcaatagtaggaaattttggctactcatttgcacatgaaaatggctcttgattcttaaaaacaaaaaaaaaaaaaa

SEQ ID NO: 91222 - DNA, 249 bp, Oryza sativa
  Clone ID: PAT_MRT4530_89819C.1
atgtcgcgcgctaccgcgctaggtgatgcaccacgccgaggaggaggagctgcccaagtacgagcccgacgcgctgcaggtggaagcggcggcgcaggcgaagatgatggggccgttggtggtaacggggttcctcgttgcctacgtgcccaccggtgggatcaggatacacatgatgaggtcgttgctctactcaaggcgcatcgtgctgcccggcccttgcgcatgagcggtcctttccccgcctga

SEQ ID NO: 91223 - DNA, 1015 bp, Oryza sativa
  Clone ID: PAT_MRT4530_8981C.1
tcaggtgcgggctggccgcgccgtctcctccttcgtcgttgccgcgtcgacctccactccggcctgctctctgattcgtccggagaccgccgtcgccgcgccggcctctccatcctcttcgtcgccggcgtcctttcggccgccccttcctcctccccggctcgtcggcttgctgcaccaccaccacccccggcattgcagcgacaaggtcgccctcgccctcgccctcgcctcccctccacccgaatgccgccggtgtccgtcgtcgtcttcaccgttcattctcgccggctcgtcgtctcgcggcgccgccttcgtcgtcggcatcgcagcggcgtggtccgcgccgtcctcgtctccgtgcagccgctgccggctgccctcgtcgcctcctcgccggtcccggtcgtcgtcgtcgtcgtcctctcgtcgttcccggtcgttgtggcgttcgtccctccgtcaagccgttcttgtccgtcgtccgcgtccgtcaagtgtgccgctgcagccccgtcgtcgtcttcgtcctcgcctccgtgtcgccaatcgttgcgccggccgcgtctcgccttcgtccaaggatcttcgccgaagtcgttccctcgccgtccgtttccgccgcgcccgttcgtcgttgtctttcccacgcctcgtcgcgtggtggtaaggatctctcctctcgctgcctcgtcctcgtcctttcagtgtcgccccgtacccgttgtgcggttgtcgaccccggtacccgtgtaccggtgtcggtagtcgttcacatgtgcgggtggtgaccaggtagtgtccgtgttagtgtgcccgctcggtagccgcgtggtttccacgtgtgcaggccgtgtggtgtctagtggagtccgtttgtcggccactcgcctcggttgacacacggggtccgcttccgtcgacccgtggaccgtctctgtgtactcggtctaccgtggtcctttaggttgacatgtggggtcggcatgtcaacagcgcagcctttctgtctttt

SEQ ID NO: 91224 - DNA, 699 bp, Oryza sativa
  Clone ID: PAT_MRT4530_89820C.1
cacatttgttgtaccaaccatctcaatcatccttgctggtcgttatgccaacgaaccaaatccacacacaaaattcctccgaatcatgcgtggaacacaaggtgcattgatcgtggcttctgctctacaaatcatatttggtttcagtggcctttggcgtaatgttgcaaggtatctgagtccattgtcagctgctccactggtgatgctagtcggctttggactttatgagcttggttttccctcggttgccaagtgtgttgagattggtcttccagaacttatcctcctggtgatcttcgcaatgtacctgcctcatgctatacacatgatgaagtctatcttcgaccgttttgctgttctgttcactattcctatagtgtggctctatgcatatctgctcacagttggaggcgcgtacaggaatgcaccaccaaagacccagtttcattgccgaactgaccgttctggaataattggtggtgctccttggataagagttccctatccctttcaatggggtgctccaacttttgatgctggtgaagcttttgcaatgatggctgcttcatttgttgctctggtggagtctactggtgctttcattggctgtttcaaggtatgctagtgccacacctctccaccctctgtacttagccgtggaatttggttggcagggcattggcatttttgttggat

SEQ ID NO: 91225 - DNA, 508 bp, Oryza sativa
  Clone ID: PAT_MRT4530_89821C.1
ggacctgcatgcggatacgactgccactagattgtctcgagagatcggtgattcacggtgcggatagccgcatgaacgacgacccgcgggttaatatacacgcaccaaaaaggcaacgccggccatggatgtgtatgtggatgtgggatgggatgatccttgcgtcgttgcatatcctggacatggatgcatgccagcatgtgcgcgcggtcctagtaatggcatcaccacaccctcgcttttgaggttccggtgcccgtggccgtgcgcgctttccgccgatgagtggcgggaggagcgcacgaaggcgtgtagctgactcagggctcagacgccacggactgcgattagaaaagagctgaggcaagctagctagtggagggattagtgtattacgttagtgagccaaaggcgacctgtcgctgcggaacgtcccgctgacgaggcgaggcgtacgatcccatgtgacgcgccgtgcaaagctagctggtggttataggctggagcc

SEQ ID NO: 91226 - DNA, 580 bp, Oryza sativa
  Clone ID: PAT_MRT4530_89822C.1
aagagtaactgagatcaagggttaaacgactgctgaaacaatcagctagcatgtgactatacttgctccctaaggctggaaaaacaagttaccacaaactgggcatctctgaacaagaggaaagctagaggtctgaatttgaggtgtcagcaaggctttcatccccctagcactctggggaaaatctgtcctagccccctgctggcttctggcggtggccagcattccttggtgttctttggtatgcagctgcatcatatcacctctacccctgcagtgacacaactctccccttgcctctgtctccaagtcctcttccctccctgctgggctcttcttacatggatgccagtcacactgaataggagcccatctgaataacctcgtcttgctggctttggctatgactctttctcaaatatggtcacattcacaggtactatgagttaggattttaacatatctttcacagggacacagattggtccataacagtgacagaatcttatctgtctagctccaaagttggtgttctttccattagacagcttagctgtttcccacaatcttgaataacaag

SEQ ID NO: 91227 - DNA, 987 bp, Oryza sativa
  Clone ID: PAT_MRT4530_89823C.1
atgttcaaccgtcccggatttacagaccttgagctccctcagctctgtgaggtctttacagtcaagggtggcacaggccaaggccatgcacattggaggggaaaacagagccgtcagttctttgttgagatgcaaaaggcgaacagcggtgtcgtcgttaatggggtggtgtacttcttgatggatgctctatatgatgctatgattattagtggactgggagctggcattcatccagacttcatcttttcttttgaccttgagactgaggaatggagggaagacatccaggggccaattagcagcagctttgtattcgacggtgattttgatccacaggagtatttctcaatttggcatcaactttgtctggctgagttgaaaggctatttagttcatcaccagcggttttgttcaaccatggacctatggtttctaaccgattatgagacccgtgcctgggttaaagaatatagcattcagactgaatcgttcatccctgttcttgagtacgatgtaaagccattgctggtattagatgatgggaggatactcatatggttaggatcgacaggactactgctcatatatgatccaagaaccagcagttttgcggaagtcaagatgagacatcttgctgaagttggcatcccaatatccacaggatacttcagataccttgaaattcgtttcagagctgtccaatggacatccatagctcatctggacaatctgatattctacgaattcagaaaaattgcagcagagtttgcaatcaaggatatatgtgggctgtcgtattttctgagcattgaagcaaataagctatctggtgatgaactgatgctggcacaaataaatgaaaagaggtatctcattgatctgccacaccggacagacatcagactttcagaagctatactagactactgctggtgctggtgtgctacaatacttgatgatgacagggtgttcacaattacttga

SEQ ID NO: 91228 - DNA, 142 bp, Oryza sativa
  Clone ID: PAT_MRT4530_89824C.1
atgcggacgcatcgatagtgatagcgtggacaccagggatcgctgcgatgagggacaccacggcgatcatccctagctcgtatgggttagacattgtccataatgccaatgtcgtgctgacgaactatttttcacacatcgt

SEQ ID NO: 91229 - DNA, 309 bp, Oryza sativa
  Clone ID: PAT_MRT4530_89825C.1
atgggtgaagacttgtggtgccgccgtccgaatgaccctctgatgggacgtgtcatacctacctccactccaccggaagcagacgcgacgtgggagcacgggggcagttggggcgttgcgcgtattaaaggaggctcagcctgggccccctcctcgctcgctgcccccgccaaatggcggctgggcgagggcctcggggcaaagcgatgcaagggcccgaggggcatgacgtggcaccccgaggccgcgaccccccctccccggccgctccagcagttcgcggactgcgggggcaggaccaagctgtag

SEQ ID NO: 91230 - DNA, 234 bp, Oryza sativa
  Clone ID: PAT_MRT4530_89826C.1
atggaacaagaatacgcgccggcgcgaccaacctccgacaccaaggccggtactacagagctagctcaaagtcaggcattgtggtctactactaggagaggagctaccggccgtgcgcgacgcgaccgcgccatcgcggcgcgacgcccgggcatagcactaactgcccgcgtgtcacgcggccacgcaccgcacgcaggggggcagcaagcgaggccgctcgcagcagagtaa

SEQ ID NO: 91231 - DNA, 1217 bp, Oryza sativa
  Clone ID: PAT_MRT4530_89827C.1
ggaagaaattgtaataggctgcacgatgcatccaattaaactttttttcaagggcattccgtttgtctatggcgcatacgaacgacacaacactatgcagtacgcccgctatccacgcaggatttcgttttgttgctcgcaacaaacgtttttttttaatttagtacagtagcatgcggtgcatacccaagtgcaaaccaatcaagttcacacgcatctatttgcgatctcctgtttgtttgggatagttgagttttactgacgttcgagcctcacctctgacctctccaaacacagttcttcgatccccatacggccatacggtttgcctattcggtctagtcctgagttggatacagtccgtttatggtcatgccgccgtcgaccgagatcgtctggccggtgatgtaggaagcgccgggcatgcacaggaacgcgaccagcgatgacacctcttctggttctcccacgcgcttcagcgctgttcgacgcacgacgctgtcagcgaagtccttccttgccaattcatcttccacaagtgaagtcttcatgtaccatggtgcaacagaattggttcttatattgtctttcgcccactcacatgccaggttcttggccagctggttcatggcaccttttgtcatcgcatagacagagccagaacttacagccaccactccagagactgacgatatgaagacaacgcttcctgacccagatgatttgagaagaggatgagcaagttggcacagatgatacgcagattcaagattggtggccattatgaacgagtaatcatctgcagagtattcagtggtttgttttgaaaagtttgttcccacgttgttcacgcggatgtcgagcttgccaccgtagaggccggcgacctcgcggagcatgcgttcccgctgctcccgcacggagacgtcgcagactgagccggtgacgcggaagcccttgccctcccactccctgaggcgctcgcccagctcggcctccttcctggagcaggtgtgcacggccgcccccagcgccgccagctcgtccaccaccgcatgcctgcgcatgaattccccgcgttgatcgtggaagagcagcaaaggctctgcggtggaggtctcactcctcactgggtagcgataggggagaaccagagaagggcgctggggtgagtacccgatgccccgggtgccgccggtgacgagggccgtctagcc

SEQ ID NO: 91232 - DNA, 512 bp, Oryza sativa
  Clone ID: PAT_MRT4530_89828C.1
gataaagtgatggcattatcaggcgctgttctctccagtttctgttctggcaaactgtaagcaaacatcctcaatcctcataggcaaataacaccctctgcctgacctttgatggaacatgatgaggtgaatctatgtttctccatgattatttagtgaatatatgtttctccatggacaaatagcacatcctatacaatccctgcatatgcagataaggtaaattaaagtgattcctattaaattttggaattatggcggttgaaaatataaaaggtggaaatttcctgtattcagtcctggaaagggaaaataaaaacgcatcactaaaatttttacagtttccggattgattgatatccatcaaactagtgtccctgaaactggtttacattggcacgcttcacgtatcctatatgcactagaatactagatgtaggaagtcaggaactatcaagcacatcttgcaatttcactcatgcctcttctatctgcttcgtatagttgagaag

SEQ ID NO: 91233 - DNA, 1903 bp, Oryza sativa
  Clone ID: PAT_MRT4530_89829C.1
gccggtcggtgaagacgtatgcgcccaacagcggcggcataataggccagccgtgcaggcgaggacaccagtcggcggcgacgaaggcgagccggtcggtgaagacgtaggcgccgaacaacggcggcataataggccagccgtgttctcaattaaattcacccaggatcatcaataaatatcaaaggaggcacgacaagcagcaggagaaatattatgaggaagatgatggtggttttgacccacattgggattgtgagttcttcaggttttgctggaacgaagggatgaggctgccatcgattgaagattgccctggatgcagtgacaatgcagggagttcaagccgatcttataacagaggtaatcggctgagtcagaggagactgtctgttcaccagaggttgggcccgattaattaggatcgtcatcaggatgaggacgaaggcaggaaaatacaatggtgtccttctggtattttcactaagaatcagaagaggagggtccataggatgaggaacagggaatgctttcaagaggtacaacaagagatcaaccatcggatgaaaaagaccaagcaagagtagcgtgttaagagtaaggtcgcaacagccgatgaagttgaagccgacaaggtgaagaggttagctaaaggaaagagtgttgcatctacatcggtaaatatggtgtttttgttgactgcagaatatgaagccaagcaagccgatgttgctgacgtagaagaagcctctgctagattgattttgtcaccagagcaagcgatctttgagaagccagaggggacagaaaatcgacatctcaaaccattgtacgttaatggatttgtcattaggaagccgatgtccaagatgatggtcgatggtggggttgctgtaaatttgatgccatatgctaaattcaggaagctgggtagaaatgcagatgatctcatcaagacaaacatggttctcaaagattttggtggcaatccttcggagaccaagggagttttaaatgtcgagttgacagtcgatagcaaaactgttcctacaacgtcttttttgtcatcgatgggaagggttgctatagcctgttgcttggaagggattggattcatacaaattgttgtattccttcaaccatgcaccagtgcttgattcaatgcaaggtgacaagattgagatcgtgccagccgacatgtcagttaatgttgctagtgctgatttagctctttgggatatctaaaagtgtccgattgtgatatatacagccaattgaagatggagaccccaaattattactttgagggcgtcgtggagggttcaaatttctacaccaaggacacggaggatgatctcaatggcaagttaggacagggtttcatgtcggccgacgatctggaagaagttgatataggtctaggagataggccaaggccaacattcatcagtaagtatttatcggcagaattcagaaccaggttgatagaacttctaaaacagtatagagtttgctttgtttgggaatattatgagatgccgagactcagccgatcgattgttgaacatcggcttcctattaaaccagggtacaaaccgtactagcaacctccgaggagatgtaaagccgatatgtatgatgctatcaaggctgagaatactcatttatatgatgctggttttatcaggccatgccgatatgctaagtgggtttccaacatagtcccggtcatcaagaagaacgccaagcttttggtgtgtattgattttcggaatttaaacaaggctacccctaaggatgaatacccaataccgattgctgatcaattggttgttgctacttcaggacataagattataagcttcatggatggtaatgtagcttcacaagactgctttcaggt

SEQ ID NO: 91234 - DNA, 1458 bp, Oryza sativa
  Clone ID: PAT_MRT4530_8982C.1
atggaggcgagcaaggcgaagcgcagcgtggccatcgtcggcgccggcgcgagcgggctggcggcgtgcaagcacctgctggcgaggggattccggccggtggtgttcgagtcgggggaggccgccggcggcccggcggcggcggcggcggaggagttcccgcggcacgacgaggtggccgcgtacctcgacgcgtacgcgcggcggttcggcgtgcgggagcgcgtccggttcggcagcaaggtggtgagcgccgagtacgccggcgtgccggaggaggaggcggcggcgtgggagaggtggtccggcaacggcgaggcgttcggcgacggcaggggtgagtggcttctcacggtgcagcaccgcgaatcggagaacctccagacatataagttcgacttcgtgatcctttgcattggacggtatggcgttgcgagcgttccaacatttccacccaaaggagtacctgaagcgttccatggacaagtgctccactccatggactactctagcatggaccatacggccgcggccgagctgattcgcgacaagcgcatagccgtggttggttctggcaaatcggccttcgacaccgttgcgcaatgtgccgatgtaaacgggcttgtgtggggtgtgaacctccagaaccttaccacgtcacggctggccgaggtgatggttcacaagcctggtgaaggcctcctcctgagtcttctcgccacaatgctgacaccactgagatggttattgtcgaagctaacggagatgtactacaagaggcacacaccgatgcagaggcatggcatggtgccaggctacagcttctcacagtcaatcttggcttgccggctcggcatcctcccgaagagattctacgaccgggtggacgatggcagcatcgtgctcaggaggtgtgacccgtctttcagcttctgcgccggcgggctggtgctggacgtcgccaccggcgaccacatcgtcgacgccgacgtggtcatcctcgccactggcttccaggcggaccggcagcttagggatatattcgtgtcgccgtggttcagcaagatcgtcgcagaatcttcagacgccactgtacctctgtacagacggtgcgtgcaccctcgtataccacagatggcgatcattgtttacgcggagagcgcggcgaacatctacccgtacgagatgatggccaagtgggtggcgcaccttctcgatggtgcattccagctaccgagcattgcacgtatggagaagagcgtggtggagtgggtttgttgggcgcatgatatgaggaggtgtagcggcaactacttccgcaagtcatgtattggcaccatcacaacgtgggataatgatcagttatgccgcaatatgggatacaacccaagaagaaagaaagggatagttgcggagtggatagagccctatggagccgctgactatgctgatatctag

SEQ ID NO: 91235 - DNA, 353 bp, Oryza sativa
  Clone ID: PAT_MRT4530_89830C.1
cgcgtccggagagagagagagtatttgattcttgaattctctagtttggaaggaggggagctgcgttattattattattattattattattattattattattattattattattattattattattattattatttttggttcgtttgtttcatggagtcgaaggaagtgcatggccgggatgtgctggttgatctggagaaagggaattgcttgctaatgagagaggggggcgataatgggacggatgtgaatatgatatctagccaggccaaaacttcatggaatgatcttatagctatgaaagggtgatcaccacatttccttgctgcttgtcactgcttttaagattt

SEQ ID NO: 91236 - DNA, 1015 bp, Oryza sativa
  unsure (1)..(1015): unsure at all n locations
  Clone ID: PAT_MRT4530_89831C.1
cggcacgaggccctgcgttcccgctctactcttccgccgccgccgccgtcagcgtcagcgactcgactcagcgatgcgatggagccggccgctgctaccacgacaccgccgccgtcggagaggcaccgcagccctaaggtgaagcggcagcggagtgcggcggcgcagccgttgggcgacgtcaccaacctcctcctcccgagcaccccgaccaaccccagcaccggccgcccccgcccactcccctccgacaccaccgccgctgcctccacttgctccgcgtctccctcgcacactcccgtctccaagccttcttccgcctccgctgctgaggagcgtagcttgngttaaatcggccatctccaccgtgtatacaaggcgcaacaccgcccagaagaggaggagaaccaacgacaacacaccatttcctgccggaacagcaagctgccctcctcctgcaactctcgcaagtaaaaacagcaaaacctctgaggctcagggtactcggcctatttcatccgcggctccttgtcatcgatctaaaaagacgaagagcacgaggatggagaatacatcttcaggtaaacatatgctaccagaagattttgtcaagaagcagagagcctacttttgaggaggttgatgcctttgagctgccagaggaggaggcctcagagacggacctggagtgaagactccagttaaatcagtgtatcggtgcagctaccttgtaagaatttccgggaatatgtgactaccctacctgtacagaagcacgctcgcatagttttacgacaatgtaactgcgagttagtataacccgtgtaccgtaatcatcaccagtcaaagccctactgacgttggctttgtcttctgcttgtagttgtacaatatcaagtacttagatattaagatgagaccggtgctttcccccgtttgacctaaacaatggctatgatctttgttttttctggaagtaactgctggcttggagtactaaaaaaaaaaaaaaaaa

SEQ ID NO: 91237 - DNA, 3741 bp, Oryza sativa
  Clone ID: PAT_MRT4530_89832C.1
atggagcggcgtccgccgattcggccggactggcaagctaacaagcgtcaggcgatggagcaaggcggaggtgactgggggatccgcgacgtccgggaggaggagggcctccggcgtccactccccaatcaaccaagggtgaatccaaatgtcaagcctcaaggtcgtcaagctgcggagatggagcgtggggctggtacgatgaagatcaagtgcttcaaatgtggccgtgaaggtcaccaccaggcaaactatactaatccccccctctgttactcttgccacaatactggacacattgcttctcattgcccgctgatttctgctaaaagatgtgttaagctctgtggatttgggatcccagggcaagggttctatagtttgcaagtagagatttctgacgcagaggtggctagagctcctgtgagaggtattttgacagtgattcagggggaagcttctgtgagtaaagtgctagctgaactgaaacacttgtttgtaggtttaacttgggattggaaaattaagcagctaaatgctaaagaatttctcaaaaaattcccttcatatgaagttaggagtcagatttcaacttgcaagagctttgactttgagacatcccagattaaagctagtgtggtggagactggtataactgaagaggctgttgatgaattagtggctgtctgggtgaaaatctatgggattccaaaaatggccagatcagaagactatatcaaatctattgtggagctggttggggagtttgaggctgtagaggttgcaagtatcaggagagatggtccagtaagggtgagagttgcctgtaaggatcctagagagctatatttctctattcatctgtacataaacaaggtgggttacatgattcgttgggaacctaaggggtacttaccttatgagaatagacagaatcctccagatgatgatgacaaagatgataaggatgatgaggggctagaggatgatatgaatctagatgacgaattcaagaatcatgacatctctagaggaagacctcttaaaggcgagggaagccaacatgagagtagagcaggagctttttctgctccacccacttacaagggcaaagtcagttctgaacagggaggaagtataaaaatgatagcctctaagaaaacctctcttttgaaacaccctgacttatttgagagttgtacttctttagtgatatggggagacaaaaagcaagagatgattgcagagcaggaatcccaagagttggaggcacctgaattgtcccaaaatgagactagacccgagttctcaacactgttagagtttgatgaggatcttgagagatgccaaatccctactgattctgacattgagaggctgagagaagaagaagatagggaggaggaggacagtttccaggaggtctctaacaggaagaaggggaaggctaaaaggactgaacctgcagttacttcaagaatgagcttaagacatagagagttagctgttgttcctattccaaagagagctaagatcctgacccaaaggaaaaatttggagcaaccagactctgttgaattgaaaaagattgatgtagctgctaatatagatctaggcagtaaccctgttgagattgacaacaatattgagactttaaaagccaaagagttagtccaagctaagttagctgagttgaattggaagaatcaattggagaaacagaaacctcaggcaggagatgtttctgttcctgcaaaggtgattgagtcagaagatgtgtcatccattaaagagttggaaacagatttgagagttgaaaaagatggcataagccctgagcctaacaagagagaaactcatgcaggggctttttttcttagtaatgtcattaaattgaattatgataattcttgttgggagatcatggtgatttatggtcctgtggataacaatctgaaacaggcttttctggatgaactgaattggcacattctttatagatcccatcatgtggtgattgggggggattttaatttgtataggtttgctagtgagaaatcgaacaccaacactaactctagaaatatggatatgttcaattctttcattgctaacttagatctgagagagatttatcgcagtggccctaaattcacttggactaacaagcaagattctcttgtgcaagaagtcctagataggattctagtgaccactgactgggatgatatgtaccctactgctcttctttcctctatcttaagagtgggttctgaccacatccctcttctactagatacttgtgaaggtattatagtcaagagtaagtactttaagtttgaatctgcttggcttgctgaagagagttttaaagagttggttattcagaggctgttacctagagacaattcttatattttagagttttggaataaaaaacaaagcagtctgagacgattcctggtaggatggggcaaaaacaatcgctctaaaaagctgagggagaaaagaactttgcagtgtaaaatagaagaacttgataagaaggctttgactgaggaactgacttcagatgagtggaatcagagatacagttgggagaatgatcttgagcacatctatgagatggaagaactttactggcataaaagatgtggagagcaatggattcttgaaggagatagaaacacagagttttttcacagagttgctaatgggaggaaaagaaagtgtcacattacatccttgatggatggagaaacagagttgacctctaagagtgaaatccgagagcacattgtggagtactacaaaaccctctttagagatgtccccactgccaacattcacctttcccagggggtttggacgaaccacctcaacctttcagatgctagtaaagaaaacctgactaggccctttgtaatggcagagttagataaagttatcaatgaagctaaacttaacacagctcccggccctgatggttttagtatccctttctatagagctttttggccccaagtgaagaatgatttgtttgagatgttactcatgctacacaatgaagatctggacttaaaaagacttaactttggagttatttccttaattcctaagaacaacaatcccactgacataaaacagtttagacccatttgtgttcttaatgactgttttaaattcctaagtaaggtggtgactaatagattgacagaagtagctgatgaagttgtttctcaaacacaaactgcttttatccctggtagatttatccttgagggttgtgtcattattcatgaggtgctccacgagttgaaaagcaaaaattcagaaggtattattctgaaaattgacttcgagaaagcgtatgataaagtgaactgggagtttttaatagaagtgatggaaagaaaaaatttcccaaagaagtggattagttggatcaagtcctgtgttatgggaggtagagtttgtataaatataaatggtgagagaactgacttttttagaacttttaggggccttaggcagggtgaccctctctctcctctcctctttaatcttgtgagtgatgctctagctgctatgtttgacagtgccaaagctgctggagttttatgtggattagttcctaacattttcccggggggtattactcatcttcaatatgcggatgacacagtcctatttgttgctaatgatgttaatcaaattgtggccacaaagttcatcctctaa

SEQ ID NO: 91238 - DNA, 276 bp, Oryza sativa
  Clone ID: PAT_MRT4530_89833C.1
atggaggaggaggatgtgcgtcggcgaggaggcgacggagatggaaatcagcagcatatgcgatggagactactggaaatcagcagcggacgtacggtggcaaccggtggcgcgaagttatggatcttcaacaactgcgacgtgagaggagtgcgacagagagggagcgctggtgcgaagaggggtggaaaagaaaaggacggcgacacagagggagaaattttgaaaataaaccagaattttgatttccttccatattttcaaaatgcacattaa

SEQ ID NO: 91239 - DNA, 795 bp, Oryza sativa
  unsure (1)..(795): unsure at all n locations
  Clone ID: PAT_MRT4530_89834C.1
ggcacgaggcgctcgcggccgcacctcaccgcagcgtccggcctcccgggtcgacaccgcgtccgattcgatctcgaattctcgaactctctcgatcgaaccctgtgccctctgctccccgcaaaatcctccgcatttgatgagtagtcctatcactcttcttcctccccgcgcaaatcctcgccgccacttggatgccagggagctccacctcgccgccgaccaccaccaccacccttctctcctccgctccccgccgcggcgcctaggccgctgccgccgccgatgggctaggagaggagagggatcgccgcctccctgcgatcgccaccgggggagccggaccctctccgcgagatctggttaattgatttgcctactaccagtattccgctagattctggaccgattcctctctgttgatgcaaccactgtacagttgttgctttccttgatgatcagaaggagctggcgatttcggaggtgaatgcgttgtttatatgggtttgcagcttatgctacaacagctatctccgatttagtttattacctttggggagcgtagagattggattccgctntgcgttttcctctttcctgcgagattctagcttatccttcgattaaacctattcgcgcggctattagcgcaagtggttaggacggacgcagactaaaaaaggttaggttattagggattttgggttttccattttggattgccgattgcgggagcatatcctattggngagattccggcactgtaaagatatccttggcaactgagttgattta

SEQ ID NO: 91240 - DNA, 291 bp, Oryza sativa
  Clone ID: PAT_MRT4530_89835C.1
tcgtttcgcctataaaactatcaaccccgccattcggagaaggaggagcaagagctccaagaagagctcccccccctccaccaccaccaccaccgatctctcctccaatccgcggctcatcctcccatccccgtgttgcgggatctttccgggcggagcaacggtggtcgggtcgccggatttgggggtgatccgggtttcatggggtcgccggagggggaggaggcggtggtggccacggcggccgtcgtggaggacgggctgcgggggaacggggatggtggtggaggt

SEQ ID NO: 91241 - DNA, 183 bp, Oryza sativa
  Clone ID: PAT_MRT4530_89836C.1
atgcatagcgaaacaggatcaccgccaccatcggagtcctccatgtggagtgttgttgccgagatcctccccgaggaccgctgccaccgagtcctccagagctacactaccattcgaggtaaaccactcaagttcgaccagcaacaacggccagaggagagaggctggattccactacggttc

SEQ ID NO: 91242 - DNA, 240 bp, Oryza sativa
  Clone ID: PAT_MRT4530_89837C.1
aggggatgtcatgccaaaatttctagtaaatttattttggtgattatatacaaatcagaggtgcctaaaaggttaatcgatcggcaatggatgtatgctgaccgtcggtccaaagagtttattgacggcgtgcattattttttgagagtggccgaagctaacagacataagggttttatttattgtccatgcaataagtgtaagaatcagaaggagtattctgcatccaggacaacaaca

SEQ ID NO: 91243 - DNA, 392 bp, Oryza sativa
  Clone ID: PAT_MRT4530_89838C.1
ggaaaaaaaaaaccatttgggtatttttacccaaacaggggggaaaaaggacaggcaacgggtaaaaaataaaactccccagtgtgcctggcacagggggggactaaaaaaacggggggaaacaggggcaaaagccacagttaaaaaattgggcggggctggggatattgccccaaccccaaaaaaaaatttgacaaccattaaggggttttgggtgggccaaaagaaaaaggggttaagtttggagggaaaaaaaaaagcctggcggggaaaaaccgatttttttgggggttttgccccagggggggaaactcccggcgggggggaaaatcgaaaccggggtcaaaatttgggccttactttttggcaaagtttgacctgggggggggcct

SEQ ID NO: 91244 - DNA, 534 bp, Oryza sativa
  unsure (1)..(534): unsure at all n locations
  Clone ID: PAT_MRT4530_89839C.1
ggtttttattgtccaagccatcctattttacatgagaagacttgagtgctcatatcctaggcataggtgaagagaaaggacaggacacaatacaagactatacattccatccccaccttaacatatatttttactaaccttacccatccccaacgggggggggtacattcaattctaacattacacgaaacaaactacacgtcaaaacatttaataagcactgctctagctgaagatcttctatgctacaacacccaactcgcttagccgatctgacatgactattagatgtgtggtcacatctcatgactagaccataacggtcccttgcgtggacacgcttgacccactggactgcagtccagatgagctgtggtgggggggcagtactctactcgtcgccattcttttgttcagcccccctcacactaacgtcgctgccttgcctaacgtatcgttcttttatgcgcattgtccgatcctgacttgagatattacattccctcgcccctctcctgttttgangggacgtga

SEQ ID NO: 91245 - DNA, 1359 bp, Oryza sativa
  Clone ID: PAT_MRT4530_8983C.1
gagttgtatttggctgctcagaactgtacacacagataacatgggcatctacttctatgctgaattgcaactttgcaagactaaacaggttgtacagatgctgatgggctacatgattcatcagatcaaaaaagaaagagagagaaaggaatagatggaaaaatggctggcagataattgcaagatgaatagttggtactgcatggcctagctggaagaagggcgaccatcctatgtttgtatccttgaaattttgcgtccttgccattatcgacggagcagcggtatccatatgctttcaacattgctcagcaaggttttcttggcccacagcgctccttcccaacaaatgccgtaggaaatcagtatgcagggcatgaccagccttgtaggcaactacatgagcaagtggaaaaccctggttaccattctgtgcaagaagcgagaaatcaccgataagatctaaaatcttgtggcggcaaggttcatcctcaaaccgcagtggtggattaagccaaccaccagaaatactgcaaaccgtagcattttctagcgatcctccttctgatgagcccagcagaacccaattttttcaacctcttccaaatatacagaaagttcttgctggggctatcttgcttgagtagacattagcatctaggactgttgcgaagcgctgacaccccaattcctggcacttttggaaaatcaatcccataggttatacggattcttgaggaagggagtgcagctatgaaacaatcagacttctgcaagtaaacaggctcatggatttccggagccagtttctccagtttctggccactggaatccttggccgcacattgacctgcacctcttatagccatcacccactcttgcgctgatccatcaagcaacggaatctcgtcgccgccgctgacctcgacgcggcagttgtcgacgccgagcgcctccatcgcggagagcaggtgctcgaccgtgcgcacccgcgcgccgccccgccgcagcgcggtgcatagcggcgagtgcgcctcggcattcgccacctccgccgccaccctcgtctcctccccctcaacgacgaagtacctcccctcgccggctcgcgcggggagcagcgtggcggtggttttcgcccccgagtgaagccccacgcccgacctgctcaccgcagcggcgagcgtctgctgcggcaaccctgttggtttccaggagaaggccgcgcgggagacggagttcagggctcgggcggcggagccgcacatgacggcggcggcggcggcggcggcgaagggattcaacttctcactttctcaggacgggggcgatctctgcggagacgggcgagcccccgat

SEQ ID NO: 91246 - DNA, 374 bp, Oryza sativa
  Clone ID: PAT_MRT4530_89840C.1
ctctcgcgagtacgacccactcacccaatgatatgaacctggaacagtatatccatagaccaatgatctgaatctcgacgctgatatcaaagcagatactgctactaggaactggactcattcctactagagaacgccaaatgaaagtgacacatgctgacttaaagaaggcgtacgagaaggtgatgacctataataagctcagtgtgccgcagggactgtacatgtgacgtgctcactcgaatacatagacggtgtatgtcacctgctatgacgactatatatgtgatataccacataagctatgctggcttcgtttggaaaatacttgtgaatattgctttgttacttcttgggatggagttggatagaac

SEQ ID NO: 91247 - DNA, 696 bp, Oryza sativa
  Clone ID: PAT_MRT4530_89841C.1
atgcagagcgtcaaaggtgaaggtttcggaaacccactctctcgatcgccagtgcacgctggtgagcgagacagagtagactacgagcgacgacacagtacaaaggaggaggcaaaccctagacagtttttcacgtgtgttgtgaggagacgacgactcggtttatatagagataacaagaagagtgatcagggcgcctgcatgatctccataatgcgcaaggcgaggcagcaagagcgtgcacgttcttctagttctttccaccacacacgtctcaagtgtctagcaaatccacctgtgtgccccgaaggaggtatatacccctcaaaatacagctcattgcaagcccaagaagcccaacatggacctccaaccctccatgcacttctcctcacagccaccgccatcatatgtgctctcctctcctctcctctccacgactctacgcatccatgggcaccgaccaccacatggccgctcccatggtccagcctccggtctccccacgtcgttgtgccgggcgaccagcggccaagcaaaccaacgacggtgatgggcgtaggcgggcatctatggactatggttctcgcaggtggcaagctgggtggcatgcaagctgcgagcgggacgaagcagggctatgagcagggtggcgagcggggcgacgctcaagcgagtaggatggccagccagtag

SEQ ID NO: 91248 - DNA, 438 bp, Oryza sativa
  Clone ID: PAT_MRT4530_89842C.1
cgagcaaatactctcagagttcttcaaacggtttcacctcctatgaaagctgcaacagtatgaatcctcatatagtggccatgccagtgaactccaaatcaataaatacggtgagagcatttaatagtaccggaaaattgctgcagcacaatattggttcagaaaacccactacagattaaattctgtcaacatcctgattctaatctggcaagtgcaacagacgtttttttaagtttgaacaatcttccgagaatagagaacgagatatcatgcccacctaacaagctaggatattgcatacaaagtgagaagccatatagttttcagagttcattctcatcttgtttttctgtgggtgatgagctgaagccaattttatttgacagtgccacttcttttgttcagaatgacttaatgcaagagttcaatctcactg

SEQ ID NO: 91249 - DNA, 1507 bp, Oryza sativa
  Clone ID: PAT_MRT4530_89843C.1
atggaggccggccaggatgacgcggcggacaggctcacctacgagatcttctccatcctcgagagcaagttcctcttcggctatggcggcggcggcggcggcgagacgaagagcttgcagtgcgcgccgccggtgtcgagagggaacagggtgtgcgtgctctccgtcgacggcggcgcgcgcccggaggacgggctcctcgccgcggcggcgttggtgcggctcgaggccgcggtgcagcggcgcgccggcagcaaggccgcgcggctcgcggatttcttcgatgtcgccgctggctccggcgccgggggcgtcctcgccgccatgctgttcgcgcgcggcccgtgtgggcggccgatgtactccgctgatgacgcgctcggcttcctgctccgccgcgtccgccgccgcgggtggtcgtcccgcgccggcggcctgctccgccgccccgccggcgccttccacaaggttggcgttcgcgtgctcgtctactttttgtactactcggtgttcggcgagctgacgctgcgggacacggtgcgcccggtgctcgtcccgtgctacgacctcgcgacgcgggcgccgttcctcttctcccgcgccgacgccgcgcagtcgccggcgtacgacttccgcctccgagacgcctgcgccgcgacgtgcgccccctcgggcggcggcgccgccgtggaggcctcctcggtggacggcgtcacccggatcacggcggtcggcagcggcgtcgcgctggggaacccgacggccgcggcgatcacccacgttctcaacaaccggcgcgagttccccgccgcggccggcgtcgacaacctgctcgtcatctccatcggcaccggcgaggccgccggcagcagcagccgccaccgcgcgaggacgccggtgatcgcgcggatcgccgccgagggcgcgtcggacatggtagatcaagctgtcgccatggcgttcggacaacacaggacaagcaattacgtccgcatccagggtatgggggtggcgcggcggcgcggcggcggcgtggcgtgcggcggcgagacggcggagaaggcggtgtgggtggcggaggcgatgctgcagcagaggaacgtggaggcggtgatgttccaggggaggaggctcgccggcgagaccaacgccgagaaggtggagcggttcgcgcgtgagctgatcaaggaacacggccggaggaagcagcatgttccgccggcggcgagcggcggcggcggcggcggactggactgccatgtgagcaagaaacagccgtaagtcagccacggcgagcggtgtcgcggtggctgaccggccgaccgccgggcgtattgcggtgttgttcgtgcacctccggcgatggacgtcgatcatactatcatacaatcgtactgcatcatgttaattaaataataatctcgcccgatcatttaaaaaaaaaaaaaaaaaaaaaaaaaaaaaaaaaaaaaaaaaaaaaccctcgtgccgaattcctgcagcccgg

SEQ ID NO: 91250 - DNA, 296 bp, Oryza sativa
  Clone ID: PAT_MRT4530_89844C.1
gccgagccgtcgaccgcgtcagcgagctccccaaggcggccgtctcctgcggcgccaccgccaccgcgctcatggccggcgccggcggccacgtgtgatcgatcgtgcgtgcattctcatgcacgttgcgctcttcttctagtactagttttgtaactttggtgttctttttgctcgttttatcttagccattagcgtgatttgcgatatgttgggttggattttgcttaagcttattggatgaagagagctagatcgcatggagtgtagtgtcgcgtaaaaaaaaaaaaaaaaaa

SEQ ID NO: 91251 - DNA, 171 bp, Oryza sativa
  Clone ID: PAT_MRT4530_89845C.1
cacgcgtgacggtagaggagagtagatcatgaagaggatgcgcttccttctggacggggcttgggacgcttatcatgctgatacgggtggaggacagtgagcatagcacagagattgaggcgcagaagcattcgcattgagcccaaaggtgtagagagctccagggatgga

SEQ ID NO: 91252 - DNA, 390 bp, Oryza sativa
  Clone ID: PAT_MRT4530_89846C.1
gttagaaaaaggacataatcacttattggactgaagatttagaaccaaccacagaaaggatcgaacagacaatcgaaaccgcaaagaaccatgaactcttaaaaaaccaaccaaacgatggggggtcgaatatgaacagcactacaccaactaagaaaaagactaactctatgggcacgctccaacttataaagggactcgtccaatcaagttaaaaggttctggccgcatggcgaccgttgacgaaacacatcataggagacgtgctctgtacacagggaggacgacccggatagctggccatcccggcgtattaacagaccttctaaaaggtgttgaataacgccatgccctatgcgacgcggccaatcacaatgaggtaaaggaaca

SEQ ID NO: 91253 - DNA, 156 bp, Oryza sativa
  Clone ID: PAT_MRT4530_89847C.1
atggcgggcggcggcgcgaagagggagtttggcgagaggtggctgctgcgactgcgagggatggaaattttcggcttcggcaccgccggcgccgcaacatttctatatgatgcttgtattgccagccttcatcggctccgaggtgtggccgggtga

SEQ ID NO: 91254 - DNA, 2620 bp, Oryza sativa
  Clone ID: PAT_MRT4530_89848C.1
tttttttttttttttggtgctcttttttttcgtgccatttgatagaactttttttttttctcccacagtaccaaaattaacactggatataatcattcgctgaatcacaaaatagtttttagtttatatcccatcagcatcctcagggagagcaacgagcatcaacattgacagggattcaggaaagcaggtaaaagctctacagaaaactcgttgtgagaatttcttaatttatcaaattgattgctttgttgttgaggcccgttcgtgccaacaagccgggacctgagatacctgcgagattacactacaaatatagccataaaagctcttccttcttcatcaccattcaaccaccattcatctgctcatcggaatggaaaagcatagccctccttactaagattggtggtttgggtaggagtagccgcgcccccttcccatatatccataccccctcccatagtaaccacgtccacggggtccaccacggggacccctccctcctccacgcatgcccatgggccgatgccttgcagaatcaccaaaagtctctgtgtctatttttctctgctccgagaatttgattcttccattcccccctccattatcaatggtattgcatgacagtgaatcaaagaagtcatctttgacatatacaggcttaacttctggcttcccaggagaaatatcatcttctagaacatcatcttcatactcattaggatcatcgttcaactgtcctttgcttttaccgagatggccccatacttcatctttgttaaacttctcattcattgccatgaaatcgaagtcctctgtaaacttggttataggacgtgattgctggagaggggaaacataccccaattcctcttcctcggcctcttcctcttcctcggcctctattgttgtattgaatgtatgaggaagctccaacaggctgaaaccaaaggattgaaaatgggacttctgaagagtaggcttaggtgctggcaacaggggttccttgttggatggagcaacagagtgttgtttagccttccattcaggtttcttggtgtgcctatcttcattgttttgctccagctgttgatgtgatggaacaggtgaggaagcaaattgatcctctgagggtgaaactacagaggaagtaacctgagaggatgcagccaaggcagcctgagaggatgagaccatagaggaggcagccttaggggatggaatcatagctgaagctgtttccaaggcatcagccgaaaggactgtagatgaaatggttggtagaagttggccaggagtgaccaatgtaactggttctgcaacagtggctgcacttgctgcaatattagccaatggtggctgagaggaaggtagataggttggcacaggtatattcataggcttattactgctggcagatggtacagtagagtcaagaggaagtgagactggcttattgttcatcagaggagagatgccttgcgattgggacatagtcgattcaattgtagagactggcggattaacagatgggggagttaaacccagagagaatacactagcagaaacagatgacagcatatttggaagctggtttgcagatgattcagttgctggagtacttgataaggcagggaccggcattgatgtggatacacctagattctgggtcaagttattaccactaccaggttgtggtaaagcaaactctggcattctaggaaaaggtggtaaaggtgcattaagtccaggatactgtatgggctgctgcaaggcctgtggaattgtcaagccatgtggtggacgaagaaagggcggttgttgcaaatgaggaaacccacttggtggtgtataaaatcctggccagtacattggtggcatagtaaggccagcaccatttgcagatgatggcataggtgatgagttccatgacggtaaactggccccaggttgatattggggcaacggtggtggcatctgaattcctgactgaccattgtgtgagccaggatcagctgttgttgtgctagcaggagcgccatttgcagatgatggcataggtgatgagttccatgatggtaaactggccccaggttgaaattggggcaatggtggaggcatctgaattcctgactgaccattgtgtgaggcaggatcagctgctgtgcttgcaggaggcggtaagctcgtagaggcaggacaaggataatgtgactggataatcgctggatcgttgtgtaaagtagtaggctgagctggtggagaggatttgacttgtaaatcctttatatcacttcctctaaatagtatgtattcatatatcttgtcactggctggaatctgttgaccatccttcttacgaccttcagttccaaatgagcgaacgttcctgagcccgatgctggactcctcggtgttgatggtgtagaggacgccctcgtaccggatctcgctcttcgacgtgaggcttatcacgctcccgatgtacgactccggcgccgccgccgccgccatcgccgccgagctcgccgccctagggtttcgatcccccctctctcccttcactagtgtgggtttcttttttctctcccatttccctcgtgccgaattcctgcag

SEQ ID NO: 91255 - DNA, 873 bp, Oryza sativa
  Clone ID: PAT_MRT4530_89849C.1
ttcctccacgcatgcccatgggccgatgccttgcagaatcaccaaaagtctctgtgtctatttttctctgctccgagaatttgattcttccattcccccctccattatcaatggtattgcatgacagtgaatcaaagaagtcatctttgacatatacaggcttaacttctggcttcccaggagaaatatcatcttctagaacatcatcttcatactcattaggatcatcgttcaactgtcctttgcttttaccgagatggccccatacttcatctttgttaaacttctcattcattgccatgaaatcgaagtcctctgtaaacttggttataggacgtgattgcccaattcctcttcctcggcctcttcctcttcctcggcctctattgttgtattgaatgtatgaggaagctccaacaggctttctgaagagtaggcttaggtgctggcaacaggggttccttgttggatggagcaacagagtgttgtttagccttccattcaggtttcttggtgtgcctatcttcattgttttgctccagctgttgatgtgatggaacaggtgaggaagcaaattgatcctctgagggtgaaactacagaggaagtaacctgagaggatgcagccaaggcagcctgagaggatgagaccatagaggaggcagccttaggggatggaatccccggcgaagctgtttccaaggcatcagccgaaaggactgtagatgaaatggttggtagaagttggccaggagtgaccaatgtaactggttctgcaacagtggctgcacttgctgcaatattagccaatggggctagaggaaggtagataggtggcacaggtaattcataggctattactgcggcagaggac

SEQ ID NO: 91256 - DNA, 1369 bp, Oryza sativa
  Clone ID: PAT_MRT4530_8984C.1
gcgatttataactaggctccgcctccgacgcgcgcacgcctctccctcccctcctcctccgcctcgcctcgcagtgtggaagaaaggaaggaaggctaaaaccctagcgagcgcgcgagcgagcgagggctctctgcttccttgcgatgacggcgccggcggacaaggggaagaaggccaagaccgacgccgacggcggcgccgccgaggagaacgagcagatcgacggcgccctcgtcctctccatcgagaagctccaggagatccaggacgagctcgagaaggtcaatgaggaagctagtgacaaggttttggaggtcgagcagaaatacagtgagattcgcagacctgtctatctccgaaggagtgacgttatccaaacaatccccgacttctggctgacagcgtttctgagtcatcctctacttagtgagcttttgaccgaagaggatcaaaagatgttcaagtacctggagtctgtcgacgtggatgattctaaagatgtcaagtcaggctactccataactcttaccttctccgagaacccgtactttgaagacaaagagctcacgaagacatatgccttcgctgatgacggaacaaccacaataaatgctactagcattaagtggaaagaaggaatggaaattgcaaatgggaatgccaagaagaaagggagcaagcgaccattggttgaggaaagtttcttcacctggtttactgatacagagcacaagagtcttgctgatggtgtgcaagatgaggtggctgagatcatcaaggaagacctgtggcccaatccattgaagtatttcaataatgaggctgaagagttaggagaggatgacgacgaagaggggtctgatgctgatgagggtgaagaggatgaggaggaggagaactgagtctaggatgtcagattgcgatggtgccgatcgtctgcattttgtggatgctgtcactctgaagggcgaagttgcgtgaccctcggttgcttctttcttttttctttttgatgacttagctggaacccttaggaactgtttaatgccttatggagtccgtcgtattttcgactcaaaggagacacctctatatcataatctgcgtataaccatggaagacattttaacctgctgatgtgtggttcattgcgctgcctctggtgctgtagggtgttcgttcctttgtgctctctgtcttttttttttttttttgtgtgtgtgtggtcgcgctggcattgttgccagtctgatgggctgttatttctccccctagaaagagtgaaaaacctggcttgtgatcattgtttacgaaaccgtgcgggtatctcatggttatctcggttattacatgctgtaattttctc

SEQ ID NO: 91257 - DNA, 1000 bp, Oryza sativa
  Clone ID: PAT_MRT4530_89850C.1
atggccattccaaggagcctactgagtttggtcaccctctcctccctctcggccacactgttgccagtcattgctaccgctccggagaccaccctcggcctccgcactcactgtttcccgcttctacggcgtgccttcgtgccactgacgcggggagactcgcagtgcctctccaaggcaatagccaaactccgggcggcggcggcacccaccatgtctacgcgtgccggcgctgtggaacgcatgacggagacggtagcaacagtgcccccagtcttcctcctcactcacactcgaggcattcccctgcactcgagcccgcgtgttgccttgcggtttcacgatctggaaggatgcatctcacctaatgtttgtgttggaatcacagggagcagcagccgcatggaaggtcgctcactcgtggccacgggggaatcacctgatgcgaggtcatcgtcatggagacattcgctgctgggttgctcacctaaagatttagctccagggatcttcaacctgtccaggagaaaaggaaacaatgtgcacctcagccttcaaaacaaccactggctgccaatcctaaaccccattaccacgataagtgaaattgatgaactggtccagctgggtagccgtttgcaagaagtcatgctccttgaaaacacccccgatgacattcgttggaaatggactcccaatggagaatactcagcaaagagcgcttatgaagcacaattccaagtctgtgtacaaacgctttcgaagatgcaaatcacttggccaaagaatgcagcttcacaagaaatgtgtggaatttagtatgcagctggcttggttacaatctctccccacaatcttggcaagacacacccatttcgaattggtgggattccttgatttttcttgcaaaaggagattcggcaaagaagaagattggagctctactcacaacgtggtggcaggtctggctcgagcacaatcgtcgaatcttccatcataa

SEQ ID NO: 91258 - DNA, 807 bp, Oryza sativa
  Clone ID: PAT_MRT4530_89851C.1
atggagccgctgccactcggattcggagacggcctggacgccacgctgctctcctccctctgggccttccaggatgatctgcagccgcaagagagcatggaggagctgaagcagagcttgatggcgacaacgctggagctggacgcggcgaaggaggagctcaagaagaaggagcagagcatcgccaagctcgccgacctcgtccgccatgtcgccaaggagcgcgacgacgcgcgcgaccagctgcagcgtctcctcgccgccgcggccgccaagccgccgccgctcgtcacctccagcgtcaccgactccgacggcggcagcctcgtctcctcccccgccgccgacaaccccttcttcgaccccgtcacctcctccgacaagcgctgctgcgccatcgccagcccgcctcccgccgccaagcagcagcacgccgccgccgcgggcgccgacgcggtgctcgacatgctcgccatgaagaagccgctgccgcagaggggcaggctgctccagtccgtcatggaggccgggccgctcctgcagaacctgctcgtcgccggccttctcccgcggtggcgcaacccgccgccggtcgcgctcgacacgctccccgtcggcgtccgggccggtggcgccgtctaccccggcgcgtcactctcgcccgggatcacctcctccgcggcggtgatcggctacggcggcggcgccaatgcctgcgggaagaggcccatggcggcggcggcggcggcggtggcggccagctgctcgccggcggcgttcagcgccaagcggcatcggctgcactga

SEQ ID NO: 91259 - DNA, 243 bp, Oryza sativa
  Clone ID: PAT_MRT4530_89852C.1
atgtggaggtataggagaatttgtcagatggtggatgataatcatgtagagaatgagatgggaggtgaacttgatgataggcagatggcttctaactcgaatggtgatcgtcctgtgggcaagctgttggaggaagagaggaaggtgtttgaggaaattgtaggttgcaattctgaaatctctcaattcgaggatcttggcaatgcgggatgggtagttactgacaaggatctagaatactga

SEQ ID NO: 91260 - DNA, 165 bp, Oryza sativa
  Clone ID: PAT_MRT4530_89853C.1
agatagaaagcatacggagatgactcagcactggagtcttaattacttacacacctcatgactggacaggaaggtcttcattatctttctcactccataaatctttataacatctttatttttatcaccttattaacttggatgcatttattcagtctaaggttt

SEQ ID NO: 91261 - DNA, 246 bp, Oryza sativa
  Clone ID: PAT_MRT4530_89854C.1
atggcttttgatgccatagcttctcgccatgatccaagcacctccttcttttggagctcagagaatagtggctgcatggccttctcgaggatggttggtgggcttgagctcgtcggctccctcgccatggaccgttggcactccctcgtcgactcgtcatcgacctcccaccgtggttacagcctcgtgcagacgggcaagctcaaagagaggggagagggttgcttgccaagctgtgaaaattaa

SEQ ID NO: 91262 - DNA, 724 bp, Oryza sativa
  Clone ID: PAT_MRT4530_89855C.1
caagtcgcaactatttattctgaccatatcattgcgaccttgagacagacagatcggtagatactggttctgtgcgtggttggaagcaggagaacacacaaaagccatggcgagatcggcgtcagggaggagtttgctggtgatcttgctcgccgtcagtctcctcctcgtcgcctcctctgacgcagctcgtttcacaagaagtaacaggatggcgatgatggtggtggaggctccggcgcgtccgggtgttggtgtttcaggttcagcagaggatgacgtgagcacaagcgatgcaatcgtggagatgtttggaaggatggcgctgcagacgactgattaccccccctcaggcccaaacgatcgccacactcccaaggcacccggcacatgatgacgccgcaaaagccaagaacaccaaagctttctaagctgaatcaggacgccaccatgtacagattaatacgcaattttcccttttattttacattacgcatcgatcgattaacggacagctagtagtaagagtggcaaatcaatttgtaaatttttgtatctgtgggagtagtattttcataattgttgttgcccatgatcagaggtgatcgttttgctgcgtttgaagattggttttaacgaatggcagacgaaataatgcccaattggatctaattactccgttttatattataagtcgtttgagccaaaaaaaaaaaaaaaaaaa

SEQ ID NO: 91263 - DNA, 423 bp, Oryza sativa
  Clone ID: PAT_MRT4530_89856C.1
atggtgggcggaagagacgagaagaggagaggaagagataggagcagcgtcggtcaggttttcccaaaccgcaagggccggggttaccgcgccccagcggaggttaccatggtttttctattaccgtactccctcggtaaggctggtaaccgcgataaccgtgcggttaccgacgggtggggacaccgccccatgccggtgggcccccaccgttggaggatccgatgcgtacgttatgctggagggtggggcccttcccccgtgatgtggggccaaaaggtggtggagtggaagcggatcgtcggcggcgtcgactcggctaaagctctcgctatgctccgcgcggttgcagcagctgcggcgctggcgcaaggttgcgtgatctcggcgttccaggtgtgcggtgaaccgggggtaaagtag

SEQ ID NO: 91264 - DNA, 1361 bp, Oryza sativa
  Clone ID: PAT_MRT4530_89857C.1
ggtgatgtcccaactttctgctcgctggcccactctctccccaggccgcagggcgcggccggcgccgacgcccttgggatggccggagtttccgccgcctccgccgccgggaagatcgggagcttcctctccaagaggccgtacgcgccgccgtcctgggcctcgcacctgtcccgcgccccctcgcagacaatatcgctcggccttttctcgacgccgatccacaagtggaatccgtccgatttgcagaattacaccgacagctggaggaattgtcctttagtccattttacgatggagaggcagcatatgaaattctgaaagacattggatggtaatgcagtctaagggggaagggcgaaaaattcttatggtacaaacatggtggtcttcttggttggtatcataaggttgaggagttatcatctttgagcgggagttggcagcagaatggatcattgaagaacctgttcagcgcaaagatggaacatggtaagatgttctgattgctatgctccaaaattgcttccatttgttgttagaggtttcagacatctcattgtctaaaaagagtattcgcctcaatttctcagataaatttcaatgcagatggttaatgtggaaaaattggcagtgtggctttagcggacttgctgaaaaagaagcttttggaagaaggccgaaaaccatatgttattcctgttggtggatcaaactctctaggaacttggggatatatagaagcaataagggagattgaacatcaaattcagatatcaggtgatgttcagtttgacgacattgttgttgcatgtggcagcggtggaaccattgctggtcttgctttaggatcaaaattgagtagcttaaaggcaaaagtccatgctttctctgtttgtgatgatcctggatatttccattcctatgttcaagacctgattgatggacttcattctgatttgcgttcacatgatttagtcaacattgaaaatgctaagggcttaggttatgccatgaacacagctgaggagcttaagtttgttaaagatatagctacagcaacaggcattgtccttgatccagtctacagtggaaaggcagcatatggaatgctgaaagacatgggtgctaatccagctaagtgggaagggcgaaaaattctttttgtacatacaggtggtcttcttggtttgtatgataaggttgatgagttatcatctttgagtgggagttggcgcagaatggatcttgaagaatctgttccacgcaaagatggaactgaggtttcagacatctcattgtctaaaaagagtattcgcctcaatttgtacgacaaaattcaaagcagatggttaatgtaa

SEQ ID NO: 91265 - DNA, 5756 bp, Oryza sativa
  Clone ID: PAT_MRT4530_89858C.1
ttctctggttgttctttgttgtttccttcgtttcttcggcttagcaccggggtttctcccggcgtcgtggccgctgtctgcttgtctccgaaccggcggcctctttttttttttttttttttttttgaaaaatcatattttcaaaagcatggagcaaataattcaccattataatccattgaataaaatggaaagaattgggtttggcatagctggtctagtaatttggtaaatactcctttcccaaaatatttacccaaaaaataactcatacaaatttggttcctacacctatacagacataaagacttcatacatgtatttaagtgtaacttgcaacactgaaaagcgaaatcaatctctcgtggcagaaaaacctacaataagttgaatttctagacattctataccaaaaaaaatgaatttccagaaattcagcaaattcccagattccttgaatcagatcactggaagatcaaagtagaaaacaacgaaacatcatgaaagcaactgtatttcttgcagcatcggggccgctgtcagcttgtcaccacagcggctgcatctgtattcactgcatgtccgggtaaaaccaatagtttacaacatcatcaatctgactaccaccaggtatgatcaggtcaatattccatcatggcagatacaacctataataaggtaaagcaaagtaagtaagaacattatgcatgttccatagttgaacttacctagtaaatacatcctttttttattgtaactaacaatgaagttccatttagaattaatgatgatttgcccctttccataaagaaagcaataacacaatccaattttggtgaaaaaacagtgctgtctcctgttccacgattcatttgtatgagaggattagccacaaacttcttggtagcctattaattattccagaatctcatacaagtaactcaagcggctcacatatcaatatatcatactgctgagagacttccaatctttcccatttcatatgtatcagcatagtaatacaacttgatcttatttgacaaagacaacccagtggccaaaggaagatttcgcaagtttgagccatcaatctcggcaatgtcatccacaaaggcagtgacatccccaagtaatctaaagagaacacaacggacatcttgttgtaaatcttgaaaatcataatagagtggagtattcacttttacttctggtaaacggtattcctcaacaaccagctttccagactccttaacaattgtgacttgtaaataaagaattgctggatttataactctatcttccataggtatcaatgaaaattccttcatatccaactctgacgaggaaggtgaatgggtcacccgcagtctaacaacattgaagaaatcaaggcgaaatccagctattccaggtgtattaggcaagagatattgctccaaaacaagatcattatctctcagcctttcagcttcaactggaatcctaaatctgcccagtggttgcgatctatctaaataagtcttcatcctcattattcccatagatgtgtcaggatttgtctcctttctcagagtgttgccaaaaataacaatcctttttgcatggataaatgaattctgtggagtggttggcttggattcagaaaatgtgccttcacttaatgacaaaagatcaaattcctctctgaacttggttgaatgagagtcaatatggttgagtgtcatctttattgaaacaatacgacagcggatagggtttgggaagtgaaatttaatgtgccttggctcttcactcatgctacttgttttttcgggtccagaaagatgtggagatgacaacatcatgtcgtgtacatcccattttcctataaatgttcgatcttctcgatttattttattaccagcccatatctccacaattgggcagtcagatgttgagtatccacaggaaccaacaattattgcagctcctgaaacatcagatagaccaccaagaacaattgagaactccacagatgtgttatccagtggagctttccaataagacttttgctctccaataccaaatggtgccagtaatgacaacagtggttctgagtcatcagaagtttctaccgtttgtaaaaagcttgcatatggaaattctgcaagggattcttcaccatcaaggagctgcttcaattgcttttgaccatattgaacactttttgtgaaatcggatatcctactgaattcaagtccacagacctgattcacagctttcagtactgcttgctcggtacgacctttttttcgcaggctgcgaagaaccctcacataatccacatataatgcatgtttgatcacctcactgcagcatgatttgcacacaaaattatctgcaagagctgaatagccaccaccttgactcccaccatatatcttcagatctctgtaagtgttattaagcaaaagaaaggctcctttcccagcacaacatgctttgcatgctgtccttccacactgggaacactctacaaatattgatgagttctcactagtggcagaagcgtgtgatgaagacaaagcacggacttcacatacatcacctgtgcatgactcatcattttcacaaatattccaaaagtctatagcatgaccattgatattttcgagccctattgaagcattgacacgatcctcatggacagtatggcccagcaatgccagataatcagcaaggctagacaacttcaacaggtaagaataatcaaccgagcggtttgggtctactgtggcaggaataacaccaatcgataataacgcccggtctctttcggcagcagaaagatcaagacaaagacgctttatttcaagcttcatcatttgctcgaagttaagacccttacccttgatatttccagaaaatgattcaaaaaacttaagataaatgtgtgcactgtcaaattcttcaacctggctattcactttagcagaaggtgtttctgatgcagtggcgaaagggttaacatcaaagtcatcatcaaatgagttcgtttgttccacattaacaaaagatgtattttcagttgcatctgattgattcggcatgtcaaaatcaccagtgagaaagtccacaaaatttcctgaactgccttgtagaactgatgaagagcttttagtagaagaggctctttcactaccaacaataccattttgaggcaagaaagaatttgaagaatttgcaaattcctttgaaccaacattgccaggaatactagacaacttttcatgtagaagctctacaaaatcagggccacgtctgctatctgttaacatatccacccatggaagagaaaccccaagcacttcaatctcaccaagagtaattggtgttcttgccctggccgatggatgaaaagataatgcaacaactctatttaaaaagtttaattctccttccagctctgtcacagctaagtcctctggatcaattcttccagtaagtgggatcagcaaattcgtcccattggagcattgtggaatgcaagcaccctcaagaacaagcttaagggtatctacgctggagccaactctaacatcaatagttgctggatatgaagaatcatcaacaccatgagagacagtaagaagaagctgacaaacttgacaaggttctccaaggtatataaaaagttcaacataatcagcaccttgctgacatacatgcatccagatggcctcgaaagtaccaactttgagaggagaaatagggatggatgggagatgcttaaacagcctcaatccaaggaacatctcaaactgtttttgacgagaactatcattaatataattctggaaccttctttgcagcgtaatcttgacattctgagcagctgagaatttactaaattttccagtctcttccttgaatatgttcagaatttcactgtgcatagcttttgagccagtgtacaatgtagcatggatatcaccagccagaagaaaaagttcagcaaggtgattcactggagcaagcatcgtcgagcctttgaactgatcaaatgtcatatcaaatctcttccagggcttttggggagcctcctgacatggatgctcccacgttgtagtgcgtgtattatgatcaatatagaatgattttcctgttacagaatcaaagcgctcctcccatccagggggcaaagtacgagggtttctgccattatattcaggatacctgcttgatgataacccaaacattgcatcaacatcaagggatatactcaatcgactacactgttcgacaaaaacttgaagtgccccaaagtagcttgcagcattggttcgatcaagagagtctgcacaattgaagcgcaccaccccgttttgtatagattccatgcaaaacccaccattgatgtcatcattgaagataactgatcctttacattccttaagctgctgctttacattatagtattttccttcactgaagccaattgccattgtaggtgctttaaggtgtctccaaaggccctcaactgtctgttgttgcccttttaactttacagtggcatgccagtcataatttatcaactgaatccaggttttcccaagctttttagtagacctcaggtactctagagaacttttgaaagaatcaacaagaactgtctcaggttttccatcaccatatctcagcaagttaacgcacacaatgggaaccactccaggtttcttttgactcgttgcattgacttccaatgatttatttccatatcttctacccagccgttggtagtattgtaagctcccattgaaaggatcatcagcaacataaatttcagcctctactgaaacagcattttttatctcggcaccccaccatattggtatagttccacggcgccaaatataagagctaaagggaatagattgcccttgaccatccttccgaggagcccatacaagctgctcacactccacctcattacctgtgcctgaacaagcatttatgccacgggccaaatagcgggtcccaggatgcaaccgactacgtcgtgcaaggagggcaactatcccaccttgctgtcctgtacctccaaaactccggcactcggcaaaaccctgcaatagaacaacacagtgccctagcaacccaatatccataaaaggctttgctaaccatctgttccacacaaattcttcatctggttcccgaagagtcatacggctcggaaacggccttgtaatatcccttgtttcacagaagtagtacttcccatcaatgtcaagttcagccaattccttgatattcttcgattctccattaccttgggcttgtgggttttgcagttggatctttatccattgactctctgccactgtatatatacacccacctccaggtagggttggtactgtcgcactcagctgcgttgcaaccagaagcaatgcgtaactccctaataccgcataacctagtacagctttagagtacgtagtactcttgcacagaatctttgatccattagtgatatagttcaatgctgctgcctccgaatcaaaaaggtcctcaccgtgcttccccaggtagtgcaggtaacccgtggttgggtcgacgtagattacctgagtatccttccttgttgacaaactagccacaatgtacacttcgctcgtatctaacacgacgacgacgaccgaagtgtccctgggccgaccacggggattggccggcggcgagggatccgaggggtagtaggatcgcgacgccat

SEQ ID NO: 91266 - DNA, 652 bp, Oryza sativa
  Clone ID: PAT_MRT4530_89859C.1
gttcaagacctgattgatggacttcattctgatttgcgttcacatgatttagtcaacattgaaaatgctaagggcttaggttatgccatgaacacagctgaggagcttaagtttgttaaagatatagctacagcaacaggcattgtccttgatccagtctacagtggaaaggcagcatatggaatgctgaaagacatgggtgctaatccagctaagtgggaagggcgaaaaattctttttgtacatacaggtggtcttcttggtttgtatgataaggttgatgagttatcatctttgagtgggagttggcgcagaatggatcttgaagaatctgttccacgcaaagatggaactggtaagatgttctgattgctatgctccaaaattgcttccattgttgttagaggtttcagacatctcattgtctaaaaagagtattcgcctcaatttgtacgacaaaattcaaagcagatggttaatgtaaaacactgtttgttatatttaaagaataaagcatatatttctgccatttggaaataaaggtttatatacatttgatgtgcggccgcccttttttttttttttttaaacaaattttaaaaattttaattggctctgtgacaataatctaacatctacagcactataaaaa

SEQ ID NO: 91267 - DNA, 988 bp, Oryza sativa
  unsure (1)..(988): unsure at all n locations
  Clone ID: PAT_MRT4530_8985C.1
gctgatcagctgaacagaactgcccccaagacttgtggagttgtagcgaactgcaagagtgacgcggcggcggcgatggacggcggcggggtcgaggcggcgatggacggcggcggggtcgaggcggcgacgacggcggcgtggatggcgcggcaccgggggatgtacgagcgggccacgaggcacccgttcaccgtctccatccgcgacggcaccgtcgacctgtccgccttcagacgctggctgggccaggactacatgtttgtgaaggaatttgttgcgtttctagctagtgtactgctcaagtgttgcagacagtcagatggctcggacatggaaataatactcggtggcttagcttcccttagtgatgagctctcttggttcaagaaggaagctgaaaaatggagtgttaatctagctgaagtttctcctctgaaatccaatacagaatactgcaggtttctccaaagcttcagcgagccagagatcagctacgttgttgccataactaccttttggataattgaaaccgtgtaccaggatagctttgctttctgtatagaagaaggcaacaagacgccacctgaactcctggggacctgccagagatggggaagccctgagttcaagcagtactgccagtctctgcagagaattgcagatcgctgcctcgcagaagcgtcagctgatgctgcgaggagtgctgaagaggccttccttcgggtgcttgagctggaaattggtttctgggacatgagctcttctcgatcatgaacggcaacagcatctcgatcatgaactacttgggagaaataatcgaataatggtgcagccggttccataccgaaccctgcagtgtactactgtgttttcctcttccttttatccccatttctctccttactcccatgaacattgatgtatcatcgtaactatgaaataaatgaaataatgccgtttcctcctnatcaaaaaaaaaaaaaaa

SEQ ID NO: 91268 - DNA, 849 bp, Oryza sativa
  Clone ID: PAT_MRT4530_89860C.1
gacacacaaactgatcatcagatcaatatacacccggcggattcaaatccccaaacaggagtctcgtgcgctacccccttttcatattgtcgaaaattcgttacgacagttggcgcgccaggtaggggttgcgtcgagttttccgtcgagaagtgcgatggaatcaacttcaggcatatcagtctcgacatgctcgatggattcaatttccaccgccaccaagttgattgcttgatcttcgtttactaaaagaccccaagcacgatcgtgcggcatcatcttcattagcaagcctcctcgctttgagagattaacttgctcatgcggctacgacggtgcctcaaccaacgacttctgtactccgccgctgttgctgatggtgacattatcttcaccgccggcagccgtcgtcaccgccgactggtgtctctgcctacacggctggcctattatgtcgccgttgttgggcgtctacgacttcaccgccggcctgcctccgttgccgccgactggtgtctccgcctacacggctggcctgtaatgccgctgttgttgggcgtctacgactccaccgtcggcctgccttcgccgccgccgaccagtgtctccgcctacacggctggcctattacgccgccgttgttgggcatccacgtcttcaccgaccggcttgccttcatcaccgctggatggtgtctccccctacacggctggcctattatgccgccattgttgggcatccacgtcttcaccgaccggcttaccttcgtcgccgccgactggtgtctccgtctgcacggctggcctattatgccgccgctgttgggcatctacgactccaccgccggct

SEQ ID NO: 91269 - DNA, 269 bp, Oryza sativa
  Clone ID: PAT_MRT4530_89861C.1
ttccttcctcctcctcagatcaagaaaccgtgtcctagaaaccatcgagatcgccctctcccccctcggatcgcggcctctcgcgcggatcgatcgctgctcggtttcttgattttttttttatttttttttctccggtgaccggagaggcggtggtgtttggatcgggaggggagagatggtggctgaggctgatgtgatgtatcagcccgtgccggcgttggaggtgacgcaccaccggtgctttgccaaggctgtccaggaggtgg

SEQ ID NO: 91270 - DNA, 277 bp, Oryza sativa
  Clone ID: PAT_MRT4530_89862C.1
caaaggcttccttctgctctccctcgcggaggctgcgcgtggtatatactgctccaccgtgcgtaaggcatgcgtgcaaagcagttcgctttgttcctgggcgagaacctcacatggctccgtgtggcaagcgcctgcggtggaaggccgtcgtgcccgacgccgacgccgttgaccccgacaccgtcaacgccgacgcctaccccgtacgcgttcgggaggtgcccccgcgacccgcttaaacttggcgtgtgccccaacattcttggccttatca

SEQ ID NO: 91271 - DNA, 419 bp, Oryza sativa
  Clone ID: PAT_MRT4530_89863C.1
ccccggccccccgcatttggcccccggcattttgcttgcaaaggataggagttgcagtactagtattgctctctcattgcatgtgaagctagcaagcaagcaagcaagagagagattctaggtgagtggtgtttggtgtgaagggaaggagcatggtgatggtggcatggctgatctgctgctaatagcaaggagtagtagtaataataatactactagtcactcatcatccttctccctcccttgagcttagctatagagtggagaagaaagaaaggagagtagtcaaagcgactctttctttgttttcttgcgcttcctcctcggctgagctcagcagcaagcaaacctgctcctgctacagccgccagcgagcgctagatctgaccaaatggaggccaaggacgtctcgccgctcg

SEQ ID NO: 91272 - DNA, 483 bp, Oryza sativa
  Clone ID: PAT_MRT4530_89864C.1
tttgtttttttttttttttttggtttttttttttttttttttttttttttttctttttttttttgtttttcttttttttttttttttacaaaaaaaaaaaaactaccccattaggggcccaaatttcccggggggccgggagacaaccaggttcccccaaaacttcccacgaaaaaactttccccccccttgtttgcccgggggggggaaccaccaagtgcccccaaaaatgccccattgaaaaacaaaacaggggagggaacgataccaaaaacctctcccaggggccaaaatcccggggcccttgggcgaaagggccggcaaaaaacataccccccaacgctgggaaaaagcatttcctttttttacccactcaccgtttaccccccccggggaatccctcccattgcccccagcccaggggggacggggaaaaaccctccccggctaccccccccctcgggcttttcctaggccgggggg

SEQ ID NO: 91273 - DNA, 762 bp, Oryza sativa
  Clone ID: PAT_MRT4530_89865C.1
atggcggggtgcttgcccaccgccgggctccggcgggcgctgacgctgccgtcgccgtcgccggcggcggcggtgggccatgaggaggggtcgtcgacgtcggcggcgtcaacaacggtcgggacgggggtcgcccccgtcgtcgtcgtcggcgtcgacctcgtgccggcctttcttgacgaccttgatccgccgctgtaccttgatgatgtcgaggcggaggccgacgccggtgggttgtccaccgccatcgcctcacgccggctgttctttgagtcgcccggacggtcgaactccatcgtggattccgccgagcaccccgccgccgccgccgccgccgtcgtcccccgcggcaacggaggcgccagcacgtcgtcgtcgtcgtcgtcggggcgtcctgccgccgcgcctagccgcgcggctgctgcggcgactggtaagggagtgcgcgtgtgcggcgacgagcaggcgcggccggtcccggtgtcgacggccgcgccgcgggaggagttcctcaagtcgatgacggagatggtggacgccatggggctcgatgtcgcgcgccgcggcggcgaccgcgcccgcctccacgagctgctcctctcctacatcgcgctcaacgaccgcgacgcgctcccggacatcctcggcgcgttcaccgacctcctcctcgccctcaacgcccatggtcccgccgccacccccgccgacggcgtcgtccgagaacgcggcggcggcggcgacgcaaggaggaaggcatag

SEQ ID NO: 91274 - DNA, 467 bp, Oryza sativa
  unsure (1)..(467): unsure at all n locations
  Clone ID: PAT_MRT4530_89866C.1
agttncattgatcctcgacatcatcttgacggtttnccgtgacttgaactgctggtaacncacaacacatntacggctcacctcacctaatatttgctatanccttcagttctgataatgctgaagaangggcacacntaaaaaaggagaaagggcgtgttagagggttattgttttgaaacaaaactgtcacatagggagtgcgaaatcaccatgaatctatcagcttgattgatggtgttgctagctcatcaacttttatttagttatttctggacccaaaggctcacaatatataatagagccctctcctgtgcttgtacagggatgtccatattctttctacaatgtaatattactagtattcttgtaattcagaagaggtaattttgcatgtttgcttcaatatatttcgtacagagctaaaaanaaaaaaaaaaaaaaaaaaaaaaaaanaaaaaaaaaaa

SEQ ID NO: 91275 - DNA, 274 bp, Oryza sativa
  unsure (1)..(274): unsure at all n locations
  Clone ID: PAT_MRT4530_89867C.1
cttccccaaaccctccacccaacccgcctcctcgagcgacggcgncagccatggcggaagcagcagcagcacctcccgccgccgccgccaccaactacgaggtggacctcggcaacctcatggcctacgacccgtcgcatcacctccccgccgatcctcctcagggaggactgaggagaaggcctcggagggacggactggccagcggcgcgcgcctttgcctgcgcaccagacggacgcctgtcgctcgcgcaccacgtccgagagttacagc

SEQ ID NO: 91276 - DNA, 346 bp, Oryza sativa
  unsure (1)..(346): unsure at all n locations
  Clone ID: PAT_MRT4530_89868C.1
cggacgngtaaaccccagctagccantttttcctcgtcccnaggttgagtaacaagntgggnctggaggntgnggtggaggccactntngnnttccttaacaaggcnntnaagcccgtactcgttggnggccccaagcttcgtntgncaaaggcaggtaaggccttcntcgaccttnttcatnccantggctacgcctacgagntgatgacntcggcaanggtctcgtnncaanaacgtaccngcacttaatcggcacctactgcggtgccntnagcacggcctttgtntgccgagatcttcgagtngnccgacggctacctatntgcaggnncaatnttcaatna

SEQ ID NO: 91277 - DNA, 752 bp, Oryza sativa
  Clone ID: PAT_MRT4530_89869C.1
cggcatgcggtggccttgcgtccgcgagggcgcgcggcgccaagtccgggagtggctgcgcaacctcgaccttgccgctgggactggcgatggcgccgtcgccattggcgccctcaatggtggtggagaagaagacagcgacacaacacgacttgggtgtccggttctcgggcacgatttccaggcgatgcgacgcggtttccgcagttggtggcgcaaattctggcaacggttggagcaaagccaggcggcgtgcatgcggctcgagtcgcgagcgcgacgggtgggcgtggcactcgtgcgtcgcgatggcgtagattgcgccgggtccacacgttgatatgtctactgctgttgcttctccccattccacctgccagcgtcggtcatcttctatcgggacccgaattgatgtttcttgtgatgatcggaactcggaagtccttgtgtggactgaagctatagctagcgcctggaaacatcttcgtgaagctggttatgattggactggaaggaaggtttctttctctttttctctcctctttatctctggacgtggattgctgggagcctcaaatccgttcctgctatcctgggcatatagtgcacgcactcaggcacgggaacagcaacggcttaaccgacgggacaggctagagcttctcgtttctccggcgatctggggaattgagtgctctcttcctggttaagtgatgggctgatgtccatgcgatgggccgcataaaccagaa

SEQ ID NO: 91278 - DNA, 767 bp, Oryza sativa
  Clone ID: PAT_MRT4530_8986C.1
tggatccccgggctgcaggcttttcttcccgaacggcggtggtggtgggcttagtggaggcggaggcggctgaggccggtggacggatccggttcccccgccgtagggagcggtagctatgcgccttgggagtggtgaaggtggagacgaaggcttgcggcagtgcgtcgtcgacgataaaggcggaaaaaagatagcaacagaatatttttgtcagtttgaatattatagcgtgcaaccttcagttaaaagtggcattttaattaactaatcctattttcagcatggcatttgagcgaaagcgaaacccttttgaagacggcacaatctcaattttctcccctaatccgaaccgtccgttgtggcccctctttcccggtggcaacttgccaactcgtccggcagccgccgccggcggccatggaccgcgaagcgctccgcatggtgtgctcgcgggagttctggcggatggccgtcctgtggaccgtctccctcctctactcctacatcctcctcttcttcctccgccgcggcgcccccgtccctcgcctccgacctatgcccgagcccgacgacgacgccgctcgtcgccgccgccgccgcccgttttgggtaataactgggccaacgtcgggcctggccaaaccgccggcggcggccctgccccgggaggggtccaacttaatcctcaactgttaaacaaatccggaatcaacaacctgatgccaatcttgaacatttcaaatcgacttgtcattctacaagtc

SEQ ID NO: 91279 - DNA, 183 bp, Oryza sativa
  Clone ID: PAT_MRT4530_89870C.1
atgacttcaaggcatcccgacaacggcctctacatcagcctcaccctaggatcttcaatctcgacaccgctgtttagagaacaacgtcgcgacaatataccctcctgccctggcaaagaagggaacagcgactacagctaccacccgggggcgacctcaatgttgacggtcgttatcgactaa

SEQ ID NO: 91280 - DNA, 295 bp, Oryza sativa
  Clone ID: PAT_MRT4530_89871C.1
tttgtttttttaaaacaaaatcaatcttgaatttaagcttccaatagtaaggaatccttcacatttcaaatcagcttaaatgtggcttgcacttcttaggttagctaattttagcttctgttggataactttgggtcaacttaagaatgggaattttcttttgttcattcagttgctatggcagaactttctgaaattgcagccagttacaaagtatctaagctatgttctctggagaacttcgtgagttctttgaacatcagtcatatcattattctacaattttctgaatgag

SEQ ID NO: 91281 - DNA, 1635 bp, Oryza sativa
  Clone ID: PAT_MRT4530_89872C.1
tcacatagaagtagataggatagtcttgacaaactcccggggccggcagacagccgccaatggcgtcgccatcggcatcgtcaacccgccgccttcggtcatgtcgacgacatcgtcgtcaccgacctcccaatcaaagcactgcacgagcgccgccaccgacacgccgacgacgcgcacggcgagcccctccccggggcaccgccgccggccgagcccgaacggcatcatgggcgcggtgaccgcgccgccggcgtcgctgtccacgaaccgctccggcctgaactcctccggtgcgtcccagacatcgccgtcgcggtggatcgcccacgcgttcacgaggaccttcgtgccgcgcgcgacgcggaagccgcccaccgtggtgtcctccatggcctcgtgcgccgggatcaccgggccggcggtgcggagccggagcgtctccttgatgacacattggatgtaagggaggttcgccatgtcggcctcctccaccagccgcgccgtgccgacgttggcgtctatctccgccctcgccttcttcatcgtctccgggtgagtcaccagctgcgccattgcccactcgattgtcagcgccgacgtgtcggtgccggcgaagaggagcgactgcacaccatgatcgaatccattgtacatgttgatcacaatggagtagaagtgtagaagtgggacagtaatggaaaacaagatgatgcctttgacgacattgtcggtgtagtggtcgggatcggtttcttgcagcgcgaggagggcgtcgatgacgcccttcttctccttgtcttggtcgccatcgccggcgctgccgctacgccattgccggtggtcgtcgataaggccggtgaccattgcgtcgcgccgagcttgcagcttcttcaggctgcccaccttgccgcggagacgatcgacccaccggagcgccgggaagaagtcgccgacgctcggcgtgccgttcaccgagaacgtctcctcgatgatctcctggagcttgcgcgcgtcgacgctggcgtggcggcggcgcgtcgtcgccgcgcgcagcatcacgttgagcaccagctcgaacagcctgggccggagcgtcaccttggcgccgccggcggcgtcgcggaggatggcgtcgacgagggacgcggcctcggcgtggcggtcggcggcgagcgcggcgaggcgcggcgcggagaggagctcgacggcgaggaagcggcggagcgcgcgccagtggtcgccgtggggcgtccacaggacgatggtgtggtcgtacccgaggatctcgccggcgagcgtccgcggcctccccgccagcgcggcgtcgcacgccgtgaagcactcctccgccgcggcgtgcgtcgacacgaccagcgcccgccgcgcgcccagccgcagcgacaccaccggcgcgcccaccccggcggcgaccgctgccagcgagcggtgcagcggcttcttcagcaggtggaggtggccgagcaccggcagcgccggcgggctcggcgccgcgccgccctcaccacccgaccaccatcgaacaagaacgacgacgacgacgaccaccacaaacagtagaacggtgatgccaacgagcacggcggcgccaccattgccgccgccggccaccat

SEQ ID NO: 91282 - DNA, 465 bp, Oryza sativa
  Clone ID: PAT_MRT4530_89873C.1
agcgtggggctcctcaccgggagaccgcgcacacccccctttgccggttccgccggggacgctaagagctacaaagagctggagagcaagagagttcaaactctagagaccctcttcctccttctctcctctaccagctccgtgcggccacgcgtcctcattcgtctgacctcggggatcaccctgtcatctctttttaattgggcggagacttgcaatggctgctgtccgagtgatccttctgatgggacggcccatacctacctccactccgccggaagcaggtgcaacgtggggacacggtcgtctgccgacgacataaccagtgtcagaccgcctggcatgtatctagccgggactgacgtgccaacttcgggagttagcacgccggctccggctagtgacgagcgcctggaggctctcatcattccgacgggacggggcaaggcgtgtgacaggccgcct

SEQ ID NO: 91283 - DNA, 366 bp, Oryza sativa
  Clone ID: PAT_MRT4530_89874C.1
gaaagaagaagaaccgggaaattcggggagcctatagctgggagatcaagaatggggcaagggcatcatcatcatccttgagcaaccattaattaatttgtcctccaggtgctgcacagcagcaggtgaccggaaagaaactttaggccctattttcttgtaccacgtggtttgaagacccattttttgggcctttttttttttgggaggatgagaatttaagtactggattaccccattgagtaatttgatttttttttttagaggtttgagaatatgagagttttaattacatcacattgtataatcttgggctaaatttgtgatgtcgagattaattattcttaaaaaaaaaaaaaaaaaaaa

SEQ ID NO: 91284 - DNA, 324 bp, Oryza sativa
  Clone ID: PAT_MRT4530_89875C.1
ttttttttttttttttttttttcatacttcaattttcattttttgtttttttttttaagggggaacaaaactggatccaaaccgttggaaaaacccaatccaacaaacctaatggatctaattcatcatacttcaccccaatcgaatttatttactttaaaaccaaatttcattttgcttctacatacaaaattccgcgaaaacccaaaaaaaaaaaaaacatttttttattggaacacccccagattgggggtaaatttttttttaaatttttctcctaaaaaaaaaaaaaccccccaaagaattcccccccctctttttttt

SEQ ID NO: 91285 - DNA, 311 bp, Oryza sativa
  Clone ID: PAT_MRT4530_89876C.1
aagggaccaactgctcacgatgtggactcaccatgaacacgtagcataatgcccacacgacttaagctggagattgaatctcataacccgaccacaccagacgtcgtctgtctgactaaacgcatggactacatgcaacaacgggtgaacataatggagcatctggttatgactcaaggtgtgcagaatataaaaacaagagcccatcatgcttataattctcaacatgctgtgagcccaaggcgtccagtacttgcagagctgcatgctaatgagcctaccaatacgcacttgcttgaggagccttatgc

SEQ ID NO: 91286 - DNA, 304 bp, Oryza sativa
  Clone ID: PAT_MRT4530_89877C.1
gttgttttttttttatactaacaaaaaaatcatatcaaacaatttttacatggtgtataacgtgtaaacctcagggaaaaaatatatatcagccttacagctcaagtgacagattatactacctggatattgattctgaatgaaccattaagaaccagactctaaaggatattagaaggtatggtctttgccaaacatgctataacagcaggagggccgcatagggccagcagaatcaggggggcaatcatgcaggcgccaagacgccggtatgccccgaagtgcacagatggtgacccatagc

SEQ ID NO: 91287 - DNA, 951 bp, Oryza sativa
  Clone ID: PAT_MRT4530_89878C.1
cggccacctggtgcgcgtagcctgtggagcctcccagcacgcacgcggcagagaaatccagagtcctatagctctgcggtgagttcagccatggcgtcttccatggccaagaactcctcgcctttcaaggtcgtgctcggatcgtcgtcgccggcgcgccgcgagatactggcggacatgggatacgagttcaccgtcatgtgcgctgacatcgatgagagggccatcaggagggagaagccagaggagcttgtcaaggccctcgctgaagctaaggcagaggccatcaaactgaagttgcatggggaagactctgctcaagagagagatcagcctactattctgatcacctctgaccaggtcatggtgagcaaagggatgataagggagaggccaaaaggccaggaagaagccagggagttcatcaaggggtattcgggtgataaagcattcgcagtgaactatgttcttgtgactaacctaagcaatggagcttccaaaggaggatgggatatacctgagatctattttcaccacataccagaggatttcatccaaagtgtggtgaaggaaggacacatgacctgcgtggctggaggccttaagctgacacatccttcggtgctgccattcatcaagcagttagtgagcaattctttcgaaacaaccaccattgctagtattactactcttagaacggccaatctgtactggacagtgtcactgcaacgtctgaacaacaataatatcgaatccattgctctgattttgagatttcttcctatgttgcatagatcggcacaatggatagcgttcgaggactcccgagggagctcactgagaggcttattcaagaagttcttggagccaaatgatttgcatctagagtgtcacttgcaacttgcaagaagggcattgctaaatggaccgtacgacgcgctggtattgtga

SEQ ID NO: 91288 - DNA, 710 bp, Oryza sativa
  Clone ID: PAT_MRT4530_89879C.1
cccccgtccggtccgctcaagatggaattttgatctcctcggtgttcttcttccctccagatttggtcactgtcgcgggggaagagagaggcggagcatcggaaagcagatcgagccggaggcgccgcggcctcctcccccccaccggcgcctcggatcgaatcgaatccaatcgaaggatggagtatggaaggaggaaacctattagcttgctggagctgtgcatccgtactaccatggataacctgaggtatgtcgataacgtggacggcgtggagatggatctgctccagagaatcctgcctcactgcaagatggaggacctgacccgtatcgagaacaataccgagatggatcttaccccagttactgataagctgtggaagctattctatacgcgacaattcggcgaggaaaatgcaaaccaagtcgtcaagagaatgagcatgagcggagcgcggtacaagtggaaggatctcttcgatgccaaaacaaaaaagcagaaggaatatgaagaaaagatgggccagaggcttgctaagaagtatgaggcagcgaaagctggtaagaaacattttcttgctgggtgtctccagatttcaggcaaaaatgaaagctgctattcaaaggaatactatagcaaggacatctcagcacataaggatgaactcaaatcatgtacagccaatgaagacaacgactattcatag

SEQ ID NO: 91289 - DNA, 134 bp, Oryza sativa
  Clone ID: PAT_MRT4530_8987C.1
gctcgtgccgattgtggcaatggtggtactccaagccaaaaaaagaaaaaaaatattggatgcctcatgtccgaataattgcacacaaccaatatacacaatgaatgaccggaatctttattgatccttatcat

SEQ ID NO: 91290 - DNA, 669 bp, Oryza sativa
  Clone ID: PAT_MRT4530_89880C.1
tggatccccgggctgacgggccgcacgaggcgccgcggaggaaggggggaagggagcaagcaaggcaagggattccgcctcgcgagaacgatggggttcatgctgcgggtgaggctggcctccttcttcgccggcgccgccgccgccggggccgccggcggcttcttcctctacaaggactacaagctcgcccacgactccatggccctccaggtcaaaggcctacaagaccatgtggatgcccgttacaaagctcttgacaaacgacttgctacattggaagaccagaaaaccagcgagactgctccagacgtgggcgtgccatctgattagtctgttcattggctggcttgagtatggatgatttacgactgtttactttaacctgtgttatcgtctcttggaggcaaaagccgatgactgactgcaaaataatttagtgaagagttttttttttgtgtgtggcaatgaagcttctgtagtgttatagatgcccatggggatacccaaccttgcaaaaccatttcacttttgatggcactgaaccttggcagtcaagctcgatcatttaccaatgtacctgtgtgaaagtttctttacctgtttgctgccaggaacttggatgttttaagatgcctgctgttattttttttcaaaactttccgtaaa

SEQ ID NO: 91291 - DNA, 822 bp, Oryza sativa
  Clone ID: PAT_MRT4530_89881C.1
cggcttgtgtgtgtgtattttctcgtttttttttttttttttttttttttttattgaaatttcatccatggaaacatgctgatttgaaaagttacggttacaatatcccaggtaaggcactaggcccatacaattacacacgcatataactgtttttgagtttttgatgggaagccggtataacatcacgtcttcaggtgtttatttaggtgcgggaatgaactgcctactaacaaaccaatcagccattacactattacagacgtggctgaaggtggcagtcaatagcaccagtgcaggtacggcaacatcaggcattttgcgttgctcatgctccgtcgtcgtcttcgacattgttgacacgctcgcactcatcaatccattcgctatatatgtcgattggttcagtcagtgcattgacagtggtgctgaagttttcctgacagatcctacatgaagcctcgccgatcaggttcttcatatcaatccggcattcaacactactgccatgattgcagaatgggcaggaaaatacagtatcaagcttgtccatcctcttcttaggtggtggcttagccgctgacttcctctttcccatggctcaagttactttcttcctgagccggtcgccggaggtgaggacgacgagcagccgtgggagggtggctgtcagaggcggatctcgccggaggagctcccggggcaggcggaggggagacggggaatgcggggagctcgagagcgcgtcggaagggattggggggaaaaaatggagggtgttcacacccgccgcttgggcggacgcgtgggcggacgcgtggg

SEQ ID NO: 91292 - DNA, 312 bp, Oryza sativa
  Clone ID: PAT_MRT4530_89882C.1
atggggttcatgctgcgggtgaggctggcctccttcttcgccggcgccgccgccgccggggccgccggcggcttcttcctctacaaggactacaagctcgcccacgactccatggccctccagttccaaagtttggcttggttgacagttccagtaccacttcatgtggaatctgagcttgccaaattgaaggtcaaaggcctacaagaccatgtggatgcccgttacaaagctcttgacaaacgacttgctacattggaagaccagaaaaccagcgagactgctccagacgtgggcgtgccatctgattag

SEQ ID NO: 91293 - DNA, 261 bp, Oryza sativa
  Clone ID: PAT_MRT4530_89883C.1
gcacgaggcagactttcagtttagctatagctcgcgaagccgccatgggctcgcacggcgacgacggcggcggcggcggagctcacgtgctcctcctgccgtacccaagccagggccacgtccacccgatgctccagttcgccaagcgcctcgcgttccacggcatgcgccccacgctcgctgtcacccgctacatcctcgccacctgcgcgtcgcccgacgccgccgcggcgggcgccgtccgcttcgccaccatctccg

SEQ ID NO: 91294 - DNA, 471 bp, Oryza sativa
  Clone ID: PAT_MRT4530_89884C.1
atgacgactctgcctccgcgctctgacgacgccccgcacgaactgttcatcttgtccacatctcgccaacggacgacgacttcgcctccgcgctccgacgacgccttgccggtggagccggagcgggaggcggcgggcgaggtcagggagcacgagcggctcggcgagcgatgcgcgcagcgcgtccaccagcggcgccgctgccacgagcgggaggtgcgccgacgcgagctttctcgaaggctaccaggtactaggtatcacaggtaccaggtatcacggggtaccagggaagggaacatggacaaactcgatgtgggcgacgtcctcgacgagcagctcgaagtggtggccgacgcacgtcaggaagagtcgcgtggctgcgcagcttgttggaagcttgcatgtgggggtgaggtgcgcgccttcagggatatatgcggcgttaggctgtcgccccgagcgatgtga

SEQ ID NO: 91295 - DNA, 337 bp, Oryza sativa
  Clone ID: PAT_MRT4530_89885C.1
aatttatccgagcaccacagtgcttgctgtctacgttcaaaaagatgctagccttcgacaactgccagggatgggaagctgtgtacgcggacaacggtcaagtcctcgtcactaatgtaagtgcttatctctgctcaccgtcatcttaagaattcccctttccctagtggactgatgcaccgtgctcaattgattattcaattgaaatttttgacagtatagcaaaggtgatcgctgatgttttattgttagagccatattgataatgttgctcttctctttgagctttgcgagtggtctcatttccttaccaagttttaattcttatctctacttt

SEQ ID NO: 91296 - DNA, 238 bp, Oryza sativa
  Clone ID: PAT_MRT4530_89886C.1
ccaacccccaaagggcaaacaatttagccccaaaggaaaatgggttttcccgtttcgatcaccgcgaccccctttacaaaaagacccgggtcatgtaccatgctattttttgcaaagttactacaacaacaaccctgaaaaaattccccccgtttcaacaaaaggcaaaaaaccttgttttccccataaaccccagtggaagggcggttttgtcataatacgaaaaggcaatacccgc

SEQ ID NO: 91297 - DNA, 261 bp, Oryza sativa
  Clone ID: PAT_MRT4530_89887C.1
atgggagctgcttggcttggcgtcgggttgcaggcaatcctagtgatgtttctgttaatgtcgccaccatttctgccctgtgcgctcgccgctggctgcagtagcgaaggcaagtccggcgaccaagtggtcggcatagtcagggagatgcaagaaggccatgatttttttgcttcaagcaaatcaacatggtctcgtcgaattcttaatgcgggtgaagatgggagacacaatcctcccttctccccgggacacaagtag

SEQ ID NO: 91298 - DNA, 711 bp, Oryza sativa
  unsure (1)..(711): unsure at all n locations
  Clone ID: PAT_MRT4530_89888C.1
ccgccggccgggccatctgcaacagagaaagattgtgccacagtacaaactacctcattctccatcaggtgcacaatagaagaaactaagattctcaaagtgatggcggggatcaccggatctcgagcactcatggtggtggcgctcctctgcgctgccgcggccatgactgctgcacaagaagcatccaacgtgcgagccacgtatcattattacaacccacaacagaacaactgggacctgaacaaagtgagcgcatattgtgccacatgggatgccaacaaaccgttgtcttggcgccagaagtatggatggaccgccttctgtggacctgctggtcctaggggccgagactcgtgtggcaagtgtatccaggtgaagaaccggggaacaggtgcgacaataattgcgaggattgttgaccaatgcagcaatggtgggttggatctggactacgagaccatcttcaagaagatcgacacagatggtcgtggctaccagatgggtcacctccaggtcgattacaagttcgtcaattgttgatttggtcatgcctctttgcatgatcatatactggaataagaaatatatggtgttatacaataagatggaagaggttggcactctgtaatcatgctgaataatgaataaacgaaattacagttcaacaaaaaaaaaaaaaaaaaagcggcggccaaaaaaaaagcgngc

SEQ ID NO: 91299 - DNA, 1331 bp, Oryza sativa
  Clone ID: PAT_MRT4530_89889C.1
cccccgggctgcaggaattcggctccaggggcccggcccgcgcctcctcccttcctctcttctttcctcgccgacgacgcgattccccaccggcctacggcggcggcggcggcgagggatttcgccggccagctagccccatcctcaacaaaatcgaggggtcggttgctctcccggtggaagagccccatggcctccgccaccgccccgcagcctgtgtcctctccatccgccgcagccggcgccgcgtcgaacaacccccacaagcgcaagaagccggcggcgagggggaaggggaagggcaagggaaagggccgcctcgccaagacgcccaggcgctccgatgaccccggcgacctcccccgccgccgcagcaagcccagcgacaggttcctcaagctgctccgcaagcgcgcccgcgactacaactccgacgactccgacgacgaggagcgcctctcggatgaggacgaggaggaggagggggcttccggctccggtgacgacgaggccgccggcgcggtgaccaggttcgagcaggggtgccgcgcgttccgcgtcgccttcacgaagatcatggccaagaagctccccgacgacccactgggtccaattctttcggcgcacaagaagctggtcgccgccaagttggccgaggacgcagaagaacacaagcccaagggagaaggccgcagggaaaagcgcatggctgcagagaagggccatgtcattcccacaaatcatttagatagtaaagagaaggagctcatcaaaatcgcaacccaaggggtcgtcaggttgttcaactcggtaagcaaggcgcagaattgtcggaaaggtttgaacccatcaaggagtaaagacgccaaagtgttggcaaaagaaacaaagcaggccttcctcacagaattaagcaaaacatctaaccaaagtcaaaagggcaaggcatcttccaacttttctaagaacaatagcaaagacgaagacgaacctgggtgggcacccctacgcgagacatacatgcttgggtcgaaattgaaagattgggataaaatgcagacctctgatgttgtgaatgaacaaacggagatccctttggacgactcttctgatgaggaataggcaatagattcacctgagtgagttgaagcagcatttgggacaatgttcctgtgctttgaagtcgtgttcttgttattgacattgtaaagcgatatttggttcaaatttgcaagttaagttttcttatcattgtttcatgcaaaaaaaaaaaaaaaggctaatgcccggcacgggcaagttgtccaacctcttggaaattattttccttt

SEQ ID NO: 91300 - DNA, 238 bp, Oryza sativa
  Clone ID: PAT_MRT4530_8988C.1
gtcgactctagaggatccccgtaataccctactcctgtccggggattattccgccgagtgtgttattgatcgtataaactggaaaaaagaatcgtgccccgagaggcacacggaccctccttatataggggaaagggtccgctttacaaaatatggggtatccataatctccacactattgccgtcgtatgccctgggcttcggcagccacgccgtgacgacgctggagaagacctga

SEQ ID NO: 91301 - DNA, 770 bp, Oryza sativa
  Clone ID: PAT_MRT4530_89890C.1
cccatctgcaacagagaaagattgtgccacagtacaaactacctcattctccatcaggtgcacaatagaagaaactaagattctcaaagtgatggcggggatcaccggatctcgagcactcatggtggtggcgctcctctgcgctgccgcggccatgactgctgcacaagaagcatccaacgtgcgcgccacgtatcactactatcgccccgcgcagaacaactgggacttaggagccccagccgtgagcgcgtattgtgctacgtgggacgctaacaagccactgtcgtggcgtcagaagtatggctggactgccttttgcgggcccgttggtcctaggggtcaggctgcatgtggcaagtgcctcctggtgacgaacacggcgacgggggcgcagatcacggcgaggatcgtggaccagtgcgccaatggcggccttgacctggactgggacaccgtcttcaccaagatcgacaccgacggccagggctaccagaagggccacctcatcgtcaactacaagttcgtcgactgcggcgacaactgattaagctatagctgccttagctaattaattactctccattattacatgctaataaggttgctgctgcatatacattattgtcgacagggcagagtagagtggtaaactctgcctgatgaataaattaagcagctgataaataattgtgatatgttgatcgatctgctcaagatctttgtatacatattcacaggaagtatcaattaatagatttctctcgagt

SEQ ID NO: 91302 - DNA, 894 bp, Oryza sativa
  Clone ID: PAT_MRT4530_89891C.1
ctgagttttttttttttttttttttttttttttttttcgggctgctggttttttttttttttttttttttttttttttttttgggcaaaaataaacccagtgatgatatgatttcaggatcttcaaattttacacaaggtgcagctcctcttttcttctcaacaagatggaatagaattcgtgaattacaagcgtgcagctctagcctctaagcttgtgttatcaaaatcgctcctctctttagcataccatagttcaccagcaccccaaagccttccggtcaatgttgggaaacttggaggttggagatcagggcatatatttatttttcgtttattccatcccatgtaatcatgggacatcttttctttgccaacacatcctgattatgcttacataagctggccagacaataaaatatgtccatttccatacctgaatctggtcaccctttcatgaccccgagataaatgggatctcggctagtgaagtgggaagggatagagggagattttgtgcagctagataagtgatgataccagctgcataacctgcaagggcaaaaccactcaccttccggaaataccaatagaaatccaccttttcctttcccatgatagatcccccccatgtggacgtatatgctccgggccttgtcacgggtagccccttattccgtacagggacgctcatcttgcggccggtcggtaaggattgggggttctgagaggacactgacagcacgatggacggagatgttagggttgcgattctccgaaaagcacaaatagttgaagaaaggtgggcaatctactttacatccaaatcattgagaagacacttgtgcaaatctataaacaaagttatgccgtaaaccaagctcgcttatttgtt

SEQ ID NO: 91303 - DNA, 268 bp, Oryza sativa
  Clone ID: PAT_MRT4530_89892C.1
aggcaaggaaaagaatcggacttacaactggcgggagaaaaacctagacacacacgggcccaaatcaaccagataggttagatcacatagaccgcagtataaaacaaggtcgatcttctcaagctcgtgagggggggacaaataacaatcatgctcaagagagttgcacagcaatcaacttaagtacgcgtgctggatgcagctgagctgcgcagtgaagaatctgtatatgtctaggtgaccttgacgcccgtgtattctgatgatc

SEQ ID NO: 91304 - DNA, 2373 bp, Oryza sativa
  Clone ID: PAT_MRT4530_89893C.1
atggctcctgaggcggcggcggcggccttgaagccgatgaaggcaacgtcggacggcgtgttccagggggaggaccccctggaagcggccctgcctctggccatcgtgcagatttgcatcgtcgtcgtgctcacccgcgtgctcgccttcttcctccgcccgctccggcagccgcgcgtcatcgcggagatcatcggcggcatcatgctcggcccgtccgcgatcggccggaacagcgcgttcatcaacacggtgttccccaagcagagcctcacggtgctcgacaccctcgccaacatcggcctcctcttcttcctcttcctcgtcggcctcgagctcgacctccgcgccatccgccgcacgggagctggcgcgctcgccatcgccgtcgccggcatctccctccccttcgtcctcgggatcggcacctccgtcgtcctccagaacaccgtcaaccgcggcgtccccacggggcccttcctcgtcttcatgggcgtcgccctctccatcaccgcgttcccggtgctggcgcgcatcctcgccgagctcaagctgctcaccaccgacctcggccgcatggccatgtccgcggcggccgtgaacgacgtcgccgcgtggatactcctcgcgctcgccatcgcgttgtcgggctccggctcgcctttcgtgtcgctctgggtgctcctcagcggcgtcggcttcgtcctctcgtcgttcttcttcatccggccgctgctctcgtggatggcgcggcgatcccccgagggcgagcccgtgaaggagctatacatatgcacgacgctcaccatcgtgctcgccgccggcttcatcaccgacaccatcggcatccacgcgctgttcggcgccttcatcgtcggcatcatcgtgcccaaggaagggcccttcgctggcgtcctcctggagaaggtggaggacctcatctctggcctcttcctgccgctctacttcgtgtcgagtggcctcaagaccaacgtcctgaccatcaagggcggggactcgtgggggctcctcgtgctcgtcgtcgcgacggcgtgcatcggcaagatcggcggcacagtgctcgcgtcgctcatcgtgcgtgtgccgctccgtgaggcggtgacgctcggggtgctgatgaacaccaaggggctcgtggagctcatcgtgctcaacatcggcaaggaccggcacgtcctcaacgacgagaccttcgccatcctcgtgctcatggcgctcataaacaccttcatcaccacgccgctggtgatggccatctacaagccggcgcggcgcgcccccccgtacaagaaccgcgccgtccagcgcccgaaccccgacgacgagctccgcatgatggtgtgcttccacagcacgcgaaacatccccaccatgatcaacctcatggagtcgtcgcgtgggacgcggcggcgcggcatcaccgtgtacgccatgcacctcgtcgagctctcggagcggtcgtccgccatcaacatggtccacaaggcgcggcgcaacgggatgccgttctggaaccggcggcgcaacggggacggcgaccagctcgtcgtcgcgttcgagacgtaccagcagctgagccacgtgtccattcgcgccatgacggccatctccgacctccacaccatccacgaggacgtggtcaccagcgcgcaccagaagcgcgccgcgctcatcgtgctccccttccacaagctccaccagatggacggccacatggagtccctcggcgacgagtaccagcacatcaaccagcgggtgctccaccacgcgccgtgctccgtcggcatcctcgtcgaccgcggcctcggcggcgccgcgcaggtcgccgccagcgacgtgtcctacaacatcgtcgtcctcttcttcggcggccgggacgaccgcgaggccctctcctacgccacgcgcatggtcgagcacccgggcatcgcactccacgtgatacgcttcgtcccagagtccggcggcggcggcgcgaacgacaaagccgcggcggacgatgcgttcctcgcagagttccgcggcaaagtcgccggcgggaacgactccatccggtacgaggagaggacgtccagagggaaggcggacgtggtggaggcgatcaaggcgatgggtccgaccaacctgttcctcgttggacaggggtcgccgtgcgcgccgctgatggaaccgagcgctgagtgcccggagctcgggccggtggggagctacctggcgatgccggacttctcgacggtggcgtcggtgctggtgatgaagcagtacgacccgacggcggagcactacgaactcgtcgaggaggtcgcggacaccgccgtggacatcgacacaccggggcctcgtagagggtga

SEQ ID NO: 91305 - DNA, 433 bp, Oryza sativa
  unsure (1)..(433): unsure at all n locations
  Clone ID: PAT_MRT4530_89894C.1
gcacgagggttctctccttccgctcctcccggtgaggacgaggtcgggcgcctcatccgctccatcttctccgagagcggcggcggcaccggcgccttctacctcgcccgccgccgccgcctcgcccgtcgtcgcggcgctcgcccgccgccgtcgccatttctgatccgttcttgtttcagagcttgcacccggcggcgaagtaccacgacgctgcgatggcgatcggcgggtgtccgatctacgtnagcgacaancggggaaccacaacttagaactgcttaggaagctcgattacgaggtgttccacgtctgcnccgtccgcgctatcgaatggcgccgggaagaccgtcgttgcgttcngcccgttgggtccttnaaaacgttangcaacgccgcgccgttggctcaaggtgnatggttcgacattttg

SEQ ID NO: 91306 - DNA, 2379 bp, Oryza sativa
  Clone ID: PAT_MRT4530_89895C.1
atggctcccgttctcctggtggtggtcggctcgtcggcggcggcgtgggccgacgtgcccgccggcagccgggtgcaggtcgtgcaggtagcctgcggcgcgaggcgtccggcgacgacgtcgatggcggtccgctgcgtcggccgcggtggcggcaagacgggtccggtccttggcaagccttccgacgacgacgacgacgacgcgttaagcaggtgcgtttcttggggttctttcttgtttctccctgtgcatgacgcgttcctgagccagatcgaaccaagtatgtgtttcttgggttcaggcgttgagcagatcggaccaagtgtgtgtttcttgggctcaggcgttaagcagacgaagctggtcaagatcgccttcaggatggccgtggtgacggccgttttcttgaggagagttcaggcgaattccaactgcgccgacatgtctctgcaggtgtcgagcctgcaagaggagtgcgcccgtttcctggattcgttcgtggccggggaggagatcgcgggccacgacgcggtccgcatgctcgtcggctgccatgacaagctgaccgtggttctctccgcctacggcggcgccggccgggacgacgtcgacgagggacaggcgccgccggtcgtcgtcccgcccggaggacagatcgacacccacctcctcgacttgttcctcattgggacctccgagctaccaaccaactggtctgacagaaccctcgttgcccagctgacgtgctctctgtaccgggcaattgaagcagtcaccaagttcatcgccaccacggagaagggggttcctctcgagcaagcagatgcagaggggagcagccatcagagtctgcatgttgcatctaaggcggccgggctgaccagcagcagcagtagatcaaaagatgtgaagttgagggctatcttacatgaggacagtgttactggtgttagaccatggtttagcctgttcggaatgtccttttctgatctttatgatcacttccctgaatctgtctgggacatctgtgaggattcccctgccgaagcttttgagaagaaggagcataaggggtggatgcaatttcggagtgaaatgaacagcagatacaacaaagccgtggacataagttttgacgataggtttgctgattccattgtgtttgacaaaacactctacaagtatgcaattttgggttgcaaggtcaatgcggatgggattatgaatcagggtgttatatctgccagtgaaagaaataaaattatccatgctcttgaaaggatagaaggtgacattgagattggaaagttcaagtggagagatggcgctgatattcatacaagcattgtggaagcacttgctgatatgattggggacaaagcgaaggatcttgcagtggaaagtaaatatgatagttgcctcatgatactggaaacatggtccaaaaactccattgatcatattatgactcaattgaaacaacttcaggttgctctagttctgttagcaataaaaaatgatggggttatccttggtgagagagagattgagggcaccacatgcctggagagtcttcttctgcgcattgtcaaagtgctagactatgatgcttccaaacttcgttcctatcatggaagcatttcttgctcaaatgatggtgtcatgcttctgaggaccagctatccagaaaatcagatgttttccaagctttcttccatggcctcgtttgcagaatcaatcaacaattgcatccccaaccatctaaggcaactgcttgagaaggttttgtccaggaggaatatactgttactcacaccaaatggtgaaacaacgatatatgacacagtcctatccaagtttggttccattgaacagacaaggcatcatggagatgttgctatctcaaaatgtctaaatattggatttcgaaatgtacgtgaatcacctcagacatgtgaaatcgaggacgctaagcactatttattttctagcactaaatctgtggtcgaaattctcgatctatccatacaacttgttctaaggatcttgtttggcatggaaaaggcccaaaattccctcccaagaggatatcatgatgttatgaggtttacacatttcctgacaacgaagggaatcgatttgggcacagcttatgccttggtccatctgtgcttggataaaaagctccaaccttcggagctcattctagacaaacacgagctaaagcagatcgattttcactgtgagcgtgctcattacctcctggaatacaaagggagcatctttggtgattccaccgatctggatgcctgcaagaagatgctgaaatggtgttgcaaacttcgcattgatcctgctgcgaccatctcttcttga

SEQ ID NO: 91307 - DNA, 345 bp, Oryza sativa
  Clone ID: PAT_MRT4530_89896C.1
tcaagccggagctagcgtgttatctcttagagatggcacgttagccctggttagatttataccaggcttcatcgcgtggtggacaagaatgaccggtctgacactggtcgcatcagcaacgggcagccacgatctcacgttgcgcccgtctccgccgggagtggaggtaggtgtgaggcttcccagcggcccgaacctgtatacatcgtccgtgtctcgtgtttcttcctggcacgcgatctttccacacacagcgagagcttgagatctcaccctaagcccccggccgaaccggcaaaggggggcctgcgcggtctcccggtgaggagccacgagctccgtcat

SEQ ID NO: 91308 - DNA, 441 bp, Oryza sativa
  Clone ID: PAT_MRT4530_89897C.1
gtgtttttttttttttttttctttttttttctttttttttttttttttttttttttttttttgggggtcaaaaagaaattttgaccgcattactactggttggacaaatggacaagaagtcaataagctggtttcagatgaaacttggtttggttttaaccatttcaacagggcccatggaaacttaaagagaagtttaacaattgccttgagggatttctttggggccttgattttttagatcataaaataaaagggggccactgaagggtttaacttccggacactgggacccgaccaaagattctatcccctgggggccttggggtgacaccaacttctttcaggaaggggggaagaattacccatctccgagggaactttggccttcctttcttggcactcaacaaatttttttaacgggggggtttttcaagggcc

SEQ ID NO: 91309 - DNA, 159 bp, Oryza sativa
  unsure (1)..(159): unsure at all n locations
  Clone ID: PAT_MRT4530_89898C.1
tttaanatcagattaccatataccctgtggcttttgctgagtgaaaatttgctggttgtccgcttgttggcctatcggaattcggatatactagttcatacttgtcaaaaccgtatctctgtgtactganctactactagtaaaaaaaaaaaaaaaaaa

SEQ ID NO: 91310 - DNA, 432 bp, Oryza sativa
  unsure (1)..(432): unsure at all n locations
  Clone ID: PAT_MRT4530_89899C.1
gatgaacacatttatttattcatccatccatatttactttgttctcccaattggcaactaggattacattattttgattacatttagttgctggagatgacaagctgtagcttgattctggcagcctggcacagaagagagagagagaaccagcaaccagacacaattattcccaactaatctgaaccacactttctcaactgcatgtacgctcgtggctcacacatacagctactagctgatctggtcaccttctcctcccaagcaagatccaaccacaatgatcatcaatgtcatcttcactgcattccccatccatccatccatcgattgatcatccgtgagcgcattgggggaatcgatcatgttcttgacatggttgttgatgctcatgttcttgggnttgggtgtaaangtgttggtggaatatca

SEQ ID NO: 91311 - DNA, 222 bp, Oryza sativa
  Clone ID: PAT_MRT4530_8989C.1
atggatgaaggagcatgcagctatagcctagccaagccaaagttgattgatcgatatgacccaatcccaaaaatcatatcctgttgtgccctgcatttgctacttgcatatcctgtttgtgctcgagaaggaacaagctatgtcgatcggtatatgtgtgtatatgtgcccatctatcagttatatccattgtacctccatgctgttgtggtcgacaatgat

SEQ ID NO: 91312 - DNA, 204 bp, Oryza sativa
  Clone ID: PAT_MRT4530_898C.1
tcgtccacgcgtccgcccacgcgttcgagacagtgttcaacggggagcttagacgctgacagctgcttattataccacaacgctatgcagttgtaaagaaagcacatagagagggatgtgcttacattgcatttaagaccaagcctaactctatggtaagccacattgcaggaaagagctccatgttacgtgctgtatcaaatg

SEQ ID NO: 91313 - DNA, 820 bp, Oryza sativa
  unsure (1)..(820): unsure at all n locations
  Clone ID: PAT_MRT4530_89900C.1
agctggagtccaccgcggtggcggccgctctagaactagtggatcccccgggctgcaggaattcggcacgagtttttttttttttttttttttttttttttttttttttttttannaaaatnacanganaaaatnatnatngnctngaattatgnaaacgnngataacaaancctttnccagntacaaaagnnccngcntaacancaangntttntaaagngncttangnaancncncccttcanctcaaaangggctntatctngggggcctnggccncagcaacantttcacttaangggtacttnccatcctgggncananaagnncccggggncaaatctccttggccntncccgttntcgcnagcagcagtcgnggggttnanntnatcccaggcctannttcccgggggccccttgngatcggnaaagttttnccggngnnggggtncnttttttccgggggttttccccttnnccntncttnnagggtgggnnngnnngtnncnctntnttgcnggntntcggccncntttnnggncngnnnnctnnntntnaannaggngnccnttaccccctcccanaagancccccagtanttcctnntnnatnnccagnnggtccncancnnncnttncaannnttntggtnnccacntnntcnnangtccncggnnnacanttngntntctcnnccnncncacnnnactttntttnnccttcanncnanntcannnccanannntcnacnctnttnannccnnttttnnnttcaantntantnttnccnntcatgtggtnactttnantnnancntnc

SEQ ID NO: 91314 - DNA, 518 bp, Oryza sativa
  Clone ID: PAT_MRT4530_89901C.1
caaaactaaaaacaaactttaactttttggggtaattccgtaacaaactaacagagggggtttatttaaacaaaacaattttttttgggtggggttaaccccaacaacagcacactttccttaaaaaaaaaaggcacccccccacccggacattttgggaaacaaaagggccccaagcggggaacagcgcaaatagggggcggaattatgcttcacccatgaggcaataaagggctgggtggaaaatcccagccatgggggcctggggcccatatccctaattgggaacaccaagttcggcccctagggcccccttttgggaaaggccagttgggtagttggaaccacctctccaaacgaaaatgttcatccgggcacccttaaattgggatcccttctcttttaaagcccgaatgatccccttgaagggaccagcgacctcagggaagtgcgctatcccccccccaaagaaaaaagctctcttacggccatcaggatcagggggggcccaatccaaa

SEQ ID NO: 91315 - DNA, 309 bp, Oryza sativa
  unsure (1)..(309): unsure at all n locations
  Clone ID: PAT_MRT4530_89902C.1
tggaccaaaaattgnattagtatcnaagaagtgtaggtattattattattatacatatgtataagcttaagctatactgggactctagctcagggttctgtaatcttcttcttctacctccctttcagtctcctcatcttgatcatctcttcttttcttctctgaagcatatgccattattatgtggttttgcagtggtgctactactaccaccacagtaccactacaatgtgngggttttcaagnggttttatgatgtgtgtaaagaggnaaggnattnatccaaaaaaaaaaaaaaaaaaaaaaaaa

SEQ ID NO: 91316 - DNA, 629 bp, Oryza sativa
  Clone ID: PAT_MRT4530_89903C.1
gcgcccacgcgtccggttgcgcaggcgtgcggctggcggcgcgccgccgagcaggcggggcttgtggcgccggcccggccgcgcgactcgtgtcctcgtgctcgtggtcgtgggatgtggggcgccgcgccgggcgcagggcggtaggcggctgcgccactgagggctgccggcacctggcctggccggctgaccggctcagccgcgcagggcaggaccgcagaagcaggagcaggacagcaacagcaagccgcgcaggacaggagcagcacaacagtgacaacacaaactgaaacatgaagacgaagaagggccagctgttgatttaaactcttttttggagaaacaagatggggcttcattaaaaaaaattcaatttgcaagctaaggacaaggacatcatcgattattttcaaaatatcaagcgtcgaaaagttaatctctaaattgattgacttggacatcagcctcaaagagtggtacatgttccctgcagtgaaccttgtcactttactatcttagaatgtcaatgtattggaacaaacatgtaactatgaatggggaattggatactaaagaaaattttgccttctctgcatagagcagagaaaaaaaaaagccaatttccg

SEQ ID NO: 91317 - DNA, 626 bp, Oryza sativa
  Clone ID: PAT_MRT4530_89904C.1
ggcggcccggacgacaaggaagccgccggtgcggccgaaggagccggtagggaggaggagcacggggaaacgctgtgcggcgcgtgcggggagagctacggcgccgacgagttctggatctgctgcgacatcttgcgagaagtggttccacggcaagtgcgtcaagatcaccccggccaaggcggagcacatcaagcagtacaagtgcccctcctgcagcggcggcaacggcggtggcggcggcgtcagcggcaacggcaagcgtgcgcgcccgtcctaaggtgtggcacggcgagcccatccagagttaagatttgggctcgccgtgtggtaggagcagtctgcatagtgcagtgcagcggctattcttatttgcaatggctgtaactcgtgaggatgatttttaactttgttaagttattgtatggcagtggctgtaacttgtaagggtgtttttaacttgttaggcatgcagttgtgctgccccttagggggctaagactgcttatccattgtactcctaatctaatcttaatttggtttttttttaattaagtagatggctgtatttagctggtctaccagcttactactgcgtcctgtgttaagagtttgctttcttgctc

SEQ ID NO: 91318 - DNA, 2016 bp, Oryza sativa
  Clone ID: PAT_MRT4530_89905C.1
aattgcaaaggctcacattcatatttgaatccatctttacattggatattgaaaatgaaacgacacatggtaccaatcactcatctgcaacgacagaactaaaaattggtgccgctgcaggctgctctcttttaaaccccctccccctccaaaagataccaaaaaaaaaacaaataatgtcagaataaaacgcggcgcagcacacaccccagctcctcctccggcgacgagaaaaaaaaatggacgcgcagtacaacccgcgaacggtggaggaggtcttccgcgacttcaagggccgccgcgccggcctcgtccgcgcgctcaccgcagatgtggaggatttcttccggcaatgcgacccggaaaaggaaaacttgtgcctttatgggtttcccaatgagcattgggaagtaaatttgcccgcagaagaggtgccacctgagctcccagagccagcattgggcattaactttgcacgagatgggatgcaggaaaaagattggctgtccatggttgcagtgcacagtgatgcatggttactttctgttgcattttactttggtgctcggttcggatttgataaaaatgacaggaagcgcctgtttggtatgattaatgatcttcccacgatttttgaagttgttagtgggaagagtaaagccaagccaccgagtgctaataaccacagcaatagtaaatcaaaatccagcaataaaacgaagtcttctgagcctcgggcgaagcagccaaagccgcagccccagcccccagtgaagaacgaaggccgcgaggaggaaggcggcccggacgacgaggaaggcggcggtggcggcggaggaggcggtagggaggaggagcacggggagacgctgtgcggcgcgtgcggggagagctacggcgccgacgagttctggatctgctgcgacatctgcgagaagtggttccacggcaagtgcgtcaagatcaccccggccaaggcggagcacatcaagcagtacaagtgcccctcctgcagcggcggcaacggcggtggcggcggcgtcagcggcaacggcaagcgtgcgcgcccgtcctaaggtgtggcacggcgagcccacccagagttaggatttgggctcgccgtctggtaggagcagtctgcatagtgcggtccagcggctattcttatttgcaatggctgtaactcgtgaggatgatttttaactttgttaagttattgtatggcagtggctgtaacttgtaagggtgtttttaacttgttaggcatgcagttgggcggccccttagggggctaagactgcttatccattgtactcctaatctaaccttaatttggtttttttttaattaataagaagatgaaagtaatcggctaatccacctaaagtactaaacgagaagccattataagccagtacctcgtgagagatgagagaagcaaaaacacaagcacgcatgcccggagtccactgataagtgacaacccctatgaagtgattagtgatattcgcatcatgttagctgaacagtacactactaatgcacgggaagacgactttgatgcaaaacctaatgacaaggacaaccagggcgaaggaaacgtggcctggggtggtataaacaaagaattgtacagcttacaagttacaatccagaattaacagctagcaaagcacatattgaatcatgctgatattgggatgaggtgtagcaaagcgagcccatcaacagttaagatttgggctcgccgtgtggtaggagcagtctgcatagtgcagtgcagcggctattcttatttgcaatggctgtaactcgtgaggatgatttttaactttgttaagttattgtatggcagtggctgtaacttgtaagggtgtttttaacttgttaggcatgcagttgtgctgccccttagggggctaagactgcttatccattgtactcctaatctaatcttaatttggtttttttttcactacagtagatggctgtatttagctggtctaccagcttact

SEQ ID NO: 91319 - DNA, 251 bp, Oryza sativa
  Clone ID: PAT_MRT4530_89906C.1
catattcttaacagtgaacttcttgggtttatttttaggcccaaaaacacgctacacccggtaaacatggggcgggagatttacttttctctttaacactattctaacacaaaaacgagtacaacacttaaacaagagaaaatcggaatgtactaacaatacaggggggaatactctcaagttgatctactatctaaatggaacaactatacaccacgaactaacaactgttacaccgcgctatgtcatat

SEQ ID NO: 91320 - DNA, 487 bp, Oryza sativa
  Clone ID: PAT_MRT4530_89907C.1
gcaaatgttgggaaatctgcatttataagtgctatgctaagtatgttcttaccattcttgactactattgctgtctccctttttcaacctattacttgttttgttcgctcattctgttctttgttacactaatagttagagaccataatttgtagggacgatggcatataaggatccagtggcagctgcagctcaaaaatacaagccgatacaatctgctgttcctggaacgacccttggtcctattcaaattgaagcatttttaggaggcgggaaattatatgatacacctggagtccatcttcaccaccggcaagcagcagttatccatgctgatgatctgccttctcttgcaccacaaagtcgtctaagggcacggtgttttcctgtatgtatttgtattcagtggcacacatgtttctttctcaaaacatgcacactaatcttttcttcagaatataatgttgtgttcaggctaatgatacag

SEQ ID NO: 91321 - DNA, 231 bp, Oryza sativa
  Clone ID: PAT_MRT4530_89908C.1
tccgcacgcgttcgcggactcgtgggcggacacgtgggttgccgctgacaccaaagacgcccccatgttagctgttggggtcaacgtgataagatttcatgtctgacctttacattgtcttcaacgctagttgcacacacctactgactggctcctctcgccaaggtcatcaatgacagatatggcattttttagggtattgacgaccactgtccttgccttctctgcttc

SEQ ID NO: 91322 - DNA, 264 bp, Oryza sativa
  Clone ID: PAT_MRT4530_89909C.1
tcaatgcggcgcggccagatccggggacgacgacgaccctgcgctagtgatggcaacaaccggcgacgaccccgtgatggcgacgggcggagggagagcggtggcggcgcgacacactagatccggccttcgcgcgccgctcgccgtcggccaccccgcgccccgctcggcccagtgcgtgcgtgctacacgctccggagtctgcacccatcttccccacgtgcgcgcccatcgccgggccaccggaaagccaccgccggccat

SEQ ID NO: 91323 - DNA, 882 bp, Oryza sativa
  Clone ID: PAT_MRT4530_8990C.1
atgagcggagcagccaaggaggcacgcggggagctggtcatcgccgtacatgatacggtgaccatcgcggggcacgagcacaagaccatggtagctcttgagaaggggagaatcggcgacgccgctccagtcgaaacggacatgggcgtcgcttctatttacattgagaacgtggagatgatgaaggttgacaaccggatcattgggactaataattttattgagttgaatgaaagaaataggtcccaaggattacaaagtggctattatggcaagacggtgaagggcaagcgatgctcggtcgcgatagaccatgcggcggtgaagggcaagcaagggacttggcgccgaagaaccaaatccagtggtgaaggtcttggcctccaacggctagtttttgaggggctcgggtatataaactcctccacccctcatttgagtggctgctgctcttggggagcgttgccggtgagcacccaaggttgtggtgtgccacggaaagtttgtgaaggcttcgatttcgcctccgcaagggaagaaatcaagagcgacatcaaggtcctttcaaaggggattagggatggcgagcaggatgcgacattaggagggaccaaaacgacggcgacggaaggtcttggagatgcatcgacgcgccgcagcccgattggaacgacggccgactctcggccaccgaatcgccgatcggagaagggagagaaaggggatcagggacggggaggcgacgtggggagaggagcgctcgtcgattccacgacctgaggagaaggagatattgccgtggtggcacgagttattgcatctctctgctcaggcggtgatggacgtttcaacggaaaaaccaggagtcgtttccgcgcgtga

SEQ ID NO: 91324 - DNA, 804 bp, Oryza sativa
  Clone ID: PAT_MRT4530_89910C.1
atgccgtttgccatcgagcaccaagcggcagcagcaccggagctctacgtgcggtacacggcggtggaaggtggatgcgtcggacaggacgcacgacaaaaagatgaagaggcgacggcagctagcgagcgagggcacgcgccggccacctgtggtggcagcggaggtaggagtctgccgaggctgaggtactggtatatcctgtggtgtggaggtgattcctttgtgcgcatgatgtccaaggatactgatgtcgaagtgctaatgccaaatgaagaccttcatacttcaacaaatggtgcaaaaggaagtgccaaaagatcaagcaactatgctcataaggaggacattcaattgtgcatttcatggcagagcattagctcagatcctattattggtaatgagcaactagggaaggcatattggcagaggatcgcagagcactaccatgctaaccgtgattttgagtctgataggaatgcaaactctcttgagcaccgttggggtaacattcagaaggaatttcaaacactagaatcccacaagaggccacggtctaggaagtcttcgaccccaattgacagagctggtgaagaagatgaaggagatgatgctagcaagagtacagctcctgatttatctcagccgagtgctaaaaagagaccaataggtaggaagcaagcaaaggagaagttgaagaacggaggagaagatggaccatacaaagaggcgatgaaagatttgcttgacgctaaagagaaagaagcgaaattgaaagaagagagatggaaggaaacttggtga

SEQ ID NO: 91325 - DNA, 1452 bp, Oryza sativa
  Clone ID: PAT_MRT4530_89911C.1
atggggagatcaaagaaaaagaccttcaattatttgaaggagagggtctggaagaagatacaaggctggaaggagaagttgttgtcgcgtgccgggaaggatattttgatcaaagctgtggcacaagctattccagcttttgcaatgtcatgttttgacctgacaaaaaccctttacgatgaaataagcagtttgatctcccgtttcttttgggcacagcatgatcgggaaaacaaaatgcattggattgcctgggacaaactatgcagtcgaacggaaaaagggggcctgggatacagagacctccaccttttcaatctagcgatgttagcccatcaagcgtggcggctcctttccaatctagactcattgtgcgcaagagtgttaaaggccaaatatttcccagatgggaagcttatggaggttagagaaagtccgggcatctcatattcttggagaagtattgttcggggggtgcaggtgttgaaggttggcctaatctggcgtgttggtgatggtaccgacatagatatgtggaacgacccatggatccccttgggtacaaccaagaggccaattaccccaaggagagggatcgttctgaacaaagttgctgacttaattaatccaattaccggagaatgggatagagagttgatccaggatatattctgggaggaggatgtgaaaaacattctagccatcccagttcataatggctatagcgatgttgcagcatggcattttgacccaaggggcattttttcggtgaagtcggcataccacactctggaatatcagcgtgatcgtcaggcaatacgacaaacaggtgaatcttcatcggggaaaacgagcagtgcagcccttcagtgggagaagctatggagactgaatcaccttcctaaggtgaagcatttcctgtggcgcttagcgcacaacagtttgccactccgtcagaatatcagtaaaagaggtatggagatcgatacaaggtgcccagtctgcctccggttagatgagaatggtggccactgtttcttcaagtgcaaatttgtcaaaccttgttggcgcatgctgaactttgagcacattaggcaggagctttctcttcagacttctacgttggatgtatgtaagcacattctgaatttgagagaagacattatgttaacgactgtcatactgctctggaattggtgggatgcaagaaacaaagtgaatgctggggaggataggagaacgcatgaagaggcggctaatctaagtggtggttggggctttatcctccgggaccatgaggggaatggggtactggctagagcaggacgaatcgaactggtgcatgatgcgcttagcgcggaagccgtcgcttgtctgcatgccttgcgtgctgttctaaatcatggtttttcgtatttctctgttgaaacagatagctccatcctggtatga

SEQ ID NO: 91326 - DNA, 4284 bp, Oryza sativa
  Clone ID: PAT_MRT4530_89912C.1
atgaagaccttcatacttcaacaaatggtgcaaaaaggaagagccaaaagatcaagcaactttaatcgtaaggaggacattcaactgtgcatttcatggcaaagcattagctcggatcctattattggcaatgagcaaccagggaaggcatattggcaaaggattgcagagcactaccatgctaaccgtgattttgagtctgataggaatgcaaactctcttgagcatcattggggtaacattcaaaaggaagtaagcaagtttcagggctgctacgagcaaattgagcgtcgacatccaagtggcataccacatcaagagcttttgaggaattctccaaagtttcaaactctagaatcccacaagaggccaaggtctaggaagtcttcgaccctaattgagagtgctggtgaagaagatgaagaaggagatgatgctaggaagagtacaactcctgatttattacagccaagtgctaaaaaaagaccaatgggtaggaagcaagcaaaggagaagatgaagaatggagaagatggaccatacaaggaggcgatgaaagatttgcttgacgccaaagagaaagaagctaaagtgaaagaagagagatggaaggaaactaaggagattcaagagcgcaagctcttatttgctgagcatgtgagaacatatgtgttggctatgaggacacaaattgcagcttcaaaggtggctgccctcaatggtggatttgatggtagtagtggctttggagctactgcttccccatcatcaagggagcttgcacagcggctcttaaagaagaacgctgaacatgaaagtcgtctgcgaaggtcagcacagtccaaagtgccatcagatcctaacatatggtttcagatgcgtgagaactatgaaaagataatccttgctgatcatgacttctctgaaaaacgtgagatagaatatcttctgtggcagttgcactacaaaagaattgaggaattccgagctcatattgtctctgctgggaagaacaatgccaatcctgatcggatcaagaggatcagatcttctgttagaagtttcctctcagaagcaactggtttctatcatgacttgatgctgaaaattcggtctacttatgggcttccgttgggctacttctctgagggtcctgatagttctgttgttcctgataaagatgggaagaaagtggttggggtgaaaaaaggcttgttgtcatgctatcgctgtttgatatatttaggagatcttacccgatacaaaggtctgtatggggatgtggattatgcaagtcgtgaatatgctgcagcctctatctactacaaggaagcagcttcgctgtgcccttcgaatggcaacccacatcatcagcttgcaatactggcatcatatgctggagatgaggtaacagctatctataggtacttccgtagcttagctgtggataatcctttttctgcagcgagggaaaacttgattctcgcatttgacaagaatcatgatatctatgctcagctatcaggtaatagcaaggttcccaacgctaagagcttgccatccagatcagttggtagggccagaggaaggggtgagacaagatttcagcccaaaggttctagtacagaagaaaattcaaaggagcgagagcacagtattcaagaaatactgaaggctttctatattcgatttgttcgcctcaatggaattcttttcacaaggacaagcttggaaacatttggggagttgtctgctacagttatcagcgatttgcaaattcttctttcatctggtccttacgaggagcttaattttggtgttgaggctgctgaaaacgcgctttctgttgttaagcttattgctatccttatattcacagtgcacaatgcaaacaaagacgcagataatcaatcatatgctgaaattgtgcaacgcagagttcttcttcaaaatgcatttgctgcagcctttgaatttgttggataccttctcaaaagatgcgcagagcttcatgatgttgcatcaagtatctacttgccagctattttggtcttcattgaatggctggcgtgccatccagattttgtggctagttctgagatggatgaaaagcaagccgatgcaagatctttcttctggagtcaatgcgtgccatttatgaataagctcattttgactggtctcgcacatgtcgatggtgataatgatgaaacttgcttttttgacatgggcacatatgaggagggtgaaactgggaacaggcttgcgttgtgggaggatgttgagttaagagggttttcgcctttggtacctgctcaaggtatcttggacttctccaccaagcaaggttttggaagtgatggaggtaccaaggagaaaaaagcacgtgtagaaaggattcttgctgcagggaaggcgctgttaaatttcgttcaaattgatcagctgcgaatatattttgatgcatcctcaaaaaagttccttatggcttcagaacctcctcctcctgcttcttctgttcctcttgttgtatcttccaatgcgcagacaacaaatcacatacaacaggaacctgaagtctccagtaaaattggttctgtcgcagaagatctaggtgtgcttcagtcaaaggcacaactctttcttgatggagatgatgatgaagaaatagttttcaagcctccagtttctgaaaagcttccgagagttacttcagaacagactagtaatgagttattacagccagtggtggtgtctgatgtcaattggtcaaatgatggtgcaccaccaccaatgacatttcagagcaatggaccggttctgactcccaatgtttatgttcaatctctcccaatctcttctcttggttgggcagccaatgctgggcaacatgtgattcttgatgttggtgcaaggtcaacatctgatatttttgagtctctgaaagcacctgatcataactgggtaagcactggtgcaccacttgttggctcactggatacagtccctatggcgagcttttccaatataatttcggatcagcgtacacctccatcgtcactcggttgtttcagtaacccagataatacagccatactccctgggcaagattcattcttattgagtgcattaaacaatgttaacataggtgcaagtggatttctggatcaaagagtgaatggtggactcagtggattacagtctgtgggaaatgtgcctcaggtatctgctcaagctactatgaatagtacaaatccaatgattggtcagtataaacatactgaagttaccatcccttctgccttctattcagttctgccgtcagtagtatcttctgatggtgtatcaaagaaaaatcctgtcagccgtcctggaagacatgttggccctcctccaggatttaacaatgcccctccaaagcgacaggatgattccattttagctggcaatggccagcatgttcagaccaatgacggcatctggttggatggctacaggtcatcactggattatgtcaataatcagcgttttgcacattcaaatgttaccactgccagcagtactttcaccactccctttccttttcctggaaaacaagctttcagcatgcatcctagaggtagcgatgaaaaacagtggcaggatttccacctttttgggcccacaaagcaacttccagaacttaattttcagcaagggaaccagcaaaatggtccactggcggaacaattaccagcacaatctgcatggtctggcaattaccttgatttgctgagaatctgttgggaatgcttgtcttggaagcataacaagtgctacccttggaactgggtatggcaggtcttccaggctatgaaggggattttagatgatcccttccattgtctgatgagaatatgtacggagagttctttaacttctcagacccagggttttgacctaatgagtaatctgcaattctgcatacgggcagttactgagatgcgtcagatgatgggtgtcctacaaatcgacgccggcatgctgccgagctcgcctccatggatgctagcctcctgtgctcctggcgacgacgcttggtcccggagagccaccgtcatcgtgcctgtccctgcctcctgtcgctccagctcctgccgaaccctatcccctgttgcttttgctgtattgttgacggtgacgcaaggatcgtcgacggctcctacatggcgagacacggccccgccgccagcggcatcccccgcgtcaagctcggcggcacgtggtggagaaagccgccgctga

SEQ ID NO: 91327 - DNA, 441 bp, Oryza sativa
  Clone ID: PAT_MRT4530_89913C.1
atgaagaccttcatacttcaacaaatggtgcaaaaggaagagccaaaagatcaagcaactttaatcaaggaagtaagcaagtttcagggctgctacgagcaaattgagcgtcgacatccaagtggcataccacatcaagagcttgttcttgaagctgaggcattgtactcatccaatgcatcgaagaatagggcatttcagtttaatcattgttggctcaagttgaggaattctccaaagtttcaaactctagaatcccacaagaggccaaggtctaggaagtcttccaccccaattgagagtgctagtgaagaagatgaagaaggagatgatgctaggaagagtacaactcctgatttattacagccaagtgctaaaaaaagaccaatgggtaggaagcaagcaaaggagaagatgaagaatggagaagatggaccataa

SEQ ID NO: 91328 - DNA, 738 bp, Oryza sativa
  Clone ID: PAT_MRT4530_89914C.1
atggccgaaggcggcggtagaggattgggaggagaacttcagggtgtgacatcacaacctcccgctagagaggatcactcctcgacagagtctgataggaatgcaaactctcttgagcaccgttggggtaacattcagaaggaagttcttgaagctgaggcattgtactctttcaatgcaccaaagaacagggcatttcaatttaatcattgttggttcaagttgaggaattctccaaagtttcaaacactagaatcccacaagaagccaaggtctaggaagtcttcgacaccaattgagagagttgatgaagaaaatgaagaaggagatgatgctagcaagagtacaaatcttgatttatcacaggcgagtgctaaaaagagaccaatatgtaggaagcaagcaaaggagaagttgaagaatggaggagaagatggaccatacagggaggcaatgaaagatttgcttgacgccaaagagaaagaagcaaaattgaaagaagagagatggaagaaaactaaggagattcaagagcgcaagctcctatttgctgaacgtaagttagtgtgggatcaacaacataagatcatgttttttgatgtttccaccttggctatgagggcacatattgtagcttcaaatgtggctgccctcaatgatggatttgatgggagtagtggctttggaggtgagtttggtggcggtaatggagagagtttgagcacttcgatggaataa

SEQ ID NO: 91329 - DNA, 488 bp, Oryza sativa
  Clone ID: PAT_MRT4530_89915C.1
cacttaaatcccatgacaaatatgatggcgctattttcacattataagtactctttacctctttgacaccaatctgatgacaggatctaaatttaattacatacttacaatcagataattttgactgacactttccagaaggacatgtatttcttaacggatgggattgtaggaacatggattttgcatgatcattcttgcacctttgagctcatgtcctagaacaattcacaactgaagacaataaattcatcatttgcattatttactagttagcatcctttcccatgtatagtgatgacttgaaatattttgtaccttttgccacagaagccagctgaatgccacaagtgatcaggaatacaagatagcacactccgtgtgcagtctgcacaacgtggctgctaattcaaatgagaggctgagaagggtagccaacggccccagtgaccacttcttcttgccaagttcaaaggaccataatgaat

SEQ ID NO: 91330 - DNA, 2603 bp, Oryza sativa
  Clone ID: PAT_MRT4530_89916C.1
tactcgggtcgtcgtctcctccaccaccaccatctcctcccaccaccaccatctcctggcgcgcgcggccgccgagccggcgagcggcgtcgcggcggcgaacggcgtcgcgccggtcaacttcccgactccccgccccttccctactccccgcccccgtcaggactcctcgcgctcgcgcgcgcgcggccggcgaggggcgacgcagccggggcctccgtcctctcggcagcacgaattgaattggaggcacatttgtaaaaatgggagtttaccttagtacccccaaaaccgagaagctatctgaagatggcgaaaatgataagcttaaatttggactctcatctatgcaaggatggcgtgcaactatggaggatgctcattcagctttgctagatatcgataatgacacatcattctttggtgttttcgatggacatggaggaagagtggttgctaaattctgtgcaaaatatctgcacagagaagttctcagaagtgaggcctattcagcaggtgacctgggcaatgcagcccataaagctttctttagaatggatgagatgatgcgaggtcaaagaggctggcgagaactacaagcacttggagataagataaaccagattagtggcatgatagaaggcttgatctggtctccaagaggcagtgattcaaatgatcaacacgatgattgggcttttgaagaggggccacactctgactttgctgggccaacctgtgggagcacagcttgtgttgcaatagtaagaaatagccaacttgttgtcgcaaatgctggtgattcccgctgtgttatctcaaggaatggtcaggcatacaatttatcaagagaccacaaaccagagcttgaagcagagagagaaagaatactaaaagcaggagggtacatacagatgggacgagtaaatggaactataaacttgtcaagggcaattggtgacattgaatttaaacagaacaagttcttgtctcctgataagcaaatgttaactgcaaaccctgacatcaacacagtggagctttgtgatgatgatgactttcttgttttagcatgtgatggcatctgcgcggccgaggagaaagccaccgaacagtgctgcgcagtgcggcgcagcgccgccgcggcgagggccatggagttccggttccgcgccggcgatcgcaggcatcgacctccctccgccgcgtccgggcccttctccgacacccgccgcggctacttcgtcggggcggcgcaagccatgcgaggcgcagtggggcacttccgcggcgggctccggccgccgccgccgccgccgacgccgttcgggtgggaggaggccgcgcggctggagcggatcatcagcgaggaggtggggcggcggctcatcgagaaggaggtggagcggcggctcatcgaggaggacgtgcgccgcgaggtcgccttcgcccacggcctccacgtgctcccgcacgatcccttcccgcgaccgccgccgccgccgccggagatgccggtgggcatgcacccgcacccgcacgagccgccgccacgcttccaggagttgggggcatgggagggatttcgacctcgccggcagcacgccggagtcgctgctccgcttaggttcgggcagaggatgctccttggtggcgcggagaggaggtggtcgccgccgccgccgccgcggccgaagccgaagcacaagctcgtgctgcgggagatcgaacctggggaaagctccgaggttccttcagaaacaaaacattcagaagcaaaacctttggaaacaaaacctttacaaacaaaggtttcaggagtgaagaggaaagtagatgcaattcctgcaaccactcgaccagggaaattacagaaaccagcccaggactggagctgtgcactatgtcaagtgagtgcaactagtgagggagctctaaatgaacatcttgaagggaaaaggcataaggcaaagctggctcattgtggagccagcaatgcgattaaggatggcaaaagcagcctgaaagaaaaaactgcaaataaggatgatgcaggccctagtgatgcacctaagaaaatatgcatccaggtagatggagcaatgcatgaagttgttcaaaaaagcaattacctgtggtgcgatcgctgcaaagtcaggtgtgacaacaacgtgaccatggctgaccatctgcggggcaagaagcacagtggtttaaacaaggtttggacatcaataaatgctgtcagaatgaacaagaaaaaggaacagtcggctgctacatgggaagaaacggtgaatgaaaatgaacgtactgaaataccagtggaagctaaggatgacagcgcaggcttgtccaccgaagaagacgaaacatgccattatgaaattccagtgaaaaatagtaagaatgaaggcacatacttggccactgaagtagatcaaagtgactctgaaattgaaactccggtagaaattatgagagaaggcttgaacatggccaccgatgccaccgatgaaaatgtccgtatggaagatccactggaaatcaagaaggaaaaccccgatgagacaaatcttgcgccaaaggaggagcaacactaa

SEQ ID NO: 91331 - DNA, 1221 bp, Oryza sativa
  Clone ID: PAT_MRT4530_89917C.1
atgcaccaagcccagctggagaagatccaggcgcgcgaggagacgcttgattcggtcatgcgtaagacggaggagaagcgccaggcggcgctcatcacatcaagcgctttagcggaggtgctgggcaacatccgcctgcagtatgaggcttacgccaaggtcaacgcctcgctgcgggcccggtcggtggcgcttgaggccgagcgcaaggccttggacgagcgcacccgcttcgcgcaggagttcgaggccacgattcgccggcggatcgaggtcctcgatcgcaaccaacgcgaacagaaggggtgcggtcgggcacaggcgcagcgggcccaggagctgaaggagcgggccctagcgcttgaggagcgggcgcgcgcgttggaccagcacgagactaccttggccgtccacgaggcgacagcggccgaggcggaatcctcccttcgcctccgcgaggaggccgcgaccgagcgcaaccagaccaccattgccactgaggctttagtggcccgtcgcacagaggagctgtggctccgagaggaggcgtggcgggaacgagatgccgcgctcgccgagcgtgaggccgaggtgaaccgccgcgaggtggcggcgcgccggctaggcgagcagctcaccaaatgtgaggaggccgttgctgggcatgagacccgccatgtggaaagcgcccgtgttgagcgcacggcgatggtggcgagggcgcttgagctggaggccagggagaaggaactggcagcgcgcgggcagcccggcgacgccgagttggtcagccagctcaccgcggcccaagatactctcgccaacctggggtgtctggtacagaaccaggctggggagatcgcggccctccacctcaccaacgacatcgggcctggccaactctacgatgccatcgaacggctggagtgcgtgggacgccgggtgggcatctccgtgcgccgggacaagaagctcctgcccacaagaccggcgctcgcgcttcggctggacgagatggcggcggatctcgagaggctgaaggaggaggtcggcgaagccgtgaagtcgtcatcggcttccttggcacgggctgcggtggagcttgtcctcgcgagtcatcaagctcgcgaccccaacatccttccgtggcacgtgctcgaggatttcccccagggattgagacgagggctcaggagcaagttcgggacgcggccgacgtga

SEQ ID NO: 91332 - DNA, 993 bp, Oryza sativa
  Clone ID: PAT_MRT4530_89918C.1
atgacaagtggaggtgattcctttgtgcgcatgatgtccgaggacactgatgtcgaagtgctaatgccaaatgaagaccttcgtacttcaacaaatggtgcaaaaggaagtgccaaaagatcaagcaactatactcgtaaggaggacattcaattgtgcatttcatggcagagcattagctcagatcctattattggcaatgagcaaccagggaaggcatattggcagaggatcgcagagcactaccatgctaaccatgattttaagtctgataggaatgcaaactctcttgagcatcgttggggtaacattcagaaggaagtaagcaagtttcagggttgctacaatcaaactgagcgtcgacatccaagtggcataccacatcaagagcttgttcttgaagctgaggcattatactcgtccactgcaccaaagaatagggcatttcagtttaatcattgttggctcaagttgaggaattctcctaagtttcaaacactagaatcccacaagaggccacggtctaggaagtcttcgaccccaattgagagagctggtgaagaagatgaaggagatgatgctagcaagagtacagctcctgatttatctcagccgagtgctaaaaagagaccaatagataggaagcaagcaaaggagaagttgaagaatggaggagaagatggaccatacaaagaggcgatgaaagatttgcttgacgctaaagagaaagaagcaaaattgaaagaagagagatggaagggaactaaggagattcaagagcgcaagctcttatttgctgagcgtaagttagtgtgggatcaagaacagaagattatgttttgtgatgtttccaccttggaaccggatgtgagaacgtatgtgttggctatgagagcacagattgcagcttcaaaggtggctgccctcaatggtggatttgatggtagtagtggctttggaggtgagtttggtggcggtaatggagaagtttga

SEQ ID NO: 91333 - DNA, 417 bp, Oryza sativa
  Clone ID: PAT_MRT4530_89919C.1
ccagataacagatgctgtcgctgtcaaccaaatatggaaagccacacttggtgcccctgactctgaccaccactgattgtggatggattattgccacttctctgacacttctgacgcggactggctcatatgttacctatcaaaggatgtaactattggcaaaagaatccgttatgaggcgatgataataatggataaacttctatggaccatgcatccgcctaggaaattcatacctgatttttacatctattaatgcttgactatccttatacgaacgcttaccaggctaacaaagatggcttatcggattacttactagctttgagaaaaagtcctgtacttaccctagcgcatgaatttgcatgcattaagaattacaaatgccatactaactataggcgagaaattggtgct

SEQ ID NO: 91334 - DNA, 657 bp, Oryza sativa
  Clone ID: PAT_MRT4530_8991C.1
atgtctaaaaatccaccaccaccagagcagactggcagacaaagaatacccattgggactggtgggaaccagcctgccgtcagaaaagaccaatgcgtcctggctatagccaggcaaacggttgcaactgccctgtcgcctttccaggacacgcacgggcgtcgcgtagaatatcagggcgtgcagaagctgctggttgctgccgcctactgccagatctccggagtgtgccgggcggcgcgcgagacgcggaggcggagaatggagctaggtggcgagcatgggggtgtggctgggtggcttcagctggcggcgagcggcagcgggagcaacaggacaggtcggaagtggcatggagatggagatggaggtggaaggaaaggggctacctcatcttccctgctgatctccctcccctcccagcccccaatggctgatcctggcaacaccgccgtgcacgccgacctccccttccacctccacctcctccctttttccatccacctccactctgttgatgtgaaaacacgaggcttgggagatctgcttaactccagtgcaggtccaaaattcaccttcgggtatgctagcgtgccagttgatttgatcctgcaatcaacaaaaacaaagacaaaaaaaccgtggttaaatccataa

SEQ ID NO: 91335 - DNA, 2190 bp, Oryza sativa
  Clone ID: PAT_MRT4530_89920C.1
tcacgtcggccgcgtcccgaacttgctcctgagccctcgtctcaatccctgggggaaatcctcgagcacgtgccacggaaggatgttggggtcgcgagcttgatgactcgcgaggacaagctccaccgcagcccgtgccaaggaagccgatgacgacttcacggcctcgccgacctcctcctccagcctctcgagatccgccgccatctcgtccagccgaagcgcgagcgccggtcttgtgggcaggagcttcttgtcccggcgcacggagatgcccacccggcgtcccacgcactccagccgttcgatggcatcgtagagttggccaggcccgatgtcgttggtgaggtggagggccgcgatctccccagcctggttctgtaccagacaccccaggttggcgagagtatcttgggccgcggtgagctggctgaccaactcggcgtcgccgggctgcccgcgcgctgccagttccttctccctggcctccagctcaagcgccctcgccaccatcgccgtgcgctcaacacgggcgctttccacatggcgggtctcatgcccagcaacggcctcctcacatttggtgagctgctcgcctagccggcgcgccgccacctcgcggcggttcacctcggcctcacgctcggcgagcgcggcatctcgttcccgccacgcctcctctcggagccacagctcctctgtgcgacgggccactaaagcctcagtggcaatggtggtctggttgcgctcggtcgcggcctcctcgcggaggcgaagggaggattccgcctcggccgctgtcgcctcgtggacggccaaggtagtctcgtgctggtccaacgcgcgcgcccgctcctcaagcgctagggcccgctcctccagctcctgggcccgctgcgcctgtgcccgaccgcacccctcctgttcgcgttggttgcgatcgaggacctcgatccgccggcgaatcgtggcctcgaactcctgcgcgaagcgggtgcgctcgtccaaggccttgcgctcggcctcaagcgccaccgaccgggcccgcagcgaggcgtcgaccttcgatgcccgccgcacttgggccgcggccgcgtcgaggaccccgcgggcgtcctcaaccctcttcgccaggacctcggcgtaggcctcatactgcaggcggatgttgcccagcacctcgtctaaggcgcttgaggtgatgagcgccgcctgccgctcctcctccgtctcacgcatgaccgagtccagcgtctcctcgcgcgcctggatctcctccagctgggcttggtgcattttgcgccccgtctccccgcggggccccgtgggatgtaaattaaaccttaaaatgtagtccatggaagacccaaaagagcccaatccaacaatagtcctcacaccacacaggcggcggctacgtcgaccgccaggcatgggcggtggcgacggccagggcgcgggcggcgacgtcgatggcctggcgcaggcggcggcggtgaccagggcgtggccggcggcgtcgacggccaggcgcaggcggcggcggctcgcctcatcgtcttccaactcgctgtcctcgtcgccattgtctatcttgccgtccaccggcccagccgggtagtgcggggcccttatctcttcaccccatctcttcctcttcttcctcctctcctcattctcttcctcccttttctcaggtagcgacgggcagcggcggccgggcggaggcggaggcagcctcacgccgcggcggccgggtggcaacggatccgggaggggaggcggccggcgaggaggccggtgcggcggcaggcggtggaggccggcgctttgccttagcccgccgtcgcgtctagcgccgcctccgcgcagccctagccgtcgccgtcgttgccgtcggttcagccgcgccgcgtcgccgttgcagccgccgtcgtcggtcgtcgtcgccaccatcgggatcgtgaggtcgtcgtcgtccccgtccaccgcttcgccgccgccgaagaccgccggagcaccgccatcaccgtcgacccgaagaccgtcgccgcttcttcctcgtcgccggcgccgtccgttggtgtcctccgtttgcgtcgtcgcgccgtcgttcgccggtgagcatgcgccgcccgagccgtcgccggtgatgacgtcatcgctgacgtcatcgttgccgttcgccat

SEQ ID NO: 91336 - DNA, 912 bp, Oryza sativa
  Clone ID: PAT_MRT4530_89921C.1
atggcaaatgaatgtgattcctttatgtgcatgatgtccgaagagacccatgttgaggcatattccttgccaatgcaaaatgaagaccttcatacttcaacaaatggtgcaaaaggaagagccaaaagatcaagcaactttaatcgtaaggaggacattcaactgtgcatttcatggcaaagcattagctcggatcctattattggcaatgagcaaccagggaaggcatattggcaaaggattgcagagcactaccatgctaactgtgattttgagtctgataggaatgcaaactctcttgagcactttggggttcttgaagctgaggcattgtactcatccaatgcatcgaagaatagggcatttaagtttaatcattgttggctcaagttgaggaattctccaaagtttcaaactctagaatcccacaagaggccaaggtctaggaagtcttccaccccaattaagagtgctggtgaagaagatgaagaaggagatgatgctaggaagagtacaactcctgatttattacagccaagtgctaaaaaaagaccaatgggtaggaagcaagcaaaggagaagatgaagaatggagaagatggaccatacaaggaggcgatgaaagatttgcttgacgccaaagagaaagaagctaaagtgaaagaagagagatggaaggaaactaaggagattcaagagcacaagctcttatttgctgagcgtaagttagtgtgggatcaagaacagaagatcatgttttgtgatgtttccacattggaaccagatgtgagaacatatgtgttggctatgaggacacaaattgcagcttcaaaggtggctgcccttaatgttggatttgatggtagtagtggctttggaggtgagtttggtgacggtaatggagaagtttga

SEQ ID NO: 91337 - DNA, 613 bp, Oryza sativa
  Clone ID: PAT_MRT4530_89922C.1
atggcggacggcaacgatgacgtcagcgatgacgtcatcaccggcgacggctcgagcggcgcatgctcgccggcgaacgacggcgcgacgacgcaaacggaggacaccaacggtgctccggcggtcttcggcggcggcgaagcggtggacggggacggcgacgacctcgcgatcccgatggtggcgacggcgaccgacgacggcggctgcaacggcggcccggcgcggctgaaccgacggcaacgacggcgacggctagggctacgcggaggcagcgctagacgcgacggcgggctaaggcaaaggtggcggcggatagaggagagctcgggggtgcttttaaaggggctagcgagtggcgacggaggcccacggcgaccggcggcgagatggaaagctagggttggagggagaaaagtcgatccgaatcgagctcaaatccgtcgatttccaaacgaaattgaccgaagtttctataagagaaaaggaagaggagatcgaggagattatttcccctcaaacgatttcaccgaaaacggaaaggatcgaccggattggaaagcggcggcggctagggtttcggccggcagcggcgcgaggaggaagacgggcc

SEQ ID NO: 91338 - DNA, 2221 bp, Oryza sativa
  Clone ID: PAT_MRT4530_89923C.1
gtatattcctttttctgcagcgagggaaaactggattctcgcatttgacaagtttcatatgcagaatcatgatatctatgctcagctatcaggtaatagcaaggttcccaacgctaagagcttgccatccagatcagttggtagggccagaggaaggggtgagacaagatttcagcccaaaggttctagtacagaagaaaattcaaaggagcgagagcacagtattcaagaaatactgaaggctttctatattcgatttgttcgcctcaatggaattcttttcacaaggacaagcttggaaacatttggggagttgtctgctacagttatcagcgatttgcaaattcttctttcatctggtccttacgaggagcttaattttggtgttgaggctgctgaaaacgcgctttctgttgttaagcttattgctatccttatattcacagtgcacaatgcaaacaaagacgcagataatcaatcatatgctgaaattgtgcaacgcagagttgttcttcaaaatgcatttgctgcagcctttgaatttgttggataccttctcaaaagatgcgcagagcttcatgatgttgcatcaagtatctacttgccagctattttggtcttcattgaatggctggcgtgccatccagattttgtggctagttctgagatggatgaaaagcaagccgatgcaagatctttcttctggagtcaatgcgtgccatttatgaataagctcattttgactggtctcgcacatgtcgatggtgataatgatgaaacttgcttttttgacatgggcacatatgaggagggtgaaactgggaacaggcttgcgttgtgggaggatgttgagttaagagggttttcgcctttggtacctgctcaaggtatcttggacttctccaccaagcaaggttttggaagtgatggaggtaccaaggagaaaaaagcacgtgtagaaaggattcttgctgcagggaaggcgctgttaaatttcgttcaaattgatcagctgcgaatatattttgatgcatcctcaaaaaagttccttatggcttcagaacctcctcctcctgcttcttctgttcctcttgttgtatcttccaatgcgcagacaacaaatcacatacaacaggaacctgaagtctccagtaaaattggttctgtcgcagaagatctaggtgtgcttcagtcaaaggcacaactctttcttgatggagatgatgatgaagaaatagttttcaagcctccagtttctgaaaagcttccgagagttacttcagaacagactagtaatgagttattacagccagtggtggtgtctgatgtcaattggtcaaatgatggtgcaccaccaccaatgacatttcagagcaatggaccggttctgactcccaatgtttatgttcaatctctcccaatctcttctcttggttgggcagccaatgctgggcaacatgtgattcttgatgttggtgcaaggtcaacatctgatatttttgagtctctgaaagcacctgatcataactgggtaagcactggtgcaccacttgttggctcactggatacagtccctatggcgagcttttccaatataatttcggatcagcgtacacctccatcgtcacttcggttgtttcagtaacccagataatacagccatactccctgggcaagattcattcttattgagtgcattaaacaatgttaacataggtgcaagtggatttctggatcaaagagtgaatggtggactcagtggattacagtctgtgggaaatgtgcctcaggtatctgctcaagctactatgaatagtacaaatccaatgattggtcagtataaacatactgaagttaccatcccttctgccttctattcagttctgccgtcagtagtatcttctgatggtgtatcaaagaaaaatcctgtcagccgtcctggaagacatgttggccctcctccaggatttaacaatgcccctccaaagcgacaggatgattccattttagctggcaatggccagcatgttcagaccaatgacggcatctggttggatggctacaggtcatcactggattatgtcaataatcagcgtatggcacattcaaatgttaccactgccagcagtactttcaccactccctttccttttcctggaaaacaagctttcagcatgcatcctagaggtagcgatgacaaacagtggcaggatttccacct

SEQ ID NO: 91339 - DNA, 2310 bp, Oryza sativa
  Clone ID: PAT_MRT4530_89924C.1
atggagaaaaaaatcactggatataccaccgttgatatatcccaatggcatcgtaaagaacattttgaggcatttcagtcagttgctcaatgtacctataaccagaccgttcagctggatattacggcctttttaaagaccgtaaagaaaaataagcacaagttttatccggcctttattcacattcttgcccgcctgatgaatgctcatccggaattccgtatggcaatgaaagacggtgagctggtgatatgggatagtgttcacccttgttacaccgttttccatgagcaaactgaaacgttttcatcgctctggagtgaataccacgacgatttccggcagtttctacacatatattcgcaagatgtggcgtgttacggtgaaaacctggcctatttccctaaagggtttattgagaatatgtttttcgtctcagccaatccctgggtgagtttcaccagttttgatttaaacgtggccaatatggacaacttcttcgcccccgttttcaccatgggcaaatattatacgcaaggcgacaaggtgctgatgccgctggcgattcagaaattcgatgataagctgtcaaacatgagaattggtcgacggcccgggcggccgcaaggggttcgcgttggccgattcattaatgcagctggcacgacaggtttcccgactggaaagcgggcaatatgtcaaattctcgggttagctggaattgatttgtttaccccttctgatgtggttgagaaaagaaatgttcggaaagtttgtatgtgcatacgcttgctatctaagaaggctcggacgatgcgcctgactgtgcctgattttgatattgtcactcatacaatagccatgcccaactacattgttggaggcatccggagaagtctggagcaaccacaatgtagttcatctggttcaagtggttacagtccaagtgccaactctaaggcattaaatcagcagagagtttttggtgcagagaatgatcaacaatgtgaaacacattatgattctgatgaagctgaaagtaagctctctgcattagaacctgaggactcagtcagtgaagacaatatttccacacttttgaaatcgggcaacatgcccaaggaagaaaaggaaggctatggagatagtgagcatggtatgcatgaagagaagtcattgtctgaatcagttggatcgattgatttcggcaatatggaatctgattctgttggttcaactcctttatttcacaaaaatgaatcatattgctgtattgaatctccaactgaccagtgttcaagaactagaacaattaggtgttcattaagttcagaagagtcagattccataagcagtcatttggtagttgacagcagcaaggctaaaaggactcatggcgaacatctcgagcctcttaacggaaatgggaaaagatttgctaacgatcccgaaaaagaaagcgatgccctccaaaaggtcacctttgatcaacaatgtgatctgcttgcctgtgatggggagtctgtatgttcaaattgcgacagtacaccatactcgagtttaaccccaatagacagtgcttgtggcaaattgccagcagtttctgaagatgatagtgcatgccgagggctggaactcgaattccgttgtgggaatgaaacggacgtttcccaaaaagaagataaacaggtggaatcagaatataaagctgaaaatgacagctctgctcaaatgaatgagaatgatgttcccaaatcagggaaagggatgctaaagtctgttgctggaggaattacacttgtcggcgcagtgttcttcatagctcatctcagaaggagcaaggacagaagcttcgcaggtgttatagctccattctctgaaaaatcagttcagggcgactcaagggcaaagaaagtagagaaaacaaaggcgggtgccgtgtatcccggggaatggctaaaagtttaatcaagaagaacggacatgccacggtgccacctaagcgcaatttggaagtttattttgcaatatgcatacatcttgtaaaagtaaaatccatatgctaaagaacacttttttttaatcagctactccagtttgcacgagtagagggctttaagaagcgactccactagtatagcaagtgttaatatttattttcttatagcagtccaaagcttacaataatctgtaatctggataaacaagatgcctcaagttctctccatgtacagaatgatccatgaagttgattaatttattataagcagcagccattattcagagtaaaaaaaaaaacccacgcgtccg

SEQ ID NO: 91340 - DNA, 996 bp, Oryza sativa
  Clone ID: PAT_MRT4530_89925C.1
atggcaagtgaaagtgattcctttgtgcgcatgatgtctgaagagacccatgttgaagcatattccttgccaatgcaaaatgaagaccttcatacttcaacaaatggtgcaaaaggaagagccaaaagatcaagcaactttaatcgtaaggaggacattcaactatgcatttcatggcaaagcattagctcggatcctattattggcaatgagcaaccagggaaggcatattggcaaaggattgcagagcactaccatgctaaccgtgattttgagtctgataggaatacattctctcttgagcaccgttggggtaacattcagaaggaagtaagcaagtttcagggctgctacgaacaaattgagcgtcgacatccaagtggcataccacatcaagagcttgttcttgaagccgaggcattgtactcatccaatgcaccaaagaatagggcatttcagtttaatcattgttggctcaagttgaggaattctccaaagtttcaaactctaaaatcccacaagaggccaaggtctaggaagtcttcgaccccaattgagagtgctggtgaagaagatgaagaaggtgatgatgctaggaagagtacaactcctgatttatcacagccaagtgctaaaaagagaccaatgggtaggaaggaagcaaaggagaagttgaagaatggaggagaagatggaccatacaaggaggcgatgaaagatttgcttgacgccaaagagaaagaagctaaagtgaaagaagagagatggaaggaaactaaggagattcaagagcacaagctcttatttgctgagcgtaagttagtgtgggatcaagaacagaagatcatgttttgtgatgtttccaccttggaaccagatgtgagaacatatgtgttggctatgagggcacaaattgcagcttcaaaggtggctgccctcaatggtggatttgatggtagtagtggctttggaggtgagtttggtggtggtaattga

SEQ ID NO: 91341 - DNA, 2552 bp, Oryza sativa
  Clone ID: PAT_MRT4530_89926C.1
cttcgatcgatcggctcgtctctccccttccccacctccatgccaccgacacgcgcctcaagctagaaccctagccccgatccccgatggccgcgccgcccgtctcgggggatggggcggcggcggcggcccccgtggtggccctgggcgccgcgggggcggtgggggggccgaggccgtacgaggtggccgtcgcggcggcggagctccggcccgtggactgcaacctcgcggcgctgtgcgaccacgtgcaggcggaggggttcgggtccggggcgttctccgacgtcgtcgtcgaggccatgggcgccacctaccgcctccatcgcctcatcatctcccgcagcgcctacttcaggaatatgctacatggtccttggagggaggctggagctcccacagtggtgttgcatatagatgatccaaacattgactcagaagcaattgcaatcgcgttagcatatctttacgggcaacccccaaagcttaatgataacaatgcgttccgagtacttgcagctgcatcatttttggatcttcaggatttatgtacaatatgtaccgactttattatttctgagctttggacatcaaactttttgcaatatcagctgtttgcggagagtcaagactatggtagtcatggggaacgtgtcagaaatgcctgctggggttatctttgccaaagtgccacattggaactacgagaggtgctcccaaaactttcttcacaaactttgcatgcgctccttacatctgacgaattatgggtacctaatgaggagaaacggtttgaactagcattatatgcgttgcttgcaaaggtcactctgtctgatgtagaagttagtggaaatgaaaatttgaaccttacgtcaagctctgcgaattctgatcattccatgaggaagggaaagagtccaatgaatgaagctggtgaggagcagcttatggggtctgaattgcagaacttaaaattacatgacaacacagagactataagtgcccataacactagtgatattccagatatggtaatcccgcaggatagcacagcatactccattgagcaaaatgctgaggcttccaggaggaagatgcttctgtgtcacagagtacaagcaatagttgctgatacttgcacaaattgttgccttactggtaattcatgtgcttgtaaacaagcacatgtgagttcacatcatcactacaggcaagagcatgatcggagcagtgcttccggtactgtaggtaatatctacctcacagatgcccatggtgaaggaaatgctgtttttgggcctgtccgtgtcaatgtcagaggagcagttgatggacttgctggtattgggagaggaaattctaatgttcctggtgcagcttgggctcccacacgttacgtcttctctcgtgttccttatggacttggttcaagaaatggtcaacaaccattcgcaaatgatgaatcagaacctagagtcgactacaatggtgatatttcaggagatggtctgactgcattggttaatcttagccaagaaagcagtgcttctcatcatcagacagaaagtatatttgagacaggcattcaagttagatattctggtgctgcttctgtttcaaccccaggtggttccccacgcgtccggcaagagtcaaaagagcatgaacttggatccaacttggaaactacagagaacacaactatctcgttggacatgaaaacaccacttagtcacttcccacctttccgctttggagttgagtttgaagatgtgcacaggctcgcagatagtcaggtgaagcattcgactgaagtattttatgcaggctctctttggaaggtaagtgtccaggcattcaacgacgaggatcctcatggacgtcgcacccttggactctttctgcaccgacgcaaggctgagcctttagacccattgaggaaggccaacatgtatgtagaccaccgggaaaaggtcactgctcggtatcagcttatctgtccatcgaagagagaggtcatgattttcggaagcctaaagcaggctggcacactcctacccaaagctccaaaagggtggggttggcgcactgccatattgttcgacgaacttggcgatcttctccagggtggatccctgagaattgctgcagtagtccagcttgtctaagccaaattgcccttgtatatctagaaacaatagtagtgttagcttattgcaaatggaaaaaagaaggcactaaatggcacttgcaaagtatggtaatgtcactgtaatgcaatggttctattgtatttattcccaaacgtgacgccgtcatgcttgtgtgtgtaataggaactaatatatagccaagtcatgcattcgatatcataggaccctagatgggttcttgtggttagtttttttttttaattatttttttacgctcccgctacattatatgtgttgtagcaacgcatacatgttgaaaacaaatatattgctggtaatttgcattataaatagacataaatgcagagttactttcaaaaaaaaaaaaaaaaaaaa

SEQ ID NO: 91342 - DNA, 597 bp, Oryza sativa
  Clone ID: PAT_MRT4530_89927C.1
gactttggctataacagaatgcacctgtgggaaatgatgcttcttcttctaaagagcgcgcggggtctgtctggaatcggttgggactatctactggatctttatggaggtccgcttactcaagtatcctcagatgttatgtctattgacacttctgaaccacttttatcccttgccactgatgttatctctcgttcatcctgtacaacctttgtcttctatataagtcttcctctctactcttcatatccatcgtttttactcttttccctactcttatctaatgtctttgaatctctagtctgttcttaaatgttctgtaggctcttcttccgttctttgacgttaggctttatccttcttttctactgtttacttcttctgtcttcctctttcatactactcttctcttctcttctttcctttcttttcctcctctttttcccttcttttttccttcttttctttttttactcccccttcacttcctctttcttcctttcctttcactcttttcttccttcctcttctctttctcttttccttcttttctcttccttcttttcttcactctcttctccctttcttttccttctt

SEQ ID NO: 91343 - DNA, 651 bp, Oryza sativa
  Clone ID: PAT_MRT4530_89928C.1
atggtgaatggctggaaggccggtgccgcagccatctttgcctcttctccggcggcgcgcttcgccggcgacaggcggcggcgcggcgggggtgtggagcgggagccggaggagactgatgcgagcagaaagaatggaaaaaaaaaactcggaaagcgcggaaggaattacgaaaaggggagtgggagggagagtgacgagggtaggcgggggaggtggggcccaaaccgcggcggatttgacggcggggcccgccggggagcgtcgtctagccgtccggtccgcctacgggcgtcgctgctttccatttactccgcctcgggaaccgcgcgtgttccacggtgggagcagcagcagcatcgtgtgctctgcccctggctggcgtggtggcgggtgggccggggaagaggggagggaagcgtcacgtctgtcacggcccgagtccaagcaacgcatgtctctttccggtctcgacttctggaccaggcgaccagcaatgacagaggagagaacgatgcccaaagttttctggctggctggtctcaactctcacctgccccggctgttggatggagtaattatttcagctgctgccaacatgtgacaaaatggagttcgaattttgagctcgtcccaaccatggcaaaatag

SEQ ID NO: 91344 - DNA, 915 bp, Oryza sativa
  Clone ID: PAT_MRT4530_89929C.1
taaaagtataatccttgtgcatatatactccgtacaaaccacacattatattacaatagtatattacgtatacttatcacaccgacacgcatatatatcatcagcatatcagacctttagcccgctggcactgcccggtctactgcaatttaatctcgctcgatatttccaaagggatcgcgtagactggctcagcgtggacgaggtggtacatcggcttctcttgacaaaccggcggctgttcgatcacgttcaccttgccacggcgcaccgctacgctgccgcagcccgacacggacgcggcgcggcatcgatccacgcggacggcgccgcaccgactcacgtccgccgacccgcaccgctcgatgccgatcgcgccgcaccagtcggcgcgcgcggcgcgacaccggcctaccgcgacgtccgcgcacccgcccacgttggcctcgtggcaccgcccgacgtgaagttcccccgcgccgcgcacgcgcgcggcgcccttgcaccggcggatggccaccacgccggcgcgctccacgtccgcggacctgcatcggcgcacggccacctcccgcgccccgtccgcccgcacggcgtcgcaccgatggaacgacgcgaccccgcaggcctccgcggccgcgaagccgcaccgggtgaagctcacgtcaccactgcccccgccgcgcaccaggacgtgctggagacggtcgaccgcgaggacacccgtgctgaccaaagtgaccgtgccgccgttccactggatcacaccctcgtggagggctgtctccacgccgtcgatgaagatggtgaactgctggtcctccttgacggtcgtggcggcggagggaggatttctcaagtctagtgccaccatttttatgcagatatcttctgatgattgctcggacgcgtggg

SEQ ID NO: 91345 - DNA, 291 bp, Oryza sativa
  Clone ID: PAT_MRT4530_8992C.1
atgggcggcggcgggcacggcggcggcacgacgtacaaggggtacaccatcccccacaacaagcgctggcacaccgtcgccggcaagggcctctgcgccgtcatgtgcctactgttaagcttctgcttgaatagcttatcatggcagcatgagtatagaaatctcattgttaacacgcttgcattttgttttaatttacattttaaaaagggcatgcgtcatccttgggatggtcatgatgatcactcacatggtcatgggcatgagcatgaggcacctcttgaccactag

SEQ ID NO: 91346 - DNA, 344 bp, Oryza sativa
  Clone ID: PAT_MRT4530_89930C.1
gtaatatacaatcaacgttgaaagctacaacgaagggacaaacacgaagacggaccgaacaagacagaggccaggcccccagggagcgagcgggggcaacacaacaaaagggggcgtaaagacagcgggggctgcaaggggcccaactgaaacagatgcaaggcacacagcggggacccaagcaggggcccctcgcgaaaaagatggagaaccagaggagcccacagggcaaacacaggcccccaagggaagaggaaggagagcctaggggcaaagccgcggacgacccccaagtgacaggcgcccgggcacctgcccgggagcacagcccgcaccaagaagcc

SEQ ID NO: 91347 - DNA, 114 bp, Oryza sativa
  Clone ID: PAT_MRT4530_89931C.1
gaatcatacgtaagtgcttgctgatacaatatcaacatggaggggacattgccggatccagatgaacaaacatataaacaccgaaacctcattttgccattatgccaatcctag

SEQ ID NO: 91348 - DNA, 833 bp, Oryza sativa
  unsure (1)..(833): unsure at all n locations
  Clone ID: PAT_MRT4530_89932C.1
ggggtngcnnggaatttcccggnnccgaaaggaattccgaacgggggtttccttggaaaacccttgggggaatgccgcncaggggaaaacttggaacgaaaccgggggaaaggccctcccccggggcccgccaaccgcttggggcccgaacccctggattctttcctgtttaaangggtttccnaaatttgggaaccacccccttggttcnngggaaacccccaaaaaagaatnggttnnaaactttttgcccctggaanccggggggccnaaaaaccccanaaaggaaaaacttccttggggtttggaaaggcttcccaaaaacccnaattacttgaaacctttnccaaaaattcntttccnttccttggaacttttgggggtttnttangggggggccnaaaaaaaaacttaaatcccnaaaccccattctttantttanccttgggtttcccctccccnaaaaatttttcccccctcccaagggaattaaccttgggaaacccccattttacccaaaatttccttattccggggttttaaaagccccaattgaatttaaaaaaaggccnttccggggggggccgccaaaccnccccctcccaaaccttatttcctccaaaaactttttaaaaattaaggtttangaaaccgggngcccggctttccttccccggtttnaaacccccccncccccccnggaaattcccggggaacctccccnaantttggggcccntttttttttgggtttaanccnnaaaactttgggcnaaattgcccggggaatttaaaacccnggaaaancccttngnttttncccggtttncccca

SEQ ID NO: 91349 - DNA, 960 bp, Oryza sativa
  Clone ID: PAT_MRT4530_89933C.1
atgcgtcaaacacttgacctgcacttgctcggagcggtggcgtcccaatccaatccattcccaatgcgacttctcaggaggatcccgctgctcttggagaggtttgattgggatttttctttcctgggggtgtgtaggacgagtccgaatgggattaaggccatcggggtgtttcgtctagtgcattggtggctggatgttttgcttgctgaggaagcgaggttgagctgggagggagggctctggtgtggtcttgcatatggttctgctgcgaggtgtggtgatggagtagtcagttcaagcaatgagatgcaggaattgtggccactaggtgaagtagaccaaaagggacccaggtaggcctgttggattgttcggatgggtcgacccgctgcattccggcgcgatggcggttcgagcacaagtgctacaacctcttcacctgcaacagccactccttcgtggcgatgctgcctgaacagcctcgactacggtggctccgtcggctggaacgtcctcaaccctggccgccctcgtgtggctgcgcggccggtggctgggcaagatggccgtcgtgcgaggtcctacgagcactcggaggccgggacggcgatctcgtgggacgacgcgctgcagtccggcgcgaggcggttcgagcacaagtgctacaacctcttcacctgcaacagccactccttcgtggcgagctgcctgaaccgcctcgcctacggcggctccgtcggctggaacgtcctcaacctggccgccctcgtgtggctgcgcggccggtggctgggcaagatggccgtcgtccggtcgctcctccccttcgccgccgtggcctgcgtcggcgtcctcatggccggctggtccttcctcatcagcatggcggcattctcctccctcctcctcggctggttcgtcctcggcgtctactgcttcaagggcttggtctgctga

SEQ ID NO: 91350 - DNA, 808 bp, Oryza sativa
  Clone ID: PAT_MRT4530_89934C.1
gatatgttttccacttaggagatcaagcaagttagtaccaaaactgtacaccacactctctggaattactctgccagtcttaaggtactcaggaggcgtgagcgccaaattggtactatagctcttcccatccctgctgttcttcatcagaccgaagcacgacagtctggggttaccatccacatcaaagagaaccctgtatgcatgcagatcatggtagagagctctccctttgctactgcagtactccaatgcctgagccacatagaatgcagctcgtaccctcattgcccagctcaatggctttgtctcccagtggaagagatgctttgccaaggtctcgtgcggcatgaactccgcgacgagcagccgctcgccattctcgcagcagcagccgatcaggttggccagccggacactccgcagctgcccgacagccctcgcctcctccaagaactggcgggagtcgggccaggcagagcggccgaagcgcttgatggccacggtgcggccggtgctgaagagggtgccgcggtagacgacgttgggcgccttctcgccgtgctccgacacgatgcgctcgggagagaacccgtcggtcgccacccgtagctcgtcgaggctgtactcggcgaacaccggcacgccgctgccgtcgtccgcggcggcgccattctcaagcagcggcgacttgaagtgcggcggccaccagcacacggagagcttggagcagcgagctcccaggacgcctccctcctagatctcgccctcacctcacagcagcagcaacggctctctctccccggcg

SEQ ID NO: 91351 - DNA, 593 bp, Oryza sativa
  Clone ID: PAT_MRT4530_89935C.1
gcacgaggcacctatgtggatagtagttctgaagaaagtgaagatcaacaggtgaaaatatgtgacatatgtggagatgttggtgaggagaagaagcttgctatttgcagtaggtgcaatgatggtgctgaacatatttactgcatgagggtaatgatgccagaggttccagagggtgattggttttgtgaagagtgccgaactgagatgcagattgaaaaagaaaagagcatacttgagaaatctcaagtgaaggttagtacaatttctgtagggagtaaggtgaaggctgcaaatgtgagtagtaaagacctaaatgtgagtaatacatccagtaagagtacaaaagaagatgcagaggaagggattgtccctagtggctgtacttctacaggaaaggaggaagacggtagatcatgcattggtggcagtgaggctgctaataaaaacgaagagcagacatccagtgggagaaatgatgattttaatttgaagatactacatggagagaggcatatgcaaagccacaataatgatgttccatttacatccgtggctcatgacatatctaatatggctgtaaagaataaaag

SEQ ID NO: 91352 - DNA, 1924 bp, Oryza sativa
  Clone ID: PAT_MRT4530_89936C.1
gcagaaagcagggagcggaaagcccaccaccttgctaggatccacaacccaaacaccccgttgtttgctatttgaatgctagttgcccattttttgtacttatgaatatattggaggtgtcataacagccaacctaggagttgtaaaaccactggaaataccaatacaagttagggaagaccaaaaaacagccctattggtggcaaagcactggaggacacccaaaatgcaggcgatctaggtacagaagagaggaggcatcacatcatgtttgagggctatacagttcatctctatctagcattcctttcagcttccaaagcggcgccttgcttgagttcttcatgcccttcaggctccattcccatggcgagatatgccatcccttgaaggtagtgtgcagtaggccactcaggagatatgtctgctgctttctttgcatccgcaaggccttcttgcagcttgccgagcaccatgtatacgaaacttcgtcgtgccagcatagtcggagacaccattacaccagtgtcaatgaaccttgagtagcactcaactgcagtcgcaaaatccttggattgaaaagcactgtctccatgtttcttgacaagaatactatcagatacttgttggccagtccaggaatggaaagatacctcgaatgttgctctttcatcctcacaatatccatcattctccagcatctcatgaacctcatcaaggtctgctctggcataaactttcgctatagcagataacgaaattcgctctgtattttccttatcatgttgtatgcctagtaaagcatgtgaaggagcatggcttggtgggatatgttttccacttaggagatcaagcaagatagtaccaaaactgtacaccacactctctggaattactctgccagtcttaaggtactcaggaggcgtgaaagccaaattggtactatagctcttcccatccctgctgttcttcatcagaccgaagcacgacagtctggggttaccatccacatcaaagagaaccctgtatgcatgcagatcatggtagagagctctccctttgctactgcagtactccaatgcctgagccacatagaatgcagctcgtaccctcattgcccagctcaatggctttgtctccccataacccatactaagaaccttagatgcaattgagttggatatatattcaaatcggaaacaacagcagtactccaatgcctgagccacatagaatgcagctcgtacgaagaaagaaaaggtgagcaccaaacacatacagtggaagagatgctttgccaaggtctcgtgcggcatgaactccgcgacgagcagccgctcgccattctcgcagcagcagccgatcaggttggccagccggacactccgcagctgcccgacagccctcgcctcctccaagaactggcgggagtcgggccaggcagagcggccgaagcgcttgatggccacggtgcggccggtgctgaagagggtgccgcggtagacgacgttgggcgccttctcgccgtgctccgacacgatgcgctcgggagagaacccgtcggtcgccacccggagctcgtcgaggctgtactcggcgaacaccggcacgccgctgccgtcgtccgcggcggcgccattctcaagcagcggcgacttgaagtgcggcggccaccagcacacggagagcttggagcagcgagctcccatgacgcctccctcctagatctcgccctcacctcacagcagcagcaacggctctctctccccggcgtactactactaccaccaccaccacctcctccaccgccaccgtctcggctgcttagctagctactggtaggactcgaatagactaatactactactactactactacgcgaggaggggtgggagagaggaggagggggaggggggtggagtg

SEQ ID NO: 91353 - DNA, 529 bp, Oryza sativa
  unsure (1)..(529): unsure at all n locations
  Clone ID: PAT_MRT4530_89937C.1
gatnncctctagaagcggcncgcnncctttnnttttttttnnttttaatcaannnagcatttnncaaacttnnttctgaatgggaatgtcacctatttgaccacttaaaactgagattcagatatacagattaggtgctacccatgagcacagtcgcagatctctgtttcacatttgctaaacttccaaagttaaacgttgaaactaaaggaattctcaaatcgttgtgtggacctctcgttatgtagtgtacctaagatctacctatacggtcttcctcgttagggccagaagtaccactgctacattgttgatcttgtcttcctggaaacactggaaacaggtttactggcaaagtggccgttggtgttgggtaccttgcctggggccgtgttacatggtcagaaatcccgtgttcttgtgacggttcgctgtcttcgctgctcgcagactcagggaagagctgaagttctcttggcgtggcggcatagtgctgctcgatgataaccggttgctgctgaggaaatgc

SEQ ID NO: 91354 - DNA, 375 bp, Oryza sativa
  Clone ID: PAT_MRT4530_89938C.1
acgataacgacaagatcgtagtcgagttgatccgactagatctcccggcgacttggctccgataagctccggcttcgtaggctgtggtggatatgttggctctgagattcgatgccttatgtcctcccgtgaggtcccttttatatcgcaggtcacctgtctcccagtaggactcggagggaccggaccgaacacgacacaatgacgacccatttctgaccgagtaggactccttccatctgtgaactctgtgataaatttccttaacgtatgccgaaagcgtccgtatacgcgtgaacataccatatcgatatgtgacgtatatcgaaggatagagggtataccttctctttgccggcgtacgttggccctacc

SEQ ID NO: 91355 - DNA, 277 bp, Oryza sativa
  Clone ID: PAT_MRT4530_89939C.1
tctttgcgtcgtactctcctttcgtgtgccatgattttctgctccgagtttgtttgctcttcatcgaaccgtgggctaggagaagtcgcacaccaacacagcgaggattggccacggccaccgccttatgtcaagcacctcgggtcatctgtgctaccagctagggggcgtcgacaggggcgcgaccgagagggacctgaaggcacccattgaaacgaacatgacggccctacagcccgcggaaatgctcgatgagctaagagactatcgtgagaga

SEQ ID NO: 91356 - DNA, 524 bp, Oryza sativa
  Clone ID: PAT_MRT4530_8993C.1
ttccgaccacctctacgggaccggggccggtgggagaagtcggggagtagggcggggacgttctagcccaacccgcccccaacccgccccgttgccaaccctatggcgagcgctgcgcgtgtaaataagggccaaatgggatcgacgcgagtggataaggttggtggagatcgcgctagtggatctgtggaaataggcggccggctcggccggctcggctcgctcgtgtcggttcagtttggtaggcactggttgtttaaagaaccagcacctgtaatatattaataggtgtaagttcttttaaaaaaccagtacatatagtattggtaccggttttaacaaataaaccggcacctttaattattaattattaaaggtgacggttctttatattttcatcatgcgaggtgcaaaatgcctataagtgtcggatttaaatgaaccgacacccataagagcgacccctatgagggttttttagtcagtgtgatccaaacatgatggatgcaataaaacctgtgtgg

SEQ ID NO: 91357 - DNA, 588 bp, Oryza sativa
  Clone ID: PAT_MRT4530_89940C.1
atgtcctcctccacaagggcacctagcaccagggccatcatcgacgaggtcaacaacagcaacagccagcgcagacaccacattcaccagctgcatgctagctactcatttactcattcgccatacccaaacaaagagcatagctctgatccagcattatttatcttgaggtacctataccaccgatctaaatccggccgttcatctatcgggggtgcaagggaaacggaggtgttgaatgctagggatggcggtaaagttgggtgcttgacgaggtggatgtggtggctccggatgagcgtggagatggaggtggcggcgccggcgccggtgcacggcaaggtgaacgcggtggcgcagaaggcatagcgggttgtgtcgtatttgggggatttggagttgatggcgaaccaaacaagagaacatggaaagccgttgccaccgcctattgtgaccacatccccctgcctggacatggcgaagccgtccttcttcgctggatgccagggcgaactggctatggcgaagtcatccttcttcgtcagggggtcaccagaactaaaggagaaggggtcaactgtagaataa

SEQ ID NO: 91358 - DNA, 348 bp, Oryza sativa
  Clone ID: PAT_MRT4530_89941C.1
atggaggccgccgccggcggcccgacgcggggcggcgagatggaggcggcggcgggctggcggcgggctgcgtcgggggcggcggcggccagctgcgccggtcgggaggcggcggccggcgccggcaaacgccacggtccacgctgttggatccagtgggctgttggtgaggcgctcggcgaggtcggggaggagcttgacgagggaaggattgtgatggcctccacctccttcccatacatcggatgccacctcgcccttcgcgctgacttctaccccaccactgccatcatcggacggagaggagggccgagcctccttctccaccatccggtcgttgtcgcttga

SEQ ID NO: 91359 - DNA, 349 bp, Oryza sativa
  unsure (1)..(349): unsure at all n locations
  Clone ID: PAT_MRT4530_89942C.1
ccatcatcgctcggctcccgcgcggcgaccatggcggaccaccacaaagaccaggtggtgtacagcctcggcgagcgttgtcagccaggaatgggctacccgatgttctttctgccacgggggggggcnntnttnaatctccagtgcgtgttccacagcgcacccggcggcgccttggacgagcaactccttcaggactgctgccggcagctcgccgcggtctactacatctggtgcatgtgctcggctctcaaccacanggnnggaggcanctacagggaactcggcgccaccgatgnngggcaccccatgttcgtggtgntccccggcttccttaaatgggacttgt

SEQ ID NO: 91360 - DNA, 240 bp, Oryza sativa
  Clone ID: PAT_MRT4530_89943C.1
gttctacagaccacgccggttattgactatgtgctcacattcacatctactggtacgattactaaccatgtaggggcaatggttaccaccgctgtactcatgataaagaagaccatatgatcgcctgtacactactgtggtgtgacggaaaggattttgtcatgtattagctgctaatatctagaggaacgatgatgaaatggtggacaaattagactctggcgtacgaagtttacataa

SEQ ID NO: 91361 - DNA, 283 bp, Oryza sativa
  Clone ID: PAT_MRT4530_89944C.1
ttgttttggcggcaacagggaactacagcttttctcgagggaaccaaaacaaaattgctgtgcgtcctgtgttccacagcaatcacaagcaactctgaatctctgacgatcatgagatcatttgaacgtggcattaaaatagacctaaaaactacataagaaaaagaaatggaaacaaaacgcatgacacctcaaggatggggggctgccaaacggagggtctgctttttacagtgatggatgtatacacaagccttgctggggtaacgcacaaagacccagc

SEQ ID NO: 91362 - DNA, 801 bp, Oryza sativa
  Clone ID: PAT_MRT4530_89945C.1
ctgtgattccttgcactcgtaggaggaagccaaaagacatttacaccgtcagggacgttgcaagcacgccggacaagctcatgatcaggaaggctgcacgctcggttgttgccattgagaccacctattctggttaaaagatgatctcactactcacaatcctcaactgcaatctatctcctctaattaattaccagcagctagcttgcatatggtttgttttcagatgggaaaatcattgctgtattttctggcatcgttgtcagttggaatgagacaactaggtctgcaacaattgtaacttgttctgaagctgtgtgcgatgatggtgcattgatcgaccccaaacccaaggtgcttgtgcacttgccaaacaataccattctagatggacagttgctgtttttcaatgaccactaccgcattatgttgttggaggtcgtgtcagacactccattgcagcctgccaattttggttctaccccaaaatttggacaagatgtgtttgctttgtcaagggattatgaatcatcaatgcacgctaggcgtggcacagtcttgtggcaggaaccaccaaacgttttggagtacatgtactactgtctgtctctcagttgtcaactagccccgtgtggcagtggaggatcggtgattgaccagcacggtgatgttgttggaatggcaattggtgctcctccgaatcctgatattcttcccatttcaattgtgcaaacatgcattgaaatgtggacaaagttcagtcgtattgctcatccagtgcttaatatggagttaagagct

SEQ ID NO: 91363 - DNA, 156 bp, Oryza sativa
  Clone ID: PAT_MRT4530_89946C.1
gagaccgatgaggcgcaagagaaggctggtggaggcaagcgcggcagcgagggctgtcgtgctctggcagtggcgcacgcgggaatgatggcaccgttgaggcgctaccacatgggagatccgatgacgaatgatggcttcggggcgaggcgatag

SEQ ID NO: 91364 - DNA, 1541 bp, Oryza sativa
  Clone ID: PAT_MRT4530_89947C.1
tttttttttttttttgaagaaaaaagactcagaggtcaatagcaacacacaaacaactgcagaaagttttctgctggcttgtacaaggacggcttaaacatttatcatttgaaaggccaactagtaccaagtttaaacacttaacaactggaatagccattcacttgaccgattgcagttagctaaggtaaaattcaaacaggggcacagatcaatgtatatataagaccctaaatctgcaagctcctgcaaaagacaaaaggatcaccagcaactctaaccatttctagttctatcattccaaggcttcaatcactaaaaatcttctttggtttgatacccatctctatttctttaagcttcagctccaattccaaccgctcattctccagtttcatcttttcattctccagtctcatcttctccaattccctgtccttctccttgctgaacctcagccacttgaaatgcttctgctcaattttcagcatctgagctttgatcttcaggcggcgtttttcaagtcgaatatcacgcataccaggggtagagggactcttttcagcagttggaccaccagatccctcagagagcattttgttcatgtcaataacagcaacttctgacagattagacccaaaatgcgtctcctcctgatcatgcttcagcctcttggcaccatgaattccatggtgatgatcttcagcgctgacctccagatcatcgaattcttcatcttcgtcgtcatcgtcagaaaaatcctcatcatcatacccaaacgggttcttctttgcatgctcctctccactcctaagcgccaaacgcaatgacttctgaagggcgggatcatcaaacagacacattttgttcctgttatggtacgagcacatctcctcatagtgcagatgctttgagttcaggtgcttcctagcctcctctttgagctttcccgagagccgcatcccttcaagaagctcggggtgctcgacgacctggcacgccgttccccggccaaggatctcggtcatcctcttgtacctcttgttgagatcgttgaacttgtcctcgcactgctgcggcgacaccgggaagcccctctcggtcatcgccgcggagacgagcctccacttccccttcctcttcagcatggcgtgcttcctcctcgcggcgctgcccgtgccgtagtccatgtcgacgtcctcgtcgatgtaggccacggcggacaccagcagcttgaccatgccactgatccacttcacccggtgccactgggaggcctccttaccgctgccgccgccgccaccatggtggtggccgtcatccacgtcctcctcgtcgctcggcgaggtcttgaccacattgcccaaatccagcatcgggttcccgcggacggggaccatgccctggtggtggtggaggtgcggatcctgggcgaagtggaacggcggcggcggctgcatcgtcgcctccagatcgaaggcgccgacgccgccgccatggccatggacaagggctcctctcggcggcaaattcccctccat

SEQ ID NO: 91365 - DNA, 1851 bp, Oryza sativa
  Clone ID: PAT_MRT4530_89948C.1
atggcgtcgcggggcaccaccagctcatgcctgctcgccctcctcctcttgctgctcctccccatcgcgccgctcgccgcgccgcggaggagccgcttcccgtcgaccctccgcctcgcctccttcgacgcgtcgccgccgccgccgccgaccaccttcttcgaggtggaccgcccgatccggccgccgcgcggcagcgtcgggccctgctcgacgctgctcctctcccactccttcggctacacctacggccgtggccccgtcacggtcgcctacgcgccgcccgcctgcctcgccgccggcgccgccgcgggcgggtccctcgcgctcgccgtgctcgagtggagcgccgactgcaggggccgccagttcgaccgcatcttcggcgtgtggctctccggcgccgagctcctgcgcagctgcaccgcggagccgcgcgccaccggcatcgtctggtccgtgtcgcgcgacgtctcgaggtacacggcgctccttgcggcgcccggggaggtcgcggtctacctcggcaacctcatcgatgacacctacactggcgtctaccacgccaacctcacgctccacctctacttccacccagcggcggcgccgccgccgccggagcagcagcagcagcagcagcagcagcatgccgatctgatctttcctatctcaagaagcttaccattaaacgacgggcagtggttcgccatccagaactccaccaatgtgcagtccaagaagctcgtcattccgtcgaacacctacagggcggtcctcgaggtgttcgtctctttccactcaaacgacgaggactggtacatgcacccaccgaatgaatacatcgaagccaacaacatctccatcctccctggcaatggcgcattccgggagatcactgttcagctcgacggcgatgtcgtcggagctgtttggcccttcactgttatctacactggtggtgtcaacccgcttttctggaggcctatcactgccattggttcattcaatctcccaacttatgacattgatatcactccttttcttggtaagctcttggatggcaaagagcataattttgggtttagtgtaacaaatgctttggatgtatggttcattgatgccaatctgcatatttggttggatcataagagtgagaagacatttgggagcttggtgagctatgaggctcccaaattgacacttcatgtggattcgaatttcagcgcgctggatgggcggtttgtgacaagcgcgggccggcatatctctgccactgggtgggtgaactcgtcgtatggcaatgttatgacaactttctaccagaggttcagctacaagaacagcaatttgtatagcaagaatggtacatttcaagtggtgaaccaaacaatcgatgcaaagtctggtgtttttgccaaaagcagcgttgtgctgttcttggaggaagttcataggaccttcccattatatattttttctggaacctcggaccaagtgggtgatgagtactcgttggtttcggttgtgaaaatgggcttcaatgagaggaggatatctggcaggaagcaagagttttcatacatctctttgcggaatgcgcaatcggcacatggctatatgaagttgcagatggaacagaaatctggtgttggaatcaacaaaatctctcatgtaaagagcaaagaacgaagactcacatatcatgattcacatatcaaccgattaccggctctgcacctatggaatggtaatcttcatcccaatcagtcgcccgccccttcgcatggcatgatcagagtcttggagattcggagagttttctacgttaaatctcgtgtcttctatgattga

SEQ ID NO: 91366 - DNA, 404 bp, Oryza sativa
  unsure (1)..(404): unsure at all n locations
  Clone ID: PAT_MRT4530_89949C.1
ttaagccgtgctcgagatgatgatgatcggtcattcgatccctcgtgcctctcgccgtcgctaccgggggtggcactaccgcagcagccggtggtggcaccgagggaaggtccccgagttcaggtggcggcccgacgggcagccggcggcgaggccgttgagcccgaagccgttgcagtcgttaccgccgtcctagtccacgtacgtccacaccggctaactcccgtagttcttcaagctctgggagagcatggacggtggcgagtggcacctcctggaggacttcgtctagctcatggacgaggctaggttcacccacgggacggagctcaagtcgttccaacctaagcagatggcactcttggtgttccagagggcccatgatncnaccttccataaactgg

SEQ ID NO: 91367 - DNA, 480 bp, Oryza sativa
  Clone ID: PAT_MRT4530_8994C.1
atgtggatcgaccccaccgtgagctcgcttggagcggcctgcatcgtccccgccttcaactcgagcttgttgagcggtgttaccggcaacggaagggtgtggagcttcgggcattcagggttgggggggagggggagagtggctccatggatggagctcgccaacaaatttggcattggcatccgtgagctcgtcgtcgcccacaccacttccattgccagatctagaatgaggaagccatccaggagccacaggaccaagtgtccgtcctatttccgtgaagacgagtgcgagagattgcttactcgggccgccgaaggggatgggtccagggttgagccccgcggcgatgctctgcggcggcgggacgtggagcacgacaagcgcgccgtcagggcgaaggcggaggttgtcggcgggaggccactgtcctccttgctgctcatgttgacgccagcttgcatctgcgtcggtggctga

SEQ ID NO: 91368 - DNA, 171 bp, Oryza sativa
  Clone ID: PAT_MRT4530_89950C.1
agaatgcttacaaacatagcaaaatatggcttgcaacacagtaatgtgctctgtatgctcctcgtcgttctatccgtgctcgcggcaactatggcgaccattgccgaccaacaacaaatctacagccccggcgagcaaagtctgccacgaattaactatcccgcatactca

SEQ ID NO: 91369 - DNA, 1874 bp, Oryza sativa
  unsure (1)..(1874): unsure at all n locations
  Clone ID: PAT_MRT4530_89951C.1
atctcccccattcctccatcctgccgttgccacgttcccgtgtcgttttgctcctcgcccgcgatctcctctcctctccgcctaaaccccctccctcctccgcctcgttcactccgccgccgccgccgccgccagatccagcagcttcaggtcggggctgaaccttggacttggagcggccatggcttcggacaacattggctcgagagatgtatgtgttgttggggttgcacgcacccctatgggtggtttcctaggtgccctgtcttccttgtcagctaccaaacttggttccatagcaattgaagctgctctgaagagggcaaatgttgatccagcccttgtgcaagaggtcttctttggtaatgtgttgagtgctaatttggggcaagctcctgcaagacaagctgctttaggtgcagggataccaaacacagttgtttgcagcgcagttaacaaagtttgcgcatctggcatgaaagcgacaatgtttgcagcacagtcaattctattgggcatcaatgatattgttgtagccggtggcatggaaagcatgtctaatgctccaaaatacattgctgaagctagaaaaggatctcgttttggacatgacactcttgttgatggcatgcttaaagatggcctttgggatgtatacggtgattttgccatgggaaattgtgctgagctttgtgctgacaatcatgctctgacaagggaagaccaggatgcctatgctattcaaagcaatgagcgtggaattgctgctcggaacagtggtgcttttgcatgggagattgttccgattgaagttcctgttgggagagggaaaccaccggtacttgttgacaaagatgagggcctggacaagtttgacccagtgaaactgaagaagctccgtcctagtttcaaggagaatggtggtactgttactgctgggaatgcttctagtataagtgacggtgctgccgcattagtattggtgagtgggcagaaggcacaagaacttggactgcaagttattgcacgaatcaaaggatttgcagatgcagctcaagctcctgaattatttaccactagcccggcacttgccatacctaaggctcttgctaatgctggcttggagtcttctcgtgttgattactatgaaattaatgaagccttttcagctgttgcacttgcaaatcaaaagcttcttggaattccttcagaaaaaattaatgtacatggaggagctgtgtctttaggacatcctcttggatgcagtggtgctcgaattttggtcaccctgcttggtgttcttagggagaaaggtggcaaaatcggagttgctggtgtttgcaatggcggaggcggagcatctgctctcgttctcgagcttgcataagaagccttgtgatccatctccagttctccaggacgtttgtgtactctagtttatttgattttctgctttagctgtttggacattcttttatcttaataattgggtaataaagtgtgtttgtggtgccaaagttaatctggtttgtactttttgtcaaaatatttctcctgtaagtggtaataatgtggtatgcagcagtctttaggctcaatcaattgtctatagaagttctagattcttttttctgctacacaactggtaacgctcaaatgaagcttttgtgttagccagcccatttttagtggactatatctatcgagaggcctatctacacaggaattatggacatttgaaagatgctcgtagggcacctgagttcactctttgaaaaatggagcgccaagaatggcagcatatctttgcncnttnnaaaaaaaaaaaaaaaaaattacaaaaatttttttttttaataaaattaaattctggt

SEQ ID NO: 91370 - DNA, 696 bp, Oryza sativa
  unsure (1)..(696): unsure at all n locations
  Clone ID: PAT_MRT4530_89952C.1
gggaaggatataaatctctataaagaagctcttcctccaaaaagttacccatagtcatgcaagagctacctcttgcagagggcaagtacatagctatttngcatattggaaagctcttgcatttgattcctaattccctccacttagtagcttatgttccttaaccacttggagccctttttcctatgtctaaaatatgggtaatgatacctgcattgcaatatcattgaaaagattagggagaatgaacttaaagtacctcttaccactacatctacacgaattacagtacaacttcctgattccataggtcaaccctgaaattctagtggtttagtaccagtagagcttagtttttgctcaagtcaagtacaatgtctttaaacacaatgattcagggttcagactctttccatcttgtgagaccttcatccttggagccttacagtcctgtgtttacagccacaggatgggaaagagcgaggctttatgagtagagcctggaggtagacatctccctcctcacacctgcacccagtcacatggctccatctaaccgacagtgcaggtgagacaggtaatctagttgtgtgccccatgtgaacagaaaatagaactgagaagagctgnccatcttgccccctggtccctaacacagagaagatgtttgacaggatagatgtgttctagttctgt

SEQ ID NO: 91371 - DNA, 469 bp, Oryza sativa
  unsure (1)..(469): unsure at all n locations
  Clone ID: PAT_MRT4530_89953C.1
attgagcagattgagtacattaatttttagattgaacaaatatacaaagaatcaaatgaatcaacactcctagaaccatatatgtcccttggcgacaatcaatcttggaagatccatggtcaccagcttagcttgttgcatactcgatgacagaaaccaaacaattagtgagttgaaaagaaaaaaaaaatcaaagaatagactctgttcaatagagtcgatcaatgggcagatctcttgtttttacaagatggcgtatgatgaattagttggacatcctgagcttcttgaccggcagtggactctgcacctcctcctcctccgcccacctcttgatcccggcnnnntttgtgctctccggcagcggcatcaggttgaggtcgaagttcctgacggccgacgaggcggccgacgcggacgccgagacggagacggacacccacgtgccgtcccaatagtggcagcgctt

SEQ ID NO: 91372 - DNA, 511 bp, Oryza sativa
  Clone ID: PAT_MRT4530_89954C.1
cgcgcacctgcgcccaggcggagcagctcaacgtgtcggtgagccccgagtggggggtgctccccatgcagaccatctacggcagcaacgggtgggactcgtacgcgtgggcgttcaaggctatgatggacgaggtgtctctcgtcatgcacaacccgtacttggaggactacccaatggacttgcacgttatggacgtactactacatgatggcactgtgccctgctcgcttggtcgaagtgacacgtgatacatacggcatggattgggtggcttgaacggtaagctgaagaattaattgatggcggaatcatgtctaccgaatgggttttgattgctctgcgtttagagaatagatatttgactttactgaccccaagattaaactcattgatttttttttatgtttatgtacccatttattgaattcttaacagctcgcgcctatagaagaaagcctgccgtgctttctaatatttatctcattttattattttttttctttttttc

SEQ ID NO: 91373 - DNA, 1326 bp, Oryza sativa
  Clone ID: PAT_MRT4530_89955C.1
atggcgatgtcctcctcctccttccccaccgccaccgccaccgccaccgcctccttccccaactgggtgatgctggagcgatttgtcttccgcagagacgacgacaagtcattccccgacgacaccaaggctacactgagggcatccggttccggatcccacaagaccccctttaccatcgccttccgtatcgccgaccctccggcgatctcccgcctgtacgtgcagtggccacagggcccgaatccggaggagatggtggcatgccacctcgtggccacccaccgcaacctcgttctcgtatgcttctgctacatcgtcgagtgccctgttccggcttgcccgcaggactacttcatcttcaccgcgtccggcgacgacccagtttcctcgccgctactcaaagccctccccccatgtacctaccagccaaaagggggggaacccctcccatgtacctaccagccagaaggcggcttccccccatctgatgttgagggcgacggcaacctgcggtatccattggagtttcgatccgtcggcatcttgtgccaaggcgaagagtttgccgtcgccgagctgcaggtcctcagaaacatcaatgctaatgtcaaagccagactgtgcgtgctccgctcggccatatcctccaaaggtgaagatggagatggaggcggccggtgggatatcatggagctgccaatcgtgtacggcagcggcgaagagtactgggacatcttctactggaccactgacactgtgatcgccttccaaaactacctctgctgggtggactacgaccgaggcatgctcttctgcgacgtactgcagaaaaggcctggaatcgccttcatccggtttcctctggacagcttccctaacggtagatctcgccgccatttctcccaggtgtaccgtggctccctagaaccaggacggggctataccatcacctgccacactttgaggacgttagggctggatgttggggccattgagtggagcaaagactttgcgatcacgtccaaggagatttggtccttcaagggccctgagctcgtgcctcatgaagttctcctgtttcttaccgtgagcatggagatgccgaatgtcatgcacttcctcacctgcgactatgagcacgtgatcaggaagatgtcggttgtgaccattgacctagccagcaagaccgtgttgtcagttattccatatgttaatgggcaggaggacctttccggtgaggatgccgacatggtcagggcaaagtcaagctatccccagtccttcctcccctctgagttttccaagtacttcaattcaatctaa

SEQ ID NO: 91374 - DNA, 816 bp, Oryza sativa
  Clone ID: PAT_MRT4530_89956C.1
atgtcctgttccgccattgtggccgacggggtgaccgggtaccacctcctcaagatcgacggctactcgttaaccaagggcacccccactggcacggccatcaaatccaacccgttcactgtcggcggctaccgctgttcatcaaaaccgaggatttcgagaagtccgactacctcaggcacgactcgttcaccgtccggtgtgacatggtcgttgtccgcaagatccgtgccgagaaggggaagactgacccacctcgccgagaccttcgtgtccgtgcccccgtccgacatgaaccggcagctcggcgacctgctggagaccgagaagggcgccgacgtggtgttcgaggtcgccggcgagaggttcgccgcgcaccggtgcgtgctcgcggcgcggtcgccggtcttcggcgcggagctgtacggcctgatgaaggagggcgacgccgccgtggtcgtgtgcatcgaggacatggaggcgcgggtgttcaagctgctgctccgcttcatgtacaccgactcgttgccggagatgaagaataaggacgcaggcgtcatgtgccagcatctgctcgtcgcggcggatcggtacaacctggagaggctgaagctgatatgcgaggagaagctgtgcaagcacattagcatgggcacggtgtcgaacatgttggtgctcgctgatcagcaccactgcgccgggctgaagaaaacgtgctgcaattttctcggctcatcggcgaacctgagtcctatcagcaggggctgcctctctgttatgaaagagcttgtgttaggatgctggtgcatccactga

SEQ ID NO: 91375 - DNA, 491 bp, Oryza sativa
  unsure (1)..(491): unsure at all n locations
  Clone ID: PAT_MRT4530_89957C.1
atgcagctcaacccgaaagcaagaactcgtcgaaacaaaactaaagtaaaaaagactctatccatgtgcggcaatctccttgaagcacctcaatccaacccgacatcacacgtcaagttgtattatcagaatcagctgtatcggcttttctaatccgactcagacccagccgatcctagtcgtagccgatccggactccagccgattccttgctctgtttccgaactcgatctccgcctccaactttgcttcgatctaatcttctttcctgatgctgatgttaccaaatctggaaaccttgtcctctttcttctccgccattnctncaacgcanaagcgactttcaggcgacttcatcttcggcgagatttccgcccgcagtgatgtcgttctccaccaacccatttgatacgccatcaaccgagtatgctgagaaaagactcccccaaaaaaggtgcccctcgtggtaaagattttttaaacaaaagagg

SEQ ID NO: 91376 - DNA, 1215 bp, Oryza sativa
  Clone ID: PAT_MRT4530_89958C.1
atgtcctcttccgccgccggcaactcgtcgcggtcggcctccacctccaccatcgtggctgacacggagaccgggtaccacctcctcaagatcgacggctactcgcgcaccaagggcacccccaatggcacggccatcgcatccagccagttcatcgtcggcggccaccgctggcgcatctactactatcccaacggggaccacaccgacaatgcagattacatgtcgttttacctcttgctcgacgaaaagaaaaacaccaagaccaagagcgtgaaggtgtggacgctgtttcagatttgtttcgcagaccaggcaaaggcgctgcctacactaacatccaaaacagtgagaacttttggtgatggttcttcttggtcttggggctattcgaagttcatcaaaagggaagatttcgagaagtccaaggatctccgagacgactctttcacaatccggtgcgacattgccatcgtccgcgagttccttgttgagacgaccgaggtgctcccgcccaaatcgttcgtatccgtgcccccacccgacatgaacctgcagctcggcgagctgctggagaccgagaagggcgccgacgtggtgttcgaggtcgccggcgagaggttcgccgcgcaccggtgcgtgctcgcggcgcggtcgccggtcttcggcgcggagctctacggcctgatgaaggagggcaacgccgccgtggtcgtgcgcgtcgaggacatggaagcgcgggtgttcaagctgctgctccgcttcgtgtacaccgactcgttgccggagatgaagaagaaggacgaaggcatcatgtgccagcatctgctcgtcgcggcggatcggtacaacctggagaggctgaagctgatctgcgaggagaagctgtgcaagcacattagcacgggcacggtgtcgaacatgctgttgctggctgatcagcaccactgctccgggctgcagaaagcgtgctgcaattttctcggctcatcggcgaacctgagtcctgtcagcaggggctggctctttgttatgaaacagcttgtgttaggatgctgcaatgcatggagacttgctgttgtacaccctgtctcggtgtcttggcttgtactatcactatcaggcagagctgcagaggtatatgaccttagtaattccatgaaatttacgagtcatgaacatcatcctaaggaggcacgtggagcaatcgcctga

SEQ ID NO: 91377 - DNA, 510 bp, Oryza sativa
  Clone ID: PAT_MRT4530_89959C.1
atggccggcgccggcgaggacggaaagagagagagtagctggccatggccgccggagtacggcccgccggacaatgctctgcactccctgggaatggagttcaccaccatcaccgccggcgaggtcgtcggccgcctcctcgtcaccgccacctgctgccagccgttcaaggtgctcggcggcggcgtgtcggcgctgatggcggaggcggcggcgagcatcggcggctacatcgcgtccggctaccggagggtcgccggcgtgcagctgtccatcaaccacatcaggccggcccacctcggcgagaccgtccaggcgaaggccaagcccatgcagctcggccgtaccatccaggtttgggaggtccagatatggcggatagatccttccacatcagagtgcaaacatctagtgtcaacagcaagggttaccctactatgcaacctaccaacaccagaggatttgaagcactatgaacaaggttttatcaagaaacatgcaaagctgtag

SEQ ID NO: 91378 - DNA, 773 bp, Oryza sativa
  Clone ID: PAT_MRT4530_8995C.1
ttaccggatccagcgtcgcccagccatccccggccggatctgcagccgtccgtcctcctcgtccgtcagccgccggttgctcgcggatccgaggacaccgctcttctccgccgggcagccgccgtccatcgccgtccggtcgcagcgctcgtcgataacgagcagcagcaacagcagctcttcgtatcccttccagatccagctccaatcgtcgtcggtctcgtcgcccatcactgtgagccgccgcctccatcgccggccaacccatcctctccatcgttgtcccatgctcccgccgcggatcttgtcaatgccttctctgttgctctgctgatttcgtggattttgttgtttttggcaattggtctgcagctcttttccaaaacctcaatcaggaacgcatcaaactgccatggtgctcgtccagtcgtcctcctcaaaatgctgctgccagaaaatcagtaagcgtgcacttgtttgccatggatctagagtgcatgcttgctagtgctagctagtttagtttgcacctgtcagtaccactgtccactgaactagtagctgcaacttgcaaatggttattagtttagttagttgcaatggtctcaattgggagtatagtccatgtgcatctgagatatgcatcacgtgttcttacacaggtgtccagtgtccactgccgtgctactgtcgtctactagttcaactcctttgttatccattgagttcaccaaagtctattgcatatcatcaatttcatcgaagtcattcct

SEQ ID NO: 91379 - DNA, 296 bp, Oryza sativa
  Clone ID: PAT_MRT4530_89960C.1
ggcgttaatacttcaaattaatgtttaaatatctaatgtgacagtgactgagttaaagtttaatcactagatccaaacaagcccttaactggcagaaaatttttttttacctcaaatctcttgaacaatccaccagtcaatcaagcaatatatatgcatttttattttctttttgcatatatagttgttgcatatatgttaatggtttagtgtggcgatgaagtttgtgagtgtgttactccaccaactaaggtttaaataatgatccctgatgtatatataaaatatggttctgt

SEQ ID NO: 91380 - DNA, 156 bp, Oryza sativa
  Clone ID: PAT_MRT4530_89961C.1
ccccacctgtgggtgttttcaaattgtatttgcctgggacaaccaagtttactcggttattcaatgatggaatcatggaaactggccgaatccatcaaacatctttggtgatatatataagttcactgcattggagaaaaaaaaaaaaaaaaaaaa

SEQ ID NO: 91381 - DNA, 380 bp, Oryza sativa
  unsure (1)..(380): unsure at all n locations
  Clone ID: PAT_MRT4530_89962C.1
cctttggttgcaggattcggcacgaagtgagtgcagagatggcccctccgtgatggcgtcgtcggncaccaccgtcgctcccttccangggnncaagtcnaccgccggnatgcccgtcncccgccgctccngnaantccancttcggcaacntcngcaatgggggnaggataangttatgcacgtgtnnncgattgaaggcatcnanaaattctanaanctctcttactgcaccgctcaccgtgggaaganntccccaaananattaanttccccccccctccccnttnggttccngcccccaantttacaaagggnngatttttttcccctgaaaaaacacaagtnccccncgatactacnaaaggnngttctggaaca

SEQ ID NO: 91382 - DNA, 663 bp, Oryza sativa
  Clone ID: PAT_MRT4530_89963C.1
atggagccaggctccgtggatatagacacctttgcaacaaaaatctaccgtgtcatgctcattgcggcgctggcggagtgggtcggcgcggctcaggacctaaagttgtggctccggttggacttgtgtggagcaggcccaatggtcacatgggttgatgtgacggggagattgttgagcccgatgtcttcgggggtcacatggattgatgtgacagggaaggttgttgggcccgatgttcggggcacaggatttaaagttgtggctatggttgggcttgtgtggagcaggcctaatgtgatctgggtgacctacggcgcctgctgccggccaagcgcccgcgcctccgtagccgtcacgcctactgcggcctcctgcgcctccgccgccgacgccgcgcccacactgccacaaaacaaatctggcggcggcgacaccggatccagccgcaatggggctagatccaatggtggcggcgccgaatccgcagccacgtgcctcgccgctgcgctgcgccgccccttcgtgccaaagacgggacgcaccgcaggggattggagcctcaccactaccatcccggcgggccgcgcggtttcctgtgacacgcttcggcggtggcgaggcgggggagaggaggggagggtggcggcggccaggggctag

SEQ ID NO: 91383 - DNA, 632 bp, Oryza sativa
  Clone ID: PAT_MRT4530_89964C.1
ccgccaaagaggaacaattgccgaaacgacgaggagtagaacgggtgagaagaggacttgagtcaacatcaaccgccagatcccgatcggatggcgcgggtcgcagccagctgtgttgccctgctggcacaaaggagaggattgtccgcggcgataaccgcggcggaaggttccgccaagaccatcgacgacaaggcggtgaagctcggcacggcggcgaaggacgtcgcgacggcgacggcgaccacgacggaggagaagacggcgttctgggagccggacccggacaccggctactaccggccggtgaccggcaccaaggaggtggacgccgccgacctccgcgccgagatgctgaagcagaggatgctccatgactgatgcagaatggggggtttacccgtcctttgagattcgtgccgacggtatgcgtatgtatgggccgttggatgcgaccccggttcgtctgtgaaaaaaaaattgtgcacgttgtaccagtatactaacacccaatttcatgcattttgcatggcttagttgttacctgacacaatacagatttcatccaaaaaaaaaatatatatattacataatttaactgctcacaagcaggatttaaaaaaaaaaaaaaa

SEQ ID NO: 91384 - DNA, 522 bp, Oryza sativa
  Clone ID: PAT_MRT4530_89965C.1
gaggccgggtaaaaaaatacacttctctaaaaacacacacacatgcattggcatttgacaattaatatatatggatatatacttcaattaatcttgtagctgcaaggctactattttttttccagcagcatggtcatctactcacctcttatttgcagtgcatgactgaacactgttgcagagaacacattgaattatttgaagagagaccagacggtagcatacgttgatatacatgttcaggccaatgctgatacatatagctagcaagctagctagcatagcattttagcattatttgcttggattcttgtggatcgatctgcgataaataattttatgaacagttatatcttataccactatttaagaatccaatgaatttggacgaagggactagggagtcaattaattaggaccaggaggtaaacaataatactgtgtgcttgtgtggtaactctaccagacttattaattggagctacatattccatgtatatatatatgtcatgaaatcctatt

SEQ ID NO: 91385 - DNA, 243 bp, Oryza sativa
  Clone ID: PAT_MRT4530_89966C.1
cttcttcctccctccggcggtccccgaggtcgtgtcgcctggcctcgccgagccgccgcaccgccccagacccggcccgcctccggccatccccgccgacagatccggtcacggacggcatccacatgggctactcctccaggagcgcaggattagtcccggaggaggaggcgcagcgaggtggtggtagcgtccttcgcgagcacgagggcgtcaacatctccggcgtcacctgcggacctg

SEQ ID NO: 91386 - DNA, 267 bp, Oryza sativa
  Clone ID: PAT_MRT4530_89967C.1
atgacggaggaggtggccgtggcgcccctcccgccggcggaggcgccggccatcagccacacggcggcggcgttgagcggcaaggccgtcttcgtcggcgccgtcgtggtcggatgccacatcgctcacgcggtcgagcggcgccgctactggcgtcgccatcgtgacagcgacggtgtgtacgcggcggcgcggtcgctcgccgccggcgacgtggcggcgtggcttcgcgcgtgggaggcggacaggattaacccacgcgactaa

SEQ ID NO: 91387 - DNA, 244 bp, Oryza sativa
  Clone ID: PAT_MRT4530_89968C.1
atgagacagatgatttcacccacatcatattacaagtgccttgtaagacaccgaattcgtacctattcgcataaagcagacataggacgagtattcatagggactaaacagagcccgggcaactcccaggtgtgtgccacgggccccagcttacaccggaaggaagagttactcaacgcggggcgtgaactagtacttattagcgcataaaataccgtgcaactccatgagctttgtcaagggg

SEQ ID NO: 91388 - DNA, 353 bp, Oryza sativa
  Clone ID: PAT_MRT4530_89969C.1
aaaaaaaccacccacaagagttccttggtgggggggattatacctaatttaaaaagctacttccaattgtatttcattcataagggccctctaaaatttggaatctattgaaagggatatggcacatttgggggaagtttataggacacggaccattggggactatgaccattggggggggcacacaaaggttggctcccgcttgaacttgggttgagccaatttggcactatattttttacgagactttgggatcataattttgcgagcgctttttttgtgggccttaactgtacagggggtgtgctttggagcaagcttatttttcttagggtccagctttaaaaatttag

SEQ ID NO: 91389 - DNA, 590 bp, Oryza sativa
  unsure (1)..(590): unsure at all n locations
  Clone ID: PAT_MRT4530_8996C.1
cacagccgtccgagaaagaaatctagtagtcccagtagcaatagaagaatcnaattttcagtctttagcttcttttcttaggctattagctagcaaaccagcagcctctagcgccagtttagatagttttagaggtcaaagttatagagcannatatcagctagcagtcagcctcttcctaccttacagcaacatagtagcttagcccatataatagagttcgtaagagcagcagtatggcatagcaggcaaagccccttattgcaatcagctgcatttcaactgagaaacaaccaagtctggcaacagctcaggctggtggcgcaacagtctcactatcaggatattaacattgttcaggccatagcgcaacagctacaactccagcangttgatgatctctactttggtcggaatctggctcaagctcaagctcaagctctngtggctttgaacttgccatctagatatggtatctaccctangtactatagtgcacctagtagcattaccacccttggcgtgtattgtactgaagtttaacaatataatggtttggaagttaaaaataagctcagatatcttctttt

SEQ ID NO: 91390 - DNA, 1818 bp, Oryza sativa
  Clone ID: PAT_MRT4530_89970C.1
atatacagtgcatttctacaatcttttgttgcccattcatctgggttttcttctgcttctttttttttcctagagagtacggttttctttgtaattctttaatttgttgcaaccatgaatgtattggcatctaagatcttcccttcccgctccaatgttgccagcgagcaacaacaatcgaagcgcgagaaagcaactattgatgacgctaagaactcgtccaagaacaaaaatcttgaccgcagtgtcgatgagagtgtgcttggaatcattcttggaggtggtgcagggactagattgtatcccctcaccaagaagcgtgccaagcctgccgtgcctctgggtgccaactacaggcttattgatatccctgtcagcaactgtttgaacagcaacatatccaagatctatgtgctgacacaattcaactctgcctctctgaaccgtcacctgtcaagagcctatgggaacaacattggcgggtacaagaatgaagggttcgttgaagtcctcgctgcacagcagagcccagataatcctaactggtttcagggtactgcagatgctgtaagacagtacttatggctatttgaggagcataatgttatggagtttctaattctggctggagatcacctttaccgcatggactatgaaaagttcattcaggcacacagagaaacagattctgatattactgttgctgccctgccaatggatgagaaacgtgcaactgcattcggcctcatgaaaattgacgaggaagggagaatagttgaatttgcagagaaaccaaaaggagaacaattgaaagcaatgatggttgacactaccatactcggccttgacgacgtgagggcaaaggaaatgccttatattgctagcatgggtatctatgtgattagtaaaaatgtaatgcttcagctcctccgtgaacaatttcctggagctaatgactttggaagtgaagtcattccaggtgcaacaaacatcggaatgagggtacaagcttacttgtatgatggttactgggaagacattggtaccattgaggcattctataatgcaaatctgggaataacgaaaaagcctgtaccagatttcagtttctatgaccggtctgctccaatttatacacaacctcgacacttgcctccttcgaaggttcttgatgctgatgtgacagacagtgtcattggtgaagggtgtgttattaaaaactgtaagatacaccattcagtagttggactccggtcctgcatttctgaaggcgcaataatagaggactcattactcatgggagctgactactacgagactgaagcagacaagaaactccttggtgaaaaaggtggcattcccattggtattgggaagaattgccacattagaagggcaatcatcgacaagaatgctcgtattggagataatgtgaagataatcaatgttgacaatgtccaagaagctgcaagagagactgatggatactttatcaaaagtggcattgttaccgtgatcaaggatgctttgctccctagcggaacagttatatgaagtagctgcgtaatatgtgatggggcatcggcgacgagcaccaggcgggcattataagaagaataaaagcagttcaaggcactttattccctttttttttcttctgttcttcctctattgtgttaggataaatgtaatggtagaagcaactgtttttcagatgttttgggagtgaatgataccgtgcttgaattttccatgttttgctttgcctctgcttgaaaatgaatccagcaatcccatgtgtttctaattcgtgaagtt

SEQ ID NO: 91391 - DNA, 438 bp, Oryza sativa
  Clone ID: PAT_MRT4530_89971C.1
acctgctccaaactgtgcattgaattcacttggtcttccactacgcccggtaaggttttttttttatgttgaaatttctcaagccaaattttgtgaggaccattccatttatagtggccatcatgcaattttttctgcatgtgttgtcttgtttcctgttcttttaaggtactgaccgtgtaggtgaaaagcatttctgggaaagctatcgtgggaggaactattatgtgaaacggttataacctgaaaattggttgtattcatacggtgtaaagtgagttaaaagtgctaatactgaagtaaaaacaaaacacaggttttcctttcttatgatcaccacagtagcagcactgagcaacatgtctgtgcatgagactttgtaattcatttactggtgatagtggtgaactggtgacataggacatgggcagagctaca

SEQ ID NO: 91392 - DNA, 1593 bp, Oryza sativa
  Clone ID: PAT_MRT4530_89972C.1
atggcgatggcggcagccatgggcgtggcctccccctaccacgccgcccacgccgccgcatccacatcgtgcgactcgctccgcctcctcgtcgcggaaggccggccgcggcggccgcgaggggtggcctcctcctcctcctcctcctcttcggcggggaggcggaggcggccgctcgtcttctccccgcgcgcggtgtccgactccaagagctcgcagacctgcctcgacccggacgccagcacgagtgtgcttggaatcattcttggaggtggtgcagggactagattgtatcccctcaccaagaagcgtgccaagcctgccgtgcctctgggtgccaactacaggcttattgatatccctgtcagcaactgtttgaacagcaacatatccaagatctatgtgctgacacaattcaactctgcctctctgaaccgtcacctgtcaagagcctatgggaacaacattggcgggtacaagaatgaagggttcgttgaagtcctcgctgcacagcagagcccagataatcctaactggtttcagggtactgcagatgctgtaagacagtacttatggctatttgaggagcataatgttatggagtttctaattctggctggagatcacctttaccgcatggactatgaaaagttcattcaggcacacagagaaacagattctgatattactgttgctgccctgccaatggatgagaaacgtgcaactgcattcggcctcatgaaaattgacgaggaagggagaatagttgaatttgcagagaaaccaaaaggagaacaattgaaagcaatgatggttgacactaccatacttggccttgacgacgtgagggcaaaagaaatgccttatattgctagcatgggtatctatgtgattagtaaaaatgtaatgcttcagctcctccgtgaacaatttcctggagctaatgactttggaagtgaagtcattccaggtgcaacaaacatcggaatgagggtcatgtgctatatttgctgcttaagaatctatttttgttgtctgcaggtacaagcttacttgtatgatggttactgggaagacattggtaccattgaggcattctataatgcaaatctgggaataacgaaaaagcctgtaccagatttcagtttctatgaccggtctgctccaatttatacacaacctcgacacttgcctccttcgaaggttcttgatgctgatgtgacagacagtgtcattggtgaaggttgtgttattaaaaactgtaagatacaccattcagtagttggactccggtcctgcatttctgaaggcgcaataatagaggactcattactcatgggagctgactactacgagactgaagcagacaagaaactccttggtgaaaaaggtggcattcccattggtattgggaagaattgccacattagaagggcaatcatcgacaagaatgctcgtattggagataatgtgaagataatcaatgttgacaatgtccaagaagctgcaagagagactgatggatactttatcaaaagtggcattgttaccgtgatcaaggatgctttgctccctagcggaacagttatatga

SEQ ID NO: 91393 - DNA, 324 bp, Oryza sativa
  Clone ID: PAT_MRT4530_89973C.1
atggcttgccggtgggtcgctcaggcggcagcgaggtggagggtggagggagagcgtggtgacggcggtgggttttggggcgccgtccgtgtcgcccagggacgggagcgcacagaagggagcggagtcaaaccatctaacatctccttcttcttcagtgaactgttcaccgtcatcgacaatgcttggcttcgtcatcccttcaggttgcttcatctggcaccgaatgagaccattgaaccaaaacttgatggactggagaattacctttcatgtaagtacaggaatccaggagacgagctgggaattgcaggtcttggttag

SEQ ID NO: 91394 - DNA, 120 bp, Oryza sativa
  Clone ID: PAT_MRT4530_89974C.1
catgctgtacaaatgaagacactatattttagtctactacaaacgctgcatgcaatttatatcaattcttggacctctagattgcctttcttactccatgaccgtaaacaggttccctat

SEQ ID NO: 91395 - DNA, 255 bp, Oryza sativa
  Clone ID: PAT_MRT4530_89975C.1
atggacccggtgcacatggactcaccttacgagaacccgctgtcactgaccgcgtgggcccacgtaaacgagagagcacgaactcgccgtcgccgacgctatcagcggccgcgttcaaaaccgaagcgccgcggcggcggcggcgccgcgtgggggacggggcccacatggaagcggcgttgggtggggttggtcgaggtcatcgtcggcggccgcggcggcggcgaggagagccaggtgacggtgaggggttag

SEQ ID NO: 91396 - DNA, 299 bp, Oryza sativa
  Clone ID: PAT_MRT4530_89976C.1
aaataccaactaacataaccattaaactggaatgcccaacagatggtcagagactacttttataaacacatacgtgcttttacagaaaccatgtgacagggctaaagcacactcacacccacttttgggatctcccataacacatggcggctttattattggatcgataactcaacagaaacaggcactggccactgagcaatagatcatttagaccgaaccagaaacaggcagtgcactgataggtgaggccacacgtgaagacatgagcagggtaacgagactgacgtgcgttgcta

SEQ ID NO: 91397 - DNA, 222 bp, Oryza sativa
  Clone ID: PAT_MRT4530_89977C.1
atgtggcctttggaagaagaggcccagaaatcactcaccacattccatctcaacgtcggatcttggatctcgatcatcagctggtttgcgagaggtgtccggttaggcattgagtcgagcatgtggaacacggcggtgtgcagaggtattccagtgttggaaataggacacgagggatggattgggcagaagagtagcctatcagacgatgtggatgagtag

SEQ ID NO: 91398 - DNA, 187 bp, Oryza sativa
  Clone ID: PAT_MRT4530_89978C.1
gttgttttttttttttttgttgtttttttttttttttttatttttttttttactggaacaaaccccagggccaacgggtacagagggcccaccggaaggaacaccgaaaagacaggccaagtctaccggcctgaaggaacggcgaacaaagcataatccaggcgagacagcgtcaagaacagccaaa

SEQ ID NO: 91399 - DNA, 703 bp, Oryza sativa
  unsure (1)..(703): unsure at all n locations
  Clone ID: PAT_MRT4530_89979C.1
atcttctcccccgagaccgggtgatcttgggttagcttagctagctaaattaagctgcgtgcagcatggggctcctcgaccagctctgggacgacacggtggccgggccgagggcgaactccaccctcggggcgttcaagcccaacccgagggccacggctagggcctagcccaagcccatggccggggggggggccatccccgcctccctcctctccggcggctcttcgccggcatccggcgacgcggccgacgacctcagcttcctctcgccctcctcgccggtggtgaagcccaagccgaggtcaccgctcgccgccccggcctcctcccccatctccccctacgcctcccccgctttcgcctccgtctccaccgtcgcggacctgaggatcctcgccgtgtgccacctcggctccctcaagcgccggctcgtcgcgctccacggnggctccgcccgcggcctcggggcctccccctcccgcntgtccaagcgcttgctgatgccggctcagagctgcctgcttctggccggtgaggctggggaggggcccctgaaggtgggcggcctggtctgccgtcatgctggggcgggggaggcctgnggcacgagtttgggggggggggcagggttggcctggggggggtgcgnggggctatacctgggtgggggggggggggggcgggctttggtggggctggg

SEQ ID NO: 91400 - DNA, 1014 bp, Oryza sativa
  Clone ID: PAT_MRT4530_8997C.1
atgggccccacatgtcattctccccccgggcttcctcctctctccccatctcccctctctctcacgcaaggttcggcggctggagtagaagcaccacctcgccacgtccgctggcggcggcgacggcgatggcgacgcgcccctgccgccgacttgtacttgtcgccatggccgcacacaataagctcctgcatatgcctccttgccgtggccgcccatgtgcatccgcaggttgtcgtcgcgcttgaagcccttgctgtacacgctgcagaagtgcacgtgcggcgccaggatcttgtccttcttgatccggaccacctagtaggagccccgcggcgagatgtgctcaccgtcggcgttggcgccctcgtcgacgtcgctgctatcgtgcttgccgtccacgtcgttgccgccgcggtggttcttggagatggagacgagctgcatgacgcgagcgtggccgtgcggcagagcgcgggtcgcggcctcggcaatgggggtcactgcttttttaagttcaagcttgtcaagaattgctggcgtctgatgaatttggaacaaactcgtctcagtttgaagatgttggactcaggcaggtcggtggtcgaacatattctgaatttggaggaaggaaggagattacaaatagcttgtctgatgtggtgttggtgggatacccgcaataaggtaaatgcaggagagcaaggttcatcatctacggaaattgttagaagagccaattttatggcgtctgcgcctgctggtttgatgagtgtaagaactcccagtccggagggtgtatcagcaggtaggagtgtttggaagtttccacatgaggatgagctgaaactgaatgttgatggagcattctacgaagcaagcaattctggaggctggggctttatcctgcgaaaccccttcgcgttacaagcagccgcggaatggggtgtgagccaggtggaagttgagacggactcaagttctggtgacagcagtacaatccagttcttatga

SEQ ID NO: 91401 - DNA, 615 bp, Oryza sativa
  Clone ID: PAT_MRT4530_89980C.1
atgacgacctcgccggagatagagcgaccggctgcggatttggaggacatgaacaccacgtctatcgacgaacgacgacggccgacgacaaggtctagcggcggcgcggcttcggtcgacggcggcgacggggctccggtgatcggcgacggcggagaacgggcggccgggcttcccctcaccacggcgcacctgaatgcggcggcagcaagcggtgacgacgacggagatggcggcgctacctcgccggagatggccggcggcaaccggggaaaggtagaggagaacgagaggataaaaacccctcaaacaatcggaagaaaaggggagagattggggaggaaacggcgcggcaaggcggctcggctcagctacagccggcggctggagctggaagatgaacagtagcgcgggggaaggataatagacttcttgccgggcttttcttttctcagccgggccgcagctcgtgtagccttcatttgtcctagagatgtccatcgaccctcgacttcgtccatctccatccatgtacctgcctagctcgctttcgctaacgtgggcttcaacttccggcaagagcggatcctccgaaggggatcctctagagtcgac

SEQ ID NO: 91402 - DNA, 531 bp, Oryza sativa
  Clone ID: PAT_MRT4530_89981C.1
atggcggctcccccggcgtgtgggacgctctcggcggcgtgtccgtgctcgccgccggcaccggcgaagccgttcagctcagggacctgtgggaccccaccgagctgggagctggcctctgttctgaaggaatccatggcgaaattcgacgctgccggggccaagctgatcgccatcggcgtcgggactcctgacaaagctcgcattctcgccgatgggctgccgttccctgttgatagcttgtacgctgaccccgagcgcaaggcttacgacgtattggggctttaccatggtctgggtcggacattaatcagtcctgcgaagatgtactcggggcttaattccatcaagaaggtaaccaagaactacacgctcaagggcacaccagcagacctgacgggtatcttgcagcagggtggtatgcttgtgttcagagggaaagagttgctgtactcatggaaagacaaaggcacgggtgatcatgctcctctggatgatgtcctcaacgcttgctgcaatcgaacttcttga

SEQ ID NO: 91403 - DNA, 243 bp, Oryza sativa
  Clone ID: PAT_MRT4530_89982C.1
tttcccacttttcactttttgtagcactctggtattctcccgtggtgactgccatccgaggaggttgccgctgcgtctgctgccgccggcgaggcgcctccgcctccttctcctgctgtggtagaggaggcgaaggatgcctcggaggcaccgaagccggaggaggctccgaacgctgaggatggggaggagaagaaggcggagggtgagaaggagaatgtgatggcgaactattgagaggaa

SEQ ID NO: 91404 - DNA, 1094 bp, Oryza sativa
  Clone ID: PAT_MRT4530_89983C.1
gcacgcgcctcgatcagtacgcgtctcagagtttggcctcgtcgtacctatggagacggtcgcctcgctctcgcgcgccgcgctcgccggcgcgcccgccgctacacgcgcgacagcgtcgcgcgtgaacagggccgtggtccctgcggcgtcccggccgcgcgggggacgcctttgctgccgacgctcgctgacggccgtctccgcggcggcaggggcttcccctcccgtctccccgtcgcctagccccgatggcggctcccccggcgtgtgggacgctctcggcggcgtgtccgtgctcgccgccggcaccggcgaagccgttcagctcagggacctgtgggaccccaccgagggggtggccgtggtggcgctgctccggcacttcgggtgcttctgctgctgggagctggcctctgttctgaaggaatccatggcgaaattcgacgctgccggggccaagctgatcgccatcggcgtcgggactcctgacaaagctcgcattctcgccgatgggctgccgttccctgttgatagcttgtacgccgaccccgagcgcaaggcttacgacgtattggggctttaccatggtctgggtcggacattaatcagtcctgcgaagatgtactcggggcttaattccatcaagaaggtaaccaagaactacacgctcaagggcacaccagcagacctgacgggtatcttgcagcagggtggtatgcttgtgttcagagggaaagagttgctgtactcatggaaagacaaaggcacgggtgatcatgctcctctggatgatgtcctcaacgcttgctgcaatcaaacttcttgaggtctctagcagtcggaagatgtgtatgtaaatatatgaaatgctcagcatgccaaacagagagcaattagactcaacagtactagatgttcgattaattatgcattgttggtttgcttatgtacttagcatgatattggattagctacccaatggacatgacactacagtctgaactctgaacttctgatgtataaggtacagttacacctaatcaattagatatctctactcaattaaaaacagaaaaaaaaaaaaaaaaaaa

SEQ ID NO: 91405 - DNA, 1468 bp, Oryza sativa
  unsure (1)..(1468): unsure at all n locations
  Clone ID: PAT_MRT4530_89984C.1
atnncnccnnnnanntccnnntcactttnncancncccnnnntttaccctgttcccatttttatcacttccctcaatttttccgtccgtcttgatcggtggtttcaccctcaactccgcttcagaaacctccgtcctctatttccagaaccggaagcgctttgtcaatgtccacgtggcggacagcaacgggagtcgcgtggttggtgccaaggtcgcggtgcatcagatcaccagggatttcccattcggctctgccatcagcaggacaatccttgggaacaaactttatcaggaatggttcaacaagaggttcaatgcggcggtgttcgagaacgagctcaagtggtatgcaacggagccatacccggggaaggaggactatacggtggcggaccagctgttgcagtttgtgcaggccaacgacgcagtggcgcgcgggcataatatcttctgggaggacccaaagtacacgccagcatgggtgaagaatctgacggggtcacagctacgtgctgccgtctctggccgcatcgagagcctcctctctcggtacaagggcgactttgtgcattgggacgtcagcaacgagatgctgcacttcgacttctatgagaaccgccttggcggcaacgccaccgtcgacttcttcgacacagccaagcgcgccgacccgctagccacgctcttcctcaacgacttcaacgtcgtcgaggtctgcgatgacctcagctccagtgccgactcctacgtctcccgcctccgccaactcgccgatggcggcgtcaccttcgaaggcatcggccttgagggacacttcggcaagcccaacatcccctacgtccgcgccgtgctcgataagctcggcaccctgcgtctccccatttggcttaccgagatcgacatcagtagctccttcgaccccaaaacgcaggctgcatacttggaagaggtgctccgagaagggtttgcccatccatccgtggatggcataatgctgtggacggcaatggacaccaatgctagctgctaccagatgtgcctgaccaaccagaacttcaccaaccttcctgcgggagatgtggtggacaagctgctgggggagtggcaaaccaaggagaccctgggaaccaccaatgaccgcggctccttcaacttttctgccttcttgggagaatacaagctctcggtcacctatctcaacctcactgccgagggaaccttctcgctggcccatagcgacgacaccaagcatatcaacatccgtctatcaccatcatgttgaaattgaattgattcttgtgttatatagaaggatgtgatgatgaaaacttggtagtgtaccttaattagagggagactccatacgtttgtgttgatacaatggattcataatgtgtgttcgtacaaggcatatatatgttgtatctatatcaggattgaggatttctatcaaaaaaaaaaaaaaa

SEQ ID NO: 91406 - DNA, 707 bp, Oryza sativa
  Clone ID: PAT_MRT4530_89986C.1
atgccgtcgccccctcgccactcgccgcctccagaagaacccatggctgcagctacgcaagatcacctcccttcttctccggccgcccccgccgccgaccaaccacagggcggcgggcgtacatccgccttgtcatagagcagctgctatcccgcgacaccgccagcgacaccggccgcatccgcctcctgctccggcgacgcccccgcggcgtcgtcgccgccagcttccccgcggccgtcacggcggcgctcgacgacctggaggcgctctactccgaggggagcgcgccgatggcggcgctggcgcgcgacgcggcgcggtcgaggcgggcggggcacgaggagcggctgcgccgcgccgcgtcccagcgcctcgctgtcgagggcccgatccgcgacctcgccgccggcatcgacgcggcggggaagcggctcggggaggaggaggccgtcgtccgtcgaacgcagcggcggctgctgctgctgtccggcgccgtcgccgaggaggccgacgtcggcgcggtggtgtccctcgtggagcgcctcgcccgtgcgcagggggcggaggcggctctcgcggtggccatggaggcgatgaaggcgcgtcaccggcggctgctgctgcagcgcgaagctgccgaggtcgccgagctcacggagatttcggcgctggaggacattccacaggacggatgcccgcgctag

SEQ ID NO: 91407 - DNA, 168 bp, Oryza sativa
  Clone ID: PAT_MRT4530_89987C.1
agaacatcacagattcaggggggctcttataaaagcagggggatctgaaaggattcaccacaaacaatagctaaaaccgaaagggcaccgactgtgaacaaacgtactgaaacagattgacgacccagttagcctctaacattggggataaaatagaagatcctgtca

SEQ ID NO: 91408 - DNA, 931 bp, Oryza sativa
  Clone ID: PAT_MRT4530_89988C.1
aatatggcggccgcgctcctccgccgcgcgctccacctccacctccacctccgccgcgcgctcccctcccctccccgcgccggcgcgctcctcctccccgccgccgcttcctcccccgcccaccgcttcctctccggcttcaccaccaccacccagcagaacagcgcctccaccaccaccatcgacctctcctccgacgagagccgccgccgcctcatcaacaggctggtgtacaggagcaagcagcgggggttcttggagctggacctggtgctcgggacctgggtcgagcagcacatccactccatggacgaggccaacatccgcgccctgctccaagtcctcgacctcgaaaacccagatttgtggaagtggcttactagtcaggaacaaccacccgaggcagtgaactctaatcctgtatttatcgctgttaaatcgaaggtcacggacaacctgagcaagcactcttctcctgagaccagatcagcacctggtcagccatgggtgagagggtgggatgacaagcgaggcattgaaggaccaaagtatggaaatcagtgatgagatatgcttcagagaatggtagcggttttatgcctaagtataatcctgttttgttgcccctatagtttggtgcttgtgtagaataaattaaatcatggtatccaatgatttggaaatttggagtgtcaccatgaatttggattgacaaataatgctctgtacaagtttcaaacactttctggttgaagacaaagcagtgtggtggtaacaacttaacatgtaaatcaaaagctcttgtgtttagaaaaaaaaaaaaaaaaaaaaaaaaaaaaaaaaaaaagaacaaaaaaaaaaataaaaaatcccgtcgtgaaaaatttaaattttataaaaaattaatggggggggcccttttaagggatcc

SEQ ID NO: 91409 - DNA, 3515 bp, Oryza sativa
  Clone ID: PAT_MRT4530_89989C.1
atggcgtgtttggtaattttggatacagcatttatgtgcaggatatgcttagctgtggcgagtgaattgtttcctatgtttgcaatccttcctggaatggacctggtttggggggttcaacagctgaaccccatgccccatgctagatccgccactggggagagtttgagcgcagattttattggtctcatttggtggctactatgtttatccttaacaaccctcagtggattggaaatatggcggattgaaaaactgcaagctgttccagttcccaaggaatcacatgggagatttttcacaggagattcctatgtgatattgaagacaaccgctcttaaaaatggttcttttcggcatgatatccattattggcttggtaaagataccagtcaggatgaagctggtacagctgcaatcaagactgtggaattggatgctgctcttggtggacgtgctgttcaataccgtgaagtacaggggaatgagacagagagatttctttcatattttaaaccttgtattataccagaggaaggtggaattgcatctggtttcaggcatactgaaatcaatgaacgggagcatgtgacaaggttatttgtctgcagaggaaagcatacagtccatgtcaaagaggttccgtttgcaagatcatcgctgaaccatgatgatatatttattttagatacaaagtccaaaatattccagttcaatggatcgaattcaagtattcaggagagggctaaagcccttgaggttgtgcaatatttgaaagacagcaaccatgagggcaaatgtgacgtaggttcagttgaggacggcaagctgatggcagatgctgacgccggtgaattctggggtctctttggtggatttgcacctcttccaagaaaaaccttttctgatcttaatggaaaagattctgctttctcttcgaagttgatctgtctaaataagggtcagacagtaccagttgattttgatgttctaacaagagagttgctagattcaacaaagtgctatctgctagactgtggatctgaaatttatgtctggatgggtagagagacaccactcgaagagaggaaacgggcaggatctgctgcagaggaattacttcgtgaagtaaacaggccaaaatctcatattgttcgtctcatggaaggatttgagactgtcatattccgatcaaaattcagtaaatggcctaagaaagctgatgctgttgtgtctgatgagagcagaggaaaagttgcagctcttcttaagcggcaaggatttaatgttaagggtcttgcaaaagctgctcctgtgaaggaagagcctcaacctcaaattgattgcacaggcaacctgcaggtttggcgtgtaaatggcactgaaaagacattcctttcattctctgagcaatgcaaattctacagtggggactgttataggagtgtctcattggtacttggttcgggagaagaggagtgtctcattggtacttggttcgggaaaaagagtgttcaggacgagaagactacagccatttcagttgctagcaagatggttgagtctctgaaatttcaggcagtcatggttcgcctttatgaaggaaaggaaccagctgagtttttctcaatatttcagaacctggttatcttcaagggtggtgttagtactgggtataagaaatttgtctcagaaaacggtattgaggatgacacatattcagaaaatggggttgcccttttccgggttcaaggctctggaccagaaaatatgcaagccattcaagttgatacggctgctacctcgctgaactcttcttattgttatgtactacatgatggagatacactatttacatggattgggaatttaagctcgtcaatggatcaagagcttgctgagaggcagctggatgtgatcaagccaaatcttcagtccagaatgctcaaggaagggtcagaatatgatcagttttggaagctacttggagtcaagtcagagtaccccagccagaagattgcaaaagatcaagaaagtgatcctcatttgttctcttgtactttttcaaagggagtgcttaaggttagagaaatattcaactttactcaagatgatttgatgacagaggacgtttttattttggactgtcattcatgtgtcttcgtatgggttggacaacgtgtggacacaaaaatgcgagcacaagctttgagcgttggagagaaatttttagaacttgacattttgatggagaactcatcacaagaaacaccagtttatgtcatcactgaagggagtgagccccaatttttcaccaggttcttcacttgggactctgcaaaatcagccatgcatggaaactcatttgaaaggaggttatctatagtgaaggatggagtaaaaccaaaattagatcgctccagaagtatgtcgttcagtcctgaccgtgtaagagtcagaggaagatccccagcattcaatgcattagctgctaactttgagaacccaaatgctcggaatctatcaacacctccaccagctatcagaaaaccatctccgaagtccccctcttcagatcctacaaagccacctcaacgagctgcttcaattgctgcaatttctgcttctttcgagcgacctaggccaactctgataccaaagtcaatcaaagcgagtcctgatgtaaacaagccccaagttgaagcaagcaagcctaaaccagaggcaaatggcaaggatagtaccccttcaaaggatagcccaacagtaactccaacgatacaggaagatctgaaggagggacagccagaaaacgaggaagggctcccagtgtatccatacgaacgcttgaggacatcttccatcaatcctgtgacagacattgatgtgactaagcgtgagacatatctatctgcggcggagttcagggaaaggtttgggatgacaaaggaagcttttgcgaagctaccaaagtggaagcagaataggttaaagattgcccttcagctgttttaaaatctcttactgtgaaacgagacagtgtttccaacagttagcgcaagaacagtatgacgagactgattccgaaggtagaaattatgtttaccagtcacttttgtggtctcttgcggggttgcagtggtatgcaacattggttgtaagtgtatcctggctttgggtcaagggacccccttgtcaggtatgggcggacgcaggatcagtgaatttttagctgctcctgcttccaaatatgtgttgttgttcattgacaatttttcatgttgtgttggattgctgcattagcggtccagttactccatttttttttcaccattcctaggtcaagggtttggttgtgagcttgattcttccccccaccttaaagcctcatatttgtttgattttttgaactagagggttccctgagacaataagggagacatatatggtgtaacttcggcaacagaaaatggtgtacaaaagagtttgttgaagaaaaaaaaaaaaaaaaaaaa

SEQ ID NO: 91410 - DNA, 288 bp, Oryza sativa
  Clone ID: PAT_MRT4530_8998C.1
tttggtgaggtttttttttttttttctggtgcggcgccggttaatgttttctttttctgggaaaacaaaacccgctcacagggctttcgataccggaataatgttttaatcgcctcaccggcaaatggagaacacccccattgcttttagaagaaagttcactgggttcagaacacaagtcccaaaattttaaaagggcgaacggatattattaaaggctgcaaggggtggtttccacaggaacgtgacatcaaagcccataggcttaacgataacggcgaaaagaga

SEQ ID NO: 91411 - DNA, 414 bp, Oryza sativa
  Clone ID: PAT_MRT4530_89990C.1
gacaacggccgcaaacaacctgcgtgaaatacaaatccactgtagagctcacaccattttatgtcaatactattatgacgcacgattgaatcggacttttgtgaaaacaactgaagacacatctcataactgttcggtgccctgaatagatgcataattaaagagggtcataccgggggaaggacgccaccgccgatctatctttaactttattgctagctacctgcttccaagccggccacttctgacgaatttatcagatcatgacgtggaacaccaacacttgctggcgatggataaaaacgtcgtgatggtactaatgcgtgccatccagtaaagagggtggcacagtgccacccggctgattcttaggccgaacgccgaacatgtgaggtggaaatcatgagattgaca

SEQ ID NO: 91412 - DNA, 388 bp, Oryza sativa
  Clone ID: PAT_MRT4530_89991C.1
ttccctcctcatccaccactgcgccgccttcctcttgcaccactagcctctttcccctttacttctccgccgacggcagctagcacatctcctctccgatcgacgagatcaagctctcttccctctccaccgagctcgagccctatccccgcttcactgacgagagggactacggcagtgatgaagtgaggtcaccaccgcatacaaccacatgctcgccagagggtgatgagatcggtggtagcgaggtctaagtgctgaaggccgacgaggcccatgcgataaaaggacatgaagtcagcctttccccttaatatcgccgtcgttatctcaaatttggtcaagggtgggcaccctgatctggatctggccccccatttctttaacc

SEQ ID NO: 91413 - DNA, 343 bp, Oryza sativa
  unsure (1)..(343): unsure at all n locations
  Clone ID: PAT_MRT4530_89992C.1
ctgtatctgnaatnagcatncagcaaaggagaggaaggagatttttctcctttatgccttcgaggagtatttggtagtggatttagcagatttgtttattctttgcttagttcctcgacatgtgaccttttttgtttcatgtagagtttgctcaaatatgtaccagcagctcaccagtagagcttctttccactgaacaatgtttgtaaagcagctcactgcctcactcgaaatgaaatagtttgagtgctttgtnntnaaaaaaaaaaaaaaaaaaaaaaaaaaaaataaaaaaaaaaaataaaaaaaaaaaaananaaaaaaaaaaaaaaaaaattaaaaa

SEQ ID NO: 91414 - DNA, 2361 bp, Oryza sativa
  Clone ID: PAT_MRT4530_89993C.1
atgcagcagcagcagcaggcgatggaggaggatggggtgaaggaggaagaagaggagtactacttggaggaggaggacgagggggaggaggagactcggcccccgcttcagcagcagcagcaggtggggttggggcggcgggggcgggcgcgggaggagaaggagcggacgaagctgcgggagcggcagcggcgggcgatcacggcgcggatcctggcggggctccggcggcacggcaactacaacctgcgagtgcgcgccgacatcaacgaggtcatcgcggcgctcgcccgcgaggccggctgggtcgtcctccccgacggcaccaccttcccctcctcctcctcctccgtttcccagccgccacccacgcagcagcagcttcaggtgcccgatctgctgcccccgcgcccaccggagcgcgacttcgccggaacgccatacgtccccgtctatgtcatgctcccgcttggagtggtcaatggtaatggcgaggtggtcgacgccgacgtcttggtgggccagcttcgggtactcaaggctgccggcgtcgatggggtcatggtcgattgctggtgggggaatgtcgaggcccacaggccgcaggagtacaattggaccggttacaagcgactcttccatatgatcagggagctcaagctcaagctgcaggtggtcatgtcattccatgagtgtggaggcaatgttggagatgatgtgtctattcctctcccacattgggtaacagagatcggaagaagcaatccagatatctacttcaccgacagggctggcaggcgtaacacggagtgcctttcatggggcattgataaagaaagggttcttcaaggacggacaggggtcgaggtatactttgactacatgagaagcttccgagtagaatttgatgaatattttgaggatggtatcatttcagaaattgagattgggctaggggcttgtggagagttgaggtatccatcttatccagcaaaacatgggtggaaataccctggcattggagaatttcagtgctacgacagatacttacagaaaagtttaagaagagctgcagaagcacgaggacataccatatgggcaagagcgccagacagtgcaggccattataattctgagccaaatctgactggatttttctctgacggaggagattatgatagctactatggtcgttttttcctcaattggtattcccaggtgttggtggatcatgctgaccgtgtattgatgttagccaggttggcttttgaaggttcagatattgctgttaaggtttcaggtgtacactggtggtacaaaactgccagtcatgctgctgaattgactgctgggttttataacccatgcaaccgtgatggttatgcctcaattgctgctgtcctgaaaaaacatggtgcagctttgaactttacatgtgttgaactgcgcactatggatcagcatgaggtatttcctgaggcctttgcagatccagagggccttgtatggcaggtgctaaatgctgcatgggatgctggcataccagtagctagtgagaatgctctgccttgctacgatagagatggctttaacaaaattttggagaatgcaaagccactgaatgatccagatgggaggcatttactaggattcacgtacctgaggctcaccaaagtcctcttcgagagagctaattttttggaatttgagcgtttcgttaagagaatgcatggtgaagcagttctcgatctacaggtataagttgtgttcaatcagctgatatttgaacatatatatacatgccattgtaattggcataggccttatggcttatgatgggggaacagagatgccatttttgtttcgtaggttgttgtagtataccatcagcagatttttgaactatagagggtttggctccatggtgtaaagcatacccttggcaaagagttgtcatgcagaaaattgatggtttcattcggaatgaggttggaagcaggtgtatttctttcgatgcggcagacatatttgatttgtcatgagatgaggattgggtgagcaggtggtatccttctgaaagatttgaggctgtattgaagagaatgtgctgatgcatgtttatcatggagcaagcgacattaatggagttagcaaaggttctcgcggtgtatgtgtttgtatttgttggtggaatgtcactcgaggatcttggctgtatacaatacatacatgtgcttttttttgggtcttttctacagtgtatgagaaatgcatgtttcttactgtcaaaacattgcattgctcatcagtaccgagaatttctctgagttttccccatattttacatgaatattttataac

SEQ ID NO: 91415 - DNA, 714 bp, Oryza sativa
  Clone ID: PAT_MRT4530_89994C.1
cgggagggcggcgaaggtgggtggaaaggagaagcaggccgcccgcggcgacttagaaaccacgaggcggaaccactcgaggagagggatgagggagagcgcgtcgccgaggaggtcgcctcacgccgtcacccccctactcggccgtccaccgagaggagaagtgccatgatccggccgccaccaccgcttcccctcgtcctccctctgccacgagccgtcgccgccctcgtccgcccgccctctcaccgctgccggctccccacgtcctcccactgccacaagccgccaccgccctcccgcctgccggcccccatccctcatccgccgctcgcaccgccgccggctcccctcgtcctcccactgccacaagccgtcgctgccttcccgcccgccggcccccatccctcatccgccgctcgcaccgccgccggctcccctcgtcctcccactgccacgaggcgctgccctcacccgcccgccggttgcggtgtcgaagacctggtcggcggcggccgagctcgccgtaccccaccgcgtgtgcctcccgccaccgccgctgtggtctcctccgtcttcgccgcagtggagctcagcccgggcgccgccgccgctcgcaggccgccgcgcctccgccgctcgccgccgtctccaccgctcgccgccgtcgccgcccgccgcgggagagagagagggagcggtggggtgagataa

SEQ ID NO: 91416 - DNA, 373 bp, Oryza sativa
  Clone ID: PAT_MRT4530_89995C.1
cgtggtgatacccactgatctcaccactcctaggggggctgcttgcaacaagcgggccgtcgaagcaaccaaggatatgaccgacagcgacacagtacagcacctccgcgcgcccgcagacgaggccccatactacggagctagagcacaaacggagaacgttcgcctacacgactctctcagaaacgtgagccaggccgcaaccgagggcccgacgatgggtagccaatgtatcaactgagctgacgctgggagtgattgactaacgacatgagaggatgcaatgccacagccagaccatgggttagatcaagactcacaccaagttggacccactcggcacctgagtcaagaacacggggggggggaacta

SEQ ID NO: 91417 - DNA, 384 bp, Oryza sativa
  Clone ID: PAT_MRT4530_89996C.1
atggccaccgccactccactgaggtgcgccgcctcccctcctgccggatctggtggagggaagggcgcggccaccgccgctgccgctgtcgcccggccagatctgagacagagaaagagaggggagctcgctgcctccgccaggcagccaccggctgcgggagcccgccgcctccgccgggcagccaccgagagagagaggggagctggggagggagagagacgtgagaaagagaggggagggagagagatgcgagagattgaggggaccgaggaagtagacaaggaccgagggagagatgcgtgtgcgggtgccggttctagcgtgtttaaaggtgccggttctacaatttttcatcatagggaggtggggaaagctttatag

SEQ ID NO: 91418 - DNA, 135 bp, Oryza sativa
  Clone ID: PAT_MRT4530_89997C.1
atggagccaacggaggcgccgcaggaggtaggcgtggagccaacggtgaaggagcggctgcagagcatgctggagcgcatcgtgttgcagtcgcaggtgcaacgtggggatggggagctgctcgtccaggtgtag

SEQ ID NO: 91419 - DNA, 333 bp, Oryza sativa
  unsure (1)..(333): unsure at all n locations
  Clone ID: PAT_MRT4530_89998C.1
acccgctctctttgtccccccctctccaccaaaaanggagggctttatatatctgggggccttacaacctcaacatgtagacatccatactcctttccctcaccacctcagcccgtcagggaagcttgtgcagatcgatcacactctcaccggggtcggatccggccagacgtccctcgggatcaaacctgctaatggtgtatttatcgccactgagaagaaattgccttctattttagccgttgaaacatctactgcataagattcagctcattgactcctaacattggatctggtctacagtgggatgggtcctgatctccctgtcctttg

SEQ ID NO: 91420 - DNA, 330 bp, Oryza sativa
  unsure (1)..(330): unsure at all n locations
  Clone ID: PAT_MRT4530_89999C.1
actcccccttgatgacattagctcgtggctgaggtgactagttgaatctccatggctgtaaaatgagaatgttcatttgtttaaaaaaaaaaaaaaaagtcagaaaaaaaaaaaaagcaactccacgagaaacaagaaagcgagaagccatcagggagctcgccgtcgctgcgtggggctcccnggagtagggggcgctcggggagcctcccgagatccgccgctcggcgccgccgccgtcctccgggcggagctcccgaagctcgcccccctcgcgcgccngtgggcgttggcggnncccncggncggncngntccggggctgcgcctc

SEQ ID NO: 91421 - DNA, 497 bp, Oryza sativa
  Clone ID: PAT_MRT4530_8999C.1
tctggacagccctggagctccaccgcggtggcggccgctctaaactagtggatcccccgggctgcagttttttttttttttttttttttttttttacaaccaagtatagttttaggtttcgacggacataaaaccatacagaatttaaaatttattcccggaaaaggcttcatcttactccttccctgggggcaaaacacaattcccctgtttctgcagggctccataaggagggcccgccctaattgggtggcttttgcattttaaagggatcagggtccaattcccccggggccctttggggaaccctttccaaaagggaatcccccccccaaccccccccctgcgcaaaaaaaaaaaaaaaaattctctccaaaaatcttccgggccccaaaaattcggggggggaaaaaatggggttttttttcctccccctaaaaaataaatttttagggggggcccttttgggcactctcttataataaatttggcgcccc

SEQ ID NO: 91422 - DNA, 1122 bp, Oryza sativa
  Clone ID: PAT_MRT4530_899C.1
agagcaaactgacatgacagttactacaataattcttggctagtatgaattatggtccagttgatcaaatctgattctagatcagaatggttcatacttaaaaaagacaggattcaaccaaaaaaaattagtacaggttttcgataccaaaatttgttccccttcgttaacctttgtgcagcataacattttcagccttcaagcattgccttggctgcatcaattagtgcaggtctaaagctatcagatgctcgaccaagtacggtatagccttccttgtcctcaatggcaacatcagcaccatgtctaactagcagaagagcaaccgctttgtcctcagaaataacagcatgcattagtggtgtttgtcctgttttgtcaactgcatcaacatcagccccctcctcaattaggaattcacacagttcagcatttcctgtactggcagctctatgtaagggtgtgcacccaaacttatctttcttgttgacatttgcactgtgcgctattagtgtttctgctatattaagccgtcctttactggcagcataatgaagagcagtccggccagcatcggttgtcaaatcaacattagcaccttgatcgagcaggatggagatgatctcagcttttccgctgctcgccgccgtgtggatcggcgcccacccctcctcgtccttcccgttcacaacgctggccgccgcgtcgccgcccatcgcggcaagcactctcaccacctgggcgtggccggaggcggcggcgacgtggaggagggaccggccgtcctcatcgcggagggcgagcgcggcggcgaggtcggcgggggagagggaggagaaggccgcggcgtccccggactccgccgcgctgaagagctccttctccgaatgtctcccaccgcccgcggcggcgctggcggcggcgccgtcgatgtccattgtagcagacatcgtgcttaggcaaaagcgaaggcgcagaagagaaatacgcttcgagcctcaggtttgcgtttccggacgcgtggggctcatctcgtgcgcgtctcaaatgagccacacacggctctaaagccacgtatcaggatcagaatcagatacggcaatgatacgataagcctcgtgc

SEQ ID NO: 91423 - DNA, 1650 bp, Oryza sativa
  Clone ID: PAT_MRT4530_89C.1
ttaagcccggccggacgatcgtcggcgggaggagaggccgcagccatggctaccgccttcccctacagctttacaagaaccaaacacctcactctctgcccgcccagcagccacggcggggatgcggccgatcaccggccccttccatggatcctcctcgacgtccgcgcctacatcgccgaccgccggaactccaccaccgccaccatcgtcctcagcaacggccgcaaaatccagatcacattctgcatcgcgccgccgccgctcgtctcctacatctgcgcctggtcccctgccaccgaccccgccgtgttcttcgccaaggagcccgccgtcgggttcgtcgacgccgacctcgtcttcctccgcgtccatagcgatcaaatctacgacctcatctaccatgccagctctcgcccatcgctcaagctcatccacaacccctacagcccctacaacccataccactaccttcgtcgtatcgacaacgttgtcgtcctccccgaccgccgccgccatgccgccggcgctgatgacgacgaccacgatggcagcggccgcttctacgttagctcgctcgatcgggatcgccgcttcgatcttggccacttcaagctctgcctctacgacgaagacgattccatggactgcaaatggagcaacaccatccttcttcttgaccgactccgcgatccgccagacaaagatatcgtgctccatttaacagagaaggtacttatcctggatgatgaacaaccactagtggccttcgttgatccctggcggggcatggtcatctgcaacgtgctcgacaacagcagcacacctgggggaagcagctacatgccgatgccatccgagatcttcaacatccacaacacctacacttcatccatttcccgtgacattgctatcgtcaatggccgtctcaccgttgtcaggctgtgcctttacctcgattcagatgatgattcagacgatgatgatgacgacgattgctgcgcttgggatctgaccacatggagcaagccagtcacctgtttggatgatgagtggcgtgaggacttgaagatcaagtccagtgacgtctcgattgacgacagcactcggaacgcctgcctcctgcccaagctggatgatggttgcccaacaacggagacgctccagttagctcatccaacactcagcttggtggacgctcacattgtttacatcatgggtaaggttgacgtctccgatgagaaggcgctggtgctcaccgttgacatggcaaacaagaggctacaagaggtatctatgtatgacgccgaaagaattgtaaacgattttgattatgcctacacgcactctaccatctcccagtatttcactacagcagctgcagtgctagctagacaagttgaggccgtaattagtgtgaacctcgccaaactctttattacccatctaatcatggaagccgtcggtgtaaagggaagcctgaagagacctttgaagtttcatattcaatatcctcacaagcggttgggtgaaacaatcaataggagcgatcctatggacttgcatgagccattgcaactggatgctggatctgacatgggaactacagacggaactgaaggcagcgataatcctatggacttggaatag

SEQ ID NO: 91424 - DNA, 237 bp, Oryza sativa
  Clone ID: PAT_MRT4530_8C.1
atggagcttgacatggtgaggcagctgggttgcgtcgggcctagagcaggaggttgcgagtatgcgaggaagatggctgggcccggagcggtggtgtcgctctcaggcgcgcgcgcagaggggcgcacgaagaagaggagaggaagaaggcaagggaagaagagggagaagggtgagaagaagaaggaagagaagaagaagaagaggagaaggagaaaggagtattatcactggtag

SEQ ID NO: 91425 - DNA, 1177 bp, Oryza sativa
  Clone ID: PAT_MRT4530_90000C.1
atggccaccattactgctgctagtcccagacccagtgctgctcctgcagccatggaagagaccagcaaggcgatgcctactagcgagtggcctgccgccagcggcggcaatgcgtcgccgccggcgaggtcccggccgtcgctgctggtcatattcagcgcgtgcctcgtcctcctcggcgccggcgggccgctcctcctccgcgtctacttcgtgcacggcgggacccggctgtggctgtccgccacgctccagatctccggctggccgctgctgctgccgccgctgtgcgtgtcgctctaccgcggccgcaggcacgggatcggcaacctcctcctcccgcggcgcctcgtcggcgccgccgccgtgctcggcgggctgtacgccgtgtcgtgcttcgtgtacgcgctggggtcgcaggcgctgccgctgtccacgtcgtcgctgctgctggcgacgcagctggccttcaccgccgtgttcgcgttcctcttcgtgggcctccggttcacgccgttctcggccaacgccgtcgtgctgctcactgtgagggagcgtgtccgaggaaggcggtgtaagacggtgcgggacccgcatgaccgtggagggtggcacctagtcgacgtccagcaagtggtcactctacagtcgcaggattgggatatgatggagtgtggcggcgttctaggtggagaattgccgcctacgagcccctacgcgacggtgatgcagatgcaggcggtgatgggcgcggcggacaccgccggtgtgcgtgctcggcatggcgatcaagggcgctttccaggcggtggcgcgggaagcggcggcgttcgggctcggcgcggccaactactacctcgtcctcgcctgggacgccgtgtcgtggcagctgctcaacctgggcatcatggggctcatcacctgcgcgtcgtcgctgctcgccggcatcatgatcgccgtgctcctgccgctctcgcaggtcctcgccgtcatcttcctccacgagaagttcgacgggacgaagggcatcgcgctcgtgctctcgctctggggattcgcctcctacctctacggcgagaaggcgcagaagaagaaggaggcgcagaagatgcgcgagcgcgagcaggaggtggcgctggcacagaagaccgcagacgtggagtcagcggcgccttag

SEQ ID NO: 91426 - DNA, 360 bp, Oryza sativa
  Clone ID: PAT_MRT4530_90001C.1
atggatggtgccgacgagttcgacgcggaccagctccaggaggaggcggtgggttccgtcggcggggcagcgtctgccccagtgtcggaaggctgtcgcgtgggcgtcggcatccccatccggcgggaagctcacggcggcggtggtggcagcacactcaccggagaagttccagggggaggcggcgttttgggagtcgatcccgtgcgcggcggcgccttgtccaaaatggtggtagtgctgaagaggaacgaaggcggcgacagtagcagtcggtggcaattttctcggggggtgcggaggagcggtgaggtgcggcaggctctggtgctcggtggtcggcagagggggcgacggtag

SEQ ID NO: 91427 - DNA, 280 bp, Oryza sativa
  unsure (1)..(280): unsure at all n locations
  Clone ID: PAT_MRT4530_90002C.1
tcagcctccaagtccaagtaggctatagccacgagctcncagctgcttggtcacagagaagcggatgcttgcttgagccactgtggatgcatggtgatggtgctgcaggtgtttgggggtgtgtgtgttttaactttagccgtggatgtcaactaggaaggcgtttttaattactttcagttgctgaattctggattctctgctcactggtatgtagtcttaacatgatatccttgtaatggatagccaggttaattggaggtacaaaaaaaaaaaaaaa

SEQ ID NO: 91428 - DNA, 1538 bp, Oryza sativa
  Clone ID: PAT_MRT4530_90003C.1
gaagaattgagaatccagataagtgctgttgttcgagttcgaataaactctaatacaaatgatattcattgtacaaaatcgagtgaagggcaaagcaccttagtcaaaaagtcaaaactggtcaacactgactccagtgttgtgtgtcctatctatgcgacttgctgcttcttgcttttctttttcattcctttgcttttttcaccagatttttttctctttgaggtgtgcatttcagaatcactgtcatcatggtcgagcattctagtttcgtcttcatccatttcactcgttctattcttcttttcctttctttcctttctaacttctgccccaactggatctggctgcttggatttagtctcctcgagttcttcagtggagaaatgtgaatcaataaccacagctgtcaggtgctgcttgaggaagaccgcagagagcagctgccttgtatttgtgtcccagatgcgtaagtaactgtccagtccacaagatgctatcaaaggtagctctggatgtctaactatagatctaatacttccactgcatttaccagcaaagcaaccaagtagttttcctgggaaaagggtgcaagctaaagttaattctgttctcatgtcaaaggaagcaaggtcccctcttcctgtaccaatgtagacagcatgtccatttgggtcctcagcaactgccttgattggtgactccctaaaatcaactgaaattacaggccttctttgggaagcagtgtcatataagcgaacctgatgattatttgtgcaggctacaattttacgatggtcatccttgcacaaaaaagttccagcagtgaaccaaggtgcagtgaatatctgaagactgttgcctcgaggagacttggcagaccatatcttactacaagatgtgatatcccacaaattgacttctattcctttccctccgaacatcgcgtagctttcaccagcatccactgaagaaaattgcactgtacccgaattgctcacatcccatgagcttgatggcccaacagccatgtccgaggatgcattttcctttgcgacagacttgacatatgctttccccttctctgtacaagcaagaaatgtgcctaacatggatgagtccagcgcatgtcttctgaagagatgcagcgtggctaaggggtcctcttctgcagaactatcagccggtgccgcccgcccagcagcagcgttgacgcctgcgagagtctccccattcagtggattcagcagctcaaccacgccgttcttccgcgccacggccaaaaccgcggggaggaataacgggaggtcgcgaacactcacggggtcgacggcgcggtcggcgagcgaggcggcgaggacggcgcggggcgcgtcgggcgcgccccacgtctcgacgaccttggcgacgcccggccggcttcgtgcgggcctccacgacagatatggggggtctcctaagtatgcaataccggtcacccgaggtcccagggcaggatttctccccgatttgtccgacgtggcagcggttttgtccat

SEQ ID NO: 91429 - DNA, 432 bp, Oryza sativa
  Clone ID: PAT_MRT4530_90004C.1
atgcctactaccccctctcatcaaaatccaacggcatatcatcttctcgcgctcaactccggcggcaatcaaatcacgcgctcggcgacgacggcgatgctacgggagctccaggcgctgtgcagggtccacggcctccccaccggtggctccagcgccgacctcgccgaccgcctcgccgctctcgtcatcctcccggggcgtggtgatgcggcggcggcggcggagatgaccgcggcgaggtggggtgggaagggctgcttgaagcggcccggtggcggcgggggatctgggccgacgaagaaggtgaagtttattctagaggaggaagaggcggcggcggtggcggcggcggcggcggatgccgggatggaggtgaggcagagaagccagaggctggctgggaatccgccgggggatgcctcctgctag

SEQ ID NO: 91430 - DNA, 1928 bp, Oryza sativa
  Clone ID: PAT_MRT4530_90005C.1
tttttttttttttttttttttttttttttttttttttatataaaaaatactactatctgattaggaaataatttttcctttgaaacaattcgtagtacatcaaacattatcaatatcggacacataatccattgaaacatatttacagagcattatatacatcatcagtactctaattgaaatatatgatcctagatcattttcccgttaccatctagtaatcaaatctaaaccaaaatgtctcccaataaaacatttactcgaactgaaagatgaacgcgaccactaccctacagaaataaatcataaatgtattaaatgtatcatcaaccttgaaagactgcaaaattcagggtccggcggcatccatccgccactatttccgccgctcagcttcgcctggacgaagcagagtcaccgtcaccggccatccgccgtacccagtagtcggccaagaacgtcttggcggcgtcgaggctggggaagtagggcggctcgaggaacatctgcgccagggggtccatctcctccgccggcgagaacagcgcgcggttggtcgacgactccgcggtgcccatcaccgccgccacgagctgccggtacgcgaagaagaacctcctcaccgccgcctccacggcctggaacgcctgcagcagctccaccttgccggcctcctcgccctcgccgcgccgccggctgtggaacagcctcatggctgcctcctgcaccctcggcccgccgttggggtccacctcgacgccaagcacacatggcacacgcttcttgaggtccctcgtggcgttagcgacgtgcagcagcgccctggagcggaagcaggaggacgcgtcggagcccggtgccgcccgtattgcgagctggctcttgagccgcaggaagtcgtccgggtccatcagcaggtgcaggtcctcgacgtcggcgagcagcttccagacgcgttccaggatccagcagtcgctcgccgcggcctcccagtttcttgcttcgatccggttgtttaggcgggtgagaagctgtgaggccgcgcacagccaggactcgagtatctggtggatagtgaacagcgcctcgttctccttgttgcggtagccggtcttgggctccggcgcgatcttcgccttgagggcgtgcagctcgtgcggcctcacgacgcggtcgtactcgagcaccggcttgccggcgaggttgggctcgccgaggccgagggtgaacacgcagccctgcatctggctctcgatggcgtacttgatcctggccgccacggtctcggacttgtcccaagcggcgagccgcgggagcaggctggcctcgctgacctggcacaccaccgcggcggcgctaccgggaatcttccacacctcagacgcgctccgctcccgcgggagcacgcctttggacgcgctcagctcggccagcggcgggcactgctcgccctcgcagagcgcggccaccagctccacctcccttgccgcgagcgcctccagccgccgcgcgagctcgcggcggctggcgtagccccgcgggtcggagagcgcgacggagatgaagcggaaggtgatctccagcgcctgcagcgccggcttgacgaggccctcgtcggcccactccggacagcacctatccttccacagccttgcgagctccggaagccgcaggtactgctcgtactcctcgaccgccgtatcgtcctgcaccctcagaggcgcagccaccgcccccgacgacgacgaggaggacgcgcgctgcttatcttccggccgcaccggcgatacaggggacagcttgggcgttgccatctccgcgctccagttgagttgaactctccctcgatatgatcagcgtctagtttgaattttccaactgtatactccctccagttatcgatcgctaatcctcgcctgtcggttccg

SEQ ID NO: 91431 - DNA, 1470 bp, Oryza sativa
  Clone ID: PAT_MRT4530_90006C.1
atggacgacgacgacgactgccggcggcgagatgtcaccttgggcgacgaattcatggtgctgcagccggagaacggcggcgcgcgcagcctcgccgacctgctgctctcctgcaaggtcggcgagaacaaggccgtgcgctgcggccgccccggcgccgaggtggcgctgccgtggcaccggtggatcatcgccgtctccctcctcgcgcagatgctgctccggttgtccaagggggtcatggccaaggtcggccgcgccgtcgagtactggatgaacctcgtcagcgagaatgacaacgtcctcggcctcatcagaaatgctctgcatgggaaggtgaaaacgccggacagaaattctcccaactacagatcgttcattggacttcttgacacaaggatcgatctggacgagaagatcaagccaggtgatagcaattaccacgcagctctctgcatcatggcagcgaaattggcctacgagaacgaactcgtcataaaggacgccgtggaaaagaattggaagatgaccttcttagagttcttcaactgttggaacgatttccagaatgattacacgacccaggcgttcatgttcgccgacaagccggaggacgccgagctcgtcgtggtggcgttccgcggcacgcagccgttcgacatggagcagtggagcaccgacgtcgacatctcgtggtacgagatcccgggtgtgggcaaggtccatggcggcttcatgaaggcgctcgggctgcagaacaacgccgccgccggcaagaaacccagctggccggcggagatcgcgccgccgtcggcggccaagaactccgagaagacgaagagcttcgcctactacgccatccgcgcccgcctgcgcgcgttcctcgccgccaacccgcgcgccaggctcgtcgtgacggggcacagcctcggcggcgcgcttgccgcgctgttcccggtggtcctggcgctgcacggcggcgaggccgacgccgcggcgctcggcaggctggacggcgtgtacacctacgggcagccccgcgtcggcgacgcggcgctcggcgagtgggtcgcggcggcgagctcactggagggcaagcacctccggttcgtgtactgcaacgacgtcgtgccccgggtgccctacgacgacgccgcgttcctgttcaggcacttcggccgctgcgtctacttcgacgccgcgtacagggcgagggccatggcggaggagccgaacaagaactacttctcgccggcgttcgcgttggccaagcacgcgaacgcggcgtgggagctggcgcgagggctcgccatcgggcgcgtggcagggggggagtacgcggaagggtgggcgatgcgggcggcgagggtggtggggctggtgttccccggcttgccgccgcacgcgccgcaggactacgtgaacgccaccaggctcgccggcgcctcgcttcgcaagctgctagactag

SEQ ID NO: 91432 - DNA, 1224 bp, Oryza sativa
  Clone ID: PAT_MRT4530_90007C.1
atggcatccatgtctaccattgtaccactatgtctaagcctcctcctcttctttcaagtatcgatcgcacaattttcatttggtggaggcccactatatagctcacgtgggtttaggggtgactcagtgagccaacaccaatgtcgttttgagcatctcgccgctctaaaggtgactcaccgagacagatctgaagccgactttattgagtactacaacaccgaggtacgcaacgagttccgttgtgctggagtgagtgtgaggcgcttggtcattgagagtaggggcttggctctgcctgtgtatgccaatgctcacaagcttctctacatcatccaaggtcatggagtgtttgggatggcactaccaggctgcccggagacatttcaatcggtgcagtatgcatttgagcagtctagcacccaaaaattgagcgatgagcaccagcagcttcacaagttccgccaaggggatgtcattgcagtgccagctggagtggcccattggttgtacaacaacggtgattctcctatggttgcttttttggtcatcgactttggaaacaatgctaaccagcttgatccaataccaagggaatttttcttggccggaaagcctacgagctggcagcaagagcagtattcgtaccaggctgaacaacaaagcgacaatcaaaacatctttgctggattcaatccagatttacttggtgaggccctaggcaatgctttgctcactccacattggacagtgaacgcgcatatagtgatgtatgtgactgctggtcaagggcgcatccaggtggttgatcaccgtggtaggactgtctttgatggtgagcttcgccaacaacaaatcctgctaatcccacagaactttgcagttgcagtgaaggcacgccaggaaggattttcctgggtgtccttcaagactagccacaatgccatagacagtcagatcgctggaaagagatccattcttcgtgctttgccagttgatgtggtcgctaaagcctacctactttcaagggaggagtctaggagcttgaagttcaatcgtggtgatgagatggctgtcttttcaccaaggcttcaccaacaattgtacgctgagtggcagaacagcaaataattaacccaatgtgtattctatcctatgttagtgatttgaataaagtaaaggagggatcaacacctctttttcaataaaaaaaaaaaaaaaaaa

SEQ ID NO: 91433 - DNA, 741 bp, Oryza sativa
  Clone ID: PAT_MRT4530_90008C.1
atgtcggtctattacgagacgctgtgcccgttctgctccggcttcgtcgtcaacgatctcgcgaggatcttccgggacggcctctcccccgtcgttgacctccgcctcgtccccttcggcaatggccgcgtctcgcccgacggatcgattacctgccagcatggagaggaggaatgccaactcaatgcgatagaagcttgcgtgatcagactttggcctgacgcggaacagcatttccctttcattaattgcattgagcatttagcgctgactcaaaaatggaacgcgtggcaatcttgctttcaagaaactggtctagcctctcaacctgttatggactgctataactcagggtacggcacacagcttcaactccagtatgctgcagagacgaatgcccttcagcctcctcatcagtttgtaccctgggtgaccgtaaacgggcgcccccttggtgatgattacacaaattttgaagcctacatctgcagagcttatgatggtgaacttcctgaggcatgcagggggaaacacctcgccattgctcaacagacaagagcaagccgaggaggcaagatacacaagcctgatcgatgtccatgttcttgtaatgcagagggatccacaaaagttggccgttctacttgccttctgcatcgcggtgtggttctgacctctctggagcgccatttcgtcgagaaaactcaaacagttcaagatcagatgaagctaaccaagtag

SEQ ID NO: 91434 - DNA, 119 bp, Oryza sativa
  Clone ID: PAT_MRT4530_90009C.1
agcaatgtccttaccgagacttgaagccaagcaacctactttggaatgcaaatggtgacctcaaaattggtgattttggactggttcgtaccacctcagaaaccgattttttgactgag

SEQ ID NO: 91435 - DNA, 378 bp, Oryza sativa
  Clone ID: PAT_MRT4530_9000C.1
ttttgtttttttatttttttggggagaacaaatccgagtcggagactcggattccgattaatacatgtgagactcggattccgattaatacatgccaactattttttttctcccttgtaggtttgcaggggatgaagatgcaacatactgccattggcacttgtgtgttcaaggaacagtgcaaatcaactcgctcaggtaactaactgttcaaacgctaggtctttgattctctcgtcaatcctgataattgcagattttgcaaaattttatcagatgatcagctggtgcagaattgtaagggttgaactttagtttaccctcataccctgtctggtggcattaagggggcatcccaggggagaaggccttgaactt

SEQ ID NO: 91436 - DNA, 251 bp, Oryza sativa
  Clone ID: PAT_MRT4530_90010C.1
cgactacttggggatggcgcgcccaacaacaccgtgggggagtggcatcctcggcgcatgtccacaccaccaccaccggccgtctgaggtgcgcctgtgcaccaccgacgaggagaacaaggcggcggcggctcgcggtggcggtgcgggtgcgggtgcgggtgcgggcgtcggcgtcggaggcgatggcgacggagaagctcggcgtccgtgtggagcgcaacccgcccgagtcccgcccttccgagctc

SEQ ID NO: 91437 - DNA, 750 bp, Oryza sativa
  Clone ID: PAT_MRT4530_90011C.1
atggttaggtatgagagggttccatatttctgtttcatatgtgggttcataggccactctgacagagactgtgttaagaaggtagctaataatgatgcgcccttccaatattctgctgagctacgctgctcgcctttgaagccatttgagaagaaggtgagcactgttaaggggacagaggcttcgactgcttctcacaggttgtcgttccgcaaggctggtagtgcaagctcatcttcttcacggagatatcagggggaacaatgggatgaagcagtccctccaagggtggacacacattacggctttgatgctcaagagaaagtgggagatgaaacacttgatgaacagttagctagatcgacaaaactgaagatgggatccatgtccgggttgtcgtcggcgaagcagcagatggttgacatgatcccggctattgcgaatttacatcaggcagcttcttttggggatgtttcttcagaagacactctcagtgtccataagagacgatccacagaacaactcgggaacaagaagtcagggaaagtccaacaagccttgctgcagcatgtgttggaagcagaggaagacatgaagaagaaggaaggtgcagggctgcaaggaagagaactgaagcgtttcaagaagacagctgcggacggtatgaatgtgggagaattggaagtgaccagcgccggggctgctggtacactggcaggtcctatgttgggatcccgccaggaacaatga

SEQ ID NO: 91438 - DNA, 690 bp, Oryza sativa
  Clone ID: PAT_MRT4530_90012C.1
atgcgcaacattctagactccaatgggaaccttgaagatgtccagccacgcaacatcctaatatggggaataccaagtatactgtataccactgaacaattcccagacactacagcaactccaacttttcaaaatagagaatcattgatggggaaccgatcgctcaccaagtatggctcggagtcggagcggctgctccacgcggcggtgcggcccccgtcatgggtggagcggcgaattcgagatcgcggcgggtctcgtggacgcaagaggattctggaggaggggagcgagggggtccgtcagggcagaggcggaagcggaggcatggcctcccccgccgcgacgggcatcgccgccgtgagtgcgccggcagccggcggggacgcggggtctcgggaaagagaagggaaaccgatgggattgtgtgcgctcagcgaggccgcatgtctggcccaaaataaaaagcccaggaacgagaacgaagcagaggccaaccggagagggcggagacgaatcgccggcccctcctctcgccggcgggcggccgccaggccgggaggtcggccggcgacgcgccacggcgaccaacctgaggcggcggtagaaacgctgtttccgccggcagcgagggaggggcggggcggggctctccccccggatgccgccgtgcggggaatgattccgtag

SEQ ID NO: 91439 - DNA, 1374 bp, Oryza sativa
  Clone ID: PAT_MRT4530_90013C.1
atgtccttacacggctggagtaagaggaaatgcaagaatgtgggcagagaaattgagaaatgtcgaaaggagctagctgccctactggaatcaaactcggatagtttagcgattcggggagccacggataggctaaatgaacttctatacagggaagagatgttatggctccagcggtcgaggataaattggcttaaagaaggtgaccgtaatacacggttttttcatagtagggctgtatggcgtgcaaagaaaaacaaaatcaccaagcttcgggatgccaatggagttgttcatagttcgacaaaacttatccaagggaaagtcacggcagcaatgaatgaggagttatgtaaggatttttcggacgatgaaattgcaacagcagtttttcagattggtccgctcaaagcgcctggtcctgatgggtttcctgcacgggtttatcagtggaattggggtcttttgaaggatgatatcaagtcatccccggtggaggtgagagaagctattaagcagaaactgcagatcgctaacaactcctttgaggataagtacctgggtttccccatcctagaaggaagaagaaacaaagattcggtctgtgaggacttaaacagattaactaggaacttttggtggggggctaccaatggggaaaggaagatacattgggggtcatgggacaacctgatcaaaccgaaaaaccaaggtggacttggttttagggatgttaagcttttcaatcaagcacttcttgcaagacaggcttggcatctcattgataaccctgaaagtctctgttctagggtcctcatggcaaagtacttccccaatgtttcccttgttgatacttggtttggaggcaatgcctctccggggtggaaggacatcgagtatggcccgtccttgctaaaagaaggaatcatctggcgcattggtaatgggagatgtgtgaggatctggagggatccatggctgccaaggaacttctcaaggagaccgatctcgcaaaagaacaactgcaggttaaaatgggtgtcagaccttactgcggatggtgtttggaatgaagagaaaatcaatgaacttttcctatcgatagatgctgaaataatttcaaaaattcgtatttcatctcgggaggaagatgttttccttgcgtggcatccagatgtacacggcaggttttcagtgaggagtgcatactatttggctctgaatctcgcgaaccagaatgtggctgggccgtcttcgggaggtggtaacaagtcttggcatctgatatggggatgtaatatcccccagaaggtgaaaatttttgcatggaagatagctaccaactcccttgctactttggttaacaaagcttaa

SEQ ID NO: 91440 - DNA, 1029 bp, Oryza sativa
  Clone ID: PAT_MRT4530_90014C.1
atggagatccagcagcagaagggggttggcaattccaaagttgtgaaggttgagaaggaggagtcatgggatctgttcatcaatcaagcaagcaacgaaggccgtcctgttgttgcccactttggggcttcatggtgtgtgacttcgctgtccatgaactacaagtttgaggagctagctcaaacacaccctgagatactgttcctctatgtggatgttgatgatatccagagtgtttcgtccaagcttggagtgaaggccatgccgacattttttctcatcaaggacaaggaggtggtgaacaagattgttggtgccaacccagatgaggtcaagaagatggtggacgcttctgctgagtccattggagttactgctcctcctgatatagtgcctcgcacgagtgcaaagccgacagccagcaccaccgccaaaaactcgaggcgagttggagttggagttggagctggatccctctcgccattgctctctccagcctcattcctcttcccctctcgtgctctctgctgcgagtgcggctgcggcgttgcatcgcatgctctttgtgaattgtgggtgagagagcggtggccggaagagctcgccggagaggaggaagaagaagaggaagacgacgagcttagctttgcaatgtgctgctacgtggggaaggcgaccaagatcttcctgtgcctcgcagcggcgctcatcgtcgtgggcctcgtcctgggcttcgggctggcccaccggacgtggggcgagcggaaggtccagccggactgccggtggcccgactgccagctccagccgacctacggcggcggtggcggcggcgaccctctcccggccacctccggcgccggcgccggcggcgtagacacgccgcccggtgtcccgctgacggagccggccgtggccgcgttccccggcgtcgcctctgcttcgtcggccgcgccgccgacggcgagcatgccgtaccttgggccgcccagcccgttcgcggtgggcctcgccccggcccatgggtga

SEQ ID NO: 91441 - DNA, 673 bp, Oryza sativa
  Clone ID: PAT_MRT4530_90015C.1
attaagaataaggcctagcacagctctagctcctaacgccaacttatctagagctggaactgtgccaaacggtataaattttctattttttggagtggagttggcagagctactccacaaatttgtactacgggggtggaggtgggcttttgctgctccacagctctactccaccccaaaagaccctctaccctttaattttttaatgtatttacacaaaaatgcctctaaagtaccccttcacacctcatcccccccgcggcgccctccgccccggcgtcggcggcgactggcgggggtgggcaatggtggcacggtgtggtgagcactggtggcctggcacgatgcgtgagagccgcggaccgatcggcagctgcaagcgcgccttccccgggaggcccacaggctgtggccggtcgctggcggcccttcaacggcggtagccgttcattggaagcttccggccggggcccaagggccaacaacgggggccctgggcttgcaccaacgtgagggggggaaaaaatctccgtgttcttcccctccctcttttgaagaaatatttctcctcgaggggaaggtggggggcccccgtaattttttcaaaatcagtggacgcaccacttctctattaagagagttttataaactttttataaaaacaaaaaaaaat

SEQ ID NO: 91442 - DNA, 4890 bp, Oryza sativa
  Clone ID: PAT_MRT4530_90016C.1
atggcggcgctgttagggctatggtggcgctcgggcaaccaggggtcaccggcggccgtaatccacgtgtggagtgggttttggatggggattattcccgatctgcttggtgtgtctgtggggctatcgcccacctttagttttcttcaggtgctatgggatccaggaaggaaacagtaccatgatcttgatcatcatcggactcgggcatactcctttcaggatcggcagattttaagatcaaatcagaaccggtacgactggacaggcagtgcagattggatctcgtcttggcatcagttttcccacgatcaatctatggagccgtctgctggtaggggcgatcaagggatcatcaaggcgatgattacccgcccgaagccgcaggacggtgacatgagtggtcagcaggggaaggaattagcattgttggggccgagttcgaaggattccacattgagggcgtcgtcgacagatgaagaaactctgaagttgaaagcaaaggaggttggggagatgagtcctcccccaacatgcaattcgagaagcggctacctgggtccggaggagttcccagagggagaggttctagaggatgatgaggatgcagtagaggttgatattgaggaagaagagatgaaacaggtggggcaattgacagtggtagccagtttttactctctacgcacccctaacctttttgctctgtttgaggatatggggagggcatggaggctgcgttcggatatgagctataagtcgcttcgggacaatttgttcatcatcacgtttggggctgaaggggactacaactttgtcctccagggaggtcgttggctacataaaggtgatgctttactagtagctgctttcgacggcttaacttgtccctcaaagattcctttaaaagtggttcctatctggattaggatttatgatctacctttggtgttgatgacaaaagctcgtggtgagttgtatggcagcaaatttggtcaggtcagggaagtggatgtggaagctgatgggaggaatagacatgatttcttccgtattcgggtagatctcctagtgaagaaacctcttaaatcgaagatagctatcaaaaacaaagttcaaggcaatgaggtaaccagacgcttcgatgttaggtatgagagggttccatatttctgtttcatatgtgggttcataggccactctgacagagactgtgttaagaaggtagctaataatgatgcgcccttccaatattctgctgagctacgctgctcgcctttgaagccatttgagaagaaggtgagcactgttaaggggacagaggcttcgactgcttctcacaggttgtcgttccgcaaggctggtagtgcaagctcatcttcttcacggagatatcagggggaacaatgggatgaagcagtccctccaagggtggacacacattacggctttgatgctcaagagaaagtgggagatgaaacacttgatgaacagttagctagtcagacagacaagttacatgtttcagatgaaaagggatagctacaggacatgatggctacaggatcgacaaaactgaagatgggatccatgtccgggttgtcgtcggcgaagcagcagatggttgacatgatcccggctattgcgaatttacatcaggcagcttcttttggggatgtttcttcagaagacactctcagtgtccataagagacgatccacagaacaactcgggaacaagaagtcagggaaagtccaacaagccttgctgcagcatgtgttggaagcagaggaagacatgaagaagaaggaaggtgcagggctgcaaggaagagaactgaagcgtttcaagaagacagctgcggacggtatgaatgtgggagaattggaagtgaccagcgccggggctgctggaacaatgagttgcctaagctgtaactgccgtggaattgggaacgccacgacagttcgcgacctatgtgccttggttcgcgaggcaggtcccaagttagtttttctttgtgagactagacaaaagatcgaaacggttcggcgtcttcgtaatagattaggtttaaaaagttgtgttggtctcagttctgatggtttgagtggaggtttagctctgttatgggatgagtcagtttttgtggatattaaaggaatgaatgaaaggtatattgatgcgtatgtgcgtttgtccccggatgctcctatatggcatgttacttttgtatatggtgaacctaaagttgagaacaaacatcacatgtggtctctgttgaacttgctgcgacaatcatctactttgccttggttggtgatgggcgattttaatgaaacactttggcagtttgaacacttctccaagaccccacggaatgaaagacagatgcaggcttttagggatgcccttcatatctgtgagctacatgatttgggtttcagggggctaccatatacgtatgacaataagagatagggagttaataatgtcagagtgcggctggatagggcggtggcagatgacaattggaggtccccatgttcggaccatgcccccattctgctgaaatttgcggttgaagagagccgacgggttaaacgcaaatgtctgcattatgaaatattctgggaaagagagaatgagctcccaaatattattgacgaggcctgggcagtagcaggtgataaaatgaacttatctgaggtccctgagcaaagtcatgatgtccttacacggctggatatggcgtgcaaagaaaaacaaaatcaccaagcttcgggatgccaatggagttgttcatagttcgacaaaagtaatggagaatatggccacacaatattttgaatgtataagagagatgaaatgcttgatcactctcctataacccagcttatccaagggaaagtcacggcagcaatgaatgaggagttatgtaaggatttttcggacgatgaaattgcaacagcagtttttcagattggtccgctcaaagcgcctggtcctgatgggtttcctgcacggttttatcagtggaattggggtcttttgaaggatgatatcagtaaggcagtgaaggttttctttgatactggggtcatgccaaatggagttaatgagatggctataatactcatccctaaaatagaagccaatggaactaaaaggctttagaccaatcagcctttgcaacattatctataaagttgtctccaaatgtctggtgaacaggttgagacctttgctggatgagttggtttctcaaagccagagcgcttttgtcccggggcgtatgataacggataatgcccttcttgcctttgaatgttttcacagtatccaaaagaatagtaatctgaataaaggagcttgcgcgtacaaactagacctctctaaggcttatgatcgagtggactagaaattcctggagcaggcgatatacaagttgggtttttcttgccggtgggttaactggatattggagtgtataaccacggtgaggtattcggttaaattcaatggaaccctgctatctacacttgctccttcgcatggacttcgtcagggagaccctttgtcaccctttctattcctgttcgtagccgatggtctatccttgctcctggatgataaagtggccaaaggagaattaacgcctgtgcatatctgtcaccgggcgccggggatatcgcacctcctgtttgcggatgatactttgctcttcttcaaagcaaacgtccaacaagcaaggatcatcaaaagagatatgcagcagcaacaagccaattgattaatcctgcaaaatgctcgattatgtttggagagtcatccccggtggaggtgagagaagctattaagcagaaactgcagatcgctaacaactcctttgaggataagtacctgggtttccccatcctagaaggaagaagaaacaaaggtaaattttagagtttacagaaaaagatctggaagagggtgctccaatggggagaaaacttgctgtcaagtggtgggacggaaattttcataaaatcggtattgcaggcaatccttgtttatgtcatggtgatttttcggctgccagattcggtctgtgaggacttaaacagattaactaggaacttttggtggggggctaccaatggggaaaggaagatacattgggggtcatgggacaacctgatcaaaccgaaaaaccaaggtggacttggttttagggatgttaagcttttcaatcaagcacttcttgcaagacaggcttggcatctcattgataaccctgaaagtctctgttctagggtcctcatggcaaagtacttccccaatgtttcccttgttgatacttggtttggaggcaatgcctctccggggtggaaggacatcgagtatggcccgtccttgctaaaagaaggaatcatctggcgcattggtaatgggagatgtgtgaggatctggagggatccatggctgccaaggaacttctcaaggagaccgatctcgcaaaagaacaactgcaggttaaaatgggtgtcagaccttactgcggatggtgtttggaatgaagagaaaatcaatgaacttttcctatcgatagatgctgaaataatttcaaaaattcgtatttcatctcgggaggaagatgttttccttgcgtggcatccagatgtacacggcaggttttcagtgaggagtgcatactatttggctctgaatctcgcgaaccagaatgtggctgggccgtcttcgggaggtggtaacaagtcttggcatctgatatggggatgtaatatcccccagaaggtgaaaatttttgcatggaagatagctaccaactcccttgctactttggttaacaaagcttaaaggaagctcgagcgtgttgccact

SEQ ID NO: 91443 - DNA, 12153 bp, Oryza sativa
  Clone ID: PAT_MRT4530_90017C.1
atggaggaggaggaagcggcgccggagtgtacggacgccatggggagcgaggcggcggcgggggatgtggctgagactgaggaggtggtggtggcgtcggaggcggagtattcgtggcctcagctccggttcgacctcccgccccgccgcctctaccacttcgctggccagttccgctccgccgccgccgccgcctccgcctccgcgggcaacttcctcaagggcgtgaagtggtcgcctgacgggtcctccttcctcaccagctgcgacgacaactccctccgcctcttctacctgccggaggaagcgtacagtaccgaggccgagcaccctgctgaggccgctgttggaggtgaagattcctatggtgcaagcatccaagtgaacgagggtgagcctgtatatgacttctgctggtacccctacatgtctgtatctgatcctgctacgtgtgtatttgcgacgaccagtcgtgatcatccaatacacctctgggacgctaccactggggagcttcggtgtacttacagagcgtatgatgccatggacgagataacggctgcactttctatatccttcaattctactggtactaagctctttgctgggtacaacaaagcaattagagtgtttgatgttcaccgccctggtagagattttgagcagcattctttgcttaaaggatgtgaagggccgactggtataatatcttcaatttcattctctcctcacaacgggatgcttgctgttggttcatacagccagacaacagctgtgtatgcggagagtaacatggagcctttatatgttttacatggccagcttggtggtgtcacacaggtactcttttcaaaagatggaaactatttgtatactggagggcgcaaggatccatacatactatgttgggatatccgcaacactgtggacattgtttacaagctgtacaggtcgtctgatactactaatcaaaggatacattttgatattgagccttgtggcaggcatcttgccactggcgggcaggatggcatggtacacatttatgacctccaaggtggtcagtgggtaacagccttccaagcagcagctgataccgtaaatgggttcgcgtttcatccataccttcctttggctacaacatcttctgggcacagaagatttggcatggaggatgaaattgaagaagagctgagcttggctggtatttttaataagggtgataggtcctacgccgtgcgccgcgccgcggtgtccgcgtacgcggcgctctgcgcggtgctgtgcgcgcacgaggcgcccggtggcctgcccgaccggttcgtagcctggggtttgccgcttctgggggagccgacctcggccgcgctcctcgccgaggggctcagggagctcctggccaccggggacgtgcccgcggtcgagcgcttcgtgccgccgctccttgccgcttgccgcgacgtgctcgaggatgagcggacgtcgctcaccgtgctccggtgcctgctcggcctgctcactttggtcgccgccaagtttccccactgcttccggccgcagtttgtcgatatcgtggacctgctccttgggtgggtgtttgtgccagaccttgccgagtccgatcgcagcacgatcatggacagtttcttgcaattccagtggcattggcttggcaatctgcagttctcgcttggattgctgccgaagttcttggcagacatggaggttcttgtgcatgatcctaatcttgcagccagccataactctggccggcttcgcccactctttgcttgcttctccacagtactgcagataatggcatctggtgtggctgagagaaatagccttaaggaacttatagcagggccacttgaggggttgtctcctcagcttttaaggtgtgcatcagtgattgcttctaagctcgggtggtctgagaggatggaagaagcgtccagatgcctagtcttactagcagagatccttcaggaaaggtttgctgaattttatggtatgtttgtggatgtgttggcccagagcttggaagttgcctcatcagtgcagttggtggcagcacttaagactaacctgcaagttctgtcactgcaaaatttggggctccgagcatctgctgtggaagccttgcttgattttagctcatttctatctcggttgcgtcttcatccaaaccacaccatggtcacaaatgtggcaaccacttacctttttgtcctgcaacatggattggaagatgtagttgatcaagccatttcatcattgatgaaagagttggagctattgaaatctctgcttgagacgggacgagcaagctaccctgatatccagaatctatctttaggtagtaacagtgaaacacaaagcaagtcaaactcatccacattctcattggtggggtattcagagcatcagttgctttctttgatgaaatttgatttgaagattcttctggctactatttcagttgatacaaaaaagaggaacgacaaagcagctagtctgacatcattcatttcagcaaagcttgacccatttggtactccatttcatgattttcttgagatgcagtttcatattttctctatactacacagattgagcagtatggacctctcaagtactatcgcaccatctaaagcaaacggttctggcgattcaggtagtcaaactcagctggttattgaatcaaggaagtccttttgtgactgcaaaaacaaatttatgcataagtatggaaaacttgtggtctggggccttaatgcatcatcatccatgacactgaaattagaagctctagcttggatagatacgtttggaaacctggttcttggcatggaaagggatgtggataagcgcaatatctcatacgaagtccatgagggtgctacccttctgaatactatcctttttgcaatcttggattgtgcatatgacagagaacctaaagtaagactgcatgttgcaacatctttggaaatactctttcttggtaggcttatcaatcccatggatttctcagttgtgacacaagttcttcttgacaagcttagtgatcctgataatgctgtaaagaaaggattttcaaggttactttcaattgctcttcctattacaacatacacatttggcttgcttgagaatagatggagttaccagcattccccagatactgctaacatgagtaagcattgcatgagttggaggcatgtgcttgctgtgaagcaacaacccaggaaacttcattggcagcagcttgtttcaattttgagctacctttctctcagattgaagttacctctttcttcttgggtccagcgcctgttctttagttaccgtggcaagaaagatatgttctctggtcaaactgatgtttctggggattctgatgggaacgaattatttaaaggtccagatgtggacagaactattattgataggatctactcagttaacaatcttgctgcggtttggtggggcattcatgaagctgctcggcactgcataaaccttcgacttcgaactcatcttggtggcccgacacagacatttgcagctctagaacgcatgcttttggatgtaccgaatctattggcaccagaagctaccgaaggtgaaggcaggtatatagcaccatctgacacaagcttattgcctatgcgcctgctgttggattttgttgaggcgttaaagaaatatgtttacaatgcatatgaaggttcctttgttctaccagcacctccaaaagcaagttccttgttttttcgagcaaacaaacgagtctgcgaagagtggttttctagaatttgtgatccaatgctgaatgcaggattagctttgcactgtaatgatgcggtcatccactactgttcatcgcgtcttctagatatcagaaaccttgctgcatcatccctcaaggacaacagtcgcatgggaggagctactgaaagtcaccatgcttttagagagaggttagaggcagattttctgaaggtcttgcgacatgcttcactggcattatgcaggtgtcatgaaacagatgccttagttgggcttcagagatgggccatatcaacgttctatacatactttgagcaggacaaacaactagttcgaggtgtatctgatagccagaatcacttctcctggatgtcaggactcatctatcaatctcaggggaagtatgaaaaggctgctgcacattattcccatcttctacagtttgaagaaggccttgcctccatggaatctgatggcatccagtacatcatagcacgtgttattgagtgctacacgtccctgtctgattggaaatgcttagagggttggctttcagaattacaagttctccgtgctgtacatgctggcaaaccttattcaggtgctttaactagcgctggcaatgagctaaatgctgttcatgccatggcatgctttgatggaggggacttccattcagcttggggctatcttgatttgactcctaaaagcagcagtgaactcagccttgatcccaaggttgcagttgagagaagtgagttaatgctcttgcgtgcaatgcttcaatctcacagcaaacctgacaaggcacgagaggagctaaataaggctaaactgatgttggatgaagcactctctgtggtcccactcaatggattaaccgaagctgctgcttgtgctggtcagctttattgcatctttgcatttgaagaaaccactgaactggcatgcccaaatagaactaatcaatcgccagcgctaatggattatttactgagactactgcaggatcccatcgatagaattaatcaagattgcaacatttggctgaaaatcttcaaagtgtattgtactacacaaccatcttctttacccacacttcttttgtgtcagaaacttgctagtcttgctagaaagcagagcaacttgaaattggctagccgcttaaatcagtacatcataaaccaccctttgagttcatctgatgagatggaaaaagaaatgcttactttgaacattaagtatgaaggtgccctgctgaagcacgatcaaggaaagaaggaagaggctttaactgacctgtggtcactggttcgtgctactgttctttctacagttagtgattcttctggtgctggcaccccattgattgctaaagcctgtttgaaattctcgacctggatggaacgagagaattcaactcatattatgaatatgatccttccgaaggtgatagaagatattaatgattctggtggcttccaaaatggagctgagaagcttttgttaggtgataatggatcagtttctgcatcgaattctcatgtggtttcccaagaaatcataggaattgctcgaaagacaagctggcaactttgtcccagtatgggtaaagcatggcattcttatgcatcctggtgcattactcatgccaattactctctatctggaactgattcaaaattgcagaattcgttgttccctgctctccagtctgagctttctccagatagatttcacctgacagacaacgaaaagtctgaagtgcaggaaataataagaaatttctgtgctgataaagatggaaattatgtggactgtagcatttcaccaacggcaggatgcagttacaattctgaggggaatcccatcgtttcactaattgagcaaacaatctgtctgctagaaactgcagctggagcaccaggctctgaggcctgtgatggtgaagggccttctgtacggttatcatcagagctaacagttcttttctgtaaatgtgattctgcaaaggacagtagcatgactttgattggcaagcttattgaaatttggtggactttaagacgtaggagagtatcactttttgggcatgctgctcatgcctattttcagtacctttcgcattcatcaactgggcttcaaccctcatatcaccgtgatgttttgaaagggaaaacaaagagctacactctgagggcattgttgtatctcctccatataattttgaactacggggtggagttgaaggaaatagttgaaagtgggctttcaacagttcctttgttgccgtggcaggagattataccgcaactttttgcccgcttgagcttccacccagagaagatagttaggaaacagttggaaagcatattggtgaagctagggaatctttctccttgttcaattgtatatcctactttagtcgatatcaatgcttgtgaaggagaaccctcggatgagcttcagcgcatattggattttctggttaagcaatatcccaaactagttaaggatgttaagcttgcaattgaggagttaggaatggttactgttctatgggaggaacaatggttgagcactttacaagatctccattcagatgttttaaggagaattaatatacttaaagaggaagctgcaagggttgctgcaaattctaccctgagttcagccgaaaagaacaagatcaatgctgcaaaatactctgctattatgactccaattgtagtagccttggagcgccgtctagcttctacatctcgtgaaccaaaaacatctcacgaagtgtggttccataaggaatataatgctcagttgaaatctgcaatcacagctcttaagacaccccctggatctccatcagcattaggagagatttggcggccttttgattcgattgcagcttctttagccactcatctgaggaagtcatgcatatcattaagtgaaattgcaccacagctagcagctttatcaacctctaacattccaatgcctggttttgagaagcagatattcagttcttcagaatcttcttttgctgacagtcatggcacaattacaatatcttccttctgtaaagaagtaacagtactttcaacaaagacaaggcctaagaagcttgtcttgcaaggatcagacggccagaagtatacctatctcctcaagggtcgagaggatttacgcctcgattctcggatcatgcagctgctagaggcgataaatagctttttttattcatcttctgacactagaagtcgaaatatggcaatacgattctactctgttacaccaattagtggaagagctggactcatccagtgggttgagaatgtaagtagcatctacaatgtgtacaagacatggcaaaaacgctctcagttagcacaggcacagctctcttcagttaacactgttaataatagtattcacaaatcagtaccacctgttccccgtccaagtgatatgttctatggaaagatcattccagcactgaaagaaaaagggatcaaaagagtaatctcacgaagagattggccactagatgttaaaagaaaggttctattagagcttatgaaagagaccccaaagcagatactgtggcaagaaatgtggtgtgcaagtgaagggttccggaactttaactccaaagtaaagagattctctagcagtgtagcagccatgagcatgattggccatgtactgggccttggagatagacatttggacaatatccttatggatttcagcagtggtgatgtggttcacatagattacaatatatgctttgataaagggaaaaggttgaagattccagagattgttccattccgtcttactcaaactattgaatcagctttaggattaactggagttgaaggtgtctttcgagttacttgtgaagaagttatggctgttctcttaaggaacaaagatatcatattaatgttgttagaagtatttctttgggacccgttgatggagtggacacgtggaaatatccaagatgaagctggaatagctggtgaggagaagaaaggaatggaattagcagttagtctgagcttgttctcttctaggatccaagaaatcagagttcctttgcaggagcatcaggatcttttggtaactaacttgccagctacactatcttcactaaagaaatttttggatactctagagcagtatgaggttatatctgctatgttttatcatgctgagaaagagagatccagtgctttgcagagtgaaacatcagcaaaatcaatgctagctgaagctagttcacttgctgaaaaatcccgcacttcatttgagcttcatgctcatgaattagcggaaacaaaagcggcagcaaatgatgaagcaaacaagcttgcagtatgggtggaaaaacatggaaggattcttgaggccatacgggacaattcaattgcaggtgtagagtcatgcatgcaattaaacagcaaggatgatgccttaagccttatttcagctgtgcttgaatcagaagtccctcttacagttgttcctgagccaacaagagcacaatgctctgagttggatagggaggtttctcaactaattcttgaattgcagggtgggctgtctgctgccttagagtcacttggtgaatatgctttggtattgcagcaagttctcccagttaattacatcacaaccagcccagttactggttgggcacaagctttgcagctatctgtaagcagtggttcagaagatctgcttccccttgccaagaggcaagcagcagaagtcattgctaaggttcagggtgagggtattaatctagttcagcaaagatatagggatctcttaaatcaaatggaaagttatgttgtgtgtatagaaagacttgcaagggaacgttccgaactgatgaattctattggattcgagaatgaagtgcgatctaaagagtggattctttctgcattcatgaactccattcaattgccatcaccaaagagggatatgggtaacattccatttttacaatcaggtaatgttggagtcaaaactccagcccatgaggatatacaggatgaaacaggtattgttctttctattcttggaattgctgttggtcagctatatagtgacgttagagccaaggtttctgagctttcaagtaaagttactgggatagctaaatttagaacagatgaagctggtcttcaagctgatgctggaacaagtttgcagttgtttgatcagcaggttgaaaaatgtgcactaatttcaggatttgttggtgaagtgcatggagttatggaggcaaaattagttgaaatgaatacagcttatgcaaagccccagcatgggcaatgggcttccacttttcagcgcattttgtgctcaagtaccaacatgattgaacaaatgaccgaagtattccttccagaaattattagatcgtttatttcatacaattcagaggtaatggaagcttttggttcagtttctcagattcgtggctctgttgatacagctctagagaaactggttcggatagaacttgagagagcatcgatgactgaatttgaacagagctacttcatgaaagttggacgaatcactgagcagcaaatagctcttgaagaagctgccatgatgggtagagatcatctgtcttgggaagaagcagaggagctagcttcccaggaggaagcatgcagggcacaattggagcaactccaagaaacgtggagccagaaggatatgacgatttcatcacttatgaaagtagaatccagtgccatgaattcgctactttcttctaaacagtatttctcatctttggtgaatgttgatcaagaaagtgaatttcatttgagaagaagcaaggctctgctttcggtcttgacaaagccgcttgctgaccttgaagcacttgatcatatgctgtcagcatgtggcttgtttccttatcatgatcattgtttctttgtttggaaactcagtttgctggactcaattcttgatttgtgcatgcatgagatttcatcttctgttgagcacagttttactactaaccagctttatacagctcttaaaacgaagcttacaaaccatgtggaaaaacaagtttatcggtatatcatggaaaggattgctcctgcatttatcctacagttagacaaagaaattagtgatttactgcaattgagtcaaggaagaagagaatctggtcaacctaaaagagattctgcagctgttggaaggattgcagtaatgcttgaggagtactgtaatgctcatgagacagctcgagctgcccggactgctgtttctctgatgcaaagacaatcgaatgatctcacagaggctttacgcaaaatcgttctagaaataattcaagtggaatggctgcatgacctttcatctcctcacgcgcagaagtctaaggttttgtcacaaaatattcttagtgatgataagttcatatctgtgctcctaaatataagcagaggcaacttgttggataagattcaatcttcagtgtcactggtaacaagatcaattgagtgcctgcaagcttgtgaaaacacttcagtttcagctgaaggacaacttgagagagcaatgggatgggcttgtgctggtccaaatacttctggagcaggcagttcaaccacaaaggcttcaggaatcccatctgaatttcatgatcatctgttaaaaaggaggaaattgctttgggtcatccaagaacaggcatctgatcttgctaacatctgcacatctgttttggagtttgaaggatcgagagacggaatttaccttattcctgaggataaatcttccggacaatctactgacagaggcaggacatggcagcaaactttcttgaatctcctgacacgtctagatgcagcatatcgttctttcacatgtgcagaacaagagtggaaactcagtcagttcaacatggaaagtgctgggaaaagcttgtattcagtaaccaatcagctctctgtagtctcttcgagagcaaaatctgctttagagtgttctgtctatattttcccagttaatctacaggatactcttgtgtccatgtatgaacgagcttctgaagtcactgcatcattatctgggttcaaacatgtttcacaggatcgcactgctttgacttctgaatgtggttcgttactagaggaggttttggcaatagcagaggggttgcatgatgtatatatcgtgggaaaggaagctgctgttatgcacaattcaattatgtccaatctttcaaaggcaaacacaattttacttccactcgaagcctcattgtctgctgatttagctgttatgtctgaagcaatctcaaaggaaagagagaagaataataccagcatgcctcttattcatggaaaggcattataccaatcttacattattagaatacgggatgcttacaaaaatttagaacctctggtgcccccacttgctgacgatgcgaaggagttgcactccttgatgactaagcttggacgcctttctagtattcatgcagggagccttcataaggctctagaagttcttggtgaaagtgaaactgtgaagtcacaggatatgccttcaacacatgcagatattttgcagagtgattcatcaattgagaaggataaaggttcttctgggagcagggaaggtggatctcaggatttagtaacgaccactgatctttctttacaagatgaatgctggatttctcctcccgaacactcatatacaagcagttctggatataccacagagttaacccagattacttcttctgagaacatagagaatatggatcccttattggttgacaggcctgtgatagaagctcctggtgctaatgatcaggaaagaggggctgattcagaatcagattcaagtagcaataagcagttgttcataaacaatgttacattgacgaatgttaacagtgttgatgaggttgaaatctcattgtcaaaggagaggaaatctgaaaatgagaatacaaatttgccattcaaacagattagaggacaagaatgtgataacagtgatcctaaatcctatccagattctgtgactcgattgacaagaggtaaaaatccttttgctttgtccatactgaagcaagtggagcataagttacatggatgggatatagatggcaccaggtccttgaaggtttctgagcaagttgaccatcttctcaagcaagcgacaagcattgacaatttgtgcaatatgtatgaggggtggacaccttggatatgattcaaagatacatgtgaacatgtctttctacgatttgttttttccagggcaagctgaagttaagatctgaatggg

SEQ ID NO: 91444 - DNA, 1719 bp, Oryza sativa
  Clone ID: PAT_MRT4530_90018C.1
atgggcttcgacgtcggcgtcgtcgccttcaacccggagggctggggccctcccgacaccgcgccggcgccggcatcccttggcggtggcgccgccgcggcctccatccccttcgcgcccttctcccgctcggacaagctgggacggatcgccgactggacgcgcaacccggcgggccccgccgccctcgccgccgcctcccgcgactccgtcttcaacttcacctccggcgacgactccctcgccggccgccgcggaggactcctcgttccgcctcgtcgacgccaagccgccgccgcgccacccgcgctcccgcagcgccgcgacgaggaggtggaggcgcgccgccgcgaggccgagaaggagcgcgcccgccgcgagcgccacttccagaacaaccgtccaccacaccccggcttccgcggcaaccagtcctcgtcggccaagtcctccgtcgacatccagcccgactggaccatgcgtgagcagatccccttcgccaactttaccaagctctccttctccgtcgccgaccagcccgaggacctcctcttgtgcggcgccgtcgagtactacgaccgcgccttcgatcgcgtcaaccccaaggccgcacgccgcctcgagcgcttcaagtctcgcaacttcttcaaggtcaccaccaccgacgaccctgtcatccgccgcctggctgaggaggacaaggccacggtgttcgccaccgacgccatcctcgccgcgcttatgtgcacaccccgcagcatccactcgtgggacatcgtcgtgcagcgcgtcggcaacaagctcttctttgacaagcgtgatggttcccagctcgatctgctatctgtcaacgagaccgcgcaggagcagctcccagaaaacaaggatgatatcaactccgcgcactccctggctgtcgaggctacctacatcaaccagaacttctcgcagcaggtgcttcttcgcgatggtgagaaggttacctttgatgagcctaacccgtttgcttctgagggcgaggaggcagcatctgttggctaccgctaccgccgctggaagctggatgatgagatcagcattgttgctcgctgtgaagtgcatgctgtgaatgctgatccaggtggtggtcgtcagttccttactctcaatgcgctcaatgagtttgatcctaagattactggtgttgactggaggcagaagcttgagacacagcgtggggctgtgctcgctacagagctcaagaacaatgccaacaaacttgctcgctggacttgccaggctttgcttgctggtgctgacatgatgaagttgggatatgtgtcacgtgtgcacccccgtgatcactacaaccatgccatactcactgttatgggatacaagccaagggattttgctacacagatcaacctcaacacatcaaacatgtggggaattgtcaagtcgatcgtggacatctgcatgaagtttgaggagggaaagtatgtgcttgtaaaagatccagcgaagccacaagtgaggatctatgaggtgccttctgatgcatttgagaatgactatgtggaagagccacttccggaggaggaacaggttcggccgccatcagatgatgttgatgctaccgcggaggaaatggatgcagcggcagaggctgaggcgaacaatgcagcagcttctgcaggtggtgagggcgagaagagcgcagaagctgctgccgcttga

SEQ ID NO: 91445 - DNA, 2584 bp, Oryza sativa
  Clone ID: PAT_MRT4530_90019C.1
agaagtcacgtaagagatgactccgtggtaaatagtaagagcgcgcagaccaaataataaatcaattacggcagctcctagctaaagaaaacaaatcagctaagaggcggttacggagagagcggcgagcaaaacgaggggagggtataaaaaacaatgacaatcgtggaattgcaggagggcgagctcgagaacaaacagttcccaaagggggtacataaaagacaggaagaaaagggatgaaacaacgagacggcgggtatagtggatgcgagaagggggggtggtccaatgagcaataaaaggggagacaaatgtttggtaaaggcgagaagagaagcggggccactttaggggctaacgacagagtatgcgaacagaggctaataggacggagaaggcggaataaaatgtgggacaggccagggggttttcccagggaatgaacggggtaaaacgcagcccaagagaagggaggggaaaacagactcacataaaaggggttttgggggcccgggcccccttttgttttttttttagtaacatggtcaataaacagccagaagtgatatcaaactaggagtaccaacatagtcattgagcgggcaacttagcatctttaagatgaaaaacagaacagttttatcatcgaccaaacaagaccactgtatcgataacaggcagttcaactcttaaatgtaaaccataaaaacagataattaaaccaaaaaggatctagctggcaacctgaagaggagcccttcaagcggcagcagcttctgcgctcttctcgccctcaccacctgcagaagctgctgcattgttcgcctcagcctctgccgctgcatccatttcctccgcggtagcatcaacatcatctgatggcggccgaacctgttcctcctccggaagtggctcttccacatagtcattctcaaatgcatcagaaggcacctcatagatcctcacttgtggcttcgctggatcttttacaagcacatactttccctcctcaaacttcatgcagatgtccacgatcgacttgacaattccccacatgtttgatgtgttgaggttgatctgtgtagcaaaatcccttggcttgtatcccataacagtgagtatggcatggttgtagtgatcacgggggtgcacacgtgacacatatcccaacttcatcatgtcagcaccagcaagcaaagcctggcaagtccagcgagcaagtttgttggcattgttcttgagctctgtagcgagcacagccccacgctgtgtctcaagcttctgcctccagtcaacaccagtaatcttaggatcaaactcattgagcgcattgagagtaaggaactgacgaccaccacctggatcagcattcacagcatgcacttcacagcgagcaacaatgctgatctcatcatccagcttccagcggcggtagcggtagccaacagatgctgcctcctcgccctcagaagcaaacgggttaggctcatcaaaggtaaccttctcaccatcgcgaagaagcacctgctgcgagaagttctggttgatgtaggtagcctcgacagccagggagtgcgcggagttgatatcatccttgttttctgggagctgctcctgcgcggtctcgttgacagatagcagatcgagctgggaaccatcacgcttgtcaaagaagagcttgttgccgacgcgctgcacgacgatgtcccacgagtggatgctgcggggtgtgcacataagcgcggcgaggatggcgtcggtggcgaacaccgtggccttgtcctcctcagccaggcggcggatgacagggtcgtcggtggtggtgaccttgaagaagttgcgagacttgaagcgctcgaggcggcgtgcggccttggggttgacgcgatcgaaggcgcggtcgtagtactcgacggcgccgcacaagaggaggtcctcgggctggtcggcgacggagaaggagagcttggtaaagttggcgaaggggatctgctcacgcatggtccagtcgggctggatgtcgacggaggacttggccgacgaggactggttgccgcggaagccggggtggtggtgggagcggttgttctggaagtggcgctcgcggcgggcgcgctccttctcggcctcgcggcggcgcgcctccacctcctcgtcgcggcgctgcgggagctgcggacgctggttgaagcgccacttggggccgaaccgcgggtggcgcggcggcggcttggcgtcgacgaggcggaacgaggagtcctccgcggcggcggcgagggagtcgtcgacggaggtgaagtcgaagacggagtcgcgggaggcggcggcgagggcggcggggcccgccgggttgcgcgtccagtcggcgatccgtcccagcttgtccgagcgggagaagggcgcgaaggggatggaggccgcggcggcgccaccgccaagggatgccggcgccggcgcggtgtcgggagggccccagccctccgggttgaaggcgacgacgccgacgtcgaagcccatggtgctcggcggcggaggcggtctggatccgggcggaggctgggggtggcggcgcgagggtttg

SEQ ID NO: 91446 - DNA, 765 bp, Oryza sativa
  Clone ID: PAT_MRT4530_9001C.1
cccacgccggccgggctgcgtgtggttcaggtgctgaaggtgatattcagattttcagagtgagtgctcgtgtgttgtgcgatcagtgcccgcagttcgatcgatccgtgttgatctttgaaagaaagatgtcgtgctgcggaggaaactgcggctgcggatccggctgccagtgcggcagcggctgcggaggatgcaagatgtacccggagatggctgaggaggtgaccactacccagactgtcatcatgggtgttgcaccttccaagggtcatgccgaggggttggaggccggcgccgccgccggagcaggagcagagaacgggtgcaagtgcggcgacaactgcacctgcaacccctgcaactgcggcaagtgaagcaagcaacctcctgacgaaaccaaggagatggaagggcctagtactgctaagctagtagtttgatccagttacaagtgatgagttgttgtcactgtaactttgtgtttcctctgagtttgtgatctaagacctgagactgaagaaatgcatcctagttaaataagtgctaagaataaagatgttttgagacatctatggcgtgtgtacgatgatgtagtccttcctctccagtcttgtggtgtgtacgtaattaagaatgcagtgctgtgtcatgtggtatgctttctatctagtgaaactgaactagtgagttggtatactaaaattgcttgtttgcttgaaaaaaaaaaaaaaaaaaaaaaaaaaaaaaaaaaaacccgcggcc

SEQ ID NO: 91447 - DNA, 475 bp, Oryza sativa
  Clone ID: PAT_MRT4530_90020C.1
attaacactattgctttaagccatttaataatgttttcatttgtaattttgattacaagggaagaaagcctcccaaaagacactcttatgctacagctaaccacagcagttcaacgactatcaagggcaaaatgcaaggtgaaatgttcgccttagaaaacgcatagccaagttccccaatgacaagtgtgctcccaagacaccgcaaaggagcaactcaaaccacgattcgggaaagtgaagtggttcaggggtttccagcaacttgacgttaattagcagacctgattatggcgagcacccctgccacgccttatatacagagcactctatagggacaggcaccaagctaccagagaacacgtacatttacaggggcatgaggccagctttggtcattagcaacatccactgacacgctaacaataccggggagtgagattaatgaagcatggaaaatgcccaaagcagggca

SEQ ID NO: 91448 - DNA, 186 bp, Oryza sativa
  Clone ID: PAT_MRT4530_90021C.1
aataaagcccagacaatgtcagatgcacggcatctttctgttgtctttggcccaatctttttgtatgccatcctatttggttaattactagtacatgatatcccagtggattccatccaccaagggcctaccagaaattcttgtaataccgataaatttaaaagaaacccaaaaaaaaaaaaaaaa

SEQ ID NO: 91449 - DNA, 352 bp, Oryza sativa
  Clone ID: PAT_MRT4530_90022C.1
ttctttttctgctcctcccctctccgccgcctcgcgctcaagccctcctcctcccgcgccgccgccgccgccgccatgtcgtccgcccccgccaccgccatcgccgcgccggtcgagcacatcgtgctcatcaaggtccgccccgaggcggcggcgtcgggcgccgccgcggcgatggcgtcctcgctgcaggcgctgtccagcgtggtgcccgggctgtcgtacattcacgtgggccccgcgctccggctgaggtcgccgggaggtgcggccctggggggaggacatgttcgccactcgcgctacgccaccaagcccgacctggcggcttacgcagcgcaccgggcgcacg

SEQ ID NO: 91450 - DNA, 666 bp, Oryza sativa
  Clone ID: PAT_MRT4530_90023C.1
atgtcgccggtgaaggtgttcggctcggcgccgttcacgaacgtggcgcgggtgctgctctgcctggaggaggtcggcgccgactacgagatcgtcgacgtcgacttcggtgacagggagcacaagggccccgaccacctcgccagaaacccgtttgggcaagttccggcgttccaggatggagacctgatgctcttcgagtcccgtgcgatttgccggtacatactgcggaagcacagggcgacggacgaggccaacctgctgcgggaaggcgacccctccgagtcggcggtggtggacgcgtggctggacgtggaggcgctccggtacgagccctcggtgcacgccgtgttcgtccagcggcgcgtcgtcccggcgctgggcggggagcccgacgagcgggtcatcgccgagagcgtcgcgcggctgagggagacgctcgccgtgtacgaggcacggctggaggccacgcgcgggtacctcgccggcggcgaggtgagcctcgccgacctgagccacttcccgtacacgcgctacttcatggagatgccgtacgaggtgccggtgttcggcgcgtaccctcgcgtgacggcgtggtgggagcgcctgctgacgaggccgtcggtcaggaaggtggccgccatgatgagcggcggcgagggttga

SEQ ID NO: 91451 - DNA, 1500 bp, Oryza sativa
  Clone ID: PAT_MRT4530_90024C.1
atggcggagcccaaaacaaccatcgataaaaagcttgttgtaagcgaaacaaaggtttcgacttcgcgagaatcatgggagaaagccaagaatccctcaaaaattgttgaagctcaagagatgagaacaaagtcaagaaaggagaatggtttggcaacttctgatggaagggagacttgttgctttcttgatttcttctactactacttgttggaggtgcttgtctttgttccaaaagcacatgaaaacagcggcttacgtcgacataatattctcctttcgagatcacatgtgaatgcgtgtatttataattcgtcgggtggtactattcaccctacggcttaagaagatcctccgggaaattcgcttgtgatcctccgaaacccagaatttcttttttcgatccgttttgatcgattgaaagcaaatatcatcttgaaaaggatcgttcttgctggtgttggtttggggaggagggggagtctcgcggcgaggttcgccttcttcccgccggagccggcgacctacgccgtcaggaaggatgaggcgtgcggcggcggagggcggctggtggcgtcgggcgtcccgcgggacgccgccgtggacgtgctgctggtggacaccaggaaggggagcaaggtggtggccttctacctgaggaaccccgccgcccgcctcaccgtgctctactcgcacggcaacgccgccgacctcggccagctctacgacctcttcgtgcagctcaaggtcaatctcaaggtcaatctgatgggatatgactactctgggtatggagcatctactggcaagccaagtgaagagaatacatatgcagacattgaggcagtttaccagtgcttagaaacagagtatggaatcagtcaggaagaccttatcttgtatggacaatctgttggcagtggacctacattgcatttagcttcccgtttaccaagattgcgtggcgtggttcttcatagcgctatactgtcaggcctccgagttgtttgccatgtgaactttactttctgctttgacatctacaaaaatgtgaagaaaatcaaaaaggttaaatccccagtgcttgttattcatggaactgatgatgatgtcgtgaactggtcgcatggtaacgagctgtggaaactggcgagggagccttacgatccgctatggatcaaaggaggaggccattgcaacctggagctgtacccggacttcatccgccacctctccaagttcatccgcgagatggagaacatcacaacgaagacaaggcttaagaagatccggcagtccctgcaacccgcacctaagaaggtccaccaccgggcgagcaccgggacgaccaccaccttcaccaccaactgctgctgccgcatccggctgcaggggatgcttcaagtgcccaacctgcttctccttctcctgcagctgctgcaggagctgcctcaagtgcccaaccttcaaatgctgctgctgcggttcatgcagagatga

SEQ ID NO: 91452 - DNA, 1290 bp, Oryza sativa
  Clone ID: PAT_MRT4530_90025C.1
atgcggatggggaagtacgagatggggcgggcgctgggagaggggcacttcggcaaggtgaagctggcgcgccacgccgacaccggcgccgccttcgccatcaagatcctcgaccgccaacgcatcctcgccatgaagatcgacgaacagataaagagggagatcgccacgttgaagctgctcaagcaccccaatgtcgtccgcctccacgaggtttcagctagcaaaaccaagatatacatggttcttgaatatgtaaatggaggagagctattcgacaaaattgcattaaagggtaagttgtcagagaaggaaggaagaaaactcttccagcagctgatggatgctgtaagctattgccatgagaagggagtttatcatagggaccttaagccggagaatgtcctagttgatgcaaaaggaaacataaaggtttcggattttggactaagtgcccttccacaaaatcaacggaaagatggattgttgcataccacatgtggcagccctaactacatcgcccctgagtttagtgcatatggaggatgtagttctgacagagggaatcttccatttgatgaccaaaatacggttgtcctttatcagaagattctgaagggggatgctcgtattcctaaatggctttccccaggtgcccaagatatactgcgaaaaatcttggatcctaacccaattacacgcttagatataactggaataagggcacatgagtggttcaggcaagattatactcctgctatgcctttcgatgatgatgacgacaacaatatcagtgatggcaacctacatatgactgagaatcaagatattgaaaccagcccagcaatcagccaaatcaatgcattccagctcattgggatgtcctcatgccttgatctatctggattttttgagaaagaagatgtttctgaaaggaaaatcagatttgtatcaaattattcccctacttctctatttgagaagattgagagcactgtcacagaaaagggtttccaggtacagaagaacagtggcaagctaaaagtgatccaagtttgtaaagaaccagcaaatccaagaggacatggaaatttattgatttctgctgaggtgtttgagatcaatgaatctctttatgttgttgagctaaaaaggtcatctggggattgttccctttacagacagctatgtgcgtcactttctgaagacttgggcatatgcaaaaggcaacagcttttgaagaaagattctatgagacaagacctttgtcgatataacagtagcttttga

SEQ ID NO: 91453 - DNA, 1905 bp, Oryza sativa
  Clone ID: PAT_MRT4530_90026C.1
atggcgccgaccaagggggaggggccagcgatcggcatcgacctcgggacgacctactcgtgcgtgggggtgtggcagcacgaccgcgtcgagatcatcgccaacgaccaggggaaccgcaccaccccctcctacgtcgggttcacggacaccgagcgcctcatcggggatgccgccaagaaccaggtcgccatgaaccccatcaacaccgtcttcgatgccaagcgtcttatcggcagacggttttctgatgcctctgtccagagcgatatcaagatgtggccttacaaggttattcctggcccaggggataagcctatgattgtagtgcagtacaagggtgaggagaagcaattctctgccgaagaaatttcatccatggttcttatcaagatgcgtgagatcgctgaagcttacctagggtcaactgtgaagaatgctgttgtcactgttcctgcatacttcaatgattcccagaggcaggcaactaaagatgcaggtgttattgcgggtcttaatgttatgcgtatcatcaatgagccaacagctgctgcaattgcttatggtcttgacaagaaggcgactagtgttggtgagaagaacgtgctcatttttgaccttggtggtggtacttttgatgtctccctccttaccattgaggagggtatttttgaggtgaaagcaacagctggtgacactcaccttggtggggaggactttgacaaccgcctggtgaaccactttgtccaagagttcaagagaaagcataagaaggatatcagcgggaaccccagggctttgaggaggctcagaacatcatgtgaaagggcaaagaggaccctctcctccactgcccaaactactattgaaattgattccctctttgagggtgttgatttctattccaccatcaccagagccaggtttgaggagcttaacatggacctcttcaggaaatgtatggagcctgtggagaagtgcctgagggatgcaaagatggacaagagcactgtccatgatgttgtccttgttggtggttcaactagaatccctagggttcagcagcttctgcaggatttcttcaatgggaaggaactctgcaagagcattaaccctgatgaagctgtggcatacggtgctgccgtccaggctgctatccttagtggagaggggaacgagaaggtgcaggatcttcttctccttgatgtgactccactgtctcttggtctcgagacagcgggaggtgtgatgacagtgctcatcccaaggaacaccaccattcctaccaagaaggagcaggtcttctccacctactccgataaccagcctggtgtgttgattcaggtctatgagggtgagaggacacggaccagggacaacaatctccttggcaaatttgagctgtctggaatccctcctgcccctaggggagtccctcagatcactgtctgctttgacattgatgccaacggtatcctgaatgtgtctgccgaagacaagacaactggccagaagaacaagataaccatcacaaatgacaagggaaggctgagcaaagaggagatagagaagatggttcaggacgccgagaagtacaagtccgaggatgaagagcacaaaagaaagaacactatccaagacgagaagattgcttccaagctgccagctgacgacaagaaaaagattgaggacgcggtcgagcaggcgatccagtggctggacaacaaccagctcgctgaggttgaagagttcgaagacaagatgaaggagctggagggcctgtgcaacccaattattgccaagatgtaccagggtgctggtgccgacatgggtggtggaatggacgatgatgctccggctgctggtgggagtggtgctggccctaagattgaggaggtcgactaa

SEQ ID NO: 91454 - DNA, 387 bp, Oryza sativa
  Clone ID: PAT_MRT4530_90027C.1
tcctctattgagcgcgccgctttttttttttgtgtttttttaatttttggggttttttttttttttttttttttaaaataaaatcagatttggaaaaacctgagcggggtgcaaaaaatgcaatttacattccaggaccccttttaatgtttctttgtttgataaaaacaaccgggtaaccaatgtaccaaccagtgcccataccaacccattgacaacttcgggagccgacacgcatacactattctttagaaaaccccctagccgcccccggggggccctcggtaaaaacctgaacgggcccgaccaacgtgccaagttcccccaccggcaggggccttagggcttaccccaaactggggaattggggccttccccacaaaaatt

SEQ ID NO: 91455 - DNA, 2554 bp, Oryza sativa
  Clone ID: PAT_MRT4530_90028C.1
gcctcctctcctccactcctcctcccgcatccgcggaaaccctagcctcctctctctctctcctcgttcactcgttcctcgcgccgccgccgcgacccgcgagcgggaggaggagccatggcgccgaccaagggggaggggccagcgatcggcatcgacctcgggacgacctactcgtgcgtgggggtgtggcagcacgaccgcgtcgagatcatcgccaacgaccaggggaaccgcaccaccccctcctacgtcgggttcacggacaccgagcgcctcatcggggatgccgccaagaaccaggtcgccatgaaccccatcaacaccgtcttcgatgccaagcgtcttatcggcagacggttttctgatgcctctgtccagagcgatatcaagatgtggccttacaaggttattcctggcccaggggataagcctatgattgtagtgcagtacaagggtgaggagaagcaattctctgccgaagaaatttcatccatggttcttatcaagatgcgtgagatcgctgaagcttacctagggtcaactgtgaagaatgctgttgtcactgttcctgcatacttcaatgattcccagaggcaggcaactaaagatgcaggtgttattgcgggtcttaatgttatgcgtatcatcaatgagccaacagctgctgcaattgcttatggtcttgacaagaaggcgactagtgttggtgagaagaacgtgctcatttttgaccttggtggtggtacttttgatgtctccctccttaccattgaggagggtatttttgaggtgaaagcaacagctggtgacactcaccttggtggggaggactttgacaaccgcctggtgaaccactttgtccaagagttcaagagaaagcataagaaggatatcagcgggaaccccagggctttgaggaggctcagaacatcatgtgaaagggcaaagaggaccctctcctccactgcccaaactactattgaaattgattccctctttgagggtgttgatttctattccaccatcaccagagccaggtttgaggagcttaacatggacctcttcaggaaatgtatggagcctgtggagaagtgcctgagggatgcaaagatggacaagagcactgtccatgatgttgtccttgttggtggttcaactagaatccctagggttcagcagcttctgcaggatttcttcaatgggaaggaactctgcaagagcattaaccctgatgaagctgtggcatacggtgctgccgtccaggctgctatccttagtggagaggggaacgagaaggtgcaggatcttcttctccttgatgtgactccactgtctcttggtctcgagacagcgggaggtgtgatgacagtgctcatcccaaggaacaccaccattcctaccaagaaggagcaggtcttctccacctactccgataaccagcctggtgtgttgattcaggtctatgagggtgagaggacacggaccagggacaacaatctccttggcaaatttgagctgtctggaatccctcctgcccctaggggagtccctcagatcactgtctgctttgacattgatgccaacggtatcctgaatgtgtctcccgaagacaagacaactggccagaagaacaagataaccatcacaaatgacaagggaaggctgagcaaagaggagatagagaagatggttcaggacgccgagaagtacaagtccgaggatgaagagcacaaaaagaaagttgacgccaagaattccctggagaactatgcttacaacatgaggaacactatccaagacgagaagattgcttccaagctgccagctgacgacaagaaaaagattgaggacgcggtcgagcaggcgatccagtggctggacaacaaccagctcgctgaggttgaagagttcgaagacaagatgaaggagctggagggcctgtgcaacccaattattgccaagatgtaccagggtgctggtgccgacatgggtggtggaatggacgatgatgctccggctgctggtgggagtggtgctggccctaagattgaggaggtcgactaaatcaatacaccttcgtatatgtgatgagaaaaatattgatcatacaccttttgttttcaaatcccagttggcaatcataccacttgggctactcgtactttctgttaactaaagacttattatcacctgatgcttgagtttggacttctagtctcagattcgaacagacattcagtaatgtgatgatgtttcagtttttaccaggtggccgcggcagaattaccccttttgttttactgctgtattacaattgcaattgattatgctaggtgggtttggcccccggttacttaaatatgttttaaatgtttaatatgctttaaatgttttaaatgttttgttagtgaaacagcgttatttgctgatctgttgatgagagtgttccactgtccagtttatcttgaaccggggtggaaacacatgtaatagctagaccaggcctgtgcttttcataatgctgctagctaatgctatccttgatagtcct

SEQ ID NO: 91456 - DNA, 810 bp, Oryza sativa
  Clone ID: PAT_MRT4530_90029C.1
atggcacccgtcgtcatcagcgacgccgtggcggccactccgccggcggccgctcctgccggcgatcctccggccgtcacccctacggcggcggccgtcgcgcctccagcctctccagggttaagcatagaactgaccatccacgccgtgggcctccaagccgtaatcctggtcaagatcaacagcattcacctgtggactcgtttcctgatccttaacacccccctgctcgttcttctcaagacaccactagagtccggcgactcgacgcgacacgactcttctccgtcctggcgatgctgcggcacggccgccgtgtggagggacacggcgacgccctccctccttgtccgcgtctccgccttcttcctcatcgccgacgccgactctctggtcgggccactggccggcgaggcggccatgttggccgccacaacctactccgccgcggtggtcgactacgtcgtcgccgagcaccgacaccaccaccaggcgtcgtcgccgcccgggacatcggacgccaccactgccaccagcgtacgagtcacaggcggagaggcactaccgcgagacctgcaagaagttcaccgccttcgccgtcctcctcgtggaccttctacctcgcgtggttgctacggccgaacgacgcgctgccgctgcagccggcaggggacgacggtgtggggccaacgcggggccggcgggaggtcacggcgacgatcggaggtagataagaaggagaggagagggactgatggtggggtccacgttgcttttcacgctggcacggtacggtggcacgccacgtag

SEQ ID NO: 91457 - DNA, 282 bp, Oryza sativa
  Clone ID: PAT_MRT4530_9002C.1
atgggctccgcaccgtcatgggccgtcagcccgtcgtcacgcaccggggtggcagtggtgggccggcgccttacattcgcggggcgcgggttcaccgcgctcagcgtcgcggtccgcacgtcggcggaggcgaaaggccaccatgccacaagccggcgatttgctgctctcttctggggggaaaccgagcgcatcccgtcgagccgccgcccggccttctcctccaactccggcgacctcctcttcttctccagcgccgacgagaccctagactccggttga

SEQ ID NO: 91458 - DNA, 357 bp, Oryza sativa
  unsure (1)..(357): unsure at all n locations
  Clone ID: PAT_MRT4530_90030C.1
cgctccgcacatcgctccccgcgcgcatcctcgctctgcacctcctctcctcgcgacgatccaccgccggaccagcgacntcgcctcctcgctccgccgcaacgtcggacctccctcttcctcgcaacggttcagcgacggcgcaccaccgcaccgccataccagcgccgaggctgccgccgcccacgcctatncgccggcgccggcgccgaggaaggccccttccgccgccgccgccaccaccatcgccaccgtgcactcgaggtcgtccctcttccccatnggctgcagcctgagccgacgtcctcnccatccgccaacgccgctgccgcngacggagccgaggtcgttcccagc

SEQ ID NO: 91459 - DNA, 1171 bp, Oryza sativa
  Clone ID: PAT_MRT4530_90031C.1
tttttttttttttttttctttttttcacgaacatcgcagggtaaaaattattggcaccacgtcacaatcatgggatcacatttccgacagtcatactcaacacaaccaaaactatacatatattgtacttcggtctcatcctttgagtcagacgacagcaaaatacatcacgaggttttcacggttatatagatcgctgttcaaaatagtacttaatagagcaggacacactgacgtcactgagcaagttgacaatacgtctggttggtgctgatggactggctagttatcactttgcatgctcctgatcatgttcaggatataaaggaacaagttgaggatgtcaaggtagagctcaacagaggcccaaatgtagtcgtcataagtgtggcgctttatcaagttctctgtgtcgtagatgatgaaacctgagaaaactaaagctccaaggccaccaaacaatgcaactggtccagagcccaatgggaagaacacctgaataaagcttatcacaacaagtaaaacaagagcagaaaacagaattggtccaagataaccaaattctttccccttctttgaagcccagaaagtatacgcagtcaaagaggcaaccacagctgaggtcaatattaatgcctcaagcacaattttcccttgagtgttagcacatgccacaccaatactgaaactcaagcacaacgtgaacagacccaggtaaacaaagttgtgtgggtgtttgtgctgataatgatacaatgggaccatcaggacgaaggggaggacggcgagcacgagggcgagggtcggggaggaggagagcgtggcgttgagggtggggtggaggacggtgagcgcggagacggcggtggtgaggagcagctgcgcggcgaggatgccgtacaccttgcggacgaacccccaccggagggcgctctccccgcgcgagatccccgggtacagcgtctccccggtgccggcctccaggtccaccgcggaggcgtccaccttctccttcatctccggcgcccggcggtagcccgccggggccagcggctgcatctccgccgccgacgccatcgcttccgacgcgcttggtgggtgggtggggggaatcggggagagaggaggaaggaggtcaggaggggatttcggttcctggccgggcccgggg

SEQ ID NO: 91460 - DNA, 380 bp, Oryza sativa
  Clone ID: PAT_MRT4530_90032C.1
ccggcgcggagcctctgcctcctctcagcttgtcagaaccttgcgagcttccgtgcgccacaccgacacctggcccgctcgatgaccacagaatggcccgctccgtcctcgtcgacggcgtctggcccttactcctccacggtgccgcacgtcgtcaggggcagacgcaagccgctcgtcgacaacgacgccaccggccgccgcgccggcttctacctccgcgtcgacgacctcaagaacgacccttccaatgtggagccgaagaacgaccgggtgctcgttcgcctcaaacagattcctgagaaatgtgttggaggggccctgctgacaaaacctgctgttaagatagaaaggtattggatgggagagattgtgtctga

SEQ ID NO: 91461 - DNA, 607 bp, Oryza sativa
  Clone ID: PAT_MRT4530_90033C.1
ccggccggggtactccatcaaagtcctaattaaccatctctcgacctcacctcacgctccctaactaagaatggctcctaccattaggtgtactactgctcgtaggaggtgaggtctgctgacccccaccgtgcggcttcctcggtcgagagggagtgtagcatgacgtcgtctaggagagcttccaagagatacgattgagtccgtgtccggccgccaccaccacgaccacgaccacaaccgcaaccaccactctcttgcaaccaccacctgacggtgtgagagaccgacgaggcagtgaggacttcaacgcctgcaccggctcagttacgatgagcgcaagcagatgcttcgctgctcaagttacgactgatcgaacctgctgtgtgtaccctgacggactacacacacgtagtatgtgtgccacgtacgtaacgtgaaggtcatgtgatggctaagctctacctgtatatgacgcgtgtatgtgtactcgagcacacgtagcttacctatttatgaacttcttctctgtgcgaacggatgaggtatatgatagatacattctagtcctgcataagataaagactgtcctatgtatcaccgagcg

SEQ ID NO: 91462 - DNA, 324 bp, Oryza sativa
  Clone ID: PAT_MRT4530_90034C.1
atggcgtgcgtgaccaatttattcagtaccaagcggatcggtgactttgccggtgctatgggcgaagtgccccagctggatgtcctttgccaccttacaaccgacacgtttgtgacgcactacgggtggaacttggtgcaaaaggggatcattacaggtatgcccatgctctactggccgctgtatgtggagctgacgattaacaaggtgctcaaggttgactacatgggcatcgacgtggagatggagggatggctggtagggctggtgattcctgaggaggtgaaggtgaaggtcagactgatcatagagtccgagcattga

SEQ ID NO: 91463 - DNA, 1249 bp, Oryza sativa
  Clone ID: PAT_MRT4530_90035C.1
gcacgagcgcgagccacgtagtccctccacacacctcgtacctcgatctcgaagcttaattactagttaacattaacaatggctgctaataagctcaagttctcccctctccttgccctcttcctcctcgccggcatagccgtcacctcccgtgccggcgacatcgccgtgtactggggccagaacggcgacgagggcagcctggccgacgcctgcaactccggcctatacgcgtacgtcatggtcgccttcctcagcaccttcggcaacggccagacccctgtcctcaacctcgccgggcactgcgaaccaagctccggcggctgcaccggccagagctcggacatccagacgtgccagtcgctgggcgtcaaggtcatcctgtccatcggcggcggcgccggcagctacgggctgtcgtccacccaggacgcccaggacgtggccgactacctgtggaacaacttcctcggcggcagctcgggctcccggccgctcggcgacgccgtgctggacggcgtcgacttcgacatcgagaccggcaacccggcgcactacgacgagctcgccacgttcctgtcgcggtacagcgcgcaggggggcggcaagaaggtgatcctgacggcggcgccgcagtgcccctacccggacgcgtcgctggggccggcgctgcagacggggctgttcgacagcgtgtgggtgcaattctacaacaacccgccgtgccagtacgccaacggcgacgccagcaacctggtgagcgcgtggaacacgtggaccggcggcgtcagcgccgggagcttctacgtcggcgtgccggcggcggaggccgcggcggggagcgggtacgtggcacccggcgacctgacgtcggcggtgctccccgccgtgcagggcaacgccaagtacggcggcatcatggtgtggaaccggttctacgacgtgcagaacaacttcagcaaccaggtgaagagcagcgtctgagctatagcctcaacctcaagcccccaagcctgagtaattaacttacgtgacacgtatacttattacttgcacagtggttgagttggactataaataagaggagatccgttcatacgcatctgtaatatagtagtagtaataagcagttatgtatgcacaacccacatggtgtactttgtgtaactctgtgtttgatcatgggagtgtatttgccgatataaattaaataaggagaatgatttgcattaaaaaaaaaaaaaaaaaa

SEQ ID NO: 91464 - DNA, 384 bp, Oryza sativa
  Clone ID: PAT_MRT4530_90036C.1
atgaacgtaacaccaaccaacccaagtaaccaaccacagcaacacaagcagccgcgaccgcgagacgaagggggagagaagattactaaagaggagaggggttttgtggcaaaaatggaggggctgatcccgttcgtgatcgacgcgatcaggaggagcaacgatcagcgcggcggctaccgcggcgtgtcgtcgcaggacgggagctcccacggcggcggcggcggcagcaggaggcacctgatcgactactgggagctcgccggatcggcggcggaggacgcacggccgggctccgtccaggagaccggtgctgccgaggacgagcgaagccggccgccggccgccgtggttgccgccgggtcagcttatcgccggaaatga

SEQ ID NO: 91465 - DNA, 485 bp, Oryza sativa
  Clone ID: PAT_MRT4530_90037C.1
aaagcctgcgcgcgaagccaaccctatcttagcaccgcttgccgaacgcgggggcatgaccgcaaggggagacccatccacgggcggctcgcgcgccttcgaagacaaggcctagcccacggctaccatccaccgaccacatcaaggcggacacaagccgaacagctgaacgcggaaaggtgccacccacgaacaacggcaaggagacgccctaccgcaagacctacctgacgcgcccggccgtcacctcctgctacctgcggcccaggtatcttggctctacaccacctccgcactcacctgacaccacgagaataccagcctggtggactactccacataccacacatgggctccttactaatgaggagcaacgacagagatcgtcaaccatgccaaggagactctaccactacacaaacatccacagaatccagggagttcttataaccataactacgacctgtcctattgaccatgtggca

SEQ ID NO: 91466 - DNA, 2251 bp, Oryza sativa
  unsure (1)..(2251): unsure at all n locations
  Clone ID: PAT_MRT4530_90038C.1
ggtccggattcccgattaacccgtcacctagggcctcttcgagttaagcgcgcagaggccaagggagaaaaggaaaaaaaaacgaaaaaaaaagagaaaaaaaaaaggacgcgccaccgcggcgggagaggcgtacggcgcaccggccggccgtcggatctgcgccggcgacgcgcgcccccgccggatccccgctgccggaggtggacgaggcggcgctccggccatttccccgcccgcgagcgcccagatccgtcccgccggatatttgctgctcaattatgcgataaagtgcttccagttgacgcggagttggtggagacgccttgctctataatctattctccattgctcagcagtgatcagttggaagattctgcctttcttcctcttgctgcctgtttgtttgcttccttggtggagtagacgagaggaggagggcaagaagataaaggtagcttctttcagccactctatgtccagggacttggattgtcctgttcagacacagatggccgttgcagtactggatcggagcttcagcagtgaatatcctgcaagcagcagaactgaggggagatcatgtagttggaaaagagtctttgtccaaactgaaaatggttatgtcctgggcattgaactggagaggggagaaaatgcacacactgtgaaaaagaagctccaggtagccctcaaggtacccacagaggagagctcactgacctttggtgatctggttctgaataatgatctcagcagtattcgcaatgactcaccactgctcctcagaaagaatcaaatgcaccggagcagctcaactccttgcctctctcctactgctcatgatgtgcaggagcaagatcacagcgaacccattgaaatccttggatgtttgagcccctcttctcggatgaagcagcttgctaaggatgttgtggaagccataaggaatggtgttgacccggtacctgttaatagtggcatgggtggcgcatactacttcaagaacatttacggggaacgtgttgcaattgtcaagccaacagatgaagaaccatttgctccaaataatcctaaaggttttgtggggaagacccttggactgccaggcctcaaaagatcagtaccggtcggtgagactgggctccgagaggttgctgcttaccttcttgaccatgataactttgcaaatgtcccacccacaatgctggtcaagatcacgcactctgtgttcaatgtgaatgatactgtcagctgcaaaagtaaagtcttccacaacaaattgcaggctgtgagcaagcttgcatcattgcagcaatttattgctcatgattatgatgctagtgaccatgggacatcaagcttccctgtatctgcagtgcacaggattggcatacttgacatcagaatattcaacacggacaggcacgcaggaaatcttctggttaggaagcttggacctgggcctgacaattttggagtgcagactgaactcattcctattgaccatggtctctgtcttccagaaagtctagaagacccttactttgaatggattcactggccacaggcatccattcctttcactgaggaggaactcgaatacattgcaaatctggatcctgtaaaagatgctgaaatgcttcgcttggagctgccctttatccgtggagcatgtctgagggtgctggtgctatcaacaatatttctcaaagaagctgcagcatttggcctctgcttatcagagataggagagatgatgagtaggcaattcactgggaaagaagaggagccaagtgagcttgagcttctttgcatggaggcaaggaagtgggtcaagaaaagagagctatttcttccagaagccggagttgaagatgacaatgatggcatcacccagttctctatcgacagcgaagatggttcagatgcatctgaattaccatctttcagcaagttcgggctcatgaatgctagtcacagaaatccactgtcaaagttagatgagtgtgatgaggaagatggtgaagaggaagaggatgatgatggtgatgaagaggatgatgatgaagatatgttcaaagatgatgctggcaacttgaaaaatccgttntcgaagcatattccttcagtctcaaagttatcagcatcatttaagggggcttcgttttcattgggaaagctagagcctaccacaaaggtgttccccaagacaaggtgactgctaaaactaactataggggcaaaggta

SEQ ID NO: 91467 - DNA, 916 bp, Oryza sativa
  Clone ID: PAT_MRT4530_90039C.1
atcgcaagaggattaatataatcccgatcgagtagatcgagctgtccggccgtgcgaatcttggtgatatccatggcgccggtggccggctccggcgacgagtggagtgagacggccatgctcgtcatcgatatgcagaaggatttcgtggatccggcgacaagcagcgccgcgctattggccggtgaggccattctacccactgtcaccgcagcagtcgccgtcgcgaggcagcgtggtatcttcatcgtctgggtggtcagagagcatgacccttctgggagagacgttgaactttttcgcaggcacttctattctagtggcaagggcctaggggtggaaggttccaaaggtgctgagctcgctgatgggcttactatcaaagatggggattacaagttggtgaagactaggttcagtgctttctttgcaacgcaccttgattctgtcctcaagacctctggaataaagaacttggttattgttggggttcaaacaccaaattgcattcgacagacagtctttgatgctgtagcactggactacgacaaagttgctgtcattattgatgcaacagctgctgctaagccggagatccatttatcaaacatgatagatatgaagaatatcggagtggaaacaccaaccttggaggaatggagacgttgaacttgctgttacgtactgctcatgttattacaggaaacttgctacatatatacgcaagaccaccaccttcctggatgcatcatcagcaacagcgactggacctccatattgttacttgtttaaattacctccatatgcgtcattataattatatatatatgaaccttgtataactgtgtttaatgtggtgagtactaaatgtggttatatatatatatatatatataaaataagtgattccctcgct

SEQ ID NO: 91468 - DNA, 171 bp, Oryza sativa
  unsure (1)..(171): unsure at all n locations
  Clone ID: PAT_MRT4530_9003C.1
cttcctagctgacacntcctatattttcattcatggcgatgacaccgcagctagcattttctcgcatgcctcagggtttcggttccagccgacggacgagcagcttgtcgtcgactacttgcagaggcgtaccgcttgcgcagccatggcgttactcccgacatcacccga

SEQ ID NO: 91469 - DNA, 357 bp, Oryza sativa
  Clone ID: PAT_MRT4530_90040C.1
gtccgccgccgccgccgtcgcctccgacttgctcctctccaccacatgcgccgcctgcgcgcgctcctgctcatcctccacctcctcctcgcgctctctcccgccccccacatccttcaccaccgccgccgtcgtcgcctcatcgcgggcgcccagatccagcaccccgcccaccaccgcggccgcctcaacctcctctgctcccctccaccaccaccaccaccacccgcccacgctccatacccaaccccctcgccgccgccgcccgccgtcgaggaggaggcggtgaccttggaagtaaccgcgatggtgccgatgacgattttgtgcctcgtgttgcctatatctagtccatta

SEQ ID NO: 91470 - DNA, 4287 bp, Oryza sativa
  Clone ID: PAT_MRT4530_90041C.1
atgggcgacctcaccacctcgtcgccggcgagcgaggtgccgttccgcgtcagcttctccggccatggcggccacctccgcctcgaccccacgcccaatccgcccagccctatacccgagttcgtcctgccgccggcgtacccgctggagagcccgagcagcgtgaaggagtacctcgaggccaactacctcaacccggagctccacctccccaccgcggccgatggcgcgagggtgtgggatttggattggttcgagttggctaggccgccgctggagccctccgccccgcgcaccatgctcgtgcccgcctgggagccgcccttccgccgccgacggccgccattgtcgtcgtcgtcgtcgcggcaggagtcgcaagtgtgggatcctgagtccgtgcagatggatatgagcgacgtgtttgattcgggcaccggtgggataacgccgcggatgcctggccctgcgaaggatttcgtgagggggagcgtgaacagccgcccgttccgcccagggggcctgcatgatgatgcggctgcggctgctgctttggagaaggcatttccagagggtgcacgcaatggggattgggtgcgcgagcttatgagcggagggccagctcaggttaatcctccaggattccgcaagggattggacctgggcaatttgaaggagtacaaaagccattggaagtgttaccaggatggagagcgtgtagatgagcaatccacatcttcatcaaatgacaccatggataagtactcagtgcagtttgatgatctattcaagatagcatgggaggaagattctgacgacaaggtgccgcgtgaagatcatgttcagcaattggttggagatgaggagaccaatgatgttgataaacaaaatattagcaaactgcaaaatgcttctgaaactatagaaaatctggacattgaaaaacagaaaggtggtgcccaaggagatgtttctgaacctcaatcagacttggatcaaatgttattgtcctcagttaaagatactagcagagattcaagtgggtcaggtgatggcagcatggcaaaggagggcaaggtttgggcacttgttggtggggatgaagacattgtgactaacttctataaacttgttccagatatggcaattgagtatccatttgaactagacaaattccagaaggaggctatatattatcttcagaagggtgaatcagtctttgtggcagctcatacatcagcaggaaagacggttgttgcagagtatgcattcgctttagcaacaaaacattgcacccgggctgtctatactgctcccattaaaactatcagcaatcaaaaataccgagatttctgtgggaagtttgacgtgggacttctcacaggagatgtcagtatcagaccagaggcaacttgcttaattatgaccacagaaatattacgttcaatgctctacagaggtgctgacatcatacgtgatattgaatgggtaatttttgatgaagtgcattatgtaaatgatgcagagagaggtgtagtttgggaggaagttattataatgctcccgaagcacatcaacattgtccttctttcggcaacggttccaaacacagttgaatttgctgactggattggtcgaacaaagcagaagaaaattcatgtcacatcgccccttaagtttgagattccaatatttattgattcagttggtgcatgtactgaaatactgaatacattagttgaactgttgaaggtgtgcaattgggcaaatctcatttgcatcataccattttgctgccatttgttcatcaggaccaacaaaaggcctgttcccctggagcactgtttgttctactccggagaagtgttcaaaatatgtgagaaggatgcatttcttactcaaggatatagagaagccaaggaggtttttaaaaagaaaaattcgagcaagcttggaatgaaacctggttcaaaaccaggaacaactgcagtacgtgctggaactcaaggcagaaatccagatacatctagtagaggtagagatcagaaaaatccaaagcaccatcatgccagctcatcagctgctgctgttcagcaaagcacctctgggccacggagatcagagtcttcattctggatgcccctcataaataaccttctgaagaaatccctcgtgcctgtggtaattttttgcttctcaaaaaatcgatgtgatagatcagcagagagcatgtttggtgcagatctcaccagtaactcagagaaaagtgaaatccgcctcttctgtgacaaggccttttcacgccttaaaggatctgataggaaccttccacaggttgtagggatacaaagccttctacgtagagggattggagtacaccatgctggacttcttcctatcgtcaaagaagttgttgaaatgctgttttgtcgtggcgtcatcaaggtgttattttccactgagacatttgcgatgggcgttaatgctccagcaaggacgctcaaggatctggtcgtgtttgattccttaagaaagtttgatggaaaagaacatcggaagttacttccaggggagtatattcaaatggccgggcgagctggtaggagagggcttgataacattggtacagtgatcgttatgtgtcgtgatgaaattcccgaagaaagtgatttgaagaatttgattgttggaaaaccaactcgactagaatctcaatttcggttaacatacactatgatactgcatcttctacgtgtggaggaactcaaggtggaggacatgctaaagagaagttttgcagaattccatgcacaaaagaatttgcctgagaaggaaaagttgcttctgcagatgcttcgtcaacccacgaagacaattgagtgcataaaaggagagccggctattgaagaatactacgagatggtcttagaagctgaggcacacagggagtctattacggaagcaattatgcagttgcctgcttctcaacagtcccttacacctggccgtctggttgttgttaaatcccaatcagatgatgatcacttgctcggtgtaattgtgaaaactccatctgctgcactaaagcaatatgttgttcttgtactgaccggtgattgcacatcgtcagcactagctcctgattcatccaaccagaatgaaaaggaagcaggggattttaaacaaggatactttgttatcccgaaaggaaaacgtagcatggaagatgaatatttctcttctgtcagtacacggaaaggttcaggtgtcatcaatatcaagctaccatacaagggagatgcatctggaatgggttttgaagttagagcaatagagaataaagagattatgaatatatgcgccagcaaaataaagattgatcaagtcagactccttgaggatccaagcaaaacagtttactctaaaactgtccagatgcttataaaagagcaaccagacggaaacaagtatcctgctgctttagatgcaataaaagatctaaaaatgaaagacatgcttctcgttgagaactactatgcttaccagagattactgcaaaaaatgtctgaaaataagtgccatggttgtataaaattaaaggagcatattgcattgatgaaggagcaaaaggtgtacaaggatcagctgaatgatttgaaatatgaaatgtcagatgaggcacttcaacagatgccggagtttcaaggcagaatcgatgtactaaaagaaatccattacattgattctgatctagtggtgcaacttaagggccgagtggcctgcgaaatgaattccggcgaggagttgatatcaaccgaatgtctgtttgagaatcagttggatgacctagaacctgaagaagccgtagctattatgtctgcattggtcttccaacaaaggaatacatcagaaccatctcttaccccgaaactagcagatgccagaaagaggatttatgatacagcaatcagattaggaaagctccagagagagttcaaggtgcctgtagatcccgaggaatatgcccgtgataatctcaagttcggtcttgttgaagtcgtctacgaatgggcaaaggggaccccatttgcagacatctgtgagctgacagatgtatctgaaggtctcattgtaagaacaatcgtgcggttggatgaaacttgcagggagttcaggaatgcagcttccataatggggaactccgcgttgcataagaaaatggagactgcgtccaatgccattaagcgtgacatcgtctttgcagcaagcttgtatgtcacagggatatga

SEQ ID NO: 91471 - DNA, 634 bp, Oryza sativa
  Clone ID: PAT_MRT4530_90042C.1
tcaccaccaccgccgcttcctcctccgcctccgcctccactccacaactccgccgccgccgcaatgctggaggccgtgatcccggcggtgtggagcgccgtccacgggtggttcacccccgcggtgctcttcctcgtcctcaacatcgtcatcggcaccatcgcggttacttccaaggtcaccgcctcctcctcgacggcgggcggcggcggcgagggggttgggtatggagcgtgggcgggtggtggtggtggtggtggaggggagcatggggggggtcgcccgccggccgtccatggcgctcgaccggctccggtcgtttaatctctccggccggttctccgcagccgcctctgcccctgctgctcccgaggcggccgcggtggtgggcggggtgctggatctgggcgcccgcgatgaggcgacgacggcggcggtggtgaaggatgtggggggcgggagagagcgcgaggaggaggtggaggatgagcaggagcgcgcgcaggcggcgcatgtggtggagaggagcaagtcggaggcgacggcggcggcggcggacctcccgcggttgccggcgcggtctgctcatgtcggccagcgaccagtcggcgttcgcgcacttcaaggcttataa

SEQ ID NO: 91472 - DNA, 1215 bp, Oryza sativa
  Clone ID: PAT_MRT4530_90043C.1
ctagctgattccaaattcaagtccagaccacccaccagtccaaatcttgttcctcttctttccccaaaccctcgcgctcagggctctgatccagcgctcgccgacggccgcgtcggccaaggcctccttggtggcggcgacggcaggcgtgggcggggtggagccagccgtgacgctcgaccaggtgccacggtggagcaaccctgaccagcgcctctcctcctcttcccgcaccgccgccggatcctttgtgctcatgttggggcattctttatatggatggaaagctaagaagataaattttccaatggtcttggtcccacgtccaaattctttccgagtcaacgggacttgactgaacaatttgacgtccagaatcttgtccttgtttgtgttcttcaattcgcaaacagggattagccttctcggcgaggtcatccgcgtttcgacacgggtgataacaagagaagacgtggtgctgtgattgcggagctcaagagcgtgcgcgttcaagaagccggatcgatttgtgtcgcgagtctttgccagcgggtaatagtagaggatgtcctcatcattcccacccccacttgaccccttgttgcgtctttgccagcgggtaatggtgggagatgtcctcatcaccagatctatcctgaattctatatctctcttaggcggtatgccacgtagatcaactgggaacacatttggatagtcccgcatcgaaatcacatctggtgcgccttgagcttctgcggcagcaacatgattgacacgagccttcggtgctggtgcaatggacttgttctgaataggggcagtctccacacgtcgaggtttcggacacttgtcagcaaaatggcctggctcatcatagttgaagcacaccactggcatgtttccttgctccttgataggctggttgtgagcaatcttgtgtttcttctcttccattcggttgtacttgtcttcctggcgaatagccttgtccaccaacttctcgtccatgcaaacatcctcaggagcataacgggccagacaattgaactcatgcagaaactcggtgatagaacaagatctcagagtgagtgccctgaactccctcttcttgagagccaccactcccgatggtacatgaatcttcttgaaagcaacagtaaactcgagccaagtgattggctcaacaacaacctgaaggatctccttcatcat

SEQ ID NO: 91473 - DNA, 2850 bp, Oryza sativa
  Clone ID: PAT_MRT4530_90044C.1
atgggtagactccaaaatttgatgcttctatcggcggggttcttctccacgctattgctcgcacaggtgacgagtgctgctgcagggatgacagtgaaagtgagcacaacgcccatcttctccaagatcccacgagctcagacgaacaaggattttcaggtgctactacgcatcgaggcgccgcctccggtggatctcaagggtcgtgtccccatcgaccttgtcgctgtgctcgacgttggtggtggtggaatgagcttggaaccggttaagaaagccatgaagttcgccattcgacagctcagtgatgaagactctatcgccatctttgggccacccatgagccgagaggtcatccctaagtttatgaatattcatggtagccgaaggattgctgagaagaaggtagatgagctggagggccgtcgctttgcccatccagcaaggtctagcttggatgaggccctcaagatgctggaggagcagccggcgagctcttccgtcggccgcgccaagttcatcgtgttggtcaccgacatcacccgattcagctctgacatgccggagtggttcaccgccgccctggccaagtaccccgtgcacgccttcggcctgggcgcctcgcacgacgcggcggcgctgcgcctcgtcgcccagcggtctcagggcacctactccttcctcgacgacgccaacgccgacaaggtcgccgccgcgctcgccctgtgcctcggcgggctcaagtccgtcgccgccgtcggcgcgcgcgtcgtcctcaaggcggcgagcggcagcggcgtgaggatcgacaggatcagctccggtgggtacgcgagctccgtctcccaggtcgacggggcctccggcgagatcgccatcggcgcgctctacgccggcgaggtgaagaccttcgtcgtccacctcgacgtgcccgccgcgcctgagatttcgccgggggagggcgtctgctgcgaccagcagcagctgctcgtcgccagcctcgacggccagctctacaccagtggcggcggcgtcgacgtcatcgacgacgacgcagcagctggtggtggtggtccgatccaagacgtgctcgtcgtggagaggccacccgccgccgtgctgcccaaggtcccctccgccattgtcgtcaaccacatcttccagttcagggtgctggagatggtcgacgccttcatcaacgacgagatcctcctgcgccgcactccggcgacgaccgggaggacgaaggacgtcgacgtcgacgacgaccgggggatgaagctgctggcgaggtgggagaggttcgtgctcgagcaccagttctgggtcggcctcgacctgggctccctcgacggcgagatcaccgcggtggcgaacagcctgcggaagcagcagcacgtcgtcggcggcgtcttgccgtcgtcgtcgatggcggcgtacatattctcgtggatgtccagctacaagatgcagcggccgacggcgatggggtcgccggcgaaggtggtgggcttgttcgtgacgctggaggttcacctcacgctgcaggtggcgatcacggcggagaacggcggcggcggcggcgacggcgagtgcgagtacagctgcgtggagcagctgccgcctgcgccgccgctgctggtggcgtctggacgcgatgacgacagctaccgtttcaacgccgcgtacgagggcgtcatatcgctcgacgacatcaaccaattcatgatcaaaatctaccaggccatgagtgcagatccagtgaaagtgagcaccacaaccatgttccccacaatcccacgagaccacacgaacaaggactttcgggtgttactgcgcgtcgaggcaccaccaatggcagatctcaagggccatgtccccatagacgtcgtcgaggtgctcgatgtcagcggcagcatgggtgatccggcaatggcttcctccgacttcaagaagaacaagcccccgtcgaggctggatgtgctgaaggacgccatgaagttcatcatcaggaaacttgaagacggagatcgtctctccatcgtggcgtttaacgatcgacctgtcaaagaatatagcactggtttattggacatctccggtaatggtcggagaattgctgaaaagaaagttgactggctcgagggccgcggaggcactgcacttatgccagccctggaggaggccatcagggtattggattgtcggcccggtgacagccggaaccgcgtagggttcattctcctcctgacggacggcgacgacacgagcgggttcaggtggagccgtgacgtcatcaatggcgccgtcggcaagtaccccgtgcacaccttcggcttgggcgcggcgcacagctcggaggcgctgctctacatcgcgcaagaatcgcgcggcacctactccttcgtcgacgatgagaacatggacaagatcgccggcgccctcgccgtgtgcctcggcgggctcaagaccgtcgccgctgtcgacacgcgcgtcagtgtcagggtcgccgagctaagcggcgcgcggatagagcgcatcgactccggcggctacgagagccgcgtcgcgtgcggcggggcgtccggtgaggtcgtcgtcggcgtcctctacgccggcgaggtgaagagcttcatcatccatctgcacctgcctgctgcgtcggtgtcatctttggagtgcggctactgcgacgccgcaaccgtctgtgaccaccacggccaccattgtcatcgtcgtcacgagcagcggctgctcgacgtcggctactcctaccgccgcgccccggatgccgcagcgatatccatcgttgggcgtggtgtgttcgtccaaaggccggaggaggtgtga

SEQ ID NO: 91474 - DNA, 122 bp, Oryza sativa
  Clone ID: PAT_MRT4530_90045C.1
ccggggcgacaccacgccgcccgcacttatagatccacagtgcacctctaggcagtgtgttgcctgcacggctgtggggtctttacaggcctctgagcacaatggaataccccagaggttga

SEQ ID NO: 91475 - DNA, 602 bp, Oryza sativa
  Clone ID: PAT_MRT4530_90046C.1
actttagagttcagagtagagagagagagagagcaatgcaaggtttcagctttgcggccatggaggagttcacgttccccagcgtcgcaccggagcgatgcaacgccggcaagaagccgcctttctcccctcacttcgccaccccgccgccgtggtttggcggcggcgttgtcgtcgacgcggtggtgtacgatcaccggaggagcttctcggccgtcgagaagggggaggaagaaggcacggtgagaggcggctggtactattgctacgacgacggcggctgcggcaatgtctcggcgaggttcgccggcggcgaggagaccaagacgatggacatgctgtgggaggacttcaacgaggagctctcccgggcggcggcggcggcgccgtgcccgctgagcaaggagtggaccaaggaggcgtggctcgccggcgacggcacccccgaaatgcgccgccatgccgccgcggcggcggcggtggcctccggcagcgtggtccggcggaggcggctgagcttgctgatgatgctgaagctgctcaaaaagctcttcttggctcacaaatccaatgctgcatcaagaaaggcaccaccaatctga

SEQ ID NO: 91476 - DNA, 198 bp, Oryza sativa
  unsure (1)..(198): unsure at all n locations
  Clone ID: PAT_MRT4530_90047C.1
gtagccatggcgaagcatctcgcgctgtccgnggccgccgcggtggccgtgtcgtggctggcggcgtcgtcggcggcggcggcggggttctacgagaaagttcgacgtggtggggcgccggcgaccacgtgagggtggtgagcgacgacggggaaagacgcagcaggtgggcgcttgacgcttngaccnggagcttcc

SEQ ID NO: 91477 - DNA, 1179 bp, Oryza sativa
  unsure (1)..(1179): unsure at all n locations
  Clone ID: PAT_MRT4530_90048C.1
ggcgcccctggtcccactgacaaccacgacggagaagaattcacccattaagaaaaacttcgncggacgcnccaagcgtcggcggcncgtctagaactagcggatcccccgggctgcaggttttcggcacgaggcccaagtcgcgtcgcaccgaagcagagtagagaaggagaggagcggagcgccatcagccgaccgatcgagtgatccgatggctcttgctctctgcacctctgatgctgctgccgccgaggcgcgggcgctcgcggcaagggttttttttacaacaacgagggggaacccggatacagccgcaaccatcgtatataatgacctcgtcccgaagggtgacagttaatatattatgcatgctcattatactagagagatcgaccccccgatctgaagattaaccggccttaaccaacattatcgccggccagattttgtctgttgttcgtccccgcctcgtttttcgtgacgaaatcccctctggaacaatacgcatgccccccggccccccccccagtctcaccgttctgaatccggaagacaacaaaaccgcggacccgcacgacgatcctatcagccaaccccacgtccaaccgcccaccgctccgcacgcgctgcctccgttacagagttgggagacgaacctacaacagacagcaagaaatctcccagaccatagccaaaacctactcgtgctacccctccgtgctgcacccaggcatcgccgctgtagtttaatgcgggaattctcatcctgaaaccaaagcggagaccgagccttcctcccacccgtatgccacgtctctaatcccccacccacgttactcgtcattccatcctcctcccagccttcgctcgcgcaagccacaacccgccaaaccacgactacaccctgagcgccgatatctcttcctctgtcaaccgtcctattcctgcctgaggcgcccactccacgctacttcacgtgatcgattagcaatacctcctctaggctcaccatcagcacccccgcaatacttcgctcaccgccccgcttgaagggccccatggtaccctcccacgcgtcgagcgagcgctgggctatccacctttatacctctcccggcaggcccggtcacgcgcgcctctctgcacacagacaaatttataccacccttaccttcacag

SEQ ID NO: 91478 - DNA, 1870 bp, Oryza sativa
  Clone ID: PAT_MRT4530_90049C.1
atgtcggcgtcggcggaggcgaagagtcgacgggagaggcggtcggtggtggcggagctggagggggcgctgctgcgcgacgcggcgacgttcccgtacttcatgctggtggcgttcgaggcgtccgggctgccgcggttcgcggcgctgctggcgctgtggccgctgctgtgggcgctggagcgggcgctggggcggggcgacctggcgctgcgcgccgcggcgttcgtggcgacagcgggcgtgccgcgcgcggaggtggaggccgtggcgcgcgccgtgctgcccaagttcatggccgacgacgtcgacccggcggcgtgggcggcgttcgggtcctgcggcgggcggcgcgtcgtggtgacacgcatgccccgggtcatggtggagcggttcgccagggagcacctcggcgcgcacgaggtggtcggctgcgacctcgagtacagccgcctcaggcggtccaccggcttcgtcaggggcggcggcggcggcgagcgcgcggtcgccgaacgcgtgcgcgcgctcttcgccgatggcgaccggccggacgtcgggatcgcgcggtccgagtcggcgacgcgatccttcttgcccttctgcaagaagcaactccggccgccgttctgtgaggacgacggcgacgacgtcgccgccgccggcgagcagcacaaatgccctccgttccggccagtcatcttccacgacggccgcctcgtgtgccggcccacgccgctcatgtcgctcgtcatcctcctgtggcttccgcttggcgcgctcgtcgccttcgtccgcatcgccgtcggcatctccgtgcccatccagatcatcccccgcatcgcgccctacttcggcggcgccgtcgtcgtgcacggcgccccgccgcccgccgccgccagcgggccggcgtccggcgtcctcttcgtgtgcacgcaccggacgctgatggacccggtggtgctcgccaccgtgctcggccgccgcgtggccgccgtgacgtactccatctcccgcctctcggaggtcctctcgccgatcccgacggtgcggctgacgcgcgaccgcggcgtggacgcggcgcagatgcgcgccgagctgtcgcgcggcgacgtcgcggtgtgccccgaggggacgacgtgccgggagcccttcctgctccgcttctccgcgctgttcgccgagctcagcgaccggatcgtgccggtggcgatgaactaccgcgtcgggctcttccacccgacgacggcgagggggtggaaggccatggaccccatcttcttcttcatgaacccgaggccggtgtacgaggtgaccttcctcaaccagctccccgccgaggagacgtgcgccgccggcaagagcgccgtcgacgtcgccaactacgtgcagaggatactcgccgccaagctcgggttcgagtgcaccaccttcacgcgcaaggacaagtaccgcgtgctcgccggcaacgacggcatcgtcaacgtcaagccgccggcggcggcggatccggcgccgtggcagcgccgcctcaaggaggttctcggcttcttgctccactaatcgatcacaaattcacaatactttcgtggccaaagtgctctgctcacaagattaatttgacgaattttaattgcgataccccccaaaaaaattgcgagttttaatttacatgcgtgtgcatgtatgtacgcaaagaaatgtaaatgaagacagcagccaccattagatatcaaacctacacctacggttgcttttccttgctttttcttacgaaatttgttcatgattcatttgattttatttttgttgtaatcaaactatactgctgtatatatatatttacacatccattatcacaagttgcatgctc

SEQ ID NO: 91479 - DNA, 2007 bp, Oryza sativa
  Clone ID: PAT_MRT4530_9004C.1
atggtggtggcggcggcggcgaggccgcagacggcggaggcgctgtcgaagcgggcgagcatgctgcgggactcgctgcagaggagccaggggaacacggacgggatggtcaccatcctcggatccttcgaccaccgcctctccgcgctcgaggccgccatgcgccccacccaggtgaggacgcacgcgatccggatggcgcacgagaacatcgacaagacgatcaaggccgccgatggcatcctctcccagttcgaccttgcgcgccgggctgaggcagcggtattgaagggtcctcatgaggatttagagagctacctggaggcagtggatctgctcaaaggcatcgttcgcttcttttccacaaacaagaacttcaagagcagtgaaggagttctgaatcatgtcaacaacctgttggctaagtctgctctgaaaattgaagaggaatttaggcagctgatgactacgtacagcaaacctattgagcctgatcgtctctttgattgtcttcccaagtctctgcggccaacaaaagatgatcctgacgctgatccagggaatgctggccactctgagcatccatccaaaagcttggagactgcagtataccggacaccaacactaattcctccaagaatcctgcctctcatgaatgacatcgctcagcagctcattcaggctggaaatcagcagtcatgctataaaatttacagagatacccgtggatctgcactagaatcgagccttcggaaattaggagtagagaagcttagtaaagaggatgtacagaagatgcagtgggaagctttggaggctaaaattggaaactggatccattttatgcgaattgcggtggggattcttctgagaataggtccatattgtgtatattcagaccttaagactcatattttgcttacgacacaggtcaaactactactagcaggtgaaagaaaaatctgtgaccagatttttgatggtgtcaactttaacaaggatcaatgttttgctgaactgacagcaaatagtgtcgtgactcttctaagctttggagatgccgttgctaaaagcaaaaggtctcctgaaaagttgtttgtattgctagacatgtacgaagtaatgcatgaacttcaacccgagattgaggtgattttcgaaggaaaatcatgctctgagatgcgggaggcttcattgggcttggctaagcgcttggctcagactgctcaagaaacctttgctgattttgaggaggctgttgaaaaggatgcttcgaagactattgttaatgatggaactgtgcatcctttgactagctatgtgattaattatgttaaattcttatttgattaccaatcgacactgaagctactatttcaggaatttgaaactggtagtgagacagaatctcaacttgctgttgttaccatgaggataatgcaagccctacaaaataacttggatggaaaatctaaacagtacagggatcctgcattgacctacttatttctgatgaataacattcattatatggtcagatctgttcgtagatcagaagcaaaggatatacttggtgatgactggattcagaggcaccgtagaattgtgcagcaaaatgccaatcagtataaacgtgttgcttgggcaaagattctccagactctttccatacaaggtgcgggcagcactggttcatcagatcttagcagcagtggggtttcaagagctatgatcaaagaacggtttaaatctttcaacatgcaattcgaagagctccatgcaaagcaatctcagtggattgtacctgatcaggaattgcgtgaatccttgaggcttgcggtagctgaggttctgttaccagcctatcggtcgtttgtcaaacgtttcggtaaccttgttgagaatggcaagaacccgcacaaatacgtgaggtacagcccagagatggtggagcagctgttgggggaattcttcgaaggacagcaatggggggagcagaagcgctga

SEQ ID NO: 91480 - DNA, 1471 bp, Oryza sativa
  Clone ID: PAT_MRT4530_90050C.1
gggtttaggctcaaacaggtttaatggctcccttccttcagaactggggaacctggacaagcttcaggaattgtacattgacagtgctggcttaagtggtccactaccatcatcattttccaagcttacaagaatgcaaacattgtgggcatcagataatgattttactggacaaataccagattatatcgggaactggaatttgacagacctgcggtttcaaggcaattcttttcaaggtccaattccttctgctctttctaatcttgtccaactatcaagcttgattttgaggaactgtaagatatctgataatcttgcatcaatagacttttcgaagtttgcaagtttaaacttactagatttttcttacaaccagctctcaggaaattttcctccatgggctagtgggaaaaatttacaattgaatttggtggcaaacaatttcgtgattgatagctccaataacagtatcttaccttcagggcttgcatgccttcaaagaaatacgccatgttttcttggttctccacagtcttcctcctttgctgtggactgtggtagcaatagactcatatcagcctcagataatttgaggtatcaaactgatgatgccagccttggacctgcatcatattctgtcacaggagcaccaacctggggtgttagcaatgttggaaagtttgtggatgcaccaaatggaagttacataatctacagctcgcgccagtttcagaacaccctagattcagaactgttccagacttcaaggatgtcaccatcatctttaagatactatggtattggacttgagaatggaaactatacagtcactcttcaatttgctgagtttgggatcgaagacacgcagacttggaagagcctagggagaagggtttttgatatatatctccagggtgaacgcaaggagaagaactttgacatcaggaagacagcaggcgataaatcttacactgttgttaagaagcaatacaaagttcctgtgaccaaaaacttccttgagattcatctcttctgggctggcaagggcacttgctgcattcctactcaaggatactatgggcccactatctcagctctgagtgtaatccctgcaggatcaatttttgcatacctctgtaagatcccattttctcttttcaatctaacaagtggcctctgttcagatttcacccctacagtgggtaatacagcacataaaaacaagagtactagtaaaacaggtgtaattgttggagttgtagttggtgtgacggttttaggtttggtagcacttgttggaatctttatgtggagacagaaaaggagaaaattatcactggagcaacaagagctatacagtattgtcggaagacctaatgtattcagttatagtgaactaaggtctgcaactgaaaattttagttccagcaaccgccttggtgaaggaggatatgggacagtttataag

SEQ ID NO: 91481 - DNA, 486 bp, Oryza sativa
  Clone ID: PAT_MRT4530_90051C.1
atggggcttggggcgagcgtcctttcgcacaaacgcatgaccgagctcaacctcgtgttgggctcaccggccatagtcgtttgcagtgacctcacgctagttgcgtcctcgtctggagtgactaccgcggcgacgtctccatgctctaggacaagcgcgcacttcttgaccaagctcctcgacataatacaagcttcctcctcgccgcctcccgccagaactgcaacgccgcccgtcatccacgatgacaccgacgtctcctacattttccctcagcacaacaatgtcttcctcctcaacgcctcctgccaaatttgcaataccgccagcatactcttcttcctccaatctcatacggggttcgctgacctcccaccactattgttgcctcctacggacggtctcgctgaccgccacccctctccttgccggcgaactcgtggggaagagagtgggaggtggatacatggggaagagaagggatag

SEQ ID NO: 91482 - DNA, 726 bp, Oryza sativa
  Clone ID: PAT_MRT4530_90052C.1
atggagatcacacctgctggcagcgaccatgagattcctgaacacctatccatgtgctctaaactttacctcgcagcatttcgcggctacacagatgaggtctgcaatctcttagccggaagcagtggcgccgccgtgcagccggcgaacagctcgccatcgccggcagcgcaagaacgtgctaatcaccaaggaccctgcagcattcgcgaggttaccgcagagcttcgcacgcttctccacattgcagccgggcaaggacacgacgacctgatcgccgagctgtgccttcacgacagcagcctcctctcctcggccagctcgtcggggcacacgccgctgcactgcgcggcgagggcagggcacgccctcgccgtccgggccatctcgctgttggccggggcaagtgttgaggaggacagggtaagggacgtagtgcgcagcaagaacgtcgctggggacaccgcgctgcacatcgccgcgaggcacggccatggcaaggcggtggaggagctgatggaggtggcgccggagaccgcgtcggagctgaacggcgccggcgtgtcaccgctgtacctggcggtgatgagcaggtcggtgcgcgccgtcagggccattatctcgtgcagggatgcgtcggctgccggccctaattctcagaatgcgctgcatgccgcggtgctccaatgttcagattttcaactaatattcacacgtgttaattaa

SEQ ID NO: 91483 - DNA, 653 bp, Oryza sativa
  Clone ID: PAT_MRT4530_90053C.1
ctccagtcgacctttatcttctgttttagaacctgtagtttcctaccttcccctgtgccctaactcaggcactgaagaatggaacgaagcatttgcaagcctttctgaacttctgacacaatatatacaccaaaaggttgaatctgatattgaagagctccacaaatgtttccggcttttaaaaagattgtcatcaggatcagagcttttcctggaattgcacgatagcattcttcctctcttacaggattctgtcaggcagcattatggtgggatactacatttatagtttattgttcaagtacaattagccattttgccgtcgaaagggccaagagaacctgttgagatctttgctccgatttacctcaacggtgagtcgacgcgatcttgcgatggtttgattgaatccacaaattcttactggggatggctgacaggctaaccatcatggactgttctcctgatcgtgttgtcgctaattccacttggatatggaccgagccggtttttttgttgctgcaaacctacaaagttgtcctttatacctgtaaatataactagtattattactagcactactacattgacggctctatgcaggctgcaacttgcgcttctattgacggttcctatgcaggtttgcttcttgc

SEQ ID NO: 91484 - DNA, 3550 bp, Oryza sativa
  Clone ID: PAT_MRT4530_90054C.1
atgatgaaatctcagagctgtaccagcgatttgctgctagcgccgcttcctcccgccgttggctaagttccgccaggcacactatcaggccctcttcacctcaagaagcggttgctggtgacaacgctctgctgctgcgagcatgaccagcagaaaagagcgggaggtacaggctctggcatagcttcgagtcgcctcatgatccaggtggtgggtcctctccgtgtctcgctggaggagggcgcacatgcagttggtgacttgacctccttttggagtcagaggctggggtggaggacttgagcagacagccgaactgacttttcggctatacaaaaatcttaagcggtggtctgatggggagcttccggcggaaacagcgtggtctttccccgaggactacttaagaaagtgcgtctttattagcatatgccagtcagtgatagacgacaaggtggccttcatgcgatgataccatgtccagcttgatggcactaggcattttgtgcgatgcaaagagtatgagcatgacgagtggtgaaagattttgctcgtacttattaaacttgcacgagacacattgtagcttactgagagtaaaaattcaacgatacctattctttgatgagatatgcaggtgtattaatgagactaaattaagtcaagaaggaattgtttgtaaaattttttcttccttgttttcctggaaacacataaaatcagactcactcgtagaataaatgatccatttactatttctcagggagaacaatagattcctgggaaccagattgagacaaaacttctgaagactacatagcatttattataaactatgttgttggccttggtccatggaaagatacggttgttccagcagccaaaaactatacgatggcaccgactgatcttgttgcaagagcacatgctcataatcttcaggtacacccgtacacatacaggaacgacacaagattcaagccagtcatactgggaccatcacttcttgatgactacctagcatatattagtaactatgttgttggccttggtccatggaaagatacggttgttccagcagccaaaaactatacgatggcaccgactgatcttgttgcaagagcacatgctcataatcttcaggtacacccgtacacatacaggaacgagaaccaattcctgcacctcaacttccatcaggacccttatgctgagtatgatttctggataaacagcatgggggtcgatggattgttcactgatttcactggatccctgcaccgttaccaggaactggtagctccacatgcgaaggatgaaactgcaaacagcctcctagtaaaaattgctcaaatgatctcccaatatgaaggtttctgatcatgttttccatttttccgttaatcgacatgcttatatacacgcattagtgatcaagggtgaccttgaatgttacagaacaaaaaaaaaaaaaaagctggagcggtggcccggcggcgagctgccgccggacctcgcgaggttcgacaccgtcgacgacgccgtgtcgtacctcgtccggtccgtctgcgagctggagatcgacggcgaggtcggctccgtgcagtggtaccagtctacagaaagtctagccatgctaaaagcagtcacggtcagccgtcagcgcaagccaagtgctgtaccctgttctttaccacggcggtttgatcggatccccaatcctgggttccggtggctctcgagcacagcggcggtcgggaccggcgaagaagcggcttttcgctgcggagggagtgcggagttatgtgatattgagcatgcactcaaggcactgcggaagaagattcttactttggattttgaaaattccatgcgtgttcatgatccgcaaaactcatttcagtacttggaagtgctgtacaaaattcggcagctgactgaaaggttagggagcttacaccctgttggggaagccaaagagcataatgagctcatagtatatgctggcgacctttttgatatggcaatggcaaggcttgaagaggaatttgtttatcttcttacgcattacaaacaaccaatagaacaaggacttgtttctttccggtctacagaggatggcagtgtggatgatttttcaagcagctcattcaatgaggaacaatgtgacggtaagacaacacagactgaaactactggaggatcagaatattttgcgactgatttgattcaacatggtgcactctctgctgtcaagtccattgccaacttcatgtttctgagtgaatatgataaggagtgttcccaggcttacataagcacacgacagagtgcagtagatgagaaccttgggtctcttcgtattgacaagctcagcatggaagaacttttgagcaccaactggaccaagttaagttcattgataaagaggtggaatcgtgcaatgaaggtctttgtccaagtctaccttacaagtgagaagcgccttagcaatcatgtctttggtgaactttcagaatcaaccgcagacttgtgtttttatgagatttcattgagctcagtcatgcaacttctgaccttttatgaatctgtagcaattggacctcctaaaccagaaaagcttttccgtctgcttgatatgtatgaggtcttaaatgatttactccctgaagtagaattcttgtttcaagaaggatgtgatgatatagttttgactgaatataatgaagtcctgctacagctgggagaatcagtaagaaaaacaattacagaattcaagtatgctgtccagtcctacacttcatccaatgcaatggcccgtggtgaagtgcatccccttacaaagtatgttatgaactatataaaagctctcacagcttatagcaaaactcttgattcgcttctaaaggacacagatcgaagatgccagcatttctccactgacattcagtctatggcaaaccaatgtcctcattttactgtcagtgcattgcatttgcagtcagttactgcaattctagaagaaaatcttgaagctgggtccagattatatagagatgatcgattacgaaacatctttatgatgaacaacatctactacatggtccagaaagtgaaaaactcagagcttaaaatctttcttggtgatgactggatccgggtgcacaatcggaagtttcagcagcaagcgatgagctacgagagggcatcgtggagtcatgttctctcttttctgagtgatgatggcttgtgtgctgctggggatggtgcttctcgtaaaatcattaaagagaaattcaaaaatttcaatctgtcatttgaagatgcttatcgaactcaaacaggatggtctatcccagatgaccaactccgtgaagatgtcaggatttcgatatccctgaaaattatacaggcctatcgtactttcacgggacgatactatagccgccttgatggcactaggcacctagagcgatacataaagtataagcctgaggatttggagaaacttttgctcgatctttttgaaggagctcaaaaaacattgtag

SEQ ID NO: 91485 - DNA, 1484 bp, Oryza sativa
  Clone ID: PAT_MRT4530_90055C.1
cttgctgcctgcggtcgcgataagctttttttttttaaacttgctatatactcccttacagatccaacctaatgtcattttcttaattcatcaactgggttacagatttggatgcacagaaacctattcttgacctcactaatcaaggtgtccctattaggatgagggttagtgaccacataactcctgtaccactcactagtttacaacattgaaataagcgattctttttgcaatgtgtctctcagcgtttttatttttctccggccccacgtcccttgccccccgccgccatggccgcggggtttctctcccgcgctgcttgctggtgggggttgactacctccactatgaataagtctttctcgagtaactgagactcaacgtgtaggcgttggaagctgaaataggagatgggtccgttccagctcggcaagaggattccggaacatccaagtcctagctataacacagacaggaaagtgtttttctttcattgcaatgtctggcatcgtttcgaataggctcgctacatagttgcaggctcgctcgctccattcttacgctcgctggctggtgaggcagattggtatggcactggctggctgctaatggtcacccaggatctactatgcgcgatacgccgacgacattttgtttgggattccccgggccaaagagatatacctgttccattccaagtgaaagaccagcagctgcgcgccttaccttctagtaaagggcgaatgagggtctgaaagaggtttcaatgcacagatgaacccgcgaggcatatttctgagttgaggaacatctgtttgtgggtggtaagcttcatgttccgctttacatttaggctgtgaaaaagttctagccaaaaaagcttgtaaatatcggctgtgagttatgatgtgtgtaggcagcccgcctatacacctggtctcagaagattttagtcacatcttttgcgctggggtcagaagtggctgtcatctcgtaggtagcaaaggactcggctttacttaacaatggttcgctttctgggaattccatcattcccactaggcaataatatgtaaactaggtatggagtatgtttttaacggtgtaagtaccccttcattaaagatccctttccccagtctaccttcagtggccccaggcggataagccaatctacacctaggatcattgcatcacccctccaacattcttacttttgaccttctaacttggcatcgcatctcgtgtcagtcactattattgtgaaccatagtccacttgacgactttaccccaccgggttgttttccccaattccaggaatagagtagcattctcaggcgctaccctcagttgcagcctcagtccatataaaacagtcaatccaccagcatttagtgagggttaataatcactagtgcggccgcctgcaggtcgaccatatgggagagctcccaacgcgttggatgcatagcttgatat

SEQ ID NO: 91486 - DNA, 1681 bp, Oryza sativa
  Clone ID: PAT_MRT4530_90056C.1
ccggccggggcattcatcagaacaccatccgtccatcttaattcgcttctacattggggcgcttgttaatttacatgcgagcttgttgaggttgaagcgatcgagatcatcgttgagagctgtagtacgtggtgagcatgggagagcagcagcagcaggtggagcggcagcctgacctgcctccgggctttaggtttcacccaacggacgaggagatcatcaccttttaccttgcacccaaggttgtggacagcaggggcttttgcgtggctgccattggagaggtggatctcaacaagtgcgagccatgggacttgccagggaaggcgaagatgaacggggagaaggagtggtatttctactgccagaaggatcggaagtatccgacggggatgaggacgaacagggcgacggaggcgggatactggaaggcgacggggaaggacaaggagatcttccgcaaccaccacatgctcatcggcatgaagaagacgctcgtcttctacaagggcagggctcccaagggcgacaagaccaactgggtcatgcacgagtacaggctcgccgacgcctctccgccacagccgccgccgccgccatcctccgcagagcccccgaggcaggacgactgggccgtgtgcaggatcttccacaagagctccggcatcaagaagccggtgcaggtgcccatgcagatgccgatgcagatgcagatgccggttgctcatcaggtgcccgccgccaactaccagcagcagatggccatggcctccgccagcatcatccaagtccccatgcagatgcagatgccctccatgtctgaccagctgcagatgttggacgacttctccaccggttcactcatggcgccgcctccgcctccgccttcctactccactctacctggcttcccgcttcagatcaacggcggcgccccagcagtttgttgggaacccgtcgatgtactaccagcagcagcagcagcagcagcagcagcagatggacatggccgccgggaggcttcgtggtgaggcgagccgtcctctctggtggtgtcgccacacagatgctgcccgatacatatatacataggcatgcgcgagcttaattagtgtgatgacaagaggatgctggcttaattagctagtatactccatcatatggcttttgcattgcctttaattttggcttcttgtgtgagtgagatttgctgagagattattattattattagttattatagattgcatggctagctatatttgtacatacataataatatgtgtgtcccatcaatacgtatgtgtgtgagcgcgtcgccgtcttgcgtggtctaaggttactgggtattgccgtacaagttatatataggtttacatgcatgcgtgatagatatatgtgtgtatttgtgcgtgagcccagcttagatttgtgttgtacatagctagcggtgcatgcctgctattcctctgtatggattgaattatgggaaataattacaagatataaataggtatacatgcatgcgtgatagataaatgtgtgtactgcatgtatttgtgcgtgagcccagcttgattgtgttgtacatagctagcagtgcatgcctgccatccctccgtacggattgaattatgtgaattaattattttgtttaattaaaaaaaaaaaaaaaaaaaaa

SEQ ID NO: 91487 - DNA, 198 bp, Oryza sativa
  Clone ID: PAT_MRT4530_90057C.1
atggggtgttgcagcatgatcgagctagattacatcactgagatgaagacggtcaacgtcgccgtcgagagggcgttcgacgtcgaggtcgtcggcgagaatggccggagcggcagcgccgccaccgcgccaagattcgtgccggggctcaccgcgtccatcagcggtgggctcccagtgaagatcagacgcgtttag

SEQ ID NO: 91488 - DNA, 449 bp, Oryza sativa
  Clone ID: PAT_MRT4530_90058C.1
atggggtacctgtggagggtgcggctgtcgtcgttcctggtcggcacggcgacggcgtcggcggcggggttcttcttcatctacaaggaccacctcctcgcgcgcgccgccatcgcccgccaggtggaggacatcaaggaaacttctgaaaagcactatgaatccctaaatcagcgggtctcagcgttggaaagcagaaatgaattgggagatactaaagcggtgtctgattagttctggcgttctgctagttgggttgggtgttctttgtctgctgcatgtgtagatcagcatttaagatgtaccattttgttgttgaaattgctataaaccctcaattggagctgtgttacactgttgcacagttcatctacatgaaatggacacagatcaataaatcattttggtggctaacccgccacgcttttcttattaaaaaaaaaaaaaaa

SEQ ID NO: 91489 - DNA, 2071 bp, Oryza sativa
  Clone ID: PAT_MRT4530_90059C.1
ctatcccaagtcatcaggcacataatctgtcgtccgcagtaaagatttcttctgaaaatcatccaaatcagccatgtctcctccttgtacttcagcctccacctttgtagtattagcgacagagatatgtaaaccgtcctcggtgcggacgaaaagcaagctcgcggcggcgccgatgaggactccaggtagggggatgctcacgagcgcgttctgggtgtggacccaatcaacagcaccgtcagcgctgacctcggtttcccagaagctgatcgtcatgtcgccgtacatagccgcgaagctcagcctcccgtccgccgccggcatgagcaccgttccgcgtgtctcctgagtgatgaacggcgggatgtcgacgtatgacagatgctccatctcgtcgccgaaccagtaccggagaatcctcccagggctcctgaagtagagcgtggtcccccccaccaagatgctaggtgcgggcatgcgaaatccccagtcatcctcgtcggcgacggcggccgcggcggcgggcgaagcggtccaggagccggaggaggaggtgtagttgaaggcggaagtggcagacgcaccctcctcgtcgcggacgccgacgaacaccacgcggaacgggccgccgtggcagtcgaggtggtcgcatcccagggcgtcgcagaggacggtggcggtgaggttgaattcctcctgcgcgaacgcctccggcaggggcacctcctggtggtggtcggcgacggggtcccaaatgataagtgacgactcatcgagccatcccttgccaatcctcctgaagatcacgcggccgtggcggctgtcgaggacgtggaggtcgacgcccttctcgggcacgcgcgggcggaaggtggtgtcggcggtggtcacgaaccttgcaacgaccagatcgcgtcacatcagcgccatcgtggacgtagccgatcaggtgcggtagcccgtggaactcgcggtagcggcggaggaagcccgggtcggtgaggaggctgcgccatgtcctgcagacggcggcgaagcgatacagcagcttgggcaggtcggcgggaggcggagcaggatctggcaggtaagcgtcgttgatgagcacctccacgtggaggagcactggtcgccgccatgccgcgtggaagcttcctactatactcagcaagtcataccggaagaggaggtatgatgcaggatatatccaagggaggcggaaagaggccgtgacaggacccttcgcataacccccctctaaccgattgcaccacaccttagggttcgcccccgtccccagcaggcaacgggcagcccccctttcgtgccgcggtgaatccggaagccgatcaactggacaccccggccgacccaactccatcacgcccaccctcgcctgggtacgacgtcagcaaaagggggggggggtggcgccgacatgcgggaccccccccccggcaacggctcaagggggaggaggtggcaccggttggtgggtgggccccaccgggcagtggctcaaggggagggggagacgcccggttggctcggctcggcttcaaaccggccagccggttaggcggtgcggcggcggcgagcggccaccgacggcggcaaccggcggcgcggtgcggcggcggcgcgcggcaagcaagcggcggtcgggatagctcccgcgacggcgaagctagtggcggtggcggctataggggcggcggtgcacggccggaggcggcggcaagcggcggcgctagcggcgaacggcgcggcggcgttagagagcacgggaggagacggctagcgcggaaaaagagagagagagagagagagacatggggagcgttttataggggctcgggaggggcggacgtggccgggggcggccggatttctcgccgacgacgtgtgaggtggagagagagagttggggggattcgaattgaatctcgccctttcgggcgcgcgcgtgggcgggagaaggcggggcgtgggggcggcgatgtgggggacgtgtgggcgcggagtggggcgcggatgtggaggaagcggcggcgtgggcggcggtttc

SEQ ID NO: 91490 - DNA, 315 bp, Oryza sativa
  Clone ID: PAT_MRT4530_9005C.1
atggttcttgcttggctcacagaacaagcgaggcacggggaagtcaagtcagctcttgcagaagggcgtattgttgttgctggtacaagaccaaattctgcaacagcagatccagcggtggctgcttctcaattggcattcacctctgtcagtgctgccatcatgatcgtcagagagatcgcccctgagcaccagtgggcatttcctgtgaggataatgagagggaagggagtgaccgcggagcgttcaatgcatatatccgtttgcaaactgaagtatcttctgaagaatttcatcccccgtggcttcttctga

SEQ ID NO: 91491 - DNA, 113 bp, Oryza sativa
  Clone ID: PAT_MRT4530_90060C.1
atgggtggcacatcaaacaggcagtgtatgcttctgctcatcaaccccaaattttgttccagctggtctcttcttttgatttatcagtatgccttcttcagtaatggagcaag

SEQ ID NO: 91492 - DNA, 383 bp, Oryza sativa
  Clone ID: PAT_MRT4530_90061C.1
ctgcaggaatcggcacgagggaaacgttttgtgtcaatgcagctgaccgcctaagcagagcctgaggttttgtatcagatttttgtttttattttttggccggcaatcttcttatgcttgagcattttaggctcgcgtgcatcgtcactggatagaatggcagatgtaaactactactctacaagatcgaggtgtcagcattagccgctggtactaacctgaggaaggggggactaaaactgaaatggcacgatggtttcttcatccgtttgttgatcttcacttgagtagaaatgatttggtttttaataaatcaccatctatttcatatatgcaggtaattttcaggggcaacgcactggctccgggttttgggcacagct

SEQ ID NO: 91493 - DNA, 641 bp, Oryza sativa
  Clone ID: PAT_MRT4530_90062C.1
gggtacgcgctgggtgagtctacggagcacggggcattctgcgttgacgatgttgtgattttgtgcatagactggtagggctgatgacttcaggagtcgcattggcatacagagtatgctgttgattgggaaacatcggcatgcttcccacctcgtgcctgtctcccaggactggctgctgattcccatattgtgagtgtaaactgccacttgttcgaggtacatggttcgcagccctgtgtattctgttgcgttgagaatgtgaggagggcgccttgcatacagaggggcctgatggcgctttagtttaactattatgacaactgcattggctgggacttgtggcgcaaaacatacttgcaatcagtaggcgacactgtatgaagctcaggatcctggatgatggctcaactttggaataagttctagcgcgacatcccaagctcgaggctacactctgttctaagggaagatacttactgacaatgagccttgcagatgttgtgccttgtgagaacgcagagtatcggttttcatgtgatattggtcctactgtagatcatactgcgacatgatgtgagcatgctcactccagacagaactgcacctttgactgtgttcagtgaggggatttacaatga

SEQ ID NO: 91494 - DNA, 339 bp, Oryza sativa
  Clone ID: PAT_MRT4530_90063C.1
atggagatgatgaaaccggccatggcaagctgcaaagatatagctaaggagcatacccaaaatggggcacccgtggggcaggagacaccggcggcggtgaacgtacgggcacgggctgtcgacggtggtgtgccgagctcggtgacgggggaggctaactacgacctcgccaacgccgacggccaagcattcaagctgcacaggatgccaccgtcgtccgtccctgctgtcgcagcgcaccgccctacaacgacgactgcggcgtcagcatcatcgaggccaagtacgacgacgaccccgcccctggacgacaggcttcgtgacgacttccccggctga

SEQ ID NO: 91495 - DNA, 1037 bp, Oryza sativa
  Clone ID: PAT_MRT4530_90064C.1
gaaaggacctggcgtcgtctatatctggtgataaatgcttccacctgcacctgcctgccggcgcatgccgcgatggggtctattccggctcgtggccgcgtcctgagggtgcgtacaagagggtggggcaggacatggggggtaggctcggcatgggctggaaggaggatggtcagccttcgggggaccaggcgagggtcgcgcagcctacccgggcctcccaaacgcggaacggggagaccgccgcacgtccgccgaaggccacgcagccagccagcctggcgcgttactacaagtaccgatgggaggaccataaaaaccttagaatccgcagaagcacaaaaaccaacgagaaaactccacggtcatgcggatgccgtccgctcctcttcctcgcgctccacaccagcctcgccttcctcttcaacacttccgcgcccatcacctctgtggccaagctccgcatcgcctacttccacgtcaacaactccctgttcccagctgtggacctcacgctctgcttcagtgtccacaacctcggcctcgtcctcctgcttcggtactgtgcggtatccgccgctgtctcctaccacagccacctcgttgtctccaccaacatgagccctggatctgcgcaccctggatgcaagcttgatgctggagcgggaggtgttcctgctcaaatccttgcctccagggtgagggccatagatgtgtccctcaccttggagtctctgatggtctccggtgatctgtacttcgtcgttggtaaggatggagaaaaagttccggtggcgtggctcgtcggcaggactggcctgctctacttctcagctcactggtgcagtccatgccggaaattcctccctaagctcatcgaggagtacatcaagatgagggaggagacaagcagtgacgttgaggtcgtcttcgtctccaacaccgacgggcaggagaaaaggaattgtcatctcacatggcaaggtggcccaagaccgagaggccctattgaaggtttatggattgaaatgggctga

SEQ ID NO: 91496 - DNA, 320 bp, Oryza sativa
  unsure (1)..(320): unsure at all n locations
  Clone ID: PAT_MRT4530_90065C.1
cttgtcncactggagctaactgagccttgggggagcactcctgttctggaaagtatgccatctttattaacggcatctataaaactcactgactgtgatgaccattgtggtaaagaagaatttgggggttcatgcgacgataatgcctgtgataattgtggtnctaatngggggagcagcggagattgcgtnctacttgatggtttatcagaggctaaaagcttggagctgatagctaaacctagagtgttcatattcagangtgatttgatgtggtgtccaacatttngtaagttgaagacgtntgttactcaatgagt

SEQ ID NO: 91497 - DNA, 1953 bp, Oryza sativa
  Clone ID: PAT_MRT4530_90066C.1
ttatggtacttcgtgcccttgtacagctccaagtacccaatccggtttgcatagcccgagtccactagatagtacttccctgcagcggtaaacacctggaggtggatgagggaaaacatgattgtatgtactcattgcatcgttgaacaccctcatgtcatgcacaaaacccggccatccagcaagcacgaatgtaaatatcatgtcaaagtcacaacatgccatgacattctgcgttgtaatgtggtgtcgacatatgtgctgaaccaaatgatctttggaaacctgcataggaatgtgggttccatctatcgccccaatacagtcgttgaaataaggatagaacctaaggtacctcagtctcgaatgcaatgttgcaaactgtgggtcacgtggtttaattatatcagcagctagcttcaaaaggcttgccagaactttgtggaacatattgtgaactgttgctaatgatcgctcaaatctgtcctcaacttgcctaaccgactgtggagccccagccatccaaagaaacaatcctaacgcctcaatacttttagatttcatgctagacttgagctcaaatttgtcgaccaatagatcatgaagactatagaacatatcagaggtcattctaaacatgttgtaacaccgcttcctgtctgcatgcttcttctctacccattccaacgcactcattgttgtgctaacatctctatattctgactggttgtagtacttgtcaatgtgttttgcaagatgtaacgtaccgtacagaaacgcggtggatgcataatcgtccataaagtactccatcataactctgccgaactctttgtcggaatcttcatcctttgtatccacaggttggagccgcacatcctccttcaattcgttcaccacggcgcggacggctgggctcttcaacttcttgcttggactagtagccctactctgcgtgcttggtgtgctcctcatgctgtgcgacctcttcgtcccaacactgatggggcttagggggtcgaagtcgtcatcgtcggattcttcgtcatcctcgctgtcctccacatccacaatggggttggccggctgggttgcgggccccatgaatatgcggtccatttcttcgagatagtcgggcatcccattcttcaacttcctaaattcagggtggtccttagtgttgtcatcccaccacttgtctgaagcaaccatggtgccgtcaggtcttcggcccaaaccagtgtctgtacgcaacctcaatatgaaggtccacatatttttcaaacccctgtatctaaatccgaattgctcattgtcgtggaccaaatcagtggtggcataaaaaccctttctgatctccttccaacctgctttactcattcttccccttatgcagttgccattatctatttgcttgcaatacagctcgcaaaaaagtttggtgttctcatttgtccacgatgccctgtcgttgaaatcctctgtcagccggcaccgtgcaccgcgacccctacctcggcctcgaccctgagatgcggctcgagcttgaggctggatgggaggcacgaatacgcctccatggcctgaacctccaaatggcggtgccattggcgcttggaacccagctccaatcgcatgcggcccgtcaactccgggagggttctggctgctggaagaaccctcgccaaagccactcgagttgtaggacgtgcggccgccatcacgggagagatggagaggctgcgcgaggaagtcgtgcgtagggatgctggcgccgaatcgatgctcggccccgtaaaggaggatggtgctcccgccgccgtatccgccaaggttgttgccgtcattggcgtctccgtagccgtggccgctgtcgccgttgccgtacccgccgccatcatggctgtcgccgtagtcgcccccgttgttgctgtcgccctcgtacaaatccat

SEQ ID NO: 91498 - DNA, 1617 bp, Oryza sativa
  Clone ID: PAT_MRT4530_90067C.1
atggattcgtacgagggcgacagcaacaacgggggcggctacggcgacggccatgatggcggcgggtacggcaacggcgacagcggccacggctacggagacgccaatgccgggcgcgtgttcggcgacggcaacaaccttggcggatacggcggcgggagcaccatcctcctgtacggggccgagcatcgattcggcgccagcatccctacgcgcgacttcctcgcgcagcctctccatctctcccgtgatggcggcctcacgtcctacaactcgggtagcttcggcgagggttcttccagcagccagaaccctcccggcgtccctccccgtaccgtgcatcgcacgctcgggttgaggggccggccaagtgctcaaggagcttccggatctgggccgcgacggggcggtcggatgtcggcggcaggagtcgacgggccgcatgcgattggagctgggttccaagcgccaatggcaccgccatttggaggttcaggccatggaggcgtattcgtgcctcccatccggcctcaagctcgagccgcatctcagggtcgaggccgaggtaggggtcgcagcgcatggcgccggctgacagagcaaatagataatggcaactacataaggggaagcatgagtaaagcaggttggaaggagatcagaaagggtttttatgccaccactgatttggtccacgacaatgagcaattcggatttaaatacaggggtttgaaaaatatgtggaccttcatattgaggttgcgtacagacactggtttgggccgaagacctgacggcaccatggttgcttcagacaagtggtgggatgacaacactaaggaccaccctgaatttaggaagttgaagaatgggatgcccgactatcgcgaagaaatggaccgcatgttcatggggcccacaacccagccggccacccccattgtggatgtggaggacagcgaggatgacgaagaatctgacgatgacgactttgaccccctaagccccatcagtgttgggacgaagaggtcgcacagcatgaggagcacaccaagcacgcggagtagggctactagtccaagcaagaagttgaagagcctagccgtccgcgccgtggtgaacgaattgaagttatatcttttgggttatgtacgcttcggaagctatgaggtgctatgtctgttagctatgtcatttatggagaatgcgcggctccaacctgtggatacaaaggatgaagattccgtcaaagagttcggcagagttatgatggagtactttatggacgattatgcatccaccgggtttctgtgcggtacgttacatcttgcaaaccacattgacaggtactgcaaccagtcggaatatagagatgttagcacaacaatgagtgcgttggaatgggtagagaagaagcttgcagacaggaagcggtgttacaacatgtttagaatgacctctgatatgttctttagtcttcatgatctattggtcgacaagtatgagctcaagtctagcatgaaatctaaaagtattgaggcgttaggattgtttctttggatggctggggctcccagtcggttaggcaagttgaggacagatttgagcgatcattag

SEQ ID NO: 91499 - DNA, 375 bp, Oryza sativa
  Clone ID: PAT_MRT4530_90068C.1
atggagccatttgatctcgcgtattccctggtttcaacgatctccatgctctacaaataccatctgcgtgtaaagcaaatcaacagtggtgcaccacgtagggggcttggtgctaaaggatctgatgaaatgacgtcaagagctggattttctgacgagggcttttatgttcgtcctagcctgggagatttaacccacccggcattcacattggtccaagtcggaaccataatcttcctagttttcgtcgtcgtcccaatctcgccccccttggcagctgctaaggatgaggccacaacgacaacacatgcggacataattcccctattggccacatcttcggtctacaccgagaacgaggtgcggacaacctaa

SEQ ID NO: 91500 - DNA, 261 bp, Oryza sativa
  Clone ID: PAT_MRT4530_90069C.1
atgcccaacggatcggaccgggacgacccggtcctgcgcgacacgctggcgttgacatggagcttaccggatcgccgtgatgttgtcgtcggccaacttctaggaaacaacggggcccacctgctgacactggcgtgtgggcccgaggatcagggcgactgcgcgcggctgtcagtgaccctgtgcgtcgcagactcgcaggggagaaaccgcgacggcgaagtggtgttgttgctgtcctcctgcggcacgcctgactag

SEQ ID NO: 91501 - DNA, 388 bp, Oryza sativa
  unsure (1)..(388): unsure at all n locations
  Clone ID: PAT_MRT4530_9006C.1
aannaacaccgttgtgccgccggcagcggcaacgcgacgcnggcgcggggcttnagncgcctgngcgtgcgcgncanagnagggtgttacaatgatccacttccacatgttgttgttgatgaggtttcaattgaaactgaagaagaatcgttgctggtttatgatgttgatgatcttgaacatgatccaggcttaagggttcctatttcaagttttgatgccaacgatcaagatgcggatagaagagggtacattctaaaaggattggcctttcgtggacatgatgaaactgaagaatctaacaacagaggaaacttccttgaacttttgaagtggcttgcaggaaataatgaagatgttaataaggtggttctgaacaatgctccag

SEQ ID NO: 91502 - DNA, 200 bp, Oryza sativa
  unsure (1)..(200): unsure at all n locations
  Clone ID: PAT_MRT4530_90070C.1
ggacngggccgactcaggntttcctcganttcaacttcgtcttcctcctcgagcagagcagcagcaganatgaagctcgcggggctcaagtcggtggacggggcccacgaggagtccatctgggcggcggcgtgggtncccgaggcggaccaccgcccgcggcgctgctcctaacgggcgccctcaacgagaccntccgc

SEQ ID NO: 91503 - DNA, 326 bp, Oryza sativa
  Clone ID: PAT_MRT4530_90071C.1
acgcatctaggcaagggtgggcgtgatggagtgggatgggccctgcgacggcctttgtcgcttccggattcacctaggcacgagaggggactgcccgctgccttttgaggactgggggtaaaacctgaggtgtggtgtgcttggttagaggggttatgcgaagggtcctgtcacggcatctttccaacgtggatctgtatgtcaactttatcgtttgtgtaccctggccggtccgggacagggattttaatgcacattctgcttggaattccattcgggaatttaaaaaggaggctaagggttcatttgcatatagcaggcattta

SEQ ID NO: 91504 - DNA, 1820 bp, Oryza sativa
  Clone ID: PAT_MRT4530_90072C.1
ataataattcagtgtagatactgcaaattgcaacaccaccaacacatttggcttcgatttcatttctgaaaattttgtttgtagagtccatcaggctccttcgaaacatacagaacttcaccacattctataaactataacaacagcactgagtcactaataaaagttggaactctgtctatggggaatcaattcaggtactgagaatgagcagctgcaatcagggcagctccaaggccagacccgtcgtttgcaagcttgacagccaccgacttcgacgcctcttctccgagcaactccgtcagcgtggtctccaggcactgccggaattcggtgtaatgttcatatagaccgccatcgatggcgatgaccgactttcgcttgtcgcctgggacgcctctgccgatcttcctgaggatccctacgatcccagcagcagccagccgggctgatcttcgggtgacgatgtcacagatttcgacaaccatcttccttgtttctaaggatgtgtctgtgatcttcaggttatctgcaagtttttcagccacaattctgagatcaggtgttccatcatgatgcatcacggaaatatcaggagtcctcagaataaagcgggttttgagcttggtctgatctagattgccaaaaattgaagactgcaaagatattttaagaagcactctccttacgatttcacctagatacattcctgaaatcaatttctcgaagatttttgacatgtgaggagtatgcaatcttctagagaaacttgcctgctctccagggtttaagctctctttatctagtgcttcatcatattctgttattggaagacaggatgaggagaagttaccccattctgtattaataaccatgtttcctgattttggtaactcgccttccaacttagggatagcatttgccttctcaagatatgcggcgtttgagccagtgcctaagatcacaccgacgacaatatcttcgtcgtagtagctgcctgccgccaatgtcccaacagtgtcattgatcaatgcggaaacgcgcatgtccagaccttgcttctccatggccatctgcaattcggccaccacatcttcacctacagcatcatcaatagaaaacgccttggtccacttgataagagtcccagacgcaatcgatgtttgccgcacagggaaagagaaggtgaaccccagttccctttgcctgtcgttgaacacggcattatgtccttcatcagcgacgaacttggctaacgcggaagcgatgaagccaaacagctccgaggagttgccggacatgagatggggagggatcgagacctccctcgactcgcgcttcacgacccgtttctcctttccagcaagctgcacacgcaggactcggaagtttgttcccccaagatccagcgcgtagaacaagccctcttcggtcctttttatgcagaaatacagtaccgcacacattgctgttccactattctgttgttttagtaacgagaatagcaaaagatattttccgcaatttttattttcaatcagagtatccgaatcatctgtagctgctgatattaaagtgttcatggcatccaagaaccacacaattactaagaaatttccaagtaggagagagccattggggaggttgtcgacgtaggaaacgatcatcttgatcttgctgccgccctcctccgccaaccccgccgccatctcgccggccatcgccgccgccaccccatccagccgcgccgccggcgtcgcgcactcctcccgcagcgccgccaccacctgctccgccgccgccaccgccgccgccaccat

SEQ ID NO: 91505 - DNA, 1041 bp, Oryza sativa
  unsure (1)..(1041): unsure at all n locations
  Clone ID: PAT_MRT4530_90073C.1
atggcggcagcggctgcaaccgccttctcctgctccttcgcctccccgcgccaccgccggagtcccacgacggcgagagcttcgggggcggcggtggagattcgggtctgcaccaaccgcacgtgcgcgcgccagggcgggcgcgaggtcctggcggcgctcgaggggctcgcgccgccgcgcgtcgacgtggcctcctgcggttgcctcggccgctgcggggcgggcccaaacttcggcgcctccgtctccggcggcggcgccgcggtgttcggccacgtgggcaccgccgcgcgcgccgcgcagctcctggagcacctgctcggcgactccggattcgacgcggcggcggggctcgccgcgctcgcggcgcgtgagaaggcggaggccgccctcgagaagggtggcgccgccgaagcggaagccctcctgactgaggctatcgagatgaatgctggtggcggtctccacttggcgtacagaagcaggtctagggctagattgtcaatggggaatatcactggtgcgcttgctgatgccgaggaagcaacaaagattgctccgaaatttcctcaggctcacttgtcacgaggcgatgctctgtttgcaatggaagagtaccgagctgcagaggatgcttatgctgatgccctggaccttgatccatccattcgccggaccaagtcgttcagggctcgtgtacaaaagctacgggagaaggttgccaatgctgatgtttcatcatcatcatagtccatccnaataggaggaagtttcacacggcaagaaatgtatgtctgacgggcggatgggaaaattctgaatagtgaatagtttagtgaaacaatggaaatattcctgtctagttagttttactcattctatatggaggccgggaaaatgctcttccatcatctttaaagaaaagtccttaatcattcttagcagtgtacactgtgtattaggtcctgtgtggagagtttaagattctgagaatctgttggttgataaccagcttccgaaaaaaaaaaaaaaaaaaaa

SEQ ID NO: 91506 - DNA, 398 bp, Oryza sativa
  Clone ID: PAT_MRT4530_90074C.1
agaggaggaacaacagagtagcctgcacaattctctttatccgagcaaagagctactatctgatgataaggcgatgactgtatctgatcatataaaggaacttccggacaggatgttagcctcactatcggctgcaggggctaagacactacgggcgcttcgcttactccaaagatcttattagaattctagaagcaccagttcgtgtccagggggttcggcttctgcagctctcgcccggagaattgttctgtacaacattgaacgtctctggttattgtgaccttctacttggaggtccagtaattccgcatgatatgatagcgtttgttgtgccggctgtaacatggtatgaacgacccattcctagggcccatagttctgggctggtctgttct

SEQ ID NO: 91507 - DNA, 718 bp, Oryza sativa
  Clone ID: PAT_MRT4530_90075C.1
atgaggaagctactaatgagggagccaaaaaaaaaaaagagagccacaaatgagagagccactaatgagggagccaaaaaaaagagagccaagaattccaaaaaaaaggggtcaaatgataaggatgcagtaggcattgatgatgagggcatatactctgacaatgaattacttgtggtacatagtgatagcagctatgattctgatttgtccgaatcttccgactctgattgttctgaccctaagtttgatcctgatcaagaaattattgatgagggtgatgatgatgatgtacctgtctttgcatatgatgttcaggatccttgtattgatgttggtgtagtgttcccagatgtggatcaatgcaagttagcagttacccatcatgctatcttgaatgatcatgcttttgaaactgtcaagaaagacaagaaaaggtttagagccatttgcaaaagagcagaagagggttgcaagtggtgttttttttttgcatcaacaagccctaagtacattggatgcaaggtcaagacaagtggaccaaagcacacttgtggatctttcaataagtgtggtgaaacaatggtcaccactaagtgggtagctgatcgagtggtggacttgttgcgggataactcctcaaggggagcaaaggatttgcaggaggagttgaataggaagcatcagattgatatcccatatttcaaggtcttcagag

SEQ ID NO: 91508 - DNA, 290 bp, Oryza sativa
  Clone ID: PAT_MRT4530_90076C.1
aataccaatgttcctctttattacctggaggacagtttaaaccaagcttcatccaatacatatgcccaactcaaataaagtatagttcctccatctaagttgatgctcccaaaatacattttgaacatgtttttctactggaaacaaatttaatatattgcacactacaatcttatacttcgtttaccaacccatctcctttgttcatactcatcagagcttgcttctcccaaaactggtccatgatctcaatcaatgaacgagctttccttaacaactcttaatgaatt

SEQ ID NO: 91509 - DNA, 1236 bp, Oryza sativa
  Clone ID: PAT_MRT4530_90077C.1
atggcgccgcctcacgcgtgcagcccaggcgcgacgcagcggctgctcctccatgcggccgccgacggtgacctccgcctcttcaagaggattgctagtaggctggacggcggggaaggacgcctcaaggaggcggtggaggccgtgaaggaccgcggcgctggggctctgcaccaagccgcccgcaacgggaggaccgcgatgtgcgtgtacctggtcgaggaactccaggtggacatcaacgccgccaacgagtcagaggttgagaaatttgagatctatggcatttgtggtattgtgggatgcggtaactttgcaacactggagccgcacccgcacgttctgggtgggattgtgtatactgtgagttatcttcttgatcatggtgcaaatcctgataagcccaatgaacaagggcgtgctcctctccatttagcagttgaacaaggaaattgcgagatattaaaggtcttactagtgaaaggagctgatgttgattcatcttctgactgtgggacgccactgcatattgcagccgtgaaaagtcatgatggctgtatgaagattttattggaccaccatgcagattgtaataaggtattttccacattttatacacccctcatcgcagcgcttatggttcgctcattgaaatgtgtgaagcttctgattaaggctggtgctgatattaagggtgttggtacttttacccccttaattgctgctgcaactgaaggcttaactgatttctataagtgcttactcgaggctggtgctgatcctaatgtgcctgatgaaaacagacggaaagatgtggagatcctacttccagtaacttctcgtattccatctgtgtatgattggagtgttgatgggataattacttatgtaaacaaaaatgtgcaggcgacgaatcttgaacctgaagatggaacttgtactcgaataggagcatttgcttggcttaagatgggtgaaggaatgaaagctttgacagatgctcacctctgcaggatgttgtgtcccgattggccaaaggcctgctacagggaaggggctgctcacatgttcttaaaggcaaaatcgttttttatatgcaacaattattttgttttcaggactgataaggcttgcgatgcatttcttgatggtcttaaattggacccagcgaatatggagattgaaaatggtctacgggaggctttcaaatcattgaagaaatctcgtgctgcctga

SEQ ID NO: 91510 - DNA, 1362 bp, Oryza sativa
  Clone ID: PAT_MRT4530_90078C.1
atggctagcaagagcaagagcggccacggctacgtcctgctcggcctcaatggctacatcgccgaccgtcacaaccggaccaccgcttcgtcgacgacgagcaccggcctccccatcgaggtgaccttctgcgccgcccgcccgccagccctcgcccacttctccatccactgccctggcctcgatcatgtcggtgccgatcgcaatccgctcctgtcgcccaaggtcctcagcgcggatgccgacgtcgtgctgatccgcgtccccgtcgaccccctggcgctgctggacctgagattgcacgactacttcgtgtacaggatgcaccccgaaacccccaggctggacctgctcccccacccaggcgaacatggcttctcagacagcgagatcgccatactcagctgcggcaatggcaagtacgtcgtggccggcctccaagccacctcctgcgataccacctacacccttcgccgcctgtaccgcgatggcgagccgccagggagttggagttggacctcccagcgtgtgcccgtgtccgtgtccgtgtcgcagctgcagagggacgacgtgtgcccgatccccaaatcagcgattcggcagacgcaccatctcacggccaaggtgatcacgctcagaggcgcgaggggcacgatcggctgggtcgatctctggcgcggtatactcctgtgcgacgtgctcgacgccacacccaaggtccgtgacatcccgctgccgttcccggccagggccaactggcgtgcctacctcaatcgctgcccgtactattcccgtgacatcacggtcagcgagagcagggacactatcaagtacgtcgagatggaactcactaggccagctatagaggaggagatcatctctgggcctgatgatcctgaagaagaatgttcatactccctggtccctggtagatggcaggccaccacctggaccatgcctatccctgccaattcatggaatgactggaagtacggctgcacgatcagttcggaccatgtgaagctccctgatgacggcacgaagcaatccgagttgctgcgtaggcttgtgatgagtaggaatgagaggaaggaggaggttgcagttgcagggctgtgcttgtccttgggatgcctgcgaatggctcaccccacgctgagcatcgcggatggtgacgatgttatttacctcttgtccaagggcatccgcggggcaaagatggctgctgtggtcgctgttgatgtgagggcgaggactctgataggagtgtcagagattgatagcgagaagaatatcaatttcctgcgctgctgcctccccactgggattttcaaacatctcaacacttctgcagctacttaa

SEQ ID NO: 91511 - DNA, 1908 bp, Oryza sativa
  Clone ID: PAT_MRT4530_90079C.1
atgatcctcaacttgattatattatttctgggtagccatgctgcaagtgcatcaaataccctttttcctggccaacctctctcaggcagtgaaaccttagtatcagaaaatggcatttttgagttgggttttttctccccaagtggtacaaagcactacctcggcatacgatacaagaacattacaagcagcaatccagtaaacttctggctgggaaacaggattcccattactaacttccttaatgcaacattgtatatcgatgccggtgaactttatattgaggagcttggctctgttctatggacctcaaattcaatgaaaaatgcatcagacactgctgtggcagttatccttaatactggaaactttgtagtaagagatcagctcaactcttctatggtcgtatggcagagctttgatcacccagctgatgcactgctcccaggagcatggcttggattggatatggtcatcggagccaacatcttgcttaccctgtacaagcctccttataattgtaccctcatgattgaccaaagtaggaagaggggatttatcatgttcattgatgggcatgactatcttggaacatttccagattggatggttacctatgaagaaaatggcagtttgggctttcctgacaatcctcagaatgtgacggcagcaactagtgaagaatgtcaagctgcctgtctaagcgaatgcttctgcgcagcatactcatatcattctggctgcaagatatggcacagcatgttgcttaatttgactttagctgataaccctccatacaccgagatttatatgcgtataggttctccaaataaaagcaggctgcacatactggttttcatactaatttttgggtcaatagcggttattcttgtcatgttgatgcttctcttgatatacaagaagagatcctcatgtgttgcaagccaggcaaaaatggaaggttttcttgcagtgtactcttatgcacaggtcaagaaagctacaagaaacctctctgacaaactgggggaaggaagctttggaagtgttttcaagggaacaattgcaggttcaacgattgttgctgtgaagaagctcaaaggcctagggcacacagagaagcaattccggacagaggtgcagactgttgggatgatccaacatactaatcttgtccgtcttttgggattctgtactggagggactagaaggttgctagtctatgagtatatgccaaacggttctttggattctcatctcttttcagaaacctcaagggtattaagttggaatcttcgccatcggattgtcattggtattgctagaggtttggcctacctgcacgaggaatgcagggactccatcatacattgtgacattaagcctgaaaatatactacttgatgcggagttatgccccaaaattgcagattttggtatggcaaagcttcttggacgggaattcagcgcggtactcaccagtatccgaggaaccattggctatcttgcaccagagtggatatctggacagcctattacctacaaggcagacgtctatagttttggtgtcctgctcttcgaaataatatcagggcggaggagtacggagaaaattcaacatggaaaccatcgatatttccccctttatgctgctgctaaagtgaacgaaggagatgttttatgcttgcttgatgacaggctggaaggaaatgcgagtttgaaggagctggatgttgcctgccgagttgcttgttggtgcatccaggatgatgagatccacaggccatcaatgaggcaagttattcacatgttggaaggtattgtcggcgttgaattgcctcctatcccggcttcctttcaaaacctgatggacggttatgatagtgatttatattctgtggaagtttga

SEQ ID NO: 91512 - DNA, 633 bp, Oryza sativa
  Clone ID: PAT_MRT4530_9007C.1
tctttctgttaacaactaaatttggtaattcaagtatcggagatggagatagaaccgaagcggaatccaagatagagatcgttccggaaacagagcgagaatcggctaaagtccaaatcggctgcgatcaggatcggcagagttcgagtcggactaggtagccgattgagccgattccgataatgtgactcgtttgggcaaaagtctgccacaaagacttatggtattttagaatttgttagaggtaagagtcgtgtccgacaaggacatgttttgatcaaatcaactggcatgctcacgaacctaaaggcaagatttttttggacctgcaccaaagcgaagcagatcttccaggcctcgtgtttttcgcatcaaacactttcttcgacatttgagtcgtattacaattcactggccgtcgttttacaacgtcgtgactgggaaaaccctggcgttacccaacttaatcgccttgcagcacatccccctttcgccagctggcgtaatagcgaagaggcccgcaccgatcgcccttcccaacagttgcgcagcctgaatggcgaatggcgcctgatgcggtatttctccttacgcatctgtgcggtatttcacaccgcatatggtgcactctca

SEQ ID NO: 91513 - DNA, 302 bp, Oryza sativa
  Clone ID: PAT_MRT4530_90080C.1
ttatggtatggcctctcccctcaggcatgcgcgcgggattcattgatactgtgtcgctatcttcttccctctcactatccggcctaccttcctgcaccccgacacgcgcacagcacacacacagccgaccgtcacacccgcacgcacaatgtaaacccctgtctcacgctacactgctataccacgatgctgacacgccgccaggtgggatccctcagactgacgacgatacacctctaccaaatgcatgcctagaccgaggacgacgcatagagccccaggccttatgatgcaaggacgga

SEQ ID NO: 91514 - DNA, 313 bp, Oryza sativa
  Clone ID: PAT_MRT4530_90082C.1
cccacgcgtccgggaaatataaggcgcgcaaaatgagcgagtagttaaataaaaaacaagaacaaacagtgccagagagaggtggaagacagtccggttgccgccttccgtccggtgctcgaccaggagctaaccgcgcgatagaggttcaagcttaagttcagtggcccgggcgctctaaggctgcgaatgggaaatgcctggagttgccaaacttaagcgcgtagtaacacatcgccgttatacgacgtatggtaatgagctacaaggagagaatgatcatgctcctaaagcattgctgaaccttaacgga

SEQ ID NO: 91515 - DNA, 430 bp, Oryza sativa
  Clone ID: PAT_MRT4530_90083C.1
tttgtttttggagaacttagggtcaactctccttgaaaaaattgcagggggaagccaatccactaacatggctatgaaacactgttgctttccactacccccgcttatacaaatacatcatatatctgaagacattaccaacagatatattccaacataaattccggccctactatgaacatacaaacagcatgagatagccgctcctcacacagtgtttgcactggaccgagatagacggcatggggagctcatttggcacttttgctcatgttagtcattgggaacctggctgcaactggcaacccttgacgtcgcgctatttagactgggtggcggataagcttggcaggccaaaaccattgttggtgagggcaggcttcacctcggtgtactttgcgggtattgagacccgaatcagggttttacc

SEQ ID NO: 91516 - DNA, 490 bp, Oryza sativa
  Clone ID: PAT_MRT4530_90084C.1
gggaagggcccaaaaccccacccccaaatttaaagcccgaatttttttttacggactaaaaccccaaaaaaattgggacatttcgggggctctaattattaaattacccccccctttgggggggaaatacgggaaaagggcatttttccttttaattttaggcttattcggcagggggagcaacaaggaaaccctcaatcattttgaccatgccataatacccatccacgatgtccttttctttttccgggaaaagggagctgccgccctaaagctggaactccactttgagcttggccacacaggacccatcgccgggggccaaaaatcttccccccggagagggggactggagcttccccaccttgttttttgcctcgaacacatccgattttaggacataatttggggggtccaacccccccacccgggttttgtttgggcttcccaaccccgcggcagggtaaaacttaatggggaaaaaggggcc

SEQ ID NO: 91517 - DNA, 3102 bp, Oryza sativa
  Clone ID: PAT_MRT4530_90085C.1
atgggatccaactatccgcggcgagatcctccgcccgatcggcaggggcaggttccaccgcggggagatcctccgcccggtcggcagcggcaggttccaccgcggggagatcctccgcccggtcggcagcgggtaccgccgcggcttctgatcactcccttccgcgacataggtcagaggctgagcaccggtcaggccttcaagccgatcggtcaggtgtccgtcagccggatgttggccggcccgcagttgttcggccggctagcttcgcagctcttcgaggttgaccgctcgctgtccttctctaccgctggtgactccgcagaggagggtgatgaggaggacgaggagggcgaggaggaggagaccgctggtgactccgcagaggagggtgatgaggaggacgaggagggcgaggaggaggagaccgaagaggagtgtgtacagaaggatgaaggaggggagagcactttgcctccaccgcaagtgcctcgtgtgcccagagatttttgtgaaacaaaactcatatcctttctgggccgggggtataagatcatcctccagtccaagaatggaccctgctccttgatagccatatgcaattatctaatccttaccaggaaactctccttgccaccatccatgacaattgtttacctagattatttagttgaccgtgtgtttagtcaagttttcagcaaaatgaaggatgacagctataaaactgcacaggcaacggtggaacaaacggctacaggactagatattgatatttattgcacaagtgtcgacgggtttgaggacacccctcagtatgggctttttagaatcctggatatccctttatatcatgcctgggtactagacatgaacaatcaggaagacaccattttattgaatgcagttgatggacgttcatacaatcagctgaatatcgatagggctaaatacaactcaaagaaagatgctgattttatgatagatgctgctgaaactagaagatatgagttgattcacacgttcttgaaagataatcctggacaagtcacagagtttggtttacacactttgaaagcagcaactcctgataggaagttgttcattttctttcaaaacgagcacttcaacgttgtatacaagtaccatggaagattttttgttctggaatcagatgtgggcttccggaactaccaaaatatttggcgatctgttgattctcctggtgaaagcggtgtgttggttcatgatatcacaatctcaagggaccaacattctgtgttgaaaagtggcaattattttgaaggtgctaagcaaagctttaagaagaagcctcacagtgccaggcaaacccagcatcatagcgtaagctcgtcacttgagtcaagccaaggtcctcctccagtacggcattcccgtatggcaggagaacatggtagcagctccagtgttaagccaaggccatcacccaccaatgcgcagctagaaaccaggcctccctctcctggaacagtgagagcggattttgcgtcttatttcatgagtggaaaagaccaaaagctggaacacatgttcctcgactttttaagaagcttcgagcggaacaatataccatattatggagcaattgttgattctatgaagaccctgagctctcctgagatgcacatacatttcgatcatatttggagttatgctcctgaactcgcacatgacttgtgccaatgctacccaaggattcagaagaatcttgaaaatgctgtgcgcacatttattcatgatttgaacttaccaggttttcattgtgaaaatccagtaatatgcatatgtgacatgcccaaaccggatagatggattccgttgaggacatttctgaagctacgtgggtatcatctgaccaagccccgccatattagatgtgatggttttttcctgccagtgatagataccacccagattgggagaatcattttaaccaatctgttgacaatgataacaaggtctcataagggaggtagatcttggaatggccattgggatttggatcatgttatggtcagtgactcgttggatgttaagatcgatttgccatgtaattatcaagcggcatgtaaaacagaggcacatgattttcttagagttgctactgacgttcttccagagtatgaggtaggtggtaaatggccaggcctttttaggcatcttgacaagtcacttagaaattacattgatcatctgaggtacggcagtgcgatgctaagaaagtttcaaagatttatcaccatccatcctgcactgaagtcgtccttgacaagattacaaataattgataatatttattcagcccatcaagcaacaactggccaagtgaagagattacttcaatcaattctggactctgtgacacttcgacaagactggagagtccgatgtcaaaagcaggatggtagtgtatcctctgtctccccaattcatactgttgtatatgaacaccacagagctaagatggaaaaaagtgaatccaatgaacaaggagatgagaatgcagaaaaagaaggtcatgaacttggaggctatgttgggaatgatggtggaaatgaagaatgccctgaacaacgtgatgacaatgaaccctttgagaattcagtggaagatggcatggtttacttacgccatgttcgtcatcatggttggaaaggctcaaaagacaatatgggcaaacaacaattcttgcggctgtctgatttggaactggtaaattcaaattccttggatgaaattttacctgcaatggtggaatgtctaatattgcataaagatgattaccaccacatgtatgacaaggatatctatgatagagttttgggatggattgatgaaatattggagaactatgaactccttgagttccctaaaagttacggcatagattttcctgctataactccaacaggtcacgatgatgccttccccgatcctcacaggagtgctccaccgagtggtcattataatccaattggtccaccagatgtgccagggcttgagccttcttgctctgcgaggcgtccaaagcaggaggccccccttcaaaggtcaccttcctaa

SEQ ID NO: 91518 - DNA, 1921 bp, Oryza sativa
  Clone ID: PAT_MRT4530_90086C.1
caagagagtctctaaaggtaaatgcacatgcaagcaaaggaccttgcattgtcgagctacccccaattcggagccgcaagcagcaccgccgtccccgcaacaaaacgcgccatcgccctactatagcagatcgataccgcagcccgcggcgtccgcgagcggacccgagccccccaccggcctaccctccccctccgcccaccgacgcggccggcgcccacggcgcagctctggctccgggggaacaccagcccaactccggcgaactcgcacggccggtcctcgtcgatcctcgccatggccacgctctggctccgcggcacggtcgccggctccgcggccgcggcggcgcgctccgccgccagcctctgcgacgcggcgcggacgagctcgcgcatgtcgtcgtcgccgccgccgccgcgcccggcgcggcgcccgccatagccagctcaccagcttgccgccgccgccgccgccgctcccgccaccgaagctgcacccgccgccgccgccgccgccgccgccgcgcccttctccatgcacaccgtcgacggccgcgccatctcgtgtcctccggcgccgccgtagccggctccccacgccccccacccgcctccccccggcgggccgaaccacggcacctcgaagaacccgcctccccctcctcctcctcctccagcttcggctcctccttccccatccgaaacccaactccggccgccgccgccgccgcgccatggaccgccttctcgccttctcccgccgccgccgccgctggctcgcgtgggcaggcgcctccgcgggggcctacctggtataccaccacccggccgtcgccgcgcggcgccgccgcatcgcccgcgtcgcctccgccctcgcgtccctcgccgacgccgtcgccgacgtggcctccgacctcgccgccttcctccgctccgactccgactccatcccccccacggtcaggcagctctccaagctcgcttcctctcccgaggcctccgcctccgcctccgcgctctccggggccctcaccaccggcgtgatccgcggttacgccaccgccgccgccgcctcctcctccggtgacgaggcggccttctcggcaccgcctgctcgacaggatcctatccccttccggcgagcgccctcgcgtcggccgtcgccggcagcttcggggagccagctcgtgctcgcctactactccgccccgtccgatccttcgtcgggctcgtcgtcgccgagctgggtcgatgtggtcaccaccgggagttgccggagagcgatccgcagctgggtcgaggtcttcacggccaccgccgtgggggtgttcatagacaagaccatccacatcaacacctacgaccagctcttcgccgccgccacgaacccctcctatggcgccaggctacagcagcttctcgtcgcactctgcaatgcctccatggagacactggtaaaaacatcccatagtgtactatctaaccctaaccccaatgccaattccaatcaaaatggtagtaacaatggtagtggtagtggtagtggcaatggtggggatggggaaggatgggtggagacggtgtcgaccgtgcttgcggtgccgagcaaccggaggctcgtgctggatttgactgggagggcaacatttgaggcagtgcgatcgtttctcgactttgtgatgtggagacttcatgaaggcgcgagggctgggggtgatgccgcgattggggctggattgtgtgccttgaggcacatgagcgaaaggtccgcgccattctctagaacaccaaatccgtgcagaatcgacaggctagctacagctgatgatcttgtcagcgaggtcgccgctgccggtcctactgtttcaggcatccatccagaatatgtagtgccggctgggaaacagttggcgctgtaa

SEQ ID NO: 91519 - DNA, 281 bp, Oryza sativa
  unsure (1)..(281): unsure at all n locations
  Clone ID: PAT_MRT4530_90087C.1
aatacatatacatatntactcaaactttanaaaaataaaatntaaaaaactatctanataaannttcaccaactatactttttcccacaaatattatatatcgtggggggggggggaatcntttttttttatacctctncancaacntncaaacattacatacnaaatnctttattttnttnataacatatttcacaaantacccataaaaaattaattattnncttccccaaatccaaacttnatctctcttttnaaaaaaaacaattcatacacacctt

SEQ ID NO: 91520 - DNA, 605 bp, Oryza sativa
  Clone ID: PAT_MRT4530_90088C.1
agacggcagtgcacctagattacctcactaaagggaatagcttgccggtcccatcgccgaacgcctgaagcatgacagccaggctattgccgacggttttgccgaggtcacggtaatgttcgtggatatcgtcaacttcacccgcctggccgaaggaatgacgccacagcaggtcttctccatgcttaaccggatattctcgtccttcgacgaactggccgagcgctatggcatggaaaaaataaaaaccatcggcgatgcctacatggttgccggcggactgaacaatgaagcctgcaactacacgcgcgccatcgccgaactcgccattgccatgcgcgatttgctgcatcgcgatttcacggtcaacgacatgcgcctcgaggtacgtatcggcatcggcaccggccccgtcgttgcaggcgtcgtcggcaagaaaaaattcatttacgacctgtggggcgacaccgtcaatcttgccagccgcatcaccagcgagggcacgccgggcatgattcacgtcgatgccacgacccatcagcgcctgaagggcgaatttgaattcgccacaccactcgacctttatctgaaaggcaagggaaaca

SEQ ID NO: 91521 - DNA, 162 bp, Oryza sativa
  Clone ID: PAT_MRT4530_90089C.1
gtaatttgcaaacacaaaggagtaaaaaatgttgcaaatgatagttgaaagcaacatcagcaataaaaaaaaaaaaaagaaagagaggataaaaaaagactgaactagaatgactagttaacatatggtcagattgaccggggtgcttcatgtgaaaacatt

SEQ ID NO: 91522 - DNA, 1285 bp, Oryza sativa
  Clone ID: PAT_MRT4530_9008C.1
tcaaatcttgtgcaaggcgaggaagacgttggtgagctggtcgttgttgtggcggtagtaattgtggagcaggtgggtgtacctccggaagagggcgtccatggcgtcccacccgaagtgtggtccaagcataggctcaaccaccgccctgatggtgctgcttgtctgagccgccagctgatctagatctgcttgggattggcatgagcgggagcggctcacctcgaagagctccatcctcgtcacctggaaggacccctcctcgcggatggcctccctcagctcctccgggcagggcccatagaagggcgcgtcgaaggagtcgacgagcctcctgtcgtcggcggcggcctcggcgagcaggtcccagaggtggcagtcgtgcggcgagggcaccgcctcccgcctggccacgaaggtgaggaggaggacgcctccgcggcggacctcctcggcgcggcaggagaggaagaggcggaagtcggcctggaactgagccctgtaggcgtgcagcaccctggagctggagctcgagctcgacgacgccgacacgtacatcctcccctcgttgggcgccgcatctgcgggtgccctagacaggaagtggaggctcgacgacgacaccacgtagtccaggctatccgccgggaacacgcgcccgtagaaggaccccggccacgccgacaccaggcaccggctgctattggcattattgctcggcaccaccagcttctgcttctgccggaacacgctgttgaagtcgttgctggggagatcgttgaggaagacgtggaactctgcaggcgccgcctcctgctgccgctccgcgtcgcccagcatggcctcaacggcgtcgccggccatcagcagcgcgttcggccctgtggcgcacccgaggtcggcgatggctatggctctcgcctgccgccgaccgcgccgaacggccgccgccatctcctgccgctccttcctcgtcgccgcagcgatcgtccgctgcatgtccgagttgttggcgtagctcagctctccggcgtcgccactgttcatgcccaccaccacaacgccgcctgcttcttgcgacgccaccagcagctccattgctccagctgcactctgcatcatctatcatacgcaaaagaactggttgctgctgctaatagccgcctagctaatcactactcacaacagcatgtgtacatgccagtttaccaccatatatatagccatatagggactgcgtatgcatttatcaatatttttctttcaaaaaaaaaaaaaaaaaaaa

SEQ ID NO: 91523 - DNA, 2038 bp, Oryza sativa
  Clone ID: PAT_MRT4530_90090C.1
atggagccgtacgcggcggcggaggggggaggaggaggaggaggtggaggcagcaccgacaccgggctcgaagagtcgatgtggaggatggggctgggcggcggcgggggtggcggaggggaggcggtggcggcagggaggctgccggagcggccgggggaggcggactgcgtctactacctccgcacgggggcttgcggctacggggagaactgccgctacaaccacccgcgcgatcgcgccgccgcagcagtgttaaatggaggtgggaagaccacacattcggcagagtatccagaacggccggggcaaccagtttgtgagtactatatgaagaatggaacttgtaagtttggctctaattgcaagtatgatcacccaagggaaggctctgtgcaagcagtcatgttaaattccagtggataccctctacgctcaggtgagaaagattgtacctactatgtcaaaactggccattgcaaatttggatctacatgtaaattccatcacccagaaattggtggagtttcagagacacctaacatgtatccaccagttcagcctcagcctatctcttcctctcatccatatcaacatcttgctggctggcaaatggggaggcctcctgttttgccaggatcatttttatcaggctcatatccaccaatgatgcttccgtccacagtcgtaccaatgcagggatggaacccttacatttcacctgtgaaccaagttgcgtcagctggggggcatcaaactgttcaagcagggccgttttatggcttatcgcaccaagggccttctgctgcagtcacttatggcagtcagtatgcaccgttatcttcttcaaccatgccttcaagtagcagtaaacaagaacctgcctttcctgcgcgacctgggcaacctgaatgccagtattatctgaagacagggagttgtaaatttggatctgcatgcaaatatcatcatcctcagtatttgaatacacctaagtctaactgtatgctgagtcctcttggtcttcctcttcggccgggtagccaaccatgtgcttactatacacagcatggattttgcaaatttggtccgacttgcaagtttgatcacccaatgggtactctaagctatagcccttcagcgtcatcgattactgatttgcctattgctccctatcccctcaattacgctgttgctcctgtggctccaccttcatcttcttctgatttgcggccagaataccttctaaccaaagagttttcagccaaccagtcagcgtcacctggtactacatgcggacctgctggagcaatgttaaaagcgtacgctccacacatgcttatccgacctcaaacttctggagctggtggcatggttacaactcatggtggagagctctaaccaccttcagcaagcttctcgggacttttttggcatatggtgaatgagatctcgtctcctttttttgcgtcagttcgacttaccctctcagcatcagttcacttggacccccactcattgtgaataaggcttcaactgactttgacaaaggcatggccaaggtggtaatcttgccacctgaataaattcatcatagatagataggcagtggcaagctcattcacttgccgtttatctcttcatgtctgaaatggaacaggggtcattctgaagtccagttaactgtttgactgtcattgcactatgattcagagcttcgaatccatctcctcggtacataattttatcggcggagcaggccgttgagtgtgcaccactgcagagagtttcatgtcagaaagttatttggtttggtcgctcttgcccaaatctctgtttatttttaatcatcatatatatatgcaatctcgagttcagctatatgcatattcatatatatactgggatcaagaaactgtaatcacacacttggaaaccctcatctgaatcgccccaagctaacttgctgcatcatcattttgctcatttagtcgattgcatccgacttatgtttgaaccctgcaaaaaaaaaaaaaaa

SEQ ID NO: 91524 - DNA, 264 bp, Oryza sativa
  Clone ID: PAT_MRT4530_90091C.1
atggaggatttgggtggtgtccggaaaaggctagtgccgtccctggggctctacggtggggcagccattggtaggaccgcgaggcgggtgtctacagtggtgtcgccattggtaggactgccattcgcggagtgcggactacgggatatcattatttggagttatatgctgcggttgagaggtgggccgctgatggtgacagctcagtacgggaactcggcagtcaggggtggcttctcgaagtaccaggagggcatcggatag

SEQ ID NO: 91525 - DNA, 672 bp, Oryza sativa
  unsure (1)..(672): unsure at all n locations
  Clone ID: PAT_MRT4530_90092C.1
gatcgaaggatggatggnnggacggatggagcaagctaagctaagctttcgttttgtcgatccatccgtccatcggtgtcgacctagctagaaaggtcgacctgtcgcgtcgtccatccaagatcgatccaaccagcaaccaggcatcagacaggctctttcttgtccagctgctgctgctgctagtacacatactacactgtctctgctgcatgcatgcatgctggctcacctcatctgattgagagttcagaattgttgagagcaagcaggaaattgagaaacggccaggacagattggattgatcttaattggcatatatgctgctcgatcgatactgtctgtcagttctcagttcgtcgatcgatcaagtctatatttggatatctgaatctctgcaaatgccaactcgaccactaagcaattcatcaatggacatgatcatagtaatgtcgatcgacgtgcagtgtcactcattgttgggagcacggtcaaaacctccagttcatatcatatcatatgaaatcgatctcaagctcaagcagtttcgatagatgcaaaattgaagatggaagtataaataactgctactgtatatacatatggagggcaggaaggcaggcaggagattgatgaaagtgacgcgagcctggccttgaattgtgcnaagt

SEQ ID NO: 91526 - DNA, 282 bp, Oryza sativa
  Clone ID: PAT_MRT4530_90093C.1
atgggcaaaaaggtgtgcggtgcgtctctactagaccacttactagtagagagagggcgcaacgggcaaaagcggcgctatggcgatgtcaagatcaactggagctgtgcgctgttcgtcgtgtcctaccgtggctacagcaccaaaaacaaccctgtcgcttctggtgtccatccgcagtgtccagctcctgttgtgcatgtgcagagatatgcattggtcaagcagggttcagagggacatgaatatgctgcagagcaacttgttaggaagatgaactag

SEQ ID NO: 91527 - DNA, 183 bp, Oryza sativa
  Clone ID: PAT_MRT4530_90094C.1
atggcgatgtcaagatcaactggagctgtgcgctgttcgtcgtgtcctaccgtggctacagcaccaaaaacaaccctgtcgtgtccagctcctgttgtgcatgtgcagagatatgcattggtcaagcagggttcagagggacatgaatatgctgcagagcaacttgttaggaagatgaactag

SEQ ID NO: 91528 - DNA, 2067 bp, Oryza sativa
  Clone ID: PAT_MRT4530_90095C.1
atggagagggaaccgggaggtactgaacctgaacccatcctgggccgcatggttgcggttgaggactacattctctgtggttttcttcctccgccttccgagtttttccttcttgtcttgaacttctacggtctttctctgcttcatctgaaccccaactccatagccttccttagcattttttctcatctctggctgtcggggtatgaagtcgcagccgacttcattggtagacggatccagccgctcaaggctcgagcccatctagcctttgactactttggactggaggacacgacccgggtttctcctcggggtctgagcagcacaaccgtggagcaccgtgttgcccaggtgatgattagcagtcccacgacggcgagcaacgtccccacccctctttgtgagagggaggcggctgagcgtgaagccgcgatcaacgctctcctcctgactgacgccatcgggccgctcgtggaccaccagacggcggcctcgttgaaggagggcgttgcccgggaggcgtccgacacggccattgtcattgctgctgccacgaccagcggcagcaaggttccgaagaaggggaggaagttttcctccgtgctcggcaaccgccggaagacgcccactccatcggtctcggatgcgtctcccccacctccacgatggcagaggctactgacactcggcgagaaggcggcacgagcgaaggcagcgcaagatgggtctacagcaaactccagtgcgtctcctgcagtggcctcgtccgaggtcgtggtcgtgccttggagccgcgaggtgacgcccagcggcccggccagcaatcccacagctggtcgaggcccgccggctgccgtcctcacctgggaggaactccaggtcgagatggggcacatcatcgaggctggcactcacggcattagtcacgagattgcggaggcgagggcggcggcggcatcgtcggcaaatgagcgtgccgatcggctgacgcgtgatttggcggaggggctcgagcaccgtatgtcggagctcgagaatgacttgtcggagatccgtggctcgctgtgggtcacctacactagtctgcaccagctctccggggagtgcggtgtcacgaccaccatcccggagaatcccgatgagttctcgctgacgacttcgctcacggaactggcaacggcgatggaggcgatcccctctaagcacgcggccaggatcagagaggagacgtccaacgggatctacaccggggcgtgccacgtccttgcgtgtgtgaggttggcacaccctgaactcaatctccagaagatcttggatcagggggcggctagcgacgcgcgcaaagatgtgatggaagaagtcggcgaactaggggagtctgtcctcccactttttgaagaagatgtcgatgtcgaggatatccagcagcgcgggcagcctgaattgccggtagtcgttccagcacttgagcttgagccgtatgtgccgcaggacggcgtagaccaggatctgcccgaggagacggacgtggcgacgactcctttagacctcgaaaatgcgattgctgatcgcgaccgtcgcattcagtactggaggacaaagttcgaggtcgccgaacttgagaggactatattggaagtgaagaaggaccgggccatggaggcgctccgaggtcgcgaggtatggttcaactcgtacctcaggagctgttgcacaaccatggccgttgtctgcagggagctccgagtacctcgtggggatcccgaggagtcagcggctggctacatctcgtggctaaacggggctggtgctcagcttgaaggcatcggcaggcgtatcgatgaggccctaaagcagaagtgtcgtcgattgagccgatacgctggagggcacgtgttggcatgtatacgagatcatcgtccgcagttgcacctagagttcctccacgaagggttttcccgttctcggaggaatcccgcggagatagacaacctggcgaagtcgatggctccgttggcggagaaaatctttcagtcaatggattggcgttggccttcctggtag

SEQ ID NO: 91529 - DNA, 4956 bp, Oryza sativa
  Clone ID: PAT_MRT4530_90096C.1
atggaggtggatgaagtcgggggtcgatggacattctccagggcaaatgaaggctacacgagctgcggcccggtagtcgagatgtcatggcacagggccggtgtcctgctgctaggggctcagtcctgcctgcctgtcccgggggttccggccgtaggtgggattgggtcggtactcttgtctatggctaggatgggttggaaactatgtcacgtcttccgtctgtataccgtggtgatggccggcagcgtcacccgtcgtggtttggacatgactggtttcgtcttggagctgcggggcatgtgcgtggccgtggggtatccacacggagtggactaccaggccaggccgcttctggagcaggagggtgacgatgcagagccccacgctgcttgggaggtcactgcagtgatcctcgctggctctcccgagcggacttcgctgacagtcaccgcgggtggagactccttccccgccgcttgccagagcgccgctctcctcgccatcggcactcttcaccagcgctacccggacgagttgcagcactcgccctaccgctaccaccctcgtcgcggaggagcccgcgaccacgccaccttccgggatgctagctcggaggatgacgctaccatcgtgcacttggcgcgcatggtggaggcgtacgacgcggctcgtatcgacttccatcagatggtgcgccgtgggatggtcgagaacaacctgaagatcctggagctgcgtcaagagaacctgcagctcaagaaggacctggacgcagtggaggcgcagctgcatcagctcaagatcgcccagggagagatctgccgccccaagcgtcgccgcgtctgccgcagcctgaagatcaccgcccgcaagagcacctccaggcccgagcttgttcgtcagtccctggcgtggacttgcttcgtcgagacccctcgtgccgagcccgcgcccgtgatggtgatgaccaggagaagtgctaacaccggtgatggcaaccaacctgaaggcagcaaccacaaccatcagggcaacccacctccacctcctcctccgcctccaccaccaccaccagacaccaacgccattctcacccaaatcctcgcccagcaggccaacatgatgactgctttcctccaccacctccaaaatccgccacaacttaatgctccaccaccaccctcacaacactctaaacttgccgagtttctccgcatccgcccacctaccttctctagctccaacaaccccgtggatgcgttggattggttgcatgccgtggggaaaaagctagacactgtgcagtgcagcgatgaggagaaagctacgcagccagagggacagcctattacatgggctcgcttcaccgccgctttccgaagaacccatgtgcccgccggagtcgtggcccttaagaaaagggaattccgagagttgaagcaaggcaaccgctccgtgatggagtatttgcacgagttcaacaacctggcccgttacgctccggaggatgtgcgggaagatgaggagaagcaagagaagttcctggcaggaatggaccctgagctgtccgtccgtctagtctccggggattatccggatttccaatgtctggtggacaagagcatccgcttggaagccaggcacaaggaactggagtcgcacaagcaccgcttggcgaatttccgcaaccaacagggtgctaaccaaagggtccgctacaccaatccctatccagggggatcctcctcgcagcagcaacaacagcagcagcaacctcgctccgcgcctcgacctcaattcgtggtgcgcgtcccacagccgcagcagcagcagtatcaacaagggactcgtgcgccccgtcctcctccaccgactgtgcagcttggtcaaggccgcagggacgctcaaggagtagtggattgcgcgagacgcactgtcactctgtaccgagggccggaacaaccggttgttttctttgcacccccaacctcagtcagaagttcagaacttcatcagatagaactgtcagaaattcccatcgtcagagagttcggagacgtgtttccggaagaactacctggtatgccgcctaagcgagagattgagttccggatagatcttgctccaggaaccgctcctctgtacaagcgaccctaccgtatggcagcaaatgaactggccgaagttaagaaacagttggaagagctgaaagaaaaggggtatatacgtccgagtacttccccctggggtgctcctgtgatttttgtggagaagaaagacaagacaaagaggatgtgcgttgactacagagctctcaatgaagtcaccatcaaaaacaagtaccctcttccccggatcgatgatctgttcgatcagcttaaaggtgccactgtattctccaagattgatcttcgttccggatatcaccaattacgtattcgcgaagaagatattccgaagaccgcattcaccacgcgatacggactgtatgaattcacggtgatgtcgttcggtttaaccaatgctcctgccttcttcatgaacttaatgaacaaagtgttcatggaatacttggataagtttgtggtggttttcattgatgacattctgatatactcacaatcagaggaagaccatcagcaccatctccgtctggtattgggaaagttgcgggaacatcaattgtatgccaaacttagcaagtgtgagttctggttgtccgaagtcaaattcttagggcacgtgatatctgctaaaggagttgctgtggaccccgaaacagtgaccgccgtcaccgattggaagcaacccaagacagtcactcaagttcgcagtttcttaggtttggcaggatactaccggagattcatcgagaacttctccaaaatcgctcgacccatgacacagttgttgaagaaagaagaaaaatttgtgtggagcccgcaatgcgagaaggcgttccaaactctcaaagaaaagctagtttcctcgccggtgttaatcttgccggatactcacaaggacttcatggtgtattgtgacgcttcgcgccaaggattggggtgcgtgctcatgcaggatggttatgtggtggcctatgcctcacgccagcttcggcctcatgaaggcaactaccctactcatgatttggagttagccgcggtggttcatgccctaaaaatctggcggcactatctcattgggaatcgctgtgaaatatatactgatcataagagtttgaaatacatcttcactcagtcggacctgaatcttcggcaaaggagatggttagaactcatcaaggattatgatgtgggaattcactatcatcctggtaaggccaacgtggtcgccgacgctctaagtcgaaaaggccattgcaacactcttaacgtctgtggcattccacccgaacttaatcaacagatggaagccctgaacctaagcatagttagtcgcggattcttggctgcgctggaagccaagcccaccttgctcgatcaaatccgcgaggctcagaagaatgatccagacatgcatggactcctcaagaatatgaaacagggtaaagccgctggtttcacagaggatgaacacggaaccctatggaacggaaatcgagtatgcgttccagataacagagaacttaaacagttgatacttcaggaagctcacgaaagtccttattccatccaccctggcagcatgaagatgtacttagacttgaaggagaaatactggtgggttagtatgaagcgggaaattgcagagttcgtggccctttgtgatgtgtgccagcgtgtcaaggcagagcaccaacgaccggccggacttctccaacctctccaagtacctgaatggaaatgggatgaaattgggatggatttcatcaccggacttccaaaaacccaaggtggatatgattctatatgggtagttgtggatcgattaaccaaggtagctcgattcattcctgtgaagaccacctatggagggaacaaactagccgaactctacttcgctaggatcgtaagtctccatggcgttcctaagaaaatcgtatctgataggggaagccaattcacctctcacttttggaagaagctccaagaagagctgggtacccgattaaacttcagcaccgcgtatcacccgcagacagatgggcagaccgagcgtctaaatcagatcctagaagatatgcttcgcgcatgtgtcctggatttcgggaagacctgggataagagtctcccctatgccgagttctcctacaacaacagctatcaagccagcatacaaatggcaccttatgaagcgttgtatgggcgcaaatgccggacaccgctaatgtgggatcaagttagggaaagccaagtgttcgggactgatatcctgagagaagctgaagctaaagtcagaaccattcgggataatctaaaggtggcacagtcccggcagaaaagttatgcagataaccgtcgccgtgacctggaattcgcagtggacgattttgtatatcttcgggtcacgccattgcgaggtgtacacaggtttcggacaaaagggaagctcacacctcggtatgtgggtcctttccgtatcgttgctcgacgcggagaagtcgcttacaaattggagctgcccgcctccttgggcaacgtgcatcatgtgttccatgtgtcgcaactcaagaaatgccttcgagtgccatccgagcaggccgactcagagcaaattgaagttcgcgaagacttgacctacgtggagaggccagtgaagatcctggacaccatggagcgcaggaccaggaaccgggtaatccgtttttgcaaggtccagtggagcaaccacgccgaagaagaagctacctgggagcgcgaagacgagctgaaggcagcccatccagatctcttcgccagttcttccgaatctcggggtcgagattccgtttaa

SEQ ID NO: 91530 - DNA, 6253 bp, Oryza sativa
  Clone ID: PAT_MRT4530_90097C.1
cggctcggcccatctccctccccctccctctcttctccccgcagcccatccggcctcttcccgcgcgcgcgcctcatacgggcgggcccgcccgccaccctcgctgacgggtggggcccacccgtcatccccttcctcccgccgctcccgccgcctcgcccgcgccctagcgccgccgccgccgcgaatcccgctgcctcccgccgtctccgcgtgcaataaagagggggaaatcactccccgtgatcccctctccctttccccccatttttccctctctctctcgcgtttaaacgggcggatttgcccccgcaaatctcgccggcgccactgatggcagccggacctcccgcgccggtttccccccttccccggccaccctctctcgacccggctctatttaaaccctccccgcacctcctccatctgtttccgcctctcgccgcccttcctcctcgccggaatcgagctcgcgccgtcgctctctctctgccgtcgccgtcgagctccggtccacctcccacctcggcgccgcctccttcggcttcgccgcatcctcgccgacctcgtccacccctccgtttcgctcaccgaccgccggaacgccgtcgaccccgtcgacccgagccgcgccgccgccttcctccgctccggccgcctttttcgtcgtcgccgtcgacctagggtgagccgtggaccgccgcttcttttcccccttcccttcccctctctcggccgccgctccgccgtgcctatggccaccgccggcgaccataggggcgcgggcgccgcctcccgccggctgcgccggcttggccgccctcgggcgcgccgagtggctgccgcgtggggcccggctcggccatataaggaccggtcttcgggcctctgttgcaaagcactaccgtacttccacatgtctagtggggcaaatgaaggctacacgagctgcggcccgatggccggcagcgttacccgtcgtggtttggacatgtctggcttcgtcttggagctgcgaggcatgtgcgtggtcttggggtatccacatggagtggattaccaggccaggccgctcccggagcaggagggtgaggatgcagagcctcacgctggttgggaggtcactgcagtgatcctctccggctctcccaagcggacttcgctggcagtcaccgcgggcggagactccttccccgccgcttgccagaacgccgctctcctcgccatcggcaccctgcaccagcgctacccggacgagttgcagcactcgccctaccgctaccaccctcgtcgcggaggagcccgcgacttcgccaccttccgagacgccagctcggaggatgatgccaccgtcgtgcatctggcacgcatggtggaggcatacgacgcagctcgtattgacttccaccagatggtgcgtcgcggcatggtggagaacaacatgaagatcctggagctgcgtcaggagaacctgcagctcaagaaggacctcgacgcgttggaggcgcagctgcatcagctcaagatcgcccagggagaggacagccgtcccaagcgtcgccgcgtctgccgcagccagaagatcaccgcccgcaagagcacctccaggcccgagcttgttcgtcagtccctggcgtggacttgcttcgtcgagacccctcgtgccgagcctgcgcccgtggttccccaggagggggaagcctccggcgttggtagctcggagggcgcgctgttgctcaccttccgccctggcccgtcgcagcggagaaatgttaacaccggtgaaggcaaccaacccgagggcagcaaccccaacccccaaggcaatccacctccaccaccaccaccagacaccaacgccattctcacccagatcctcgcccaacaagccaacatgatgaatgctttcctccaccacctccaaaacccgccacaacagaatgctccaccaccacctccccaacactccaaactcaccgaattcctccgcatccgcccacccaccttctccagctccaacaatcccgtggatgcgttggattggttgcatgccgtggggaagaagctagacacggtgcagtgcagcgatgaggagaaagtcgtcttcgccgcccatcagctgcaggggcccgcatctctatggtgggaccacttccaggctacgcagcccgaggggcaaccgattacttgggctcgcttcaccgccgctttccggagaacccatgtgcccgccggagtcgtggctctcaagaagagggaattccgagagttgaagcaaggcaaccgctccgtgatggagtatttgcacgagttcaacaatctggcccgttacgctccggaggatgtgcgggaagatgaggagaagcaagagaagttcttggcaggaatggaccctgagctgtctgttcgtctagtctctggggactatccggattttcaacgattggtggacaagagcatccgcttggaagccaagcacaaggagctggagtcgcacaagcgccgcttggcgaacttccgcaatcaacagggtgctaaccagagggtccgctacaccaatccctacccagggggatcctcctcgcagcagcaacaacagcagcagcaacctcgcccagcgcctcgacctcaattcgtggtgcgcgtcccacagcagcaacagcagcagaatcagcaagggactcgtgcgccccgtcctcctacgccagctgggcagcccgttcaaggccgcagggacgcttcaggtccgcagcggctgtgcttcaactgcttcgagcccgggcactttgcggataaatgcccgaagccaaggcgtcagcaaggccaagcgcctccccgccccaacaacggtgggaaggacgtcatccgtggccgtgtgaatcacgtgacggccgaggacgtgctgacaactcccgacgtcatcgttggtacgttcctcgttcattccatccctgctacaattttgttcgactctggagcttcccactcgtttatatctgtgccattcgtggggaaaaatcagttgggggtagaaaggcttagaaaccctctgctcatcaccacccctggaggggttatgacagcaaagtattatagccctgccgtccctatagaaattcaggggattccttttccctcggacctgattcttctagacactaagaacttggatgtgatccttgggatgaattggctggcacaattccaaggagtagtggattgcgcgaggcgcactgtcactctataccgaggaccagaacaaccggttgttttctttgcacctccaacctctgtcagaagctcagaacttcatcagatagaactgtcggaaatccccatagtcagagagttcggagacgtgtttccggaagaactacctggtatgccgcccaagcgagagattgagttccggatagatcttgctccaggaaccactcctctgcacaagcgaccctaccgtatggcagcaaatgaactggccgaagttaagaaacagttggaagagttgaaagaaaaggggtatatacgtccgagtacttccccttggggtgctcctgtgatttttgtggagaagaaagacaaaacgaagaggatgtgcgttgactacagagctctcaatgaagtcaccatcaaaaacaagtaccctcttccccggatcgatgatctgttcgatcagcttaaaggtgccactgtattctccaagattgatcttcgttccggatatcaccaattacgtattcgggaagaagatattccgaagaccgcattcactacgcgatatggactgtatgaattcacggtgatgtcgttcggcttaaccaatgctcctgccttcttcatgaacttgatgaacaaagtgttcatggaatacttggataagttcgttgtggttttcatcgatgacattctgatatactcacaatcagaggaagaccatcagcaccatctccgtctggtattgggaaagttgcgggaacatcaattgtatgccaagcttagcaagtgtgagttctggttgtccgaagtcaaattcttggggcacgtgatatctgctaaaggagttgctgtggaccccgaaacagtgaccgccgtcaccgattggaagcaacccaagacagtcactcagattcgcagtttcttgggtttggcaggatactaccggaggttcatcgagaacttctccaaaatcgctcgacccatgacacagttgttgaagaaagaagagaagtttgtgtggagcccgcaatgcgagaaggcgttccaaactctcaaagaaaagctggtttcctcgccagtgttaatcttgccggatactcgcaaggatttcatggtgtactgtgatgcttcgcgccaaggattggggtgcgtgctcatgcaggacggtcatgtggtagcctatgcttcacgccagctacgacctcatgaaggcaactaccctacacatgacttggagttagcagcggtggttcatgctctaaaaatctggcggcactatctcattgggaaccgctgtgaaatatatactgatcataagagtttgaaatacatcttcacccagtcggatctgaatcttcggcaaaggagatggttagaactcatcaaggattatgatgtgggaatacactatcatcctggtaaggccaacgtggttgccgacgctctaagtcgaaagagccactgcaacactctcaacgtccgaggcattccacccgagcttaatcaacagatggaagcactgaacctaagcatggttggtcgcggattcttggctgcgttggaagctaagcccaccttgctcgatcaaatccgcgaggctcagaagaatgatccggacatgcatggactcctcaagaatatgaaacagggcaaagccgctggtttcacagaggatgaacacggaaccttatggaacggaaagcgggtatgcgttccagatagcagagaacttaaacagctgatacttcaggaagctcacgaaagtccttattccattcacccgggcagtaccaagatgtacttagacttgaaggagaaatactggtgggtcagcatgaagcgggaaattgcagagtttgtggcactatgtgatgtgtgccagcgtgtcaaggcagagcaccagcgaccggccggacttctccagcctctccaagtgccggaatggaaatgggatgaaattgggatggatttcatcaccggccttccaaaaacccaaggtggatatgattctatatgggtaattgtggatcgactaacaaaggtagctcgatttattcctgtgaagaccacttatggagggaacaaactagcggagctctacttcgctaggatcgtgagtctccatggtattcccaagaaaatcgtatctgataggggaagccaattcacctctcacttttggaagaagctccaagaagagctgggtactcgattgaatttcagcaccgcctatcacccgcagacagatggacagaccgagcgtctaaatcagatcctagaagatatgctccgcgcatgtgtcctagacttcgggaagacttgggataagagtctcccctatgccgagttctcctacaacaacagctatcaagccagcatacaaatggcaccctatgaagcgttgtacgggcgcaaatgccggacaccgctattgtgggaccaagttggagaaagccaagtgttcgggactgatatcctgagagaagctgaagctaaagtcagaatcattcgggataatctaaaggtggcacagtcccggcagaaaagttatgccgataaccgacgccgtgatctggaattcgcagtggatgattttgtgtaccttcgggtcacgccattgcgaggggtgcacaggtttcggacaaaagggaagctcgcacctcggtatgtgggacctttccgtatcgtcgctcgacgcggagaagtcgcttaccagctggagttgcccgcctccttgggcaatgtgcatgatgtgttccatgtgtcgcaactcaagaaatgtcttcgagtgccatccgagcaggccaactcagagcaaattgaagttcgcgaagacttgacgtatgtggagaagccagtgaaaatcctggacaccatggagcgcaggaccaggaaccgggtaatccgtttttgcaaggtccagtggagcaatcacgccgaagaagaagctacttgggagcgcgaagacgagctgaaggcagcccatcccgatctcttcgccagttcttccgaatctcggggtcgagattccgtttaa

SEQ ID NO: 91531 - DNA, 4485 bp, Oryza sativa
  Clone ID: PAT_MRT4530_90098C.1
atggttatgccgatggtgacgactaggagaaatgctgttaccggtgatggcaaccaacctgaaggcagcaaccacaaccaccagggcaacccacctccacctcctcctccgcctccaccaccaccaccagacaccaacgccattctcacccaaatcctcgcccagcaagccaacatgatgaatgctttcctccaccacctccaaaacccgccacaacagaatgctccaccaccacccccacaacactctaaactcgccgagttcctccgcatccgcccacctaccttctccagttccaacaaccccgtggatgcgttggattggttgcatgccgtggggaaaaagctagacacggtgcagtgcagcgatgaggagaaagtcgtcttcgccgcccatcagctgcaggggcccgcatctctctggtgggaccacttccaggctacgcagccagagggacagccgattacttgggctcgcttcaccgccgctttccgaagaacccatgtgcccgctggagtcgtggcccttaagaaaagggaattccgagagttgaagcaaggcaaccgctccgtgatggagtatttgcatgagttcaataacctggcccgttacgctccggaggatgtgcgggaagatgaggagaagcaagaaaagttcttggcaggaatggaccccgagctgtccgtccgtctagtctctggggactatccggacttccaacgactggtggacaagagcatccgcttggaagccaagcacaaggaactggagtcgcacaagcgtcgcttggcgaatttccgcaatcagcagggtgctaaccaaagggtccgctacaccaatccctatccagggggatcctcctcgcagcagcaacaacaacagcagcagcaacctcgccccgcgcctcgacctcaattcgtggtgcgcgtcccacagctgcagcagcagcagaatcagcaagggactcgtgcgccccgtcctcctacgccaactgtgcagcctgttcaaggccgcagggatgctcaaggtccgcagcgtctgtgcttcaactgcttcgagcccgggccctttgcggataaatgcccgaagccaaggcgtcagcaaggccaagcgcctccccgccccaacaacggtggtaaggacgtcattcggggtcgtgtgaatcacgtgacggccgaggacgtgctgacaactccagacgtcatcgttggtacgttcctcgttcattccatccctgctacaattttgttcgactctggagcttcccactcgtttatatctgtgccattcgtggggagaaatcagttgggggtagaaaggcttagaaaccctctgctcatcaccacccctggaggggttatgacagcaaagtattatagccctgccgtccctatagaaattcaggggattccttttccctcggatctgattctgttagacaccaagaacttggatataggactgtcagaaatccccatcgtcagggagttcggagaagtgtttccggaagaactacctggtatgccgcccaagcgagagattgagttccgaatagatcttgctccaggaaccactcctctgcacaagcgaccctaccagaagaaagacaagacgaagaggatgtgcgtcgactacagagctctcaatgaagtcaccataaaaaacaagtaccctcttccccggatcgatgatctattcgatcaacttaaaggtgccactgtattctccaagattgatcttcgttccggatatcaccaattacgtattcgtgaagaagatattccgaagaccgcattcaccacgcgatacgggctgtatgaattcacggtgatgtcgttcggtttgaccaatgcgcctgccttcttcatgaacttgatgaacaaagtattcatggaatacttggataagtttgttgtggttttcattgatgacattctgatatactcacaatcagaggaagaccatcaacaccatctccgtctggtgttgggaaagttgcgggaacatcaattgtatgccaagcttagcaagtgtgagttctggttgtccgaagtcaaattcttagggcacgtgatatctgctaaaggagttgctgtggatcccgaaacagtgaccgccgtcaccgattggaagcaacccaagacagttactcaagtccgcagtttcttacgacctcatgaaggcaactaccctacacatgacttggagttagccgcagtagttcatgctctaaaaatctggcggcactatctcattgggaatcgctgtgaaatctataccgaccataagagtttgaaatacatcttcacccagtcggatctgaaccttcggcaaaggagatggttagaactcatcaaggactatgatgtgggaattcactatcatcctggtaaggccaacgtggttgccgacgctctaagtcgaaagagccattgcaacactcttaacgtccgtggcattccacccgaacttaaccaacagatggaagccctgaacctaaacatagttggtcgtggatttttggccgcgttggaagccaagtccaccttgctcgatcaaatccgcgaggctcagaagaatgatccggacatgcatggactcctcaagaatatgaaacagggtaaagccgctggtttcacagaggatgaacacggaaccctatggaacggaaagcggagtttgtggccctgtgtgacgtgtgccagcgtgtcaaggcagagcaccaacgaccggccggacttctccaacctctccaacaccgcctatcacccgcagacagatggacagaccgagcgtctgaaccagatcctagaagatatgctccgcgcatgtgtcctagatttcgggaagacctgggataagagtctcccctatgctgagttctcttacaataacagctatcaagccagcatacaaatggcaccttatgaagcgttgtatgggcgcaagtgccggacaccactcttgtgggatcaagtaggagaaagccaagtgttcgggactgatatcctgagagaagctgaagctaaagtcagaatcattcgggataatctaaaggtggcacagtcccggcagaaaagttatgcagataaccgtcgccgtgacctggaattcgcagtggatgattttgtataccttcgggtcacgccattgcgaggtgtacacaggtttcagacgaaagggaagctcgcacctcggtatgtgggtcctttccgtatccttgctcgacgcggagaagtcgcttaccagttggagctgcccgcctccttgggcaacgtgcatgatgtgttccatgtgtcgcaactcaagaaatgccttcgagtgccatccgagcaggccgactcagagcaaattgaagttcgcgaagatttgacctacgtggagaggccagtgaaaatcctggacaccatggagcgcaggaccaggaaccggggcccacctgtcatcgccttcctcccgccgctcccgccgctcgcccgtgccctagcgccgccgccgccgccgaatccgccgcatcccgccgtccccgcgcgccataatgaggggggaattattccccgcgattccctctcccgtttccctctctttcccctctctctctccctcggattcgtccggattcaatcccgcaaacctcgccggcgcaatcaatggcggccggatcctccgcgccggtttccatctcctccggccgccttccctcactcccaaccctatataaacgttccccgtgcctctctcctccgtttccgccgttcgccactcgctctccccgtcggaatcgcgctcgcgccgtcgcatcttctctccgccgtcgccgccgagcttcggttcgccgccgtcgtcgctccggacatcctcccgtctcggcgtcacctccttcggcttcgccgcgtccccgtcgacctcggccgctcctccatttcgctcgccgaccgccggagcgccgtcgtcctcgtcgtcccgagccgcgccgccgccttcctccgcttcggccgccgttcccgtcgtcgccgtcgacccggggtgagccgaagaccgccctttcgcttccttctcctctccgctctctcgggcgccgctccaccgcgccggtggtcgccggcggtgaccatcggggcgcgggcgtgccgcctcccgtcggccgtgccggcgaggccgccttcgggcgcgccctcgcggctgccaagtgggcccggccatcagccgcccgcgcccgcggcacctcggccatataaggaccggtcttcgggcctctgttgcaaagcactaccgtacttccacatgtctagtggggcaaatgaaggctacacgagctgcggcccggtagtcgagatgtcatggcagagggttggtgccctgctgctgggggctcagtcttgcctgcctgtcccgggggttccggccgtaggcgggattggtcttgctcaatttttcccaagcccagaagaggagctccatgaagatgaaggctttggtgtctag

SEQ ID NO: 91532 - DNA, 719 bp, Oryza sativa
  unsure (1)..(719): unsure at all n locations
  Clone ID: PAT_MRT4530_90099C.1
atggtgggctaccccagtcaacctccggccggctcggcgccctcgggtggcgccgctgccgacgaagaggcagccgggaccgagcgagtgggaggcgcggccacctcctccaccgtcgggcgactccacctcccccttcactgcctccttcctacacggttccggccgccgcttcgcctcccacgcgcgtggatccagctgcggcacggcagatctaccacggtggcgagcaacggccggttcgacgaccttgggctccacctcctccaccgctgggtggctccaccgcctccctcctgcatggatttggcaacgacgcagcggatttggcgacaatgggaggcacagcaccaggcggcggcggatctggcgtgggcgacggtgggctcggcctccggcagctagcgccggcgaaaaagtgggtgggcaccggagctagggtctagggtttggtttttttttgctattttcttttttattatttttttatgtttgtatgtgatcgatataagccccgtatgcataaattggatttttgcatacggatgctccacccgcatgataaaatcactattttcgcagactttttggtgcaaacatgcgactcaaaccgcgtgaaattaaaaatgattttttagtaatgtgtatttaaattttanacaatgttgtttnttcatggcnaaaaaaaaaaaaaaaaaaaaaaaaaaaaaaaaaaaaaa

SEQ ID NO: 91533 - DNA, 984 bp, Oryza sativa
  Clone ID: PAT_MRT4530_9009C.1
tcagggcgtcgacttggagctggaggtgttctcggcttgggcggggacgttcagcggcggcgcaccgtgctcaattttggacaacgatcgacgatggcgacgaattccgaagtcgaagccagcggcaataaccctaagcttcggccagaacggcttcgccgacggcgagcgcaacggcaaaccaacctcgccaccctcgcggcgacgacaacgccactgccgccgttcttgagcagggcgtctaccatgcacaacaccagtagcatgtcgagcagcttggcaacgtagtgggacagcagggacgtgagcctgttggggcgcaacgacgcagacgtagatagccgatgaccccagcttgaacatggcagtggcgatagtgccacaaagttgtcgacagtccatcaccgcgctggcgtcgctgcccacacgctgcagcgcctccgtcgacgcggctgccgcgtcgatgccttcttgcccatggacgcaagggggtgtgtatgggtcgcctggacctttgccagcgcagtcctggatgcacaggccaccgtcccgactaagtgcgtgcttaccaatgctctctttggacgaccagacgcgccgatggagcatgcccccgagctccgccggcagcgccgccacctccaccaccgtgtcctccaccgtcgtcctccacgccgccacggcctctccgccggccgccgcggcagcggcggctaggagaagcacgacgaacggcgcacatgcggcggcggccagtttttctcctctctgggcaagccggctggtgggtggggaggaggttgccaggggcagaggcagggagaggaggtccagcggccggcagcgacggagcaagccgctgcagccagggtcagagtccagggcgaagacaagcgccggccgaaggagaatcagaggtgcgcagcgcgtctggccaccagataggagagaagtgcggcaacggcgctcggtggcgaagacggg

SEQ ID NO: 91534 - DNA, 313 bp, Oryza sativa
  Clone ID: PAT_MRT4530_900C.1
gaaaaaaaaagatcacatgttatcctcaggtaggttacatgacaaggaagttaataacatccacaaatcaccatccaaaacaggttcaattacatcacaggttcacggaccgggccaaaacatgactagaacaagccacggaccaccaaatccagccaaaggccaaaaagtcgttcacacattgcccaaagcaaaggcatatccaagtcacacaaatcaaaggatcttgaattagcagggtaacattaagagaagagacaaaacccttattgggggtgacctgagggttgaggccaatcaaacgacaaaggac

SEQ ID NO: 91535 - DNA, 5142 bp, Oryza sativa
  Clone ID: PAT_MRT4530_90100C.1
atgtcgtggcacagggccggtgtcctgctgctaggggctcagtcctgcctgcctgtcccgggggttccggccgtaggtgggattgggtcggtactcttgtctatggctaggatgggttggaaactatgtcatgtcttccgtccgtataccatggtgatggccggcagcgttagtcgtcgtggtctggacatgactggtttcgtcttggagctgcggggtatgtgcgttgtcctggggtatccgcatggagtggactaccagggcaggccgctcccggagcaggagggtgacgatgcagagccccacgctgcttgggagcgctacccggacgagctgcagcactcgccctaccgctaccaccctcgtcgcggaggagcccgcgactacgccaccttctgggatgctagctcagaggatgacgctaccatcatgcacctggcgcgcatggtggaggcgtacgacgcggctcgtatcgacttccatcagatggtgcgccgtgggatggtcgagaacgacctgaagatcctggagctgcgtcaggagaatctgcagctgaagaaggacctagacgcagtggaggcacagctgcatcagctcaagatcacccagggagaggtctgtcgccccaagcgtcgccgcgtctgccgcagccagaagatcaccgcccgcaagagcacctccaggcccgagcttgttcgtcagtccctggcgtggacttgcttcgtggagacccctcgtgccgagcccgcgcccgtggttcctcaggagggggaagcctccggcgtcggtagcacggaggatgcgctgttgctcaccttccgtcctggcccgtcgcagtggagaaatgctgccaccagtgatggcaaccaacctgaaggcagcaaccacaacaaccatggcagcccacctccacctcctccaccgcctccaccaccaccaccagacaccaacgccattctcacccaaatcctcgcccagcaggccaacatgatggctgctttcctccaccacatccaaaatccgccacaacataatgctccaccaccacccccacaacactctaaactcgccgagttcctacgcatccgtccacctaccttctctagctccaacaaccccgtggatgcgttggattggttgcatgccgtggggaaaaagctagacactgtgcagtgcagcgatgaggagaaagtcgtcttcgccgcccaccaactgcagggacccgcatctctatggtgggatcatttccaggctacgcagccagaggggcagcctattacttgggcccgcttcaccgccgccttccggaggacccatgtgcccgccggagtcatggcccttaagaaaagggagttccgagagttgaagcaaggcaaccgctccgtgatggagtatttgcatgagtttaacaacttggcccggtacgccccggaggatgtgcgggaagatgaggagaagcaagagaagttcttggcaggaatggacccggagctgtctgtccgtctagtctccggtgactatccggatttccaacgtctggtggaaaagagcatccgcttggaagccaagcacaaggaactggagtcgcacaagcgtcgcttggcgaatttccgcaaccaacagggtgctaaccaaaggatccgctacaccaatccctatccagggggatcttcctcgcagcagcagcaacctcgctccgcgcctcgacctcaattcgtggtgcgcgtcccacagccgcagcaacagcagagccagcaagggacccgtgcgccccgtcctcctacgccagccgcgcagtctggacaaggccgcagggacgttcaaggtccgcagcgtctgtgcttcaactgcttcgagcccgggcactttgcggataaatgcccgaagccgaggcgccagcaaggccaagcgcctccccgctccaacaacggtggtaaggatgtcattcggggtcgtgtgaaccacgtgacggccgaggacgtgctgacaactccagacgtcatcgttggtacgttcctcatccattccatccctgctaccattttgttcgactctggagcttcccacttgtttatatctgtgccattcgtggggagaaatcagttgggggtagaaaggcttaggaaccctctactcatcaccacccctggaggggttatgacagcaaagtattatagtcctgccgtccctatagaaattcaggggattccttttccctcggatctgattcttctagacaccaagaacttggatgtgatccttgggatgaattggttggctcaattccaaggagtagtggattgtgcaagacgcactgtcactctgtaccgagggccggaacaaccggttgttttctttgcacccccaacctctgtcagtagttcagaacttcatcagataggactgtcagaaatccccattgtcagagagttcggagacgtgtttccggaagaactacccggtatgccgcccaagcgagagattgagttccggatagatcttgctctaggaaccactcctctgtacaagcgaccctaccgtatggcagcaaatgaactggccgaagttaagaaacagttggaagagttgaaagaaaaggggtatatacgtccgagtacttcctcctggggtgctcctgtgatttttgtggagaagaaagacaagacgaagaggatgtgcgttcactacagagctctcaatgaagtcaccatcaaaaacaagtaccctcttccccggatcgatgatctgttcgatcagcttaaaggtgccacggtattctccaagattgatcttcgttctggatatcaccagttgcgcatccgtgaagaagatattccgaagaccgcattcaccacgcgatacggactgtatgaattcacggtgatgtcgttcggtttaaccaatgctcctgccttcttcatgaacttaatgaacaaagtgttcatggaatacttggataagtttgttgtggttttcattgatgacattctgaagcaacccaagacagtcactcaaattcgcagtttcttaggtttggcaggatactaccggaggttcatcgagaacttctccaaaatcgctcgacccatgacacagttgttgaagaaagaggagaaatttgtgtggagcccgcaatgcgagaaggcgttcaaaactctcaaagaaaagctggtttcctcgccagtgttaatcttgccggatactcgcaaggacttcatggtgtattgtgacgcttcgcgccaaggattggggtgcgtgctcatgcaggacggtcatgtggtggcctatgcctcacgccagctacggcctcatgaaggcaactaccctacccatgatttggagttagccgcggtggttcatgctctaaaaatctggcggcactatctcattgggaatcgctgtgaaatatatactgatcataagagtttgaaatacatcttcacccagtcggatctgaatcttcggcagaggagatggttagaactcatcaagaattatgatgtgggaattcactatcatcctggtaaggccaacgtggtcgccgacgctctaagtcgaaaaagccattgcaacactcttaacgtccgtggcattccacccgaacttaatcaacagatggaagccctgaatctaagcatagtgggtcgcggattcttggctgcgttggaagccaagcccaccttgctcgatcaaatccgcgaggctcagaagaacgatccggacatgcatggactcctcaagaatatgaaacagggtaaagccgctggtttcacagaggatgaacacggaaccctatggaacagaaatcgggtatgcgttccagataacagagaacttaaacagctgatacttcaggaagctcacgaaagtccttattccatccaccctggcagtacgaagatgtacttagacttgaaggagaaatactggtgggttagtatgaagcgggaaattgcagagttcgtggccctttgtgatgtgtgccagcgtgtcaaggcagagcaccaacgaccggccggacttctccaacctctccaagtaccagaatggaaatgggatgaaattgggatggatttcatcaccggacttccaaaaacccaaggtggatatgattctatatgggtagttgtggatcgattaaccaaggtagctcgatttattcctgtgaaggccacctatggagggaacaaactagccgagctctacttcgctaggatcgtgagtctccatggcgttcctaagaaaattgtatccgataggggaagccaattcacctctcacttttggaagaagctccaagaagagctgggtacccgattaaatttcagcaccgcgtatcacccgcagacagatggacagaccgagcgtctaaatcagatcctagaagatatgcttcgcgcatgtgtcctagatttcgggaagacctgggataagagtctcccctatgccgagttctcctacaataacagctaccaagccagcatacaaatggcaccttatgaagcgttgtatgggcgcaaatgccggacaccgctattgtgggaccaagttggggaaagccaagtgttcgggaccgatatcctgagagaagctgaagctaaagtcagaaccattcgggataatctaaaggtggcccggtctcggcagaagagttatgcagacaaccgacgccgtgacctagaattcgcagtggatgactttgtgtatcttcgggtcacgcccttgcgaggtgtacacaggtttcagacaaaggggaagctcgcacctcggtttgtgggtcctttccgtatcattgctcggcgcggagaagtcgcttaccagttggagctgcccgcctccttgggcaacgtgcatgatgtgttccatgtgtcgcaactcaagaaatgtcttcgagtgccatccgagcaggccgactcagagcaaattgaagttcgcgaagacttgacctacgtggagaggccagtgaaaatcctggacaccatggagcgaaggaccaggaaccgggtaatccgtttttgcaaggtccaatggagcaaccacgccgaggaagaagctacttgggagcgtgaagacgagctgaaggcagcccatcccgatctcttcgtcagttcttccgaatctcggggtcgagattccgtttaa

SEQ ID NO: 91536 - DNA, 652 bp, Oryza sativa
  Clone ID: PAT_MRT4530_90101C.1
agatgttgctacatcaatagcacaatcatcacctaccgatgcctgcacatgaatccatcgtgggctgcacacaattgtgacatctcatgcacatgaggttaggatcaggactgtcaactactgccacagtgatctgtacatttagatggtcacttttttttttttttaacttgcccacgcagagcaggtgatgagattcaatgaactattgggagaatattttagagcaggtacacatagcgggctataagccagctggcaaatattatttttgaaggagataatgaggagagagaagggcagcgggctgacagatttgtagcccagttgtagcacggactcccagacatgagtggtggtggtgatgacacagtggggatgcaagtattaatgagtggtgagtgatgtgaactgatgtggtatgaaccccctcatgtgagatgtgggctgatgagatgaaattgggagctgagtgagtgtgaggctgatgactgattggaacttggctgcttgaggaaacacgtggtgagtgtggaactgggcagaatgattgtggtgggctgtgtggtgagcatgctggactgttgtgctggttgaatggaattgatgttgcatgagtgtgccccccttggaaaaaaaaaaaaaaaaaaaa

SEQ ID NO: 91537 - DNA, 3291 bp, Oryza sativa
  Clone ID: PAT_MRT4530_90102C.1
atgaattggctggcacaattccaaggagtcgtggattgcgcgagacgcactgtcaccctgtaccgaggaccaaaacaaccggttgttttctttgcacctccaacctctgtcagaagttcagaactgcatcaggtaggtctgtcagaaatccccatagtcagagagttcggagacgtgtttccggaagaactacctggtatgccgcccaagcgagagattgagttccggatagatcttgctccaggaaccactcctctgcacaagcgaccctaccgtatggcagcaaatgagctagccgaagttaagaaacagttggaagaattgaaagaaaaggggtatatacgtccgagtacttccccatggggtgctcctgtgatttttgtagagaagaaagacaaaacgaaaaggatgtgcgttgactacagagctctcaatgaagtcaccatcaaaaacaagtaccctcttccccggatagatgatttgttcgatcagcttaaaggtgccactgtattctccaagattgatcttcgttccggatatcaccaattacgtattcgtgaagaagatattccgaagaccgcattcactacgcgatatggactatatgaattcacggtgatgtcgttcggcttgaccaatgctcctgccttcttcatgaacttaatgaataaagtgttcatggaatacttggataagtttgttgtggttttcattgacgacatcctggtatactcacaatcagagaaagaccatcagcagcatctccgtctggtgttgggaaagttgcgggaacatcaattgtatgccaagcttagcaagtgtgagttctggttgtccgaagtcaaattcttagggcacgtgatatccgctaaaggagttgctgtggaccctgaaatagtgaccgccgtcactgactggaagcaacccaagacagtcactcaagtccgcagatttttgggtttggcaggatactaccgaagattcatcgagaacttctccaaaatcgctcaacccatgacacagttgctgaagaaggaggaaaaatttgtgtggacaccgcaatgcgagaagacattccaaactctcaaagaaaagctggtttcctcgccagtgttaatcttaccggatactcgcaaggacttcctagtgtactgtgacgcttcgcgccaaggattggggtgcgtgctcacgcaggaaggccacgtggtagcctatgcctcccgccagcttcggcctcatgaaggcaactaccctacccatgatttggagttagccgctgtggttcatgctctaaagatctggcggcactatctcattgagaatcgctgtgaaatatatactgatcataagagtttgaaatacatcttcactcagtcggatctgaatcttcggcagaggagatggttagagctcatcaaggattatgatgtgggaattcactatcaccctggtaaggccaacgtggtcgcagacgctctaagtcgaaagagccattgcaacactcttaacgtccgtggcattccacccgaacttaaccaacagatggaagccctgaatctgagcatagtgggtcgtggattcttggctacgctggaagccaagcccaccttgctcgatcaaatccgcgaggctcagaagaacgacccggacatgcgtggactcctcaaaaatatgaaacagggtaaagccgcgggtttcacagaggatgaacacggagccctatggaacggaaatcgggagaaatactggtgggttagtatgaagcgggaaattgcagagttcgtggtcctttgtgatgtgtgccagcgtgtcaaggcagagcaccaacgaccggccggacttctccaacctctccaagtaccagaatggaaatgggatgaaattgggatggacttcatcaccggacttccaaaaacccaaggtggatatgattctatatgggtagttgtggaccggttaaccaaggtagctcgatttattcctgtgaagaccacctatggagggaacaaactagccgagctctacttcgctaggatcgtgagtctccatggcgttcccaagaaaatcgtatctgataggggaagccaattcacctctcacttttggaagaagctccaagaagagctgggtacccgattaaatttcagcaccgcgtatcacccgcagacagatggacagaccgagcgtctaaatcagatcctagaagatatgcttcgcgcatgtgtcctagatttcgggaagacctgggataagagtctcccctatgccgagttctcctacaataacagctaccaagccagcatacaaatggcaccttatgaagcgttgtatgggcgcaaatgccggacaccgctcttgtgggaccaagttggggaaagtcaagtgttcgggactgatatcctgagagaagctgaagcgaaggtcagaaccattcgggataatttaaaggtggcacagccacggcagaaaagttatgcagataaccgtcgccgtaacctggaattcgcggtggacgattttgtgtaccttcgaatcacgccattgcggggtgtacacaggtttcggacaaaagggaagctcgcacctcggttcgtgggtcctttccgtatcattgctcggcgcggagaagtcgcttaccagttggagctgcccgcctccttgggcaacgtgcatgatgtgttccatgtgtcgcaactcaagaaatgtctccgagtgccatccgagcaggccgactcagagcaaattgaagttcgcgaagacttgacctacgtggagaggccagtgaaaatcctggacaccatggagcgcaggaccaggaaccggtccgccgccgtcgtcgccccggaccttctcccgcttcggcgtcgccttctccgggttcgccgcaacctcgccgacctcgtccacccctctgtttcacccgccgaccgccggaacgccgccgtccccgtcgacccgagccgcgccgccgccttcgtccgctccggtcgccgttcccgtcgtcgctgtcgacccggggtgagccgtggaccgccgtttcgcttcccccttccctcatctctctcgggcgccgctccgccgcgctggtggtcgccggcggcgaccatcggggcgcgggtgcgccacctcccgtcggctgtgccggcgtggccgccttcgggcgcgccccgcggctgccatgtggggcccggtcgtcagccgcccgcgccctcggcttcggaagatccgctcttcgtggaggttgaagccgacgtttgggaaagcgagcaaggcaagtcacatcatccttga

SEQ ID NO: 91538 - DNA, 209 bp, Oryza sativa
  Clone ID: PAT_MRT4530_90103C.1
cccacgcgtccgctagccagtaagctagctaactaactacgtggctatggcccccaccgtgatggcctcctcggccacctccgtggcttcattccaagggctcaagtccaccgccgggctcctcgacagccgtcgatgcaccaactcgggctatagctgcgtcagcaatggcgggaggatcaagtgcttgcatgtgtggccaattgagg

SEQ ID NO: 91539 - DNA, 5516 bp, Oryza sativa
  unsure (1)..(5516): unsure at all n locations
  Clone ID: PAT_MRT4530_90104C.1
atgccctccctaggccaaataaggcttacacancttcggcccggtattcaagttgtcatggcacaagggcgggtgtcttgtgctaggggctcagtcctgcctgcctgtccggggggttccggccgtaggtggaattgagtcggtactcttgtctatggctaggatgggttggaaactatgtcacgtcttccgtctgtacaccgtggtgatggccggcagcgtcagccgtcgtggtctggacatgactggtttcgtcttggagctgcggggcatgtgcgttgtcctggggtatccacatggagtggactaccagggcaggccgcttccggagcaggagggtgacgatgcagagccccacgctgcttgggaggttactgcagtgatcctcactggctctcccgagcggacttcgttggcagtcaccgcgggtggagattctttccccgccgcttgccagaacgccgctctcctcgccatcggcactcttcaccagcgctacccggacgagttgcagcactcgccctaccgctaccaccctcgccgcggaggagcccgcgactacgccatcttccgggatgctagctcggaggatgacgctaccatcatgcacctggcgcgcatggtggaggcgtacgacgcggctcgtatcgacttccatcagatggtgcgccgtgggatggtcgggaacaacatgaagatcctggagctgcgtcaggagaatctgcagctgaagaaggacctagacgcagtagaggcgcagctgcatcagctcaagatcgcccagggagagatggtgaagaccaggagaaatgctgccaccggtgatggcaaccaacccgaaggcagcaaccacaaccaccagggcagcccacctccacctccttctccgcctccaccaccaccaccagacaccaacgccattctcacccaaatcctcgcccagcaggccaacatgatgactgctttcctccaccacctccaaaatccgccacaacagaatgcaccaccaccacccccacaacactctaaactcgccgagttcctccgcatccgtccacctaccttctctagctccaacaaccccgtggatgcgttggattggttgcatgccgtggggaaaaagctagacactgtgcagtgcagcgatgaggagaaagtcatcttcgccgcccaccagctgcaggggcccgcatctttatggacccatgtgcccgccggagtcgtggcccttaagaaaagggaattccgagagttgaagcaaggcaaccgctctgtgatggagtatttgcatgagttgaacaacctggcccggtacgccccggaggatgtacgggaagatgaggaaaagcaggagaagttcttggcaggaatggaccctgagctgtccgtgcgcctagtctccggggactatccggatttccaacgtctgatggacaagagcatccgcttggaagccaagcacaaggaactggagtcgcacaagcgccgcttggcgaatttccgcaatcaacagggtgctaaccaaagggtccgctacaccaatccctatccagggggatcctcctcgcagcagcaacaacagcagcagcaacctcgctccgcgccccgacctcaattcgtgcctggtcaaggccgcagggacgctcaaggtccgcagcgtctgtgcttcaactgcttcgagcccgggcactttgcggataaatgcccaaagccgaggcgccagcaaggccaagcgcctccccgctccaacaacggtggtaaggatgtcattcggggtcgtgtgaaccacgtgacggccgaggacgtgctgacaactccagacgtcatcgttggtacgttcctcattcattccatccctgctaccattttgttcgactctggagcttcccactcgtttatatttgtgccattcgtggggagaaaacagttgggggtagaaaggcttaggaaccctctgctcatcaccacccctggaggggttatgacagcaaagtattatagccatgccgtccctatagaaattcaggggattccttttccctcggatctgattcttctagacaccaagaacttggatgtgatccttaggatgaattggttggctcaattccaaggagtagtggattgcgcgagacgcactgtcactctgtaccgagggccggaacaaccggttgttttctttgcacccccaacctctgtcagtagttcagaacttcatcagataggactgtcagaaatccccatcgtcagagagttcggagacgtgtttccggaagaactacccggtatgccgcccaagcgagagattgagttccggatagatcttgctccaggaaccactcctttgtacaagcgaccctaccgtatggcagcaaatgaactggccgaaaagaaagacaagatgaagaggatgtgcgttgactacagagctctcaatgaagtcaccatcaaaaacaagtaccctcttccccgtatcgatgatatgttcgatcagcttaaaggtgccactgtattctccaagattgatcttcgttccggatatcaccaattacgtattcgtgaagaagacattcctaagaccgcattcaccacgcgatacggactgtatgaattcacagtgatgtcgttcggtttaaccaatgcacctgccttcttcatgaacttaatgaacaaagtgttcatggaatacttggataagtttgtggtggttttcattgatgacattctgatatactcacaatccgaggaagaccatcagcaccatctccgtctggtgttgggaaagttgcgggaacatcaattgtatgccaaacttagcaagtgtgagttctggttgtccgaagtcaaattcttaggacacgtgatatctgctaaaggagttgcggtggaccccgaaacagtgaccgccgtcactgattggaagcaacccaagacagtcactcaagttcgcagtttcttaggtttggcaggatactaccggaggtttatcgagaacttctccaaaatcgctcgacccatgacacagttgttgaagaaagaagagaaatttgtgtggagcccgcaatgcgagaaggcgttccaaactctcaaagaaaagctggtttcctcgccggtgttaatcttgccggatactcgcaaggacttcatggtgtattgtgacgcttcgcgccaaggattggggtgcgtgctcatgcaggacggtcatgtggtggcctatgcctcacgccagctacggcctcatgaaggcaactaccctacccatgatctggaattagccgcggtggttcatgctctaaaaatctggcggcactatctcattgggaatcgctgtgaaatatatactgatcataagagtttgaaatacatcttcacccagtcggatctgaatcttcggcagaggagatggttagaactcatcaaggattatgacgtgggaattcactatcatcctggtaaggccaacgtggttgccgacgctctaagtcgaaaaagccattgcaacactcttgacgtccgtggcattccacccgaacttaaccaacagatggaagccctgaacctaagcatagttggtcgtggattcttggctacgctggaagccaagcccaccttgctcgatcaaatccgcgaggctcagaagaacgacccggacatgcgtggactcctcaagaatatgaaacagggtaaagccgctggtttcacagaggatgaacacggaaccctatggaacggaaatcgggtatgcgttccagatgacagagaacttaaacagctgatacttcaggaagctcacgaaagtccttattccatccaccctggcagtacgaagatgtacttagacttgaaggagaaatactggtgggttagtatgaagcgggaaattgcagagttcgtggccctttgtgatgtgtgccagcgtgtcaaggcagagcaccaacgaccggccggacttctccaacctctccaagtaccagaatggaaatgggatgaaattgggatggatttcatcaccggacttccaaaaacccaaggtggatatgattctatatgggtagttgtggatcgattaaccaaggtagctcggtttattcctgtgaagaccacctatggagggaacaaactagccgagctttacttcgctaggatcgtgagtctccatggcgttcccaagaaaatcgtatctgataggggaagccaattcacctctcacttttggaagaagctccaagaagagttgggtacccgattaaatttcagcaccgcgtatcacccgcagacagatggacagaccgagcgtctaaatcagatcctagaagatatgcttcgcgcatgtgtcctagatttcgggaagacctgggataagagtctcccctatgccgagttctcctacaataacagctaccaacccagtatacaaatggcaccttatgaagcgttgtatgggcgcaaatgccggacaccgctattgtgggaccgagttggggaaagccaagtgttcgggactgatatcctgagagaagctgaagcgaaggtcagaaccattcgggataatctaaaggtggcacagtcccggcagaaaagttatgcagataaccgtcgccgtaacctggaattcgcagtggacgattttgtgtaccttcgggtcacgccattgcggggtgtgcacaggtttcagacaaaggggaagctcgcacctcggtatgtgggtcctttccgtatcattgctcggtgcggagaagtcgcttaccagttggagctgcccgcctccttgggcaacgtgcacgatgtgttccatgtgtcgcaactcaagaaatgtcttcgagtgccatccgagcaggccgactcagagcaaattgaagttcgcgaagacttgacctacgtggagaggccagtgaaaatcctggacacaatggaacgcaggaccaggaaccgggtaatccatttttgcaaggtccagtggagcaaccacgccgaggaagaagctacttgggagcgtgaagacgagcttctcccgtttcggcgtcgccttcttcgggttcgccgcgacctcgccgacctcgtccacctctccgtttcggtcgccgatcgccggaacactgccgtccccgtcggcggcgaccatcggggtgcgggtgcgccgcctcccgtcggctgtgccggcgtggccgccttcgggcgcgtcccgcggccggtccaccgtggaccgtggggctgccgcgtgggccccactcccgtggacccggtccgcgcgccctctcccctcggctcggccatataaggaccggtcttcgggcctctattgcaaagcactaccgtacttccacatgtctagtgggtaaggcttagtttgtggctcagtctggttatcacgctgacgtggccgcctccgggcgcgccgtgtggccgccgggtggggcccggccgtcagccgcccgtgccctcgggtgcagctgacgcgtggggcccacggcgccggaccctcggtcagaccggcctcggaggaatttttctgaaaa

SEQ ID NO: 91540 - DNA, 177 bp, Oryza sativa
  Clone ID: PAT_MRT4530_90105C.1
atggccaagacatgggccaaggaaggcaaaaactctacttttgccaacagccaaagtcaggcgaacaagcagagcaactcaggtgaggatcatcaaacagaaaagatactatacatagccctcaagcagcatgcatccatttacctccttgtgctccacatccttcagtggaaatga

SEQ ID NO: 91541 - DNA, 3075 bp, Oryza sativa
  Clone ID: PAT_MRT4530_90106C.1
atggttatgccgatggtgacgaccaggagaaatgctgctaccggtgatggcaaccaacctgaaggcagcaaccacaaccaccagggcaacccacctccacctcctcctccgcctccgccaccaccaccagacaccaacgccattctcacccaaatcctcgcccagcaagccaacatgatgaccgctttcctccaccacctccaaaacccgccacaacagaatgctccaccaccacctccccaacactctaaactcgccgagttcctccgcatccgcccacctaccttctccagctccaacaaccccgtggatgctttggattggttgcatgccgtggggaaaaagttagacacggtgcagtgcagcgatgaggagaaagtcgtcttcgccgcccatcagctgcagggacccgcatctctctggtgggaccacttccaggctacgcagccagagggacagccgattacttgggctcgcttcaccgccgctttccggagaacccatgtgcccgctggagtcgtggctcttaagaaaagggaattccgagagttgaagcaaggcaaccgctccgtgatggagtatttgcatgagttcaacaacctggcccgttacgccccagaggatgtgcgggaagatgaggagaagcaagagaagttcttggcaggaatggaccctgagctgtccgtccgtctagtctctggggactatcctgattttcaacgactggtggacaagagcatccgcttggaagccaagcacaaggagttggaatcgcacaagcgccgcttggcgaatttccgcaatcaacagggtgctaaccagagggttcgctacaccaatccctacccagggggatcctcctcgcagcagcagcagcagcagcagcagcaacctcgcccagcgccccgacctcaattcgtggtgcgcgtcccacagccgcagcagcagcagaatcagcaagggactcgtgcgccccgtcctcctacgccagctgtgcagcccgttcaaggccgcagggacgctcaaggtcagcagcgtctgtgcttcaactgcttcgagcccgggcactttgcggataaatgcccaaagccaaggcggtgtgacaatgtcattcggggccgtgtgaatcatgtgacggccgaggacgtgctgacaactccagacgtcatcgttgagaagaaagacaagacgaagaggatgtgcgttgactacagagctctcaatgaagtcaccatcaaaaacaagtaccctcttccccggatcgatgatctgttcgatcagctcaaaggtgccactgtattctccaagattgatctccgttccggatatcaccaattacgtattcgtgaagaagatattccgaagactgcattcaccacgcgatacgggctgtatgaattcacggtgatgtcgttcggtttgaccaatgctcctgccttcttcatgaacttaatgaataaagtgttcatggaatacttggataagtttgttgtggttttcattgatgacattctgatatactcacaaccagaagaagaccatcagcaccatctccgtctggtgttgggaaagttgcgggaacatcaattgtatgccaagcttagcaagtgtgagttctggttgtccgaagtcaaattcttagggcacgtgatatctgcaaaaggagttgctgtggatcccgaaacagtgaccgccgtcaccgattggaagcaacccaagacagttacccaagtccgcagtttcttaggtttggcaggatactatcggagattcatcgagaacttctccaaaatcgctcgacccatgacacagttgttgaagaaagaagagaaatttgtgtggagcccgcaatgcgagaaggcgtttcaaactctcaaggaaaagctggtttcctcgccagtgttaatcttgccggatacccgcaaggacttcatggtgtattgtgatgcttcgcgccaaggattggggtgcgtgctcatgcaggatggtcatgtggtagcctatgcctcacgtcagctacgacctcatgaaggcaactaccctacacatgacttggaattagccgcagtagttcatgctctaaaaatctggcggcactatctcattgggaatcgctgtgaaatctataccgaccataagagtctgaaatacatcttcactcagtcggatctgaatcttcggcaaaggagatggttagaactcatcaaggattatgatgtgggaattcactatcatcctggtaaggccaacgtggttgccgacgctctaagtcgaaagagccattgcaacactcttaacgtccgtggcattccacccgaacttaaccaacagatggaagccctgaacctaaacatagttggtcgtggatttttggctgcgttggaagccaagcccaccttgctcgatcaaatccgcgaggctcagaagaatgatccggacatgcatggactcctcaagaatatgaaacagggtaaagccgctggtttcacagaggatgaacacggaaccctatggaatggaaatcgggtatgcgttccagatagcagagaacttaaacagctgatacttcaggaagctcacgaaagtccttattcaatccaccctggcagtaccaagatgtacttagacttgaaggagaaatactggtgggttagcatgaagcgggaaattgcagagttcgtggccctgtgtgatgtgtgccagcgtgtcaaggcagagcaccaacgaccggccggacttctccaaccactccaagtacccgaatggaaatgggatgaaattgggatggatttcatcactggacttccaaagacccaaggtggatatgattctatatgggtagttgtggatcgattaaccaaggtagctcgatttattcctgtgaagaccacctatggagggaacaaactagcggagctctacttcgctaggatcgtgagtctccatggcgttcccaagaaaatcgtatctgataggggaagccaattcacctctcacttttggaagaagctccaagaagagtttggtacccgattaaatttcagcaccgcgtaccacccgcagacagatggatag

SEQ ID NO: 91542 - DNA, 3888 bp, Oryza sativa
  Clone ID: PAT_MRT4530_90107C.1
atggttacgccgatggtgacgaccaggagaaatgttaacaccggtgaaggcaaccaacccgagggcagcaaccccaacccccaaggcaacccacctccaccaccaccaccagacaccaacgccattctcacccaaatcctcgcccagcaagccaacatgatgaatgctttcctccaccacctccaaaatccgccacaacagaatgctccaccaccccctccccaacactccaaactcgccgaattcctccgcatccgcccacccaccttctctagctccaacaatcccgtagatgcgttggattggttgcatgccgtggggaaaaagctagacacggtgcagtgcagcgatgaggagaaagtcgtcttcgccgcccatcagctgcaggggcccgcatctctctggtgggaccacttccaggctacgcagccagaagggcaacctattacttggactcgcttcaccgccgctttccggaaaacccatgtgcccgccggagtcgtggctcttaagaaaagggaattccgagagttgaagcaaggcagccgctccgtgatggagtatttgcatgagttcaacaatctagcccgttatgccccggaggatgtgcgggaagatgaggagaagcaagagaagttcttggcaggaatggaccctgagctgtccgttcgtctagtctctggggactatcctgattttcaacgactggtggacaagagcatccgcttggaagccaagcacaaggagctggaatcgcacaagcgccgcttggcgaatttccgcaatcagcagggtgctaaccagagggtccgctacaccaatccctacccagggggatcctcctcgcagcagcagcagcagcagcagcagcaacctcgctccgcgcctcgacctcaattcgtggtgcgcattccacagccgcagcagcagcagaatcagcaagggactcgtgcaccccgtcctcctacgccaactgtgcagcctgttcaaggtcgcagggacgctcaaggtccgcagcggctgtgcttcaactgcttcgagcccgggcactttgcggataaatgcccgaagccaaggcgtcagcaaggccaagtgcctccccgctccaacaacggcgggaaggatgtcattcggggccgtgtgaatcatgtgacggccgaggacgtgctgacaactccagacgtcatcgttgaacttcatcagataggtctgtcagaaatccccatagtcagagagttcggagacgtgtttccggaagaactacctggtatgccgcccaagcgagagattgagttccggatatatcttgctccaggaaccactcctctgtacaagcgaccctaccgtatggcagcaaatgaactggccgaagttaagaaacagttggaagagttgaaagaaaaggggtatatacgtccgagtacttccccttggggtgctcctgtgatttttgtggagaagaaagacaaaacgaagaggatgtgcgttgactacagagctctcaatgaagtcaccatcaaaaacaagtaccctcttccccggatcgatgatctgttcgatcagcttaaaggtgccactgtattctccaagattgatcttcgttccggatatcaccaattacgtattcgtgaagaagatattcctaagaccacattcaccacgcgatacggactgtatgaattcacggtgatgtcgttcggtttaaccaatgcacctgccttcttcatgaacttaatgaacaaagtgttcatggaatacttggataagtttgttatggtgttcattgatgacattctggtgtactcacaatcagaggaagaccatcagcaccatctccgtctggtgttgggaaagttgcatgaacatcaattgtatgccaaacttagcaagtgtgagttctggttgtccgaagtcaaattcttagggcacgtgatatctgctaaaggagtcgctgtggaccccgaaacagtgaccgccgtcaccgattggaagcaacccaagacagtcactcaaattcgcagtttcttaggtttggcaggatactaccggaggttcatcgagaacttctccaaaatcgctcgacccatgacacagttgttgaagaaagaagagaaatttgtgtggagcccgcaatgcgagaaggcgtttcaaactctcaaagaaaagctggtttcctcgccagtgttaatcttgccggatactcgcaaggacttcatggtgtattgtgatgcttcgcgccaaggattggggtgcgtgctcatgcaggatggtcatgtggtggcctatgcctcacgccagctacggcctcatgaaggcaactaccctacccatgatttggagttagccgcggtggttcatgctctaaaaatctggcggcactatctcattgggaatcgctgtgaaatatatactgatcataagagtttgaaatacatcttcactcagtcggacctgaatcttcagcagaggagatggttagaactcatcaaggattatgatgtgggaattcactatcatcctggtaaggccaacgtggtcgccgacgctctaagtcgaaagagccattgcaacactcttaacgtccgtggcattccacccgaacttaaccaacagatggaagccctgaatctaagcatagtgggtcgtggattcttggctgcgttggaagccaagcccaccttgctcgatcaaatccgcgaggctcagaagaacgacccggacatgcatggactcctcaagaatatgaaacagggtaaagccgctggtttcacagaggatgaacacggaaccctatggaacggaaatcgggagaaatactggtgggttagtatgaagcgagaaattgcagagttcgtggccctttgtgttgtgtgccagcgtgtcaaggcagagcaccaacgaccggccggactcctccaacctctccaagtaccagaatggaaatgggatgaaattgggatggatttcatcaccggacttccaaaaacccaaggtggatatgattctatatgggtagttgtggatcgcttaaccaaggtagctcgatttattcctgtgaagaccacctatggagggaacaaactagccgagctctacttcgctaggatcgtgaatctccatggcgttcccaagaaaatcgtatctgataggggaagccaattcacctctcacttttggaagaagctccaagaagagctgggtacccgattaaatttcagcaccgcgtatcacccgcagacagatggacagaccgagcgtctaaatcagatcctagaagatatgcttcgcgcatgtgtcctagatttcgggaagacctgggataagagtctcccctatgccgagttctcctataataacagctatcaagccagcatacaaatggcaccttatgaagcgttgtatgggcgcaaatgccggacaccgctcttgtgggaccaagttggggaaagccaagtgttcgggactgatatcctgagagaagctgaagcaaagacaaaagggaagctcgcacctcggtttgtgggtcctttccgtatcattgctcggcgcggagaagtcgcttaccagttggagctgcccgcctccttgggcaacgtgcatgatgtgttccatgtgtcgcaactcaagaaatgtcttcgagtgccatccgagcaggccgactcagagcaaattgaagttcgcgaagacttgacctacgtggaaaggccagtgaaaatcctggacaccatggagcgcaggaccaggaactgggtaatccgtttttgcaaggtccagtggagcaaccacgccgaggaagaagctacttgggagcgtgaagacgagctgaaggcagcccatcctgatctcttcgccagttcctccgaatctcggggtcgagattccgtttaa

SEQ ID NO: 91543 - DNA, 2427 bp, Oryza sativa
  Clone ID: PAT_MRT4530_90108C.1
atggtgacgaccaggagaaatgcggttaccggtgatggcaaccaacccgaaggcagcaaccacaaccaccaaggcaacccacctccacctcctcctcctcctccaccaccaccaccagacaccaacgccattctcacccaaatcctcgcccagcaggccaacatgatgactgctttcctccaccacctccaaaatccgccacaacagaatgccccaccaccacctccccaacactctaaactcgccgagttcctccgcatccgcccacctaccttctctagctccaacaaccccgtggatgcgttggattggttgcatgccgtggggaaaaagctagacactgtgcagtgcagcgatgaggagaaagtcatcttcgccgcccatcagctgcagggacccgcatctctatggtgggaccatttccaggctacgcagccagagggacagcctattacttgggctcgcttcaccgccgcttttcggaggacccatgtgcccgctggagtcgtggcccttaagaaaagggaattccgagagttgaagcaaggcaaccgctccgtgatggagtatttgcatgagttcaacaacctggcccgttacgctccggaggatgtgcgggaagatgaggagaagcaagagaagttcctggcaggaatggaccccgagctgtccgtccgtctagtctctggggattatccggatttccaacgtctggtggacaagagcatccgcttggaagccaagcacaaggaactggagtcgcacaagcgccgcttggcgaatttccgcaaccaacagggtgctaaccaaagggtccgctacaccaatccctatccagggggatcctcctcgcagcagcaacagcagcagcagcaacctcgctccgcgcctcgacctcaattcgtggtgcgcgtcccacagccgcagcaacagcagaatcaacaagggactcgtgcgccccgtcctcctacgcaaactgtgcagcctggtcaaggccgcagggacgctcaaggtcagcagcgtctgtgcttcaactgcttcgagcccgggcactttgcggataaatgcccgaagccaaggcgtcagcaaggccaagcgcctccccgccccaacaacggtgggaaggatgtcattcggggtcgtgtgaaccacgtgatggccgaggacgtgctgacaactccagacgtcatcgttgtgaccgccgtcaccgattggaagcaacccaagacagttactcaagtccgcagtttcttaggtttggcaggatactaccggagcgtgtcaaggcagagcaccaacgaccggccggacttctccaacctctccaagtaccagaatggaaatgggatgaaattgggatggatttcatcaccggacttccaaaaacccaaggtagctcgatttattcctgtgaagaccacctatggagggaacaagctagccgagctctacttcgctaggatcgcgggcccgcccgccaccctcgctgacaggtggggtccacctgtcatcccctacctcgcgccgctcccgccgcccgcccgtgccctagcgccgccgccgccgccgaatccgccgcatcccgccgtccccgcgcgccataaagagggggaaatcactccccgcgattccctctccctttccccccgtttttccctctctctctccctcggattcgctcggatttactcccgcaatcctcgccggcgcaatcaatggcggccgagatttccgcggccgattccttcctctccggccgccctctctccctcccgacgctatataatcgttcctcgtgcttcgctcctccgtttccgccactcgccgctcactctccccgtcggattcgtgcccgcgccgtcttcctctctctccgccgtcgccgccgagctccggttcgccgtcgtcgtcgctccggacctcctcccgactcggcgtcacctccttcggcttcgccgcgtcctcgtcgacctcgtccgctcctccgtttcggtcgccgactgtcggagcgccgccgtcctcgtcgatccgaaccgcgccgccgccttcctccgctccgggttgtcgtttccgccgtcatcgtcgacccggggtgagccgaggaccgttgtttcacttcccccttccctcccctctctcggccgccgctccgtcgcgccggaggtcgccgccggcgaccatcggggcgcgggcgcgccgcctcccgtcggccgtgccggcgaggccgccttcgggcgcgccccgcggctgccaggtgggcccggccgtcagccgcccgcgcccgcgggtgcggctgacgcgtgggacccacggcgccggtcggcggcagccgcgtgcacccggtccaccgtggaccgagaggctggcgcgtgggccccactcccgtggacccggtccgcgcgccctctctcccggctgacgcaataa

SEQ ID NO: 91544 - DNA, 623 bp, Oryza sativa
  unsure (1)..(623): unsure at all n locations
  Clone ID: PAT_MRT4530_90109C.1
tttntttntntntntntntntntctctctctctctctctcttcccttccttgtcctccccttctagcttgttcatcttgtccttccaagtnttcctcctggcaagctagctaggtcttcttcttcttggacatgagtgggagcaactttggagacagcatgggatggggcaacagcgggaggtcgtcgccggccggctcctccaggaagggcaagagaggcggcggcagtggcggcgcggataagccgaagcagccgcaacgagggctcggggtggcgcagctggagaagatcaggttacagagcgaaatggccgagtacttcaaccctcttggccagccgggaagcttgatccacagaaccggcagccttaacttgatggcatatggagaacgaggagacgtacgatacggtgaattccaaactcccatcatgagatcaccaagcagcagtactatctatggtgccccacattacacacataatcctagcatcacattgccactctttgaaccagaggagtctgctcgcttgaggggacaccatgaccgaagccgatcggcagattcgacaagtatgaactctgacgatccgcaagatgtggacctcgagctcaagctatga

SEQ ID NO: 91545 - DNA, 204 bp, Oryza sativa
  Clone ID: PAT_MRT4530_9010C.1
atggatgatgatggtggtggtagcagccagccacggtacgatctgggccgttcgttcacgatccggcggcggggagcgtccgagatcggacttgtgggaggtggtcgaccgatctgctgccgctgccgctgccgctgctgctgcatgcgtgtggggggcgtcgcggtcgactgctcgatcggccgaacacgactggagatttga

SEQ ID NO: 91546 - DNA, 1161 bp, Oryza sativa
  Clone ID: PAT_MRT4530_90110C.1
atggcattcatgaatcgccaagatccagaagcatctgggttcttctccgacgacgactccggccaaaccgccgcaatcgccgccgccgccgccatggagaacgaggatttctcctatatgctgcgtgaatttgactactacacaagcagtgaagatctcttcgagttgatgtggcaaggaggaggaggaggaggagccagcagcttcgaccagccgccgccgccggtttcctaccaccgcctgtcgccgccgccgccggcgatggggacgacgacgacgacgttactgccggagcagccactagttgatgatcatcatctcccagctgctgctgctgctcctccatcggaggaagagatggcagcgtggctctatccgatcgtcagtggccacgaagtcgccggcggcgggtggcggtcgccggaggctcaggatgaccggcgagccgcaccggcgccggagaagaaacagatggagaaaatgccggcggcggcatcgccaacgacgacgatgaataaggatgaaacaagcgacgactccggcgagaggaagaagaagaaggcgtcatcagcggcaggaaaaagcaagcaagcatcaccacgcggctgcaggagctcacaaccttacagaaaaagtggggattcgatcgatgaactcttcactaaatttcataggcggaggttcaagataactgagaggttcaggacgctgcagcgtctcgtccccggatgcgataagtccaaccaggcgtcgacgctggaccagacaatccagtacatgaagtcgctgcagcaccagctcaaggccatgtccgtcgtcggctcgccgccggcgctgctgtaccccgccgccgtgcacccgcagtcgtacatgcatccaccgccaccgccgccgccggtcacgatgccgatgcatccagggatggttcttgctgctcctcctccaggggcggcgccgccgcccggccctccggcgatggtgccattcggagctatgctcccttaccctccctacccggcggtgctgctgccgccggcggcggcgacactgtacggacggccgccggcccccgctcccggcgttgcagctcgtcgacatggatccagcggcggcggcagaattagcaagagcagtagcagcagcctgtgcaagaaattgtaa

SEQ ID NO: 91547 - DNA, 393 bp, Oryza sativa
  unsure (1)..(393): unsure at all n locations
  Clone ID: PAT_MRT4530_90111C.1
ggnaaatgaactttggcaaatgaacatagtgacgatggtgttaatgaggacttcatctgttagatttgggtctgtgcaagacttctatctcaaggcctttctgggtccttgcaacacttcagtgtctgatctgtagcactttgggctgtatccagaatgaatgccaggtacgcatgacttctgttgttctttcattgtgttagactggtgttgttctgtggtcttgccctttcacccaaaccttgatcccttgagggtaacataaggaaaatcctttagcagtagacattagatgtctgtttgtctttctattcatatatatctttcacttactatgnataataaggaaattaatttcctgggcatcacttcanaatcctttatggtggatca

SEQ ID NO: 91548 - DNA, 497 bp, Oryza sativa
  Clone ID: PAT_MRT4530_90112C.1
gttctgtgaaactaggcgtaccttgataggtctgatctgtttgctggattcgccccatctttgtcgccaccaagcgtatgaaatgcgacagatggacgctggcctttctctggatcatccttctggagttctggtgttggtgaagggaccatgatggtgtattggtgttgcacttttgttcggctacaatgctagcaggcagagcctccatcaaacttgtttcctgagtgcgtgtaatcaaaaccagctgtcgctaaacccagtctttgtcaaattagagttgggcgcctcgggaaaaagaaagaatgagagtgttgggtaaaaccgagtgtgtcggatagtgttgggcggtacccagtccgtcggttaagtgttggcccgaaccatgtcggaataagtgttgtctgtcagagtaagtgttggctgaagttgtggtcttgtggaccatgtcgattgaataagcattggaatttgcattttgaaaaaaaaaaaaaaaa

SEQ ID NO: 91549 - DNA, 1383 bp, Oryza sativa
  Clone ID: PAT_MRT4530_90113C.1
atggccagcatgcaggagaagatgatcagggaggcaatggcggcaatgaacgggcagaccgccgccgacgtcgccgtgaacctctacccgttcatccgcaagtacaccgacggccgcgtcgagcggctgctgacgagctcctacgtgccggcgtcggaggacgccggcaggggcaggggcggcgtcggtgtggcgacgagggacgtcgtcgtcgatcgtgacaacggcgtgtccgcgcggctgttcctcccgtcctccgcggccaccggcggcggcggcggtggcaggaggctacccgtggtgctgtacttccacggcggctcgttctgcacggagagcgccttctgccggacgtaccaccggtacgccagctcactcgcgtcgcgcgccggggcgctcgtcgtgtccgtcgagtaccgcctcgcgccggagcacccgatacccgcggcgtacgacgacgcgtgggcggcgttccggtgggtggagtccctgtccgacccgtggctcgcggagtacggcgacctgcgacggacgttcgtcgccggcgacagcgccggcggcaacatcgcctaccacacggtggcacgcgccggccgcgagaacgtcggcggcggcatccagggcctgatcatggtgcacccattcttctgggggcccgagaggctgccgtgcgagacggtctgggacggcgcgtcggtgttcccggcgttcggcgtcgactggctctggccgttcgtgacggccggccaggcggacaacgacgacccccgcatcgaccccgccgacgacgagctcgcgtccctgccctgccgccgcgtgctcatggccgtggccgggagggacaccctgcgcgaccgcggccgccgcctcgcgtcccggatgcgcggcgacgtgacggtggtggagtcggagggcgaggaccacggcttccacctctacagcccgctgcgcgccaccagcaagaggctcatgcagagcatcgtgcagttcatcaaccagccgcctagcccatgcccacctccgccggcgccggcgccatcgccggcgatgaggtggccggcaaccattcttccagagttcgacgagtggtcgtcgacgtacagtgacgacactgccaattcctcgcagattcttcttggcatgcctgctagggcatacaaggcaatattcgttgataggatggacaggaaagctgctaagactggacgactaagctctaatccgacggttaatgcgtcattaagcattggtcccagcgggaaagcatcaaagacaagctgctacgggatgtcatttggccggaccagagcttacaatttcagaggggtagcagctgcagggagcggccagtgtcagcctcccttccgtggagtgacgatttga

SEQ ID NO: 91550 - DNA, 267 bp, Oryza sativa
  Clone ID: PAT_MRT4530_90114C.1
atggcccatgtgggggccagatcgaccaacatgatagccaagcggtggtggtactactgcaaagtgagagtatcttcaaagtacaatttgtttggtcggataggagatcaggagagaccgtcagtacaagcaaaaggacgttacgcaagcagacacaggagacgtaaaacagtgcagagttgttacctcgaacggagagatgaagagaaaacaaaaacagaacgggggaagaaggcccagctagctagtgaagacattaagaaatga

SEQ ID NO: 91551 - DNA, 387 bp, Oryza sativa
  Clone ID: PAT_MRT4530_90115C.1
atggccgacggcgtggacgccagcgccggcggccagccgagaagccccaccgtatacgactgcagtcgtgttcctgatgtcaagacgatggggaagtttatcagaaaattgaatgttaccgtgctctttggactgttaaaggaactgaggcagattcgcttcgggagtcgacggtggagaagaataagcaagtcccaaagaacacaggaggcatccaaccgggtgtcttggaagggaaaattcatttggacaaagggagagtcaaatggaagattctgtggggaccacttctcaaccactcctgccagctggagccgaaagaccttattagcccagaaaatgtaccttaatgcccctagcactcatgatatggcaagggtgttatag

SEQ ID NO: 91552 - DNA, 905 bp, Oryza sativa
  Clone ID: PAT_MRT4530_90116C.1
atggccgccgccgctgctgccgccacctcgccgcgcaactacaccgacttcgttccgccgcaccagctggtcgaggaggccggcaagaagtttgattttagaggtttttcgtcgcattctgtttttcaacaccaacttttagaccgaatacaaattgttttttattgctcagttcatgcaatgcaagggttcaagaaggagcagctgagagtgcagatcgacaaccacgggaagctgcggataagcggcgagcggcaggtctccggcaaccggtggagccgcttccacaaggatttccaggtccccgatgactgcaacgccggcgacgtccgcgccaggttcgactccagggaccgcgtcctccacatcaccatgcccaagctgtcgccggcggaagaggagcccaaggccgccgccgccgccgcacccgccgatcatggcgccgcgcaggcgcagcaaaccgctgcaccagcagatcaagagaaggaggacaaggaagaagaagatgacgatggcgcggccaacgacggggcggcggcgggtggcaccgccttggtgaccggccggaggaagacgccgtggagggtggtcctcgccgtcgtgctggcgttggtggccgccgccggcttctacgccaagtacaggctgatgatggatccgtcggcggcggacggcggacatggtctcatcggcttctccgaccattgatcgccatgcgcgtctgacacactgaagtgatcctgcatgcgtgagcccccctgaacgacgacgtgcaagtttcggaagcctgcacgtagcttacacgttcgataccttcaccttgtacatattgctacctattgccaacgtttcctttcggaatacgtgtggaaacgcaagtgttctgtgcacgcaaattatacccg

SEQ ID NO: 91553 - DNA, 1222 bp, Oryza sativa
  unsure (1)..(1222): unsure at all n locations
  Clone ID: PAT_MRT4530_90117C.1
cggacgtggncnggnacgcgtccgccagtcngngnagtaaggtttttctcctatacgacgacgacgangaacgagagagatcagagcacacgtacgtacggcaatggagtctacgctgatcacgatcacgagatcgcccatcctcccctgtccattctcgagacggcccgcctcgcccgcgcgctgcttcgccggagctcgccgtagccgctgtgccgccgcctccgcttcgttcttctcccccgccggtggccgcggcggcggggatgcaggggcgggctcctcgctctcctccgccgcggccgcggccgcgctcggcgaggcggcggcggcgggtggcggcggatccgactccgaggccatcctgctcagcgtccaggggatgatgtgcgatgggtgcgcggcgagcgtgaagcggattttggagagccaacctgaagtcacttctgccaccgttgattttaaggaagcaaaagcacgcgccgcccgccgcgctccgctccggcgagacatgtcgcgcttcgggcgctccggcccgccgccgatccgcgacacctactccctcctcgtcctcaacatcaccttccgcactacggcggatgacctctcccctctcttcgagaagtacggcgaggtcgtcgacatctacatccctagggaccgcaggactggtgattcgcgagggtttgcgttcgtgaggtacaagtatgaggacgaggcgcagaaggcagtcgatcggcttgacgggagagtggtagatggaagggagatcatggtgcagtttgccaagtacggcccgaacgctgaacgaatccataaaggaaaaatcatggagacagttccaaggtctaggggtcgttccagaagccgcagtccaagacgggggtaccgtgatgactatcgggagagagactatagaaagcggagtcggagtagagatagatatggacgtgacaggtatagggagagagattatcgtcgtcgtagcaggagccgcagctacactcctgatgattacaggagacgtggcagagacagtgtgtcacctgcacgcagaagcctgagtcgtagcaggagtcgtagctacagtcctgatgattacaggaagcgtggcaaacacagaagccctagtcgctctcctcgcaggacaccatcttctcaagagggatctcctgtcaagcgctatgatgagcctaggcgctctcgtagcccttcgacgtaa

SEQ ID NO: 91554 - DNA, 132 bp, Oryza sativa
  Clone ID: PAT_MRT4530_90118C.1
atggcgctagggttcggcccgagcagcggcaggagtgctattagttatgattacctgttattattttgctccgacgtgtacaataaaatcgccgaggctgagagcctttatgaggcgcaagcacaagtatag

SEQ ID NO: 91555 - DNA, 243 bp, Oryza sativa
  Clone ID: PAT_MRT4530_90119C.1
atggagaagcaacctgttcacgcttccttattgatctgtcgtggcctggtcggcgtcgtctcctacggccaccggaccgtcgtccttggcttgatcggcaccgacgctcgcatccactccaaccgccgcggccgcgtgccccccccccaccgcatagcccaaccggcatctccgcatccgctgcacaacccggccattattgtctctcgcgtccgccgctgccgtctcccacatctgttgcat

SEQ ID NO: 91556 - DNA, 699 bp, Oryza sativa
  unsure (1)..(699): unsure at all n locations
  Clone ID: PAT_MRT4530_9011C.1
atcccctcctcaccccgccgttctacgtctaaagtgtaaggataatttgtattttcccgacaaggcccccgcgtcgcctcctcgtgagggcggcacgggcggcgacaacccgagacgccgtcgcaacccagcgccgtcgccccctacctcgccgccgcccgaacgaggtgccggcaaagccagcggctcgcgaggacggcagcggcggggttcacaactcccgtttctccagatccagcgcgggaagatctcgagacggaggttggcggcaccgtttcggcagcgggtggagacggcggcttgcgaccgagagcaggcgacggggtgggtggaggtagtgagaagcccggctggcgacggggcggaggagacggcgctggtggctgtggcgccagcgccggtcggcgtgtaacccgacaggcaacggagagggggagacgacggtggcggggtagaggaggcggnggcagcgacgggacgttggaggaggtgttgcgctgtggcttccccctagccacgctggcggtggaggaagaggccggcaaatccgcgccttgatctggcgggcaggcatccggcggcgccccggtggttgactagccggcggcgggcggctgcattctgtgggatgcagggggcccggcctcgggggcaaagttgcggggcggtccatgggcttgcggcttggccggtgggaag

SEQ ID NO: 91557 - DNA, 330 bp, Oryza sativa
  Clone ID: PAT_MRT4530_90120C.1
tggtaccgcaccaccccccccaacaccggcaggagcgttttttagaggcacattggtgatgccgccaagaaccaggttgtcaggaaccccatcaacaccggattcgatgccaagcgtctaattggcaggaggcttagcgaagcccctgtggcgagggacaataagctctggccctgcaaggcgatagctggacctggtgacaagcctatgaatggtgaccagaacaagggcgaggagaagcacctagctgccgaagagaacctcctcatggtactaatcaaaaagcgtgagattggtgaggcctaacctgggaccaccatcaagaatgcc

SEQ ID NO: 91558 - DNA, 104 bp, Oryza sativa
  unsure (1)..(104): unsure at all n locations
  Clone ID: PAT_MRT4530_90121C.1
ctttgccttgctgtggtgagagagcatcgagtgccgctgtcattgatcatcgaggcgatgtccttgatggcggctgcctctgcgtgnctctggcgctgnaggac

SEQ ID NO: 91559 - DNA, 276 bp, Oryza sativa
  Clone ID: PAT_MRT4530_90122C.1
atggttgtcaaagcagcgttcgcagttgccatgtttttgctcacaaccaatatgctcgtttctgttgccacacggtctccggataacctcctaaactcttttcctgaagaaacgggtcacgtctactcagcgtcaactgtgcagaagatgaccgaatacaagcccacgactgagtatttgcacacctcatacctgacgctggactctctttttcttgacagctcaaggtcccggattcagttccgaagagaaaatagtcatgactgggcccaataa

SEQ ID NO: 91560 - DNA, 1095 bp, Oryza sativa
  Clone ID: PAT_MRT4530_90123C.1
atgccacgtggtcctgacgacggcttcctccctctagtcatgatacccatgggcccatatcaccgagagccaccaaccccgcccccaacgccgaggagtgccaccgccaagcaccaccactccgccgccgccgagcgccaccaccgatgcccccaccgccacagttctcagaatcaacaatgtccaactccagtgcttgccgacggcggtgctcggcggcggggtggtggcgctcggcggtggggcatcgagctggggcagcggcggtgcttggtggcggcgctcagcagcggggtggtggcgctccggcagcggtgctcggtggcactcggcggtagggtggtggcactcagcgttggaggcggagtatgccagtcactggcggagaggccggtggatttcatggagcgagaacaatccatctcggaggttcctagctatcttgtgcaagggctcggctccgactctgcctcaacagtcaatcacattgcagctcgaccagagatcacctcacacacaggaacccaactgcagcaaacctacggcgcggccgacgaccagcgagacaggacgccggaaaccaactccacccgccacccctaccacacaaaggagctccccggcaatgactggaagcagcctagcctaagaagggaggaggacctaagaagagggcagcggacgccacaccgccggtcggcagcccccagccaggtcagcggcagccggcgccggagcgcgccaccgagagccggactggagccgccgccgacgaatgcgagccgccgccgacccgatgccgtggtcgccgacgagcccacgccggagaagcccgtcaccggtccatccgcctacgcccgagcggcgtcggagtcgaccaagcccgtcaccggtcaccccggccagaggggcaaccggatctggcgactccgtcgcccgtcgccgtcgctggagccgaccgccacggggagccccaccgccgcgccaccgtcgcggtggagagccccaccgccgcgcagtcccatcgccacgacctcgccgtcccgccgccatcgtcgccacgcccgcgccgggacgagacggagccgaggatga

SEQ ID NO: 91561 - DNA, 3717 bp, Oryza sativa
  Clone ID: PAT_MRT4530_90124C.1
ttttttttttttttttccttaggaaacagtacgcacataagtagcattagaaaaagagttcaggacacaatgcttgtagaaagggaaaatcttggtaagagctagaagggaaatttttggcatcatcacacaaagattgaatcggctctctcatgagatctacagtctggctctgctcattggctgctctatttccttcagctttagacagccttctatcttcaccttgtttatttccgcaatcgcgcctgctccaccaattgatacaagatcttcgcaaccccgaatatgtaaatcccggagcgatgagagattaccgcgccacagtgaagctggaatgtatgccacaattgagcaaaaggtgatctccagtgacacgagggaggcaaggttctccaggcagctgggtacacagggagagatatccccacatctagttaaggagagcctttggagagtagatggcaaaaccaggcgcctgtgccacttgagacttggacagaaacaaatcttcagatccttcagaacagaaaagtccttcaacagttcacacggcagggtacgcagactgctacatagggcaacataaattttctctacagcaggttgatgctcaggccacaagaggtgatcgagggtcgtcatattattgcagctgcttattttcaggtcagtgaggcatgagaatgttctaatgctgctgtattctcctggaacagaaaggctggtgaggactgatgattgagactctccagtaatcccactgtctgcaatctgtaacttctgtagtgctggaaagctactgctccagacatgcaagggaatggaggttacatgccaaagggaaaaaaccaaggaggtcagggaacaacactcaatgtctcccaggagattccaagaattaatcagcttgagcttcttgagggtaggtattgacaagctttgtggatcattcaaattcgggcaatgagacacctccagttcttcaaggaaatggaattcacccaacctgtcagttggcagttcaactaactgtctacattttgtaatctttattgtcttgatggccggtaagtaagcaggttgtagaaattggtcgaggtttgataacttattgcaactttcaatgattacgtggttcagggatgaaaatattccaggtctgcctttattgttctcagttagaaccttgggtatctcatttgggtctatggactgtgacatgctgggagttggtatggtcacaaaatcatggcaagcaataagctcaagggatgttaacattggcaaattacttggatgaaaccaggttggaagaaattcacctggacaacccgtgaggttcagataactgagactagtgggaggaattagaacttgaagcacctcagtcaacttctgcacttgttgtcccatagaagaccatttcagggtcatcgtgttgacatatttcttgttctttagtgcggcttttgcagcaatatcctttcttattagaccaatattatctatcgtcagacctccgcaaatatggttcacatactgcagtatagctccaacttcctgtccattaattgcatcaaaatgagtttggaacttgggatcacaacgaaatgcacatgaatcaaatctccgtaaattccttaacttattgaagtcactgggcaagttttctagcctgcattttgtagccgaaaaaatctgcaaattatatagatgacaaaactcttgaggaaggcttttgaaaggacagtctccagagattttaaggtaccgtagatgcttcaatttcccaatactcgccggtaactcctttgtgtagggacaaacaatcacacgcatatgctgaagttcagtgcaccaacggtccataacacatgctaaagtcttatcctgtagagacctgtggcagagtagagtgcgcaactttttgtgcttacaaaggctcagcaagagattgcagtcaaaatttgtgctagggagtatgaatagatgacgaacacttgaaggaactttctcaaaatcatccttgtcttttaagatgaagcactcatgctttgaaactaattgtgccatgtcatgcagcaaatcatggattacataattgccatgaactttctgaaagaatgaccgatttacaagttcttcaaagtactgacaaccaatatctagaattggaatgctaccttcaggttccacgaagccttctgcaatccaaatttcagctaaaccggccttttcaaataggtgatcttttgggtaaagagcacagaacgagaagcatctcttcaagtggaatggtagatacaagtaactcaaccgaagagcgggcaaaatctcagtgttatgttgtctcagctcccatagttcactctgtagtatgttattccaatgtgcaatgtcaaggctggttctcaacaggcgtcctaatgttttggcggctaatggtgaacccttcaactttgggactatgtttctaccgatgcgctctagctccggataatcactagaatcggaagatccaaatgtgcatattttgaagaaattccagaagatatcatccttcaatccctctaatcggacgggttccattgttttcacctcatgagcaacctctaaagatctagtggtgactaacattatacttccctgtgccaaaacatttgaaaaaggtgcacaaaacctcttccaacatcgtccgctttccctcagggcatcatcccacatgtcatcaagtataatcaataatgttttatcccgcactttttcagaaagagcgtgctgaagtgaatccaaatgatcagctgttgactctttcttagaataggattgtatggcttctttagttattctcttcccatcaaaagttgttgactcttttttagaagaggattgtatggcttctttagttaatctcttcacatcaaagtcgtctgaaacacaaatccaaattatcatatcaaagtgagaaatcactcgtggatcatgcaatatatgttgggccatagtggtctttccaacacccccaattccaactattggcagaacaggaatactttcttggttgcatcttgatgtgcttgttgattcatcattattttttctcctgcgcttggaacgagcatcggtgccgtttttaggtacaccaagcaattccatcacttgctgcagttcattatcacgaccaaatatttctctttcatttaggaaagagctggtctctggcctgagtgaattgtcaaaccgccggggaacttcatgcagccccatcttctccagttggctagaaatattatacagccttttgatgacatcgttcactttattaaagcttccttgaatgacactatcaaagaagtccataaaaggagattggcttgcattaccttccagtgccaccttttgttcataccatctgaactcatcaagaaggtcatcagcgttgtacattgcatccttgagatttgggaggagctcggccacacggcgttcgtggctcctccactctgcgcgatcgattagatcgtactttgcaggaagagtatccctcagacattgcaagctactctgcaattgcaacaattcaccctgaagcttttgatcctgtgtgttgctccatcgagagtggacacatgacatggcagattttgcccactgaaaaaaattaaaacactcattgatgccactaatgaacccaatggtcttggataagctcat

SEQ ID NO: 91562 - DNA, 645 bp, Oryza sativa
  Clone ID: PAT_MRT4530_90125C.1
atggaggcgccgtccccgtcgccggcaaaatcgcagcagatcggcagcccccggccaggtcagcggcagccggcgccgaagcgcgctccaccgagagccggactggagccgccgccgacgaatgcgagccgccgccgacccgatgccgtcgtcgccgacgagcccacgccggagaagcccgtcaccggccatccgcctacgcccgagcggcgtcggcgtcgaccgagcccgtcgccggtcgccccggccagaggggcaaccggatctagcgactccgtcacccgtcgccggagccagagccgaccaccgcggagagccccgccgccgcgccgtggagagccccaccgccgcgccgtccccgtcgccgcgacctcgccgtcccgccgccatcgtcgccacgcccgcgccggggcgagatggagccgaggaggatggccccgccgccgccatcccagcgcgtcgcccggctttgccggtgacaagctccggcagcggcgaagcacggaggagggaggaggaggggcggcggcggctagggtttcgcccccgagccgccgcgcgagggcgacttgcaataatatcgaatggtttttatctagcgctcccaacttgttcatgccatttgacaacttacacaagtcctaa

SEQ ID NO: 91563 - DNA, 1032 bp, Oryza sativa
  Clone ID: PAT_MRT4530_90126C.1
atggcggcgtgtcggggcacaattgggccgtacataggccggatttttcttgggccgtacatggaccggaatcacaatccgggacaactttgttgggcccatatagcccacgtagaacgtgcggcccatacaggatggtggaagaccagccctactactggagtactggcccgaggtttccaggccgacggcggcgaggtttccccggcgaatcccccatggcagcggtgccctccgccgccgcgccgccggttccggtctcccccggcgagagatggccgccgctcgagtcgagccccgacgtattcaaccaggttccgcctccccccccccttggccatcgcttcggttcactgcctctctgacctagcgcctcgccctcgccgtgccggcgacgcgctcgcacggggcgcgcagctcatgtggtcgctgggtgtcccggaggacgtggcggagttccacgacgtgtacagcctcgacgccgatgcgctggagatggtgccccagcctgtgctcgccgtcgtcttctgcttccccgatccaacccagcttagtactattatgggtttcagcctttacttgatttacacacttagccctacttcggtgcaggatgcaagtaatccttcacagcatcttttaattactggagagaaggaaactttgtttttcataaaacaaattgaatcactaggaaatgcttgtggaactattgcgctacttcatgctgttggaaatgcatattcagaaatcagtttgtgtaagcgtgctgtgtttcttgagaaggatgatgacatggcaagagctcacttatcggctgccagtgccggtgacacaaagctatctgatgacgttgaagagcattatatatgttttgtcgaatgtgatggaacactctatgagcttgatggtatgaagcctggaccaataaatcatggcccatcatcctctaaaagcttactgcaggtctaccaggaagaaaattatcgtcgtgagtcagagaatgtatacatcacaactttccatgaataa

SEQ ID NO: 91564 - DNA, 415 bp, Oryza sativa
  Clone ID: PAT_MRT4530_90127C.1
aaaaggaaaaagaaaggcttaataaaaaatagggaaaaaacgggacagaaaaaaaaaaaaaaaaaatgggtggaaaaaaaataaataagttattttttaaccgaaagcccaccaaaaaggattcggccgcataaaaaacggttggggaccccttgaatgggatgggagggaaagccccaaacccatcccctttataaggcgggagccccggagcctttttttttgaaaagcgaaatgcatttgcaaaaaaaaaattggggaaaacacggaaaaaggaactttttccgggaaggggggtaaccaaaaaaaaaggattggtcttaaaagcaaagaaaacacatccttttttttgggccttttttacaacgggaaaggggggggggaaaaaaaacaactgccccgggaaaacctcgcc

SEQ ID NO: 91565 - DNA, 174 bp, Oryza sativa
  Clone ID: PAT_MRT4530_90128C.1
atgactactgagtacacttacattgatggcggcatcgcgttcggccgcccccttttcgcaaaggggaacggggacatcactcgccgtcgtcgggccactgatcatcacctagctgacacgacgtcccatagcttcgctgctcagacctgtgaatcgagaaccaagtttcgatga

SEQ ID NO: 91566 - DNA, 342 bp, Oryza sativa
  Clone ID: PAT_MRT4530_90129C.1
atgacgatgtcagtagaggaggaaccgatggcctggtcagcgcgcaaggagaggagcagccggccaagaggagcaaacggccaagaggagcggcggcggctctgggcaccaacttccttccccccagacgccggcggcggaggagaagccgacagtggcggcagcgcagacagcaccggccgctccactcccaaagctggacggaagaggggaaccggccgacagtggcaaaggcagcgctcccctcgctctcgggcagcggcaccggacggaggtggagagccgtcggcgggccacggacccgcctacgaaaatcacctattttcacagacgatgggatag

SEQ ID NO: 91567 - DNA, 270 bp, Oryza sativa
  Clone ID: PAT_MRT4530_9012C.1
atgccgggctccccaaaccgtcactaccgccacccaccaaaaccttttgtcgctccctggtgccggtatcctcttctctgtaatcaaccacccttctccacaaccacggtcatgaagcagctctctagtaaggttccccaacatcgtcgatctctcctacctccagcagctctcttactaccatctaaccagttggccaagatgcctctactgcttgcaccatcctccaccgactatgctgctttggcggcaccaccgctggcttgctaa

SEQ ID NO: 91568 - DNA, 405 bp, Oryza sativa
  Clone ID: PAT_MRT4530_90130C.1
atggagcgccgcttcctcctcctcgccggcctcctcctggccaccgccgccggcgagcagcagcctagccgcaccgccatggcagaccaccagcagccggcggccaccgcggcgccgtgcgatcccctctgcatatccggagcggcggccggcgcgactccggaggccatggcggcggcggcgatggccggcggcaatgagtctgaatctgcactgccccctcgtcagcttgatcgtccggacagcagtggcttgcctactactcaccaatcatggatttaccatgaacccgtcgccatgccctactccacggcgccgccggcggccatctcgctcgtcggtgccaccgccgccgccaccgccgtcttctccacgatgttactcgccgcggcggcggcgcgctag

SEQ ID NO: 91569 - DNA, 219 bp, Oryza sativa
  Clone ID: PAT_MRT4530_90131C.1
atggtgcggcagatgggctggcggaggatgacatcgctgcgggcggagatctcgccggaggtgaaatcacctggagatcgctttgcgtcggaggaatcgccggagagagaaaagattgaggaaaggtcggaggcggagatcgagttcggaaacagagcaggaatcggctggagtccagatcggctgcgattagggtcggctgggtctgagtcggactag

SEQ ID NO: 91570 - DNA, 924 bp, Oryza sativa
  Clone ID: PAT_MRT4530_90132C.1
atgcagatccccgtggacctgatcacgggggccacgttgacgctggaagtggagccgtcggacacggtggagagcgtgaaggcgaagatcaaggccatgtcggggatcactgaggacttcgggttggcgtacgacggaaagcagatggatgaggccgacggtcatcgcacgctggccgactacggcatccgcgaccccgctacggagatgcagatcttagtgagcgggctcagggggaacacctggacgctgtgggtggagccgtcggacacggtggagagcgtcaagctacagctccaggagaaggacgggctgccgccgtgccagcagcggctgatcttcgaggggaggcagctcgacgacggcgacacggtggcctcctgcggcatccgcaagcactcgtacttgaacctctgcggccgcctcgccagctgcgactgcatccgcacgcacatggaggcgcagaaactgatccaagagcatcatcaaaccctaacgactcgacctgctgctacggatgagatgcagatcttcgtgagagtgctcgggggaaagaaggagacggcgctgaaggtgcagccgtcggacacggtgggaagcgtgaaggtgaagctgtactacaggaagaagaagaagaccatgccgtgcaagcaacggctggttttctccggtatggagcttgcggacgaccgcacgctggcctcctacggcatcgaggaggagtcgacgttgtacctttgcgcgcaacgaccaatggcggcagggagaaggatggtgaccggcggggagaaggggcggcggatggaggagatccagctggcgctagaggccaccgtgcgcccgatccgtgcgaatgtcttccgagcccacgcacgtatggcgctggcggctgattcagtccaccggtggcaacgacgacactag

SEQ ID NO: 91571 - DNA, 112 bp, Oryza sativa
  Clone ID: PAT_MRT4530_90133C.1
gaagtgcactgcgccccgcccccaactacgacgcccgagacgccatggacatgggagcgatgagcgatcctgagaggatgttcttcttcgaacctgcatgccagaacgccaa

SEQ ID NO: 91572 - DNA, 1212 bp, Oryza sativa
  Clone ID: PAT_MRT4530_90134C.1
atggagcactcaccttcaaacaggatgaccttccttctccttctcctcctccaactcctcattggatgcacacactatgctcaggccaaccctggccatcacatgatcgactccatcttcagcttcggcaactcgtactccgacaccggcaacttcgtcaagcttgccgcgccgctgcttcccgtcatcccattggacaacctcccctacggcgagaccttcttcggccaccccgctggccgtgcctccaatggccgactcatcatcgacttcatcgccgggcactttggagtccctttcctccccccatatcttggccaggtgcagaacttcagccatggcgccaacttcgccgtcgtcggcgccacggcgctcgacctcgccttcttccagaagaacaacatcacaaacgttcccccgttcaacagctcactgagcgtgcagctcgagtggttccacaagctcagacctaccttgtgctcgaaaacccaagggtgcaaacattacttcgagagatcgctcttcttcatgggagagttcggcgggaacgactacgtcttcctcttggccgccggcaaaaccgtcgacgaagtcatgtcatgctacgtaccaaaggtcatcggagccatctctgccggcgtcgaggcggtgatcgaggagggagccaggtacgtggtggtgccgggccagcagccgacgggttgcctcccggtcgtcctcacgccatacgcgagcccgaacgcgacggactacgacgccggcaccggctgcctgtggcggttcaacgagctcgcacgctaccacaacgcggcgctgttggcggcggtgtcgctgctccggcgcaagtacccgtcggccaccatcgtctttgccgactactacgacccggtgatcgagttcatgcagaagccagacgatttcgccggatggctgcaaatccccatcgaagctaacttggtcacctacactgcagcattcagtgactcgtccaagctccgggcgtgctgcggcggcggcggcggaccatacaactacaacgcgacggtggcgtgcggcctcccaggcacaagcgtgtgcccgacccccaacacgtccatcaactgggacgggatccacctcacggaggcggcctacgcccgcatcgccgcctgctggctgcacggcccgcacgcgcatccgcccatcctggcggccgtgcgccgccgcacgtag

SEQ ID NO: 91573 - DNA, 251 bp, Oryza sativa
  Clone ID: PAT_MRT4530_90135C.1
gggtatgtatagaagggaagctacagggtacagatacggtacgctgtggtaggcgaaccctagcccccattttcccgttcgctagagttactagttagctatatagagagggttgcaatatatatacagtgtatatgtacgtacttaggaggtgtattttgtacgtacacagattgtaatactgtacatttgtacgccgtacgtcgaggtattcttgcctcacgtaggcgtttgagaaaaaaaaaaaaaaa

SEQ ID NO: 91574 - DNA, 1567 bp, Oryza sativa
  Clone ID: PAT_MRT4530_90136C.1
ctacctactcacctcatcaatatggtgtagtggagaggaaaaatcgtacattgataagccataaacgtatacacaccgctctttccaagagtcactcaattgaccaagtgttgggtgacattactaagggtgttcaaactcgatctcatgtcgatttgatttgtgaacatgacttgtttgtttcttgtcttgagccaaaacatgtagttgaagctctttgtgatccggattggatgaatgctatgcatgaagagctcaacaactttgcaagaaacaaggtgtggactttggttgaaagacctagaggccacaatgtcatagggacaaagtgggtctataggaacaaacaagatgagaacgggttggtggtgagaaaaaggcaaggttggtggcacaaggtttcacacaagttgaaggtttggacttcggtgaaaattttgccctcgtggcaagacttgaggctattcgcatccttcttaaatttgcatcatgctttgatataaaactatttcaaatggatgtgaaaagtgcttttctaaatgatttcaaaattggaaaagttgacaccacccttttcacaaaaattattggtgctgatttctttatgtgtcaaatttatgttgatgatatcatattcggttctactaatgaggtattttgcagggaatttggtgatatgatgtctagggaatttgagatgtccatgattggagagttgagcttcttccttggacttcaaatcaagcaactcaaggatgggacgttcgtgagccaaaccaagtacatcaaggatctactcaagaggtttggtttggatgatgcgaagcccatcaagacacctatggcaaccaacgggcatctcgaccttgatgagggaggtaaaccggtagacttaatgctttatcattccacgataggtagcttgctttaccttaccgcatataggccggatatcatgtttagtgtttgcatgtgtgctcggtttcaagccgctcctaaggagtgtcacttagtggccgtgaaaaggattctaagatatttaaagtattcctctactattggcttgtggtacccaaaaggtgctaagtttaagcttgttggctatttcgattcggattatgccggttgcaaattggatagaaagagcacatccggtagttgacaaatgcttggtagatcccttgtgtcatggtcatccaagaaataaaactccgtagccctctctaccgccgaggtggaatatgtttcgaggggtagttgttgtgcccaattgctttggatgaaacaaaccttgttggactatggtatatccttcaccaaaaccccactcctatgtgacaatgatcgtgccataaaaatagccaataacccggtccaacattctagaaccaagcatattgacattcgccatcacttcctaagagaccatgttaccaagtgtgacatagtcattagccacataagaaccgaggatcaactagccgacatttttaccaagcctcttaatgaaacccgcttttgcaagttgaggaatgagttaaatgtcatagacttctctaatgtggct

SEQ ID NO: 91575 - DNA, 1696 bp, Oryza sativa
  Clone ID: PAT_MRT4530_90137C.1
ccccggggaacacaagaaaaaagaagcagttttttttgcccgtctcatcttcttcttctccctctcgccgcgcttcttgcacgcagcaatctctctctctctcgccgccgtcaatcccaccacgaattctccggtggctggctgctctcgactccttcgcgcgtcgatttcatgcggccgggtggttgcccgcctcctcccgaacgatccctcgccgccgccgctgcccgctcatcggcgttgtcatccaccaccgccgccgctcccgccgcgggggcggcccttgggggcggtcatccacaagcggtgagttctcctcccctgcggtgtggccttcgtagagtggccgtggatctgccgcggcgacgtaatctgctccgggttcgcgttcgtatgcctcggctttttttcgactgcagaatcccctcacggacgcgatggatttcgtcgtaggtggagcacacgcgggctgtgtttttgacagagattgatttcaacggatgaacatgtgtgagagaagatcaaaatttccactggggttatgaccttttccgtgacccttttgctcctaatcgggtactatggacctcctcatggttacggtgatggcaactattgtgacctccattatgctagagatgcatcacatctggatgagacgcacttgcattcttctgcactgacatatgatttgtacaacccatcagtaggcatctaccatcctggaaatgctggtgagcatgaccatgacacagtctatatagagccgactagttccaattcatgcccagacactgacgacagtttcccaatggatgaagaagtaggaaagaggttttaccccatggtgccagttccccatgttcctaaaattaatggagagatcccttcagtcgatgaagctaccatggaccatgaaaggctgacagaaaggttgaggttgtatgaactagttgagcacaaggtgaaaggagatggcaactgtcagtttcgggcactatcagatcaactgtatcaaagtcccgatcaccatgagtttgtgaggcagcagattatgagccagcttaaaagtaaccgtgatgcctacgatggatatgtccccatggcatatgacgattacttggagaaagtatcacatggtgctgttgagcttttgggcggaggttcactacaactccatatatccgcagaacgatgcgccgaggtcgcagacgacgaggaagaggagatggtggccgttctctcacaaccaccaccatcaccaccattgatgcctgggctgcaaagcttttcttccttgatcaagatgacccaggttgatcaagatgacccagaaagaaagctggtgctcattgtcttgttggtctgatgacaatcatggacatctgatagtaggaggaggacattgtggtgatgattatatatctccaaatgatatagaagatacatggaaatatggaatccatggaaggaataatttcgtcttagtccggtccggtcccgtatatagctgctgctgagctgcactgcactgcattgcattccctgaatcaattatcaatcacctcacctgtattattatttctcaaaaattttgccggaatgaggctacaattattcattcggaacgaatgccaccatataataccaataatgataatgataattgacataaaaaaaaaaaaaaaaaaaaaaa

SEQ ID NO: 91576 - DNA, 270 bp, Oryza sativa
  Clone ID: PAT_MRT4530_90138C.1
atggagggcggaagcggcggcgattcccagcagttcgggaagatggttgtcgaatccaaatccaggaggaagagacggcggggagggacgactatccttgcaggcacaatggacacggaaggaatgatggatcaagaagaagagaaggaggacgacgaacaacctgctgatgttcttgaggataggaagcatcgagatggatccatctacaggggtaccgattactggagtatctattatcgtatcgccgataccaacgaaactcactga

SEQ ID NO: 91577 - DNA, 353 bp, Oryza sativa
  Clone ID: PAT_MRT4530_90139C.1
tgaaatgaacgagatatttaagcgtacttggatgagacgtcgctgttcggtgtaattaccaacctgcatcaaggaaggggacaggaaggttcaatggattgaggatacaaattttatatttgtgtatatactttttatacatatacacaaaaaatatatatatatatatatatatatatatatatatatatgtatgtatgtatgtatgtatgtatgtatgtatgtatgtatgtatgtatgtatgtatgtatgtatgtatgtatgtatgtatgtatgtatgtatgtatgtatgtatgtatgtatgtatgtatgtatgtatgtatgtattcttatatactatctattatattatt

SEQ ID NO: 91578 - DNA, 234 bp, Oryza sativa
  Clone ID: PAT_MRT4530_9013C.1
atggcggcgacgaccagtggcgaaaatgggcatcgaaggccgaacaaggaggtggaggggacatcggtggcacagcgccagtcttcggatggagtggatgcggtgtttgacggggaggcgaatgccaggatttgggaagaaaaggggaatggcagcgcgagaggaggtggcggcctcaatgatcacagtgcgagagagatagaaaaaggtaggaacaaaatcaccctggattaa

SEQ ID NO: 91579 - DNA, 953 bp, Oryza sativa
  unsure (1)..(953): unsure at all n locations
  Clone ID: PAT_MRT4530_90140C.1
acgcagcaatctctctctctctcgccgccggcaatcccaccacgaattctccggtggctggctgctctcgactccttcgcgcggcgatatcatgcgggcgggtggctgcccgcctcctcccgaacgatccctcgccgccgccgctgccgctcatcggcgttgtcatccaccaccgccgccgctcctccgccgcggacgtgcctcgccggcggcgagccgagcggtgagttctgccccgtgtggtgtggactcgtagagtggccgtggatctgccgcggcgacgtaatctgctccggtttttcctcgacctctcgatccctcttctaccctcgcgtgcccaactcctatccgcgctcatgatcgtattccggggaatcgcagggctcgccgtcgaaaggatccaatttttttcgactgcagaatcccctcacggacgcgaggaatttcgtcgtaggtggagcacacgcgatgcaagtcatcggcagaagacgcacacaaaggatgaccacgcgtccggaagatcaaaatttccactggggtttgaccttttccgtgacccttttgctcctatcgggtactatggacctcctcatggttacggtgatggcaactacttgtgacctccattatgctagagatgcatcacatctggatgagacgcacttgcattcttctgcactgacatatgatttgtgcacgcatgagtaggcatctaccatcctggaaatgctggtgagcatgaccatgacacagtctatatagagccgactagttccaattcatgcccagacactgacgacagtttcccaatggatgaagaagtaggaaagaggttttaccccatggtgccagttcccgtaagtctattgaccctttgaagccaggttaataagtagtgttggtatgatttttgatctgcntcnggnccccccnnangattggaagttttgctt

SEQ ID NO: 91580 - DNA, 776 bp, Oryza sativa
  Clone ID: PAT_MRT4530_90141C.1
attcccgggtcgacccacgcgtccgggagatggcaactgtcagtttcgggcactatcagatcaactgtatcaaagtcccgatcaccatgagtttgtgaggcagcagattatgagccagcttaaaagtaaccgtgatgcctacgatggatatgtccccatggcatatgacgattacttggagaaagtatcacaaaatggtgaatggggtgaccatgtgactctacaggctgctgctgacaagtatggagttaagattttcgtgatgacatcgttcaaggatacgtgctacattgagatccaaccaaaggttcagaagtccaacaaagtggtgctgttgagcttttgggcggaggttcactacaactccatatatccgcagaacgatgcgccgaggtcgcagacgacgaggaagaggagatggtggccgttctctcacaaccaccaccatcaccaccattgatgcctgggctgcaaagcttttcttccttgatcaagatgacccaggttgatcaagatgacccagaaagaaagctggtgctcattgtcttgttggtctgatgacaatcatggacatctgatagtaggaggaggacattgtggtgatgattatatatctccaaatgatatagaagatacatggaaatatggaatccatggaaggaataatttcgtcttagtccggtccggtcccgtatatagctgctgctgagctgcactgcactgcattgcattcccctgatcaattatcaatcacctcacctgttttattatttctc

SEQ ID NO: 91581 - DNA, 441 bp, Oryza sativa
  Clone ID: PAT_MRT4530_90142C.1
atgaacagtggcgctggtggtgctgggggagcagcagtagggaggatgccggcggggagcctccagtgggcacagtggaggctagcggatgagcgatgtgaactccgggaggaggagatggagtacatgcgacggttccaccgccacgaaatcggtagcaaccagtgcaactccttcattgcgaagcacgttagggcgcccctccaaaatgtttggtcactggtgaggaggtttgatcagccacaaatttacaaaccttttgtgagaaagtgtgtaatgcgcggaaatgttgagaccggaagtgttagggagatcattgttcaaagtgggctcccagccacaaggagcattgaaaggttagagttccttgatgataatgaatacatcctccgtgtcaagtttattggtggcgatcatatgttgaagaaatgtgggccttag

SEQ ID NO: 91582 - DNA, 453 bp, Oryza sativa
  unsure (1)..(453): unsure at all n locations
  Clone ID: PAT_MRT4530_90143C.1
cttacccggagtggatatcgattgcctttgagaacaaggtccagccccacgcgtccggacgagatgttttctgaaggatgttcgactctgaagccttggcgtttcttctattccatcagttcacatgtgtcttatgttggtgatctcttgatatattcattactctactctcctgctaagctacggaaagcatgaaacttgcagcaaggattgatcttgtggccagctttaacttgaactttgtggaagttatctgtgttgtgaacatagaaatatagatactagcctgccagtacaagaatcagctgatgaatggatagatggactgctcactgctcctgcatttagtcctgtagtcattttcgtttttctgctcgtgctgtgctattcatcgcgctaactntcttcatttgcttcttgataacattatcatatgctaatataatatttcct

SEQ ID NO: 91583 - DNA, 290 bp, Oryza sativa
  Clone ID: PAT_MRT4530_90144C.1
actctcccacactcttcatctaggggggggcttatcaaaataggggggttgaaactcccgaaataaattgcttttggaaaaacgattccataggagactgcacatacactcactattacaggaaaatatgtgattgacaccacatatatatatcatgtacatcgtcttctaccatataaaatagttcagtagcaggcacgctcacatatacctgtagatattgaacatgaagattataaatacctccaacactttgcaaatatgttttataaccaagctactagagccta

SEQ ID NO: 91584 - DNA, 183 bp, Oryza sativa
  Clone ID: PAT_MRT4530_90145C.1
atgcacaccgcaagcggcagcggctgcatccgccaggcgctcacggagtcacagctgcactgcacctcgtaccctactgccgtcgaccgtcgtacggagcagcggaagaaaaaggggaagccggccaccggcgcgccgatgcgtggccttgcgccattgcgccgcgcgattttggtgccgtga

SEQ ID NO: 91585 - DNA, 374 bp, Oryza sativa
  Clone ID: PAT_MRT4530_90146C.1
ccggccggactccagtactccaccacaagctctagcttacagctcactaccagtgtacattgttgctagttagctagagctagatctcgatcgagacaatggcgggtgctcgcaggacgatggcgctggttgcgttggtggcggtggtggcggcggcggcgtggcctgtgagcacggtggcctccctcccgcggatggatccaagacttagtccccatcgattccgttaaacgagtatgtccaagcgccttagccagtagacactatgcactgtatcggatccaatgtgaaaatttaccttggatatctcgctaaaataattgtattttgtcgacttgcttgaaaaaaaaaaaaaaaaaaaaaaacccgcggcc

SEQ ID NO: 91586 - DNA, 581 bp, Oryza sativa
  Clone ID: PAT_MRT4530_90147C.1
ggtgcaaactagctacactcgtccttgagccatgcccctttttcatcagatccttaaaacattcttccatgcacttatcattgctgaggtaattcttggacagagtgatagggaagttcttcttgagctcaagaactttttacagtttcagaacccgataaaccatggtgggtataacagttggccagagtcagggacctcaccatgccattggcaaggtgttggttgtgatgcctctggcagggttaattttctcgatctttcaaactcaaatatatctggtccagccttccaaaacctgtcacgcctcagtgggctcacacacttggacctctcagcaaacagcatcactggggagctgcatgatgatctcaagaattgcctgcatctccagtacctagacttatcttacaatctcatcagtggtattctcgacgtctccagcctcgccaacctgcagacactagatgtgtcccaaaatcggttcgaaggcggcattagcgcaaacttcccagcaatctgccgcaacctaagtgctatcaacttgtccagcaataacctgacaggaagtataagtggat

SEQ ID NO: 91587 - DNA, 1086 bp, Oryza sativa
  Clone ID: PAT_MRT4530_90148C.1
atggaggacaacgttcttgtctcctcgaaaatccatggaaggagtaaaagcacaacagccaaaaggaattgtataatttgcggacaacgtattagtaagaggagaagaacacaacataattttcagaagataagtcgggggcagcttaatttacagaggacaagaccatgtctgcttaattttcagtctcttcccaaggatattgtactaagggtaatgtcaaaattaacattaaaggaagtcgctcagttgagtgttgtgtcaacaaactggagacaggcttggacattccatcctaatctgtactttggtattaaaacagcccttggaaataatgccaagagaaaaggaacaagctctgatctgaactgtagaatatcaagtggtaacaagttcattaaaagggttgatgctattctggaaaaacattgtggaacaatgggttgtcatttacaaagaatggagttacatgctccgaatctcacaacatttgagtacgacggttccctggcattggtaacgctcaatgaatgctccaatatcaaagcatcaaccatcagactttttgatgagaaaaccctccaaaatatattaactggaattccaagtgtattacctcatgttgaaacgttatatgttgaagttcatgtcaaaactcagatgtctggatttacacaatcacctctcaagttcactcaattgaagtgtctaactttggaaataacttttgagagaggttcattcgatagaaattcagtcttccagttgactaatcttttcgtagcagctccatttttggaggatctttatttggatatgtattgtagcttgaacaggtgccctttggatttggatgacatcgtggatcagcctcactatcatctcaagatggtgtgcatatttggattttgtggcaacacaggccaggttgagctagcaaaatgcattctcagaaatgcgttaatattggagcaaatgatcatcgacccaaaagggagatatcggttggatggatattttgggcgccaggaggcagatgagaagcttgttccagaagatatagatggtgtactcacaattctgtaa

SEQ ID NO: 91588 - DNA, 1693 bp, Oryza sativa
  Clone ID: PAT_MRT4530_90149C.1
gccgagggctgcgcctcgcgatcgagcggctccagccctaagtagcctctccctcgtcgcacaatcattccatcccccttcctggctaccttgctcgccgggatcaggagtctgcggagttgggttggactgcggacctgcggtggagggattcagggtttctcttgtccctgatccactgcctccacgaccaacaatggaggacaacgttcttgtctcctcgaaaatccatggaaggagtaagagcacaacagccaaaaggactcgtgataatttgcggacaacgtattagtaagaggagaagaacacaacataattttcagaagataagtcgggggcagcttaatttacagaggacaagaccatgtctgcttaattttcagtctcttcccgaggatattgtactaagggtaatgtcaaaattaacattaaaggaagtcgctcggttgagtgttgtgtcaacaaactggagacaggcttggacattccatcctaatctgtactttggtattaaaacagtccttggaaataatgccaagagaaaaggaacaagctctgatctgaactgtagaatatcaagtgctaacaagttcattaaaagggttgatgctattctggaaaaacattgtggaacaatggtaaataagtttgctgttaagtttggtttgtcaaatgagcatgctaaccatgtcaatggctgggttgcgtttgctattgcatcaaaggcaagggttatcattcttgacttctccccagattggaaatcacatgaaaacaactatgactttccttgtcatattttcgacaaacataatggatcttaccttgaggctcttcggcttgacagtgttactttgaatccacctctagatttctgcggatttgcaaaccttaaactgcttgctcttgacaatgttaggttgcaacatttagagcagttaatatcgaaatgccatgttctagagtggttaagcatccaatcatgtaaccagctgcataatttacatgtgtcggaaccattatgccgtctgcaatgtttgtcaattcagggttgtcatttacaaagaatggagttacatgctccgaatctcacaacatttgagtacgacggttccctggcattggtaacgctcaatgaatgctccaatatcaaagcatcaaccatcagactttttgatgagaaaaccctccaaaatatattaactggaattccaagtgtattacctcatgttgaaacgttatacgttgaagttaatgtcaaaactcagatgtctggatttacacaatcgcctctcaagttcactcaattgaagtgtaactttggaaataacttttgagagaggttcattcgatagaaattcagtctccagttggcttatcttttcgtagcagctccatttttggaggatctttatttggatatgtattgtagcttgatcagttgtgccctttggatttggatgacatcgtggatcagcctcactatcatctcaagatggtgtgcatatttggattttgtggcaacacaggccaggtggagctagcaaaatacattctcagaaatgcgttaatattggagcaaatgatcatcgaccgaaaagggagatatcggttggatggatgttttgggcgcgaggaggcagatgagaagcttgttccagaagatatggatggtgtactcacaattctgtaa

SEQ ID NO: 91589 - DNA, 504 bp, Oryza sativa
  Clone ID: PAT_MRT4530_9014C.1
atggggttcaaggacgacgacgatgtggacgatgcggtcggcgaagtcgtggacgatggcgatggattcgcacggccgccgctcggaccccaggccccgagatggcataccagaaccgccatgcggaatgtgttggtgaaactgccgctggcaatggagccgtcgtcgacctccgcgcgagcgtcgtcgtcaccgccgtccccacgccctcgggagtggcggcgaataaggggacaggcgccgccgacgagcagatctagccgccctcgccctcgacagcagcagaggcggagatgaaggcggtgggcgagagcagcggcctcttctttatttattccccgaaacccccagcaggttggagattcatcttccgaacccgctccgccgttacggtgcccctcctactacctcacaagtcacaactccgatgaaccacgcgtacgtgttcctccttggtccccgacatggatcagaagttctttctttggcaggcaaaaaggaacg

SEQ ID NO: 91590 - DNA, 2077 bp, Oryza sativa
  Clone ID: PAT_MRT4530_90150C.1
atgacccacccccaccgggtgatcgtgatcgacccgctgcgcccgccctccacgcctgactatcctcctcccatctctccgcacagctcagtgccaccccggcaaaagcctctccatcttgtcatcgtcttctccagctctcgatcgagctctcgaccgaggcaatacaaaatccaggacaggccattgcgccggcctgctgctccccgaggatttttgtttgattctttgctgcctccagtgggtttggttttcttgggggggtttggttcccggggtggtgcttgttggtgaacgtggtgttctccggggggaaagaggggccaccatttctgccccccggttttcttcctcgttttcctgtggcttggagcttgcctgttgcgcaaaaggcttctcttggaacacccccgtccgtcgtcgatccggctctcatagccgggggggggattttcgctcatatctctggatttgacgtgattttccgttacaattttcgctctgttctagttccccagtatctctcctacattgacattgttgctttacctgtgaatggagtattgactgatttccctgttacaccttcagaagccataggctgctttactaatctgaagaaaagaaaaacagatcatggaaagcctctaattatttcccacaatggtgctagtggggattacccagcctgcactgatctagcttatcaaaaagcagttgatgatggtgccgatgtcatggattgccctgtccaattgaccaaagatggcataacaatatgcatgagttccattaacttgatggatgatactacagttgcaaaatcacagttcgcctctcagacagcagtaatcaaagatattgagagtgtgctaggagtctttaccttcaaccttacttgggatgacatcgtaaagaatctgagacccaaaatctctaccccgtttagctccttcaaactggagacatagcatccaaatttaagcctcctggaatgtggctcaatgtccagcatgctgcttttgtggcggaggaacttgggtttgacatggtagactcagttatcaagaccctcgatgctgctggttacagcaaccaaactgcccagaaagttatgattcagtcaagcaacagctcggttttggtgaagttcaagcagcaaacgaagtacgaccttgtgtacatgatcaacgaggaggtcaaggacgccgcgccttcttccctcgctgccatcaagaagtttgccgatgccgtttccgtcgaaggcaactctatattccccgagaaccgccatttcactacctaccagaccaacctcgtcgagtccctgcagaatgccggtctcccggtctatgtttacactctcatgaacgagttcgcttctcagccatacgacttcttctcggacgcgaccgcgcagatcaatgcgtatgttcagggtgctggagtgaatggcgtgatcacagatttcccggcaacagcacggagatacaaattgaacacctgtatgcacatggggaacaacacgccgagcttcatggccccggctcgcccgggtgacctgctgcagatcatcagtaagccggcgcagccgccggcgatgtcgccgatgcccctcctgacgggctcggacgtggcggagccgccgctgccgcctgcaagaacagctcaggcgccgtcgctcgcgagcaggatgcaggctcatgccgcgatcgtcgtcacattggcgatgcttctcgcttgccatcccctgcgcatgctctctcgcaccacgaggtggcgcccggcctcgtcggcgctgctggctgtgccgccacccgctcgtcgcccacgcctcctccacacctcctcctcctcccacgtcctcgccgtcgaggcgccgcaccacgcacgacatggcgagcaggcgccctcgccatcagagcgccttgccccgcccgccgccgccacgccgcgcccgcgcgcgtcgtcgtcgtcgcccgcgccggcgtgccccccgactagcgcgctctcgtccaccacccgcgccgtccgccttcgccgccggaacagagacagcacgccccacataccttag

SEQ ID NO: 91591 - DNA, 224 bp, Oryza sativa
  Clone ID: PAT_MRT4530_90151C.1
atagggtttttttacaaactctcaacgcacgctcaaacaaccatgtgcactcataaggggtgctgctaaagactcgattacattctcattttatgagacgccctcgcccctatttacaatcgtttactcgcatactgaaatactgattattagatatgcatctgaagcacctgttgtcctaacaagattggaatggccacatccaaactcaattgattgctcat

SEQ ID NO: 91592 - DNA, 2630 bp, Oryza sativa
  Clone ID: PAT_MRT4530_90152C.1
atgctgggtgtggagaaggagaggaaaatatggattgagatgggtccaattacaatagttgtctcaactttgaaatatgagtatgcgattgagaagctaaagagtactggctttggaattttagaaagatgcggtggtttacttgtagctatcaaagcgattgcagggcttttgaaccataaagagataaataaaattgagtggggaaagtaccaagtccttcatggttttgttaatggaaaatcaaatgaaccggaagagctaggaaaggagtattacaatgagttaattataaggaaccttatacaggcaatgcccaatagtgaatggagcatgcatgatgtcggtcgctcattttgtcaacatttggctaaagatgaagcactatcatctcaaatgggacaacttagagtcagtgacattttgggctgcagccgcttgcagattgcttcaactttgaaagatgagtatgcgattgagaagctaaagagtactggctttagaattttagaaagatgtggtggtttaccgctagctatcaaagcgattgcagggcttttgaaccacaaagagataaatgaaattgagtggggaaaggtactaagaagtccttcatggttagtggatggaatgcctgaagagataaaccatgcaatatatttaagctacgatgacctagaccctcatttgaagcaatgccttttgtattgctcactcttccctaaatatgacaatgccggcgacaataataattggaccatgcatgatgtggttcgctcattttgtcgacatgtggctaaagatgaagcactaccctttcatatggaacatcttagagtcactgacctcgattcaaatagatatcgttggttgtgcatacagaatgaattagattggagtgcatggcaagaacaaaactcagttagaacgttatttttttatggaagtactcatatcaagttgaaggccaatgatttatgcagcaaattctcaaacttaagggttctgagtatagtatatgcacaacttgctacttttgattctctatgccaattgaagaacttgaggcacttgtacttttcccgtactgacatacgtagcctgccagatggcatcggcaagatgaaattcttggagtacattgggattacatgctgtgaacaaatacaacaacttcctggtagcattataaaactagagcggctaagatctcttaaccttatgggcacaaacataaaaagtatacctaggggttttggtcgccttacaagtttgagaacattatactcgtttccagctcagatgggtagcagttcatcaaaagatgagtggtgtagtttggaggagctgggacctctttctcagctcagggatctccatataaagggtttggagaatgtatctgccagctcttccgctgcaaaggccatgcttggtgccaagaaacatcttgccatatggtggttagagtgcactgataggcagagagatgatggattcttgaaagaggaaggaatcatttctatagacgagcagcgacgaatcaaggaggtttttgatgagttgtgcccttcatactgcttagaacaactttacatcagaggatattttggttggcagctcccaaagtggatgacatcaaaagcatctgtgaggcttgatagattgacgagtcttaagttggatggcctgccttgctgcaccaaactccctgatggcttgtgtcagctttcctgtttgaagcttgagtattctacagtgcccccgccattgagcgcatcgggcatgaattcctgcagatacagcaacacaatggtgattgccatccttcccgagcagcggttgcatttcctatattagagacgctagagtttacagtagtgctggagttggaggaatgggtgtgggaggaacacattcaagccatgccactcctgcatgagcttacactagacagggctttgagtgttctcaaattgttcatggtccataacctcaagtctttacagaatttgccttcagttgtggagcttcacctgtataaaaaccctgacatggagagcatcagaggtgtcccaaaactgcaagtgcttagcattaattactgcccaaagctcaaactattggagggaatacctgcgctgcaaaagctctatctgctagacttcagcatgaaaacactcccaggatatctacaagatgtaaagccaaagagtttggtgctggactgtagtttgccactgcttggtaacatatcaatgggggcctcttgctctgactgggacaagatcagccatatccagcaaatcagtggatatgcaggtgaaatgcgcatcaggagaaggtggtatgtgttttacacacgggagcccttcaaattggacacaaatatcgtctgctcttccatatctagaggtctaaatcgtagtttgagacggaagcccttcatcagtagcagtgtgtggatattcctaattaacctgagttgtatcgcaggcattatcgatggtttgttgaaggacaaagagaggcgcgccaaggagttgaggatggtgaagcttctgtgtgccctcctcgccgtcgttggatttgtttccattctgccacattgttatggattattgttgtaa

SEQ ID NO: 91593 - DNA, 216 bp, Oryza sativa
  Clone ID: PAT_MRT4530_90153C.1
tttggcatgtagacctcgacctgtcatacaccggaatgaagggtgtggtttggctttttgtgttctttcttctgggctgcttaaccaaccatgcttatctctgcaggatcagagtcacagggatcaaaggggggaataaaaatgatcgaaactgatgggaataaaatggcaactgattgatgccttcatgtctgacctctcagctttgactattag

SEQ ID NO: 91594 - DNA, 146 bp, Oryza sativa
  Clone ID: PAT_MRT4530_90154C.1
atatatttatgaacgacattatggtttgctactgcccaactgcctttcgtagctgatctttgatcatgtatatcttagaattgctttacaaatggcattaccagtatcatctgtatccatgtcataatttgaaccagtttcttcta

SEQ ID NO: 91595 - DNA, 126 bp, Oryza sativa
  Clone ID: PAT_MRT4530_90155C.1
tgcgccgcggtttgctgccggggagtgcagcaagtcctgaggcaccagctgggagagctcaccacagggctccccaacaacaccgctggtatcatcaggggttaccagctgctacagcagatatga

SEQ ID NO: 91596 - DNA, 459 bp, Oryza sativa
  Clone ID: PAT_MRT4530_90156C.1
atggcggtggcgaccaacgtgtcctgtcaagctcacccgctcatccctaatccggcaagctccctctcccatgcagcttgtgctcagggaggcaagatgcattccatctcttgttgcgacggatgtgatttctctcccctctctcgtaccatcctatcaccgggcgggaaagtagtcgtggcagtggttctaccagaggctatggggaaggggagcgtgaccaggaagcacagtgggctaggagctgggcaccaacttgacctgaggcggagcgacggcacggctggatttgctgcagcgaccactctcctcgatgccatcattaccttctctaaggccagcacctatttgcctctgacgggcgatggcaccgtggctgcccttgagcccatgcccacgctcgtcggcgttgaagacgttgatagtgacgtcaccgactaccccagctggactcgctaa

SEQ ID NO: 91597 - DNA, 699 bp, Oryza sativa
  Clone ID: PAT_MRT4530_90157C.1
atgcacactgctaacgggaggccgacaactgggtcccagtacgaggtgccgcgacttaatattagtaaatgccgcatcactcttcaagtgccgtactggtttcatggtgtggacttagctgctgcctgctgcaccggtgcccctgcatccgctggtccgtctcggctaatttgcccgccgcgctacgccctcggccgggccatatacatatcctactcggagaagggaaggactgtattgtatcgtgcggagtctgatatctccgagttctacttggaaaccaagatgaaccatgctggggtagtcggtgacgtcactatcaacgtcttcaacgccgacgagcgtgggcatgggctcaagggcagccacggtgccatcgcccgtctggagcaggaagtagcagcggaggaggcgtcgacgctggggtcaccagaggcaaataggtcaagttggtgcccagctcctagcccactgtgcttcctggtcacgctccccttccccatagcctctggtagaaccactgccacgactactttcccgcccggtgataggatggacacgttggtcgccaccgccattgtcttccttcccgcagacaagcgggtgagcttaagctacctcttcgccggagaaggtggccgccatcctgggaagcagctcaagctcgacggtgttgccccgggctggtgcaaagcttag

SEQ ID NO: 91598 - DNA, 345 bp, Oryza sativa
  Clone ID: PAT_MRT4530_90158C.1
atgcgcgcgcgccgcctcaccctcccgcacagagggcacaggctaggccgccgcgcatcgccccgtaacccaactcttcatccgtgcgcagtgctcgacggtcgccgtcaggccgccagccactgcgccgtcctccgcgtccccaccgcgtccgcgacctcctctgtcgctggcctcgctggggattaccgggattggagggcacggtcgactcccggcggccccacctttggttacaatctctctagccttgactacctcctctgctactggaatcatgcgcttgattgtatcataggccgaagctgcttccagtccaagaagagtacagcctctgattcataa

SEQ ID NO: 91599 - DNA, 267 bp, Oryza sativa
  Clone ID: PAT_MRT4530_90159C.1
atggaagtggcagccccgtccgtgtccctccgtgcgcccggccgccgcttcgcatcctggcgagaaaaaaaagtggtcctgtcagtgaacatcctctcctcggactacttcaaggagctgtacaggcttaagacgtaccacgaggtcatcaacgtgatctacaaccaggttgaccacgtcgagcaatggatgaccgggcaactgctgtggcccctccagcgacttctgcctcctctacaagttcttcaccatgaagctcacggttaa

SEQ ID NO: 91600 - DNA, 1941 bp, Oryza sativa
  Clone ID: PAT_MRT4530_9015C.1
atgggaggtttggaagaagcagagaaggccaagccttttgccagccgagaaagtggttgggcccaatttatagtgccggttttcttgggcctgaaaatcgtgtgcgccatgtttgaacttggcttgtggaagcaggggaagagaagagacacagagtggcttggtttggaagaagaggcagagtcagagaaggccagcctcatggtggttggtgttcatgtcttcgatagttcgattgcattaggtaatatccgggacaaacccatccggcaaaattggccggacgagctcgtcccacttggacggagcacacagtgtctcctcggcgaccgccggcgctccgccacgaccgcctgccaccacctccacgaccgccgacgctcctccacgaccgccgacgctcctccacgaccccctgcctcaacactggtcgccgccacgagcgagatgctcggcaccatcccgccactcatcgcgatgctcgacgagagcggctgcggtgatgtcgacgcggcgggctcgagtggcggcgaagcttggaggggatctcccgatccagccgcggtgacgacggtgggccagcgggttgggtgctccggcggtggtggccgtcttgctgctgccgttgtgcttgatccggttgttccacgcgtggatgcagccgtcatctccacccgcttccagaagcagaggaatcaatcccacacacacctcgccaccggcaagccgcgcctccgcctctcgccctctccaatggacgcgccatggttcaacctcaacgccgacgtcctccgcctcgtccacaagcgcctcccgtgcctcgtcgaccgccgccgcatggcccgagtctgccacaactggcgcgtcgccgtcaagccgcagccgcagccgcagccgccgccggggacgaggccgctcccgtcgatcctcgtcccgcgcgccgacgggccttccttcgcgtgcgccctcgccggctgcgccacccacggcttcggccacccgctcccggccgaagcacgcgctgcgcgctacttcggcgcctacgacggtggctgggtcttcgtcgccttcggccgaattctggagtacgcgctactcagcctccgcaacggcacgcgattccacgtccccgacatgagcatgggcatggtggccgcgaccctctcttcgcctccgggcgacgaacgctgcgtcgccgccgccatcagccattcctgcatgatggacaatccacgaatccatgcattcgggatcctgaggcatcgagttgcggaggaggcgactcatgatcctgctgagttcgtcaccacgtcagttctggaggatgtcatacaccacaacaaagccttcaaattcctcacaagagaagaaaacctccatgtttttcctgtagcgggcttccacgaagacgtcaacggcaatcttgagataccgcccgtggaggttcatcgcttctcgcgtggcgggcgagattacggcggagccgtcgctgttcgctacctcgtggagtccggcgggaatctcctcatggtcgtcaggctcgtcaccgatcctcttctcttgccgacgaggacgtcggcgttcaaggtgttcgagatggtggagccaccgacgaggactcccatccacgacaaggagcccgcattcgcttggaaggagctggaatcgctgggtgggcggatgctgttcgtcgcgcgaggctgctccagatcgtacagcaagaacaactacccggacgctgagttcaacgagggcgtctacttcttggatgatgggagactctaccgtgaggggttatcgttcttggctcccgattccccagaatacccctgcagagacaacggcaagtggacggcggcggcggcgggtagcagcatggacaagttcttgccggagcaaggcccgttgaactactcaccgctggcttggcttctcccctga

SEQ ID NO: 91601 - DNA, 1173 bp, Oryza sativa
  Clone ID: PAT_MRT4530_90160C.1
atggcgcccagcaaccgcctcgccggagctgcggcggcggcggcggcggcgcctcctcctcctcctcctcctccgccgcctcctctacctccgagaggatctcccgcgccgtcggagaaccatacagcgatctcggcgcctctgctgcagcccgcgggggcgggcgcgggcgacgcggcgccgctggcgaagtggctgcggcggctcgaggcgttcctctcggcggcggggctcgcggcgtcgagcccgctcgggaaggccggggcggcgtccgcgctcgccgtgctgggcgtcgcgctgccggcgctggcggtggcgctctccccgtgccgcgggcgcgggaggggttgcgacgagttcgaggtggaggtgttcgaggtgtgcgtgcttctgtcgcaggcggcggccgcggccgtcgcgctcgcgtgcgtgtcgaggaagatggccatgtacggcctccgcaagttcctcttcgtcgacccggagctcggcatgcggatccgcttccagaaggagtacgtcgctaagatcaaggatttcttcagcacaattttgtggtggatattgccatgctttgttgtgaaggtcacacgagaaatgttccgtttctcccatatcttccaagagtcgacttggagatcatgtgctgtactgtttgcttccatcatgtcatggatgtatctgaccacaattatattaacctcctgcatgcttttcaacttggtttgcaacctacaagttattcatttcgatgactatggaaaacttctagaacaagattcagatcctttggtctatttaaaagagcacctgcagcttcgtcataatctctccaaaatcagtcacaggttccgcatgttccttttgctgctcttcttttctgttacagcaagccagtttgccattctgttcaagacaacagcatatactggaccaatcaatttcactaatggtggtgatatagctgtctcttccgttgttcaagttgtcggtcttgtcctttgtttgcatgcagctgctaaaatttctcacagagctcaaaacattgcttcactggctagtcgatggcatgccttagtaacatgctctagtgattctacttattgctgtatcttctgggcaacccaggtggcatcacgatatttggctggatcgttgatcggacattcctaa

SEQ ID NO: 91602 - DNA, 385 bp, Oryza sativa
  Clone ID: PAT_MRT4530_90161C.1
caaaaaagagtgccacagatgttcagtaccatcaaaagagagagctgacacaacaatacatacaacaagagaggcttctggtgatcatccataacagacgcatagccatcacaacaatgcgtggcacatacgtccggccatgcatacctaacgacacaccaactgcacagcctacatagaaaattaccgaggcgccagggtgggtcacaagcaaacaatactctcactccacatttaccaagtatgggagtctgtctcgtatatatcacaaacacgggctaggaagcctacgagcaaacgctgaatgcttagggatcacttctctggtccctatcacctcgggccgtacatgtatataggccggagatagctggtggtgatgacg

SEQ ID NO: 91603 - DNA, 585 bp, Oryza sativa
  Clone ID: PAT_MRT4530_90162C.1
atggcgcaacgccggatcggagggagagaagaagagagaggagaggctgaccagtgggtccctgatgtgaccatggctactatggatacaaccattgctcacatcatgaatcaacaagaagacatcaagatcaagtccttcatgtgctgcaatctgattcggccatgtgctctattgctgacttcaaacggccgccaaatctacatacgtgctccgttttgggcccgtgagtacttgatggaaagctctcaaagtcctctttccaaaggatctagcctcatctcggagtttcgtttcgtttggccgcaatcacagaagttgatctgcaccagcaagaacccacggagaggtgtatcgatcgctaaggcgcaacacaacaacatctcgtacggttgtagtcgggtcttcaactcaccgaaagatcgggccaacaacagccttgagtgtcttgagtggagctcagggttcaccagtcccacaccggtttctgccctccattgccatgttggcatgctacgtgggcaaaagtggcaaatagttaagatggcatcttataagaggggcaaaaaaaatgtacaaacttaa

SEQ ID NO: 91604 - DNA, 943 bp, Oryza sativa
  Clone ID: PAT_MRT4530_90163C.1
gtaattttggattacactgaaattcacctagtctggatattgccatgctttgttgtgaaagtcacacgagaaatgttccgtttctcccatatcttccaagagtcgacttggagatcatgtgctgtactgtttgcttccatcatgtcatggatgtatctgaccacaattatattaacctcctgcatgcttttcaacttggtttgcaacctacaagttattcatttcgatgactatggaaaacttctagaacaagattcagatcctttggtctatttaaaagagcacctgcagcttcgtcataatctctccaaaatcagtcacaggttccgcatgttccttttgctgctcttcttttctgttacagcaagccagtttgccattctgttcaagacaacagcatatactggaccaatcaatttcactaatggtggtgatatagctgtctcttccgttgttcaagttgtcggtcttgtcctttgtttgcatgcagctgctaaaatttctcacagagctcaaaacattgcttcactggctagtcgatggcatgccttagtaacatgctctagtgattctacttatgtaagcacaccaaacagttctgggaaccttgtgccttttccagcacatatgttcttgagagacttttcagaaagtgatttggagtctctggagagtggctcagtacaaggcaattctcatggcacagctcaattggcttcatacatgtcttcataccacaagagggaatcacttgtgctgtatcttctgggcaacccaggtggcatcacgatatttggctggatcgttgatcggacattcctaaatacaattctgatgctcgaattaacacttgtgctcttcgtgcttagcaagaccgttgtggttccggccaaaacattagttcttgattacatcaggttttcatgatgggggctatcacatc

SEQ ID NO: 91605 - DNA, 240 bp, Oryza sativa
  Clone ID: PAT_MRT4530_90164C.1
atggtgactgcaccgacgcaggcagcagctgcaattggaagcgctcgggacgccatgcatgcgtcgatgcgtcaagtagctcaaccggattcgcctcgaggcgacgggaacagcggcgcgaacccacagctgcgcgttgacgacggtgtggccgcgctccagagctaccgtggcgaggtcggcgttcccagagatcggctccaagaaacgaggtgagatcagacagagcagaggctaccg

SEQ ID NO: 91606 - DNA, 192 bp, Oryza sativa
  Clone ID: PAT_MRT4530_90165C.1
ctgtaaaaatcccgatggtttttctttttgtagaatgggtgaatagtcattttacattgtttgcagcgttgtatccatttttggttgctcggttcagacagttttctgtcttacaattctctgtagggtgaaccagtgtgagcaaccccatttttgtacatgtaaattttggcatttggctatgttttgagt

SEQ ID NO: 91607 - DNA, 312 bp, Oryza sativa
  Clone ID: PAT_MRT4530_90166C.1
atgcatagagtatcggggtacgttggaacaggggtctacgtagtacgacatcaaagcagacaaaagacaaggattatactggttcaggccccttgtcagattacaaagagagtaactgaaacaggcgataccgacgagatcgtagtcgagggattcgacaagacctcccggcaagtcggctctgcatactccggcttcgtaaactttggtgggtgtgttggcgatgagattcgatgcccttcgcctccccttaggggtcccttttataccgtggaataccttgacccccaagtaagacttagggatatgtaa

SEQ ID NO: 91608 - DNA, 1662 bp, Oryza sativa
  Clone ID: PAT_MRT4530_90167C.1
atgcgctccccctcccgtcccctccctcgcctcctcctcctccgccgccgctgcctctcctccgccccacaccgagaccgccgcttcctccccctcctccgcttcgccgccctcgccaaggagctctccgaccaccgtccccggccgggaacgccgccgccccctacacggccgcggtccccgcacccctacgactacaaccgcctcatgtccgcgcacgcggggacgcgggacggcgccggcgcggaccgcgccctccacctgctcgacgaaatgcgcgccctcctccggcgccgccccgacgccgcctgcttcacaacggtcgccgcggcgctgtcgtccgcgtcccgcccgggcgcggcgctcgccgtgctcgacgccatggccgcggatggcgtcgcgcccgacgccgcggcgtgcacggtgctcgtcggggtgtacgcctgccgcctgcggcggttcgacgccgcctacgaggtcgtgcgctggatggtggcgaatggcgtggcccctgacgtggtcacctactcgacgttgatatctgggctgtgcagcgctgggcaggtggctgaagctctcggcgtgctggacttgatgctggaggaaggttgccaacccaatgcgcacacatatacacctatcgtgcacgcatattgcacgggtgggaggatacatgaggcgaagaggctgttgaacactatgattgccagtggatttgctccaagtacagccacttacaatgtcttggttgaagctctctgcaaggttggggctttcgaggaggtagatgcccttcttgaggagagcactgcaaaagggtggacaccagatgtaatcacatatagcagttacatggatgggctatgcaaagccggcagaatagataagagctttgcattggttgataagatgttatccaacgggttacaacctagtgaggtgactctgaatatccttcttgatggtgtttgtcgtagctcaactgcatgggctgcaaaacgcctcttggagtgcagcgcagagcttgggtgggatgccaatgttgtcaattataacacggtgatgaggaagctttgcgatgagcacagatggctgtctgttgtcaaacttttcactgacatggccaagaaaggcattgctccaaatagctggaccttcaacattgttgtccacagcctctgtaaattggggagacttcataaagcgctttttctgctgagaagcaaagagtttgtagctaccgttatcacatacaatactttaatccgtcatctcagtatttctggggaaggcaatgaagtttgcctcttactttatcagatgattgagggaggcattgctcccaatgacatcacctacagtcttgtgattgattgtctctgtagagaagagaagttcttggtggctctttgctgtttttaccaatcacttgaggacgacttcttcccatctgcatttctcagtattatacgaggtctaattgttggtggtatgcttggtcaattgcatactctaattggatgtgttcttggacaaggctttataatagaagtgtatatttaccaggaactgatcaaggctctttgtaagaatggatactgtcaaagcgtagaaatgtacaaagtttgccatatattggaaagaatgctcagattgagatga

SEQ ID NO: 91609 - DNA, 175 bp, Oryza sativa
  Clone ID: PAT_MRT4530_90168C.1
gcgtgcacaggcagccagacataaattgtccagtgccaacaaattgctaaatcctttacttaaatttgccattctttaaaataagtagaggggagctctatttatttgctggaggggggcttttgcttcctgggattcctcatttacatcttattcttgccaattgtttttttta

SEQ ID NO: 91610 - DNA, 192 bp, Oryza sativa
  Clone ID: PAT_MRT4530_90169C.1
atgggcgccgtggcaggtggccgggcggcggacaagcgcacggcgacaccggcaggcgcgcggcccatgccgcgcgcgccaacacctcgcgcgtacgttccatcacgcaacagggtcgtcgtcgtccatgcggatgattgccgctgcgccaagcgcccgtacgtgacaagggcaacggggcgaggcggctag

SEQ ID NO: 91611 - DNA, 1173 bp, Oryza sativa
  Clone ID: PAT_MRT4530_9016C.1
cacactgcgcgccatcaattctccgatccacgcgtctctcgccatctgctgcttgccaccaccacatcgtcgccggcggcgagagtggcctggagagatcgtcggcgatggcgggggaggggaggaagctgcgggtgtacgggatggcgctgtcggcgaacgtggtgcgggtggcgacggtgctgaacgagaagggcctcgacttcgacctcgtccccgtcgacctccgcaccgccgcccacaagcaaccccacttcctcgccctcaaccctttcggccagatccccgtgctgcaggatggagacgaagtcctgtacgagtcccgcgcgataaaccggtacatcgcgaccaagtacaaggcggagggcgccgaccttctgccggcggaggcgtcgccggcgaagctggaggtgtggctggaggtggagtcgcaccacttctacccggccatctccggcctcgtcttccagctcctcatcaagcccctcctcggcggcgccacggacacggccgccgtcgacgagcacgccgccgcgctggcacaggtgctcgacgtctacgacgcccacctcgccggcagccgctacctcgccggcaaccgattctcgctcgccgacgccaaccacatgtcctacctgctgttcctctccaagacgcccatggcggagctcgtcgcgtccaggccgcacgtcaaggcgtggtgggacgacatctcctcgcgcccggcgtggaagaagaccgccgccgccatccccttcccgccggccgcctgaccgccgccgccgctgccgcctcgccggccggtgcccgcatggatatgggacgataaataatttttttactactcattaatgtacgccgttaattatatgtcaaatactgtgctcgcgttttatcaattcacatgctttgagaaatagagagaatctagtaagggttgtttaggtcgcgaaatggaaatttttgggtgtcatatcggacgtttgactgtccgaccggatgtcaaaaggggtttttgacacgaatgaaaaaactaattttataaaaaaaaaaaaaaaacgtgagacgaatttattaagcttaattaatccgtcattagcatatgtgggttactatagcacttatggttaatcatggactaattagactcaaaagattcgtcttgcgattttc

SEQ ID NO: 91612 - DNA, 1347 bp, Oryza sativa
  Clone ID: PAT_MRT4530_90170C.1
ccggccggggcttgcttagctcgattgctttgctctgatctggttgatcgatctcgtcgtcggcgatggagaagttgctttcctcctccggcgccgccgccgccgtggcgtcgcagggccagctcccggactgcttcgtgttcccggccgaccggcgcccaccggcctccaccgcggccgtgtcgctccccgtcatcgacctctccggcccccgcgacgccgtccgccgcgccgtcctcgacgccggcaaggagctcggcttcttccaggtggtgaaccacggcgtgccgccggagacgatgcgggagatggcggcggtgtgcgaggagttcttccggctgccggcggaggacaaggcggcgttctactccgacgcggaggagaaccccaaccgcctcttctccagcaccatctacgaggtcggcgaccagcgctactggcgcgactgcctccgcctcgcctgcggcttccccgtcgccgacgacaccaacacccactggcccgacaagccccaccatctccgggatgtcacggagaagttcttcgtggcgacgaggggattggggatcgagctgctgcggctgctgtgcgaggggatggggctcaggccggactacttcgagcgcgacctcaccgccggcgatgtcatcatcaacgtcaaccactaccctccatgcccggatccgagcctgacgctgggcttgccgccgcactgcgaccgcaacctcatcaccctgctcctccagggcgacgtcttcggcctccaggtctcctacaatggcgactggatcaacgtcgaccccgtccccgacgccttcgtcgtcaactttggccacctcctcgagattgcgacgaacggagtgctgaagagcatcgagcacagggcgatgacgaactcggcggtggcgaggacgtcggtggcgacgttcatgatgccgccgatggactgcctcgtcggaccggcgaaggagctcgtcggagacggcggccagccgcagtatcgcaccgtcacgttccgcgagttcatgcgcatctacaagaccgtcggcgcgcgccgcgacagcgtcgagaaggccttcaaaatctgatcctgacagcggccgccatgggggaatatgtgtatctgttacagtaatttacgaagatgaagctgattattagcaaccgataagtgtttcatcagcaattatatatgttgttgatgtactgattatatgtacatcgatgtaactgtacctgtaacaccctcaagaacctttaaaaatctataaatctaaataaaatgttcaaatggatttgatgcaaattggctataagcaaagtcccgagactagttctccctcgtgc

SEQ ID NO: 91613 - DNA, 497 bp, Oryza sativa
  Clone ID: PAT_MRT4530_90171C.1
aatggggcatatatacataagtttcccattatatatatatagcactccaaatattttcatatataccaggcctttttattgccaactatttttatcacataagtaagggggagaaattaataaaaaaagggatgcctcaaataattagtacaagtagctaactagctagcacacagaaaaacctttgcagtttgcacactcaccacagggatcaccttttacaggactaattgaaagggctgcatatttgcatggaaaaaaatccttttaaaccatgcaaaacttattaacggaaaaaacggtatacccatcaaaatatagcctaaaagaacaggagtaataatcatattatatccggaattaaatcagggaggtggagccacatcgacgtcgtcgtcgtcgtcgtccccgttgttggaaagggtgccaacaaagagggggctctccagtagcaatgcccatgcaaggggctcaaactcgcttttcgcctggggcca

SEQ ID NO: 91614 - DNA, 231 bp, Oryza sativa
  Clone ID: PAT_MRT4530_90172C.1
atggcctccccatccacccagcacggaggcaccgaagaggcagcggcggcggcacctcccggcaacgacagatcggtcgacgtcccgctggactgtctctgccccatagccgtcgcaattgtgcgggagctcaagatcggagaggatgacgatggaggggtagtgggcagccaatggtggggagatgaaagatatggagggatgaagaagtatatagagattgacatgtga

SEQ ID NO: 91615 - DNA, 462 bp, Oryza sativa
  Clone ID: PAT_MRT4530_90173C.1
atgccgaccaggcagagtaatgccgtcctcagtagaagtggttcagtttacgtgaagacgacagggacccagacagagggtccggcggaatcccagaggtcaggacaagtgaaaggcgccataattcagatgcacatgacctctgaattggacaagctcggacaaacaaaactaatactcctactcctatatgacaataatctccaactacaccagtacaagagtgcacggttatgtcttcttttggatggatgtatctcagtacccccaagtagacaaagatgcaaaagatggattcagagatggtgcagaaattcgttgcctggagaaagaaagtttgatgtgatggaaaaagttgaaagtttgaagaaaaaattgggatctaaacatggtgtcagtttggctcttgctaaggcgtatccaagtcttgatccatttgcatcatttgctccatgtcaataa

SEQ ID NO: 91616 - DNA, 1200 bp, Oryza sativa
  Clone ID: PAT_MRT4530_90174C.1
atgtcttcttcacttgctgtcctcctgctcgtgatgcggctcgccgccgccatggccgcctctcccaaaagctacatatcaagaaccaccgagcagcaggtgatcgccaccgtcgcgcccgccgtggacgtcggccagagcgcgcagcctttcctcacctcgccgtctgggtcgtacgccgcgtacctccgccgcgccgtggacagctccgccggtggcccgggcgccgacgcgtgctacgtccaaatccagcaggctggcggcggcgccggcggtggtggcagcgtgtgggagtcggagtgcacccttgtcggcggcgccgacgcgtgcgacctggcgttctcgccggtggggctcgagctcttcgccggcgggcactctctctgggacaccgggatcgacgccgagccgggaacgctgagccttgacgacggcggcgacatgaggatcgtgagcaaggacggcgtgtcggtgtggcaggcgagcggcgagccgtggacggggcagcagtgcggcgcggccgcgccggtctcgccgtcgccgacgatggacgtgctcccgccgccgtcgaccacaaccacagcgaagcttctgacgccgccggcgtcgaccctcgccggcgccgggagctcggacctgtctttcggagaccagctcgcgccaccggttgacacgtcgctgcccgcctcgcccgaccagccaccggttgacactatgcctgaccagccattgctgccgccgccgccagctgacgcgacacccgccacgccggacttgccgctgccaccaccaccgccggccgacacgcatgctctttccccgcccattcccgcacggcaaagaccccttccgggcgcaccaggtggcatagcactcccccatgttgcgcccgccggcggcggcatgccgcagcagcacggttcgccgcaccacctgccactgggagcgtcgccgccgccggaggccgccccggtgccggacgcgctggcgccgagcgctggccatggcgcggcggcgggggggctcccgatcggggggcaggggcagcagcagggcgcgtttggacagcaccaggtgctgaacggcgcggggcagccattggaggacagctccggcgagcggccaagaggagcgcacgccgccgtcgtcgtcacctccggcttggtttctctactgattgcacttggatttggcttctaa

SEQ ID NO: 91617 - DNA, 319 bp, Oryza sativa
  Clone ID: PAT_MRT4530_90175C.1
ggtacaagaagccaaacgtgagagctcagttcaaaactttagatatctaaaaaattaaatatgaaaggtatgcaaggacctcactaaaaacttgacagctataggatataagctcagctatgatcaacgggacactgcaacgtacgcaatgggtacccataccgttacagtgtggttaatttaacgaatgaggtagcttggccgaccgatcgaacgatcatgccctgcactgcttgatgcaggaacatcctccaatagaaaggttggtctcagggccgggctggcagttgtagtaggacgcgcctggttgcgagcactg

SEQ ID NO: 91618 - DNA, 1290 bp, Oryza sativa
  Clone ID: PAT_MRT4530_90176C.1
atgtcttcttcacttgctgtcctcctgctcgtgatgcggctcgccgccgccatggccgcctctcccaaaagctacatatcaagaaccaccgagcagcaggtgatcgccaccgtcgcgcccgccgtggacgtcggccagagcgcgcagcctttcctcacctcgccgtctgggtcgtacgccgcgtacctccgccgcgccgtggacagctccgccggtggcccgggcgccgacgcgtgctacgtccaaatccagcaggctggcggcggcgccggcggtggtggcagcgtgtgggagtcggagtgcacccttgtcggcggcgccgacgcgtgcgacctggcgttctcgccggtggggctcgagctcttcgccggcgggcactctctctgggacaccgggatcgacgccgagccgggaacgctgagccttgacgacggcggcgacatgaggatcgtgagcaaggacggcgtgtcggtgtggcaggcgagcggcgagccgtggacggggcagcagtgcggcgcggccgcgccggtctcgccgtcgccgacgatggacgtgctcccgccgccgtcgaccacaaccacagcgaagcttctgacgccgccggcgtcgaccctcgccggcgccgggagctcggacctgtctttcggagaccagctcgcgccaccggttgacacgtcgctgcccgcctcgcccgaccagccaccggttgacactatgcctgaccagccattgctgccgccgccgccagctgacgcgacacccgccacgccggacttgccgctgccaccaccaccgccggccgacacgtaccctgtctctcctgaccagccgctgtactcgtcgccaccgccggctccgacggcatttgttcctcacacgccattgccacccgtcgacgtgcctgctctctccccgccattgccgcacggcaagacaccttccggcgcaccaggtggcatagcactcccgcctgctgcgcccgccggcggcggcatgccgcagcagcacggttcgccgcaccacctgccactgggagcgtcgccgccgccggaggccgccgcggtgccggacgcgctggcgccgagcgctggccatggcgcggcggcgggggggctcccgatcggggggcaggggcagcagcagggcgcgtttggacagcaccaggtgctgaacggcgcggggcagccattggaggacagctccggcgagcggccaagaggagcgcacgccgccgtcgtcgtcacctccggcttggtttctctactgattgcacttggatttggcttctaa

SEQ ID NO: 91619 - DNA, 378 bp, Oryza sativa
  Clone ID: PAT_MRT4530_90177C.1
gggtgggggtctatatgttttatcaccggttttttattatattggaacttcagaatttcagacgggaatagacagggtaccaggggggggaaagctgtcatgccaaaggggccgcctctgagtgggcggaaccacgccgccggggggggcgaagaaaaacacggcgacgggggggccgatggcctccgcggacgcgacgggggacaagaacatggagaagaacaagaccaacgccagccgggttggggggggcgaggatggaaaggaacgcgggggagcaccccaggccccgaggcggggagggagaaggacacccgcggcgaaaaaacatgggggccgccggcgacccgggggagggccgcaaggacggcgggggtt

SEQ ID NO: 91620 - DNA, 6385 bp, Oryza sativa
  Clone ID: PAT_MRT4530_90178C.1
ctttgcacttgtctcgtccaatttagcctgcagagcttccatagagctctgcagttttgacaacttctgtgctttcgcttcttccaagtctgtcctcattctcttctctaactgcacacgccatgtaagttcttccactttcttttcgagtttatcctttgcttccttgagagcacctgtttctctagcttccattttaagttttctgagttccttccttgcaatctttcctctccatctacattgcgcaacaatggctgcgcgtttcaacttcttatggtacacatgagctgtatggcacctataacgggcctgaattttaactgctgccttagactgcttcttgtatctgaacgtatttcttgctgccatcgctcgcaatgccgtttgcactacaagaaccgaagcatttaggtgtttataggacctcctagcctgatgcatacgatggtttttctgaactttgatggcagctgctacccttcgcatttgatcaaacagtttacaagccaatcttcctctccatattgcctgaacagatatagatgccttcctccaattaacgaacttcttccgcatgatatgtgtccgtattttcccttgaatcgtttttgccgcagcaccgagcacttcagttctcctagcgtctaattcggccatctggccagctctcagaaaaacttttgttttgcctatctgaaatcccacaagacccttcttttcaagaatcctcttgcatgcaaccttttcgtcgcaatttccttcaagggcctcttgagcaagtattccaaagcgatgcaaaaactcataaaatgtgcgacgtgtaggataacctgcacagctgatcctgattgcctcaagtacaccaccacaacgcaactgttgcatgacattgacattctcaaaaatcgccggttttagcacattgtttggcttgacacatctgatataatgaggttctgtagagtttagtgtttccataagagcttgaagttgttgcttgaagcgtgctccaatcgaagagaacttggaggatttggatgtttcctctggcagaggaggaaaaagtccagagataaacgagcatttggaagcgcttagtaactcctggtgctcggccacaacatagtctttgtttttatcaaggaattggtcagattgatacaacaccttctcaataaggtcaagaacatcctgattatcaacaaactcaatatagctccaatcaatttgttctttggtatactcttcctgttccatcttgaaaacgtgctgattgaaatgttgttgcaatttttcatttgtataattaatacagaattgttcaaaactgttcaacttgaagctctcaaaaccatagatatccaagacaccaataagagatttagagttaggatcttgtccaattgagctgtttattttatcaacaagccagtcaaacaagcgggaatatattgtcttagctagaccgtccctgctgacagttgcattgtaaggatcaaggctcctttttataacctcctctggtgttaccatgacacgcttgcaaagagcatctcccaaggctccagaatcacacataagaagctcagcagttgtgtcaaggtggaacttagatttgtcatctttcaaaactgaggaatcgacttctttgcccttggcaaactcaatgttaccgatatgaaggatagctgcaacaaccctgaaaatagcatcctgttcctgagtactgatgccaacaatatccattgctcttctggtagccaagtattcatgagcatcactaaccccaaccaactcgtagcaatttgattgattaagataatgaaaagtcttaggatttcctaatttgtacttctcaacctcctcctgtggtgcggcacaaaggagatagaagcagtggtagttgcgttcaggatcagaaatttggcacacccgtgacctttctagcaagtaagttctcacagcagcacctgagatcctcccttgcttatcaaactgaatctcaacaaacttaccaaaccgactagaattgttgtttctgacagttttagcattgccaaaagcttcaaggactggatttgacgtctttccattggttgcttggatctcggcctcttcacctttgatcttaacaacttctccatcgacccaggcaatttcagggtcttcagcccaaacatgagaacctactataatattaactttcgtcccattgacgtgggagccggcgaagaaagtggggaggggaatctcgtcgccaccaacaatatcggccaagaatttgatggcgtgcagagcaacagaggagaaggagatggagaggaggaaacgacggttggtatttatcacatggtaaaattgtgcatctctgaggagatatttgcagtcacttggggcactagtgttggagctttcccactcgataaggctctcattgccgagaggacgggacgagtcgacaggcttccaacctgtgatgagctccataagaacgacgccgaaagagaacatgtctgatttctcggccagcttccatgcgtacttgggagccaaatacccaaatgtacccatcacacgcgtcgagacattggtgacatcgttcttcgccagcttggcaagcccaaagtgtgccacccgacaacgatcttgacgctcgttgccgaccagttcaagagatacctcacgaaaccccttctggcgtctggattggctgtactccgagctgaaatcctggctgccaaatgccattctttggaactgcctgatgtcggcagtgttcgcgacattgaacatctggctcttccccggctgcacaccattgctgaggtcaacatccgtcaaactgtcaagtactctaacgacctgtcccatctttggcctccgcgcagctgagtgccggatgcacgccgcagctgcctcgatcacgcggaacatctcaacatcatcatactccccatcgaggcgagggtcgacgagctcgtcgaattcttggttctcaattgcacggttcagcaatggcctcgaccactccacgaggctctcatcgccgaggggacgggacgagtcgacaggcttccggcctgtgatgagctccagaaggacgacgccgaaggagaacacgtccgatttctcggtcagctttcctgtggatgcatactctggagccaagtacccaaatgtgcccatcacacgcgtcgagacgtgggtgacgtcgttctcagccagcctggcaagcccaaagtctgccacctgagcttcaaagtgctcatcaagaaggatgtttgatgactttatgtccctgtggatgattcttggatgacaatcctcatgcaggtaggccaatccgcgtgctgagccggcggcgatcttgaccctcgtcggccagtccatcaccggccttcccctcccatggaggtggtggtgcagcgtgtcgttggagacgaagtcgtagacgaggaggcggtggtcctcggcgatgcagtagccgacgagggagacgaggtggcggtggtggacgcggctgatgatctccacctccgcctggaactcccgctccccctgcccgccgccgcccttgagctgcttcaccgccaccgccttgccgtccgcgagcgtcccctggaacacgcacccgaacccgccctccccgaggagcttgtcgcgcgcgaaccccgccgtgatgtcgtacagctcgtcgaacgtgaacgccttggtgttccccacgctcagctcgcccgacgccgccacgctcctcgccgccccgcccccctggctccccgtgctgtagttcgccgacgtcaaccgctgctgctgcccgtacgacgtcgactgtccgtacgcctgcccggatgacatcatcggcgacacgccctggctctggcccgcgctgaagttcatcgaccccgacgccgacggcggccgcaggaacggggcctcgccggacatgtgctgcggcgtgtacgacggcaccgcgaagcccgggtagtaccgctcggcttgcctccgcctccgccgctgcgacaggcaggcgaacatgccggcctattatgccgccgctgttgggcgtctacgacttcaccgccggcctgcctccgtcgccgccgagtggtgcctccgcctacacggctggcctattatgccgccgctgttgggcgtctacgacttcaccgccggcctgcctccgtcgccgccgagtggtgcctccgcctacacggctggcctattatgccgccgctgttgggcgtctacgacttcaccgccggcctgcctccgtcgccgccgagtggtgcctccgcctacacggctggcctattatgccgccgttgttggatgtctacatcctcaccgttggctcaccttcgttgccgtcgactggtgtttccgcttacacggctgacctattatgccgccattagtgggcatcttcgctttcaccgtcgaccgccttcgtcgccgccgactggtgtcttcattgttattgatggacgactttgttcccacattggccacttctgccatcaccaaggggaatattacaaagctaagatccagatccagatatgcataaaagggattcatggctttaagcttatctcttacgctccaggaatggatcagtcagaacatcaccaccggctcgcctcggccgccgccgactggtgtttccgcctgcacggctggcctattatgccgccgttgtttggcgtctacgtcttcaccgaccggcttgccttcgtcgccgccgactggtgtcctcgcctgcacggctggcctattatgccgccgttgttgggcgcctacgtcttcaccgaccggcttgccttcgccgccgccgactggtgtttccgcctgcacggctggtctattatgctgccgttgttgggcgtctacgtcttcaccgaccggcttgccttcgccgccgccgactggtgtttccgcctgcacggctggcctttatgccgctgttgttgggcgtctacgtcttcaccgaccggctgcctcgaccgccgccgactggtgtttccgcctgcacggctgacttattatgccgccgttgttgggcgtctacgtcttcaccgaccggctgcctcgaccgccgccgactggtgtttccgcctgcacggctgacttattatgccgccgttgttgggcgtctacgtcttcaccgaccggctgcctcgaccgccgccgactggtgtttccgcctgcacggctggcctttatgccgccgttgttgggcgtctacgtcttcaccgaccggccgcctcgtccgccgccaactggtgcttccgcctgcacggctggcctttatgccgcgttgttgggcgtctacgtcttcaccgaccggccgcctcgtccgccgccaactggtgcttccgcctgcacggctgacttattatgccgccgttgttgggcgtctacgtcttcaccgaccggctgcctcgactgccgccgactggtgtttccgcctgcacggctggcctttatgccgccgttgttgggcgtctacgtcttcaccgaccggccgcctcgtccgccgccgactggtgcttccgcctgcacggctggcttattatgccgccgttgttgggcgtctacgtcttcaccgaccggccgcctcgaccgccgccgactggtgtttccgcctgcacggctgacctattatgctgccgttgttgggcgtctacgtcttcaccgaccggccgccgcatccgccactgactggtatcaccgcctgcacggctggcctgttataacgccaactgattctatcttcttcacggctggctacatcgctgtcactactaataggcatcagtatcttcaacacaagctgcctacgtttgccatggctgccgactggtttcttcacttccatggctgcatgattctgccagtgttgattggccttaccatcttcatcgccggtcgtctcgcctgctgctgactagtgccctcgcctctacatctggtttatacagctaccactactgatggacatcatcgtcttccgccgccgacttgtgttatgccgccgtcgactggtgcttttatcttcacaactgcgcgtcttcactaccggttcacttcatcacggcaacacaactttgtcatcatggtggagcgacttcatctttattatcttcggtaccagcaaactctattgctgctacttcacaagttttgctacatcaccaaccatgacgttgttgtgaatctcgacatctcggcatgcgatgccatgttattttactacaacaagtggctctccaatattcaggatttctacttggacatcttcaacacatatcttcaatcaagcaatgactactcgacgacaagaagctataattctcgactctatgttcagttgtttcccaac

SEQ ID NO: 91621 - DNA, 257 bp, Oryza sativa
  Clone ID: PAT_MRT4530_90179C.1
gcagtgcagctaaattacctactaaagggaatagcttgcaacccgcggtttcaagcttgctctcctctccccccaatccttccctcccgagtggcagtgtgctcgacgggattgcgcagaaggaggccaatggcagcagcaacggggagcacaccacccgcccgccgccgacgccctcgccgctccggttctccaagttctcacaggcgaacctgatgatcctcgtcaccggcggagctgtcttcatcggctcgcac

SEQ ID NO: 91622 - DNA, 757 bp, Oryza sativa
  Clone ID: PAT_MRT4530_9017C.1
ttcaaggagggcgtctacttcctggatgacgggagactctacgatgaggcgtcccaattcgtgaatccccttccccagtacccctgcagcgacaacggcaagtggctgccgccgccgccggcggcggcggcggaggcggttaccggccgcgtggacaagctcttgccggagcaaggcccgtcgaagggatgagggagaaatgggatggacgctgtttgccatcaccgtcaacgaccgttgactgcgccacctgcatccacgcgtggaacaaccggatcaagcacaacggcagcagcaagacggccaccaccgccggagcacccaacccgctggcccaccgtcgtcaccgcggctggatcgggagatcccctgcgccagatccgccgccaccgctctccctaccttcaagtttcgccgccgccgagtccccctcctctggatctgccgccgccgccctccctacctccaagcttcgccgccactcgagcccgccgcgtcgacatcaccgcagccgctctcgtcgagcatcgcgatgagtggcgggatggtgccgagcatctcgctcgtggcggcgaccagtgttgaggcagggggtcgtggaggagcgtcggcggtcgtggaggagcgtcggcggtcgtggaggtggtggcaggcggtcgtggcggagcgccggcggtcgccgaggagacactgtgtgctccgtccaagtgggacgagctcgtccggccaattttgccggatgggtttgtcccggatc

SEQ ID NO: 91623 - DNA, 3582 bp, Oryza sativa
  Clone ID: PAT_MRT4530_90180C.1
atggactacttcaacgggacggacgcgcactgcggcggcgccgtcggcgccatgggctcctacgtctacaacctcacctcctcctacgccgaccagaagaacgaggtctccatcgtcgccacctccctcaccatgctcctcctcgccgccctcctcctcgccttcgacctcctcgccggcgccgccacgctgcgccccgccgcgcgcctcgtcctctccgtctccctcgccctcttcctccccgtcacctcctacctcttctccgaggccaagaacgacgtccccggcgccggcgacgccaccgacgccgagctgcctctgcgtgcgcggctcattctcgcatggatgctgctcgtcgagctgctccgcaagaaggtggaggccacggtcaccggcactaagggcgccagtggcggcggccccaccagccgtgccggccgtgtcgccttcctcggttacctcgtcttcttcaacgtccacggcgccggccggaaggcggtgttcggcgcgctctgggtcgtcgccgctgccaagctggtgcagcgcgtcgcgattggtgagttcgttaagcgctccttcgccttcggcaagaatccgcagcttctcgccggctacatggcgcagacgctggagcagcaggagcggcgcccgcggcgagacgacgagctcatgacgagctgcaagtacgccgtcatgggagaggagaacctgcagagggaggccgggccgaacggctacctcgtcgacctgcgcaagacagtcgccggcgatgacgacgccgtcgtcaccgtgggcagagtgtggtcgctcgccgagagtgaccagctgctggtgtccaacccgaagctgaagcggctctgcctctcctacgctctcttcaagctgcttcgccgcgagttcgaagagacgccgttgaccgccgcggaggccggcgactgccgtgagctcatcttccgaggcctgtgcaacgacggcggcgccgcgacggcggcggcgacgctgttcgaggtgatcgacgacgagctcgggttcgtcaccgagtactaccactccgtcctccctgtgatgctcgcgagccccttcttcctcctcgtcaactacatcgtcttccccgtcctccatcaagagggacaactacgccgtgtcgttcggcttgctgaggatgacgaggtgcctcctgagcagagtactccggtcgccgtcgcgctcttctcctccattgacctctccatcacgttcctcctcttcctcaccatcctctacgaggaggcgtgggagctcgccgtcttcctcctctccaactggctcaccgtctccatggtctgcgactacgccgtcaagccgccgagccggctccgccgcgccgccatccgcggcgtccagtgggtgacgaacaggatgagccgccgcaattacctccgtgtcaagcagtactccgtgctctggttctgcaggctcccgctgaagctgccggcggcggccgtgccggaggaggcgaagcaatccatcgtggagtacctcgcggcgtacgacggcgccgtcgccccgctcagcgccggcaggtcggcggtggcggcgaggaacgccctgtgcaacgcgtcccggctgatctcgtcggcatgcgagagcggcagcgtcgccgaggtgatactcacatggcacatcgccaccagcctcctggaggtgaggtgcccgccgcacgcggaggaggaggcggcggcggcggcgaggtcgagcacggtggcgacgcggctgtcccgctactgcgcctacctggtggcgttccgccgggagatgctccccgacgacgtcgactgcacggcgcgggtgtacggcgccatgaccacggagctcaagcgggagctgggtctcaagggctactacttctcgacggacgccacccggtacgggaagatgatggctatcgccggcggtcaagaagacgacgaggcggcggcggaggagacgacggtggtgcgcaagggggcgaggctggggaaggcgctgatggacgaggcggccggcggcgacgaggcggcggtgtggaagctggtggccgacgtgtggacggagatcgtcgtgtacgtggcgccggcgagggacgccgagcaggtgagggcgcacggcgaggcgctggcgcgcggcggcgagttcgtcaccgtgctctgggcgctcgtcacgcacaccggcattgcccgccccgccgccgcgtcggacaccctgacgttgtacggcctggtgtacaccacgccggcgaccttgaaccgcacctgcgccgccaccgccacgttgaatggcccgtgtggatattatggccacgccgatgccttcctgccgtcctgcgtcgtgctgatggacaccaacgccgcccgcgactgcgacctccgcctcctccgctccgtctcggagaatggatcagtcagaacatcaccaccggctcgcctcgaccgccgccgactggtgtttccgcctgcacggctggcctattatgccgccgttgttgggcgtctacgtcatcaccaccggctcgcctcgaccgccgccgactggtgtttccgcctgcacggctggcctattatgccgccgttgttgggcgtctacgtcttcaccaaccggcttgccttcgccgccgccgactggtgtttccacctgcacggctggcctattatgccgccgttgttgggcgtctacgtcttcaccgaccggcttgccttcgccgccgccgactggtgtttccacctgcacggctggcctattatgccgccgttgttgggcgtctacgtcttcaccgaccggcttgccttagccgccgccgactggtgtttccgcctgcacggctggcctttatgccgccgttgttgggcgtccacgtcttcaccgaccggcttgccttcgccgctgccaactggtgtttccgcctgcacggctggcctttatgccgccgttgttgggcgtctacgtcttcaccgaccggccgcctcgtccgccgccgactggtgcttccgcctgcacggctggcctattatgctgccgttgttgggcgtctacgtcttcaccaaccggccgccgcatccgccactgccgactggtgtttccgccggccgcctcgtccgccgccgactggtgcttccgcgtcttcaccgaccggcttgccttcgccgccgccgactggtgtttccgcctgcacggctggcctttatgccgccgttgttgggcgtctacgtcttcaccgaccggcttgccttcgccgctgccgactggtgtttccgccgaccggcttgccttcgccgccgccgactggtgtttccgcctgcacggctggcctttatgccgccgttgttgggcgtctacgtcttcaccgaccggcttgccttcgccgctgccgactggtgtttccgccgaccggccgccgcatccgccgctgactggtgtcaccgcttgcacggctggcctgttataacgccaactgatgctatcttcttcacggctggctacatcgctgtcgctactaataggcatcagtatcttcaacacaagctgcctacgtttgccatggctaccgactgttttcttcacttccat

SEQ ID NO: 91624 - DNA, 216 bp, Oryza sativa
  Clone ID: PAT_MRT4530_90181C.1
ggccggaattcggaattccaggacgcgtccgttctcctgttacagtcgacatcccctttctcgacccctattgctgctgaaggccggaaggatgagcgccactgacgggagggagatgaactccggacgcgtcgctatttatactatagggttgcgctaggctgaggagttctggccgtagcggtgggacctttctatggcgatggaagttgaaca

SEQ ID NO: 91625 - DNA, 799 bp, Oryza sativa
  unsure (1)..(799): unsure at all n locations
  Clone ID: PAT_MRT4530_90182C.1
gttaaaaacnnanaaacnnnaacaaaaaagacaaananaaaccncaacaacnataaaaagcgagaacnaaaaaaacgcnntgaggaaacnctccgacacaagcaagggatgggcagggcccagnaatccttaaggaaaccnttaagatagagaaatccnccccagngnggcatgacaagagaaaatttcagaggccaacggaaggaggagagagaggcancagagattaaccacacanctnttcaggcnccntnanttaaggtnggnagctnccgntnagtnttanccaaagttttccacntgaggcangntacngatgtatttaaccaaangntnccggtngaacntgagagcaaaaaaaacnccctngagnccgatttaacncaccanacntnttnaaatncgacactttngaccagaccaccaatncncacacncctgtnttcgnacacaagacttgngaagattaaaatnaagaccgnaaagaaagagggcacccgancaaacccggaattangncacccntattcccncaaaaaacaaggtttnggangnacaagcacttagaaaaaattggggnccgnaaaantgggggccaanaattttagatttnaagggccgnttttnaaacttgatnttgtntaggttgtnaaaaaaaatttnacgnacggtnnnaaaaaaatnttttntataggntnttaaaaaaattnccaggaccttcnaatnatttntntttntnaaaccaccnaaaattaaagngancacggaaaaaaantaccggggaccaaaaaaaatnccc

SEQ ID NO: 91626 - DNA, 2630 bp, Oryza sativa
  Clone ID: PAT_MRT4530_90183C.1
atggcgccgcgtttccccgagcatctacgtcgatcggccgcgagtctactccgccggcttgtcctcgccaccgccattgctgatagcaacaacgacctcaccaccggcctgcctccgtcgccgccggctggtgtccttgcctatacggttggttggtcacaccaccgttcatgggcgtccacgtcttcaccaccggcctgcctccgtcgccgccgactggtgtccttgcctatacggttggttggtcacaccaccgttcatgggcgtccacgtcttcaccaccggcctgcctccgtcgccgccgactggtgtcttcgcctatacggttggttggtcacaccaccgttcatgggcgtccacgtcttcaccaccggcttgcctccgtcgccgccggttggtgcctccgcctacacggctggtctattatgccgccgccgttgggcgtctacgacttcaccgccggcctgcctccgtcgccgccgggtggtgcctccgcctacacggctggcctattatgccgccgctgttgggcgtctacgacttcaccgccggcctgcctccgtcgccgccgagtggtgcctccgcctacacggctggcctattatgccgccgctgttgggcgtctacgacttcaccgccggcctgcctccgtcgccgccgactggtgtcttcgcctatatggttggttggtcacaccaccgccgttgggcgtctacgacttcaccgccggcctgcctctgtcgccgccgactggtgtccccgcctacacggtcggttggtcacaccaccgttgatgggcatcgtcatctacaccgccggcctgcctccgtcgccgccgagtggtgcctccgcctacacggctggcctattatgccgccgctgttgggcgtctacgacttcaccgccggcctgcctccgtcgccgccgggtggtgcctccgcctacacggctggcctattatgccgccgctgttgggcgtctacgactccaccgccggcctgcctccgtcgccgccgagtggtgcctccgcctacacggctggcctattatgccgccgctgttgggcgtctacgacttcaccgccggcctgcctccgtcgccgccgagtggtgcctcctcctacacggctggcctattatgccgccgttgttggatgtctacatcgtcaccgttggctcaccttcgttgccgtcgactggaatggatcagtcagaacatcaccaccggctcgcctcgaccgccgccgactggtgtttccgcctgcacggctggcctattatgccgccgttgttgggcgtctacgtcttcaccgaccggcttgccttcgccgccgccgactggtgcctccgcctgcacggctggcctttatgccgccgttgttgggcgtctacgtcttcaccgaccggcttgccttcgccgccgccgactggtgcttccgcctgcacggctggcccttatgccgccgttgttgggcgtctacgtcttcaccgaccggccgcctcgtccgccgccgactggtgcttccgcctgcacggctggcctattatgctgccgttgttgggcgtctacgtcttcaccgaccggccgcctcgaccgccgccgactggtgtttccgcctgcacggctggcctattatgctgccgttgttgggcgtctacgtcttcaccgaccggcttgccttcgccgccgccgactggtgtttccgcctgcacggctggcctttatgccgccgttgttgggcgtctacgtcttcaccgaccggcttgccttcccgctgccgacttgtgtttccgcctgcacggctggcctttatgccgccgttgttgggcgtctacgtcttcaccgaccggccgcctcgtccgccgccgactgatgcttccgcctgcacggctggcctattatgccgccgttgttgggcgtctacgtcttcaccgaccggcttgccttcgccgccgccgactggtgttcccgcctgcacggctggcctttatgccgccgttgttgggcgtctacgtcttcaccgaccggcttgccttcgccgctgccgactggtgtttccgcctgcacggctggcctttatgccgccgttgttgggcgtctacgtcttcaccgaccggccgcctcgtccgccgccgactggtgcttccgcctgcacggctggcctattatgccgccgttgttgggcgtctacgtcttcaccgaccggcttgccttcgccgctgccgactggtgtttccgcctgcacggctggcctttatgccgccgttgttgggcgtctacgtcttcaccgaccggcttgccttcgccgctgccgactggtgtttccacctgcacggctggcctattatgctgccgttgttgggcgtctacgtcttcaccgaccggccgccgcatccgccgctgactggtgtcactgcctgcacggctggcctgttataacaccaactgatgctaccttcttcacggctggctacattgctgtcactactaataggcatcagtatcttcaacacaagctgcctacgtttgccatggctgccgactggtttcttcacttccatggctgcatgattctgccagtgttgattggccttatcttcttcaccgccggtcgtctcgtctgctgctga

SEQ ID NO: 91627 - DNA, 531 bp, Oryza sativa
  Clone ID: PAT_MRT4530_90184C.1
ccagacccaaaacattaaaaaacctttttttaatccctgggcacaaagccacatacactcctatccccctttactaaaatccctttcactcataaatccagcttttattggggggggccaaacgaccttttctgtgcagcccttgcccatcaacaagccctctcttttttaaccccaggcttcaaggaaaaaaaaaagaacctagggttaattaaaattttggcaaatcaagattagacaactggctgtccaaacaaacaagcagcttttacagtaagggtcggttgccgagcagtattaacctatttgtcaacgaaggggttgggggttgggagtttaaaatcttatagagacttttcttgggtggccaaattgcgagcttgaagggggaagaaaattctaaaaggggtggtatttgggtttggggggggataagcggggatgggatgatgaaaagggggaaaaagaaaccgggaaaagttcaccggaagcgtcccccgtcggcgagcttcctggggcggccccgttttt

SEQ ID NO: 91628 - DNA, 2082 bp, Oryza sativa
  Clone ID: PAT_MRT4530_90185C.1
atggcgttgagtctggaagggcctatgtcttcgttattaccgctggcttgcctccgtcgtcgccgactagtgttctcgcctatacggttggttgatcacaccaccgttgatgggcatcttcgtcttcaccgactggtcaccttcgtcgccgccgattgatgtctttgccttcatgactggcttatttcatcgccattgacggatgacttcaacatcaccaccggcttgccgtcgtcgccgccgactggtgtcctcacctatacggttgggtagtcacaccgccgttgttgggcgtcgttttcttcactgaccggctgcctcgtccgccgtcgactggtgttttcgcctatatgattgggtggtcacaccgccgttgttgggcgccgttttcttcaccgactggctgcctcgtccgccgtcgactggtgttttcgcctatacggttggttggtcacaccaccgtttgttgggcgtctacgtcttcaccgaccggcttgccttcgccgccgccgactggtgtctccacctgcacgactggcctattatgccgtcgtttgttgggcgtctacgtcttcaccgaccggcttgccttcgtcgccaccgactggtgtctcagcctgcacggctgacctattatgccgccgtttgttgggcgtctacgtcttcaccgaccggcttgccttcgccgccgccgactggtgtctccacctgcacggctagcctattatgccaccgtttgttgggcgtctatgtcttcaccgaccggcttgccttcgccaccgctgactggtgtctccgcctgcacggctggtctattatgccgccatttgttgggcgtctacgtcttcaccgaccggcttgccttcgtcgccgccgactggtgtctccgcctgcatggctggcctattatgccgccgttgttgggtgtctacgtcttcaccgccggctcgccttcgccgccgccgactggtgtcttcgcctgcacggttggtttattatgccgccattgtaggacgtctacatcttctccgactggccacctcatatgacgccaactggtgctatcgtcttcacggttggccacgtcgccaccaccgcaaacaggcatcatcaccttcaacgcaagctgtctacgtctgctgccgactggtttctttacttccatggctacatgattctgccagtgttgattggccttatcgtcttcaccgccgggtcgccttgtctaacgccgactggcttgttcgcctccacggctgcgcgtcttcatcgtcattgactggcgtcatcgtcatcgccggtttgctttcaccgccgcccattgtgacttcaccttcatggctggcctattttaccaccgttaaagaacatctccgttttcgtcattattctacttcttccgtcgccaactggttctgtcgccgccgactcgtgttcacttcatcacagctatgcaactttgtcaccatggtggagctacttcatcttcattgtcttcggcaccggcaaactctattgccgctacttcgcaagttttgctacttcactagccatgacgtctacaagagcttcgacatctcggtatgcgtcaccaaatatgatgccgtgttattttactacaacaagtggtgctccaatattcaagatttctctccggacatcctcaatacatatcttcactcaagtgatggctactcgacgacaagaagctacagttctcgactctatgttcagttgtttcccaactaatcaaagagttgggggctacacaaatacaagactctcaaaatttgacaagatgaagcaatcaatcaatcaacgattgttatttcatcttcacggatgacctactatgcaaacgctgatgagcatcttcatcattatcatcagttgctacactgctattgactggatcaccgacatcgtcatcttcatcaatatcctgtcaagcctcttcaacatagcctattctactgctgtttgatgggcaacttcgtcatcatagtcaatcatctatgattgctacttatcatcattactgtcggttgcgtttgtcgtcgccgactattttcttcatcctca

SEQ ID NO: 91629 - DNA, 2196 bp, Oryza sativa
  Clone ID: PAT_MRT4530_90186C.1
tccccctagccacctcagcatcaccccgccacgtcggcagggggacggcgccaaagaggctggcgccggccaagacaggtgccccacctgccaggtctgcttcaagcgcgggcataccgcagcagactgctggtatcgcttcgacgaggactacgtcgcagatgaaaagcttgccgctgctgctactaactcatatgatcatattaccggtgagctagagaaacttaccaccaaggaaaagtacaacggcggcgagcagattcacacggctagcggagcagcaaacaagcccttggcaccgtcaagctatccttgtccaggtggcatagccgcgattgatgctggtcatggactcgaggcgtctcagctttccggtcgatcggccgcgagtccactccgccggcttgtcctcgccaccgccattgctgatagcaacaacgacttcaccgccggcctgcctccgtcgccgccgactggtgtcatcgcctatacggttggtcggtcacaccaccgttcatgggcgtccatgtcttcaccgaccggctggccttcgccgccgccgactggtgtttccgcctgcacggctggcctattatgccgctgctgttgggcgtctacgacttcaccaccggcctgcctccgtcgccgccgactggtgtcctcgcctatacggtcggttggtcacaccaccgttgatgggcatcgtcatctacaccgccggcctgcctccgtcgccgccgagtggtgcctccgcctacacggctggcctattatgccgccgctgttgggcgtctacgacttcaccgccggcctgcctccgtcgccgccgagtggtgcctccgcctacacggctggcctattatgccgccgctgttgggcgtctacgacttcaccaccggcctgcctccgtcgccgccgattggtgcctccgcctacacggctggcctattatgccgccgctgttgggcgtctacgacttcaccaccggcctgcctccgtcgccgccgattggtgcctccgcctacacggctggcctattatgccgccgctgttgggcgtctacgacttcaccgccggcttgcctccgtcgccgccgagtggtgcctccgcctacacggctggcctattatgccgccgctgttcggtgtctacgacttcgccgaccggctggccttcgtcgccgccgactggtgtccccgcctatacggttggtcggtcacaccaccgttcatgggcgtccacgtcttcgccgaccggctggccttcgccgctgccgactggtgtttttgcctatacggttgacggacttcgccgccgttaatgggcttcatcatctacaccactggcttggttccactggcgccgactggtgtttttgtcaccatcgatggactgcttcgttcccacatcggctacttttgctgtcaccgagggaatattacaaagctaagtcatcatttattttattctttatatgatattttgtcttttcctttgcctcactacatcaactggatccagatccagatatgcataaaagggattcatggctttaagcttatctcttacgctccaggaatggatcagtcagaacatcaccaccggctcgcctcgaccgccgccgactggtgtttccgcctgcacggctggcctattatgccgccgttgttgggcgtctacgtcttcaccgaccggcttgccttcgccgccgccgactggtgtttccgcctgcacggctggcctattatgccaccgttgttgggcgtctacgtcttcaccgaccggcttgccttcgccgctgccgactggtgtttccgcctgtacggctggcctttatgccgccgttgttgggcgtctacgtcttcaccgaccggccgcctcgtccgccgccgactggtgcttccgcctgcacggctggcctattatgccgccgttgttgggcgtctacgtcttcaccgaccagcttgccttcgccgccgccgactggtgcttccgcctgcacggctgacttattatgccgtcattgttgggcgtctacgtcttcaccgaccggccgcctcgaccgccgtcgactggtgtttccgcctgcacggctggcctattatgctgccgttgttgggcgtctacgtcttcaccgaccggccgccgcatccgccgctgactggtgtcaccgcctgcacggctggcctgttataa

SEQ ID NO: 91630 - DNA, 1161 bp, Oryza sativa
  Clone ID: PAT_MRT4530_90187C.1
atgagcagcggccgcgtgggcgacaggatcgccatcccggcggccggcacggcccggcgccggcggcgagacccgacgaccgggccggaatcgccggtctaccttgagggcagccgttggtcgctgtcgccggcctaccaaccgagccgccgtcgtcgtcacgacgaggaagggtactctcgccgccgcggccgcagccggagcaacagcccccgccgacgtcgtcgtcgtcggccaagaagctgccggagccgcagccgcacacgcagctacgagtgcgaggacagccggtgctgccacacgaggccgtcgccgcgctccgacgacagggaagacgacgacgacgagcaggatgggtcgtggtaccatccccctgcggataacgagttcaccgtccgcatcgacggcatcggcgccgacgacggcatcttccggtgcgacggatgcttcgccatgctctcctctcccatctacgagtgtgcgaacggggatgtcatctgcgagagatgcagctacgacgacggcggcgccagggtgtgcaggaaatgcgggacgatggagctcgcccgcagccgcgccatcggccacctgctccggtgcatccggttcgcgtgcaagaaccgcaggtacgggtgcccgtcgttcctcccgcggcaggacatggacgagcacgagctctcgtgcgaccacgagccctgcttctgcccgatccgccgctgcggcttcgccggcgccgccgactccctggcgcgccacctgaccgcgcggcacggctggggccgcctccgcgtcgcgtacggggaggcggcggtggtgcccgtccagtcgccgaccatcctccgcgccgacgacgggaggatcttccacctcagctgcacgcgggagcgcggcggcggcggcggcaccgccatgtccatggtgtgcatccgccccgaccacgtcgccggcgccgaggaggagttcacctacgaggtgaggacggcgtgccagcggctgcagatgcaggcggcggtggagggcacgtcgctccggtacgggatgaaggacgcggtccaggccagggtgaccgtgcccgatgacatgctgctccggcagggcgacgccgtccaggtgttcgtccgaaaggcgacgtccgccgccggcgccgccaataacaactga

SEQ ID NO: 91631 - DNA, 2990 bp, Oryza sativa
  Clone ID: PAT_MRT4530_90188C.1
aacatgagaattggtccccaaacaggagtagggtattacctctcattgagagggcctgaacctgtctaaatcctttgtctccacatccatccacttttaggtctcgtgcgctaccccgttttattattgccgaattcatgtttcgacagttggcgcgccaggtaggggttgcgtcgagtttcctatcaacgagcacgatggaattaacttcatgagtcgccgacttcgttttcgcttcgggagttttcacttcctttccgtcgaccacttcttcaagctcctcttctctgacttgatccaaatcagtcagggggaaactcaatctgatttttatcattatttatcatattgatttttaatctcagattaatttcttgctattttttgttgttgttcgcatataacaacaacgacttcaccgccggcctgcttccgtcgccgccgaccggtgtcatcgcctatacggttggtcggtcacaccaccgttcatgggcgtccatgtcttcaccgaccggctggccttcgccgccgccgactggtgtttccgcctgcacggctggcctattatgccgccgccgttgggcgtctacgacttcaccgccggcctgcctccgtcgccgccgactggtgtttccgcctacacggctggcctattatgccgccgctgttgggcgtctacgacttcaccgccggcctgcctccgtcgccgtcgagtggtgcctccgcctacacggctggcctattatgccgccgctgttgggcgtctacatcctcaccgttggctcaccttcgctaccgtcgactggtgtttccgcctacacggctggcctattatgccgccgctgttgggcgtctacgacttcaccgccggcctgcctccgtcgccgccgactggtgtttccgcctacacggctggcctattatgccgccgctgttgggcgtctacgacttcaccgccggcctgcctccgtcgccgccgagtggtgcctccgcctacacggctggcctattatgccgccgctgttgggcgtctatgacttcaccgccggcccgcctccgtcgccgccgagtggtgcctccgcctacacggctggcctattatgccgccgctgttgggtgtctacgacttcaccgccggcctgcctccgtcgccgccgagtggtgcctccgcctacacggctggcctattatgccgccgctgttgggcgtctacatcctcaccgttggctcaccttcgctgccgtcgactggtgtttccgcctacacggctggcctattatgccgccgctgttgggcgtctacgacttcaccgccggcctgcctccgtcgccgccgagtggtgcctccgcctacacggctggcctattatgccgccgctgttgggcgtctacgacttcaccgccggcttgccttcgtcgccgccgactggtgtcctcgcctgcacggctggcctatcatgccgccgttgttgggcgtccacgtcttcgccgaccggctggccttcgccgctgccgactggtgtttttgcctatacggttgacggacttcgccgctgttaatgggcttcatcatctacaccactggcttggttccactggcgccgactggatccagatccagatatgcataaaagggattcatggctttaagcttatctcttacgctctaggaatggatcagtcagaacatcaccaccggccgcctcgtccgccgccgactggtgttctcgcctgcacggttggcctattatgccgccgctgttgggcgcctacgtcttcaccgaccggctcgcctttgccgccgccgactggtgtcctcgcctgcacggctggcctattatgccgccgttgttgggcgcctacgtcttcaccgaccggctcgcctacttcgccgccgactggtgtccacgcctgcacggctggcctattatgccgccgctgttgggcgcctacgtcttcaccgaccggctcgccttcgtcgccgccgactggtgtccacgcctgcacggctggcctattatgccgccgctgttgggcgcctacgtcttcaccgaccggctcgcctttgccgccgccgactggtgtcctcgcctgcacggctggcctttatgccgccgttgttgggcgtctacgtcttcaccgaccggcttgccttcgccgctgccgattggtgcttccgcctgcacagctggcctattatgccgccgctgttgggcgcctacgtcttcaccgaccggctcgccttcgccgccgccgactggtgtttccgcctgcacggctggggcgcgtcttcaccgaccggcttgccttcgccgctaccgattggtgcttccgcctgcacggcagacttattatgctgccgttgttgggcgtctacgtcttcaccgaccggccgccgcatccgcagctgactggtgtcaccgcctgcacggctggcctgttataacgccaactgatgctaccttcttcacggctggctacatcgctgtcactactaataggcatcagtatcttcaacacaagctgcctacgtttgccatggctgccgactggtttcttcacttccatggctgcatgattctgccagtgttgattggccttatcttcttcaccgccgttaccactactgatggacatcatcgtcttccgttgccgactggttatgccgccgccgactagtgcttttatcttcacaactgcgcgtcttcgctaccagtttgcttctgttgccgccgactcgtgttcacttcatcacggcgatgcaactttgtcatcatggtggagcaacttcatctttattatcttcggcactggcaaactctattgctgctacttcgcaagttttactacttcaccaaccacgacgtctttgtgagcctcgacatctcggcatgcgatgccatgttattttactacaacaagaggctctccaatattcaggatttctacttggacatcttcaacacatatcttcaatcaagcaatgactac

SEQ ID NO: 91632 - DNA, 429 bp, Oryza sativa
  Clone ID: PAT_MRT4530_90189C.1
atgcggagggtcgggcggcgaactgcggcgcacaggggcgggcagcagacgacgacatcgtggcgacgggcgagtggaggcggctgcggcgtcggcgtgccgatcgagcggttcctgaacgatcggctcgccgtcggcgtgacgacgcccgtgctgctgttcggcgacgagggcatggcggtcacccggggtgacgtcgcgcaggcggtgacgacgctgatggacggcggcgagcacgttggggagtggaggaggaaggcgaaggagtacgacgatggctgggcgatgtggcggagctggagcccgcgctggaggtggtcgagatggagtccgcgagggcgcacgtggagctggagctcgaccgcgcaaggaagtggacgacaacgccgccgccaacgccacatcgcgccatcgaatgctgcagcctag

SEQ ID NO: 91633 - DNA, 1101 bp, Oryza sativa
  Clone ID: PAT_MRT4530_9018C.1
atggactcgccatggcgcgacctcgacgccgacgtgctcggattcatcctcaagcgtctcccgtgcctcgtcgaccggcgccgcatggcccgagtctgccgcaactggcgcgtcgccgtcaagcctgagcagccgcggccggggacgaggccgctcccatcgatcctcgtcccgcgcgccgacgggccttccttcgcgtgcgccctcgccggctgcgccacccacgccttccgccccccgctcccggccgacgcacgcaccgcgcgctacttcggcgcctacgacggtggctgggtcttcgtcgccttcggccaaatcctggactacgcgctactcagcctccgcaacggcacgcgattccacttccccgacacgggcacggacatggtggccgcgaccctctcttcgccaccggatcatcaagttgtggagaaggcgactgctgttgagttcgtcaccacgtcagttctggaggatgtcatacaccacaagggaagcttccatttcctcaccagggaagaaaacctccatgtttttcctgtagcgggcttccacgaagacgacgacggcaatctggagataccgcccatggtggttcgccgcttctcgcgtggtgggcgagattacggcggagccatcgctgttcgttacctggtggagtccggcgagaatctcctcatggtcgtcaggctcgttcctcatcctccccaactgccgccggggacatgggcgttcaaggtgttcgagatggtgcatgagacgcccatcaacaacgacggggcaccatacgcttggaaggagctggaatcgctgggtgggcggatgttgttcgtcgcgcgaggctgctccagatcgtacgacgcggacaagtatccgggcgccgagttcaacgagggcgtctacttcctggatgacgggagactctacgatgaggcgttccaaatcttgaatccctttgcccagttcccctgcagcgacaacggcaagtggctgccgccggcggcggcggcggcggcggaggcggttaccggccgcgtggacaagctcttgccggagcaaggcccgtcgtactacacgccgccggtttggattctgccgtga

SEQ ID NO: 91634 - DNA, 1473 bp, Oryza sativa
  Clone ID: PAT_MRT4530_90190C.1
cacaactggcctattagtgccggcgttgaagggcttctaccttttcatcgaccggccgcctcgtccgccgctgactggtgtttccgcctgcacggctggcctattatgccgtcgttgttgggcgtctacctcgtcatcgaccggccgcctcgttcgccgccgactggtgtttccgcctgcacggctggcctattatgccgccgttgttgggcgtctacctttccaccgaccggccgcctcgtccgccgcggactggtgtttccgcctgcacggctggcttattatgcccccgttgttgggcgtctacctcttcacgaccgggcttgccttcgccgccgccgactggtgttttcgcctatacggttgccggactccgccgctgttaatgggcctcatcatcgacaccaccggcttggttccactggcgccaactggatccagatccagatatgcatagaagggattcatggctttaagcttatctcctacgcttcaggaatggattagttagaacatcaccaccggcttgccgtcgtcgccaccgactggtgtcctcgcctatacggttaagtggtcacaccaccgttgttgggcgtctacatcttcaccgaccggcttgccttcgccgccgccgactggtattcctgcctgcatggccggcctattatgccgccgtttgttgggcgtctacgtcttcaccgaccggattgccttcgccgccgccgactggtgtctctgcctgcacggctggcctattatgccgccgtttgttgggcgtctacgctttcaccgaccggcttgccttcgctgccgccgactgcatcttcttcgaccggccacctcgtatgacgccaactggtgctatcgtcttcacgactggccacgtctccgccactgcaaataggcgtcatcaccttcaacgcaagctgtctacgtctgctgccgactgctggtttatactgctaccactactgatggacgtcatcgttttcattgctggccgccttgtctgacgccgactggctcgttcacctccacggctgcgcgacttcgtcatcattgactggcatcatcgtcatcgctgtttgcttctgttgctgctgactcgtgttcacttcatcacggctatccaactttgtcatcatggtggagcaacttcatctttattatcttcggcaccggcaaactctattgctgctacttcgcaagttttgctacttcaccaaccacgacgtctttgtgaacctcgacatctcggcatgcgatgccgtgttattttactacaacaagtggctctccaatattcaggatttctacttggacatcttcaacacatatcttcaatcagccaatgactattcgacgacaagaagctaaagttctcgactctatgttcagttgtttcccaactaatcaaagagtcgggggctacacaaatacatggctcaaaattcgacaagctttatgtcaaga

SEQ ID NO: 91635 - DNA, 2508 bp, Oryza sativa
  Clone ID: PAT_MRT4530_90191C.1
atggtgggagccatccagaaccttctgcgcccgttccgctgacccaaaccaccagaccggcggcggcgggggcgacctaaggcgagaacacgagcgaaaccagagagggggcgatggcgacggcgacggcgctcaaccgcggcctccgctccgggatccgcctcctcgccaccgggctgaggcctccaagacagattctcgtggattccatgccactggtgtgaagaggatgggagggcatggccatgatgagccctactacctccatgccaagcacatgtacaacttgcacaggatgaagcaccagaagccgaagtgttatctttccgtgcttgggagcagtttggcatttggcatcgaagtcccagtttatgcggttgtttttccagcaagaagaagaccggcctccggataatgttttttaagcgctaaattaatgaacttaatttctttagcactccatgaggttaaaatttgggctttctctggttatatcaagaggaagcatgtccgcgaagctagggagctctttgacagcatgccatcacctccgacttctgtgtgcaatgcattgctgtcaggctatgttgaacttggttacatgagggctgcggaggtgctgtttggccagatgcagacaaggaaccctgtttcttggaatgttatgatcacaggctatgcacgagctggcagtatggggatcgcgcagcgtctgtttgatgagatgcctgagaaggacgttctatctaggactgctattatgcgtgggtatttgcagaacggatctgtcgatgctgcatggaaggtgttcaaagacatgccgcatcgtgatactgttgcttggaacacgatgatggatggttttgtgcggaatgataggttggatgatgctttgaagttgttctctgagatgccagacagggatcagatatcgtggaatgcgatcttgcaaggatatgttcaacaaggggacatggatagtgcaaatgcctggtttcgaagagcgccaaacaaggatgcgatctcatggaacacattgatctctgggtacaaagatgaaggagcactatctttgctgtcagaaatgatccgcggaggactcaaacctgaccaagccaccttgagcgttgttatttccatatgtgcatctctcgtttcccttggatgtggaaaaatggtacacctctgggcaatcaaaactggctttgagcatgatgctttggtgatgagctcattgatatcaatgtactcaaaatgtgggctaatcagtgaagcttcccaagttttcgagctgattttgcagcgggacacagtgacatggaatgccatgatcgcaacatacgcttatcatggtcttgctgatgaagctttgaaagtttttgacatgatgacaaaagctggatttagaccagatcatgcgaccttcctaagcatattgtctgcttgcgcacataaggggtacctatatgaaggctgctaccattttcgcagcatgcaagaagactggaacttggtcccaagatctgatcactactcctgcatggttgatctcttgggaagatcaggctttatacaccaggcttatgattttaccaggagaatcccatctgaccatcgaacgaccgcgtgggagacgctgtttagcgtgtgcaactctcatggggaaatccagcttggagagatcattgccagaaatgtcctgaaggctagaccctccgacggaggaatgtacacactcctgtcgaacatatatgccgccaaagagatgtggagcagcccggccagcgggaaaccgcggcacccaaccccaacccaaaccaccagaccggcggcggcgggggcgacctaaggcgagaacacgagcgaaaccagagagggggcgatggcgacggcgacggcgctcaaccgcggcctccgctccgggatccgcctcctcgccaccggcgctgaggcctccaagacagattctcgtggattccatgccactggtgtgaagaggatgggagggcatggccatgatgagccctactacctccatgccaagcacatgtacaacttgcacaggatgaagcaccagaagccgaaggtgtatctttccgtgctgggagcagttggcattggcatcgcagtcccagtttatgcggttgttttccagcagaagaagaccgcctccggataagctctctaagtgctacataatgaacttactttctatagcactccgcgaagttaaaattgggacttcactttaaattggttattgcttgttactccattttgcacttgcctgaagttgtaagctccttttcatggcgtttgatgtaggaatactgctattttctgttaataatatcatggcatgaactttcctggctgtggagaaaccaggcagcgtgatcacagttgttttaactcatatttttttttatttcttattgtgattgaaattgatagttggaattcatgtttactacttgtttaaaaaaaaaaaaaaaaaaaaaaaaaaaa

SEQ ID NO: 91636 - DNA, 3010 bp, Oryza sativa
  Clone ID: PAT_MRT4530_90192C.1
ttgttggaaataggattctcctgatatttatattttggaaactcatgctagcaggggtgtcaatatcataccctgtaggaggtatatctgtactaagagttagtgtgctatctaaccaccctgtaggaggtaacatttttgtttggctggttattgttggagaccactattttagaagcacaagtagttcattttgccttcgtcgctgccgattggtttcatcgcctccacggttggtgtgcgccgctgccgttgctgatggcgatatcgtcttcaccgccggcctgcctccgtcgccgccgactggtgtcctcgcctatacggtcggttggtcacaccaccgttgatgggcatcgtcatctacaccgccggcctgcctccgtcgccgccgactggtgtccccgcctatacggtcggttggtcacaccaccgttgatgggcatcgtcatctacaccgccggcctgcctccgtcgccgccgagtggtgtccccgcctatacggtcggttggtcacaccaccgttgatgggcatcgtcatcttcaccgccggcctgcctccgtcgccgccgactggtgtccccgcctatacggtcggttggtcacaccaccgttgatgggcatcgtcatcttcaccgccggcctgcctccgtcgccgccgattggtgcctccgcctacacggcatgcctattatgccgccgctgttgggcgtctacgacttcaccgccggcctgcctccgtcgccgccgagtggtgcctccgcctacacggctggcctattatgccgacgctgttgggcgtctacgacttcaccgccggcctgcctccgtcgccgccgagtggtgcctccgcctacacggctggcctattatgccgccgctgttgggcgtctacgacttcaccgccggcctgcctccgtcgccgccgagtggtgcctccgcctacacggctggcctattatgccgccgctgttgggcgtctacgacttcaccgccggcctgcctccgtcgccgccgagtggtgcctccgcctacacggctggtctattatgccgccgctgttgggcgtctacgacttcaccaccggcctgcctccgtcgccgccgactggtgtcctcgcctatacggttggttggtcataccaccgttcatgggcgtccacgtcttcgccgaccggctggccttcgccgccgccgactggtgtttctgcctacacggctagcctattatgccgccgctgttgggcgtctacgacttcaccgccggcctgcctccgtcgccgccgactggtgtccccgcctatacggtcggttggtcacaccaccgttgatgggcatcgtcatcttcaccgccggcctgcctccgtcgccgccgattggtgcctccgcctacacggcatgcctattatgccgccgctgttgggcgtctacgacttcaccgccggcctgcctccgtcgccgccgattggtgcctccgcctacacggctggcctattatgccgacgctgttgggcgtctacgacttcaccgccggcctgcctccgtcgccgccgagtggtgcctccgcctacacggctggcctattatgccgccgctgttgggcgtctacgacttcaccgccggcctgcctccgtcgccgccgagtggtgcctccgcctacacggctggcctattatgccgccgctgttgggcgtctacgacttcaccgccggcctgcctccgtcgccgccgagtggtgcctccgcctacacggctggcctattatgccgccgctgttgggcgtctacgacttcaccgccggcctgcctccgtcgccgccgagtggtgcctccgcctacacggctgacctattatgccgccgttgttggacgtctacgtcctcaccgttggctcaccttcgttgccgtcgactggtgtttccgcttacacggctgacctattatgccgccattagtgggcatcttcgctttcaccgtcgaccgccttcgtcgccgccgactggtgtcttcattgttattgatggacgactttgttcccacattggccacttctgccatcaccaaggggaatattacaaaggatccagatccagatatgcataaaagggattcatggctttaagcttatctcttacgctccaggaatggatcagtcagaacgtcaccaccggctcgcctcgaccgccgccgactggtgtttccgcctgcacggctggcctttatgccgccgttgttgggcgtctacgtcttcaccgaccggccgcctcgtccgctgccgactggtgtttccgcctgcacggctggcctttatgccgccgttgttgggcgtctacgtcttcaccgaccggcttgccttcgccgccgccgactggtgtttccgcctgcacggctggcctttatgccgccgttgttgggcgtctacgtcttcaccgaccggcttgccttcgccgctgccgactggtgtttccgcctgcacggctggcctttatgccgccgttgttgggcgtctacgtcttcaccgaccggccgcctcgtccgccgccgactgatgcttccgcctgcacgactggcctattatgccgccgttgttgggcgtctacgtcttcaccgaccggccgcctcgtccgccgccgactggtgcttccgcctgcacggctggcctattatgctgccgttgttgggcgtctacgtcttcaccaaccggccgacgcatccgccactgacgactggtgtttccgcctgcacgactggcctattatgccgccgttgttgggcgtctacgtcttcaccgaccggcttgccttcgccgccgccgactggtgtctccgcctgcacgactggcctattatgccgccgttgttgggcgtctccgtcttcaacgaccggccgcctcgtgtgacgccaactagtgctatcgtcttcacggctggccatgtcgctgccaccgctaataggcgtcatcatcttcaacgcaagctgtctatatctaccgctgactggtttcttcacttccat

SEQ ID NO: 91637 - DNA, 3765 bp, Oryza sativa
  Clone ID: PAT_MRT4530_90193C.1
ctaaatcacatgcctggaaagcgccaccgccattgctgataacaacaacgacttcaccgccggcctgcctccgtcaccgccgagtggtgcctccgcctacacggctggcctattatgccgccgctgttgggcgtctacgacttcaccgccggcctgcctccgtcgccgccgactggtgtcatcgcctatacggttggtcggtcacaccaccgttcatgggcgtccatgtcttcaccgaccggctggcctttgccgccgccgactggtgtttccgcctgcacggctggcctattatgccgccgctgttgggcgtctacgacttcaccaccggcctgcctccgtcgccgccgactggtgtcatcgcctatacagttggtcggtcacaccaccgttcatgggcgtccatgtcttcaccgaccggctggccttcgccgccgccgactggtgtttccgcctgcacggctggcctattatgccgccgctgttgggcgtctacgacttcaccaccggcctgcctccgtcgccgccgactggtgtccccgcctatacggtcggttggtcacaccaccgttgatgggcatcgtcatctacactgccggcctgcctccgtcgccgccgactggtgtcatcgcctatacggttggtcggtcacaccaccgttcatgggcgtccatgtcttcaccgaccggctggccttcgccaccgccgactggtgtttccgcctgcacggctggcctattatgccgccgctgttgggcgtctacgacttcaccaccggcctgcctccgtcgccgccgactggtgtcatcgcctatacagttggtcggtcacaccaccgttcatgggcgtccatgtcttcaccgaccggctggccttcgccgccgccgactggtgtttctgcctgcacggctggcctattatgccgccgctgttgggcgtctacgacttcaccaccggcctgcctccgtcgccgccgactggtgtcctcgcctatacggttggttggtcacaccaccgttgatgggcatcgtcatctacaccgccggcctgcctctgtcgccgccgactggtgtccccgcctatacggtcggctggtcacaccaccgttcatgggcgtccacgtcttcaccgaccggctggccttcgccgactggtgtttccgcctgcacggctggcctattatgccgccgttgttggatgtctacatcttcaccgttggctcaccttcgttgccgtcgactggtgtttccgcttacacggctggcctattatgccgccgttggtgggcatcttcgctttcaccgtcgaccgccttcgtcgccgccgactggtgtcttcattgttattgatggacgactttgttcccacattggccacttctgccatcaccaaggggaatattacaaagctaagatccaaatccagatatgcataaaagggattcatggctttaagcttatctcttacgctccaggaatggatcagtcagaacatcaccaccggctcgccgtcgtcgccgccgactggtgtcttcgcctatacggttggttggtcacaacaccgttgtcaggcgtctacattttcaccgccggtttgctttcgccgccgccgactggtgtcaccgcctacacggctggcctattatgccaccgttgttgggcgtctatgtcttcaccgaccggccgcctcgtccgccgccgactggtgttttcgcctgcacgctggcttattatgccaccgttgttgggcctctacgtcttcaccgaccggccgcctcgtccgccgccgactggtgtttccgcctgcacgctggcctattatgccaccgttgttgggcgtctacgtcttcaccgaccggccgcctcgtccgccgccgactggtgttttcgcctgcacgctggcttattatgccaccgttgttgggcctctacgtcttcaccgaccggccgcctcgtccgccgccgactggtgtttccgcctgcacgctggcctattatgccaccgttgatgggcgtctacgtcttcaccgaccggccgccttcgccgccgccgactggtgtcctcgcctggcctattatgccgccgttgttgggcgcctacgtcttcaccgaccggcttgccttcgctgccgccgactggtgtcctcgcctgcacggctggcctattatgccgccgttgttgggcgcctacgtcttcaccgaccggcttgccttcgccgccgccgactggtgtttctgcctgcacggctggcctttatgccgccgttgttgggcgtctacgtcttcaccgaccggcttgccttcgccgctaccgactggtgtttccgcctgcactgctggcctttatgccgccgctgttgggcgtctacgacttcaccgccggcctgcctccgtcgccgccgagtggtgcctccgcctacacggctggcctattatgccgccgctgttgggcgtctatgtcttcaccgaccggcttgccttcgccgctgccgactggtgtttccgcctgcacggctggcctttatgccgccgttgttgggcgtctacgtcttcaccgaccggccgcctcgtccgccgccgaccgatgtcctcgcctgcacggctggcctttatgccgccattgttgggcgtctacgtcttcaccgaccggccgcctcgtccgccgccgaccgatgtcctcgcctgcacggctggcctttatgccgccgttgttggacgtctacgtcttcaccgaccggcttgccttcgccgccgccgactggtgtttccgcctgcacggctggcctttatgccgccgttgttgggcgtctacgtcttcaccgaccggcttgccttcgccgccgccgactggtgtcaccgcctgcacggctggcctgttatgacgcccctctacgtctggtttagacagctaccactactgataaacatcatcgttttccgtcgccgactggttatgctgtcgccgactggtgcttttatcttcacaactgcgcgtcttcactaccagttcacttcatcacgacaatgcaactttgtcatcatggtagagcgacttcatctttattatcttcggcactggcaaactctactgctgctacttcgcgagttttgctacttcaccaaccacgacgtctttgttagcctcgacatctcggcatacgatgccatgttattttactacaacaagaggctctccaatattcaggatttctacttggacatcttcaacacatatcttcaatcaagcaatgactactcgacgacaagaagctataattctcgactctatgttcagttgttccccaactaaccaaagaacattctacttcaacaactttaaatatttcggtttagacgagttgggcaacaacatcaactctcctccaatatttcaccttgacggttgacctactatgcaaatgctgatgagcgtctttgtcattatcattggttgctacactgctattggctggatcaccgacatcgtcttcttcatcatgtcggttgcgtttgtcgtcgtcaactattttcttcatcttcatgattggtggattttgtcatcacctttgatctacctcgtctgtcaccgactgattattttgctgccatggctacacaattttgtcgctgggttccttcatcttcattgttagttgatctgtctgccgccgactggtttcttcgcctccatgactatgcgacttcattactttagattggtatcactatcttcactaccaccagtattgttgccacctctggtggg

SEQ ID NO: 91638 - DNA, 905 bp, Oryza sativa
  Clone ID: PAT_MRT4530_90194C.1
atgaagatgaagaaaatagttgacgacgacaaacgcaaccgacatgatgaagatgacgatgtcggtgatccagccaatagcagtgtagcaaccaatgataatgacaaagacgctcatcagcatttgcatagcggaaacaccattcggcggcgggcgaggcggccggtcggtgaagacgtaaacgcccaacagcggcggcataataggccagccgtgcaggcggaaacaccagtcggcggcggcgaaggcaagccggtcggtgaagacgtggacgcccaacaacagcggcataataggctagccgtgcaggcggaaacaccagtcggcggcggcgaaggcaagccggtcggtgaaggcgtggacgcccaacaacagcggcataataggctagccgtgcaggcggaaacaccattcggcggcggcgaaggcaagccggtcggtgaaggcgtggacgcccaacaacagcggcataaaggccagccgtgcaggcggaaacaccagtcggcggcagcgaaggcaagccggtcggtgaagacgtagacgcccaacaacggcggcataataggccagccgtgcaggcggaaacaccagtcggcggcggcggaggcaagccggtcggtgaagacgtatacgcccaacaacggcggcataataggccagccgtgcaggcggaaacgccagtcggcagcggtcgaggcggccggtcggtgaagacgtggatgcccatgaacggtggtgtgaccaaccaaccgtttaggcgaggacaccaatccgcggcgactgaggcaagccggtggtggagtcgtaaaccgccaacaaccacggcttaataagccagccgtgcaggcggaaacaacagtccgcggccgacgaagtggccggtccgtgaagaacttgattgccat

SEQ ID NO: 91639 - DNA, 345 bp, Oryza sativa
  Clone ID: PAT_MRT4530_90195C.1
atggccgtttcttggttgctctcatggaatgtgagcgtgaaccgtgaagggcattcgccgccgcccggccgtgggccgccggccgccttgcgccccgaccgccgcgcgggtcaccgccgcccggccgccacccaccgccttgcgcccggccaccaccgcctgccgccttgcgcagccctccgtgctggctccgccgccaccactggggacggccctccgtgcgcgacggccgccgccctccgccaccgccgcccagcctcctcccctcccggatccgctcccctcccggatctgacggaggggaggccgccgccgccgcccaaccgcctcccctcccggatctga

SEQ ID NO: 91640 - DNA, 470 bp, Oryza sativa
  Clone ID: PAT_MRT4530_90196C.1
ttggttttttttttttttttggtttttttttttttttttttttttttttttttttttaacgagaaaattcccagcatacaggaatggggtttattcagtttcataacagggggtttcgaaatcagatttgctcataacagataaccaaatttcagcctaagcgctttgggctccgggggatttccagagttggggccattcctccattggatcagcagttttagcgaaaattgcattttgggggcccagtttctccttgacaatgctgggtagttccttaacacagtttttaacaggaactgaaggcctcgatagcttcagagattcgaaaaagggaagaaccacctccatgactttcaccccttcccattttttaaagctttcgagagccttacctggttttggatcacttttcatcacataagggagacctgtctttacgccctaccggaagggatcacacccccctt

SEQ ID NO: 91641 - DNA, 1062 bp, Oryza sativa
  Clone ID: PAT_MRT4530_90197C.1
atggaggactcgagcctgttcatggagtgggccatggagacgctgcagcacctgcacccgctgccggcgacgccgccgcctgccggcggcgggtacgccggcgacaacgcgacttttccgtcgctccaagcgctccgcgagtcgtcggtgtcgcagaacggcatggccccgccggagccaacggcgcacgaaggccaccgagcctccaacagctggagctcgggcgacacggacagcgtgtccggtggcggcggcggcgcggtcatggagcacgacggatggtcgacgtcgccaaattcggtcaggtgcgccgctggcggcgggggcggcggcggcggcggcggcctctggcccgtgagctggaacttctcgtcggccatgacgcagccgtgcaacgatcaggccacgccgtcgaacccgccgacgacgacgagagcgcgctacggcggcggcggcgttcgatacctgccggccgccgtgtcgccatcgccatctgcacagacacggagagcctcctccaaaggcaacggcggcggtggctccggctcctcgtcggcggcgccgtacgcgcaggagcacatcatcgcggagcgcaagcgccgggagaagatcaaccagcggttcatcgagctctccaccgtcatcccgggcctcaagaagatggacaaggcgacgatcctctccgacgcggtgaggtacgtgaaggagatgcaggagaagctcagcgagctcgagcaacaccagaacggcggcgtcgagtcggcaatactcctcaagaagccgtgcatagccacgtcgtcgtcggacggcggctgccccgcagcgtcatcggccgtggctggaagcagcagcagcggcacggcgagaagctcgctgccggagatcgaggcgaagatctcgcacggcaacgtgatggtgaggatccacggcgagaataatggcaaggggtcgctggtgcggctgctcgccgcggttgaagggctccacctcggcatcacgcacaccaatgtcatgcccttctcggcatgcaccgccatcataaccatcatggcaaaggaatag

SEQ ID NO: 91642 - DNA, 1041 bp, Oryza sativa
  Clone ID: PAT_MRT4530_90198C.1
ccggccgcgtgggcgtacgcgcgggcccgccgctttgctcccaaactatatcttctctttctcttctcctcgcgactccgccgctgctcgagagcgcaatggcgtccatggcgttcacactggtgggagcattcaaggggatgtccctctcctccccgtgccattcctcctcctccgcctccttcctccgcgctgaccgtgtctcgctctccgtcggcggcggggtcgggatgggggtgccgatgacgatgccggtgcggcggctgacgatccagatggcgcacaagaagggggccgggagcaccaagaacgggagggactcccccgggcagcgcctcggtgtcaagatttacggcgaccaggtcgccaagcccggcgccatcatcatccgccagcgcggcaccagggtctatcctggaaataatgttggaatgggcaaggatcacaccctcttttctttgatcgatggcctcgtaaagttcgagaaatatggaccagacaagaaaaaggtaagtgtttacccatacgagaaacaacctgagaacccaaacagttacagagcaagaaagagagagtacttccgcatgcagcgtgaacgcaaaaaggcaagagcagagggaattgttgaggtgcaattggtgttggcagctgcagatgaaagtcctgaggtcaatgcagactgctgataagttctctgccccgtttttctccattttcgcaatccatgtttgataacaatgtttggaatgtaaatcatcaactatgagatgaatacaaggcccatcttcaactcagaaaaaaaaacacaagaaaaaatgaacaaaaaaaatgcttgagcttgaggatggcgtgattagcttatagctagaaattgtagatttgttgcatcgatgaagaagaagaagaagaagaagaagagatcgatcgatcgaggagcgatggatggatgctgttacttacgttgtaaatcacagagctaatcttctttttttcctgcaagaattggtaaagagatgaacaaaaaaaaaaaaagtgttcttg

SEQ ID NO: 91643 - DNA, 2271 bp, Oryza sativa
  Clone ID: PAT_MRT4530_90199C.1
atggagacgaaatatagtatcttggagcttctgttggtcagtgccgagggcctgaaacatgctcatcacttaggtctatattcttcaccctatcttgtttcagaaactctaatgctcatgacctccgattttgctcattggcatggaatgtttgcaggaacgcaaagacactacgtgaacattcagttcggggaccaaattttcacgagcaagatcacacaaggtaaaggtaaaaaggtttggtggaacgagaagttcagattcccgttgtcatcggatgaatgcaaagagcttgcaaaggtcacactgaagatcatggagagggataagttctctgaagacagtctagttggggagacaaaggttcatgtcggcgacatcatcagcgagggcatcgagagggagttcttgcagatgaagcctgctccctacaacgtcgtgctggaggacggtaggtacaagggagagctcaagcttggcctcaagttcctccccaatatgagctcaaaatgtggagctccaaaagttagaaaaccaacaatcaattaccaccgtcttccattagatggtcatcagtttgatctggatgcatttcttactaaggatcgtaatgccaataaccaatcgaagccaagtactcagtcaggaagcaaatctatagatagaagattaaccactccacagttagtatcagcattgactgggatctggaatcttgtcggccagccagaatcttccggcacagctcaaatatccgagagccatgaaattctgcataaagatgaacctgtgtgcttcagcaaagagcaaaaggaacatgcattgatgtcttgctgtgctgaaaactcaactggtctgagctctcaaaactttttatcaacgccaaaatcaatctttgaagatcttagtttggtgaagaaaatgttaatgctcacatcatgtagcagcatggctggtggctcttctacatggagacatgtgcatgttgggagtgcctattatttaaagtatcagaatatatatcccatgcaaaccagaatgatgcacacctatgctgtttctggcagtacggaatttaagaaggatcaaagctttagaagggacgataaccattccagccaaacaagaaacatgccaactgagctatgtactagctccagtgaggaggctcacatttacgaaagttctctgcatgaacacacagatcaaaatgttgatggtcttatgtctcaggagcactctgtagacaagtattcaccacagctggaatcatctgttcaacatcgattttatggtgctgttaatctgaacaggcatgctgtggcaggagcattagctggcacagtagtcagtgtttctctgcatccaattgatacagtgaagaccattattcaggttaacagttctcgacgaagttcattctaccacacgttaaggcgcgcccttgttgagagaggagttttaggactttatggagggcttgctagcaaaattgcttgttctgcaccaatttcagcaatctataccttaacttatgaaatagtcaaggggtctcttctgcctattttgccaaaggagtatcattcaattgctcattgcactgctggtggttgttctagcattgcaacttccttcgtttttacacccagtgaatgcataaaacagcagatgcaagtgggttcacagtatcagaattgctgggatgctttattaggatgtcttcgaaagggtggcattacttcactatatgctggatggggtgctgttctttgcagaaatatcccacattccgtaattaagttttacacctacgagagcctgaagcagttcatgttgaaatcagctcctgctaatgccaatcttgattctgggcagacacttttctgtggaggttttgctgggtctactgctgctctgtgtacaactccatttgatgttgttaagacgcgagtacagttacaggcactcagccctattagcaagtatgatggggttcttcatgcgctcaaagaaatttttcagcacgaaggcttgcagggtctttacaggtacggtcatttccgcaccatattggccatgctattgaatttaggttcttatacaagtactcaaattattaagcaacatatgtatttccaggggtttggctccaagagcttcatgcaaggaacttttgatcacagaatgatgcagcgtggttcaggaacacttaaagcatctgagtttcaagaacaatctcatgaactaagtgggatggttctattaggctag

SEQ ID NO: 91644 - DNA, 997 bp, Oryza sativa
  Clone ID: PAT_MRT4530_9019C.1
gacacatggtctccgccggaaaattaaccaagaccaatcacgtgctatggaaggcggtgaagctcatatggcaggattcctcaacggtgaagcgctgcggccgaatcggagctgctcgacggagcggttgcacaacggcgtccccagggtgcacgtaccttcagtgccgagcctcgtaggcacgcaacttgtacaggaggcgtgggatgagggagagatgggatggacgctgtttgtcatcatcgtcaacgaccgtcgactgcgccatctgcatccacgcgtggaacaaccggatcaagcacagcggcaacagcaggacggccaccaccgccggagcacccaacccgctggcccaccgtcgtcgccgcggctggatcgggagatcccctgcgccagatccgccgccgccgctctccctacctccaagtttcgctgccgccgagtccccatcctctggatccgccgccgccgccctccctacctccaagcttcgccgccattcgagcccgccgcatcgacatcaccgcagccgctctcgtcgagcatcgcgatgagcggcgggatggcgcagagcatctcgctcgtggcggcgaccggtgttgaggcagggggtcgtggaggagcgtcggcggtcgtggaggtggtggcaggcggtcgtggcggagcgccggcggtcatagaggaggcggcgggcgcgggcgcggacgagcgccggcgatcgccgaggagacgccgtgccacgaccgccggcggtcacgtagaaggcggcgggcgtgggcgcggacgagcgccggcggtcgccgaggagacgccgtgtgctccgtccaagtgggacgagctcgtccgaccgattttgccggatgggtttgtcccggatctgggaggaatattcctttataggggccaacccatcccactcgctcctcaaccaaacacctctcaaaatgggttcgtcccatcccatcccatcctatcccacaaaccaaaaactacctaa

SEQ ID NO: 91645 - DNA, 363 bp, Oryza sativa
  Clone ID: PAT_MRT4530_901C.1
atgggccacgcgctgtccggaggggaaggagaagcccggccgaggcccagccaggccggccgcctccctcctctccccggggtcgccgacaggtggggcccacctgtcgggcccttccccaacctccggccgcccgcccacgtcgccatcgccgctgaaaccgccgcaccccgcctcctccggtccacgtcggccatgcccccgccgttacactcgccgccgcaccgcgccgtcgccgccgttgggttcgcgcggccgaggtccacctcgtccacccctcctccgtcaatgttcgccgccggagccccatccccgtcgtgcgccggcgccctcgccctctcgcactctcctctctccctctaa

SEQ ID NO: 91646 - DNA, 1302 bp, Oryza sativa
  Clone ID: PAT_MRT4530_90200C.1
atggcgtccatggcgttcacactggtgggagcattcaaggggatgtccctctcctccccgtgccattcctcctcctccgcctccttcctccgcgctgaccgtgtctcgctctccgtcggcggcggggtcgggatgggggtgccgatgacgatgccggtgcggcggctgacgatccagatggcgcacaagaagggggccgggagcaccaagaacgggagggactcccccgggcagcgcctcggtgtcaagatttacggcgaccaggtcgccaagcccggcgccatcatcatccgccagcgcggcaccagggtcatcaccatcctcttcctttacttactggtctatcctggaaataatgttggaatgggcaaggatcacaccctcttttctttgatcgatggcctcgtaaagttcgagaaatatggaccagacaagaaaaaggtaagtgtttacccatacgagaaacaacctgagaacccaaacagttacagagcaagaaagagagagtacttccgcatgcagcgtgaacgcaaaaaggcaagagcagagggaattgttgaggtgcaattggtgttggcagctgcagatgaaagtcctgaggtcaatgcagactgctgataagttctctgccccgtttttctccattttcgcaatccatgtttgataacaatgtttggaatgtaaatcatcaactatgagatgaatacaaggcccatcttcaactccttgtttagccatgttcggcttgctgtatcttttctggcagctaggctttaggaactagggcgggtctattccaactgaatcatcaacagtgagatgaatacaaggcccatgttcaactcattggttagtcctgttcgacttgttgtatgcatgtacctttcctggcagctaggctttagggactaggatgggtctattccagtattccggtaccacaagttccacgtaattgtgttatgggtgttgtggtgggctgatctgatgcttgaaagtagtggtattcatgtggaattgcaatttgcaatggatcaacatcatcactgggggtatgatatatggttcaggccgtatttgaaactactttacaagaggttcttgcaaaagtagtttcttttggcatgtagggctgtagtggggtttcagcctcttaattgatttggttgccgcaagactgcaatgagacatctgcatttccttgattccttcttgagggacctactatctctactctctacaacgtaaagtatgtgagttggtgattgggatggtaagttctacgcctgcatccttcctcca

SEQ ID NO: 91647 - DNA, 1455 bp, Oryza sativa
  Clone ID: PAT_MRT4530_90201C.1
atggcaggagatcgcaacagcgagcttcttctgagcaagctcccttcgccgccgctgaggctgccggtgatcggccacatgcacctcgtcggctccctcccacatgtctccctccgagacctcgccgccaaacatggccgcgacggcctcatgctcgtccacctcggctccgtccccaccctcgtcgtctcctcgccgcgcgccgccgaggccgtcctccgcacccacgacctcgccttcgcgtcgcggccgcgcgccatggtccccgacatcatcacctacggcgccaccgactcgtgctacggcccctacggcgaccatttccgcaaggtcaggaaggcggtcaccgtccacctgctcaactcccacaaggtgcaggcctaccgccccgcccgggaggaggaggtgcggctggtgatcgccaagctccgcggcgcggcggcgatggcgggcgcgccggtggacatgaccgagctcctccactccttcgccaacgacctcatctgccgcgccgtgtccggcaagttcttccgggaggaagggcggaacaagctcttccgggagctcatcgacaccaacgcctcgctcctgggagggttcaacctagaggattacttcccgagcttggcgaggacgaagctgctcagcaaggtcatctgcgtcagggcaatgagggtcaggagaagatgggaccagctgctcgacaagctcatcgatgaccatgccaccaggttggtgcgccgccacgatcatgatcagcaacaagacagtgacttcatcgacatcttgctctaccatcaggaagagtatggcttcaccagggacaacatcaaagctatacttgtggacatgtttgaagcaggcacggacacatcgtacttagttctagaatctgccatggttgagctcatgcgcaagccacacctcctagccaagctaaaggacgaggtgaggagggtcataccgaaaggacaagaagtagtcaatgaagataacattgtcgacatggtctatttaaaggctgttatcaaggagacactacggctgcacccaccagctcctctctacatcccccacctgtctagagaagattgcagtatcagcggctacatgatccctacaggaatacgtgtattcgtcaatgcatgggcactcggtagggatgctaaattctgggacatgccagatgagttcctaccggagagattcatggattcaaacattgattttaagggacatgattttcattacctgccgtttgggtctggacgaagaatgtgtcctggaattcactcagcaacggttaccctcgagattatgctggctaaccttatgtactgtttcaactggaagctaccagcaggtgtgaaggaggaggatattgatatgacagaggtgtttggattgacagtgcatcggaaggagaagctcttcttagtcccgcaagctgcctaa

SEQ ID NO: 91648 - DNA, 619 bp, Oryza sativa
  Clone ID: PAT_MRT4530_90202C.1
gctgcaggtctgaacagaaaaagcttcactctgagactcatcaaggcatataggatgctgttggtaggggagacagtgatggaaaagatgttggcaccaaggtaattctgccatcaagtttcacaggaggaaggcgatacatggtgcagaattaccatgattcaatggaaatctgtcgttcttacggccctcctcagatattctcaactttcacttgcaattccaaatggccggagattattgaggctatttgttttgaagcaggccaaagaccgagtgatagaagtgatatggtcacacgatgtttaccatatgaagctagatgaatacatcacatatataaagagtggagaggcctttggtcctatacaagctgttgtatacactgtcgaattccagaagagaggattgccgcactctcatacattgacatggttgacagctcagtccgacgaaccttcacctgcattcattgatgtcctgatatgtgctgagataccagatatagcagcagataagtttgggtttggtcttgttgatgagttcatgatacatgggccatgtggtgagtacaatccaagctgtccttgcatgaaggatggtcggtgttcgaagggct

SEQ ID NO: 91649 - DNA, 345 bp, Oryza sativa
  Clone ID: PAT_MRT4530_90203C.1
atgtcgtcgacgccggcggcggcggacacggccgagacggatcaggctgacctgaagctagtgaaggctgagccggggaccggccctggcctgatcaccatcacggtgacgagccagaccttcgccgacgtctacttcgccatcaagccgcgggtcaagctgcggcgggtcatggacctctactgcggcaagcactcgctcgaccccaagaccgtcaagttcatcgacgacgacggccgcttcgtccggtccgagcagacgccggaggaagtcgggctgcaggacggcagcacgatctcgctcgcgatcgaccagcagggcggcgcgtgcatctgcgagaactag

SEQ ID NO: 91650 - DNA, 678 bp, Oryza sativa
  Clone ID: PAT_MRT4530_90204C.1
atgctgatcaacacctacgaatggctggaggcgaaggccgtgacggcgctcggggacggcgcgtgcgtgcccgaccgccccacgccgccggtgtactgcatcgggccactgatcgtgaagggcgaggacgcggcgaaaggagagcgccacgcatgcctcgcgtggcttgacgcgcagccggagcggagcgtcgtgttcgtcagcttcggcagcatgggcgccgtctcggcggagcagctgaaggagattgctcgtgggctagagaattccggccaccgtttcctctgggtggtggaggtgctccggcacgccgcgaccgccgcgttcgtgacgcactgcgggtggaactccgtcctggaggcggcgtcggccggagtgccgatgctgtgctggccgcagtacgccgagcagaggatgaacaaggtgctcttggtggatggcatgcagctcggagtggtgatggacggctacgatgaggagctggtcaaggccgaggaggtggagaagaaggtgaggttggtcatggagttcgaggaagggaaaaaactcagggatagactgacaatggcgaaggaaatggccgcgaaggcgctggcagacggcgggtcgtcgtcgttggcgttcaccgaatttctgaaggatttgaactttggaaacactacaaaggaaaaagcgtag

SEQ ID NO: 91651 - DNA, 149 bp, Oryza sativa
  Clone ID: PAT_MRT4530_90205C.1
cccacgcgtccggcctcggctgcccccgcctcctgtgcccggggaaccaccacgtgttgatgagctataactacgacccccctgacaacttgaacgggcaacgcccgtctctgacgatcaacacctcggacaagtagacgaccactgac

SEQ ID NO: 91652 - DNA, 1866 bp, Oryza sativa
  Clone ID: PAT_MRT4530_90206C.1
atggaggcagaccccaatccgatggtggtgctgcacgcctgcctcggcgtgggccacctcatccccatggttgaactcgcgaagctccttctccgccgcggcctcgccgtcgtcatcgccgtgccgaccccgccggcctccaccgccgacttcttctcctcgtccgcccccgcggtcgaccgcatggcggccgccaacccttccatctccttccaccacctcccgccgcccgagtaccccgacccggatcccgacgccttcctgcagatgctcgacacgatgcgtctcaccgtgccacccctcctcgccttcctccgctccctcccctcggtcgcggctctcgtgctcgacctgttctgcgtcgacgcactcgacgccgccacggcggccggcgtcccggcgtacttctactacacctcctccgccggcgacctcgccgcgttcctccacctcccgcaccacttcgccaccacggaaggcagcttgaaggacatgggtaagacgcccctccgctttcccggcgtccctccgatcccggcctccgacatgccgcacaccgtgctcgaccgcgcggaccggacctgcgctacgcggctggggcactacgggcggatcccggaggcgcggggtattctgattaactcctacgaatggctggaggcgaggtccgtgagggcgctcagggaaggcgcctgcatccccgaccgccccacgccgccggtgtactgcatcgggccgttgatggcgaaaggcgaggaggcggcgaacggggaacgccacgcatgcctctcgtggctggacgcgcagccggagaggagcgtcgtgttcctctgcttcggcagcttgggcgccgtctcggtgaagcagctgaaggagatcgctcgtgggctcgagaattccggccaccgtttcctctgggtggtgcgtagcccgccgcaggatccggccaagttcttcctgccgcgtccggagcctgacctgggaatgctgctcccggaggggttcacggagaggacgcgggacaggggaatggtggtgacgtcgtgggcgccgcaggtggaggtgctccggcacgccgcgaccgccgcgttcgtgacgcactgcgggtggaactccgtcctggaggcggcgtcggccggagtgccgatgctgtgctggccgcagtacgccgagcagaggatgaacaaggtgctcttggtggatggcatgcagctcggagtggtgatggacggctacgatgaggagctggtcaaggccgaggaggtggagaagaaggtgaggttggtcatggagttcgaggaagggaaaaaactcagggatagactgacaatggcgaaggaaatggccgcgaaggcgctggcagacggcgggtcgtcgtcgttggcgttcaccgaatttctgaaggatttgaactttggaaacactacaaaggaaaaagcgtagggcggcgctggaggaagggggctcgtcgcacgctgcgttcgtccagttcctgtccgatgtggagaatcttgtccagaactaactgacgaaaatttgcagatgcccagcatcttggccacaagtgacgaaaattctcagatgctctttatttgcctggggaccgggggccctttcaaccgataatcatttaagaactacttgtgtaccttatttgttgttaataaagcaacgtactagaatggccgcgatgatatttaaaaaaaaaaaaaattctcggggcttgtgctctctctctccctcgtgcgtttgttatggtagaatataattagtttccacctctgtctctctaattttaatttaaatctaatccatgtactcatatataccggacttaaggcttaaaaaaaaaaaaaaaaaaaaaaa

SEQ ID NO: 91653 - DNA, 589 bp, Oryza sativa
  unsure (1)..(589): unsure at all n locations
  Clone ID: PAT_MRT4530_90207C.1
gaaaatcnaaaccntggnnggttgcaaaattggggngggcccaaaaaaanaaaanggggttaangncccttnagatccccncnaggggtttaaaattcncccccccaaatttnccccnnggggnnggganaaaaanaggggttnttngggttcngcatcccacaangggggggatgatttttttggttccccaggngtnggggggcagatnacntccttcnccnttgggcntgggntttggggttgnggggncaattnnngaaggnaanggtnccnaaatggcantaccntngaccnacccgtttngtttttttgcnggctagnattttggttncggntcccangggnnnaacggaaatccnaangggttaggggntttgggttttttaaaagggngngggagntnnggatttttttnanntanggggggggnaanttccccgttttggtttaaccannngnaanttggnnttgggttncaaaaaaaaaaaaaaaaaaaaaaaaaaaaaaaaaaaaaaaaaaaaaaaaaaaaaaaaaaaaaaaaaaaaaaaaaaaaaaaaaaaaaaaaaaaaaaaaaaaaaaaaaaaaa

SEQ ID NO: 91654 - DNA, 670 bp, Oryza sativa
  Clone ID: PAT_MRT4530_90208C.1
ttggcagcgatcacaatgcccaataatatcgttttcaccgaacatagtataaacagtaatactatcaacattttcttttttactcgagagagcctaaaaaattactggagtacagtaatacaagtacacctttagcaatcgaggcaaacctggatgaagaaaaaattgaggggaacgatgcttcaaaaaaattacatcacaaaattctataaaaagttttttagaccaccggaagtaagttccctttccctagatgattccaaattagatgacatcccccaagtgtcggaggcagaaaatgatcatcttattgcccctctctccgaggaggaagtaagagatgcggtttttgggatggaaacaaatagggcgccagatccagatggctttcccgctgaattttagcgaaaattttgggatgttctcaagcatgatttattgcttatgttcaatgaattttatgctagagagttcccaatttttagccttaattttagggtaatcaccttgatacccaaagtaaaagaggctaaccgaatacatatacagaccgatatagtcttttaaatgctagctttcaaatcttcatcaaggttgccactaatagaatcaattcagtggctgatcgtatatatagtgagaccaactcagacagctttcatgcgaggga

SEQ ID NO: 91655 - DNA, 262 bp, Oryza sativa
  Clone ID: PAT_MRT4530_90209C.1
agttctagatcgcaggcggccgctcgcgatctagaactagcccacgcgtccgcgacctcgtcggcgccgccgcggcgaggcgtcacgtcagggaccaggatatggcggggagcagggcggcagggcctcgagggacgccgctctttactggaggaacctggacctccgcatcgtcatactcgggctcgttattatttttgactggtgtatttatgattgtgatgactataatttgctttattaaagtttatgatatttgaag

SEQ ID NO: 91656 - DNA, 247 bp, Oryza sativa
  Clone ID: PAT_MRT4530_9020C.1
gtcgtgttacgtgccaacgtaccttggaaccctatggcgcttcagtattcagcgtttgagtattccaaagccacagagtcacaactaatctttgcctagcccacctactacgtacacgtagtggtaagacctctgctccatcttgaacattctgaacactctgtgtacccttttcgaacatgttcatcagtaatgttcggcgccatgctgtgtaacggatcttttagttaaaaaaaaaaaaaaaaaa

SEQ ID NO: 91657 - DNA, 4250 bp, Oryza sativa
  Clone ID: PAT_MRT4530_90210C.1
tccactctgccggcttgtcttcgccaccgccattgctgataacaacaacgacttcaccaccggcctgcctccgtcgccgccgattggtgtctccgcctacacggctggcctattatgccgccgctgttgggcgtctacgacttcaccgccggcctgcctccgtcgccgccgactggtgtctccgcctacacggctggcctattatgccgccgctgttgggcgtctacgacttcaccgccggcctgcctccgtcgccgccgagtggtgcctccgcctacacggctggcctattatgccgccgctgttgggcgtctacgacttcaccgccggcctgcctccgtcgccgccgagtggtgcctccgcctacacggctggcctattatgccgctgctgttgggcgtctacgtcttcaccaccggcctgcctccgtcgccgccgattggtgccttcgcctacacggctggcctattatgccgccgctgttgggcgtctatgacttcaccaccggcctgcctccgtcgccgccgactggtgtcctcgcctatacggtcggttggtcacaccaccgttgatgggcatcgtcatctacaccgccggcctgcctccgtcgccgccgactggtgtcccagcctatacggtcggttggtcacaccaccgttgatgggcatcgtcatctacactgccggcctgcctccgtcgccgccgactggtgtcatcgcctatacggttggtcggtcacaccaccgttcatgggcgtccatgtcttcaccgaccggctggccttcgccgccgccgactggtgtttctgcctgcacggctggcttattatgccgccgctgttgggcctctactacttcaccaccggcctgcctacgtcgccgccgactggtgtcatcgcctatacggttggtcggtcacaccaccgttcatgggcgtccatgtcttcaccgaccggctggccttcgccgccgccgactggtgtttccgcctgcacggctggcctattatgccgccgctgttgggcgtctacgacttcaccaccggcctgcctccgtcgccgccgactggtgtcctcgcctatacggtcggttggtcacaccaccgttgatgggcatcgtcatctacaccgccggcctgcctccgtcgccgccgactggtgtccccgcctatacggtcggttggtcacaccaccgttcatgggcgtccacgtcttcaccgaccggctgaccttcgccgactggtgtttccgcctgcacggctggcctattatgccgccgttgttggatgtctacatcttcaccgttggctcaccttcgttgccgtcgactggtgtttccgcttacacggctggcctattatgccgccgttagtgggcatcttcgctttcaccgtcgaccgccttcgtcgccgccgactggtgtcttcattgttattgatggacgactttgttcccacattggccacttctgccatcaccaaggggaatattacaaagctaagatccagatccagatatgcataaaagggattcatggctttaagcttatctcttacgctctaggaatggatcagtcagaacatcaccaccggccgcctcgtccgccgccgactggtgttctcgcctgcacggttggcctattatgccgccgttgttgggcgtctacgtcttcaccgaccggcttgccttcgccgccgccgactggtgtttccgcctgcacggctggccttttatgccgccgttgttgggcgtctacgtcttcaccgaccgacttgccttcgccgccgccgactggtgtttccgcctgcacggctggcctttatgccgctgttgttgggcgtccacgtcttcaccgaccggcttgccttcgccgccgccgactggtgtttccgccagcacggctggcctattatgccgccgttgttgggcatctacgtcttcaccgaccggccgcctcgtccgccgccgactggtgttttcgcctgcacggctggtctttatgccgctgttgttgggcgtctacgtcttcaccgaccggcttgccttcgacgccgccgactggtgtttccgcctgcacggctggcctttatgccgccgttgttgggcatctacgtcttcaccgaccggcttgccttcgccgccgccgactggtgtttccgccagcacggctggcctattatgcagccgttgttgggcgtctacgtcttcaccgaccggccgcctcgtccgccgccgactggtgttttcgcctgcacggctggtctttatgccgccgttgttgggcgtctacgtcttcaccgaccggccgcctcgtccgccgccgactggtgcttccgcctgcacggctggcctttatgccgccgttgttgggcgtctacgtcttcaccgaccggctcgccttcgtcgccgccgactggtgtcctcgcctgcacggctggcctattatgccgccgttgttgggcgcctacgtcttcaccgaccggctcgccttcgtcgccgccgactggtgtccacgcctgcacggctggcctattatgccgccgctgttgggcgcctacgtcttcaccgaccggctcgcctttgccgccgccgactggtgtcctcgcctgcacggctggcctattatgccgccgttgttgggcgcctacgtcttcaccgaccggctcgcctacttcgccgccgactggtgtccacgcctgcacggctggcctattatgccgccgctgttgggcgcctacgtcttcaccgaccggctcgccttcgtcgccgccgactggtgtcctcgcctgcacggctggcctttatgccgccgttgttgggcgtctacgtcttcaccgaccggcttgccttcgccgctgccgattggtgcttccgcctgcacagctggcctattatgccgccgttgttgggcgcctacgtcttcaccgaccggcttgccttcgtcgccgccgactggtgtcctcgcctgcacggctggcctattatgccgccgttgttgggcgcctacgtcttcaccgaccggcttgccttcgccgctaccgattggtgcttccgcctgcacggcagacttattatgctgccgttgttgggcgtctacgtcttcaccgaccggccgccgcatccgccgctgactgacgagttgggcaacaacatcaactctcctccaattatttgtcttcacggttggcctactacgcaactgccgatagaggatctcatcgttatcatcggctgctacatcgctattgactggatcaccgacatcgtcatcttcatcaacatcttgtcaagcctcatcaacatagccaactctgctgccgttgatgggaaacttcgtcatcataaagcaagcccgttcgatctccttgtcgtcgacgaggcagcacagctgaaggagtgcgagtcactgatacctcttcagctccctggcgttcgtcacgccgttctcatcggctatgaatttcagctgccggcacttgtcaaaagcagggtttgtgaagatgctgagtttggaaggagcctgtttgagaggctgagttcgctgggacacccgaagcacctcctggatgtgcagtacaggatgcacccagggatcagcaagttcccggtctcaagcttctacgagaacaagatatctgacggcgagaacgtattacacagggactacgagaggaagccccttgccgggccaatgtacggctcctactccttcatcaacgtcgatgccggcaaggagagcaagggcaagcacgacaagagcctcatgaaccccatcgaggtcgccgccgtgacccggatcgttcagagattgttcaaagagtcggttgacaccgggaggaagctgtgcgtgggcgtggtgtcgccgtacaaggggcaggtccgcgccatccaggagaggctcgggaaggcgtacgagacgcacgggggcttcaccgtgaaggtgcgatccgtggacgggttccagggcgccgaggaggacatcatcatcttctccgccgtgcgcagcaacaccaccggatcggtcgggttcctctccaacgtcaaccgcaccaacgtcgcgctgacccgggccaagcactgtctttggattcttggcaatgcaaatactctagcgagtagcaaagaccatttggcggccgtcatcgagctggacgaagtcgacgacctgctcgagatggactccctgcgtcttagcggctcgcgatttggggtgacatgtaagaaacgggtggacgtccacccgagagattag

SEQ ID NO: 91658 - DNA, 3066 bp, Oryza sativa
  Clone ID: PAT_MRT4530_90211C.1
ctaccgttgttgggcgtccgtcgactggtgtcctcacctatacggttggctggtcacaccaccgtacatgggcatccatgtcttcaccgaccggcttgccttcatcaccgccgactggtgtctccgcctacacggctggcctattatgccgccgttgttgggcatgcacgtcttgaccgaccggcttgccatcgtcgccgccaactggtgtctccacctgcacggctggcctattatgccgccgctgttgaacatcaacgacttcaccgccggattggcttcgtcgccgccgactggtgtctccgcctacacggctggcctattatgccgccgttgttgggcgtctacgacttcaccgccggcctgcctccgttgccgcccaacggtgtctccgcctacacggctggcctgtaatgccgttgttgttgggcgtctacgacttcaccaccggcctgccttcgccgccgccgaccggtgtctccgcctacacggctgacctattacgccgccgttgttgggcatccacgtcttcaccgaccggcctgccttcgccgccgccgaccggtgtctccgcctacgcggctggcctattatgccgccgttgttgggcatcctcgtcttcaccgaccggctttccttcgtcgccgccgactggtgtttccgcctgcactgctggcctattatatgctgccgttgttgggcgtccacgtcttcaccgactggcttgccttcatcaccgccgactagtgtctccgcctacacggctggcctattatgccgccgttgttgggcacgcacgtcttgaccgaccggcttgccatcgtcgccgccgactggtgtctccacctgcacggctggcctattatgccgccgctgttgaacatcaacaacttcaccgccggcttggcttcgtcgccgccgactggtgtctccgcctacacggctggcctattatgccgccgttgttgggcgtatacgacttcaccgccggcctgcctccgttgcagcccaacggtgtctctgcctacacggctggcctgtaatgccgttgttgttgggcgtctacgacttcaccaccggcctgccttcgccgccgccgaccggtgtctccgcctacacggctgacctattacgctgcctttgttgggcatccacgtcttcaccgaccggcctgccttcgccgccgccgaccggtgtctccgcctacacggctggcctattatgccgccgttgttgggcatccacgtcttcaccgaccggctttccttcgtcgccgccgactggtgtttccgcctgcactgctggcctattatatgctgccgttgttgggcgtccacgtcttcaccgaccggcttgccttcgtcaccgccgactggtgtctccgcctacacggctggcctattacgccgccgttgttgggcaaccacgtcttcgccgaccggcctgccttcgccgccgccgaccggtgtctccgccttcacggctggcctattatgccgccgttgttgggcatccacgtcttcaccgaccggcgtgccttcgtcgccgccgactggtgtctccgcctacacggctggcctattacgacgccgttgttgggcaaccacgtcttcaccgaccggcctgccttcgccgccgccgccgaccggtgtctccggctacaaggctggcctattacgccgctgctgttgggcatctacgacttcaccgccggccttccttcgccgccgccgactggtgtctccgcttacacggctggcctattatgttgccgttgttgggcatccacatcttcaccgatcggcttgcatttgtcgccgccgactagtgtctccgtctacacggctggcctaatatgccgccgctgttcggcatctacgacttcaccgccggcctgccttcgccgccgccaactggtgtctccgcctacacggctggcctattatgccgccgttgcttggcatccacctcttcaccgaccggcttgccttcgtcgccgccgactggtgtctccgcctgcacggctggcctattacgccaccgctgttgggcatctacgacttcactgccggcctgccttcgccgccgttgactggtgtctccacttacacggctggtctattatgtcgccggtgttgggcatccacgtcttcaccgaccggcttgccttcgtcgccgccgtctggtgtctccgccagcacggctggcctattacgccgccgctgttgggcatctacgacttcaccgccggcttgccttcgccgctgtcgactggtgtctctgcctacacggctggcctattatggcgccgttgttgggcatccacgtcttcatcgaccggcttgccttcgtcgccgccgactggtgtttccgccagcacggctggcctattatatgctgccgttgttgggcctccgtcgactggtgtcctcacctatatggttggctggtcacaccaccgtacatgggcgtctacgtcttcaccgaccggctggccttcgccgccgccgactggtgtttccgcctgcacagctggcctattatgccgccgctgtttggcgtctacgacttcatcgccggcctgcctctgccgccactgactggtgtgttcgcctatacgtttggcggacttcgccgccgttaatgggcttcatcatctacaccactggctttgttccactggcgccgactggtgtttttgtcaccattgatggactctacgctttagggatggatcagtcagaacatcaccaccggcttgccgtcgtccgccgccgactggtgtttccgcctgcacggctggcctattatgccgccgttgttgggcgtctacgtcttcaccgaccggccgcctcgtccgccgccgactggtgtcaccgcctgcacggctggcctattatgccgctgttgttgggcgtctacgtcttcaccgaccggcttgccttagccgccgccaactggtgtttccacttccacgcctggcctattataccgccgttgttgggtgtctacgtcctcaccgaccggctgtcacgtcccaaaacgactctaaaatatatcctttaa

SEQ ID NO: 91659 - DNA, 3040 bp, Oryza sativa
  Clone ID: PAT_MRT4530_90212C.1
gtagtcattgcttgattgaagatatgtgttgaagatgtccaagtagaaatcctgaatattggagagcctcttgttgtagtaaaataacatggcatcgcatgccgagatgtcgaggctcacaaagacgtcgtggttggtgaagtagcaaaacttgcgaagtagcagcaatagagtttgccagtgccgaagataataaagatgaagtcgctctaccatgatgacaaagttgcattgccgtgatgaagtgaacacgagtcgtcggcaacagaagcaaactggtagtgaagacgcgcagttgtgaagataaaagcactagtcggcgacagcataaccagtcggcgacggaagacgatgatgttcatcagtagtggtagaggcgatgaagatggtaaggccaatcaacactggcagaatcatgcagccatggaagtgaagaaaccagtcggcagccatggcaaacgtaggcagcttgtgttgaagatactgatgcctattagtagtgacagcgatgtagccagctgtgaagaagatagcatcagttggcgttataacaagccagccgtgcaggcggtgacaccagtcagcggcggatgcggcggccggtcggtgaagacgtagacgcccaacaacggcagcataataggccagccgtgcaggcagaaacaccagtcggcggcggtcgaggcggccggtcggtgaagacgtagacgcccaacaacggcggcataaaggccagccgtgcaggcgaggacatcagtcggcggcgacgaaggcaagccggtcggtgaagacgtaggcgcccaacaacggcggcataaaggccagccgtgcaagcggaaacaccagtcggcggcggcgaaggcaagcccgttggtgaagacgtagacgcccaacaacggcggcataaaggccagccgtgcaggcggggacaccagtcggcggcgacgaaggcaagccggtcggtgaagacgtagacgcccaacaacggcggcataataggccagccgtgcaggcggaaacaccagtcggcggcggcgaaggcaagccggtcggtgaagacgtagacgcccaacaacggcggcataaaggccagccgtgcaggcgaggacatcgatcggcggcgacgaaggcaagccggtcggtgaagacgtaggcgcccaacaacggcggcataataggccagccgtgcaggcgaggacaccagtcggcggcggcgaaggcaagccggtcggtgaagacgtagacgcccaacaacggcggcataataggccagccgtgcaggcggaaacaccagtcggcggcggtcgaggcgagccggtggtgatgttctgactgatccattcctggagcgtaagagataagcttaaagccatgaatcccttttatgcatatctggatctggatccagtcgacggcaacgaaggtgagccaacggtgaggatgtagacatccaacaacggcggcataataggccagccgtgtaggcggaggcaccactcggcggcgacggaggcaggccggcggtgaagtcgtagacgcccaacagcggcggcataataggccagccgtgtaggcggaggcaccactcggcggcgacggaggcaggccggcggtgaagtcgtagacgcccaacagcggcggcataataggccagccatgtaggcggaggcaccactcggcggcgacggaggcaggccggcggtgaagtcgtagacgcccaacagcggcggcataataggccagccgtgtaggcggaggaaccaatcggcggcgacggagtcaggccggcggtgaagacgtagacgcccaacagcagcggcataataggccagccgtgtaggcggaggcaccaatcggcggcgacggaggcaggccggcggtgaagacgtagacgcccaacggcggcggcataataggccagccgtgtaggcggaggcaccactcggcggcgacggaggcaggccggcggtgaagtcgtagacgcccaacagcagcggaataataggccagccgtgtaggcggaggcaccagtcggcggtgacagaggcaggccggtggtgaagacgtagacgcccaacaacggtggtgtgaccaaccaaccatataggcggaggcaccagtcggcggcgaagtcgtagacgcccaacagcagcggcataataggccagccgtgtaggcggaggcaccagtcggcggcgacggaggcaggccggtggtgaagacgtagacgcccaacaacggtggtgtgaccaaccaaccatataggcggaggcaccagtcggcggcgacggaggcaggccggcggtgaagtcgtagacgcccaacggcggcggcataatagaccagccgtgcaggcggaaacaccagtcggcggcggcgaaggccagccggtcagtgaagacatggacgcccatgaacggtggtgtgaccgaccaaccgtataggcgatgacaccagtcggcggcgacggaggcaagccggcggtgaagtcgttgttgctatcagcaatggcggtggcgaggacaagccggcggagtggactcgcggccgatcgaccggaaagctgagacgcctcgagtccatgaccagcatcaatcgcctcaatagtgccgcgtagttatatgcgaacaacaacaaaaaatagcaagaaattaatctgagattaaaaatcaatatgataaataatgataaaaatcagattgagtttccccctgactgatttggatcaagtcagagaagaggagcttgaagaagtggtcgacggaaaggaagtgaaaactcccaaagcgaaagcgaagtcggcgactcatgaaattgattccatcgcgctcgttgataggaaactcgacgcaacccctacctggcgcgccaactgtcgaaacatgaattcggcaataataaaagggggtagcgcacgagacctaaagtggatggatgcagggacaaaggatttagacaggttcaggccctctcaatgagaggtaataccctactcctgtttggggatttgaatccgccgggtgtagtatagatctgacga

SEQ ID NO: 91660 - DNA, 519 bp, Oryza sativa
  Clone ID: PAT_MRT4530_90213C.1
atggctttctataaattggtcctcgtggctcgtgaccttttatctaaaaaattaccgtattcgagaaatgcttcaacgtggatgccatcactcattcaatctagcttcgacgttgatggaatacgacgccaggggtggggaagacaatggatgtggaggagaagagtagcggtgtgtcaatcaccagtaattgagggggcaccttgcaaggcaacgattcctgagctcaagcagccaagggtgatggtggtgcggcttagggagatgacgcagcttggcagtggcgaggaaaagcgatggtggttgctagggcgttggagatgggcagaaaaggggcctgctagtggatcccgtcacgctttgcctccttcggccaccattgtatcctctccaaccacatttcctcatgctgccgctgaatcttctccagtcactgtccccgaaggaaatgtgactgaaatattttggccagagcaattttgtaatggtatggataaaattaacactaaaatttattaa

SEQ ID NO: 91661 - DNA, 2572 bp, Oryza sativa
  unsure (1)..(2572): unsure at all n locations
  Clone ID: PAT_MRT4530_90214C.1
cgaccaaaggtagagacggttataacctgaaacggagggaataccacgcatgcatgtgtctaattaagataagcgtgatcatcatttacagactgagactagcaatacatatctaagagaatattcttaggaaattttatggatagatagatatgttttgagtgcaccgatcatatatgactctgataagtgcaccctttttacagccttcaaagtaacagtacaatgcaaccaatgcgcttccacatattgggccgtcgccgagtctttactgccgtccaaataatattaacttgaaactcataacagccttgcttgcaggtaaattcttcatcatagtgccctagaatgaactcaaagctttgagcttcatcttcaccctcaaacacacaaatattgagcaccagctccttatccaatgggacaactactaaaccacgatttagctgaacagatccatcagctgtaatctctgtccgagtgtctgcaacttcactgtcatagagaactatttcatcttcatcatttccagtagtccaagcagtcactctaccagtgaaaacagatgccccccctaacattttcaccgcaagggtagcttcaacggcatattgaacagtcacgaatgcaaattccactacacttagccagctcctgagatgtaaagtctcgagtctccctgttcgacagacgacattgtatggcagcaaacctttgctaaaatctttgtcaactccatcatcgcccttcatctttaaattgaactcgaaaaacatataatcttttgcaccaagacctcgctttgggcctgtcaaagttagcatgtcctccggtgaggtgatgatctggggatcgtccctgctacgcctgaacaaatacacacacctatagtcatactgatctctcgctaacacggtgccgaagatgctgatagggtaacccacgtcagattcgacaaccttgattgaaatgatattcatggaggtctccaaatggcgataatcagaggaagtgagcgagtgaatcggtggcccaagcccagccttagactctttgtcgaggtcgaagaaggcggtgttgaagaggcaaaggcgggtaggctcaaaccactccatcttggggtcgaattcagtcacctcccatatacgaaccatgtgaagaaccttcaacaccttctcctcccatgtgagctcctcctcctcccaattcttcctcctcggtttaggcttcagctccgacttagtctccaccaccttctccttctccttctccttctcctcaccatatgtgtgcttgcgaaggcgcttgccgaccagtccaccgtggtggcgctccacgcatagctccagcatgcggcggttgcggctattaacgcgccgcggcactactcttgccgactggtgtttccgtctacatggctggcctattaagccgccgctgttgggcgtctacgacttcaccaccgacctgcctccgtcgccgccgactggtgtccccgcctatacggtcggttggtcacaccaccgttgatgggcatcgtcatcttcaccgccggcctgcctccgtcgccgccgattggtgcctccgcctacacggctggcctattatgccgccgctgttgggcgtctacgacttcaccgccggcttgcctccgtcgtcgccgagtggtgcctccgcctacacggctggcctattatgccgccgctgttgggcgtctacgacttcaccgccggcctgccttcgtcgccgtcgattggtgcctccgcctacacggctggcctattatgccgccgctgttgggcgtctacgacttcaccgccggtctgcctccgtcggcgacgattggtgcctccgcctacacggctggcctattatgccgccgctgttgggcgtctacgacttcaccgccggcctgcctccgtcgccgccgattggtgccgccgcctacacggctggcctattatgccgccgctgttgggcgtctacgacttcaccgccggcctgcctccgtcgccgccgattggtgcctccgcctacacggctggcctattatgccgccgctgttgggcgtctacgacttcaccaccggcctgcctccgtcgccgccgactggtgtccccgcctatacggtcggttggtcacaccaccgttgatgggcatcgtcgacttcaccaccggcctgcctccgtcgccgccgagtggtgcctccgcctacacggctggcctattatgccgccgctgttgggcgtctacgacttcaccgccggcctgcctccgtcgccgccgagtggtgcctccgcctacacggctggcctattatgccgccgctgttgggcgtctacaacttcaccgccggcctgcctccgtcgccgccgagtggtgcctccgcctacacggctggcctattatgccgccgctgttgggcgtgtgcgacttcaccgccggactgcctccatcaacgccgattggtgcctccgcctacacgggtggcctattatccccccgctgttgggcgtntacgactttaccgccggcctgcttcgtacccctcaattggtgcctccccctaacg

SEQ ID NO: 91662 - DNA, 454 bp, Oryza sativa
  Clone ID: PAT_MRT4530_90215C.1
tccgtcaccacgcgtggagagttccttatgcattttattgagcaacattcattattttaattacaaactcttaattgatgtaaacataggggacaagttattctatctacaagagagtataaaggcatagtcatgtactattttaagaaaaccaaagtgttaactatatttagttgtcggtaaattattcgagccattcctcttcaagttctcccatccattcattcacttcatgcattcatttcatactctattattagttacctctaatggtatgctgttttgcttttgagaatttttccattttttatgtgttttgttaggaacgagagagaaagagggagagaagtaacttaatcaaactctcaatgtgaaatctctctgttgtaaatccaagttcagtttttcttactatttgtcacacttgttcctacctgaaaagggggggacccat

SEQ ID NO: 91663 - DNA, 2046 bp, Oryza sativa
  Clone ID: PAT_MRT4530_90216C.1
atgccacctccaagaaccaagcaccggccgcttctcctcgccaccaccttcctctcccttctgctgctgctgctgctgctcagcttgctctccaccgcgcacaaggcattcgccgtcgctgacgacgacggccaccgcgcgcgcgtgcttcttgcagcagacggcggcgagaggaatgccgatgccgagcacgcggccgccgtggaccggcattgcgccgggacgctccaccgggacgtctgcgtgtcgacgctgtccaccatcccgaacctcgcgcggaagccgctccgggacgtgatctccgaggtcgtggggcgcgccgcgtcggcggtgcgcgcgtcgtcgtccaactgcacgtcctacctccagcggccgcggcagctgcgcacgcgcgaccgcctcgcgctgtccgactgcctcgagctgttcgggcacacgctggacctgctgggcacggcggccgcggagctctccgccgggaacagcaccgccgaggagtccgccgccggcgtgcagaccgtgctgtcggcggcgatgacgaaccagtacacctgcctcgacgggttcgccgggccgtccgcctcggaggacgggcgcgtccggccgttcatccagggccgcatctaccacgtcgcccacctggtctccaactcgctcgccatggtgcggcgcctcccgacccagcggcggcgcggggcggaggaggagccattggaagggtacggccgcgtgcgacgcgggttcccgtcgtgggtgtcggcgtcggaccggaggcggctgcagcagcaggtggcggcggacgtggtggtggcgaaggacgggagcgggaagttcacgacggtgagcgaggcggtggcggcggcgccgaacaacagcgagacgcggtacgtgatatacatcaaggccggcgggtacttcgagaacgtggaggtcgggagcgagaagaccaacatcatgttcgtcggcgacggcacgtggaagaccgtcatcaaggccagccgcaacgtcgtcgacaactccaccaccttccgctctgccacgctcggtaaccaatccttttgctcaattcgtgaaccaattttccaaacctttttttgcatgcacaccgccgtggtgggcacggggtttctggcgcgggacataacggtggagaacgcggcggggccgagcaagcaccaggcggtggcgctgcgggtgaacgccgacctgtcggcgttctaccggtgcagcttcgcgggctaccaggacacgctgtacgcgcactcgcttcgccagttctaccgcgactgcgacatctacggcacggtggacttcatcttcggcgacgccgccgtcgtgctccagaactgcaacctctacgcgcgccgcccggaccccaaccagaagaatgtgttcacggcgcagggccgggaggaccccaaccagaacaccggcatcgccatccagggctgcaaggtcgccgccgccgccgacctcgtccccgtccaggccaacttctcctcctacctcggccgcccgtggaagacctactcgcgcacggtgttcctgcagtccaagatcgacagcctgatacaccccagggggtggctcgagtggaacggcagcttcgcgctcgacacgctctactacgccgagtacatgaaccgcggcgacggcgccgacacgtcggcgagggtgtcgtggccggggtaccacgtgctcaccaacgccaccgacgcggccaacttcaccgtgctcaacttcgtgcagggtgacctctggctcaactccagctcgttcccctacatcttggggttgagctgaaagtggtggcttctggacagtctctggagatggggatttttgggtcttatactggttttggtcctttttggaataagagtagctcatcacaggtttaagataatttgtagtaaacctggagctaccaccaggccatcaccaccaagtgttttgttacgagggttgaagcctacaatggccgaaggctaatcattggaaggggataggttcattgcaaaaaaaaaaaaaaaaaaaaaaaaaaaa

SEQ ID NO: 91664 - DNA, 1136 bp, Oryza sativa
  Clone ID: PAT_MRT4530_90217C.1
atggaggccgccatctttgctccccaccaggtcgccatcctagaactgctagcagtggaggcggaggcgaccgccgccactgcaccggggaggatggccgcgaacggcatgagctcgatatccaagggcggggctgagaactcggaacctatggagctccttgaggagagggagtacgtccctgagcgcaaccttgggagggatagagcgattgatgctggtcatggactcgaggcgtctcaactttccggtcgatcggccgcgagtccactctgccggcttgtcttcgccaccgccattgctgataacaacaacgacttcaccgccggcctgcctccgtcaccgccgagtggtgcctccgcctacacggctggcctattatgccgccgctgttgggcgtctacgacttcaccgccggcctgcctccgtcgccgccgattggtgcctccgcctacacggctggcctattatgccgccgctgttgggcgtctacgacttcaccgccggcctgcctccgtcgccgccgactggtgcctccgcctacacggctggcctattatgccgccgctgttgggcgtctacgacttcaccgccggcctgcctccgtcgccgccgactggtgcctccgcctacacggctggcctattatgccgccgctgttgggcgtctacgacttcaccgccggcctgcctccgtcgccgccaattggtgcctccgcctacacggctagcctattatgccgccgatgttgggcgtctacgacttcaccgccggcctgcctccgtcgccgccgactggtgtcctcgcctatacggttggttggtcacaccaccgttcatgggtgtccacgtcttcgccgaccggctggccttcgccctgccgactggtgtttttgcctatacgattggcggacttcgccgctgttaatgggcttcatcatctacaccactggcttggttccactggcgccgactggtgtttttgtcaccattgatggactgcttcgttcccacatcggctacttttgctgtcaccgagggaatattacaaagctaagtcatcatttattttattctttatatgatattttgtcttttccttcgcctcactacatcaactggttcgccgttgactag

SEQ ID NO: 91665 - DNA, 954 bp, Oryza sativa
  Clone ID: PAT_MRT4530_90218C.1
ctaaatcggcgtcttcttcctcacaggctgtaccaccgcctccggttggtcggtcacaccaccgttcatgggcgtccatgtcttcaccgaccggctggccttcgccgccgccgactggtgcctccgcctacacggctggcctattatgccgccgctgttgggcgtccacgacttcaccgccggcttgcctccgtcgccgccgagtggtgcctccgcctacacggctggcctattatgccgccgttgttggatgtctacatcctcaccgttggctcaccttcgctgccgtcgactgtgggcatcttcgctttcaccgtcgaccgccttcgtcgccgccgactggtgtcttcattgttattgatggacgactttgttcccacattggccacttccgccatcaccaaggggaatattacaaagctaatcagaacatcaccaccggctcgcctcgaccgccgccgactggtgtttccgcctgcacggctggcctttatgccgccgttgttgggcctctacgtcttcaccgaccggcttgccttcgccgccgccgactggtgtttccgcctgcacggctggcctttatgccgccgttgttgggcgtctacgtcttcaccgaccggtttgccttcgccgccgccgactggtgtttccgcctgcacggctggcctttatgccgccgttgttgggcgtctacgtcttcaccgaccggccgcctcgtccgcccccgactggtgtttccgcctgcacggctggcctgttataacgccaactgatgctatcttcttcacggctggctacattgctgtcactactaataggcatcagtatcttcaacacaagctgcctacgtttgccatggctgccgactggtttctgcacttccatggctgcatgattctaccagtgttgattggccttatcttcttcaccgccggtcatctcgtctgctgttga

SEQ ID NO: 91666 - DNA, 273 bp, Oryza sativa
  unsure (1)..(273): unsure at all n locations
  Clone ID: PAT_MRT4530_90219C.1
ctctggccatgggcgcatgccgaggaatataagggtcgatccttggggtggccctttctctatgtacatcactgcaatngaaaaaggaggctatggaaaggaatcaacatttgacacattctaaaaccacaattcaacctgttcttaagtagcctacaaccgtgagcgatacttcagcgaatgcatgctaatgtgactgagacactaacaccagctgttgcaaatgaaccagaccgtgcatgatgatctattgccatttaccaatcatctggt

SEQ ID NO: 91667 - DNA, 831 bp, Oryza sativa
  Clone ID: PAT_MRT4530_9021C.1
atgcatatgatagagggtatttcaaggaatggcttcagtcctaccaatggtgacaccgatgtagggcacgcctctcagccctacctcaacggctgtcccatcgtagcgcacctgcctcactcagggcctcggctagaaccggcgggcggcacggcgcgacggcaagcggtgggggagggggaggctcaccggttcggcggcggggtcgacggagacgcggcggcgaggtcgacggcggagcacggcgcggcgacgaggcacatcgcggcggcggggcgcatcggctcagcggcggcggtggcggcttccaatgaggcggcaacgctggggatgggaaagagagggaaaagggaggtcagcccgcgcggggaggggtggccggctttaaacgacgacgggacggcgcggcggcgtggggctcggggcgttggcgacgcgcggcggcgggacggcgcggcgcaacggcgacagtgcgcggcgcgggcggggctcgaggcgctcatggcgacgacggtgacgcgaaggcgtggtagcggcacggggctcggggcgcggcagcggctcagggcgacggcgacaggacggccgtgcggcggggcgcaggcgcgaggcagcgagaggacgggcgtgcggcggctcggggtgcgaggccaacggcgacggctcgcggcgcatggcgatggcgacgcgacgggcgacacgacggcggcgacgggagtggcgcggggctcggcgcggcgcagccgacgtgggcggcagcggcgcggcgcggcgcgtgcaggggcacggggcgtgagggggagcgcggcagtggagggggggaagggctag

SEQ ID NO: 91668 - DNA, 1596 bp, Oryza sativa
  Clone ID: PAT_MRT4530_90220C.1
atggcgccgctgttgggcgtctacgacttcaccgccggcctgcctccgtcgccgccgagtggtgcctccgtctacacggctggcctattatgccgccgctgttgggcgtctacgacttcaccgccggcctgcctccgtcgccgccgagtggtgcctccgcctacacggctggcctattatgccgccgctgctgggcgtctacgacttcaccgccggcctgcctccgtcgccgccgagtggtgcctccgcctacacggctggcctattatgccgctgctgttgggcgtctacgtcttcaccgccggcctgcctccgtcgccgccgagtggatcctccgcctacacggctggcctattatgccgctgctgttgggcgtctacgtcttcaccgccggcctgcctccgtcgccgccgagtggtgcctccgcctacacggctggcctattatgccgccgctgttgggcgtctacgacttcaccgccggcctgcctccgtcgccggcgagtggtgcctccgcctacacggctggcctattatgccgccgctgttgggcgtctacgacttcaccgccggcctgcctccgtcgccgccgagtggtgcctccgcctacacggctggcctattatgccgcctgggcatcttcgctttcaccgtcgaccgccttcgtcgccgccgactggtgtcttcattgttattgatggacgactttgttcccacattggccacttctgccatcaccaaggggaatattacaaagctaagccgactcccgatgcttggggactatgactagaatggatcagtcagaacatcaccatcggcttgcctccgtcgccgccgactggtgtcctcgcctaaacggttggttggtcacaccaccgttcatgggcatccacgtcttcaccgaccggccacctcgtccgccgccgactggtgtttccgcctgcacggctggcctattatgccaccgttgttgggcgtctacgtcttcaccgaccggccgcctcgtccgccgccgactggtgttttcgcctgcacggctggtctattaagccgccgctgttgggcgtctacaacttcaccgactggccgcctcgtccgccgccgactggtgtttccgcctgctcgctggcctattatgccgccgttgttgggcgtctacgtcttcaccgaccggccgcttcgtccgccgccgactggtgtttccgcctgcacggctggcctattatgccgccgttgttgggcgtatacgtcttcaccgaccggccgcctcgtccgccgccgactggtgtttccgcctgctcgctggcctattatgccgccgttgttgggcgtctacgtcttcaccgaccggctgcctcgtccgccgccgactggtgtttccgcctgcacggctggcctattatgccgccgttgttgggcgtctacgtcttcaccgaccggccgcctcgtccgtcgccgactggtgtttccacctgcacggctggcctattatgccgccgttgttgggcatctacatcttcatcgccggtcgtctcgtctgctgctgactagtgcccttacctctacgtctggtttatacagctaccactactga

SEQ ID NO: 91669 - DNA, 358 bp, Oryza sativa
  Clone ID: PAT_MRT4530_90221C.1
atcgttccttgaccccttggccgaccccttggcttaaaaggggggggggggggggaatccttgttgtttttccaactctacaccctaaagttcaccaaaaaccaaacccaacctattactgattccattaccttgctcaaacctctaaacccttccaattggggttaaccttacttgtcttaaaaattaccttaaaagtgcttaaatttttattaataaaaaggaatggcctttccggttaaggcaaccccattttgattaacccatttaaaaaaccaaaaccttttcaacctctttctaactaattccaaaaccttcgccacctttgtggtgtgcttttttccaaaaatattaaatg

SEQ ID NO: 91670 - DNA, 1203 bp, Oryza sativa
  unsure (1)..(1203): unsure at all n locations
  Clone ID: PAT_MRT4530_90222C.1
atgactacgtcttcgccgacttattatttcactttcatggttgctattgactggatcaccgacatcgttatcttcatcataggagtcggtacaatgcatcttaaaaggtgtcaaacagtaaagctttatatagctgccccgctgacttttttatatagtcaaggtgctgtttgggtttatcaagcaattgattggatacaatatcattgctttttgccacccctccacagtcttcagatttggtaaaagtactcgggagaccatggcgaagatgattgaagcactcggctttggagcgattgatgctggtcatggactcgaggcgtctcagctttccggtcgatcggccgcgagtccactctgccggcttgtcttcgccaccaccactgctgataacaacaacgacttcaccgccggcctgcctccgtcgccgccgactggtgtctccgcctatatggttggttggtcacaccaccgttgttgggcgtctacgtcttcaccaccggcctgcctccgtcgccgccgactggtgcctccgcctacacggctggcctattatgccgctgctgttgggcgtctacgacttcaccgccggcctgcctccgtcgccgccgagtggtgcctccgcctacacggctggcctattatgccgctgctgttgggcgtctacgtcttcaccgccggcctgcctccgtcgccgccgattggtgcctccgtctacacggctggcctattatgccgccgctgttgggcgtctacgatttcaccgccggcttgcctccgtcgccgccgagtggtgcctccgcctacacggctggcctattatgccgccgctgttgggcgtctacgacttcaccgccggcctgcctccgtcgccgccgagtggatcctccgcctacacggctggcctattatgccgccgctgttgggcgtctacgacttcaccgccggcctgccttcgtcgccgncgagtggtgccttccgctacacggctggcctattatgccgccgctgttgggcgtctacgacttcaccgccggccttcgttgccgtcgactggtgtttccgcttacacggctgacctattatgccgccattagtgggcatcttcgctttcaccgtcgaccgccttcgtcgccgccgactggtgtcttcattgttattgatggacgacttggttcccacattggccacttctgccat

SEQ ID NO: 91671 - DNA, 762 bp, Oryza sativa
  Clone ID: PAT_MRT4530_90223C.1
atggcgggagccttctccctccgcctgggaccgcgcatcgcggggacgccaccgccgccggcgagcgcgacgaagggcgagggaagaggagggggccgtcctaccggcagccgagctctggtgtcaaagaagccaaacaaggagcatcatttatggataaggaaggattcagctgggtcagggaaaaaggctcttcatcttgttaatactgtttcaaagttaccaaatgagaaagaagctgtttatggtgcattggataagtggactgcctttgagcccgaattccctactattgcagcagcaaaagctttggaaatgttgaaaaggcggagacaatggctgagaatcatccaggtagccaagtggttgatgagcaaaggccaggtgctgacatggacaacgtatgatacactactgttggctctttttatggatggaaggatagatgaggctgagtcgatttggaataatatcatacaaactcatacacgttcagtacccaagaggttgttttcccggatgatcctgatatatgacacccgccattgtccagacaaggttttggaggtgatatatgctgacatggaggagctaggggtgcatccagacgaggatacaacaagaaggatcggaagagcatttgtgactttaggccaggaagataaagaaaagattgtcctcgagaaatacttgaagaagtacaagtacatgcatttcaatggtgagcgcgttcgggtgcgaaggggaggacctttgacatag

SEQ ID NO: 91672 - DNA, 4062 bp, Oryza sativa
  Clone ID: PAT_MRT4530_90224C.1
ctacacggctggcctattatgccgctgctgttgggcgtctacgacttcaccgccggcctgcctccgtcgccgccgattggtgcttccgccaccgttcatgggcgtccacgtcttcgccgaccggctggccttcgccgccgccgactggtgtttttgcctatacggttggcggacttcgccgctgttaatgggcttcatcatctacatcactggcttggttccactggcgccgactggtgtttttgtcaccattgatggactgcttcgttcccacatcggctacttttgctgtcaccgagggaatattacaaagctaagtcatcatttattttattctttatatgatattttgtcttttccttcgcctcactacatcaactggatccaaatccagatatgcataaaagggattcatggttttaagcttatctcttacgctctaggaatggatctgtcagaacatcaccgaccggcttgccttcgccgccgccgactggtgtttccgcctgcacgttggcctattatgccgccgttgttgggcatctacgtcttcaccgaccggcttgccttcgccgctgccgactggtgtttccgcctgcacggctggcctttatgccgccgttgttgggcgcctacgtcttcaccgaccggccgcctcgtccgccgccgactggtgcttccgcctgcacggctggcctttatgccgccgttgttgggcgtctacgtcttcaccgaccggccgcctcgtccgccgactggtgtttccgcctgcacggctggcctttatgccgccgttgttgggcgtctacgtcttcaccgaccggccgcctcgtccgccgccgactggtgcttccgcctgcacggctgggctttatgccgccgttgttgggcgtctacgtcttcaccgaccggccgcctcgtccgccgccggctggtgttttcgcctgcacggctggcctttatgccgccgttgttgggcgtctacgtcttcaccgaccggcttgccttcgtcgccgccgactggtgtcctcgcctgcacggctggcccattatgccgccgttgttgggcgcctacgtcttcaccgaccggcttgccttcgccgccgccgactggtgtttccgcctgcacggctggcctttatgccgccgttgttgggcgtctacgtcttcaccgaccggccgcctcgtccgccgccgactggtgtttctgcctgcacggctggcctttatgccgccgttgttgggcgtctacgtcttcaccgactggccgcctcgtccgccgccgactggtgcttccgcctgcacggctggcctttatgtcgccgttgttgggcgtctacgtcttcaccgaccggccgcctcgactgccgccgactggtgtttccgcctgcgcggctggcctttatgtcgccgttgttgggcgtctacgtcttcaccgaccggccgcctcgtccgccgccgactggtgcttccgcctgcacggctggcctttatgccgccgttgttgggcgtctacgtcttcaccgaccggccgcctcgactgccgccgactggtgtttccgcctgcacggctggcctttatgccgccgttgttgggcgtctacgtcttcaccgaccggccgcctcgactgccgccgactggtgtttccgcctgcacggctggcctttatgccgccgttgttgggcgtctacgtcttcaccgaccggccgcctcgtccgccgccgactggtgcttccgcctgcacggctgggctttatgccgccgttgttgggcgtctacgtcttcgccgaccggccgcctcgtccgccgccgactggtgttttcgcctgcacggctggcctttatgccgccgttgttgggcgtctatgtcttcaccgaccggcttgccttcgtcgccgccgactggtgtcctcgcctgcacggctggcccattatgccgccgttgttgggcgcctacgtcttcaccgaccggcttgccttcgccgccgccgactggtgtttccgcctgcacggctggcctttatgccgccgttgttgggcgtctacgtcttcaccgaccggccgcctctccgccgccgactggtgcttccgcctgcacggctggcctttatgtcgccgttgttgggcgtctacgtcttcaccgaccggccgcctcgactgccgccgactggtgtttccgcctgcgcggctggcctttatgtcgccgttgttgggcgtctacgtcttcaccgaccggccgcctcgtccgccgccgactggtgcttccgcctgcacggctggcctttatgccgccgttgttgggcgtctacgtcttcaccgaccggccgcctcgactgccgccgactggtgtttccgcctgcacggctggcctttatgccgccgttgttgggcgtctacgtcttcaccgactggcttgccttcgccgccgccgactggtgtttccgcctgcacggctggcctttatgccgccgttgttgggcgtctacgtcttcaccgaccggccgcctcgtccgccgccgactggtgcttccgcctgcacggctggcctttatgccgccgttgttgggcgtctacgtcttcaccgaccggccgcctcgaccgccgctgactggtgtttccgcctgcacggctggcctattatgctgccgttgttgggcgtctacgtcttcactgactggccgcctcgtccgccgccgactggtgcttccgcctgcacggctggcctttatgtcgccgttgttgggcgtctacgtcttcaccgaccggccgcctcgactgccgccgactggtgtttccgcctgcacggctggcctttatgccgccgttgttgggcgtctacgtcttcaccgaccggccgcctcgactgccgccgactggtgtttccgcctgcacggctggcctttatgccgccgttgttgggcgtctacgtcttcaccgaccggccgcctcgaccgccgccgactggtgtttccgcctgcacggctggcctattatgctgccgttgttgggcgtctacgtcttcaccgactggccgcctcgtccgccgactgttgtttcccgcctgcacggctggcctttatgccgccgttgttgggcgtctacgtcttcaccaaccggccgccgcatccgccgcctattggtgcttctgctgcacggtttgcctattatgctgccgttgttgggcgtctacgtcttcaccgaccggccgcctcgaccgccgccgactggtggttccgcctgcacggctggcctattatgctgccgttgttgggcgtctacgtcttcaacgaccggccgcctcgtccgccgccgactggtgcttccgcctgcacggctggcctattatgctgccgttgttgggcgtctacatcttcaccgaccggcttgccttcgccgctaccgactggtgtttccgcctgcacggctggcctttatgccgccgttgttgggcgtctacgtcttcaccgaccggccgcctcgtccgccaccgactggtgcttccgcctgcacggctggcctattatgctgccgttgttgggcgtctacgtcttcaccgatcggcttgccttcgccgccgccgactggtgtttccgcctgcacggctggcctttatgccgccgttgttgggcgtctacgtcttcaccgaccggcttgccttcgccgctgccgactggtgcttccgcctgcacggctggcctattatgctgccgttgttgggcgtctacatcttcaccgaccggccacctcgtccgccgccgactggtgcttccgcctgcacggctggcctattatgctgccgttgttgggcgtctacgtcttcaccgaccggccgcctcgtccgccgccgactggtgcttccgcctgcacggctggcctattatgctgccgttgttgggcgtctacgtcttcaccgaccggccgcctcgaccgccgccgactggtgtttccgcctgcacggctgccctattatgctgccgttgttgggcgtctacgtcttcaccgaccggccgccgcatccgccgctgactggtgtcaccgcctgcatggctggcctgttataa

SEQ ID NO: 91673 - DNA, 513 bp, Oryza sativa
  unsure (1)..(513): unsure at all n locations
  Clone ID: PAT_MRT4530_90225C.1
accttcgccatggacngcgggggcggngcnaaacaacaccgganccgcacnatgcgccggcggactaccncntcnaccgcaagtcggcctccgggatgancggcgancccaaaaaaggcggncgcngcggcaacttctcctgggacggcgccnacggcttccccnacnaagacctcnacctcatctcccccnagaaactccacctcccactccaattccnccgcttccgccgcccgccgccgaatancnncancanccanaantccggcgacgaccaatnntangcangcggcccgncgcctcccccgggtgtcnctcggtcngtgttcatcccctccccaatcctanctgttcttgngaataantgtgtcctgttcntccgtantngttggatcnaccggccatgttgggatttgttnnatatatcatcattatctntcttttaactcttgcnaattttttgtatcttcngnttccgttctttngncttnnacctatttttctttttttctc

SEQ ID NO: 91674 - DNA, 2345 bp, Oryza sativa
  Clone ID: PAT_MRT4530_90226C.1
atgccgccgctgttgggcgtctacgacttcaccgccggcccgcctccgtcgccgccgagtggtgcctccgcctacacggccggcctattatgccgccgtgttgggcgtctacgacttcaccgccggcctgcctccgtcgccgccgagtggtgcctccgcctacacggccggcctattatgccgccgctgttgggcgtctacgacttcaccgccggcctgcctccgtcgccgccgagtggtgcctccgcctacacggctggcctattatgccgccgctgttgggcgtctacgacttcaccgccggcctgcctccgtcgccgccgagtggtgcctccgcctacacggctggcctattatgccgccgctgttgggcgtctacgacttcaccgccggcctgcctccgtcgccgccgagtggtgcctccgcctacacggctggcctattatgccgccgctgttgggcgtctacgacttcaccgccggcctgcctccgtcgccgccgagtggtgtcttcattgttattgatggacgactttgttcccacattggccacttctgccatcaccaaggggaatattacaaagctaagaatggatcagtcagaacatcatcaccggctcgcctcgaccgcggcttgccttcgccgctgccgactggtgtttccgcctgcacggctggcctttatgccgccgttgttgggcgtctacatcttcaccgaccggcttgccttcgccgccgccgactggtgtttccgcctgcacggctggcctttatgccgccgttgttgggcgtctacgtcttcactgaccggcttgccttcgccgctggcgactggtgtttccgcctgcacggctggcctttatgccgccgttgttgggcgtctacgtcttcaccgaccggtttgccttcgccgctgccgactggtgtttccgcctgcacggctggcctttatgccgccgttgttgggcgtctacgtcttcaccgaccggccgcctcgtccgccgccgactggtacttccgcctgcacggctggcctattatgccgccgttgttgggcgtctatgtcttcaccgaccgacttgccttcgccgccgccgactggtgtttccgcctgcacggctggtctattatgccgccgttgttgggcgtctacgtcttcaccgaccggcttgccttcgccgctgctgactagtgtttccgcctgcacggctggcctttatgccgccgttgttgggcgtctacgtcttcaccgaccggcttgccttcgccgccgccgactggtgtttccgcctgcacggctggcctattatgccgccgttgttgggcgtctacgtcttcaccgaccggcttgccttcgccgctgccgactggtgtttccgcctgcacggctggcctattatgccgccgttgttgggcgtctacgtcttcaccgaccggcttgccttcgccgctgccgactggtgtttccgcctgcacggctggcctttatgtcgccgttgttgggcgtctacgtcttcaccgaccggccgcctcgtccgccgccgactggtgcttccgcctgcacggctggcctattatgccaccgttgatgggcgtctgcgtcttcaccgaccggccgcctcatccgccgccgactgctaccactactgatggacatcatcgtcttccgttgccgactggttatgccgccgccaactagtgcttttatcttcacaactgcgcgtcttcgctaccagtttgcttctgttgccgccgactcgtgttcacttcatcacggcaacacaactttgtcaacatggtggagcgacttcatctttattatcttcggtaccagcaaactctattgctgctacttcacaagttttgttacatcaccaaccatgacgttgttgtgaatctcgacatctcggcatgcgatgccgtgttattttactacaacaagtggctctccaacattcatgatttctacttggacatcttcaacacatatcttcaatcaagcaataactattcgacgacaagatgctacagttctcgactctatgttcagttgtttcccaactaatcaaagaacattctacttcaacaacttcaaatatttcggtttagacgagttgggcaacaacatcaactctcctccaatatttcaccttcacggttgacctactatgcaaatgctgatgagcgtctttgtcattatcattggttgctacactgctgttggctggatcaccgacatcgtcatcttcatcatgtcggttgcgtttgtcgtcgtcaagtattttcttcatcttcatgattggtggatttcgtcatcgcctttgatttgcctcgtctgtcaccgac

SEQ ID NO: 91675 - DNA, 218 bp, Oryza sativa
  Clone ID: PAT_MRT4530_90227C.1
ggtgttacaaggttgccgagcgggaggagtgcaacaaggcaatcaggcacaatgggagcacttccaacacgaggtggagaccaccaggacaatgcggggtggtggccacctcggacgttgatcatgccttggcggtggtgaagtcccactattcccgagtggatttggaagtcatcgggaagggggatgctgccgattgctccgacaaagatatttag

SEQ ID NO: 91676 - DNA, 283 bp, Oryza sativa
  Clone ID: PAT_MRT4530_90228C.1
ggcgaacctctccctccaacctctaaatatctttgtcggagcaatcggcagcatcccccttcccgatgacttccaaatccactcgggaatagtgggacttcaccaccgccaaggcatgatcaacgtccgaggtggccaccaccttcgacaaacatcgcacaacaggcatcaacaagttcaccccgcattgtcctggtggtctccacctcgtgttggaagtgctcccattgtgcctgattgccttgttgcactcctcccgctcggcaaccttgtaacaccctaa

SEQ ID NO: 91677 - DNA, 214 bp, Oryza sativa
  Clone ID: PAT_MRT4530_90229C.1
gaagcatttcagtgtcaaagcatacagagtagaacatgatgcacatgacatagtggtacgaggtttaccaatatggccctgaagaagaagctggaacagagtatgaggaacgtgcacactacaaataaagcgtttacaaacacatcgcaggtgacatgacgggtggacatgctgacaaatagattgaaaggggaaccacggatgcttccaagga

SEQ ID NO: 91678 - DNA, 1166 bp, Oryza sativa
  Clone ID: PAT_MRT4530_9022C.1
tcctaccaatggcgacaccgatgtagggcacgcctctcggccctacctcaacggctgtcccatcgtagcgcacctgcctcactcaggggcgggcggcacggcgcgatggcaagcggtgggggagggggaggctcaccggttcggcggcggggtcgacggagacgcggcggcgaggtcgacggcggagcacggcgcggcgacgaggcacatcgcggcggcggggcgcgtcggctcagcggcggcggcggcggcttccaacgaggcggcaacgccggggatgggaaagagagggaaaagggaggggaggtggtgggggtagtgtggggagcaatgggcagccggggaggggcttatataggcgcggggaggggtggccggctttaaacgacgacgggacggcgcggcggcgggacggctcggggcgacggcgacgcgcggcggcgggacggcgcggcgcaatggcgacagtgcgcggcgcgggcggggctcgaggcgctgatggcgacggcggtgacgcgaaggcgtggtagcggcacggggctcggggcgcggcagcggctcagggtgacggcgacgggacggccgcgcggcggggcgcagacgcgaggcagcgagaggacgggcgtgcggcggctcggggtgcgaggccgacggcgacggctcgcggcgcatggcgatggcgacgcgacgggcgacgcgacggcggcgacgggagtggcgcggggctcggcgcggcacagccgacggtgacaggcgatcatgacgatgcgacggcgatgacgacggcgcgcggcgcggtgatgatggcgacgtgacagcgatggcgacggcgcgcggggcgcgaggcggcgcgacggcgcgcggcggcaatagcggcgcggggcgcaaggcggcgcgacggcgcggggcggcagcggcggagcgaggtgacggcgacggcggcgcggggcgcgaggcggcgcgcagcagtgggcggcagcggcgcggcgcggcgcgtgcaggggcacggggcgcgagggggagcacggcagtggaggggggaagggcccctcaaaaaccagaggcatgaactccccagcgacccccacggacttctcaccgcttctcagtcggtccttaattgtcatgagcacgaccttcaaaaccatgcgctcacaacccaccat

SEQ ID NO: 91679 - DNA, 471 bp, Oryza sativa
  Clone ID: PAT_MRT4530_90230C.1
cgtaccctcacaccacacaggcggcggcggcgttgaccgccaggcacgggcggtggcggcgaccaggcgcgggtggcggagtcggcgaccaggcgcggcagcggcgttggccaggcgcgggcggcggcggcgacgtcggccaggcgcggacggcagcatcgacggccaggcgcgacctgcgcgggcggcggcgtcggccagggcgcgggcggcggctgtgaaggccaggcgcgggcggcgaaggccaggccaagtgcgggcagcggcggctcgcctcgtcgccgttgtccatcgatggctaggtagtgcgagccttgcctcatctcgtccgccgcggctcgcctcgtcgtcttctagccgggttgtgcggggccccgctcacccgtcgggtcccctgcggggacgggggcgggtgacgttttccaccgaccacctctgtggggtcggggtcggggggagaagtcggggagc

SEQ ID NO: 91680 - DNA, 478 bp, Oryza sativa
  Clone ID: PAT_MRT4530_90231C.1
actagcatgcactaattaataatacatataaggggatgatcaaaatgaaacaaaattacacaagattattgcttaatagcatcagagaataagcaatataatcctccctcttttttgagagagatatagaaatgatcaaatccatcctaatctaatcttagttaattatcatatatacacacggcttagtagtaattaaaattttgatcaaatataattacttatctctccgggtggctcggcttggcttggaacgtgccacgactggccggcggcgagccaagatggcggcgtcggcgacggccatggcgctcttgcagccgtaaaggtcgaggaatccgacgaacccgctgccgccggcgagccaccgccaccgatgcttggatgaagcggcggcggcggcggcgtctgaacggggggcgttcgggcaaatcgtcggcgctatcctcctccctggggcactcggcaatggccgcgg

SEQ ID NO: 91681 - DNA, 3039 bp, Oryza sativa
  Clone ID: PAT_MRT4530_90232C.1
tttttcagcatgaaggtgggcgtggagatattggacgcgtcggagcttgcgcccaaggacggcgccggcgcctgcaacgcgttcgtagaggtggagttcgacgggcagaagcagcgcaccccgaccaagcccgccgatcgttccccgcaatggaaccacaccctcgtgttcgacgtccgcgacccctcccgcctcccctccctccccgtcgacgtctccgtccaccacgatcgcagcctcaccgaccaccacgccacccgcctccacaccttcctcggccgcgtccgcatctccgctgcctccctcgccccctccccgcaggacgccctcctccagcgctacccgctcgagaagcgcggcctcttctcccgcgtctccggcgacatcgccctccgactctacctcatcgccaacgactcccctgatcctcctcctgctcccgctgtccaccaccaccagcaccagcctccccagtccgtctccgccgagcaacccgacagcaggcctcctcccgcctttccccatggagaggcgcaggcgcaggcgcagccaccgcccccggagtcggagtccaagggcaagaccacccacgaccacgagcctcctcgtgtgttccgctccgtccccgcgtgccacgctccacgcggtggccgcgccgccaccgccgccaggccagaccgtgatcatgccgcgccctcccggccccgcccccgggcccccccctcggcgttcggcctggtggagaccaagccgccgctgccggccaagatgggcccacgcgccgcggtggccgccgcggccaagatcgcctccacctacgacatggtggagcccatgtcgtacctgtacgtgagcgtggtcaaggcgcgcgacctccccaacatggacatcaccggcgcgctcgacccctacgtcgaggtcaggctcggcaacttcaagggcgtcacccgccacctcgagaagaaccccaacccggtgtggcgccaggtcttcgccttctcccgcgatcacctgcagtccagccagcttgaggtggtcgtcaaggacaaggacgtcctcaaggacgacttcgtcggccgcgttgtcttcgacatgaccgacatccccaaccgcgtcccgcccgacagccccctcgccccgcagtggtaccgcctcgccgaccgctccggcgagaagattcgccacggcgagatcatgctcgccgtctggaacggcacgcaggccgacgaggcgttcccggaggcctggcactcggacgcccactccgtctcccttgacagcctcgccagcacgcgctccaaggtgtactactcccccaagctcatctacctcaaggtggtggccatcgcggcgcaagacctcatccccgccgagaagggccgcccgctggcaccgtccatcgtcaagatacagctgggcgggcagacgcggcggacgcggtcgcaggggtcggccaacccgatgtggaacgaggagttcctgttcgtggccgcggagccgttcgacgagccgctggtggtgacggtggaggagcgcgtggcggcggggcgggacgagccggtggggcgcgtgatcatcccggtggcggcgccctacgtgcctcgcaacgacctggccaagtcgatcgaggccaagtggttcagcctgtcgcgggcgctgacggcggacgaggccgcggcggcggaggcgacgaagctcaagtcgtcgttcgcgagcaagatccacctgcggctgagcctggagacggcgtaccacgtgttggacgagtcgacgcactacagcagcgacctgcagccggcggcgaagaagctgaggaagagcccgatcgggatcctggagctgggcatcctcggggcgcggaacctggcgggcgggaagagcccctactgcgtggccaagtacggggcgaagtgggtgcggacgcggacgctggtggggacggcggcgccccggtggaacgagcagtacacgtgggaggtgttcgacctgtgcacggtggtgacggtggcggtgttcgacaactgccacctgacggggggcggggacgccaaggaccagcggatcggcaaggtgcgggtgcggctgtcgacgctggagacggagcgcgtgtacacccacttctacccgctgatgacgctgacgccggggggcctgaagaagaccggggagctccacctggcggtgcggttcacgtgcacggcgtgggccaacatgctggccatgtacgggaagccgctgctgcccaagatgcactacacccaccccatctcggtgctgcagatggactacctgcggttccaggcgatgcagatggtggcggcgcggctgggtcgcgcggagcccccgctgcaccgtgaggtggtggagtacatgctggacgtggactcccacatgttcagcctgcgtcggagcaaggccaacttcaagcggatgacgtcgctcttctccggggcggtggcggtggcgcggtggatggatgggatctgcaagtggaagaacccggtgaccaccatcctggtgcacgtgctgttcctcatcctggtgtgctacccggagctgatcctccccaccgtcttcctctacctgttcgtcatcggggtgtggaactaccggaggcggccgcggaagccggcgcacatggacacggcgctgtcgcacgcggaggcggagcaggtgcacccggacgagctggacgaggagttcgacacgttccccaccagcaagcccggggacgtggtgcggatgaggtacgaccggctgcggagcgtggccgggagggtgcagacggtggtgggtgacctggccacgcagggggagcgcgcccaggcgctgctcagctggcgcgacccccgtgccacctccatcttcgtcctgctctcgctcatcatcgcggtggtgctctacgtcacgccgttccaggtggtggcggtggtggtggggctgtacctcctccgccatccgcgcttccgcagcaagcagccgtccgtccccttcaacttctacaagcgactacccgccaagtccgacgtcctcctctga

SEQ ID NO: 91682 - DNA, 638 bp, Oryza sativa
  Clone ID: PAT_MRT4530_90233C.1
ttcccgttcgacccagcgtccgctcaacttgcatgtacatcagggggggggggggggggggtacaaaaatcattgtcgttagctctattctaagacctgtctgctcacttcttggaacctcaaaagggcagtttgggggtggctgggtctatcggagaggaaccattcctggtatcacttatgcttgtaatgtatattctgggggggggtccttcttcacaatgccatcttctccacatttcatacactgccatgattgggcaagttcaccattttgctgactatacaagggctactatgcaaaatccaggttagcaacttctccgaatcttatttacacatgcataactcttatacttctggaagcacattcctatctgtataagcaatgacatactgcgactaagcctcaactgtttctcacacctattcacaagaaatctccagtcattgtgacctaattattcatctatgaacattctatctaattctacttggaatctgtccacatctctaacatccatatactgattacttcatcccactcattatacttcttaaattgtccttcaggcaataatgctgcaaagagagcattgcatcaaaggttcggactgcagcagactgatgtccccatt

SEQ ID NO: 91683 - DNA, 270 bp, Oryza sativa
  Clone ID: PAT_MRT4530_90234C.1
atggtccatggagtcgccggacaaaccacagagcaacacgtcgattggtgccaccgccgctacgcgatcaacaatttgacccctttggtccaaaatccatcaccagctgtagcagcagcagcagttgtaaccatggggggctcgtctctgactcggacgtcgaccaaccgtcgtctgcacggaacgtatttcgagcagaaacttgcggtgcacaactcttctgctccctgcagaaagaatggttcagaggaaaacttggatgccaaggaa

SEQ ID NO: 91684 - DNA, 855 bp, Oryza sativa
  unsure (1)..(855): unsure at all n locations
  Clone ID: PAT_MRT4530_90235C.1
atgaagccgcaccctttgattggcgagttcaaccatcggctgcaccatctgccgcccgcgctctccgattggatgaggttcaaaggcacagagaatccaccattacaagcggatttgtatttcagcacacaaggagtgctggctgtttttttaacgctgaatcgatgcggcggcggcgctgctgatcttagcggtttagccaaaggacatttagctagcatggatgaacttgtgcaagaacaacgccaccttgtgcacatcaggtcgaaaatgttgttgtctgagatccttagaagcataggcgctaatgaggcacgctataattgtcatgctgtcactgatgggtatgttggctctgctgaggcatctgtttatggtgtaagaggaggtgaagagccatttcttgttcgtgcacatggcatcccagctataaggccatgtgatgcggaagaaagtgctgcacatgcactaattgctgttatcaagaaagagtgcagagtggagatcgaagatacgaactggcttgatatgaatcgctatcacgctgaggtgttctgactgaagagagctcttgggagagtcaggaaggaacgtaatagtcttgcaaagaaggctcgtttgctagaaattggttgggatagagctttagattcattggcttttgtgaatcaaatatgtaatgatacatgttcctttgctttaggaggccctggtgctgatgatcttaatcatcgtgaggttggagtgctatatgatgtgcatcgtcttggtgaatatgctgaatctaaaatggatgaaggtcnnnnnnnnnnnnnnnnnnnnnnnnnnnnnnnnnnnnnnnnnnnnnnnncgtag

SEQ ID NO: 91685 - DNA, 181 bp, Oryza sativa
  Clone ID: PAT_MRT4530_90236C.1
tctttatagacccacgcgcctttcttttacgagtagctgctgctgcagagctaggttgttctttgaacggtgagggcgacgaaggagctgcacagaagcattctcctcgctctgcatactcgccagacttggccggatgcaatggatgaatgaccccgttagaccccaatgggaaacatca

SEQ ID NO: 91686 - DNA, 166 bp, Oryza sativa
  Clone ID: PAT_MRT4530_90237C.1
ctagctgagcggccttcctttttttttttggggaatcatttatacagtggttcactcacgtggtgggacacatgacgcttcagagtgtgccccaacaaccaaaattactttgcaccagcttgctcatctacaaagatcttgcacgctccgttttttgctacataca

SEQ ID NO: 91687 - DNA, 1460 bp, Oryza sativa
  Clone ID: PAT_MRT4530_90238C.1
atttgttcatcctgccttggccatggacccttatattttgatatcccggaccgaggcaaggcaggatgaacaaatgatgatgatcatcagatcttccttgcagactcatcggcgaaaagaacgtcgtctatacacgtcactatgttgtaagccaggctctccagcaccctggagtagccctccaggatggcttgcccaacgtccttgttgtactggatcttgctggcgtccagggtggtctgggagaggccggggaagcgctgcttgaggcagagcaggacgtcgccggcgcggctcgccagcatcacgttcttgtcggactccatgagctccttgacggcgctccacggcgacctggagtgcccctggctcgccttccgccgccacacgtgcatcgccgcctcgacgcggtcggccgcctcgagggcgtcgtgctccgacgagatctccagccggtccaggaggtactccggcgagaacttgcccgggaacgacatgtgccggtagatcaggtcgcccacgctcgcccgcccgcacttgggaagcgtttgcttgtacagctcagggatgcgaatctccgcaagaacgccattgttgatggccatggccgccttgtggatctggctcgcacagtcgtgcttctgccgcaggtctctccgcgccgactccgtcagcccgggcttggtgacgcacggcacgggcagccaccacttgtcaccgtcgcggtggctcaccggacggcacggcgccgcggcggcggcggcgcagctatccttctgacccttgtcgttcacgtaccagaattcagtcttctggaagctgtccagaatctcgagaagcatgtcgtcgagcttctcgagggcggggaggttgacgtagatgtcggacctcggcctggtcgccatcacctcccgcacggtgccgtcgggcatgatctccttggaagggaagagctcgacgatgtagtcgcacaccgagaggaggcagtccatctcccgccgccacatcgacctcttctccgccagcaggggctccagccggtggcagccgccgaacacggtcgcatagaggttggtgatggcattggagatggcgacggcggtggagacccccttgccgctcccggacatgtcctcgccgagcagaagcttcgagaacctctccttgatcagctgcaactcgccgtcgccggccttgcggtcacggcccgcgccgcgccgcgccgcgccgagcttctgcagcagcggcggcggcggcgccttcgctatgctgcacacgggccaccgcgggtacggcgaaccgtacgggctcccgggctcgccgctgcactcggacgacacgtccgacgaggcctcccgccggtggcggccgcgccgccgctccacgtcgtcgatgtccccgtagtcgtcgcgcgcgtcgacctccgagctctcgtcgcacgtcgtcgacggcgtgtccat

SEQ ID NO: 91688 - DNA, 431 bp, Oryza sativa
  Clone ID: PAT_MRT4530_90239C.1
gcacgagggcaccatcgaagactgcgagcaagtgatcaagaacctcgacggcagcctgtacagtgggcgcacgatgagggtgaacttcgcggacaagcccaagccgaagctgccgctttacccgcgagactgagcacaagctgttcgtcggcaacctgtcgtggacggtcacctcggacgatgctgacggagatgttccagaagtgcggcaacgtggtcggcgcccgggctgctctacgacggcgagaccggccggtcccgtggctacggcttcgtctgctactccaccaaggaggagatggatgaagctctttcctcgctcaatggaacggaactagaaggcagggagatccgggtcaacctcgcccttggaaagaaataatcacagagtaatagatttacttcacatgcacaggagaaacttgcaatac

SEQ ID NO: 91689 - DNA, 470 bp, Oryza sativa
  Clone ID: PAT_MRT4530_9023C.1
tactatacagggaagggcaattggaggaagagagcggctgttgttacgcctaaagcattattcacgctcggcgagatggcaataatccatgtcatccaccttctgtgactatcaaccgatcactgaaccgcgacatgaaaagaggcaacagcttgatctcgggcgcgttaaggtggcgatcactgccttgtttgccattcttatcatcatgattcatagggcggcgcgaacattttctacaccacgagcttcaactatggtgacagcgcttcctcctccagttcactttcagaccgccggtcacaccccagcacttactgcgtgggcaagaatatcaaggccatgtgcgcgcacaccgactagactgacgcttacgagacgagcctcgtccaagccggcggcaaccccagcgcgggctcgtcacgtggtcgcccaggacgtagcgcacgcataacggcctgcatcggtta

SEQ ID NO: 91690 - DNA, 2852 bp, Oryza sativa
  Clone ID: PAT_MRT4530_90240C.1
gtctcgtgcgctaccccgttttattattgccgaaatcatgtttcgacagttggcgcgccagatcaatcttctggtatattttcctgtgtcgatcttgtgtcggtcggcggagatcaagccgaagctgtcgacgacgccctcacgcatcgagactttcttcgtgctttgccggcggacatgtggtggccatcgctggctttacagctgccccggtcggtcatctacatgctgccgactctccgaggtcgcagggccgttgatggcttccgccggctactgctgatcgaggcattgcgacccaagctgatcgacgcgcacgactcgagatcaaacaatcattcactgcttgcggcctcgctgccacggttggtgtgtgccgccgccgttgccgatagcgacatcgtcttcaccactggcttgcctccgtcgccgccgattggtgcctccgcctacacggctggtctattatgccgccgctgttgggcgtctacgacttcaccgccggcctgcctccgtcgccgccgagtggtgcctccgcctacacggctggcctattatgccgccgctgttgggcgtctacgacttcacgccgccggcctgcctccgtcgccgccgattggtgcctccgcctacacggctggcctgttatgccgccgctgttgggcgtctacgacttcaccgccggcctgcctccgtcgccgccgattggtgcctccgcctacacggctggcctattatgccgccgctgttgggcgtctacgacttcaccgccggcctgcctccgtcgccgccgactggtgtctttgcctatatggttggttggtcacaccaccgttgttgggcgtctacgacttcaccgccggcctgcctccgtcgccgccgactggtgtcttcgcctatatggttggttggtcacaccaccgttgttgggcgtctacatcttcaccgaccggccgtctcgtccgccgccgactggtgtttccgcctgcacggctggcctattatgccgccgctgttgggcgtctacgacttcaccgccggcctgcctccgtcgccgccgagtggtgcctccgcctacacggctggcctattatgccgccgctgttgggcgtctacgacttcaccgccggcctgcctccgtcgccgccgattggtgcctccgcctacacggctggcctgttatgccgccgctgttgggcgtctacgacttcaccgccggcctgccttcgtcgccgccgattggtgcctccgcctacacggctggcctattatgccgccgctgttgggcgtctacgacttcaccgccggcctgcctccgtcgccgccgagtggtgtcttcgcctatatggttggttggtcacaccaccgttgttgggcgtctacatcttcaccgaccggccgtctcgtccgccgccgactggtgtttccgcctgcacggctggcctattatgccgccgctgttgggcgtctacgacttcaccgccggcctgcctccgtcgccgccgactggtgtcttcgcctatatggttggttggtcacaccaccgttgttgggcgtctacgtcttcaccgaccggccgtctcgtccgccgccgactggtgtttacgcctgcacggctggcctattatgccgccgctgttgggcgtctacgacttcaccgccggcctgcctccgtcgccgccgagtggtgcctccgcctacacggctggcctattatgccgccgctgttgggcgtctacgacttcaccgccggcctgcctccgtcgccgccgattggtgcctccgcctacacggctggcctattatgccgccgctgttgggcgtctacgacttcaccgccggcctgcctccgtcgccgccgattggtgcctccgcctacacggctggcctattatgccgccgctgttgggcgtctacgacttcaccgccggcctgcctccgtcgccgccgagtggtgtcttcgcctatatggttggttggtcacaccaccgttgttgggcgtctacatcttcaccgaccggccgtctcgtccgccgccgactggtgtttccgcctgcacggctggcctattatgccgccgctgttgggcgtctacgacttcaccgccggcctgcctccgtcgccgccgactggtgtcttcgcctatatggttggttggtcacaccaccgttgttgggcgtctacgtcttcaccgaccggccgtctcgtccgccgccgactggaatggatcagtcagaacatcaccaccggctcgcctcgaccgccgccgactggtgtttccgcctgcacggctggcctattatgccgccgttgttgggcgtctacgtcttcaccgaccggcttgccttcgccgccgccgactggtgtttccgcctgcacggctggcctttatgccgccgttgttgggcgtctatgtcttcaccgaccggcttgccttcgccgccgccgactggtgtttccgcctgcacggctggcctttatgccgccgttgttgggcgtctacgtcttcgccgaccggccgcctcgtccgccgccgactggtgcttccgcctgcacggctggcctttatgtcgccgttgttgggcgtctacgtcttcaccgaccggccgcctcgactgccgccgactggtgtttccgccggccgcctcgaccgccgccgactggtgtttccgccggccgccgcatccgccgctgactggagtcaccgcctgcacggctggcctcttataacgccaactgatgctatcttcttcacggctggctacatcgctgtcactactaataggcatcagtatcttcaacacaagctgcctacgtttgccatggctgccgactggtttcttcacttccat

SEQ ID NO: 91691 - DNA, 1368 bp, Oryza sativa
  Clone ID: PAT_MRT4530_90241C.1
atggccggcgaagtggtggcaatacatgtcgacgtcggccatggcgtcccagatgaagcacaagcaagtaccaagatacagaaactggatggcagccacatcacccccattgcgcagggcaagatccacaggttccctcgaggcctgattgggatcggcggctcaaacgagcagcggtacatcgtgccgaccttcgtggccattggcccctaccaccatggcaagcctcacctgcacaagatggaggaggtcaagctcgcggcgatgaaccgcttcatcgcaaccgcgaacggcgcctctgccggtgatgtctccggcaagctcctctccgtcgtcggcgacgtgcgcggctgctacgccgacgacgagaagttgaagtgcttcagcgacgatgacttcgcggccatgatgctcgtcgacggctgcttcctcctgcagttcatgatggagaaaaggaagccgctgttcgagggccgcgcgctgtcgtcggagtacagcatcctcaaggacatgatgctgctcgagaaccaggtcccatggctggtgctcgacaccctcatggagttcctgcccatggagatggaggtggagcaaaatgtccgctgttttgtggccgacgtgggagacatgttcctccgcaataataaggaacacgaagtctcgttgacaacctcctgtttcagcgtattgttcgaggtcagtccacataaaagcagcttcctcaaggactacaagccggcgaacctcctcgacctcctccggtccagccaaatatttcgcatgccaacggaagagctctcggtacggctggtcggctcgtcgctgctgtccagcagcgccgtcgagctggcccagatcggcgtcaacctgacggcaagcacggcggagtggttcggggatatgagcgtcaaggagggccctgtctacggcgagctttccctgtcgccgatctttctcaacgacgtgagcgccggctggctcgtgaacatggcggccctggaggcgagcggcggcgccaccaccgcggatcagtcgtcctcgtcctcgtccgtgatgtgctcgttcctgtcggtggtggcgatgctgatggacagggaagaagacgtgcatcagctgcgggcgaagcaggtgctgtacagcacgctgagcaacgcgcagacgctggacttcttcaagcggatcagccagcacctcggcttcggccaccgctacttctacatcttgcaacagatcaacaagttcaagcaaggcaggccggtgaggtccgccgtccacaagttcctgtacaagcacataagggccatcagcatcatcttgtccatcgccagcgtgctcgttggcatcttcaaagcactcagggagctatag

SEQ ID NO: 91692 - DNA, 233 bp, Oryza sativa
  unsure (1)..(233): unsure at all n locations
  Clone ID: PAT_MRT4530_90242C.1
gctccactgcgttcgtttaattagttctacaccagacacgcaaagcatcacagccgccattagtgaccgtgacagcatagattacaagctgatagtacggtaccgtctatagagcagcagactattgngaacctccagtcatttcagccacctcattactacgcgaaaagtaaagatagaaaggcacaataaccttgcaagaggcgtagtaactccgacaaaacagaggtctc

SEQ ID NO: 91693 - DNA, 334 bp, Oryza sativa
  Clone ID: PAT_MRT4530_90243C.1
tagcgtccacgcgtgcggcgactgcgccgtgccctagattccgacggagctggagccgcgcactcggcggcaaaatcaccgatgtatatgccctcacatcgggggcaaatgggcggcgaatccggtcttcgatccgcggaatccggagcgggtcagccatgatgttggtgcagttagacgagtcggccgcggataaagctgatgcagggatggcagtggcgccgacgtccaacttggggatggcggacacgggggtgtaccggtcgggggtctcggactctgacagtgttggtttcctcaggggccacggtatatgatcagtaatgtatatgtg

SEQ ID NO: 91694 - DNA, 4163 bp, Oryza sativa
  Clone ID: PAT_MRT4530_90244C.1
acgacttcaccgccggcccgcctccgtcgccgccgactggtgtcctcgcctatgcggttggttggtcacaccaccgttcatgggcatccacgtcttcaccgaccggctggcctacgccgccgccgactgatgtttccgcctgtacacggctggcctattatgccgccgctgttgggcgtctacgacttcaccgccggcctgcctccgtcgccgccgagtggtgccttcaccgccggcccgcctccgtcgccgccgagtggtgcctccgcctacacggctggcctattatgccgccgctgttgggcgtctacgacttcaccgccggcctgcctccgtcgccgccgagtggtgcctccgcctacacggctggcctattatgccgccgccacgctggctacccgctgttgggcgtctacgacttcaccgccggcctgcctccgtcgccgccgactggtgcctccgcctacacggctggcctattatgccgccgctgttgggcgtctacgacttcaccgccggcctgcctccgtcgccgccgactggtgtcttcgcctatatggttggttggtcacaccaccgctgttgggcgtctacgacttcaccgccggcctgcctccgtcgccgccgattggtgcctccgcctacacggctggcctattatgccgccgctgttgggcgtctacgacttcaccgccggcttgcctccgtcgccgccgagtggtgcctccgcctacacggctggcctattatgccgccgctgttgggcgtctacgacttcaccgccggcctgcctccgtcgccgccgagtggtgcctccgcctacacggctggcctattatgccgccgctgttgggcgtctacgacttcaccgccggcctgcctccgtcgccgccgactggtgtcttcgcctatatggttggttggtcacaccaccgttcatgggcgttcacgtcttcaccgccggcctgcctacgtcgccgccgattgatgcttccgcctacacggctggcctattatgccgccgctgttgggcgtctacgacttcaccgccggcctgcctccgtcgccgccgagtggatcctccgcctacacggctggcctattatgccgccgctgttgggcgtctacgacttcaccgccggcctgcctccgtcgccgccgagtggtgcctccgcctacacggctggcctattatgccgccgctgttgggcgtctacgacttcaccgccggcctgcctccgtcgccgccgagtggtgcctccgcctacacggctggcctattatgccgccgctgttgggcgtctacgacttcaccgccggcctgcctccgtcgccgccgagttgtgcctccgcctacacggctgggctattatgccgccgttgttggatgtctacatcctcaccattggctcaccttcgttgccgtcgactggtgtttccgcctacacggctgacctattatgccgccattagtgggcatcttcgctttcaccgtcgaccgccttcgtcgccgccgactggtgtcttcattgttattgatggacgactttgttcccacattggccacttctgccatcaccaaggggaatattacaaagctaagatccagatccagatatgcacaaaagggattcatggctttaagcttatctcttacgctccaggaatggatcagtcagaacatcaccaccggcttgccttcgcagccgccgactggtgttttcgcctgcacggctggcctattatgccgccgttgctgggcgtctacgtcttcaccgaccggcttgccttcgtcgccgccgactggtgtttccgccagcacggctggcctattatgccgccgttgttgggcgtctacgtcttcaccgaccggccgcctcgtccgccgccgactggtgttttcgcctgcacggctggcctttatgccgctgttgttgggcgtctacgtcttcaccgatcggcttgcctttgccgccggagactggtgtttccgcctgcacggctggcctttataccgccgttgttgggcgtctacgtcttcaccgaccggcttgccttcgccgccgccgactggtgtttccgcctgcacggctggcctttatgccgccgttgttgggcgtccacgtcttcaccgaccggcttgccttcgccgccgccgactggtgtttccgccagcacggctggcctattatgccgccgttgttgggcgtctacgtcttcaccgaccggccgcctcgtccgccgccgactggtgtttccgccgctgttgttgggcgtccacgtcttcaccgaccggcttgccttcgccgccgccaactggtgtttccgccagcacggctggcctattatgccgccgttgttgggcctgtcttcaccgaccggcttgcctttgccgccgccgactggtgtttccgccagcacggctggcctattatgccgccgttgttgggcgtctacgtcttcaccgaccggccgcctcgtccgccgccgactggtgtttccgccggcttgccttcgccgccgccgactggtgttttcgcctgcacggctggcctttatgccgctgttgttgggcgtccacgtcttcaccgaccggcttgccttcgccgccgccgactggtgtttccgccagcacggctggcctattatgccgccgttgttgggcgtcgaccggcttgcctttgccgccgccgactggtgtttccgcctgcacggctggcctttatgaccgctgttgttgggcgtccacgtcttcaccgaccggcttgccttcgccgccgccaactggtgtttccgccagcacggctggcctattatgccgccgttgttgggcctcgaccggcttgccttcgccgccgccgactggtgtttccgccagcacggctggcctattatgccgccgttgttgggcgtcgaccggccgcctcgtccgccgccgactggtgtttccgcctgcacggctggcctattatgccgccgttgttgggcgtctacgtcttcaccgaccggcttgccttcgccgcctccgactggtgtttccgcctgcacggctggcctattatgctgccgttggtgggcgtctacgtcttcaccgaccggccgcctcgtccgccgccgactggtgtttttgccatggcatccgccgctgactggtgtcaccgcctgcacggctggcctgttataacgccaactgatgctatcttcttcacggctggctacatcgctgtcactactaataggcatcagtatcttcaacacaagctgcctacgtttgccatggctgccgactggtttcttcacttccatggctacatgattctaccagtgttgattagccttatcttcttcaccgccgcgcctctacgtctggtttatacagctaccactactgatggacatcatcgttttctgccgccgactcgtgttatgccgccgtcgactggtgcttttatcttcacaactgcgcgtcttcactaccggttcacttcatcacggcaacacaactttgtcatcatggtggaccgacttcatctttattatcttcggaaccagcaaactctattgctgctacttaacaagttttgctacatcaccaaccatgacgttgttgtgaatctcgacatctcggcatgcgatgccgtgttattttactacaacaagtggctctccaatattcaggatttctacttggacatcttcaacacatatcttcaatcaagcaataattattcgacgacaagatgctacagttctcgactctatgttcagttgtttcccaactaatcaaagaacattctacttcaacaacttcaaatatttcggtttagacgagttgggcaacaacatcaactctcctccaattatttgtcttcacggttggcctactacgcaactgccgatagaggatctcatcgttatcatcggctgctacatcgctattgactggatcaccgacatcgtcatcttcatcaacatcttgtcaagcctcatcaacatagccaactctgctgccgttgatgggaaacttcgtcatcatagtcggctatctctgttgccgctaatcatcattaccgtcggatgcgtttgtcgccgccgattattttcttcatcttcatgattggtggatttcgccatcaccgttgatgcgcgtctacgtcttcatc

SEQ ID NO: 91695 - DNA, 2013 bp, Oryza sativa
  Clone ID: PAT_MRT4530_90245C.1
ccaaccatcactgggcctcttcatcttcaccgactagccgcctcgtcagccgccgactagtgtttccgcctgcacagctggcctattatgccgccgtttgttgggcttatatgtctccactgccggcttgccttcgccaccgccaactgatgtctctgcctgcacggctggcctattatgccgccgttgttgggggtctacatcttcaccgccggctcgcctccgtcgccgccgactagtgtttccgcctacacggtcacaccatagttgttgggcgtctacgtcttcacagccggcttgccttcgccgccgctgactggtgcctccgcctacatggctagtctattatgccgccgttgatgggcgtctacgttgtcaccgaccggccgtctcgtccgctgccgactggtgtttccgcctacacggctgacctattataccgctgttgttgggcgtccacatcttcaccaaccggcttgccttcgctgccgccgattggtgtctctgcctacacggctggcctattatgtcaccgttattgggcgtctacgacttcatcgctggcttgcctctgtcgccaccgactgatgtttccgcctatacggatggtggactccgtcaccgttgatgggcctagtcatctacaccaccggcttgcttccgccgccgccgactggtgttttcattgccattgatggacgactttgttcccatactacttatcctatatgtttgttctgtaggatccagatccagatatgcataaaagggattcatggctttaagcttatctcttacgctccaggaatggatcagtcagaacatcaccaacggcttgccttcgccgcggccgactagtgtcaccgcctgcatggctggcctattgtgccgccgttgttgggcgtttacgtcttcaccgccggcttgccttcgccgcacgcgactggtgtcactgcctgcacggctggcctattctgccgccgttgtcgggcgtctacgtcttcaccgaccggcttgccttcgccgccgccgactggtgtcttcgcctacacggctggcctattatgccgccgttgttgggcgtctacgtcttcaccgccggcttgccttcgccgcacgcgactggtgtcactgcctgcacggctggcctattctgccgccgttgtcgggcgtctacatcttcaccgaccggcttgcctttgccgccgccgactggtgtctttgcctacacggctggcctattatgccgccgttgttgggcatctacgtcttcaccgccgccgactggtgtcgccgactgcacggctagcctattatgccgccgttgttgggcgtctacgtcttcaccgaccggcttgccttcgccgccgccgactggtgtcttcgcctacacggctggcctattatgccgccgttgttgggcgtctacgtcttcaccgccggcttgccttcgccgccgccgaatggtgtcttcgcctacacggctggcctattatgccgccgttgttgggtgtctatgtcttcaccgactggccgcctcgtatgacgccaactggagttatcgtcttcacggttggccacctcgtcgtcatcattctacttcttccatcgccgactggttatgccgccgcaggttggtgtttttatcttcacaactacgcgtcttcgctaccgatttgcttctgttgctgcagactcatcttcacttcatcacggctatgcaactttatcaccattatggggtgacttcatcttcattatcttcggcacaggcaaattctattgcctctactttgcaagatttgctacttcaccaaccaagacgtctacaagagctccgacatctcggcatgcatcaccaaatatgatgccatgttattttactacaacaagtggtgttccaatattcaatatttctactcggacatcttcaacacgtatcttcactcaagcaatgactactcgacgacaagaagctacagttctcgactgtatatttagttgttttccaac

SEQ ID NO: 91696 - DNA, 6078 bp, Oryza sativa
  Clone ID: PAT_MRT4530_90246C.1
ttataacaggccagccgtgcaggcggtgacaccagtcagcggcggatgcggcggccggtcggtgaagacgtagacgcccaacaacggcggcataaaggccagccgtgcaggcggaagcaccagtcggcggcggtcgaggcgtccggtcggtgaagacgtagacgcccaacaacggcggcataaaggccaaccgtgcaggcggaaacaccagtcggcagcggcgaaggcaagccggtcggtaaagacgtagacgcccaacaacggcggcataaaggccagccgtgcaggcggaaacaccagtcggcggcggcgaaggcaagccggtcggtgaagacgtagacgcccaacaacggcggcataaaggccagccgtgcaggcggaaacaccagtcggcggcggcgaaggcaagccggtcggtgaagacgtagacgcccaacaacggcggcataaaggccagccgtgcaggcggaaacaccagtcggcggcggcgaaggcaagccggtcggtgaagacgtagacgcccaacaacggcggcataaaggccagccgtgcaggcggaaacaccagtcggcagcggcgaaggcaagccggtcggtaaagacgtagacgcccaacaacggcggcataaaggccagccgtgcaggcggaaacaccagtcggcggcggcgaaggcaagccggtcggtgaagacgtaggcgcccaacaacggcggcataaaggccagccgtgcaggcggaaacaccagtcggcggcggcgaaggcaagccggtcagtgaagacgtagacgcccaacaacggcggcataaaggccagccgtgcaggcggaaacaccagtcggcagcggcgaaggcaagccggtcggtaaagacgtagacgcccaacaacggcggcataaaggccagccgtgcaggcggaaacaccagtcggcggcggcgaaggcaagccggtcggtgaagacgtagacgcccaacaacggcggcataaaggccagccgtgcaggcggaaacaccagtcggcggcggtcaaggcgagccggtggtgatgttctgactgatccattcctggagcgtaagagataagcttaaagccatgaatcccttttatgcatatctggatctggatccagtcggcggcggcgaaggccagtcggtcggcgaagacgtggacgcccatgaacggtggtgtgaccaaccaaccgtataggcgaggacaccagtcggcggcgacggaggcaggccggcggtgaagtcgtagacgtccaacagcggcggcataataggccagccgtgtaggcggaaacaccagtcggcggcggcagaggcaggccaacggtgaagtcgtagacgcccaacagcagcggcataataggctagccgtgtaggcagaaacaccagtcggcggcggcgaaggccagccggtcggcgaagacgtggacgcccatgaacggtggtgtgaccaaccaaccgtataggcgaggacaccagtcggcggcgacggaggcaggccggcggtgaagtcgtagacgtccaacagcggcggcataataggccagccgtgtaggcggaaacaccagtcggcggcggcgaaggccagccggtcggcgaagacgtggacgcccatgaacggtggtgtgaccaaccaaccgtataggcgaggacaccagtcggcggcgacggaggcaggccggcggtgaagtcgtagacgcccaacagcggcggcataataggccagccgtgtaggcggaggcaccactcggcggcaacggaggcaagccggcggtgaagtcgtagacgcccaacagcggcggcataataggccagccgtgtaggcggaggcaccactcggcggcgacggaggcaagccggcggtgaagtcgtagacgcccaacagcggcggcataataggccagccgtgtaggcggaggcaccaatcggcggcgacggaggtaggccggcggtgaagtcgtagatgcccaacagcggcggcataataggccagccgtgcaggcggaaacaccagtcggcggcggcgaaggccagccggtcggtgaagacgtggacgcccatgaacggtggtgtgaccaaccaaccgcataggcgaggacaccagtcggcggcgacggaggcaggccggcggcggaaacaccagtcggcggcggcgaaggccagccagtcggtgaagacgtggacgcccatgaacggtggtgtgaccaaccaaccgcttaggcgtggacagcagtcggcggtggtgaagtccggccgatcaatgaagacgtggacgcccatgaacggtggtgtgaccaaccaaccgtataggcgagggcaccagtcggcggtgacggaggcagtccgagttgaagagaaacttgacaaagtcgtcggcgacatatatggcccagactctcgtagcaaaaatcatatgcatgtgcagatcttctgttggtatgtgtttatgcatacaggaaactcggcgaacccctaccgccgctgttgggcgtctacgacttcaccgccggcttgcctccgtcgccgccgagtggtgcctccgcctacacggctggcctattatgccgccgctgttgggcgtctacgacttcaccgccggcctgcctccgtcgccgccgactggtgcctccgcctacacggctggcctattatgccgccgctgttgggcgtctacgacttcaccgccggcctgcctccgtcgccgccgactggtgcctccgcctacacggctggcctattatgccgccgctgttgggcgtctacgacttcaccgccggcctgcctccgttgccgccgactggtgcctccgcctacacggctggcctattatgccgccgctgttgggcgtctacgacttcaccgccggcctgcctccgttgccgccgactggtgcctccgcctacacggctggccttttatgccgccgctgttgggcgtctacgacttcaccgccggcctccgtcgccgccgactggtgcctccgcctacacggctggcctattatgccgccgctgttgggcgtctacgacttcaccgccggcctgcctccgttgccgccgactggtgcctccgcctacacggctggcctattatgccgccgctgttgggcgtctacgacttcaccgccggcctgcctccgtcgccgccgagtggtgcctccgcctacacggctggcctattatgccgccgctgttgggcgtctacgacttcaccgccggcctgcctccgttgccgccgagtggtgcctccgcctacacggctggcctattatgccgccgctgttgggcgtctacgacttcatcgccggcctgcctccgtcgccgccgactggtgtcctcgcctatacggttggttggtcacaccaccgttcatgggcgtccacgtcttcgccgaccggctggcctctgccgccactgactggatccagatccagatatgcataaaagggattcatggctttaagcttatctcttacgctccaggaatggatcagtcagaacatcaccaccggctcgcctcgaccgccgccgactggtgtttccgcctgcacggctggcctattatgccgccgttgttgggcgtctacgtcttcaccaaccggcttgccttcgccgccgccgactggtgtttccgcctgcacggctggcctttatgccgccgttgttgggcgtctacgtcttcaccgaccggccgcctcgtccgccgccgactggtgcttccgcctgcacggctggcctttatgccgccgttgttgggcgtctatgtcttcaccgaccggccgccttcgccgccgccgactggtgtttccgcctgcacggctggcctttatgccgccgttgttgggcgtctacgtcttcaccgaccggcttgccttcgccgctgccgactggtgtttccacctgcacggctggcctttatgccgccgttgttgggcgtctacgtcttcaccgaccggccgcctcgtccgccgccgactggtgcttccgcctgcacggctggcctttatgccaccgttgttgggcgtctacgtcttcaccgaccggccgccttcgccgccgccgactggtgtttccgcctgcacggctggcctttataccgccgttgttgggcgtctacgtcttcaccgaccggcttgccttcgccgctgccgactggtgtttccgcctgcacggctggcctttatgccgccgttgttgggcgtctacgtcttcaccgaccggcttgccttcgccgctgccgactggtgtttccgcctgcacggctggcctttatgccgccgttgttgggcgtctacgtcttcaccgaccggccgccttcgccgccgccgactggtgtttccgcctgcacggctggcctattatgccgccgttgttgggcgtctacgtcttcaccgaccggcttgccttcgccgctgccgactggtgtttccgcctgcacggctggcctttatgccgccgttgttgggtgtctacgtcttcaccgaccggccgcctcgtccgccgccgactggtgcttccgcctgcacggctggcctattatgccgccgttgttgggcgtctatgtcttcaccgaccggcttgccttcgccgctgcctactggtgtttccgcctgcacggctggcctttatgccgccattgttgggcgtctacgtcttcaccgaccggcttgccttcgccgccgccgactggtgttttcgcctgcacggctggcctttatgccgccgttgttgggcgtctacgtcttcaccgaccggccgcctcgtccgccgccgactggtgcttccgcctgcacggctggcctattatgccgccgttgttgggcgtctacgtcttcaccgaccggccgcctcgtccgccgccgactggtgcttccgcctgcacggctggcctttatgccgccgttgttgggcgtctacgtcttcaccgaccggcttgccttcgccgccgccgactggtgtttccgcctgcacggctggcctttatgccgccgttgttgggcgtctacgtcttcaccgaccggccgcctcgtccgccgccgactggtgcttccgcctgcacggctggcctattatgccgccgttgttgggcgtctacgtcttcaccgaccggcttgccttcgccgacggcgactggtgtttccgcctgcacggctggcctttatgccgccgctgttgggcgtgtacgtcttcaccgaccggccgtctcgtccgtcgccgactggtgcttccgcctgcacggctggcctattatgccggcgttgttgggcgtctacgtcgtcaccgaccggtcacctcgaccgccgtcgactgagcagacattctacttcaacaacttcaaatatttcggtttagacgagttgggcaacaacatcaactctcctccaattattcgtcttcacggttggcctactatgcaactgccgatagaggatctcatcgttatcatggactgctacactactattgactggatcaacgacatggtctcgtgcgctacccccttttattattgccgaaatcatgtttcgacactgagcgtggagcttgggccggaggacgtgccgtcgttcgtgaaggcgccggagtcgtatccgccgttcctggaggcggtgttgggccagttcgatgggctggaggacgccgacgatgtgctcgtcaactctttccaagaattggagccgaaggaggcagattacttggcatcagcatggcgttttaagacggttggcccgaccgtgccatccttctacttggatgacgatcgcttgcaaccaaacaagaactatgggttcaacatttctgacagcacttcaccatgcttggcgtggctagataatcagcccccttgctctgttgtctatgcttcctatggaactgttgctgatcttgacccaactcagttagatgagctgggtaatggattttgcaattctggtaaaccattcctttgggtcgtgaggtcctgtaatgaacacaagctatcagaagaactccgtgacaagtgcaaggagaggggcctaatcgtttcttggtgcccccagctcgaggcttttaattggccagatgatgactaa

SEQ ID NO: 91697 - DNA, 888 bp, Oryza sativa
  Clone ID: PAT_MRT4530_90247C.1
tctccttctccacgccgatccgtctctcctcgtcaccgccgtgcagagatcgaaacctatcaaccatggcgaactcagcgtcggggatggccgtgggcgacgagtgcaagctcaagttccaggagctcaagtcgaagaggagcttccgcttcatcacgttcaagatcgacgagcggacgcagcaggtggtcgtggacaggctgggccagccgggcgacacctacgacgacttcaccgcctccatgcccgccagcgagtgccgctacgccgtcttcacttgatccaatcgcccctctgctcctccatcttggaatccagcgtatcaatccactgtgtgagtgtgcccaacttctccatgagtttggcctcccactggtggagtgtggagattatgggtaccccatacccacatggcatagttatccgactggctctcattgagagggcctgaacctgtctaaatccttggtctctgcatccatccacttttaggtctcgtgcgctacccccttttattattgccgaaatcatgtttcgacagttggcgcgccaggtaggggttgcgtcgagtttcctatcaacgagcgcgatggaatcaatttcatgagtcgccgacttcgctttcgctttgggagttttcacttcctttccgtcgaccacttcttcaagctcctcttctctgacttgatccaaatcagtcagggggaaactcaatcgttggctcaccttcgctgccgtcgactggtgtttccgcttacacggctgacctattatgccgccattagtgggcatcttcgctttcaccgtcgaccgccttcgtcgccgccgactggtgtcttcattgttattgatggacgactttgttcccacattggccacttctgccat

SEQ ID NO: 91698 - DNA, 520 bp, Oryza sativa
  Clone ID: PAT_MRT4530_90248C.1
aagaaacaaaacctttttattttcaggcacaaaaaaaattttttgggtttcctttcacccgggtaacacatatatacattggggggtaggaggaacatcatggggtcgatccaaattggggggagtcagcattcatgccgggaaaaaagccctcatattttggtggggggggggggggggggggcatgattgaaaaaaattaattgaagtttttgggagcccggggggggacccccaactgcccatcggggggggggacccgccaagagggggccttggggggggcgccgggcatcaccctgaaagggagggaccctccgggggggacccccgagggggggcactcctgcccccaggggggcttaaggggaggccacttcacccttttggtcccctttaccgaaagccctggcaaggtacccgccccgcccacggtggaaaccattaccagggtgaaatacggggtcccgggttttggggacccggtcccccccacctttacacaagggacccgggggga

SEQ ID NO: 91699 - DNA, 4187 bp, Oryza sativa
  Clone ID: PAT_MRT4530_90249C.1
atgagacaactagatcgtcagatctatatacactcggcggattcaaatccccaaacaggagtttcgtgcgctacccccttttattattgccgaattcatatttcgatagttggcgcgtcaggtaggggctgcgtcgaattacccatcgaaaagtgtgatggaatcaactacagaagaaacggcgagattaatctcgatggctcaaatcttcagtcgggagcagcgccgacggatgcgttgcggccaccacgccaccacgggcacatgggagcagccgcctatagcttgctcggagaaatttcatgcatgcatgagttgattcagcagatcaacatacatgcacgatctacctaatcatgcatgcatatacttctaattaatcttctagtgtgtactaactagattagattagattaattttctaatctcagtttgatctgtgattccttattttgcatgcgccatggtcacctgagtctgattcccatcacgtaaagcctccaagttggatttgatccggactcggacccgtgatctgtacgcacggatggcagcctgcaatctgtctggtgacgtgcatgtgtggatgcgtgtactgttcatgctacaggagatcaatcggccaatcaaaaaatatatgcatgcttcatatatgcagacatacgtacacaagattaattttcttgatgctaattagagattgcttttctctttacatgtactgctggagccatcgtcaccgaccggtttgccttcgccgccgccgactggtgtctccgtctacacggctggcatatcaagccgccgttgttgggcgtctacgtcttcaccgaccggcttgcctccgccgccgccgactggtgtctctgcctacacggctggcctattatgccgccgctgttgggtgtctacgactttaccgccggcctgcctctgtcgccgccgactagtgtcctccgtctatacggttggttggtcacaccaccgttcatgggcgttcatgtcttcaccgaccggctggccttcgccgccgccgactggtgtctccacctatacggctggcctattatgccgccgctgttgggcgtctacgacttcaccgccggcctgcctccgtcgccgccgactggtgtcctcgcctatacggttggttggtcacaccaccgttcatgggcgtccatgtcttcaccgaccagctggccttcgccgccgccgactggtgtttccgcctgcacggctggcctattatgccgccgctgttgggcgtctacgacttcaccgccggcctgcctccgtcgccgcggactggtgtcctcgcctatacggttggttggtcacaccaccgttcatgggcgtccacgtcttcaccgaccagctggcctttgccgccgccgactggtgttttcgtctgcatagctggcctattatgccgccgctgttgggcgtctacgacttcaccgccggcctgcctccatcgccgccgactagtgtcctcgcctatacggttggttggtcacaccaccgttcatagacgtccatctctttaccgaccggctggccttcgccgccgccgactagtgtttccacctgcatggctggcctattatgccaccgctgttgggcgtctatgacttcaccgctggcctgcctccgtcgccgctgactggtgtccttgcctatacgattggttggtcacactaccgttcatgggcatccacgtcttcaccgaccggctggcctttgccgccgctgactggtgttttcgcctgcacggctgggcctattatgccgccgctgttgggcgtctacgacttcaccgccggcctgcctccgtcgccgccgactggtgtcctcgcctatacgattggttggtcacaccaccgttcatgggcatccaagtcttcaccgaccggctggcctttgccaccgtcgactggtgttttcgcctgcacggctggcctattatgccaccgctattggacgtctacgacttcaccgccggcctgcctccgtcgccgccgactggtgtcctcgcctatacggttggttggtcacaccaccgttcatgggcgtccacgtcttcaccgaccggcctgccttcgccgccgccgactggtgtcaccgcctacacggctggcctattatgccgccattgttgggcgtccacgtcttcaccgaccggctggcctttgccgccgccgactggtgtctttgcctacacggctggcctattatgccgctgttggtgggcatcgctttcaccgtcgaccgcctccgtcgccgccgattgatttcttcattgtcattgatggacgactcagaacatcaccaccggcttgcctccgtccgccgccgactagtgttttcgcctgcacggctggcctttatgccaccgttgttgggtgtccacgtcttcaccgaccggccgcctcgtccgccgccgactggtgtttccgcctgcacggctggcctattatgccgccgttgttgggcgtccacgtcttcaccgaccggccgcctcgtccgccgccgactggtgtttccgcctgcacggctggcctattatgccgccgttgttgggcgtctacgtcttcaccgaccggcttgccttcgccgccgccgactggtgtttcccgcctgaacggctggcctttatgccgccgttgttgggcgtctacgtctttaccgaccggcttgccttcgccgccgccgactggtgtttccgcctgcacggctggcctattatgccgccgttgttgggcgtctacgtcttcaccgaccggcttgccttcgccgccgccgactggtgtttccgcctgcacggctggcctttatgccgccgttgttgggcgtctacgtcttcaccgaccggccgcctcgaccgccgccgactggtgtttccgcctgcacggctggcctattatgccgccgttgttgggcgtctacgtcttcaccgaccggcttgccttcgccgccgccgactggtgtttccgcctgcacggctggcatttgtgccgccgttgttgggcgtctacgtcttcaccgaccggctgcctcgtccgccgccgactggtgcttccgccctgcacggctgccttattatgccgccgttgttgggcgtctacgtcttcaccggctggcttgccttcgccgccgccgactggtgtttccgccctgcacggctggcctttatgccgccgtttgttgggcgtctacgtcttccccgaccggcttgccttcgccgctgccgattggtgcttccgcctgcacagctggcctattatgccgccgttgttgggcgtctacgtcttcaccgaccggcttgccttcgccgccgccgactggtgtttccgcctgaacggctggcctttatgccgccgttgttgggcgtctacgtctttaccgaccggcttgccttcgccgccgccgactggtgtttccgcctgcacggctggcctattatgccgccgttgttgggcgtctacgtcttcaccgaccggcttgccttcgccgccgccgactggtgtttccgcctgcacggctggcctattatgccgccgttgttgggcgcctacgtcttcaccgaccggctcgccttcgccgacacagaccagactggtgtcctcgcctgcacggctggcctttatgccgccgttgttgggcgtctacgtcttcaccgaccggcttgccttcggccgtcgccgactggtgtttcccgcctgcacggctggccatattatgccgccgttgttgggcgtctacgtcttcaccgaccggcttgccttcgccgccgccgactggtgtcctcgcctgcacggctggcctttatgccgccgttgttgggcgtctacgtcttcaccgaccggcttgccttcgccgccgccgactggtgtttccgcttgcacggctggcctttatgccgccgtagttgggcgtctacgtcttcactgactggcttgccttcgccgccgccgactggtgtttccgcctgcacggctggcctttatgccgccgttgttgggcgtctacgtcttcaccggctggcttgccttcgccgccgccgactggtgtttccgcctgcacggctggcctttatgccgccgttgttgggcgtctacgtcttcaccgaccggccgccgcatccgccgctgactggtgtcaccgcctgcacggctggcctgttataa

SEQ ID NO: 91700 - DNA, 3607 bp, Oryza sativa
  Clone ID: PAT_MRT4530_9024C.1
cttcgcctcttgcctctacctccatcgtgccaccaggcgccagcgccagcgctgtgtgctgcctcggcgccttcatcccgcggtcctgcctaggtgcatctactctccacctcggcatctccatccatcccacctctatctccaccaccgtgcgcggtgtgcctgtgtgccgcctccagcccacctccgccctctgcctcggcacctccatccatcccgcctccgtctccaccgccgtgcacccgtgtgccgcctctgggctccgcttccaggctccagctcacctctgcctctagccgaccagcccccctccgcctcccccttccccccctccactgccgcgctccccctcgcgccccgtgcccctgcacgcgccgcgccgcgccgctgccgcccactgctgcgcgccgcctcgcgccccgcgccgccgtcgccgtcgtcgtcgcctcgctccgccgttgccgccgcacgccgtcgcgccgcctcgcgccccgcgcgccgtcgccgtcgccgtcacgtcgccatcatcaccgcgccgcgcgccgtcgtcatcgccgtcgcatcgtcatgatcgcctgtcaccgtcggctgcgccgcgccgagccccgcgccactcccgttgccgccgtcgcgtcgcccgtcgcgtcgccatcgccatgcgccgcgagccgtagccgtcggcctcgcaccccgagccgccgcacgcccgtcctctcgctgcttcgcgcatgggccacgccggaggccgtcttgtagccgtcgccctgacccgctgcggtgccccgaagccccgtgctgttacaacgcttttgcgtcaccgctgttgccatcagcgccttgagccccgcccgcgccgcgcactgtcgccgttgcgccgcgtcgtcccgccgccgcacgtcgccgtcgccccgagccccacgccgccgcgccgtcccgtcgtcgtttaaagccggccacccctccccgcgcctatataagcccctccccggctacccattgctccccacactacccccaccacctcccctcccttttccctctctttcccatccccggcggacgcctcgttggaagcagccgccgccgccgctgagccgacgcgccccgccgccgcgatgtacctcgtcgccgcgccgtgctccgccgtcgacctcgccgccgcgtctccgtcgaccccccgtttgtttcgatggacggctcaaatcagttccaaatcaatcaaaaccctggtgcaaccctaaccctagattcattctccccctccctctccctgcctccccctgcccaacgccacctccgcctcccccaccccccaatcgccagctgcctcctcccgcccgacaccgctcccctcctcccccaccggcgccgcctctccccctccccttccctctggcgccgtttctcctcccctctccctccggcggcgccactcctcctgtccctctccctcccatctcgccggcacggcacggcgacggcagggtacagcgacgacggttgtccctccccctctccctctccccccaacctaccaatcaaccaaccttatcctcacaatcctagccatccatccttattgccacaatcccaaccgacctaccacccgctcctcttcctccctcggtacctccaccccacaccgtcgcacgactcccgcccgacccccagcgctgcccacctcctcaccaccacccctacccctgccacatctgcctcccgccaccggacctcaacgcgtggccgcgcctcctcagcctcctcgacgtcgccttcttcctccctccctctcggcatctccctagtttagcagcggcacaggggcacaggtcgacagctcccggctccctgcctcagttctttattcatggatggctcccaaatactcggcccagcccagcccacatgcctgccgctcccgcaccggattggctccctctcccgcatcacgctactgccacccccaccgcatgtctctcgccgtatcgcatgccctccctccccgcatcgcacttctccaccttccccgccgcatttctcgcaccccaccccatccccttcctatctcgcatcgcgctttgccaatcccgtcgcatcggcgccgcacggccctccctaggtctgtttcgcctccctcctcccagtgctagccgcatcgccttcctcgccccatccaccctcctgcgccggagggagttcgccagagttccctcccgctccctcccgaagttcgccgctccctcctctgtgtcccgcgccaccaccaccttcgtgtcccccgccgccgccaccacctgcgcgtcccgcgtcccgcggcgccacccatcatctgtcgccgacccgtatcctcaccgccgctcgcccgccacgcctcccgcgtcccctgcccctctgctccgcccgcgcccggagacgccgccgctccgcctgctctagccgcgcaccgcccacgcccagagccgccacttgcccgccgccgtgctcgccaaccgcttgccgctgccgctgccacgctctcccggagacaccgccgctctgcctgctctggccgcacgctgacactgcccctccgcctactccggccgcgcgctcacccatcgccgcccgctcggtcgtaaaccctgaaccacactcatcacctcgccctccaaatcgcccaccgccctggaaattccacccacccacgcgcagccgcagcgacgagaggagaaacgagagagagaaaaagaagaaagagaaaaatgctgcgccacgccgcccgccgcctggccaccacccgcgccgccgccgccgccggccgcagcagcagggcgctctcgacggcggaggtgccggccgaggcggccaccgactccgccttcgcggaggcgtggaagaaggtggcccccaacatcgaggcccccgccacgcccatgtcgctcatgcagccccgcccccccacgccggcggccatcccctccaagctcaccgtcaacttcgtcctcccctacaagtccgagatcgccaacaaggaggttgacatggtaattgtaccagcaacaactggtcagatgggtgttttgccaggccacgtttccacaatcgcagagctcaagcctggtgttctctcggtacacgagggaaacgatatcaccaagtactttgtgagcagtggctttgcatttgtccatgcaaactccatcgctgatatcgtggctgttgaggctgtccccctggaccagatcgacccagccgcggtccagcagggtctcgcggaattcaacgccaagcttggatcggcctcaactgaactggagaaggccgaagctcagattggagtggatgttcacagtgcgctcaatgccgctttggctggttgatcaatacgtttttaagttgctgtccctctctctcttttgcatcttcatttttagaatgtgagctgaagtttgcaaactcatggatgatgggatggagggaatgatcttaaataaattatactccatctcaaagacagaaccctgtttcttcttttaacttgactcctgcatggatttttgtaatagtgaatatttttctccgagcctacaaagtcgaagttttctggttccagttttccaaaaacaaa

SEQ ID NO: 91701 - DNA, 930 bp, Oryza sativa
  Clone ID: PAT_MRT4530_90250C.1
atggacagaggaggggaggtgaggggagggcaatttcgctaccgccgcatcccctttgttgtgccaccgctggtcttgctgtgccaccacccgccgccgagagatcctgacgtgagagccgccatcgccgagagcatcttggagccgttgtacgccgctggtggggagggaggaggagaggggtacgacgaccgccgttgggtgagggatggagtgccgccggtgagggaggaggagagggatcttgagaggaggaggaggcggtggccgttcgccgtcagcgaaaactgcgacatctttgctggtggcccgctcaactccgttgctagcgaagatcaattttcgctggcggggaggactgccgccttcgtcacccctcctgcatcgtcatcgctcgttgttgccgagggccacctcgccggggaaagccatatcaaggcaccatgtcacttcctagccacacgccgtcactattcatcgcgccaccttgacgccatccatcccgccacctcttcggatctggtcaagagcacgttggatctgcatatggggatgccaaatccgacagcccccattgttgccttcaccaccgcccactaccctgctagcattctcctccactgctgcagctgttcaggcacaaagaggacgccggccgagacgggtccccccgtgctgagtgtgaaggatgaggacgcggaggcagccgatgagtcgggggggccaggccagtcgagccaagggcgaggtctccttctcgaccgcctccaccaccaccgtggagagctcctccgcctccatctccgtcctccgtccaattccatgctgaggactggggggagcagtggtgcgtcggcttccgcttccatggcggtggcgtctctgccgtggttgcagccgctctcgcagtcgcagcagtccttctcgtag

SEQ ID NO: 91702 - DNA, 224 bp, Oryza sativa
  Clone ID: PAT_MRT4530_90251C.1
agcaggtaagattataagatgtgacatgctgtgcgactgtcagttataccaataacaacaacagtgagaaagaacaagaacataagattatgtaatcaactatagccacccttagatgccgcaattggtgccaaacaaatagaattacatataagagaccaaaaggtttgatccagaggcaggggaacaacaactgatactggacaaccccaaggctatgagat

SEQ ID NO: 91703 - DNA, 4954 bp, Oryza sativa
  Clone ID: PAT_MRT4530_90252C.1
atgagacaacctgatcgtcagatcaatacacactcggcggattcaaatccccaaacaggagtctcgtgcgctacccctttttattattgccgaaatcatgtttcgacagttggcgcgccaggtaggggttgcgtcgagtttcctatcaacgagcgcgatggaattaacttcatgatcagggggaaactcaatcgagggattacaacaatctaccgcggcaagtttcagattcaatctcctatggctgccgtcagcaccgccttcatcttcggaccggttcttttcttctggagttcggcttgcatcgccgccgccggaaattccgacgggacgtcagtcgtcaacttgatcgtttgacatgccgagtccatcatctgatgatgtcaaatccgtctcagctttccagtcgatcggccgcgagtccactttgccggcttgtcttcgccaccgccattgctgataacaacaacgacttcaccgccggcctgcctccgttgccgccgagtggtgcctccgcctacacggctggcctattatgccgccgctgttgggcgtctacgacttcaccgccggcctgcctccgtcgccgccgagtggtgcctccgcctacacagctggcctattatgccgccgctgttgggcgtctacgacttcaccgccggcccgcctccgtcgccgccgagtggtgcctccgcctacacggctagcctattatgccgccgctgttaggcgtctacgacttcaccgccggcctgcctccgtcgccgccgagtggtgcctccgcctacacggctggcctattatgccgccgctgttgggcgtctacgacttcaccgccggcctgcctccgtcgccgccgagtggtgcctccgcctacacggctggcctattatgccgccgctgttgggcgtctacgacttcaccgccggcccgcctccgtcgccgccgagtggtgcctccgcctacacggctggcctattatgccgccgctgttgggtgtctacgacttcaccgccggcctgcctccgtcgccgccgactggtgcctccgcctacacggctggcctattatgccgccgctgttgggcgtctacgacctcaccgccggcctgcctccgtcgccgccgactggtgtcctcgcctatacggttggttggtcataccaccgttcatgggcgtccacgtcttcgccgaccggctggccttcgccgccgccgactggtgtttctgcctacacggctagcctattatgccgccgctgttgggtgtctacgacttcaccgccggcctgcctccgtcgccgccgagtggtacctccgcctacacggctggcctattatgccgccgctgttgggcgtctacgacttcaccgccggcccgcctccgtcgccgccgagtggtgcctccgcctacacggctggcctattatgccgccgctgttgggtgtctacgacttcaccgccggcctgcctccgtcgccgccgactggtgcctccgcctacacggctggcctattatgccgccgctgttgggcgtctacgacctcaccgccggcctgcctccgtcgccgccgactggtgtcctcgcctatacggttggttggtcataccaccgttcatgggcgtccacatcttcgccgaccggctggccttcgccgccgccgactggtgtttctgcctacacggctagcctattatgccgccgctgttgggcgtctacgacttcaccgccggcctgcctccgtcgccgccgactggtgtcctcgcctatacggttggttggtcacaccaccgttcatgggcgtccacgtcttcgccgaccggctggccttcgccgccgccgactggtgtttccgcctgcacggctgacttattatgccgccgttgttgggcgtctacgtcttcaccgaccggcttgccttcgccgccgccgactggtgcttccgcctgcacggctgacttattatgccgccgttgttgggcgtctacgtcttcaccgaccggcttgccttcgccgccgccgactggtgtttccgcctgcacggctggcctttatgccgccgttgttgggcgtctacgtctttaccgaccggcttgccttcgccgctgccgactggtgtttccgcctgcacggctggcctttatgccgccgttgttgggcgtctacgtcttcaccgaccggccgcctcgtccaccgccgactggtgcttccgcctgcacggctggcctttatgccgccgttgttgggcgtctacgtcttcaccgaccggccgcctcgaccgccgccgactggtgtttccacctgcacggctggcctttatgccgccgttgttgggcgtctacgtcttcaccgaccggccgcctcgtccaccgccgactggtgcttccgcctgcacggctggcctttatgccgccgttgttgggcgtctacgtcttcaccgaccggccgcctcgaccgccgccgactggtgtttccgcctgcacggctggcctattatgctgccgttgttgggcgtctacgtcttcaccgaccggccgcctcatccgccgctgactggtgtcaccgcctgcacggctggcctgttataacgccaactgatgctatcttcttcacggctggctacatcgctgtcactactaataggcatcagtatcttcaacacaagctgcctacgtttgccatggctgccgactggtttcttcacttccatggctgcatgattctgccagtgttgattggccttaccatcttcatcgccgctaccactactgatggacatcatcgtcttccgccgccgactcgtgttatgccgccgccgactagtgcttttatcttcacaactgcgcgtcttcactaccggtttgcttctgttgccgccgactcgtgttcacttcatcacggcaacacaactttgtcatcatggtggagcgacttcatctttattatcttcggtaccagcaaactctattgctgctacttcacaagttttgctacatcaccaaccatgacgttgttgtgaatctcgacatctcggcatgcgatgccgtgttattttactacaacaagtggctctccaacattcatgatttctatttggacatcttcaacacatatctttaatcaagcaataactattcgacgacaagatgctacagttctcgactctatgttcagttgtttcccaactaatcaaagaacattctacttcaacaacttgaaatattttggtttggacgagttggacaacaacatcaactctcctccaatatttcaccttcacggttgacctactatgcaaatgctgatgagcgtctttgtcattatcattggttgctacactgctattggctggatcaccgacatcgtcatcttcatcataggagttggtacaatgcatcttaaaaggtgtcaaacagtaaagctttatatagctgtcccgctgacttttttatatataagtcaaggtgctgtttgggtttttaagcaattgattggatacaatatcattgctttttgccacccctccacagtcttcagatttggtaaaagtactcgggagaccatgacgaagatgattgaagcactcggctttggagtaatctagttcgagagaaggttatctttccgactgtgaaggtctcaggggctactgtggagattatgggtaccccatacccacacggcatggttatccgactacatcatctttgcgggttttctgggttctatcgccattggaatcaatttccgatcaaatcaatctacaaccaggcatcagcccccgagtcatcttgctgattggagagacttgaagccatcgtatatctggagccttctcaactagtcacgcatgtgtattcttccatcaacatatacgtgcatgcttgcaagatcttctaattgacagatcactaattattatttgatctgttatttttatgcacgtaccgccggccgccctcgtcgctgccgattggattacacgcctccacggttggtgtacgttgccgccgttgctgatggcaacaccctcttcaccgccggcccgctttcgtcgccgccgactggtgtttccgcttatacggttggttggtcacaccaccgttgttgggcatctacgtcttcaccgaccggccgcctcgtctgccgccgactggtgtctccgcctgcacggctggcctattatgccgccgttgttgggcgtctacgacttcaccgtcggcctgcctctgtcgccgccgactggtgtcctcgcctatacggttggttggtcacaccaccgttcatgggcgtctacgtcttcaccgaccggcttgccttcgccgccgccgactggtgtctccgcctacacggctggcctattatgccaccgttgttaggcgtctacgtcttcaccgaccggctggccttcgccgccgccgactgatgttttcgcctgcacggctagcttattatgccgccgttgttgggcatctatgacttcaccgccggcctgcctctgtcgccgccgactggtgtcctcgcctatacggttggttggtcacaccaccgttcatgggcgtccacgtcttcgcggaccggcttgccttcgccgccgccgactggtgtctccgcctacacggctggcctattatgccggcattattgggcgtctacgtcttcaccgaccggctggccttcgccgccgccgactgatgttttcgcctgcacggctagcttattatgccgccgctgttgggtgtctacgacttcaccgccggcctacctctgtctccgccgactggtgttctcgcctatacggttggcggagtccaccgccgttaatgggcttcatcatctacaccactggcttggttccactggcgccgactggtgtttttgttaccattgatggactgtttcgttcccattaattacagtggcgctcatcagaaattctttaggatttatatgca

SEQ ID NO: 91704 - DNA, 4961 bp, Oryza sativa
  Clone ID: PAT_MRT4530_90253C.1
cttctcgatcctgagggagaaagggagggtgggttagggcatcaggggaggaagggaagggggagggagacggatagccggacaggggaggaacctggaggcgagggcaaagcagaggtcggagtgggcggaatcgaggtcagcgagctgggcggggtcgtcggagttaagaaaatacccacaactttctcctcgctgaaagagtacatgggatcattcaccgtgccgctgatcgaagaaacttgtggatattatgggtctcgtgcgctacccccttttattattgccgaaatcatgtttcgacagttggcgcgccaggtaggggacacgtcgaggtcctcatcgacgagtgtgatggaaccaatctccgatgttgttggagtcacaaagatcaatctcggcgagattcaacgatttaatctccaatatcaccggctcatggattggtggcgtcgctgtgtagccgactgctcgtgagcctactccgggacgctttggccgagtggttaaggcgtatgctgttgccgccgaattctctatttgatcggcaagaccagcagccaattttccaacactaccgggtttaatcttccaacgactccgcaacccggctgccggcgtgtacgtcgactgattaattcggcgagagcttcgctcgacgtatggagttggtgtgatcggacgtctacagtacaacggctgagtaggaatccgttgccgacgattcagccgcacggagctgtcgacgatccaggcgccgatgtgcagcgccggctgcttgccatcttcctttgccgaagatgatcttctactttcattgccggtcgtctccgtcatcgttaattagtgccctagccttcgtggctgacctattccagtcttcgccttcacagctggcctattatgccgccgctgttgggcgtctacgacttcaccgccggcttgcctccgtcgccgccgagtggtgcctccgcctacacggctggcctattatgccgccgctgttgggcgtctacgacttcaccgccggcctgcctccgtcgccgccgagtggtgcctccgcctacacggctggcctattatgccgccgctgttgggcgtctacgacttcaccgccggcctgcctccgtcgccgccgagtggtgcctccgcctacacggctggcctattatgccgccgctgttgggcgtctacgactttaccgccggcctgcctccgtcgccgccgattggtgcctccgcctacacggctggcctattatgccgccgctgttgggcgtctacgacttcaccgccggcctgccttcgtcgccgccgagtggtgtctccgcctacacggctggtctattatgccgccgctgttgggcgtctacgacttcaccgccggcctgcctccgtcgccgccgagtggtgtctccgcctacacggctggtctattatgccgccgctgttgggcgtctacgacttcaccgccggcctgcctccgtcgccgccgagtggtgcctccacggctggcctattatgccgccgttgttggatgtctacatcctcaccgttggctcaccttcgttgccgtcgactggtgtttccgcttacacggctgacctattatgccgccattagtgggcatcttcgctttcaccgtcggctcgcctcggccgccgccgactggtgtcctcgcctgcacggctggcctattatgccgccgttgttgggcgcctacgtcttcaccgaccggctcgccttcgtcgccgccgactggtgtcctcgcctgcacggctggcctattatgccgccgttgttgggcgcctacgtcttcaccgaccggctcgccttcgtcgccgccgactggtgtcctcgcctgcacggctggcctattatgccgccgttgttgggcgcctacgtcttcaccgaccggctcgccttcgccgccgccgacgggtgtttccgcctgcacggctggcctattatgccgccgttgttgggcgcctacgtcttcaccgaccggctcgccttcgtcgccgccgactggtgtcctcgcctgcacggctggcctattatgctgccgttgttgggcgcctacgtcttcaccgaccggctcgccttcgtcgccgccgactggtgtcctccgcctgcacggctggcctattatgccgccgttgttgggcgcctacgtcttcaccgaccggctcgccttcgtcgccgccgactggtgtcctccgcctgcacggctagcctattatgccgccgttgttgggcgcctacgtcttcaccgaccggctcgccttcgccgccgccgactggtgtttccgcctgcacggctggcctttatgccgccgttgttgggcgtctacgtcttcaccgaccggctcgccttcgtcgccgccgactggtgtcctccgcctgcacggctggcctattatgccgccgttgttgggcgcctacgtcttcaccgaccggctcgccttcgtcgccgccgactggtgtcctcgcctgcacggctggcctattatgccgccgttgttgggcgcctacgtcttcaccgaccggctcgccttcgtcgccgccgactggtgtcctcgcctgcacggctggcctattatgccgccgttgttgggcgcctacgtcttcaccgaccggctcgccttcgtcgccgccgactggtgtcctcgcctgcacggctggcctattatgccgccgttgttgggcgcctacgtcttcaccgaccggctcgccttcgtcgccgccgactggtgtcctcgcctgcacggctggcctattatgccgccgttgttggacgtctacgtcttcaccgaccggcttgccttcgtcgccgccgactggtgtcctcgcctgcacggctggcctattatgccgccgttgttgggcgcctacgtcttcaccgaccggctcgccttcgtcgccgccgactggtgtcctcgcctgcacggctggcctattatgccgccgttgttgggcgcctacgtcttcaccgaccggctcgccttcgtcgccgccgactggtgtttccgcctacacggctggcctttatgccgccgttgttgggcgtctacgtcttcaccgaccggctacctcgtccgtcacgccgactggtgctctcgccttcacaactggcctattatgccgctgttgttgggcgtctacgacttcaccgctggcctgtctccgtcgttgccgactggtgtcgtcgcctatacggttggtcggtcacaccaccgtccatgggcgtccacatcttcaccgaccggcttgccttcaccgccgccgactggtgtctccgcctacacggctggcctattatgccaccgttgttgggcatctatgacttcaccgccggcccgccttcgtcgccgctgactggtgtcctcgcctatacagttggcggactccgccgccgttgatgggcctcgtcatctacaccactggcttgcttgcaccgcgccggctggtgttttcattatcattgatggacgactttgttcccacatcaggcacctctgccgtcatcaagtaagcttatctcttacactccaggaatggatcagtcagaacatcaccaccggcttgccgtcgtcgccaccgactggtgtcttcgcctatacggttggttggtcacaccaccgtcgttaggcgtctacatattcaccgccggcttgccttcaccgccgccgactggtgtcactgcctgcacggctagcctattatgctgtcgttgttgcgcgtctacgtcttcaccgaccggcttgccttcaccgctgtcgactggtgtcttcgcctacatggctggcctattatgccgccattgttggtctcgtctgctgttgactggtgtcctcgcctctacagctggtatataccgctagcactactgatgggcgtcatcgtcttcattgctggcctttgccttcgctgctgcccatggtgtcttcactttcacagctggcctattttgccaccgttcaaggacgtcttcgtttccatcatcattcagcttcttccgtcgccgtctggttacgccatcgccgactagtgtttttatcttcacgactacgcatcttcgctattggtttgcttctgttgccgctgactcgtgttcacttcatcacggctatgcactttgtcaccatggtggagcgacttcatctttattgttttcttcattggcaaactctattgcctccactttgcaagatttgctacttcaccaaccacaacgtcggcaagagctctgacatcttggcatgcgtcaccaaatatgatgccgtgttattttactacaacaagtggtatttcaatattcaatatttctacttggacatcaagcgttgcatcagtcttctttatacacacgctcgcatcaaggaaactactcgagctttgatatcttctcgacagtttgatggattattgtcactgacatcatcaccagcacctctacttcgtcggccctgacgtctccgccattgctaatgtatggctacgttttcacctccggctgcttctgtcattgccgactagttatttcgccttcatggttgacctactacgcaaatgctgatgagcgtcttcgtcattatcattggctgctacacttctattgactaggtcaccgacatcgtcatcatcatcaacatcctgtcaagcttatttaacatagccaactctactgctattggtgggcaacttcaacatcatatttgatcatctctgttgctgttaatcgtcattaccgtcggttgcgtttctcgtcggtcacagactgattatctcaccaccatggctgcataattgtgtcgttgttgctggatgccttcatcttcattgctggctgacttgtcttctgtcgactggtttcttcgcttccacggctgtgtgacttcatcacctttgattggtgtcattgtctttaccaccaccaacattttcgttagctttgatggg

SEQ ID NO: 91705 - DNA, 938 bp, Oryza sativa
  Clone ID: PAT_MRT4530_90254C.1
cccacgcgtccgcactaatacacaatcaaattaattccgagttctaattaacgtacgtaaaagaaggagaagagatggctgcttctcgccgcgtcgcgatctccctcctcctcctggtcgcggccatggcgagctccttctccttctccccgtgcaccgcgcagtcgtcgtcgtcgtgcgcgagctacaccttctccagcaaccagcagtacggctcgtgcgccaccctgccgcgcctgggcgccacgctgcactacaactacacggcggcggccagcaccgtcgccgtcgcgttccgcgcgccgcagccggcgggcggcaaggggtgggtggcgtgggggatcaacccgagcggcagcgggatggtgggcacccaggccgtggtggcgttccgccaccccaacggcagcctcgtcgcgtacccgacggtgctcggcagctacgcgccgtccatggcgcccgcggcggccaaggacctggccctccccgtctccggcgtgtcggcggaggagaacggcaaggcgaaggaggtggtggtgtacgcgacggtggcgctgccggccgggaaggggaccaagttcaaccacgtgtggcagcagggcagctcggtggccggcgacgtgccggcggcgcaccccacctccggggacaacgtcctctccgtcggcagcatcgacttcagcaagtgatcgatcgtacatatatactggtatatacgtacacttgttcgatcgtatacgtacgtacgcccggctgcttgtaatgttggtatacaagtatattcatgtacacatgtgttaattatttatgcttctggtagatcggctcccattagatgtgtggagtatatgtatgatgattatgtcagtgagactccatgtatgtattgtctatatatatgtacagccggaaagtttgcaatgtaaaaaaaaaaaaaa

SEQ ID NO: 91706 - DNA, 5349 bp, Oryza sativa
  Clone ID: PAT_MRT4530_90255C.1
ggagttcgagtgacatacgagcagcagccaacacaagctcgatcgaaagttctctcacaagttcagagtagcatttggttagtgacagtaactggtcagcgtctctcaccatgtcgtccaattttgaggccaacaacaacaacaatggcgagaagcagctggtctgtgtgaccggagcaggtggcttcattgggtcgtgggtggtgaaggagctcctcatccgtggctaccacgtcaggggaacagccagagatcctgctgacagcaagaatgctcacctgcttgagctggagggagccgaccagaggctctccctctgccgtgccgacgtcctcgacgccgccagcctccgcgccgccttcagcgggtgccacggcgtcttccatgtcgcctccccggtgtccaacgaccctgacctggttccggttgcagtggaggggacgaggaacgtgatcaacgcggcggcggacatgggcgtgcggcgcgtggtgttcacgtcgtcctacggcgccgtgcacatgaaccccagcaggagccccgacgccgtcctcgacgagacctgctggagcgactacgaattctgccgccaaaccgacaacctgtactgctgcgccaagatgatggcagagatgacggcgacggaggaggcggcgaagagggggctggagctggcggtggtggtgccgtcgatgacgatgggtcccatgctgcagcagacgctcaacttcagcagcaaccacgtcgcccgctacctcatgggcaccaagaagtcgtaccccaacgccgtcgccgcctacgtcgacgtccgcgacgtcgcccgcgcgcacgtcctcgtctacgagcgccccgacgcacgcggccgctacctctgcatcggcaccgtgctccaccgcgccgagctcctccggatgctcagggacctcttcccccagtaccctgccactgcaaagtgtgaagatgacgggaagccgatggcgaagccgtacaagttctcgaaccagaggctcaaggatttggggttggaattcactccactgaggaagagtttgcatgaggcgctgccccggtcggtcatctacatgctgccgactctccgaggtcgcagggccgttgatggcttccgccggctactgctgatcgaggcattgcgacccaagctgatcgacgcgcacgactcgagatcaaacaatcattcactgcttgcggcctcgctgccacggttggtgtgtgccgccgccgttgccgatagcgacatcgtcttcaccactggcttgcctccgtcgccgccgattggtgcctccgcctacacggctggtctattatgccgccgctgttgggcgtctacgacttcaccgccggcctgcctccgtcgccgccgagtggtgcctccgcctacacggctggcctattatgccgccgctgttgggcgtctacgacttcacgccgccggcctgcctccgtcgccgccgattggtgcctccgcctacacggctggcctgttatgccgccgctgttgggcgtctacgacttcaccgccggcctgcctccgtcgccgccgattggtgcctccgcctacacggctggcctattatgccgccgctgttgggcgtctacgacttcaccgccggcctgcctccgtcgccgccgactggtgtctttgcctatatggttggttggtcacaccaccgttgttgggcgtctacgacttcaccgccggcctgcctccgtcgccgccgactggtgtcttcgcctatatggttggttggtcacaccaccgttgttgggcgtctacatcttcaccgaccggccgtctcgtccgccgccgactggtgtttccgcctgcacggctggcctattatgccgccgctgttgggcgtctacgacttcaccgccggcctgcctccgtcgccgccgagtggtgcctccgcctacacggctggcctattatgccgccgctgttgggcgtctacgacttcaccgccggcctgcctccgtcgccgccgattggtgcctccgcctacacggctggcctgttatgccgccgctgttgggcgtctacgacttcaccgccggcctgcctccgtcgccgccgattggtgcctccgcctacacggctggcctattatgccgccgctgttgggcgtctacgacttcaccgccggcctgcctccgtcgccgccgagtggtgtcttcgcctatatggttggttggtcacaccaccgttgttgggcgtctacatcttcaccgaccggccgtctcgtccgccgccgactggtgtttccgcctgcacggctggcctattatgccgccgctgttgggcgtctacgacttcaccgccggcctgcctccgtcgccgccgactggtgtcttcgcctatatggttggttggtcacaccaccgttgttgggcgtctacgtcttcaccgaccggccgtctcgtccgccgccgactggtgtttacgcctgcacggctggcctattatgccgccgctgttgggcgtctacgacttcaccgccggcctgcctccgtcgccgccgagtggtgcctccgcctacacggctggcctattatgccgccgctgttgggcgtctacgacttcaccgccggcctgcctccgtcgccgccgattggtgcctccgcctacacggctggcctgttatgccgccgctgttgggcgtctacgacttcaccgccggcctgcctccgtcgccgccgattggtgcctccgcctacacggctggcctattatgccgccgctgttgggcgtctacgacttcaccgaccggccgtctccgtccgccgccgagtggtgtttacgcctgcacggctggcctattatgccgccgctgttgggcgtctacgacttcaccgccggcctgcctccgtcgccgccgattggtgcctccgcctacacggctggcctattatgccgccgctgttgggcgtctacgacttcaccgccggcttgcctccgtcgccgccgagtggtgcctccgcctacacggctggcctattatgccgccgctgttgggcgtctacgacttcaccgccggcttgcctccgtcgccgccgagtggtgcctccgcctacacggctggcctattatgccgccgctgttgggcgtctacgacttcaccgccggcctgcctccgtcgccgccgagtggtgcctccgcctacacggctggtctattatgccgccgctgttgggcgtctacgacttcaccgccggcctgcctccgtcgccgccgattggtgcctctgcctacacggctggtctattatgccgccgctgttgggcgtccacgacttcaccgccggcctgcctccgtcgccgccgagtggtgcctccgcctacacggctggcctattatgccgccgctgttgggcgtccacgacttcaccgccggcctgcctccgtcgccgccgagtggtgcctccgcctacacggctggtctattatgccgccgctgttgggcgtctacgacttcaccgccggcctgcctccgtcgccgccgagtggtgcctccgcctacacggctggtctattatgccgccgctgttgggcgtctacgacttcaccgccggcctgcctccgtcgccgccgagtggtgcctccgcctacacggctggcctattatgccgccgctgttgggcgtctacgacttcaccgccggcctgcctccgtcgccgccgagtggtgcctccgcctacacggctggtctattatgccgccgctgttgggcgtctactacttcaccgccggcctgcctccgtcgccgccgactggtgtcttcattgttattgatggacgactttgttcccacattggccacttctgccatcaccaaggggaatattacaaagctaagtcatcatttattttattctttatatgatatttttccttttcctctgcctcactacaccaattggtcctccattgagtagtgagtcgggggctacagatattatatcatattttttataatatttatcttgattgcttgcgacatattctgagtacaaaagtgcctttgcctttaggccgattcctagcacccgggggctcgttggatggaccgagtaacgcaaggtgctaagtattattcggaataaatcaaaagcatagagataagataatttattttctgctcttaataattgcaaaagtacccgagtagtaaactccgatccgtgaaactttgttccattaatgacgaactcatgtcactcatatgcatgtttgggaagtgcttaggccgactcccagtgcttggtggctatgactagtcgggcagagcgtttaaacgtaataagtcatctgctcggggaaatcaaacttgacaagaggagaaatacatatttataaatattttaaaatacttgattttttctcgagtattatatttatatcagatactactcatcctaggattcatggctttaagcttatctcttacgctctaggaatggatcagtcagaacatcaccaccggctcgcctcgaccgccgccgactggtgtttccgcctgaacggctggcctattatgccgccgttgttgggcatctacgtcttcaccgaccggccgccttcgccaccgccgactggtgtttccgcctgaacggctggcctttatgccgccgttgttgggcgtctacgtcttcaccgaccggccgcctcgaccgccgccgactggtgtttccgcctgcacggctggcctattatgctgccgttgttgggcgtctacgtcttcaccgaccggccgcctcgaccgccgccgactggtgtttccgcctgcacggctggcctattatgctgccgttgttgggcgtctacgtcttcaccgaccggccgccgcatccgccgctgactggtgtcaccgcctgcacggctggcctgttataacgccgactgatgctatcttcttcacggctggctacatcgcagtcactactaataggcatcagtatcttcaacacaagctgcctacgtttgccatggctgccgactggtttcttcacttccatggctgcatgattctgccagtgttgattggccttaccatcttcatcgccgctaccactactgatggacatcatcatcttccgtcgccgactgattatgccgccgccgactgagcgacttcatctttattatcttcggcactggcaaactctattgctgctacttcgcaagttttgctacttcaccaaccacgacgtatttgtgagcctcgacatctcggcatgcgatgccatgttattttactacaacaagaggctctccaatattcatgatttctacttggacatcttcaacacatatcttcaatcaagcaataactat

SEQ ID NO: 91707 - DNA, 3614 bp, Oryza sativa
  Clone ID: PAT_MRT4530_90256C.1
catccacttttaggtctcgtgcgctaccccgttttattattgccgaattcatgtttcgacatgttcgcatataactacgcggcactattgaggcgattgatgctggtcatggactcgaggcgtctcagctttccggtcgatcggccgcgagtccactccgccggcttgtcctcgccaccgccattgctgatagcaacaacgacttcaccgccggcctgcctccgtcgccgccgactggtgtcatcgcctatacggttggtcggtcacaccaccgttcatgggcgtccatgtcttcaccgaccggctggccttcgccgccgccgactggtgtttccgcctgcacggctggcctattatgccgccgctgttgggcgtctacgacttcaccaccggcctgcctccgtcgccgccgactggtgtcatcgcctatacggttggtcggtcacaccaccgttcatgggcatccatgtcttcaccgaccggctggccttcgccgccgccgactggtgtttccgcctgcacggctggcctattatgccgccgctgttgggcgtctacgacttcaccaccggcctgcctccatcgccgccgactggtgtccccgcctatacggtcggttggtcacaccaccgttgatgggcatcgtcatctacactgccggcctgcctccgtcgccgccgactggtgtcatcgcctatacggttggtcggtcacaccaccgttcatgggcgtccatgtcttcaccgaccggctggccttcgccgccgccgactggtgtttccgcctgcacggctggcctattatgccgccgctgttgggcgtctacgacttcaccaccggcctgcctacgtcgccgccgactggtgtcatcgcctatacggttggtcggtcacaccaccgttcatgggcgtccatgtcttcaccgaccggctggccttcgccgccgccgactggtgtttccgcctgcacggctggcctattatgccgccgctgttgggcgtctacgacttcaccaccggcctgcctccgtcgccgccgactggtgtcctcgcctatacggtcggttggtcacaccaccgttgatgggcatcgtcatctacaccgccggcctgcctccgtcgccgccgactggtgtccccgcctatacggtcggttggtcacaccaccgttcatgggcgtccacgtcttcaccgaccggctagccttcgccgactggtgtttccgcctgcacggctggcctattatgccgccgctgttgggcgtctacgacttcaccaccggcctgcctccgtcgccgccgactggtgtcctcgcctatacggtcggttggtcacaccaccgttgatgggcatcgtcatctacaccgccggcctgcctccgtcgccgccgactggtgtccccgcctatacggtcggttggtcacaccaccgttcatgggcgtccacgtcttcaccgaccggctggccttcgccgactggtgtttccgcctgcacggctggcctattatgccgccgttgttggatgtctacatcttcaccgttggctcaccttcgttgccgtcgactggtgtttccgcttacacggctggcctattatgccgccgttagtgggcatcttcgctttcaccgtcgaccgccttcgtcgccgccgactggtgtcttcattgttattgatggacgactttgttcccacattggccacttctgccatcaccaaggggaatattacaaagctaagatccagatccagatatgcataaaagggattcatggctttaagcttatctcttacgctccaggaatggatcagtcagaacatcaccgaccggcttgccttcgccgccgccgactggtgtttccgcctgcacggctggcctttatgccgccgttgttgggcgtctacgtcttcaccgaccggcttgccttcgccgctgccgactggtgtttccgcctgcacggctggcctttatgccgccgttgttgggcgtctacgtcttcaccgaccggcttgccttcgccgccgccgactggtgtttccgcctgcacggctggcctattatgccgccgttgttgggcgtctacgtcttcaccgaccggcttgccttcgccgccgccgactggtgtttccgcctgcacggctggcctttatgccgccgttgttgggcgtctacgtcttcaccgaccggcttgccttcgccgccgccgactggtgtttccgcctgcacggctggcctttatgccgccgttgttgggcgtctacgtcttcaccgaccggccgctgcatccgccgctgactggtgtcaccgcctgcacggctggcctgttataacgccaactgatgctatcttcttcacggctggctacatcgctgtcactacgccgactggtgtttccgcctgcacgctggcctattatgccaccgttgatgggtgtctacgtcttcaccgaccggcttgccttcgccgccgccgactggtgtctccgtctgcacggctggcctattatgccgtcgttgttcggcgtctacgactccaccaccggcctgcctccatcgtcgccgattagtgtttccgcctgcacgctggcctattatgccaccgttgttgggcgtctacgtcttcaccgaccggccgcctcgtccgccgccgactggtgtttccgcctgcacgctggcctattatgccaccgttgatgggcgtctacgtcttcaccgaccggcttgccttcgccaccgccgactggtgtctccgtctgcacggctggcctattatgccgtcgttgttgggcgtctacgactccaccaccagcctgcctccatcgccgccgactggtgtttccgcctgcacgctggcctattatgccaccgttgatgggcgtctacgtcttcaccgaccggcttgccttcgccgccgccgactggtgtctccgtctgcacggctggcctattatgccgtcgttgttgggcgtctacgactccaccaccggcctgcctccatcgccgccgactggtgtttccgtctgcacggctggcctattatgccgccgttgttgggcgtctacgtcttcaccgaccggccgcctcgtccgtcgccgactggtgtttccgcctgcacggctggcctattatgccgccgttgttgggcatctacatcttaatcgccggtcgtctcgtctgttgctgactagtgcccttacctctacgtctggtttatacagctaccactactgatggacatcatcatcttccgtcgccgactgattatgccgccgccgactggtgcttttatcttcacaactgcgcgtcttcactaccggttcacttcattacggcaatacaactttgtcatcatggtggagcgacttcatctttattatcttcgggaccggcaaactctattgttgctacttcgcaagttttactacttcaccaaccacgacgtctttgtgaacctcgacatctcggcatgcaatgccatgttattttactacaacaagtggctctccaatattcaggatttctactcggacatcttcaacacatatcttcaatcaagcaatgactattcgatgacaagaagctacagttctcgactctatgttcagttgtttcccaac

SEQ ID NO: 91708 - DNA, 385 bp, Oryza sativa
  Clone ID: PAT_MRT4530_90257C.1
cgactcctatagggcgattgggtctctgtagccgccgggatccttccactccccacatacaggaggctaacactagaatccacagatgtcgaccttttgcctccagacgagttgtgcatgagcaggggagtggccccgatgtccagctggcgagcccagcaccgaagaggatgatgactacctcaaggcgtctctcccaccggaaacaggcacggtgtgagaacaacgtcaccaacagcagttctggacctgagacagtcaagaaaggaaatgattatcctggcggacccattgtgcttgaattgttcggctttgtgcttgttgcctcatctccctgtcagatcatcagcacaggccacaacgctggatacttctgacaactgca

SEQ ID NO: 91709 - DNA, 1208 bp, Oryza sativa
  Clone ID: PAT_MRT4530_90258C.1
cccgcgtccgctgtagagcaagaggcctcatccactgctgaagaacctgtggtttcagtatcgcggaggagtctgcttccctggaagaagaagaggaaattgaatttacggttattgaaggtactgaagaataaaggggaacctttactgaagaaggggaatgacgaagagggaggtgatgacattgactacgatcggcgattattgaccacttctgacggaaatgctttagagggatcagatagctccatcaatagtatggtgtcaatatttggtgatgataattttgtagttgggaattgggagtcaaaggaagtacttagtcgtgatggccacctgaggttgtctacccaggtgttctttgcatcaattgaccagagaagcgaacgagctgcaggggagagtgcctgtacagcacttgtagctgtcattgcagattggtttgaagcaaaccaggatctgatgccaatccgctcgcagtttgatagccttatccgagaagggtctctggaatggaggaaactctgtgagaacgagacatacagagagcgatttcctgacaagcactttgatcttgaaactgtccttcatgccaagatccgcccactcacagtttcccccaacaggtcattcattgggttcttccagcctgaaagtactgaggatggaagtggaggcgatttccttgatggagcaatgtcatttgacaacatatgggatgagattagccgagcagcagagtgctccactgaaaaacctactctatatattgtcagctggaatgaccatttcttcgtcctcaaggttgaggctggcgcatattacgttatcgatacacttggtgagaggctgtatgaaggttgcagccaagcttacatcttgaagtttgacgacaacactacaattcacaaagtacctgctgaaaagaaagaagccaaccctgattccagcgggcggttgaaggattcgtcagatagctcatcaactgatcaggacagcggaactgacactgaagagtgcgagctcgtggtcgaagggtaaagaatcatgcaaagagtacatcaagagcttcttggctgccatcccgatccgcgagctgcaggccgacatcaagaagggtatcatagcatcgacgccactgcaccaccgtctccagatcgagttccattacaccgaatcatgccccgaggagatccggctgcctgctc

SEQ ID NO: 91710 - DNA, 387 bp, Oryza sativa
  Clone ID: PAT_MRT4530_90259C.1
atggcgcgtggaggacggtgggtggcctctccacggcggcgtgcggaggatgacgagcagccacgtcgaggggctcatgggtggccattcaacgggcgacctccccacggtggtgcacgaaggatggcgagtggccgtgtcgaggggctcaggggcggccggtcgtcgggcagcctcccgacggggtggccgctcaataggcggccttcccacggtggcgcggaggactgcgagcagctgagtcgaggggctcaggggcagccggtcgatgtgcggtcgtatcgaggggtacggactccccacgacggcgtgcgccggtggactccccgtggcggcgctcggtgggaggcgagcggccgatcaacgggtggcctctcccgcggatga

SEQ ID NO: 91711 - DNA, 1158 bp, Oryza sativa
  Clone ID: PAT_MRT4530_9025C.1
atgggccgccgcgcgctgccgccgtcgtcgtcgtcgtcgtcgtcgtcgtcgacgacgaccacctcgccggagctgcggcggaagcgcacggccgcgccgcccccgccgccgtcgccgcggaggtaccgctcgatctccgacgtcatgcgccgctcgctgcccgtcgacgcggcgccccccgtggcgcgcgcctacgagagcacgcggtgcgacgtgtgcgggtccggggagcgggacgaggagctgctgctgtgcgacggctgcgaccgcggccgccacaccttctgcctccgccccatcgccgccagggtccccaccggcccctggttctgcccgccatgcgccccgcgctccaagcccgtcaaaaggttcccgatgactcagacgaagatcgttgatttcttccggattcagaagggcgcagaggatgccgaggcggagaaatatgggctttttcaagatgttaagaagcgaagaaagcgttcccttgttatgcacaagaagaggaggaggatactgccatatgtcccaactgaagataaagttcaaaggctcaaacaaatggcttctctagccactgctatgacatcttcgaagatgaagttcagtaatgagctgacttacatgcctggtatggctgggagatcgtgtaatcaagctacactggaagaaggtggcatgcagattcttccaaaagaggataaggaaactatagaactttgcagaaccatgcaaaaaaggggagaatgccctccccttcttgtggtgtttgattcacgcgaagggttcacagtgcaggctgatgctgatattaaagatatgaccttcatcgccgaatatactggagatgttgattttttggaaaacagagcaaatgatgatggtgacagtataatgactcttcttttgacagaagatccttccaaaaggctggttatttgtcctgataagcgtggaaacatttcccgtttcattaatggcattaataatcacactctggatggcaaaaagaagaagaatattaaatgtgtccggtatgacatagatggtgagagccatgtcttgttggttgcctgccgtgatatagcttgtggtgagaagctatattatgattacaatggatatgagcatgagtacccaactcatcattttgtctaa

SEQ ID NO: 91712 - DNA, 173 bp, Oryza sativa
  Clone ID: PAT_MRT4530_90260C.1
atctttcttcctcccaatctgtgaagcgagagagagagagagagagctcctggcgagcttaccttgttccttcttccaaaccctaatcctttcgtcgagcggaggagagccgctgttagtgcgctctcgcggaggcgtgatgtgattctgtattgtccgaggggaggggaggg

SEQ ID NO: 91713 - DNA, 2620 bp, Oryza sativa
  Clone ID: PAT_MRT4530_90261C.1
cacacaccatgcatctcaaacaaatttctatggtccatccggacatctcatttgtctccatggggctgggcaagacactcttggtcgtctttagcttgctacatgccttagtgttagcaacatcagtaggtgttgagcatgcaacagatgatgtatccacctacatcatacatgttgcacatgtgcatgcgacacctccaactcatgcctcgcaatgcatggaccagcacgccattgcacactacacctcctttctccaagggatcctcccttctcacttaagcgagccaacaccacgccttgtctatgcatactcccacgcggccacaggctttgccgcgaagctagcgaagcaccaggctacacacatcgtgcaccatcccagcatccttgccatcttccccgacaagcgcaatgagttgcagaccactctgtctccctccttcctcggcctctcaccgtccaacggcctcgtacaggcatcgaacgatggtggcactggtgcagtgatcgcagtggtagacactggtgtttatcctaagaaccgtaggtcctttaccgttgacccatcactgcctccgccgccgagcaccttccgtggccactgcatctcaaccccttccttcaacgcgactgcctactgcaacaacaagctcgtcggtgcaaagtatttctgtagagggtacgaggctgcattaggccaccccatcgatgagacgcaagagtcaaagtcaccacttgacaccgaaggccatggcacgcacaccgcttctactgccgcaggatctgcggtccctggcgccaacctatttggctatgccaatggcaccgcccaaggcatggctgtgcgtgcgcatattgccatctacaaggtgtgctgggcaaaaggatgttatgattctgacatcctcgcgggcatggatgaggcgattgcagatagagtaaatgtcatatctctttccctgggtggtcggagtgaacaactctacaatgaacccacgtccgttggtgcattcaatgccatccgcagaggcatatttgtctctgctgccgccgggaacgacggccctgacatgtctactgctaataaccttgcaccatggatggtcacggttggtgcgtcaagcataaaccgtcggttcccagcaaacattatcctcggaaatggcgaaacttatgtcggcacctccctctactcaggtcggaacatagctgcttctttgataccactagtatacagtggtgatgctggctctagattgtgtgaacctgggaagctctctcgcaacatagtcattggcaagatagttctttgcgagatcggctatgcccccgcacaagaagctgctgtccaacaagccggtggtgttggtgccatcgttccaagtagaaatgtctatggtcagttcttcctgagttcacccgacttgatcccggcatcaacagtgactttcgctgacgccaatgcaatctattcgtacacgcaatcggcggcgaacccggttgcaagaattgaatttcgcggcaccatgatcagccaatcaccatatgctccgagggtcgcggccttctcgagccgtggacctaaccgctttgtggctgagatactcaagccggacataatcgcccctggcgtcgacatcctcgccgcatggacaggagaaaactcgccaagctccctcagcatcgacacgaggcgtgtcgagttcaacatcatctctggcacgtccatggcgtgccctcacgtgagcggcatcgctgctatgctcaaggtggcacgaccagactggagccctacggcgatcaaatcggccatgatgaccacggcttatgaggtggacaacggcggcaacgccatcatgtcgtcagtgaatgggcgggcggctgggccatttgagctcggttctggtcacgttgaccccaacaacgctctcgaccctggccttgtgtacaacgccaccaccgacgactacatcgccttcctctgcggccttggctacacaccaaaccagatagcgattttcacaagggacagcacgacgacctactgctcacgtcggccgcccatcggggacctgaactacccggcattctccatggtgtttgcgaggtccggtggtcaggtaacgcaacgccgcaccgtgaccaacgtcggggcgaacaccaacgccgtgtacgacgtgaccatcaccgcgccgcctggcactaggctcacggtggcaccaatgaggctcacgttcaacgcgcagcgcaagacgcttgactatgcgatcaccttgtcggcagggtcaagcaactcgccatacaacgcgtggggagatatcgtctggagcgatggccagcacatggtgaggagccccgtcgtggccacctggaaataaatcaccacttgtgacattgtatcgtacgtttatagtaattgaaggccatcatctcagatggtgccatgatgtaaacgtaacatacgtagtactgtatggatgaacccgggaaaaacgcgttgtcatcgttgttcctgctaccgctagcacttgctgcttggctgctactgtataatcagcacgtatgcattaataaataaatctgaagtaaattgtcctcaaaaaaaaaaaaaaaaaaa

SEQ ID NO: 91714 - DNA, 1031 bp, Oryza sativa
  Clone ID: PAT_MRT4530_90262C.1
cggaatcccggctcgacccacgcgtccgggaacatgaatgccgcactgcgatgcgcaaaggaatatatcgacgcaatcggtggatcagtctcaaaaggttggaggttgctagcattggttctttctgcacagcagagatatcctgaagcagaagtggcaacaaatgctgcattagatgagactgcaaagttggatcaagggtcattacttagtctaaaggctaagctgaaggttgctcaatcatcacctatggaagcagttgaagcataccgtgcccttcttgctcttgttcaagcccaaaagaattcctctggatctagcaagactgatgcagagggacagaatgacagtgtaagtgagtttgaaatctggcaaggacttgcaaacctgtactccagtctctcaatctggagagacgctgagatatgtctgcggaaggctagagccctgaaatcctactcggctgcaacaatgcatgcagaaggttacatgctcgaggcgcgagatcagaacaaggaggcattggctgcctacgtcaatgcattctcgatagagctagagcatgttccatccaaggtggccattggtgcacttctctgcaagcaagggtcaaggtatctccctgcagcgagatgcttcctctcggatgcactgagaattgagcctacgaacaggatggcttggcttcatttagggaaagttcacaggaatgatgggaggatcaatgatgctgctgattgttttcaggctgcggtgatgcttgaggagtctgaccctgtagagagttttaggtcactcgcatgaggatatcacaattcacaaacatgttctctcttgttttttcaggttcatagtatttgagagaattaacacacattagatattactaaggttgttgtatctaaaaatatgtgtaatcctgtatattttttttctttctgaactctatcaggcattaacaaacagagtggtgtatcaaagctgtaattaattaacaactcaccgtccttatataattgttttacttggtg

SEQ ID NO: 91715 - DNA, 220 bp, Oryza sativa
  Clone ID: PAT_MRT4530_90263C.1
ttttgtttatctacgggcggcaaccacccgaagttgtggggtgattctcgaaatgtgtatgaataaacaccccaaattccaggcagtaattttttcggagtgaaagataccaccaccaccagcagcttaaagcaagcccatggccaagtcgacgcccgctgcggcagcaggagtcgccgaagagggtatccttggctttcttcctccatttcatgcgccg

SEQ ID NO: 91716 - DNA, 4833 bp, Oryza sativa
  Clone ID: PAT_MRT4530_90264C.1
atggccgagaagctaccgccatcgccgtcctcagctagccctagttccgttaaggaaaagatccagaagttaggtcaaggtgatggcactcagggagttcaaggtggaggtgttagtcaggatggcaatgcagcacaggagtttttcaataacttccaagactgggttgactacgccgtgcacaatgctttgatcaatcaatctggggtattagttaataccttgtcaaacatgatgaagtcaatggttgatggttcaatggccgagtctaaagctacaggaccggtttacctacccggaggagtgttcccgaattatcggccattaatcaccgataatcagccagtcatccagtcagcccctcttaatgcaccatcggctcagccgacggcaccagcattggctcccgcacctgctgcaccgccttcggctccaggccagctagtcaatccccagttgttgcaagttgtaaatcaaattatcccagagcacttggttcatcatgtacaaccagatggcacggtgatacctcaagttgtccctgagcatttgccttatcttgaatggtttgaaagagttcccctacctaatcggtttaaggtgccagatttttcaaaatttttagggcaagatagtacatcgacttatgaacacattagccgatttttagctcagtgtggtgaagcatcggctgtggatgctttgagggttaggttattccggttgtcgttgtctagatcggcctttacttggttttcttctttaccatatggatcaactaacagttgggctgatttagaaaagcagtttcatagctatttctatagtgggattcatgagatgaaattgtccgatctaacgtcgatcaagcaaaagcatgatgagccagtgcacgagtatattcagagattcagggagatgaggaataagtgttacagcttaagtttgactgatgcccagttagccgatttagctttccagggtacgattgctccgattagggaaaagttttcatctgaagattttgaaagcttgtcacatcttacacagaaggtagctttgcatgaacaaaggtttgcagaggctaggaagaattctagaaagattaatcatgtctgtccttatatatatggatcggatagtgaggatgatgattctgaaatagctgcagccgaatgggttaggagcaaaaaggttataccgtgccaatgggtgaagagctcagggaaagaggaaaggtataatttagatataaccaaggctggtacaatctttgacttgctactccgagagaagcagattcaacttcctgctggacacaccattccatcagctgaagagttgggcaagaagaggtattgcaagtggcataattccgggtctcatacgactaatgattgcaaggtcttcaggcagcagattcaagcggctattgaaggaggcaagattaagtttgatgattctaagaggccaatgaaagttgatggtaatcctttccctgtcaatatggtgcatacagctggccgggcagccgataggggttgtgcaagaggatttcagataaattcggctaagattatcaacaaatatcagaggaagtatgataagcagcaggagaagcattatggagaagattatgatggctttgatcctcattggggttgtgagttcttcagattttgttggaatgaaagtatgaggctgccatctattgaagattgtcttggttgtagtaatattgcggagagctcaagccgatcatttaataggagtaatcggctaaggcagacaagagttcctgttcatcaaatgttgggcctggtgaaccaagattatagccaagaggacaacgagaataggaagattcagtggtgtccttctggtatttttacgaagaataaaaaaagaagggttcaaaggttgagaaatagagaacactttcaggaggtcgagcaagaaatcaatcatcggctgagaaggacaaagccgaggcaggaatggcgagttaagaatcaagctcctacaggcgatgaggtcacggccgatgaagcaaagaagttggcgaaagggaaaagtgttgtaacagcatcagttaacatggttttcaccttgccagctgagtttgggatcaagcaagccgatattgacgaagttgaggaggaatcggctaaattggttctatcaccagaacaagcagtcttcgagaagcctgaagggacagagaatcggcatcttaaaccattgtatataaatggctatgtcaatgtgaagccgatgtctaaaatgatggtcgatggtggggctgcagtgaatttgatgccttatactacattcagaaagctgggcagaaatgctgaagatctcattaagacgaacatggtgctcaaggacttcggcggcaatccatcagaaaccaagggagttttgaatgtggagctgacagtcggcaacaaaaccatccctacaacatttttttgtcatcgatgggaaggccaattgaagatggagaacccaagctattattttgaaggcatcgtggaaggttcaaacgtctacatcaaggacacagtagatgatctcgatgacaaacaaggtcaaggtttcatgtcggctgatgatttggaagaaattgatatatgtccaggcgatcggccaaggccgacatttattgtctccagaattcagaaccaagctgagattaagcgtttatatgatgctggttttattcgtccttgccgatatgctgagtgggtttctagcatagttcctgttatcaagaagaacggcaaggtgagagtgtgtattgattttagagatttgaataaagctcccccaaaggacgagtatccaatgccagtagccgatcagttggttgatgctgcttcaggacataagatattgagttttatggatggaaatgcgagatataatcagatctttatggctgaggaagatattcataagacggcatttagatgtcctggtgcaattggcttatttgaatgggtggtcatgacttttgggttaaaaagtgttggagccacatatcaaagggctatgaactatacttatcatgatctgattggcctggaaatagaggatcacatagccgatttaagaaaagttttcgagagaacagggaaatatggcttgaagatgaattcgacaaagtatgcttttggtgtatcggctggccagttcttggggcttcttgttcatgagaggggaattgagataactcaaaggagtgtcaatgcaatcaagaaaattaagcctccagagaacaagacagaattgcaggagatgatcggcaaaattaattttgttagaagatttatttctaatttatccggcagattaaggcattatctattgtccaatgaatgcactgtcatatgcaaggccgatgttgtcaaatacatgttatcggctccaattttaaaaggaagggttggaaagtggatatttttcttgactgagtttgatcttcggtatgagtcaccgaaggcgatcaaaaggcaagctatagccaatttcattgttgagaatcgtgatgattcaattggctcagttgagattgtgccatggaccttattctttgatggatcagtatgtactcatggttgtggtatcggcttagttataatttcccctcgaggggcatgttttgagttcgcttatactattaaaccttatgtgactaataatcaagctgaatatgaggcagttctcaaagggttgcagttactcagagaagttgaagccgatactatcgaaattatgggggattctttactagtaatcagtcaattggcaggagaatatgagtgcaagaatgatatgttgatagtttataatgagaagtaccaagaactgatgaaggaatttcggctagtgactttgaagcatgtatctcgagagcagaatattgaagctaatgatttagcccaaggggcatcgggatacaagccgatgatcaaagatgttaagattgaagttgctgccataacagccgatgattggagatatgatgtacatcagtatttacaaaatccatctcaatcggcttcacggaagttgagatataaagcattgaagtatactttattggaggatgagctttattatcgaacgattgatgggaaatttggggcgatccagagggcaccggcgtcggctatgaatcctatcattaaaccatggccatttagaggttggggaattaatatgattggcatgattaatccaccatcgagtaaaggacataagtttatattggtggcaaccgattattttaccaaatgggtagaggcgattcctttgaagaaggttgattctggggatgctatacaatttgttcaagagcatataatttatcgatttggtattcctcaaactattacgaccgatcaaggctcaatcttcgtgtctgatgagtttgttcaatttgccgatagcatgggtatcaaaatgttgaattcttcaccgtattatgcacaagctaatgggcaggccgaggcgtctaacaaaagtttgatcaaattgattaagagaaagatttctgattatcctcggcaatggcatactcgtttagccgaatcattgtggtcttatcggatggcttgtcatggatcgatacaagttcctccttataagcttatttatggacatgaggctgttttgccatgggaagttcgaatcggctctagaagaacggagttgcaagatggtttgacagccgatgagtattataacctcatggctgatgaaaggaaggacttggttcaatcgcgattacgagcccttgcaaaggttaccaaggataaggaatga

SEQ ID NO: 91717 - DNA, 1293 bp, Oryza sativa
  Clone ID: PAT_MRT4530_90265C.1
atggattgggcttcactcccagcagacctcctcttctccatctcaagccatctacgcgagccggaagatttcgtccgcttccgtgccgtctgcccacagtggcgagccgccgtgtcgcataaagagcacgccttcttccagccttggatcatggcaagccgctggcttgaggacgaatattccgaaaacgtcctcttctactcgctctccactctgaaaaccatcaaggtacatgtccctgacatgaagagcaggcgtattgctgcgtctggttccagccacctcatagccattgacaaagacgatgacttgtccgctgtgctcattaacccgctctccgggaagaccacggcgctacctcgcctccccaagttcttccacgacaatggcgctcacggttggattactggtgaaggggtcatcacggtggtgctcaacaattggatgagcgaaaacatggcgctatggtaccgtggcggtgggatcactatgaagggttgggctgtagtgcctaggtggaagttgaggttgagggtgtcacactacctgagaaagcttgctgcctatggtgaccagatggagatgcatctgatagacctcggcggcgacaacgaagacagcgttgtgctactgcaggagacgaagaaggttgagttgcttggcggctgctggcctaggtcagacgaggttttcaaggcaactaggccatgccatcacgaatggttctcactgtacaggaatgttgaacaggaggaaattccagtccatgacatcggaaatgtcatggtagttcaaagtcgtgattcttgcacccgcacctacatgatcccagcaagtcgtgactttgctgcactcggtagcagaaatgccttctactacctctggaagcagttcgacgctggtggctcatacaatgcattgttcaagaagagggaaggcggcggcggcgcctctcctccgccagatctggccgagagcggcggccatggcccagcaggaggggaggcggcggcggcgggtggaacccacggccccacctgtcatccccaacctccatccatcccggcggcaactgccatgggcgccaacgtcgccgtctctcccgctcggttccgcctcccgcgctcgcaactgacggtgtggaccggctcccctccaccttctcgaccaaaacccccactcgtcacacaaaaaccgacgccggccgagccgccaccaccccacatcggcgctccgcctccaccggccgatcccgcctctcccggtcacgatttccacctcccggacctataa

SEQ ID NO: 91718 - DNA, 223 bp, Oryza sativa
  Clone ID: PAT_MRT4530_90266C.1
atggagaaacggtggagaagggcagcaaggatgctctccctcggtggggcccgccctggtttgggcgtcgacacgtcgtggccacgcatcgaacgtgcccgagggctgtcggctcggtctctttctcagttctggtcggctagagaagttgcacagaggaagggcaagccaaggaggctgtcaggtgggtccaggtcggtgcatgtggattttactgaagtag

SEQ ID NO: 91719 - DNA, 849 bp, Oryza sativa
  Clone ID: PAT_MRT4530_90267C.1
atggcgtcaccgccttcctccccctccctccccgacgccgaggcgccgcctccgccgacttcgccgtccactgtaaccggcggcgccgtctcgggcaccatcccggccgccgaggcattcgccgtccactacccgggctacccgtcctccccggcccgcgccgcccagaccctcggcggcctccccgccatcgccaaggtcaggggctccgaccctggcgcccgcctcgagctccgcttccgccccgaggatccctactgccacccggccttcggtgagccccgcatgtccgccggcctggtgctccgcctctccaggcccaagggcggtaccgcgccgccgcgcgccgaggtggttgcgcgtgtccggaacgcctaccacttcgaagttggcccgagtttacttcatggaagatctaaacaagcttgctcggtggatgctcagaaaaaaaaatcttcattatttaaggaccacaccaaaatagttgtttatgttagaatgatttgggggtgtgtccaggatcaaaccccattgaacggcatctttgagaaggccactagggtttgcataagtgtgaactcacataaaattagtggtgagaatgagaataggacattccttagtgataatgaagatgtcatgatgttagtgccaccactcttctcaataaaggataaaccaacaaagatagcgcttctcccatcgtctaatgcattgtccaaaagcatgcaaaggggagttgtacagcatcgatgggagatggatattggaccaacccttgcacttcctttcaatgttcaagatatccttttctactgttgtcctgtcaagtttgcctttttcccttga

SEQ ID NO: 91720 - DNA, 362 bp, Oryza sativa
  unsure (1)..(362): unsure at all n locations
  Clone ID: PAT_MRT4530_90268C.1
ntccgtttcttcattagttcccattatctagtctttagttccaattaagtttgtgtctctgttttttcctctcaaaatggctatgttcagaattatttttgaaatgctgaaaatccaccgttgtgttgtgtaaaaaaaaaaaaaaaaaaaaaaaaaaaaaaaaaaaaaaaaaaaaaaaaaaaaaaaaaaaaaaaaaaaaaaaaaaaaaaaaaaaaggaggaaaagaaataaaaaaaaaaaaataataaaaaacaatgagaattgaaaagactctaataaaataaaaaaaggggggggcttctttaaaaattcaaatttaaaaacccggggggaaaaaaagaaaatttttatatggggggacc

SEQ ID NO: 91721 - DNA, 471 bp, Oryza sativa
  Clone ID: PAT_MRT4530_90269C.1
atggatccccgggctgaggaatcggcacgaggaaatcatatcaaggatgggtgcaacttttgcttggttgattcattagagaattgtgtggagaagccagctggattcatatgtgaatgtcctagttgtgacaaggcacgtgatatgaaggtgcagagaagaaatgaaaactggcaaatcaaggtctgtaaaaggatagctgctgagactaactttccaaatgaggagatcattaacttgtacttgagtgatgacaatttggataatggtattctttttcccaataacacttctttcaatatttcttactgacgccgttattttagaatggggactgctttggccatctatatcttgtctcatttgactctacaatactgtatttgcttgcataggtatctggtatttacctctatgttcaatttgcagaaaatggtgttccattgcttaacatggaataaaccttatatg

SEQ ID NO: 91722 - DNA, 351 bp, Oryza sativa
  Clone ID: PAT_MRT4530_9026C.1
atgggtactcagtcgtcggtgatgcctcctccaccaccacctcctcctcccttgaacggtgacagagaccgcgtggctcaccggctccgagacgaggtgctcgacaacaacgacgacgcaggcgcagcctggcccgacctctctgagacaacgatggagacgacggagacgacacctcctgccgcatctacggtggtggagagagaggaagaggaaagagaagagagggaagggaggtggggccccccggccgccgggggcctaataaagatttttgacggaaaacgtgatggagtggcatggatccaatttccacaattttcagtgccacgtagccgatatactgaatag

SEQ ID NO: 91723 - DNA, 145 bp, Oryza sativa
  Clone ID: PAT_MRT4530_90270C.1
gtgtgggagcattgatcttagctcaggcttttctcaggaggaccctcatggcagggagaagcactcccctgccagcaggtgctgcaggcagctggggtcgcatccaacagtcctgagctacctgatggacgctttcggagactcg

SEQ ID NO: 91724 - DNA, 476 bp, Oryza sativa
  unsure (1)..(476): unsure at all n locations
  Clone ID: PAT_MRT4530_90271C.1
atagccggagcttccatatattgtgttcacatatgcacgagggaacaacatataatcttagcatataccactcttacatcaagtcagagagagatcaggtcaaacaaaaacaaaagcatagcacggccttttaaatcaaaagacaatgaacaaactgggaacacaccaaacaaggtgggagacatcatctaaatagagatgaacaattaaacaaggctatatatgacaatgaccgcttaattgccaccagactcctcgcaacccntaaaaaattaagtctttaaaactaatgaggcaaaacttctctcctttttcaaaaccgattataccgactaatgcataatggtacaccttcttggccttctcgagcttcttgagcacctgggtggcgtcagtgcacccgaacatgggcagcttccacatggtccaatacctgccatcgtaatatccgggggatctgtggttctcaccgtaga

SEQ ID NO: 91725 - DNA, 344 bp, Oryza sativa
  Clone ID: PAT_MRT4530_90272C.1
acaattcatcagtctttaaaggtctacaatatgcgtcttgctttgtctctacaatatgtgtcaggcttcttgcagttagcaacttgcatactgagccctttaccacctgactacaaaaacgcagccgctcaatgggcgtttttgtcatacaagaacccttcactagcagttctacccggccattttaatcgctcagtctttgttccatttactgacagtgagctttctgatccctcgcttgctaaagacctcgactacatcaattcaacaaactttgtggcctatgatgaaaggctcttccatcctcttgggcccatgtccacacacgcaaagcacaccacctc

SEQ ID NO: 91726 - DNA, 351 bp, Oryza sativa
  unsure (1)..(351): unsure at all n locations
  Clone ID: PAT_MRT4530_90273C.1
atcgatctcctcctcttcacaagcaagcgcgagaggagacacctccatcgatncatggccgccaccgcnaccgccgttgcggcgtctntttccgtggccggggggctcggnaggccgctggctcgcttntcgtcgccggcgggccgattgaaagccgcctcccnggcggcggcacggcgggccgtcntcntccnggcntcgtcgtcgggnnanccggtaaggagggagaaggcctcacctgctgccgcggcggcgggngatagccgcggtggcgcccgtggcggcggcnctggcggtgcccgagagtggcggagcgacgccgnccctgtngcgtcnctcaaaaactttcct

SEQ ID NO: 91727 - DNA, 3380 bp, Oryza sativa
  Clone ID: PAT_MRT4530_90274C.1
gtagtcatcacttgattgaagatatgtgttgaagatgtccaagtagaaatcctgaatattggagagccacttgttgtagtaaaataacatggcattgcatgccgagatgtcgaggttcacaaagacgtcgtggttggtgaaatagtaaaacttgcgaagtagcaacaatagagtttgccggtgccgaagataataaagatgaagtcgctccaccatgatgacaaagttgtattgccgtaatgaagtgaacacaagtcggcggcaacagaagcaaaccggtagtgaagacgcgcagttgtgaagataaaagcaccagtcggcggcggcataatcagtcggcgacggaagatgatgatgtccatcagtagtggtagcagcgatgaagatggtaaggccaatcaacactggcagaatcatgcagccatggaagtgaagaaaccagtcggcagccatgacaaacgtaggcagcttgtgttgaagatactgatgcctattagtagtgacagcgatgtagccagccgtgaagaagatagcatcagttggcgttataacaggccagccgtgcaggcggtgacaccagtcagcggcggatgcggcggccggcggaaacaccagtcggcggcggtcgaggcggccggtcggtgaagacgtagacgcccaacaacggcagcataataggccagccgtgcaggcggaaacaccagtcggcggcggtcgaggcaagccggtcggtgaagacgtagacgcccaacaacggcggcataataggccagccgtgtaagcggaaacaccagtcggcagcggtgaaggcaagccggtcggtgaagacgtagacgcccaacaacggcggcataaaggccagccgtgcaggcggaaacaccagtcggcggcggcgaaggcaagccggtcggtgaagacgtagacgcccaacaacggcagcataataggccagccgtgcaggcggaagcaccagtcggcggcggacgaaggccagccggtcggtgaagacatggacgcccatgaacggtggtgtgaccgaccaaccgtataggcgatgacaccagtcggcggcgacggaggcaggccggcggtgtagacgtaggcgcccaacagcggcggcataataggccagccgtgcaggtgtggacaccagtcggcggcgacggaggcaagccggtcggtgaagtcgtagacgcccaacagcggcggcataataggccagccgtgtaggcggaggcaccactcggcggcaacgaaggcaggccggcggtgaagtcgtggacgcctggcgtgcggcggcgcgtcgaggcaggaacagaaggcgtcgacgtcggcgggggacgcggcgtcgtagaggccgaacgcctcgtacagcgggttggcggcgctcggcgccatgtagccgctgccgtggatgacgtcggcgttgcggcgcttggcgtcgccggggaggtcgaacagggcgcgcacggcggccctcatgccggcctggagctcccgcggcacgccgtggcccgacacgcggaagcagcccaggcgccgcgccgcgtcgcgcagccgcgcggcctcgccgggcgcctcgccggcgagccgcaggtcgatcaccgggatcttcgccgccatacggccctgcgcgtgcgtggtgccgtcgccggtttgttcacgtcgtctgatggagagtgatgggtgtccacggcatcgacttgatgatgtgctctgtcgcgggcgaatgaaccgaattaggcagttagcactcgctgtctgggcactgaatccgtgtgctccaaatgcagacgagcacaagtcagcgagcaaaggctgcttctgtctgttacgacatgataacgtgttccacactttcggttctccactttcgcagaagacgataatagacatcactatgggatttgagatttgaagccggacgacatgccaggctaccagctctttcatgtctttcacggctatgacaagaacagcaattgtaccaaacaacaacagagcaagacggtgccacactagccatggaagctctgtttcgagagcgcaatgccgttggtacgaatgcccttgttttgtaatggcatgtgcttttgatggatccagttcagatataggaaactccacaccaccaacagagtttccctctacatctcttagttcgagtttaatctggggaggcactgcattccaatctatttcgattgctccaaagtttggttgaccatatgtgcatgatttgtaacgacagttagggctaaagactcgcaaggtagttggtgtcaacaaagccacaagtctcataagtggttgaaatactgatggcacggaattctcaacagattgggtaagaccacttgaggtaatatcatacaatggatattgagctccacagtcataacgagaaatttctccaaaatgaacatcaccgctgataaaaaacactccatttctctgcagtgcataggaagaaaattgtattattttgaaacaattttgtattgaagatccaatgatggtgatctctgatcgaggaccatgcagttccctctccagccattgccactgaggatctcccagtacagctccatcacttgatagagggtctctgtgatatctggtgtccaacagaattacctttacccgttttccttcagggccaaacatgtaggaggcataaacaccagcttgctgcctccgtgaactatcttcagcttcatccagaaaatctaatagaagcctttgagaggtcaccttcccaccaaactcttttcctgcatcattcagtccataatcgtgatcatcccatgttccaataacctgagccctctccctgagcttggcgtacccgggcttggccttggccatctcgtagcgcctccgcagctcggcctccgtcgacgggtagaaccgcggcacgttcctccacggccccaccgtcctctccctcccgaacacccggaacggcctcttgttgtcgccgtacacgttgtccccgagccagatgaacacctgcgggtcgaaccccacgacggcctcccacacgggctggggcgcgctctggttggcgcaggagccgaaggcgatcctggacacggcggcgccgggatcggcgcggagggagagggagcgggagaggaggaagaggaggaggagggggaggaggagcaacgcccgcgtggaggtcgccattggcggaggcggaggcgggcgggcgggcgagcgaggtcgcggacgaggagtcgacccacgggagaaatggttggagctgggaaggagcaatgcaagctcattccacggtcgaagctacaacaccgcacctcgtgatctgcagtgttcgcagtatggagtacaatagagctcactctcagttcagacga

SEQ ID NO: 91728 - DNA, 3823 bp, Oryza sativa
  Clone ID: PAT_MRT4530_90275C.1
tcctttgtctctgcatccatccactttaggtctcgtacgctacccccttttattattgccgaattcatgtttcgacagttggcgcgccaggcgattgatgctggtcatggactcgaggcgtctcagctttccggtcgatcggccgcgagtccactccgccggcttgtcctcgccaccgccattgctgatagcaacaacgacttcaccgccggcctacctccgtcgccgccgactggtgtcatcgcctatacggttggtcggtcacaccaccgttcatgggcgtccatgtcttcaccgaccggctggccttcgccgccgccgactggtgtttccgcctgcacggctggcctattatgccgccgctgttgggcgtctacgacttcaccaccggcctgcctccgtcgccgccgactggtgtcctcgcctatacggtcggttggtcacactaccgttgatgggcatcgtcatctacaccgccggcctgcctccgtcgccgccgactggtgtccccgcctatacggtcggttggtcacaccaccgttgatgggcatcgtcatctacaccgccggcctgcctccgtcgccgccgagtggtgcctccgcctacacagctggcctattatgccgccgctgttgggcgtctacgacttcaccgccggcctgcctccatcgccgccgagtggtgcctccgcctacacggctggcctattatgccgccgctgttgggcgtctacgacttcaccgccggcctgcctccgtcgccgccgagtggtgcctccgcctacacggctggcctattatgccgccgctgttgggcgtctacgacttcaccgccggcctgcctccgtcgccgccgagtggtgcctccgcctacacggctggcctattatgccgccgttgttggatgtctacatcctcaccgttggctcaccttcgctgccgtcgactggtgtttccgcttacacggctgacctattatgccgccattagtgggcatcttcgctttcaccgtcgaccgccttcgtcgccgccgactggtgtcttcattgttattgatggacgactttattcccacatcggctacttctgctgtcatcgagggaatacgacaaagctaagatccagatccagatatgcataaaaaggattgatggctttaagcttatctcttacgctccaggaatggatcagtcagaacatcaccaccggctcgcctcggccgccgccgactggtgtttccgcctgcacggctggcctattatgccgccgttgttgggcgcctacgtcttcaccgaccggcttgccttcgccgccgccgactggtgtttccgcctgcacggctggcctattaggccgccgttgttgggcgcctacgtcttcaccgaccggcttgccttcgccgccgccgactggtgtttccgcctgcacggctggcctattatgccgccgttgttgggtgtctacgtcttcaccgaccggcttgccttcgccgccgccgactggtgtttctgcctgcacggctggcctattatgctgccgttgttgggcgtctacgactccaccaccggcctgcctccgtcgccgccgactggtgtcctcgcctaaacggttggttggtcacaccaccgttcatgggcgtccacgtcttcaccgaccggctggccttcgccgccgccgactggtgtttccgcctgcacggctggcctattatgccgccgctgttgggcgtcgccggcttgcctccgtcgccgccgagtggtgcctccgcctacacggctggcctattatgccaccgctgttgggcgtctacgacttcatcgccggcctgcctccgtcgccgccgactggtgtcctcgcctatacggttggttggtcacaccaccgttcatgggcgtctacgacttcaccgccggcctgcctccgtcgccgccgactggtgtcctcgcctatacggttggttggtcacaccaccgttcatgggcgtctacgacttcaccgccggcctgcctccgtcgccgccgactggtgtttctgcctacacggctggcctattatgccaccgctgttgggcgtctacgacttcaccgccggcctgcctccgtcgccgccgactggtgtcctcgcctatacggttggttggtcacaccaccgttcatgggcgtctacgacttcaccgccggcctgcctccgtcgccgccgactggtgcctccgcctacacggctggcctattatgccgccgctgttgggcgtctacgacttcaccgccggcctgcctccgtcgccgccgagtggtgcctccgcctacacggctggcctattatgccgccgttgttggatgtctacgtcctcaccgttggctcaccttcgttgccgtcgactggtgtttccgcttacacggctgacctattatgccgccattagtgggcatcttcgctttcaccgtcgaccgccttcgtcgccgccgactggtgtcttcattgttattgatggacgactttgttcccacattggccacttctgccatcaccaaggggaatattacaaagctaagatccaaatccagatatgcataaaatggattcatggctttaagcttatctcttacgctccaggaatggatcagtcagaacatcaccaccggctcgccgtcgtcgccgccgactggtgtcttcgcctatacggttggttggtcacaacaccgttgtcaggcgtctacattttcaccactggtttgctttcgccgccgctgattggtgtcaccgcctacacggctggcctattatgccgccattgttgggcgtctacgtcttcaccgaccggcttgccttcgccgccgccgactggtgtttccgcctgcacggctggcctattatgccaccattgttgggcgtctacgtcttcaccgaccggcttgccttcgccgccgccgactggtgtttccgcctgcacggctggcctttatgccgccgttgttgggcgtctacgtcttcaccgaccggcttgccttcgccgccgccgactggtgtttccgcctgcacggttggcctttatgccgccgttgttgggcgtctacgtcttcaccgactggcttgccttcgccgctgccgattggtgtttccgcctgcacggctggcctttatgccgccattgttgggcgtctacgtcttcaccgaccggccgcctcgtccgccgccgactggtgcttccgcctgcacggctggcctattatgccgccgttgttgggcgtctacgtcttcaccgaccggccgcctcgtccgccgacgactggtgcttccgcctgcacggctggcctattatgccgccgttgttgggcgtctacgtcttcaccgaccggcttgccttcgccgccgccgactggtgtttccgcctgcacggttggcctttatgccgccgttgttgggcgtctacgtcttcaccgactggcttgccttcgccgctgccgactggtgtttccgcctgcacggctggcctttatgccgccattgttgggcgtctacgtcttcaccgaccggcttgccttcgccgccgccgactggtgtttccgcctgcacggctggcctttatgccgccgttgttgggcgtctacgtcttcaccgaccggccgcctcgtccgccgccgactggtgcttccgcctacacggctggcctattatgccgccgttgttgggcgtctacgtcgtcaccgaccggccacctcgaccgccgccgactggtgtttccgcctgcacggctggcctattatgctgccgttgttgggcgtctacgtcttcaccggccggccgccgcatccgccactgactga

SEQ ID NO: 91729 - DNA, 644 bp, Oryza sativa
  unsure (1)..(644): unsure at all n locations
  Clone ID: PAT_MRT4530_90276C.1
gngnnnnnnngnaattgtaatacgactcactatagggcgaattgggtaccgggccccccctcgagttttttttttttttttttgatgtaaaatcancnattganagctgggaacttctcaaatnttccaaacttngttcanatcannctcacttcnnnagaaccagtncnnaaacanagtacgantcanatgattgaancctatnccttgtanggancaaanacatcanaaaagcctcgtgtncgaattcnagtancccgggggatccactanttctagagcggccgccactcgcngtgtatctccancttttgtgccctnnagagagggttaatttcgancttggngtantcatggncatnactnttccctgtgtgaantngttantcgcgcaccttccacaaanngaacnaanctgatncatatcctntacancntggggtgnctaaagaattgactnnctcacnttaatgaagtttggncactgcngntttcactnaggaaactgtctgnagttgcttaataatcagcaattcccnggaaagcggttgnntattngcgccntccgcgctcgggaanaaacccggtncngnctncgcncagtaacggtaaagcccncacgngttttggnatcccaancngat

SEQ ID NO: 91730 - DNA, 2907 bp, Oryza sativa
  Clone ID: PAT_MRT4530_90277C.1
atgccgccgctgttgggcgtttacgacttcaccgccggcctgtctccgtcgccgccgactggtgtcctcgcctatacggttggttggtcacaccaccgttcatgggcgtccacgtcttcaccaccggcctgcctccgtcgccgccgattggtgtctccgcctacacggctggcctattatgccgccgctgttgggcgtctacgacttcaccgccggcttgcctccgtcgccgccgagtggtgcctccgcctacacggctggcctattatgccgccgctgttgggcgtctacgacttcaccgccggcctgcctccgtcgccgccgagtggtgcctccgcctacacggctggcctattatgccgctgctgttgggcgtctacgacttcaccgccggcctgcctccgtcgccgccgagtggtgcctccgcctacacggctggcctattatgccgccgctgttgggcgtctacgacttcaccgccggcctgcctccgtcgccgccgagtggtgcctccgcctacacgactggcctattatgccgctgctgttgggcgtctacgacttcaccgccggcctgcctccgtcgccgccgattggtgcctccgcctacacggctggcctattatgccgccgctgttgggcgtttacgacttcaccgccggcctgtctccgtcgccgccgactggtgtcctcgcctatacggttggttggtcacaccaccgttcatgggcgtccacgtcttcaccaccggcctgcctccgtcgccgccgattggtgtctccgcctacacggctggcctattatgccgccgctgttgggcgtctacgacttcaccgccggcttgcctccgtcgccgccgagtggtgcctccgcctacacggctggcctattatgccgccgctgttgggcgtctacgacttcaccgccggcctgcctccgtcgccgccgagtggtgcctccgcctacacggctggcctattatgccgctgctgttgggcgtctacgacttcaccgccggcctgcctccgtcgccgccgattggtgcctccgcctacacggctggcctattatgccgccgctgttgggcgtttacgacttcaccgccggcctgcctccgtcgccgccgactggtgtcctcgcctatacggttggttggtcacaccaccgttcatgggcgtccacgtcttcaccacgggcctgcctccgtcgccgccgagtggtgcctccgcctacacggctggcctattatgccgctgctgttgggcgtctacgtcttcaccgccggcctgcctccgtcgccgccgattggtgcctccgtctacacggctggcctattatgccgccgctgttgggcgtctacgacttcaccgccggcctgcctccgtcgccgccgattggtgcctccgcctacacggctggcctattatgccgccgctgttgggcgtttacgacttcaccgccggcctgcctccgtcgccgccgactggtgtcctcgcctatacggttggttggtcacaccaccgttcatgggcgtccacgtcttcaccaccggcctgcctccgtcgccgccgagtggtgcctccgcctacacggctggcctattatgccgctgctgttgggcgtctacgtcttcaccgccggcctgcctccgtcgccgccgattggtgcctccgtctacacggctggcctattatgccgccgctgttgggcgtctacgacttcaccgccggcctgcctccgtcgccgccgagtggtgcctccgcctacacggctggcctattatgccgccgctgttgggcgtctacgacttcaccgccggcctgcctccgtcgccgccgagcggtgcctccgcctacacggctggcctattatgccgctgctgttgggcgtctacgtcttcaccgccggcctgcctccgtcgccgccgactggtgcctccgcctatatggatccagatccggatatgcataaaagggattcatggctttcagcttatctcttacgctccaggaatggatcagtcagaacatcaccgaccggcttgccttcgccgccgccgactggtgtttccgcctgcacggctggcctttatgccgccgttgttgggcgtctacgtcttcaccgaccggcttgccttcgccgctgccgactggtgtttccgcctgcacagctggcctttatgccgccgttgttgggcgtctacgtcttcaccgaccggcttgccttcgccgctgccgactggtgtttccgcctgcacggctggcctttatgccgccattgttgggcgtctacgtcttcaccgaccggcttgccttcgccgccgccgactggtgtttccgcctgcacggctggcctttatgccgccgtagttgggcgtctacgtcttcaccgaccggcttgccttcgccgccgccgactggtgtttccgcctgcacggctggcctttatgccgccgttgttgggcgtctacgtcttcaccgaccggcttgcctttgtcgccgccgaccgatgtcctcgcctgcacggctggcctttatgccgccgttgttgggcgtctacgtcttcaccgaccggcttgccttcgccgccgccgactggtgtttccgcctgcacggctggcctttatgccgccgttgttgggcgtctacgtcttcaccgaccggccgccgcatccgccgctgactggtgtcaccgcctgcacggctggcctgttataacgccaactgatgctatcttcttcacggctggctacatcgctgtcactactaataggcatcagtatcttcaacacaatctgcctacgtttgccatggctgccgactggtttcttcacttccatggctgcatgattctgccagtgttgattggccttaccatcttcatcgccggtcgtctcgtctgctgctga

SEQ ID NO: 91731 - DNA, 759 bp, Oryza sativa
  Clone ID: PAT_MRT4530_90278C.1
atggctgagaacctcctggttctgtgcaccatcctcgcggcgcgcatggcgctcgccgccgccgatgattggattccggccaccgccacgttctacggcggaaacgacggctccggcaccatgggcggtgcgtgtgggtatgggaacctgtacgaccaagggtacggcctcgagaacgcggcgctgagcacggcgctgttcaacgacggcgcggcgtgcgggcagtgctacctcatcgtgtgcgacaccgacaaggccgggcggtggtgcaagccgcggggcgcggtgaccgtgacggccaccaacctgtgcccgcccaactgggccctccccagcgacggcggcgggtggtgcaacccgccgcggcggcacttcgacatgtcgcagccggcgtgggagcggatcggcgtctaccgcgccgggatcgtgccggtgctctaccgccgcgtccggtgctggcgccgcggcggcgtccgcttcaccgtcggcggcttcgaccacttcgagctcgtgctcgtcgccaacgtcgccggcagcggctccgtcgccgccgtgtcggtcaggggcgccggcaccgggtggctccagatgtcgcgcaactggggggccaattggcagtcgctcgccgggctcgccggccagccgctcagcttcggcgtcaccaccaccggcggccagtacatactgttccaggacgtcgcgccggcggggtggaagttcggccagacgttctccacctccaagcagttcgactactga

SEQ ID NO: 91732 - DNA, 588 bp, Oryza sativa
  Clone ID: PAT_MRT4530_90279C.1
cgagagcgacgagaagggagctcactctagctctagctaaagcttagccatggccagcaccgcccgcgtcgccgccgcgctgttcctcctcctgctcgggctctccgccacagcccccctcgccgcccgcgacctcatgtccgccgcgccatccgccaagaagcagccggcggggaggaagccgtccgtgcagccgggttacccgggcaccaatcccggcggcggcggtggcggcggcatcccgaccatcccggggttcgggagcatcccggggatgggcggcggcatgggcgggttcaacgtgcccgggatgggcggcgggtggggcggagggtacggcacgccgagcggcgggtactcgcgcggcggcgtggtggtgcccacggtggtgtgctccgacaagggcccgtgctacaggaagaaggtgacgtgccccaagaagtgcttctcgtcctacagcagctccggcaagggctacggcggcgggggcggcggcggcggctgcaccatcgactgcaagaccaagtgcaccgcctactgctgaatctcccaaacgccgagttcgatatatcggcgccggcaccacgg

SEQ ID NO: 91733 - DNA, 197 bp, Oryza sativa
  Clone ID: PAT_MRT4530_9027C.1
gactagatgagaatcgagagagagaaaaagaataaagagaggaaatgttgtgctactccgtccggcgcctggacaccacccgtgccgacgacgtcgacggccgcattatcagggcgcttttgacagcggaggtgcctgccgaggcggtcacctactccgccttcgtggaggcgttgaagatggtggtcttctatatg

SEQ ID NO: 91734 - DNA, 1603 bp, Oryza sativa
  Clone ID: PAT_MRT4530_90280C.1
atggctggtgtactctgccaccattgctggtggcgacattgtcttcaccaaccggctgcctccgtcgccgctgactggtgtcctcgcctatatggttggtcggtcacaccaccgttcatgggcgtcaacgtcttcatcgaccggctagccttcgccgccgccgactggtgtttccgcctgcacggctggcctattatgccgccgctgttgggcgtctacgacttcaccgccggcctacctccgtcgccgccgagtggtgcctccgcctacacggttggcctattatgccgccgctgttgggcgtccacgtcttcaccgccggcctgcctccgtcgccgccgagtggtgcctccgcctatacggttggttggtcacaccaccgttcatgggcgtccacgtcttcaccgccggcctgcctccgtcgccgccgattggtgcctccgcctacacggctggcctattatgccgccgctgttgggcgtctatgacttcaccgccggcctgcctccgtcgccgccgactggtgcctccgcctacacggctggcctattatgccgccgctgttgggcgtctacgacttcaccgccggcctgcctccgtcgccgccgagtggtgccttcgtcgaccggctggcctattatgccgccgctgttgggcgtctacgacttcaccgccggcttgcctccgtcgccgccgactggtgtcctcgcctatacggttggttggtcacaccaccgttcatgggcgtgcacgtcttcgccgaccggctggccttcaccgccgccaactggatccagatccagatatgcataaaagggattcatggctttaagcttatctcttacgctccaggaatggatcagtcagaacaccaccaccggctcgcctcgaccgtcgccgactggtgtttccgcctgcacggctggcctattatgccgccgttgttgggcgtccacgtcttcaccgaccggcttgccttcgccgccgccgactggtgtttccgcctgcacggctggcctttatgccgccgttgttgggcgtctacgtcttcaccgaccggcttgccttcgccgccgcctactggtgtttccgcctgcacggctggcctttatgccgccgttgttgggcgtctacgtcttcaccgaccggccgcctcgtccgccgccgactggtgcttccacctgcacggctgacttattatgccgccgttgttgggcgtctacatcttcaccgaccggcttgccttcgccgccgccgactggtgtttccgcctgcacggctgacttattatgccgtcattgttgggcgtctacgtcttcaccgaccggccgcctcgaccgccgtcgactggtgtttccgcctgcacggctggcctattatgctgccgttgttgggcgtctacgtcttcaccgaccggccgccgcatccgccgctgactggtgtcaccgcctgcacggctggcttcgtctttgtcattatcattggttgctacactgctattggctggatcaccgacatcgtcatcttcatcatgtcggttgcgtttgtcgtcgtcaactacacaactttatcgctgagcgccttcatattcattgctggctga

SEQ ID NO: 91735 - DNA, 3050 bp, Oryza sativa
  Clone ID: PAT_MRT4530_90281C.1
atgagacaacctgatcgtcagatcaatacacactcggcggattcaaatccctaaacaggagtctcgtgcgctaccccgtttcattattgccgaattcatgtttcgacagttggcgcgccaggtaggggttgcgtcgagttttctatcgacgagtgcgatggaatcaactccacgagtcgccggtattatcttcgcttctgtatcgtgagatccgccgccgtcgacaccacccgccgatcaaatcaatctacagagagattcaatctactatggctgccaccagcttcacttctgtcttccccaggatctttctggacttcatcgctgccgccgaaaatccgaccagccccaattagtcggctaagagatcatacgccggccgccctcgtcgctgccgattggattacacgcctccacggttggtgtgcaccgtcgccgttgctgatggcgacatcctcttcaccgccggcctgcctccgtcgccgccgagtggtgcctccgcctacacggctggtctattatgccgccgctgttgggcgtctacgacttcaccgccggcctgcctccgtcgccgccgattggtgcctctgcctacacggctggtctattatgccgccgctgttgggcgtccacgacttcaccgccggcctgcctccgtcgccgccgagtggtgcctccgcctacacggctggcctattatgccgccgctgttgggcgtccacgacttcaccgccggcctgcctccgtcgccgccgagtggtgcctccgcctacacggctggtctattatgccgccgctgttgggcgtctacgacttcaccgccggcctgcctccgtcgccgccgagtggtgcctccgcctacacggctggtctattatgccgccgctgttgggcgtctacgacttcaccgccggcctgcctccgtcgccgccgagtggtgcctccgcctacacggctggcctattatgccgccgctgttgggcgtctacgacttcaccgccggcctgcctccgtcgccgccgagtggtgcctccgcctacacggctggtctattatgccgccgctgttgggcgtctactacttcaccgccggcctgcctccgtcgccgccgactggtgtcttcattgttattgatggacgactttgttcccacattggccacttctgccatcaccaaggggaatattacaaagctaagtcatcatttattttattctttatatgatatttttccttttcctctgcctcactacaccaattggtcctccattgagtagtgagtcgggggctacagatattatatcatattttttataatatttatcttgattgcttgcgacatattctgagtacaaaagtgcctatcgagttatggagttccatcttcctatgctttccgtttggtttgccaatggatagttgcctttaggccgattcctatcatctgctcggggaaatcaaacttgacaagaggagaaatacatatttataaatattttaaaatacttgattttttctcgagtattatatttatatcagatactactcatcctatatgtttgttctgcaggatccagatccagatatgcataaaagggattcatggctttaagcttatctcttacgctctaggaatggatcagtcagaacatcaccaccggctcgcctcgaccgccgccgactggtgtttccgcctgcacggctggcctattatgccgccgttgttgggcatctacgtcttcaccgaccggcttgccttcgccaccgccgactggtgtttccgcctgcacggctggcctttatgccgccgttgttgggcgtctacgtcttcaccgaccggcttgccttcgccgccgccgactggtgtttccgcctgcacggctggcctttatgccgctgttgttgggcgtccacgtcttcaccgaccggcttgccttcgccgccgccaactggtgtttccgcctgcacggctggcctattatgccgccgttgttgggcgtctacgtcttcaccgaccggcttgccttcgccgccgccgactggtgtttccgcctgcacggctggcctattatgccgccgttgttgggcgtctacgtcttcaccgaccggccgcctcgtccgccgccgactggtgtttccgcctgcacggctggcctattatgccgccgttgttgggcgtctacgtcttcaccgaccggcttgccttcgccgccgccgactggtgtttccgcctgcacggctggcttttatgccgccgttgttgggcgtctacgtcttcaccgaccggcttgccttcgccgccgccgactggtgtttccgcctgaacggctggccttttatgccgccgttgttgggcgtctacgtcttcaccgaccggccgcctcgaccgccgccgactggtgtttccgcctgcacggctggcctattatgctgccgttgttgggcgtctacgtcttcaccgaccggccgcctcgaccgccgccgactggtgtttccgcctgcacggctggcctattatgctgccgttgttgggcgtctacgtcttcaccgaccggccgccgcatccgccgctgactggtgtcaccgcctgcacggctggcctgttataacgccgactgatgctatcttcttcacggctggctacatcgcagtcactactaataggcatcagtatcttcaacacaagctgcctacgtttgccatggctgccgactggtttcttcacttccatggctgcatgattctgccagtgttgattggccttaccatcttcatcgccgctaccactactgatggacatcatcatcttccgtcgccgactgattatgccgccgccgactgagcgacttcatctttattatcttcggcactggcaaactctattgctgctacttcgcaagttttgctacttcaccaaccacgacgtatttgtgagcctcgacatctcggcatgcgatgccatgttattttactacaacaagaggctctccaatattcatgatttctacttggacatcttcaacacatatcttcaatcaagcaataactat

SEQ ID NO: 91736 - DNA, 4644 bp, Oryza sativa
  Clone ID: PAT_MRT4530_90282C.1
atggaactaatctccggcgtcgccggattcgtcaagccgactgagatcaagatcaatggctgtcatctcggcattcatgtcttcaccaaccggttggacttcgccaccgccgactggatccaaatccagatatgcataaaagggattcatggctttaagcttatctcttacgctctaggaatggatcagtcagaacatcaccaccggctcgccgtcgtcgccgccgactggtgtcttcgcctatacggttggttggtcacaacaccgttgtcaggcgtctacattttcaccgccggtttgctttcgccgccgccgactggtgtcaccgcctacacggctggcctattatgccgctgttgttgggcgtctacctcttcaccgactggccgcctcgtccgccgccgactagtgtttccgcctgcacgctggcctattatgccaccgttgttgggcgtctacgtcttcaccgaccggccgcctcgtccgccgccgactggtgtttccgcctgcatgctggcctattatgccaccgttgatgggcgtctacgtcttcaccgaccggcttgccttcgctgccgccgactggtgtctccgtctgcacggctggcctattatgccgtcgttgttgggcgtctacgactctaccaccggccttcctccatcgccgccgactggtgtttccgtctgcacggctggcctattatgccgccgttgttgggcgtctacgtcttcatcgaccggccgcctcgtccgtcgccgactggtgtttccgcctgcacggctggcctattatgccaccgttgatgggcgtctacgtcttcaccgaccggcttgccttcgccgccgccgactggtgtctccgtctgcacggctggcctattatgccgtcgttgttgggcgtctacgactctacgaccggccttcctccatcgccgccgactggtgtttccgcctgcacgctggcctattatgccaccgttgatgggcgtctacgtcttcaccgaccggcttgccttcgccgccgccgactggtgtctccgtctgcacggctggcctattatgccgtcgttgttgggcgtctacgactccaccaccggcctgcctccatcgccgccgactggtgtttccgtctgcacggctggcctattatgccgccgttgttgggcgtctacgtcttcaccgaccggccgcctcgtccgtcgccgattggtgtttccgcctgcacggctggcctattatgccgtcgttgttgggcatctacgacttcactgtcggcctacctccgtcgccgccaactggtgtcctcgcctaaacggttggttggtcacaccaccgttcatgggcgtccacgtcttcaccgatcggctagccttcgttgccgccgactggtgttctcgcctatacggttggatggtcgcaccaccgttcataggcatccacgacttcaccgccggcctgcctccgtcgccgccgagtggtgcctccgcctacacggctggcctattatgccgccgctgttgggcgtctgcgacttcaccgccggcctgcctccgtcgccgccgagtggtgcctccgcctacacggctggcctattatgccgccgctgttaggcgtctacgacttcaccgtcggcctgcctccgtcgccgccgagtggtgcctccgcctacacggctggcctattatgccgccgctgttgggcgtctacgacttcaccgccggcctgcctccgtcgccgccgagcggtgcctccgcctacacggctggcctattatgccgccgctgttgggcgtctacgacttcaccgccggcctgcctccgtcgccgccgagtggtgcctccgcctacacggctggcctattatgccgccgctgttgggcgtctacgacttcaccgccggcctgcctccgtcgccgccgagcggtgcctccgcctacacggctggcctattatgccgccgctgttgggcgtctacgacttcaccgccggcctgcctccgtcgccgccgagcggtgcctccgcctacacggctggcctattatgccgccgctgttgggcgtctacgacttcaccgccggcctgcctccgtcgccgccgagcggtgcctccgcctacacggctggcctattatgccgccgctgttgggcgtctacaacttcaccgccggcctgcctccgtcgccgccgagcggtgcctccgcctacacggctggcctattatgccgccgctgttgggcgtctacgacttcaccgccggcctgcctccgtcgccgccgagtggtgcctccgcctacacggctggcctattatgccgccgctgttgggcgtctacgacttcaccgccggcctgcctccgtcgccgccgattggtgcctccgcctacacggctggcctattatgccgccgctgttgggcgtctacgacttcaccgccggcgtgcctccgtcgccgccgagtggtgcctccgcctacacggctggcctattatgccgccgctgttgggcgtctacgacttcaccgccggcctgcctccgtcgccgccgagtggtgcctccgcctacacggctgacctattatgccgccgctgttgggcgtcttcgctttcacaatcgaccgccatcgtcgccgccgactggtgtcttcattgttattgatggacgactttgttcccacattggccacttctaccatcaccaaggggaatattacaaagctaagtcatcatttattttattctttatatgatatttttcctttttctctgcctcactacaccaattggtcttccattgagtaaatatttatcttcattgcttgcgacataatctgagtacaaaagtacctatcgagttatggagttctatcttcctctgctttccgtttggtttgccaatggatggttgcctttgggccgattcctagcacccgggggctcgttggatggaccgagtaacgcaaggtgctaaatattattcggaataaatcaaaagcatagagatgagataaatttattttctgctcttaataattgcaaaagtacccgagtagtaaattctgatccgtgaaactttattccattaatgacgaactcatgtcactcatatgcatgtttgggaagtgcctaggccgactcccggtgcttgatggttatgactagtcggacagagtgtttaaacgtacagaacttgattttttctcgagtattatatttatatcagatactactcatcctatatgtttgttctgcaggatccagatccagatatgcataaaagggattcatggttttaagcttatctcttacgctccaggaatggatcagtcagaacatcaccaaccggccgcctcgtctgccgccgactggtgcttccgcctgcacggctgacttattatgccgccgttgttgggcgtctacgacttcaccgaccggcttgccttcgccgccgccgactggtgcttccgcctgcacggctgacttattatgccgccgttgttgggcgtctacgacttcaccgaccggcttgccttcgccgccgccgactggtgtttccgcctgcacggctggcctttaatgccgccgttgttgggcgtctacgtcttcaccgaccggcttgccttcgccgccgccgactggtgcttccgcctgcacggctggcctattatgccgccgttgttgggcgtctacgtcttcaccgaccggcttgccttcgccgccgccgactggtgtttccgcctgcacggctgacttattatgccgccgttgttgggcgtctacgtcttcaccgaccggcttgccttcgccgccgccgactggtgtttccgcctgcacggctggcctttatgccgccgttgttgggcgtctacgtcttcaccgaccggccgcctcgaccgccgccgactggtgtttccgcctgcacggctggcctattatgctgccgttgttaggcgtctacgtcttcaccgaccggccgccgcatccgccgctgactggtgtcaccgcttgcacggctggcctgttataacgccaactgatgctatcttcttcacggctggctacatcgctgtcactactaataggcatcagtatcttcaacacaagctgcctacatttgccatggctgccgactgttttcttcacttccatggctgcatgattctgccagtgttgattggccttaccatcttcatcgccggtcgtctcgtctgctgctgactagtgccctcgcttctacatctggtttatacaactatcactactgatgaacatcatcgtcttccgtcgccgactggttatgttgtcgccgactagtgcttttattttcacaactgcgcgtcttcactaccagttcacttcatcacggcaatgcaactttgtcatcatggtagagcgacttcatctttattatcttcggcactggcaaactctattgatgctacttcgcaagttttgctacttcaccaaccacgacgtctttgtgagcctcgacatctcggcatgcgatgccatgttattttactacaacaagaggctctccaatattcaggatttctacttgaacatcttcaacacatatcttcaatcaagcaataactattcgacgacaagaggctacagttctcgactctatgttcagttgtttcccaac

SEQ ID NO: 91737 - DNA, 1108 bp, Oryza sativa
  Clone ID: PAT_MRT4530_90283C.1
tcacgggaactcgaaacgtgaaaaatggcgggcatgcccatcccctcccgcccacccaaaaccaattgtttcccggatgcccccttccgccccccctaaggggacttcaaaccgaaccagcgcgaacagcctcctttgggccgcctcccttcctccccaagggcagcggtcattgccgtcgccgccttccgcctccccacgccgactcctgccgccccgcgcctgccgcctccccgcgccgcctcccgctgcctccctcctcccagcgcagccgccatcgccatccctgctccccaaaccgttgtcgccgtcgctgccttccgcctccccgtgccgcctcccgccgccccacgcagagaaggcatcgcagttgtagacatgcagatacatgaagggcggcgtcactgctgagagtgagtccttcaggatgtttgattcatcgacatcatcatctccgagtccaacatccgcaggagtgatggtgtccaggagagaggagacggcgcggatggcgtggtcgggcggtggagaggaggaggaggacgggggcgggaaggtgcgcttgcagaggtcgtacagcgcctgcacccgcgaaggcgtcgacggcggcgaccgcgagggcatgatgtatcgccgccaggagaggggcggacggacgaggatttggcccgggctccactggtcagattcaagtactccgttgtactgcgccccggtcgctaccgagacaacatcaatgccattgtcctacccacaaccgccatgccacaaccgctggatcgagcagtcaagcaccccatgtatttgcgtaaaccctgcaatagtctacatcgatccttcttctaattgtgctgagatttacattaattacttcagaaaaatctgtaagaaattggaacagcagagggaacctgaacattttcttggtatgtacctataccaggatttacggaagttggaaaatgatcagttccactgccaaatggaaacaaatatgttagcattagagttgaggtgcctttacaggaatttgtttttggatgatcgattctgcatggctaaatccatcgtggatttgttgaggtggtcctctagatttatttcttag

SEQ ID NO: 91738 - DNA, 1255 bp, Oryza sativa
  Clone ID: PAT_MRT4530_90284C.1
atggccgcgctcgccgccgcggcggccgcgggggacggcggggcggcgctgccgctcctcctcctccgccttccactccccctccccctcctctcctcggcctcgggctagccctgcctctctcctccccactccagccaccgcttccacctcccctcccctaggaggcacacaccacacactagcactagctcgtcgtcgatcgcgcgcgccaccggccatgggccgcggcggcggttcctcctcgtccgctgctgttgctgctggcgcgtcttctagctcctcctcctcctcggtggccgcggcggcgaggaggggcgcgggccgtgccggcggtggcgccccgtcgggcggcggcggcgggccgaggtgccaggtggagaggtgcggcgtcgacctcagcgaggctgggcggtacaaccggaggcacaaggtgtgccagacgcactccaaggagcccgtcgtcctcgtcgctggcctccgtcagcgcttctgccagcaatgcagccggttccatgagctgacggagttcgacgacgcgaagaggagctgccggcggcggctggccgggcacaacgagcggcgccggaagagcgcggcggacacggcgcacggcgagaactgccgccacgccgaccaggacgccggccggagccaccagggcaccgggaacccgccgttccagatcagataaacctacctaagcatgctccctctcttctgtcatgcagccatgctagtgtgagtgtgtgtgttcgtgccactactactactacatgtctacatcgatctatctacctatatatatccaccacctacgtcccttcttcctcaaatcaatcaaatctatctatctatctatttatctatccctgaatctatctctatccggtgtgctttgctgctgctgattaactggcagtgtgatcatctccctctactgctgctacatatatgcagtgctatgctggagaggcataaatgtgctatatatatgttctctgccacaaccctaagctaattgtaacctgttgattaagcaggtgttctagggattctctctctctctctctgtgtgagggtgtgtttgatgtgtaattgtactattgcctttgcccaacagaaacttgtaggctgcagtgtgcctatgtatgctgttgtgccgggatggcagtggtaatatatgctgtttgagtcaccgtttaaaaaaaaaaaaaaaaaaaactcgagactagttctctctctccgccggcat

SEQ ID NO: 91739 - DNA, 3096 bp, Oryza sativa
  Clone ID: PAT_MRT4530_90285C.1
atgccgccgctgttgggcgtctacgacttcaccgccggcttgcctccgtcgccgccgagtggtgcctccgcctacacggctggccgcctccgtcgccgccgactggtgcctccgcctacacggctggcctattatgccgccgctgttgggcgtctacgacttcaccgccggcctgcctccgtcgccgccgactggtgcctccgcctacacggctggcctattatgccgccgctgttgggcgtctacgtcttcaccgccggcctgcctccgtcgccgccgactggtgcctccgcctacacggctggcctattatgccgccgctgttgggcgtctacgacttcaccgccggcctgcctccgtcgccgccgactggtgcctccgcctacacggctggcctattatgccgccgctgttgggcgtctacgtcttcaccgccggcctgcctccgtcgccgccgactggtgcctccgcctacacggctggcctattatgccgccgttgttgggcgtctacgacttcaccgccggcctgcctccgtcgccgccgactggtgcctccgcctacacggctggcctattatgccgccgctgttgggcgtctacgacttcaccgccggcctgcctccgtcgccgccgactggtgcctccgcctacacggctggcctattatgccgccgctgttgggcgtctacgtcttcaccgccggcctgcctccgtcgccgccgactggtgcctccgcctacacggctggcctattatgccgccgctgttgggtgtctacgtcgtcaccgccggcctgcctccgtcgccgccgactggtgcctccgcctacacggctggcctattatgccgccgctgttgggcgtctacgacttcaccgccggcctgcctccgtcgccgccgactggtgcctccgcctacacggctggcctattatgccgccgctgttgggcgtctacgtcctcaccgccggcctgcctccgtcgccgccgattggtgcctccgcctacacggctggcctattatgccgccgctgttgggcgtctacgacttcaccgccggcctgcctccgtcgccgccgactggtgcctccgcctacacggctggcctattatgccgccgctgttgggcgtctacgacttcaccgccggcctgcctccgtcgccgccgactggtgccctcgcctatacggtcggttggtcacaccaccgttgatgggcatcgtcatctacaccgccggcctgcctccgtcgccgccgactggtgtccctgcctatacggtcggttggtcacaccaccgttcatgggcgtccacgtctttaccgaccggctggccttcgccgactggatccagatccagatatgcataaaagggattcatggctttaagcttatctcttacgctccaggaatggatcagtcagaacatcaccaccggctcgcctcgaccgccgccgactggtgtttccgcctgcacggctggcctattatgccaccgttgttgggcgtctacgtcttcaccgaccggcttgccttcgccgccgccgactggtgtttccgcctgcacggctggcctttatgccgccgttgttgggcgtctacgtcttcaccgaccggccgcctcgtccgccgccgactggtgcttccgcctgcacggctgacttattatgccgccgttgttggtcgtctacgtcttcaccgaccggctgcctcgaccgccgccgactggtgtttccgcctgcacggctggcctttatgccgccgttgttgggcgtctacgtcttcaccgaccggccgcctcgtccgccgccgactggtgcttccgcctgcacggctgacttattatgccgccgttgttgggcgtctacgtcttcaccgaccggcttgccttcgccgccgccgactggtgcttccgcctgcacggctggcctttatgtcgccgttgttgggcgtctacgtcttcaccgaccggccgcctctaccgccgccgactggtgtttccgcctgcacggctggcctattatgccgccgttgttgggcgtctacgtcttcaccgaccggcttgccttcgccgccgccgactggtgtttccgcctgcacggctggcctttatgccgccgttgttgagcgtctacgtcttcaccgaccggcttgccttcgccgccgccgactggtgcttccgcctgcacggctggcctttatgccgccgttgttgggcgtttacgtcttcaccgaccggcttgccttcgccgccgccgactggtgtttccgcctgcacggctggcctattatgccgccgttgttgggcgtttacgtcttcaccgaccggcttgccttcgccgccgccgactggtgtttccgcctgcacggctggcctttatgccgccgttgttgggcgtttacgtcttcaccgaccggctcgcctcgaccgccgccgactggtgtttccgcctgcacggctggcctattatgccgccgttgttgggcgtctacgtcttcaccgaccggcttgccttcgccgccgccgactggtgtttccgcctgcacggctggcctttatgccgccgttgttgggcgtctacgtcttcaccgaccggcttgccttcgccgctgccgactggtgtttccgcctgcacggctggcctttatgccgccgttgttgggcgtctacgtcttcaccgaccggcttgccttcgccgccgccgactggtgtttccgcctgcacggctggcctattatgccgccgttgttgggcgtctacgtcttcaccgaccggcttgccttcgccgccgccgactggtgtttccgcctgcacggctggcctttatgccgccgttgttgggcgtctacgtcttcaccgaccggccgcctcgtccgccgccgactggtgcttccgcctgcacggctgacttattatgccgtcgttgttgggcgtctacgtcttcaccgaccggccgcctcgaccgccgccgactggtgtttccgcctacacggctggcctattatgctgccgttgttgggcgtctacgtcttcaccgaccggccgccgcatccgccgctgactggtgtcaccgcctgcacggctggcctgttataa

SEQ ID NO: 91740 - DNA, 3381 bp, Oryza sativa
  Clone ID: PAT_MRT4530_90286C.1
gtagtcattgcttgattgaagatatgtgttgaagatgtccaagtagaaatcctgaatattggagagcctcttgttgtagtaaaataacatggcatcgcatgccgagatgtcgaggctcacaaagacgtcgtggttggtgaagtagtaaaacttgcgaagtagcagcaatagagtttgccagtgccgaagataataaagatgaagttgctccaccatgatgacaaagttgcatcgccgtgatgaagtgaacacgagtcggcggcaacagaagcaaactggtagcgaagacgcgcagttgtgaagataaaagcactagtcggcggcggcataaccagtcggcaacggaagacgatgatgtccatcagtagtggtaacggcggtgaagaagataaggccaatcaacactggcagaatcatgcagccatggaagtgaagaaaccagtcggcagccatggcaaacgtaggcagcttgtgttgaagatactgatgcctattagtagtgacagcgatgtagccagccgtgaagaaggtagcatcagttggcgttataacaggccagccgtgcaggcggtgacaccagtcagctgcggatgcggcggccggtcggtgaagacgtagacgcccaacaacggcagcataataagtctgccgtgcaggcggaagcaccaatcggtagcggcgaaggcaagccggtcggtgaagacgcgccccagccgtgcaggcggaaacaccagtcggcggcggcgaaggcgagccggtcggtgaagacgtaggcgcccaacagcggcggcataataggccagctgtgcaggcggaagcaccaatcggcagcggcgaaggcaagccggtcggtgaagacgtagacgcccaacaacggcggcataaaggccagccgtgcaggcgaggacaccagtcggcggcggcaaaggcgagccggtcggtgaagacgtaggcgcccaacagcggcggcataataggccagccgtgcaggcgtggacaccagtcggcggcgacgaaggcgagccggtcggtgaagacgtaggcgcccaacagcggcggcataataggccagccgtgcaggcgtggacaccagtcggcggcgaagtaggcgagccggtcggtgaagacgtaggcgcccaacaacggcggcataataggccagccgtgcaggcgaggacaccagtcggcggcggcaaaggcgagccggtcggtgaagacgtaggcgcccaacagcggcggcataataggccaaccgtgcaggcgagaacaccagtcggcggcggacgaggcggccggtggtgatgttctgactgatccattcctagagcgtaagagataagcttaaagccatgaatcccttttatgcatatctggatctggatcctgcagaacaaacatataggatgagtagtatctgatataaatataatactcgagaaaaaatcaagtattttaaaatatttataaatatgtatttctcctcttgtcaattttgatttccccgagcagatgataggtacttttgtactcagattatgtcgcaagcaatcaagatgaatattataaaaaatatgatataacatctgtagcccccgactcactactcaatggaagaccaattggtgtagtgaggcagaggaaaaggaaaaatatcatataaagaataaaataaatgacgacttagctttgtaatattccccttggtgatggcagaagtagccaatgtgggaacgaagcagtccatcaatggtgacaaaaacaccagtcggcgccagtggaaccaagccagtggtgtagatgatgaagcccattaacagcggcgaagtccgtcaaccgtataggcaaaaacaccagtcggcagcggcgaaggccagccggtcggcgaagacgtggacgcccaacaacggcggcatgataggccagccgtgcaggcgaggacaccagtcggcggcgacgaaggcaagccggcggtgaagtcgtagacgcccaacagcggcggcataataggccagccgtgtaggcggaggcaccactcggcggcgacggaggcaggccggcggtgaagtcgtagacgcccaacagcggcggcataataggccagccgtgtaggcggaaacaccagtcgacggcagcgaaggtgagccaacggtgaggatgtagacgcccaacagcggcggcataataggccagccgtgtaggcggaggcaccactcgacggcgacggaggcaggccggcggtgaagtcgtagacgcccaacagcggcggcataataggccagccgtgtaggcggaaacaccagtcggcggcgacggaggcaggccggcggtgaagtcgtagacgcccaacggcggcggcatataggccagccgtgcaggcggaaacaccagtcggcggcggcgaaggccagccggtcggtgaagacatggacgcccatgaacggtggtgtgaccgaccaaccgtataggcgatgacaccggtcggcggcgacggaagcaggccggcggtgaagtcgttgttgctatcagcaatggcggtggcgaggacaagccggcggagtggactcgcggccgatcgaccggaaagctgagacgcctcgagtccatgaccagcatcaatcgcctcaatagtgccgcgtagttatatgcgaacaacaacaaaaaatagcaagaaattaatctgagattaaaaatcaatatgataaataatgataaaaaatcagattgagtttccccctgactgatttggatcaagtcagagaagaggagcttgaagaagtggtcgacggaaaggaagtgaaaactcccaaagcgaaagcgaagtcggcgactcatgaaattgattccatcgcgctcgttgataggaaactcgacgcaacccctacctggcgcgccaactgtcgaaacatgaattcggcaataataaaacggggtagcgcacgagacctaaaagtggatggatgtggagacaaaggatttagacaggttcaggccctctcaatgagagccagtcggataactatgccatgtgggtatggggtacccataatctccacaatctctctgtgcaagaacccaatgctgcatgagggaagtaaacatattgatactaagtatcatttcatccgtgactgcatcgaggatggccgaattgaagtggatttcttccccaccggtgatcagctggcggacgttctcacgaagccgctgggtcgtgcagtgttccaagaactgcgtgacacaagtggagtcgttgagaaaagctgcagcaagttttcgcagcaccaaatcctctgcttccactgtgtcttcacgttgagtatttgctatttccactgtgatcctgtgagccagataacagaaacgacgtcgctcgcatcgtga

SEQ ID NO: 91741 - DNA, 635 bp, Oryza sativa
  Clone ID: PAT_MRT4530_90287C.1
tttatgttgaccaacaaagaaaacacttcaaggataaacaaagctcattctcagggaatcttatctatgccaatcccacaagtggaagggaaaattcccaattatccaatatgcagatgatattctcatcattctgaaagcttgtcaaaaagagctttttgtctcaaaggtattacccaaccatttgcttactctactactccctccgtttcataatgtaagtcattctacatcaatatgaatgtgggaaatgctagaatgacttacattgtaaacggagggagtatttgagaatttccataaatcttgtacgatgccaattcatgtcaatgaagaaaaactagaaatccttactggtacttttcgatgtaatattgtttcgatgcccttcacttatttgggtcttccggttggaacaacaaagccaagaattgttgaattccccccctcccccctaattgatagagttgaaagaagacttatggcaatcaccatgtttcttaatcatggccaaagacttacccttgttacccttgtcaattttgtcctctcttcgccgccaaccttttatatgtgcacactcaaactcccaaagaaagtgatagaacatattgatgctccattgctccgctggc

SEQ ID NO: 91742 - DNA, 3626 bp, Oryza sativa
  Clone ID: PAT_MRT4530_90288C.1
tgttagagagagagagagagggagggagagggaagcaatggtggcgacgaacctgaaggcggagacggtggggctgatggaccggcgggcggcggtggaggcggagatggacgccatcatcgccgccctctccgtgcccgtcgggccggggatcaccggcggcctcgtggacgcggagggtttccccaggtccgacatcgacatcccggccgtcctcgcccagcgccgcaagctcgccgaattgcggaatgatcacaaggatattacgaacaaaattgagaagaatctggaagttttgcactcaacaaaattgtcaagaaatgaagcgtcaatccctgcaagttctggcacacctgcttcattgcacagtgggttatctcaaaatgatcctatggaagaagatgctgtgaccagacttccttttgccataattgatgaactgacagatggttctcctgctgctgtggatggcttgcagctttgggatgagatagtaaagtttggaaatgtggaagcagggatcatcaatgaacttaactgttacaccaagaaagtggcacggaagaggacttttggggatcactcctcaaagctgaatggggaaagaacctacactgaaacatctgagatcagcaagcagtggaagtggaacaacccctttgttgaccgagcagatcaatccagggatctgtgtatggaggagaagcttcttgctggccgagcagatccatccagggacgttcttgtatggaggagaagcagcacctgcttgttggccgagaagatcgatccagctgctgggtgcgacatcgcggggagaaggggaagtggcaactacagcgccggggccacgggaggcgatgcggccgtgaggcaggatccacctatggcattggtcgctccgagggcgctacggagacgcaacgaggatcctcgagatacaatcaacgacgaatacatcgccgcggcgtcctacctcgtggtgtccatacacgatcaccacgccggatcactccaaacagtacacatcaggagtaatatgttggctgagaggggagataggctgcttctatactggagtactgaccttcttggttggtctacgtcgccgctgttgggtgtatacgacttcaccgccggcctgcctccgtcgccgccgactggtgcctccgcctacacggctggcctattatgccgccgctgttgggcgtctacgacttcaccgccggcctgcctccatcgccgccgactggtgtctccgcctatatggttggttggtcacaccaccgttgttgggcgtctacgtcttcaccaccggcctgcctccgtcgccgccgactggtgcctccgcctacacggctggcctattatgccgctgctgttgggcgtctacgacttcaccgccggcctgcctccgtcgccgccgagtggtgcctccgcctacacggctggcctattatgccgccgctgttgggcgtctacgacttcaccgccggcctgcctccgtcgccgtcgagtggtgcctccgcctacacggctggcctattatgccgccgctgttgggcgtctacgacttcaccgccggcctgcctccgtcgccgccgagtggtgcctccgcctacacggctggcctattttgccgccgctgttgggcgtctacgacttcaccgccggcctgcctccgtcgccgccgagtggtgcctccccctacacggctggcctattatgccgccgctgttgggcgtctacgacttcaccgccggcctgcccccgtcgccgccgagtggtgcctccgcctacacggctggcctattatgccgccgctgttgggcgtctacgacttcaccgccggcctgcctccgtcgccgccgagtggtgcctccgcctacacggctggcctattatgccgccgctgttgggcgtctacgacttcaccgccggcctgcctccgtcgccgccgagtggatcctccgcctacacggctggcctattatgccgccgctgttgggcgtctacgacttcaccgccggcctgcctccgtcgccgccgagtggatcctccgcctacacggctggcctattatgccgccgctgttgggcgtctacgacttcaccgccggcctgcctccgtcgccgccgagtggtgcctccgcctacacggctggcctattatgccgccgctgttgggcgtctacgacttcaccgccggcctgcctccgtcgccgccgagtggtgcctccgcctacacggctggcctattatgccgccgctgttgggcgtctacgacttcaccgccggcctgcctccgtcgccgccgagtggtgcctccgcctacacggctggcctattatgccgccgctgttgggcgtctacgacttcaccgccggcttgcctccgtcgccgccgagtggtgcctccgcctacacggctggcctattatgccgccgttgttggatgtctacatcctcaccgttggctcaccttcgctgccgtcgactggtgtttccgcttacacggctgacctattatgccgccattagtgggcatcttcgctttcaccgtcgaccgccttcgtcgccgccgactggtgtcttcattgttattgatggacgactttgttcccacattggccacttctgccatcaccaaggggaatattacaaagctaagatccagatccagatatgcataaaagggattcatggctttaagcttatctcttacgctccaggaatggatcagtcagaacatcaccaccggcttgccttcgccgccgccgactggtgtttccgcctgcacggctggcctattatgccgccgttgttgggcgtctacgtcttcaccgaccggccgcctccgccgccgccgactgatgtcctcgcctgcacggctggcctttatgccgccgttgttgggcgtctacgtcttcaccgaccggcttgccttcgccgccgccgactggtgtttccgcctgcacggctggcctttatgccgccgttgttgggcgtctacgtcttcaccgaccggcttgccttcgccgctgccgactggtgtttccgcctgcacggctggcctttatgccgccgttgttgggcgtctacgtcttcaccgaccggccgcctcgtccgccgccgaccgatgtcctcgcctgcacggctggcctttatgccgccgttgttgggcatctacgtcttcaccgaccggccgcctcgtccgccgccgaccgatgtcctcgcctgcacggctggcctttatgccgccgttgttggacgtctacgtcttcaccgaccggcttgccttcgccgccgccgactggtgtttccgcctgcacggctggcctttatgccgccgttgttgggcgtctacgtcttcaccgaccggcttgccttcgccgccgccgactggtgtcaccgcctgcacggctggcctgttataacgccaactgatgctaccttcttcacggctggctacatcgctgtcactactaataggcatcagtatcgtcaacacaagctgcctacgtttgccatggctgccgactggtttcttcacttccatggctgcatgattctgccagtgttgattggccttatcttcttcaccgccggtcgtctcgtctgctgctga

SEQ ID NO: 91743 - DNA, 3622 bp, Oryza sativa
  Clone ID: PAT_MRT4530_90289C.1
atggtgttgcaagatggatctacaaacacgaagcatgccaaaaccgatctaatcggatgcataggagacggctgcagccacgccgatgccttcctgccgtcctgcgtcgtgctgatggacaccaacgccgcccgcgactgcgacctccgcctactccgctccgtctcagaattaatctctcttggaatggatcagtcagaacatcaccaccggctcgcctcgaccgccgccgactggtgtttccgcctgcacggctggcctattatgccgccgttgttgggcgtctacgtcttcaccgaccggcttgccttcgccgccgccgaccgatgtcctcgcctgcacggctggcctttatgccgccgttgttgggcgtctacgtcttcaccgaccggcttgccttcgtcaccgccgaccgatgtcctcgcctgcacggctggcctttatgccgccgttgttgggcgtctacgtcttcaccgaccggcttgccttcgccgctgccgactggtgtttccgcctgcacggctggcctttatgctgccgttgttgggcgtctacgtcttcaccgaccggccgcctcgtcggccgccgactggtgtttccgcctgcacggctggcctattacgccaccgttgttgggcgtctacgtcttcaccgaccggccgcctcgtccgccgccgattggtgtcttcgcctatacggttggttggtcacaccaccgttgttgggcgtctacgtcttcaccgaccggcttgccttcgtcgccgccgactggtgtctccgcctgcacggctggcctattataccaccattgttgggcgtctacgtcttcaccgaccggccgcctccgtccgccgccgactggtgtttccgcctgcacggctggcctattatgccgccgttgttgggcgtctacgtcttcaccgaccggcttgccttcgtcgccgccgactggtgtctccgcctgcacggctggcctattatgccaccgttgttgggcgtctacgtcttcaccgaccggccgcctccgtcagccgccgactggtgtttctgcctgcacggctggcctattatgccaccgttgttgggcgtctacgtcttcaccgaccggccgcctccgtcagccgccgactggtgtttccgcctgcacggctggcctattatgccgccgttgttgggcgtctacgtcttcaccgaccggcttgccttcgccgccgccgactggtgtgtccgcctgcacggctggcctattatgccgccgttgttgggcgtctacgtcttcaccgaccggcttgccttcgccgccgccgactggcgtctacgtcgtcaccgaccggcttgccttcgccgccgccgactggtgtttccgcctgcacggctggcctttatgccgccgttgttgggcgtctacgtcgtcaccgaccggcttgccttcgccgccgccgactggtgtttccgcctgcacggctggcctttatgccgccgttgttgggcgtctacgtcttcaccgaccggccgcctcgtccgccgccgactggtgcttccgcctgcacggctgacttattatgccgccgttgttgggcgtctacgtcttcaccgaccggccgcctcgaccgccgccgactggtgtttccgcctgcacggctggcctattatgctgccgttgttgggcgtctacgtcttcaccgaccggccgccgcatccgccgctgactggtgtcaccgcctgcacggctggcctattatgccgtcgttgttgggcgtctacgactccaccaccggcctgcctccaccgccgccgactggtgtttccgcctgcacggctggcctttatgccgccgttgttgggcgtctacgtcttcaccgaccggcttgccttcgccgctgccgactggtgtttccgcctgcacggctggcctttatgccgccgttgttgggcgtctacgtcttcaccgaccggcttgccttcatcgctgccgactggtgtttccgcctgcacggctggcctttatgccgccgttgttgggcgtctacgtcttcaccgaccggcttgccttcgccgctgccgactggtgtttccgcctgcacggctggcctttatgccgccgttgttgggcgtctacgtcttcaccgaccggcttgccttcgccgccgccgactggtgtttccgcctgcacggctggcctttatgccgccgttgttgggcgtctacgtcttcaccgaccggccgcctcgtccgccgccgactggtgcttccgcctgcacggctggcctattatgctgccgttgttgggcgtctacgtcttcaccgaccggcttgccttcgccgccaccgactggtgtctccgtctgcacggctggcctattatgccgccgttgttgggcgtctacgtcttcaccgaccggcttgccttcgccgctgccgactggtgtttccgcctgcacggctggcctttatgccgccgttgttgggcgtctacgtcttcaccgaccggcttgccttcgccgccgccgactggtgtttccgcctgcacggctggcctttatgccgccgttgttgggcgtctacgtcttcaccgaccggccgcctcgtccgccgccgactggtgcttccgcctgcacggctggcctattatgctgccgttgttgggcgtctacgtcttcaccgaccggcttgccttcaccgctgccgactggtgtttccgcctgcacggctggcctttatgccgccgttgttgggcgtctacgtcttcaccgaccggcttgccttcgccgctgccgactggtgtttccgcctgcacggctggcctttatgccgccgttgttgggcgtctacgtcttcaccgaccggcttgccttcgccgccgccgactggtgtttccgcctgcacggctggcctttatgccgccgttgttgggcgtctacgtcttcaccgaccggccgcctcgtccgccgccgactggtgcttccgcctgcacggctggcctattatgctgccgttgttgggcgtctacgtcttcaccgaccggcttgccttcgccgccaccgactggtgtctccgtctgcacggctggcctattatgccgccgttgttgggcgtctacgtcttcaccgaccggcttgccttcgccgctgccgactggtgtttccgcctgcacggctggcctttatgccgccgttgttgggcgtctacgtcttcaccgaccggcttgccttcgccgccgccgactggtgtttccgcctgcacggctggcctttatgccgccgttgttgggcgtctacgtcttcaccgaccggccgcctcgtccgccgccgactggtgcttccgcctgcacggctggcctattatgctgccgttgttgggcgtctacgtcttcaccgaccggcttgccttcgccgccaccgactggtgtctccgtctgcacggctggcctattatgccgtcgttgttgggcgtctacgactccaccaccggcttgcctccaccgccgccgattggtgtttccgcctgcacggctggccattatgccgtcgttgttgggcgtctacgactccaccaccggcctgcctccaccgtcgccgactggtgtttccgcctgcacgctggcctattatgccaccgttga

SEQ ID NO: 91744 - DNA, 608 bp, Oryza sativa
  Clone ID: PAT_MRT4530_9028C.1
ttttttttttttttttttttgagaagaacagaataaaataataacagggagtgcttatatacaagatttacaatacgtgtttgcaagtttcatgtcatttgtgatggatgaacatcattggaacctatttactcttcattgacatcaaaaaatggaatcgctgtgtataccatcattcgtttttttttttgtgtaaaagacataggatacaacatggatggtacatatggtacatgaactaaatgaattgcgtaggagcagggttaacgactaaaacaagaagcagatgcttctacttctggacacatttctatctctctgacccttgtaaaaggcagagatagcaatatgctctgaagcgtatgtcataaaagatgcaagcacaacaccaccagcaaccatcaatcctagcttcgcaaataatgcagtcacacccaagagagtcggtaacaatacagtgacaatagctataattgccatccctgtccagtaaaatgttgcatctatgtcacagtcagacatattatggtgccggcctgtaaccatgtggttttctgatgaatcaaaacgaccggacgcgtgggcgtacgcgtgggcggacgcgtggg

SEQ ID NO: 91745 - DNA, 216 bp, Oryza sativa
  Clone ID: PAT_MRT4530_90290C.1
atggacatctctagggcaaatgaagactacacgagctacggcccggtagtcgagatgtcatggcacagggccgagaggcaacaccggtcactagtttccattgacggggccctagaggtgtggggcgccgctccgacgaccattgcattgcgcaaatgccacccgctcgccgtgtctttccccctcgatctagatctacctgtccgctggctctag

SEQ ID NO: 91746 - DNA, 233 bp, Oryza sativa
  Clone ID: PAT_MRT4530_90291C.1
acgaccttgatgagaaataggataggcgcggtcccctatggagtaaaatttctcatattattcttgggaaagctgtctttggtccgaacttctgcacagcacatattgctgctattccggatgaacaccaagaaacacctacttcaagagattctcttgggctgactccctcaagccggagaacggagctttggcacataccattcaggatatcaagatcccttcactgcaac

SEQ ID NO: 91747 - DNA, 568 bp, Oryza sativa
  Clone ID: PAT_MRT4530_90292C.1
ccgccgccctcccggtccgccccccccccgccggagcccgccccccgccccctgctgggtgccggcctccttcccttccctgcttctccttccggcctcccgggtctgggctggcctccgccgcgtcgttgggtccccgtctccggtagtttcaccccccccgtcctccgccctcccgggccccggcctctccgccctgtgcatccctgctcccgctgcaccccagcggcggggcgcccggcggcggtgggccggtcccccgcgccctggcgcccccgcctcctgcgccccggcgccttcccccccatggcggcggcggcgtgctgctgaccgcgccgtcgtggttcccgcggccgcgccggcctgctccccactgctcccgccctcggctcttggctcctctcgcccggcctgggtcgggcagtcgttcagcgcctccgcatcttccaccagctctgctctcatctagacttcgctcgagcgctacctggagaccaccttgacataaccatgtgagattcagatgaaagtaagtaaaattaattaaataaaaaaaaaaaaaaaaaaa

SEQ ID NO: 91748 - DNA, 1718 bp, Oryza sativa
  Clone ID: PAT_MRT4530_90293C.1
atgggatccaaggacgggagtggagccgcctcgtcgggaggcggcgggggcttcttctcctcgatcgccgccggcgtgcgcagcttgggcaccgccgtccacaaatctgtcaacgggttggtcggctatgaaggacttgaagttattaacccagatggaggcacagaagatgcggaagctgaggctttggggttctctctctctcctgttgaccatctgcagatcgcccgcgcgatgggatccaaggaagggagtggagccgcctcgtcgggaggcggcgggggcttcttctcctcgatcgccgccggcgtgcgcagcttgggcaccgacgtccacaaatctgtcaacgggttggtcggctatgaaggacttgaagttattaacccagatggaggcacagaagatgcggaagctgaggctttgagagggcgatggaaacaagaggatcgtgatagttattggaagatgatgcacaagtacataggggcagatgttacatcacttgtgacacttccggtcatcatttttgagccaatgacaatgcttcagaaaatggcagagttgatggaatactgtgaacttttagacatttcatttattgctgagcaggtaagccatcatcctccgatgggtgccgctcactgtgaaaatgcacattttacatatgacatcacctccaagttgaagaccaaattcttggggaactctctggaagtttatccacttggaaggactagagtgtcacttaagaagtccggtgtcaagctggaattggtaccaccactcacgaaggtcaacaacttgatatttgggcgtacttgggttgattctcctggagagatggtattgacaaacctgacaactggagacaaagttgtgcttttattccagccatgtggctggtttggggctggtcggtacgaggtggatggctatgtgtatagtgcagctgaagaacccaaaataatgataactggaaagtggaaccagtccatgagttgtcagccatgcgatcaagaaggcgatcctcttccaggaactgagctaaaggagatatggagagttgctcctactccaccaaatgacaagtaccagtacacgcacttcgcgcacaaaataaacagcttcgatacggcgccgaagaagctattggcatcggactcccgattgaggcctgatagatatgccctcgagaagggtgacatgtcaaaatcaggttcagaaaagagcaggcttgaagagcaacaaagagctgagaaaagaacacgagaggccaagggggagcaatttactccaagatggtttaacaggaccgatgaaatcgcccctacaccctggggcgagctggaagtgtatgaatacaatggaaaatacaccgagcaccgcgctgccattgacagctcaagtgtggccgacgacgatacagacgtcacttcgatcgaattcaacccgtggcagtacagtagctcatcttcccaatgattttcgtagggtctgaaactgcacatccgtatttttattatccaatatgcttccaggccttgctttgcacgctgattcatctcagcagagttttcgtgcctttgtagtattatgaccttcactttttcccttcttcatgcttctactgttcaggaagtgatggtgtattcgatgtagtccatatactgtcgttgttaatctagcgaaaattacccccccaaaaaaccgtaccaaaa

SEQ ID NO: 91749 - DNA, 747 bp, Oryza sativa
  Clone ID: PAT_MRT4530_90294C.1
atgaaggcatcaaattacgtgtgcagatgtaggccagagaacaggagaaataagggatgggcatactactcttcattatcttgtgtaaattttacattattctatctaaaatcaagaccattcttgcagagaggagaaatattagaggatgcacatgataagaaagatgagctgcgagctgaagatcttgaactgaagttaaatgaaccttttcttaacttcatgagactcagacttataccgcagtggggtcaaggctttacttctgagtgccaactcaaaactgcacaagatcagcttgaatggcacagccagataaagccaacaagattgcctgtcctggcacttcacattggcaacaaaaagttcgctcggacaaatgaatgcgacatatttgttaagttcttctaccacaaaaagtcagttatattccaaatgtccaaggacaagctgtgtaggaaggttgacatccccttcgacgacattacatccttttgtttcgttttcggacagcagtctgatatcctgacaatagaggtcaaatcttcattgatacccttaagtgctgctaagccacttccagggaagtttcttgattggaaagtagattactcaaaagatgatgagtactattttcctgaatcaaaatctttatgggttgaggctgagaaggggagcttggaaaagacctatgcaaaactcaagggaacaaggaggtataaatcggagaagaaacttttcttctag

SEQ ID NO: 91750 - DNA, 1037 bp, Oryza sativa
  Clone ID: PAT_MRT4530_90295C.1
gcacgagaggcagcccggtccagcccaccaagcaggtgaggggcggagatggaggagacggcggcggcggcggcggagaaggcgacgtcgtacagttactgggtgcgggaggccacgggcgacgccgcgccgcttcccgcgccacgcaagatcgacgccgccgacctcgccgccaagcccgcgcccaccaccctcggctccgtctggaacaaggctggaacctgggaggaaaagaacctcaattcatgggccaacggtaggataaaggatttgctgggctcattagaccctttggaattttctactgggaaggcatctgtttacgaagtatccaagtgttcaggcgatgcatttctggtcactgtccgtaataagaagagagtaggctatacttatgagctgggcttaaaatttaaaggtgaatggttaattaaggaagaaaacaagaaggtgaaaggctatctggacattccagaattttcatttggtgaacttgaagacttagaggtgcaaataagttttaccgacatcaaggacctctcgtccgacaacaaggcacaaatcagcaaggatttgaagtcgtttcttgcaccgatccgggagaaactgcgcaagtttgaagaagagctcaaggatagatagcaaagctgcaaacttggttggaagcatcacgtatcaaaagatgatggcttaatctatagccatttcacgtatcaaaagactgcttcagacgtttactgctaaaagtttgttccaatacttgctgcaatatgcaccgtgtttgtttcattgccgatacattcatacttgtgccactgttgaacttacaagaccaattgagcagaaattttctgaagctatattcctgtcagttctgtagtttgtattcaggtagccaggcccatgggccacaactcgaaacaggtttcggcccaatcggcttgtatatctgattcagtagcactgtggcaattcaccaatcagaactcagaaattcagaactgaacagtttgttttccaaaaaaaaaaaaaaaaaa

SEQ ID NO: 91751 - DNA, 678 bp, Oryza sativa
  Clone ID: PAT_MRT4530_90296C.1
atggaggagacggcggcggcggcggcggagaaggcgacgtcgtacagttactgggtgcgggaggccacgggcgacgccgcgccgcttcctgcgccacgcaagatcgacgccgccgacctcgccgccaagcccgcgcccaccaccctcggctccgtctggaacaaggctggaacctgggaggaaaagaacctcaattcatgggccaacggtaggataaaggatttgctgggctcattagaccctttggaattttctactgggaaggcatctgtttacgaagtatccaagtgttcaggcgatgcatttctggtcactgtccgtaataagaagagagtaggctatacttatgagctgggcttaaaatttaaaggtaaacaacctttagttctggagttcacatcttcacatgagctatctcctgctgaaaattggcactcatgggagtattcttcaggtgaatggttaattaaggaagaaaacaagaaggtgaaaggctatctggacattccagaattttcatttggtgaacttgaagacttagaggtgcaaataagttttaccgacatcaaggacctctcgtccgacaacaaggcacaaatcagcaaggatttgaagtcgtttcttgcaccgatccgggagaaactgcgcaagtttgaagaagagctcaaggatagatag

SEQ ID NO: 91752 - DNA, 576 bp, Oryza sativa
  Clone ID: PAT_MRT4530_90297C.1
atgtggggcccacatgtcatactctctctcactcttcctctctctcttctctctctctcttcctctctctctcacggtcaggcggctgagggcggcggcctcggcgcggaggcggcggcggcagctgagggcggcggaggcgccgccggcagtgatgctatctccgctcggcctagatggtcatcggcgacgcacacgcggcggcgctatgcggcggcggaagaaggcggcgcggcgaaaggggagatgaggcgtgagcggccaaggcggcgactcgggacggttgcttgggacacgggaagggagacagcgacgggaatcgagggggagaagggccgacggcggagcgtgactgcgctcggcgacggcgggaggggaggcacggcgcgggagctagtgaggaggccagcggccaaggcggcgggttggggtggttcaagggagctccaggagggtggtggcgcgaggaatcggcgagggagaccacggcggcgcacaatcgaacgcggcggcggtgaagcagagaaaaaggggaaacgacggcgcacaatcgagcgcggcgacgtcgaacggtga

SEQ ID NO: 91753 - DNA, 445 bp, Oryza sativa
  Clone ID: PAT_MRT4530_90298C.1
ttttttttttttttttaacgaggaagtcagtatatgccatcggccgaccttgacatcacatagtagtatcaagacgcaagtattatagcatcacaaaatagtagtatctcgcaaggtataatagcagcatcacaaaatagtagtttctggacgcgagtatccaggactatcaggactatcaacgaaagagacaagagacagtgaaagaactctcagtggacctaatatcacaacatcacaacgagaccgtggctatcagaactctcagtgaacctacatcacagcatcacaagagaccgaagtatgagtataagccgggagcacagcgaacaaactttcagtgaacctagtatcacaacatcacaacgagaccggggctatcagaactctcagtgaacctacatcacagcatcaagagaccgaagtatgagtataagccgggagc

SEQ ID NO: 91754 - DNA, 416 bp, Oryza sativa
  Clone ID: PAT_MRT4530_90299C.1
gcattcagtgtcacttagtcctacaacaacatggcatccataaatcgccccatagttttcttacagcttgcttgctcctcttgggcgatggctccctagcccagcagttattaggccagagcactagccaatggcagagttctcgccgaggaagtccgcgaggatgcagattagataggctgcaagcatttgagccaatccgcagtgggaggcactcaagctggcacaactgatgtattcgatgtctctagctgaggtgttctactgtaccggagtatatgttggccgccgaggtatcgaacctagaggcctactactaccccattacactagaggcgcatgatgtacgatatatcatccaaggggagaggtataacagggcccgactatcccaggctggactgagacctaccagg

SEQ ID NO: 91755 - DNA, 155 bp, Oryza sativa
  Clone ID: PAT_MRT4530_9029C.1
ggagcgggtcgaagtcagcttgcagacgttctggaggaaagggaggggggccatgcgacgagggcggtagtcggccggacagacggcccggaatgccgcgcgaagacgccggctgcggtggacatccgctgggcgacaacttggcgaggcgctga

SEQ ID NO: 91756 - DNA, 324 bp, Oryza sativa
  Clone ID: PAT_MRT4530_902C.1
atggattttacagcgacgaacgccgcggagccgatcgctcctacgacgccgagtcagggttcgtcgactcgcgcctccgccgccgtggccgtggacgacgtcgatgtcgacctcggcatcctcggcgccacggcgacggcagcccgggtcgatgaaccccgactcgtcgtcgtccgcgttgttgtaccgacgctggactacgagcagagaaccgcgctgcggtggagtagcctgtaccggcgcatcgtggtggggcacggtggccggccagtgaggcgcacactgaggacctgggatgaggacgagcgttgcctcggcaagtag

SEQ ID NO: 91757 - DNA, 557 bp, Oryza sativa
  Clone ID: PAT_MRT4530_90300C.1
ccggcccaagataggccaaccaaatttacttaagattaggggaaatgtctttgaagaaatcactgttgaaggtgaaactattcagtcaagcaggtggccatgtacaagatcatttgcagacccagtaaatttttttcgagataagaacagccatgagaggagtgattctccatccttgacagcagactccgctgccaagaacaattctcctagaacagattcctcaccgaaaaatagtgcaagtgctttggccacagagaacaatctaacacctgggaagagacaaccatccaagaagatctgatgggataacagtacgctagttggttgttttctgttcgtccgaagtctgaaggtacgcaacttgaagcatgtaagctaacttgaaaggcaaattcaacctgcgcatgtttgtggccaatgctagattcatttcagtgaagttccagtaacatctgtagtaagaaaaacattgtatttgtgtttgatgtattatagacgattcctggtgaagcattcattggttgctcaaaaaaaaaaaaaaaaaacccgcggcc

SEQ ID NO: 91758 - DNA, 300 bp, Oryza sativa
  Clone ID: PAT_MRT4530_90301C.1
agacccttcaaggaaaagttaccgggccaaaatttggaaaaaaaagggtaaaaaacccccattgttaacccaaaacccaaaattttaggaacaaaaatttgaagcccctacaacggttttatatgaaccccaaaccaccggcaggtagcaaaatgggcaaaagcccaaaaaaccccaaaataaaaaggggaaaggttaaaattgccccccagaattaaaccggatcggggcaaatgggcccaaagagggttccggtttaacacccaaaaatttggccccgtccaaaggggaattttttcc

SEQ ID NO: 91759 - DNA, 6369 bp, Oryza sativa
  Clone ID: PAT_MRT4530_90302C.1
aggacacgacctgatcgtcagatcaatacacactcggcggattcaaatccccaaacaggagtctcgtgcgctacccccttttattattgccgaattcatgtttcgacagttggcgcgccaggtaggggttgcgtcgagtttcctatcaacgagcgcgatggaatcaatttcatgagtcgccgacttcgctttcgctttgggagttttcacttcctttccgtcgaccacttcttcaagctcctcttctctgacttgatccaaatcagtcagggggaaactcaatctgatttttatcattatttatcatattgatttttaatctcagattaatttcttgctattttttgttgttgttcgcatataactacgcggcactattgaggcgattgatgctggtcatggactcgaggcgtctcagctttccggtcgatcggccgcgagtccactccgccggcttgtcctcgccaccgccattgctgatagcaacaacgacttcaccgccggcctgcctccgtcgccgccgactggtgtcatcgcctatacggttggtcggtcacaccaccgttcatgggcgtccatgtcttcaccgaccggctggccttcgccgccgccgactggtgtttccgcctgcacggctggcctattatgccgccgctgttgggcgtctacgacttcaccaccggcctgcctccgtcgccgccgactggtgtcctcgcctatacggtcggttggtcacaccaccgttgatgggcatcgtcatctacaccgccggcctgcctccgtcgccgccgactggtgtccccgcctatacggtcggttggtcacaccaccgttgatgggcatcgtcatctacaccgccggcctgcctccgtcgccgccgagtggtgcctccgcctacacggctggcctattatgccgccgctgttgggcgtctacgacttcaccgccggcctgcctccgtcgccgccgagtggtgcctccacccacacggctggcctattatgccgccgctgttgggcgtctacgacttcaccgccggcctgcctccgtcgccgccgagtggtgcctccgcctacacggctggcctattatgccgccgctgttgggcgtctacgacttcaccgccggcgtgcctccgtcgccgccgagtggtgcctccgcctacacggctggcgtattatgccgccgctgttgggcgtctacgacctcaccgccggcctgcctccgccgccgtcgactggcgtcctcgcctatacggttggttggtcacaccatcgttgatgggcgtcttcgctttcaccgaccggcttgcttccgccgccgactggtgttttcgcctatacggttggcggacttcgccgccgttaatgggcttcatcatctacaccactggcttggttccactggcgccgactggtgtttttgtcaccattgatggattgtttcgttcccacatcggctacttctgctgtcaccgagggaatacgacaaagctaagtcatcgcttattttattctttatatgatattttgtcttttcctttgcctcactacatcaactggttcgccgttgactagtgagtcgggggctatagatgttatatcgtattttttaaacaattttcataatatttatcttgattgcttgcgacatgttctgagtacaaaagtgcctatcgagttatggagttccatcttcctatgctttccgtttggtttgccaatagatagttgcctttaggccgattcctagcacccgggggctcgttggatggaccgagtaacgcaaggtgctaagtattattcggaataaatcaaaagcatagagatgagataaatttattttctgctcttaataattgcaaaagtacccgagtagtaaattctgattcgtgaaactttgttccattaatggcgaactcatgtcactcatatgcatgtctgggaagtgcctaggccgactcccggtgcttgggggctatgactagtcggacagagcgtttaaacgtaatgaatcatctgctcggggaaatcaaaattgacaagaggagaaatacatatttataaatattttaaaatacttgcatttttcttgagtattgtatttacatcagatactactcatcctatatgtttgttctgcaggatccaaatccaaatatgcataaaagggattcatggctttaagcttatctcttacgctccaggaatggatcagtcagaacatcaccaccggctcgccgtcgtcgccgccgactggagtcttcgcctatacagttggagtcttcaccgaccggccgccttgtccgccgccgactggtgtttccgcctgcacggctggcctttatgccgccgttgttgggcgtctatgtcttcaccgaccggcttgccctcgtccgccgccgactggtgtttccgcctgcacggctggcctattatgacaccaactgatgctatcttcttcacggccggctacgtcgccgtcaccactaataggcgtcatcatattcaaacgcaagctgtctacgtctgctgccgactagtttattcacttccatggctgcatgattctgccagtgttgattggccttatcttcttcaccgccgctaccactactgatggacatcatcgtcttccgtcgccgactggttatgccgccgccgactggctactggtttgtttatgttgccgtcgactcgtattcacttcatcatggctatgcaactttatcatcatggtggagcgacttcatcttcattatcttcggcaccctttgatatcttctcaacagtttgatggattattgtcactgacatcatcaccagcacctttacttcatcggtcctgacatctctgccgttgctaatgggtgactacgtcttcgcctccagttgctttcatcattgccagcttgttatttcaccgtcatggttgacctactatgcaaacactgatgagcgtcttcgtcattatcatcggccgcaatactactattgactggatccttcatcttcatgattggtggatttcgtcatcgcctttgatgcatgtctacatcttcactgtcggcttgcttttgtcaccaccgaccggtatccttgccttcatggatggcttattatgtcgccactaatgggcatcttcatcttcttcaccagctgcatcgtctatcaccgactgattatttcactgccatggctacacaactttatcgctgggcgccttcatattcattgctggctgacctgactgttgccgactggtttcttcgcctctatattggtagtcttgtctctagccggcttgcctccgccatcatcaccgccggcctgcctccgtcgccaccgaccggtgtcctcgcctatacggttggttggtcacaccaccattcatgggcgtccatgttttcaccgaccggctgcctcgtccgctgccgactggtgtttccgtctgcacggctggcctattatatgctaccgttgttgggcgtccgtcgactggtgtcctcgcctatacggttggttggtcacaccaccatacatgggcgtctacgtcttcaccgaccggctggccttcaccgccgccgactggtgtttccgcctgcacggctggtctattatgccgccgctgttgggcgtctacgacttcaccgccggcctgcctctgccgccactgactggtgttttcgcctatacggttggcggacttcgccgccgttaatgggcttcattatctacaccactggcttggttccactggcaccgactggtgtttttgtcaccactgatagactgcttcattcccacatcggctacttctgctgtcaccgagggaatacgacaaagctaagatccagatccagatatgcataaaagggattcacggctttaagcttatctcctacgcttcaggaatggatcagtcagaacatcactatcggcttgccttcgtctgccgccggctggtgtctccgcctgcacggctggcctattatgccgctgtctgttgggcgtctacatcttcaccgaccggccgcctcatctgccgccgactggtgtctccgcctgcacggctggcctattatgtcgccgtctgttgggcgtctacgtcttcaccgaccggccgcctcgtctaccgccgactggtgtctccgcctgcacggctggcctattatgccgccgttgttgggcgtctacgtcttcaccgaccggccgcctcgtctgccgccgactggtgtctctgcctgcacggctggcctattatgccgccgtctgttgggcgtctacgtcttcaccgaccggccgcctcgtctgccgccgactggtgtcttcgcctgcacggctggcctattatgccgccgtctgttgggcgtctacgtcttcaccgaccggcttgccttcgccgccgccgactggtgtctccgcctacacggctggcctattatgccgccgtctgttgggcgtctacgtcttcaccgccggcttgcctccgccgccgtcgactggtgtcctcgcctatacggttagttggtcacaccatcgttgatgggcgtcttcgctttcaccgaccggctgccttgaccgccgccgactggtgtttccgcctgcacggctggcctattatgccgccgttgttgggcgtctacgtcttcaccgaccggcttgccttcgtcgccgccgactggtgtttccgcctgcacggctggcctattatgccgccgttgttgggcgtctacgtcttcaccgaccggcttgcattcgccgccgccgactggtgtttccgcctgcacggctggcctttatgccgccgttgttgggcgtctacgtcttcaccgaccggcttgccttcgccgctgccgactggtgtttccgcctgcacggctggcctttatgccaccgttgttgggcgtctacgtcttcaccgaccggccgcctcgtccgccgccgactggtgcttccgcctgcacggttgacttattatgccgccgttgttgggcgtctacgtcttcaccgaccggccgcctcgaccgccgccgactggtgtttccgcctgcacggctggcctattatgccgccgttgttgggcgtttacgtcttcaccgccggcctgcctccgtcgccgccgattggtgcctccgcctacacggctggcctattatgccgccgctattgggcgtctacgacttcaccgccggcttgcctccgtcgccgccgagtggtgcctccgcctacacggctggcctattatgccgccgctgttgggcgtctacgacttcaccgccggcctgcctccgtcgccgccgactggtgcctccgcctacacggctggcctattatgccgccgctgttgggcgtctacgacttcaccgccggcctgcctccgtcgccgccgattggtgcctccgcctacacggctggcctattatgccgccgctgttgggcgtctacgacttcaccgccggcctgcctccgtcgtcgccgactggtgtcttcgcctatatggttggttggtcacaccaccgttgttgggcgtctacgtcttcaccgtcggcctgcctccgtcgccgccgattggtgcctccgcctacacggctggcctatgatgccgccgctgttaggcgtctacgacttcactgccggcttgcctccgtcgccgccgagtgctaccactactgatggacatcatcgtcttccgccgccgactggtgcttttatcttcaccgccgctgactcgtgttcacttcatcacggcaacacaactttgtcatcatggtggagcgacttcatctttattatcttcggtaccagcaaactctattgctgctacttcacaagttttgctacatcaccaaccatgacgttgttgtgaatctcgacatctcggcatgcgatgccgtgttattttactacaacaagtggctctccaacattcatgatttctacttggacatcttcaacacatatcttcaatcaagcaataactattcgacgacaagatgctacagttctcgactctatgttcagttgttttccaactaatcaaagaacattctacttcaacaacttcaaatatttcggtttagacgagttgggcaacaacatcaactctcctccaattatttgtcttcacggttggcctactacgcaactgccgatagaggatctcatcgttatcatcggctgctacatcgctattgactggatcaccgacatcgtcatcttcatcaacatcttgtcaagcctcttcaacatagcctactctgctgccgttgatgggaaacttcgtcatcatagtcggctatctctgttgccgctaatcatcattaccgtcggatgcgtttgtcgccgccgattattttcttcatcttca

SEQ ID NO: 91760 - DNA, 472 bp, Oryza sativa
  Clone ID: PAT_MRT4530_90303C.1
tttttgttttttttttattttttttttttgttttttttttttttttttttttttttttttttttttttttttttttttttttttttttttttttcttgctggtgggcctgcccctttttttttgttccgttttttaccttctttttggggggggggggggggccccctgtttaaaattggtttcccctcggccttgcccgctccttgggggccgggtgcttccgtgtaaagcccggggggcctaatgggggggctaactaactttaatggcggggggcccactggggggtttccacccgggaaacctggggggccctctgggtccgtgtttcggcccgcacccgggggggggcggtttgttttttggacccccccgcggcttttgtttgccccattgggactggcacccccgggtggtccttcccccccccgccctgagggagatactgtaagcgcccccccccgcttggcc

SEQ ID NO: 91761 - DNA, 5580 bp, Oryza sativa
  Clone ID: PAT_MRT4530_90304C.1
taatatggagatgaacccatcaaagctgatgaagatgttgatggtggtaaagacaatgataccaatcaaaggtgatgaagtcgcatagccgtggatgcgaagaaaccagtcggcagcagacaagtcagccagcagtgaagatgaaggtgtccaacaacagcgacaaaatcgtgcagccatggtggcgaaataatcagtcggtgacagacgagccaataggacaatgaagatgaagtagctccaccatggtaacaaagttgcatagccgtgatgaagtgaacacgagtcggcggcaacggaagcaaaccggtagcgaagacgcgtagttgtgaagataaaaacatcagtcggcggcgacttaaccagtcgacgacggaagacgatgacgtccatcaatagtggtagcggtataaaccagacgtagaggcgagtgcactagtcagctgcagacgagatgaccgacggtgaagacgataaggccaatcaacactagcaaaagtggccagccgtgaagacgatagcgccaattggcgtcatacgaagcggccggtcggtgaagatgtagacgtccaacaacggcagcataataggtcagtcgtgcagcggagacaccagtcggcggcggacaaggcggccggttggtgaaggtgtagacgcccaacaacagcggcatagtaggccagccgtgcaagcggagacaccagttggcggcggcgaaggcaagccggtcggtgaagacgtagatgcccaacaacggcggtgtgaccacctgaccgtataagcgaggataccagtcggcggtggacaaggcggccggttggtgaaggtgtagacgcccaacaacaacggtgtgaccacccaaccgtataggcgaggacaccagtcagcggcgatgacaacaagccgatggtgatgttctgactgatccattcctagagcgtaagagataagcttatagccatgaatcccttttatgcatatctggatctggatcctacagaacaaacatataggatgagtagtatctgatgtaaatacagtacaccttgtgccgctgccagtggggcccacttgcccgagccccctctccctccccttgtgcgctgacaagcgggggttgaaagtgaagacgcccatcaatggcggcataataagccagccgtctaggcagaaacaccagtcggcggcaacgaaggcgagccggcggtgaaaatgcagacgcccatcaacggtggcataataggccagccgtgcatgcggaaacaccagtcgacggcggcgaaggcaggccggcggtgaagtcatagacgcccaacaacagcggcataataggccagccgtacaggcggaaacaccagtcggcgacggcgaaggccagccggtcggtgaagatgtggacgcccatgaacagtggtgtgaccaaccaaccgtataggcgaggacaccagtcggcggcgacggaggcaggccagcggtgaagtcgtagacgcccaacaacgctggcataataggccagccgtgcaggcggaaacaccagtcgacggcggcgaaggccagccggtcggccggcggtgaagtcgtagacgcccaacagcggcggcataataggccagccgtgcaggcggaaacaccagtcggcgaaggacggaggcggccggtcggtgaagacgtagacgcccaacaacggcggcataataggccagccgtgcagacggaaacaccagtcggcggcgatggaggcaggccggtggtggagtcgtagacgcccaacaacgacggcataataggccagccgtgcagacggagacaccagtcggcggcggcgaaggcaagccggtcggtgaagacgtagacgcccatcaacggtggcataataggccagccgtgcaggcggaaacaccagtcggcggcgatggaggcaggccggtggtggagtcgtagacgcccaacaacgacggcataataggccagccgtgcagacggagacaccagtcggcggcggcgaaggcaagccggtcggtgaagacgtagacgcccatcaacggtggcataataggccagcgtgcaggcggaaacaccagtcggcggcggacgaggcggccggtcggtgaatacgtagacgcccaacaacggtggcataataggccagcgtgcaggcggaaacactagtcggcggcagacgaggctgccagtcggtgaagaggtagacgcccaacaacagcggcataataggccagccgtgtaggcggtgacaccagtcggcggcggcgaaagcaaaccggcggtgaaaatgtagacgcctgacaacggcggcataataggccagccgtataggcaaaaacaccagtcggcggcggcaaaggccagccggtcggtgaagacgtggacgcccaacaacggcggcataataggccagccgtgcaggcggtgacaccagtcagcggcggatgcggcggccggtcggtgaagacgtagacgcccaacaacggcggcataaaggccagccgtgcaggcggaaacaccagtcggcggcggtcgaggcggccggtcggtgaagacgtagacgcccaacaacggcggcataataagtcagccgtgcaggcggaaacaccagtcggcggcggcgaaggcaagccggtcggtgaagacgtagacgcccaacaacggcggcataaaggccagccgtgcaggcggaaacaccagtcggcggcggcgaaggcaagccggtcggtgaagacgtagacgcccaacaacggcggcataaaggccagccgtgcaagcggaaacaccagtcggcggcggcgaaggcaagccggtcggtgaagacgtggacgcccaacaacagcggcataaaggccagccgtgcaggcggaaacaccagtcggcggcggcgaaggcaagccggtcggtgaagacgtagacgcccaacaacggcggcataataggccagccgtgcaggcggaaacaccagtcggcggcggtcgaggcgagccggtggtgatgttctgactgatccattcctggagcgtaagagataagcttaaagccatgaatcccttttatgcatatctggatctggatcttagctttgtaatattccccttggtgatggcagaagtggccaatgtgggaacaaagtcgtccatcaataacaatgaagacaccagtcggcggcgacgaaggcggtcgacggtgaaagcgaagatgcccactaatggcggcataataggtcagccgtgtaagcggaaacaccagtcgacggcaacgaaggtgagccaacgattgagtttccccctgactgatttggatcaagtcagagaagaggaggttgaagaagtggtcgacggaaaggaagtgaaaactcccaaagcgaaaacgaagtcggcgacccatgaaattgattccatcgcgcttgttgatgggaaactcgacgcaacccctacctggcgcgccaactgtcgaaacatgaattcggcaataataaaagggggtagcgcacgagacctaaaagtggatggatgcggagacaaaggatttagacaggttcaggccctctcaatgagagcgttacgcttcacggttcacattttttatatacttcctccgtttcacaatggtaacagtaagcgagcagggttggtgggtgtgggcgtgtggcaaagcagagaggcggctaagcgcgggtcaaagctgagaacaacgccgacgagagacgagtcgtccgcgagtataaaagcggcgggggaggagagtggaggggtggatggaaagcgggttttgtctccaaaggaagagaccatacagttcatcatgtcaggaggatctggtgattcttccccttcatcagggcgggctagcttcagttctttgtcaggtttgaaggacctagaactgtcttcagagtctggttgcttgtccattgtggtcctaggtgcttctggagaccttgctaagaagaaaacattcccagcgctgtttcacctctttcagcagggatttctacaatctggagaagtccatatatttgggtatgcaagatcaaatatttcggatgatggattaagagaacgcattcgtggatacctcaaaggagcttcagatgaacatatttcacaatttttgcaattaattaaatatgttagtggttcctacaatagcggggaaggatttgcatcattaaataacgccatttcagagaatgaaacttcgaagaacaacaaaccaggaagctcacgtagactattttatttggcattgcctccatcagtctacccctcagtatgcaaaatgataagatcatactgcatgaatccatcttctcattctggctggacaagggttattgttgaaaagccctttgggaaggacttggagtctgcagaggaactcagtgcccagcttggagagctgtttaatgaacaacagctgtacagaattgaccactatttaggaaaagaattggtccaaaatctgcttgtgcttcgctttgcaaaccgtttgttcctacctctttggaatcgtgataacattgctaatgtacagattgtattcagagaggactttgggactgaaggacgtggagggtactttgatcaatatggcatcattcgtgatatcattcagaaccatttgttgcaggtcttctgtttggtggctatggaaaagcctgtctctcttaagcctgagcacataagagatgaaaaagtcaaggttcttcagtcagtgacacctataaagcatgatgaggtggtccttgggcaatatgatggctacaaggatgactctacggtaccagatgactccaacacacctacttttgcatctcttgtattgagggtaaacaatgaaagatgggaaggagttcctttcattctcaaggctggcaaagcactgaacaataggaaagcagagatacgtgtgcagttcaaggatgctcctggtgacatttttaaatttctgtctgctattgttttgcttctgccaatggtgtctaaaactctgtttttatttcaccctgataaaggcaagaagcaaggaaggaatgaattcgttatacggttgcagccatcggaagccatgtatatgaaattaactgtcaagaaacccggactagaaatggcaaccgaacaaagcgagctggatctgtcatatgggctacgctaccaagacgtgaagatcccagaagcgtatgaacgcctcatcctggatacgataagaggggatcagcagcactttgttcgccgagacgaactgaaggctgcgtgggagatcttcactccgctgctgcacgacatcgacgacggcaaggtgaaggccctgccgtacaagccgggaacccggggacccccagaggccgacgagctgagcaagaggatgggctacgtgcagacccatggctacgtttggatacctccaaccctttcaaaattctagccgctatgtaccaatgcaggctctgtctagatgccggtttatcaggagctttgtaatattttttttaaaagaactcctactacttcgcctgtctagaacactgtaatgttggtgatcttggaataaaaagaagactatatatgctgc

SEQ ID NO: 91762 - DNA, 427 bp, Oryza sativa
  Clone ID: PAT_MRT4530_90305C.1
atgacaacgcccggcgcaaacccgcctccccaacacctgcgaggatccaggaagaagcaaacccagccacggagacagttgccgaaggtcatccctcgacaacggcccacggcgcccaagactgtcattggaagatggtctaactactgcgggctggcggcacgtgagaactttgggatcctccataaagatatcggcaaggtcacaaaagccgagaaagagcgagcttggacagcaacggagaaatggttcacatttccggctgaagcaaaggataggctcaagtggaaggcattccataagatggggtacatcggcaaggaggcaatatgggcccaagaagatgcagccgctgcagcagcgaatgtccctgccccgttttcagacatccctgaacaaggagctcgcaactggtcgcgggcaaggg

SEQ ID NO: 91763 - DNA, 156 bp, Oryza sativa
  Clone ID: PAT_MRT4530_90306C.1
ccccgccctttttttttttggttttttaatagatgcgggcggcaacaccaaaagtcccttcaaatcaccaggcaaaaaaacaggagcctagtacaaactcctcaatatcacacttgtatctaaaaccacgtaacgagtattctgcccctcctacat

SEQ ID NO: 91764 - DNA, 3507 bp, Oryza sativa
  Clone ID: PAT_MRT4530_90307C.1
tagggggatcttcctcactcacacccgctttccatccacccctccactctcctcccccgccgcttttatactcgcggacgactcgtctctcgttgatgggcatcgtcatctacgccgccggtctgcctccgtcgccgccgactggtgtccccgcctatacggtcggttggtcacaccaccgttgatgggcatcgtcatctacaccgccggcctgcctccgtcgccgccgactggtgtcctcgcctatacggtcggttggtcacaccaccgttgatgggcatcgtcatctacaccgccggcctgcctccgtcgccgccgactggtgtccccgcctatacggtcggttggtcacaccaccgttcatgggcgtccacgacttcaccgccggcctgcctccgtcgccgcagactggtgcctccgcctacacggctggcctattatgccgccgctgttgggcgtctacgacttcaccgccggcctgcctccgtcgccgccgactggtgtcctggcctatacggttggttggtcacaccaccgttcatgggcgtctacgacttcaccgccggctcgcctccgttgccgccgagtggtgcctccgcctacacggtggtctattatgccgccgctgttgggcgtccacgacttcaccgccggcctgcctccgttgccgccgagtggtgcctccgcctacacggctggtctattatgccgctgctgttgggcgtccacgacttcaccgccggcctgcctccgttgccgccgagtggtgcctccgcctacacggctggtctattatgccgccgctgttgggcgtccacgacttcaccgccggcctgcctccgttgccgccgagtggtgcctccgcctacacggctggcctattatgccgccgctgttgggcgtctacgacttcaccgccggcctgcctccgtcgccgccgagtggtgcctccgcctacacggctggcctattatgccgccgctgttgggcgtctacgacttcaccgaccggccgcctcgtccgccgccgactggtgtctctgcctgcacggctggcctattatgccgccgctgttgggcgtctacgacttcatcgccggcctgcctccgtcgccgccgagtggtgcctccgcctacacggctggcctattatgctgccgttgttggatgcctacatcctcaccgttggctcaccttcgttgccgtcgactggtgtttccgcttacacggctgacctattatgccgccattagtgggcatcttcgctttcaccgtcgaccgccttcgtcgccgccgactggtgtcttcattgttattgatggacgactttgttcccacattggccacttctgccatcaccaaggggaatattacaaagctaagatccagatccagatatgcataaaagggattcatggctttaagcttatctcttacgctccaggaatggatcagtcagaacatcaccaccggctcgcctcgaccgccgccgactggtgtttccgcctgcacggctggcctttatgccgccgttgttgggcgtctacgtcttcaccgaccggcttgccttcgccgccgccgactggtgtttccgcttgcacggctggcctattatgccgccgttgttgggcgcctacgtcttcaccgaccggcttgccttcgtcgccgccgaccgatgtcctcgcctgcacggctggcctttatgccgccgttgttgggcgtctacgtcttcaccgaccggcttgccttcgccgccgccgactggtgtttccgcctgcacggctggcctattatgccgccgttgttgggcgtctacgtcttcaccgaccggcttgccttcgccgccgccgactggtgtccccgcctgcacggctggcctttatgccgccgttgttgggcgtctacgtcttcaccgaccggcttgccttcgccgccgccgactggtgtttccgcctgcacggctggcctattatgccgccgttgttgggcgtctacgtcttcaccgaccggcttgccttcgccgccgccgactggtgtccccgcctgcacggctggcctttatgccgccgttgttgggcgtctacgtcttcaccgaccggcttgccttcgccgccgccgactggtgtttccgcttgcacggctggcctttatgccgccgttgttgggcgtctacgtcttcaccgaccggcttgccttcgccgccgccgatggtgtcccgctgcacggtggcatttatgccgccgttgtttgggcgttctacgtttttcacggaccgggcttgcctttgccgccacagatgggctcttcggttggcagggctggcatttatcccgccgttgttgggcgtctacgtcttcaccgaccggcttgccttcgtcgccgccgactggtgtctccgcctgcacggctggcctattatgccgccgttgttgggcgtctacgtcttcaccgaccggccgcctcgtcagccgccgactggtgtttccgcctgcacggctggcctattatgccgccgttgttgggcgtctacgtcttcaccgaccggcttgccttcgctgccgccgactggtgtttccgcctgcacggctggcctattatgccgccgttgttgggcgtctacgtcttcaccgaccggccgcctcgtcagccgccgactggtgtttccgcctgcacggctggcctattatgccgccgttgttgggcgtctacgtcttcatcgaccggcttgcctcgtccaccgccgactggtgtttccgcctgcatagctggcctgttatgacgccgactgatgctatcttcttcacggttggctacgtcgccgtcaccgctaatatgcgtcttcaccgaccggccgcctcgtccaccgccgactggtgtttccgcctgcatagctggcctgttatgacgccgactgatgctatcttcttcacggttggctacgtcgccgtcaccgctaatatgcgtcatcatcttcaacgcaagctgtctacgtctgccgccgactggcgcttttatcgtcacaattgcgcgtcttcactaccagtttgcttctgtcacttcatcatggcaatgcaactttgtcatcatggatttctacttggacatcttcaacacttatcttcaatcaagcaatgactactcgacgataagaagctataattctcgactctatgttcagttgtttcccaactaaacaaagaacaatctacttcaacaacatcaaatatttcggtttagacgagttggacaacagcatcaactctcctccaatatttcaccttcacggttgacctactatgcaaatgctgatgagcgtctttgtcattatcattggttgctacactgctattgactggatcaccgacatcgttatcttcatcatgtcggttgcgtttgtcatcgtcaactattttcttcatcttcatgattgatggatttcgtcaccgcctttgatcttcattgttagttgatctgtctgtcgctgactggtttcttcgcctccatggct

SEQ ID NO: 91765 - DNA, 2050 bp, Oryza sativa
  Clone ID: PAT_MRT4530_90308C.1
cagaggagaaaaaagagagaaaaggatgggaggaggtgagggcacgcgaccacttcacttgcatgagtcgcgcgcggtcctgggccgccctgtccggccgaattggccggatgcacagagccggcatctggagggaatattccctagggggtggccatatcccatcaggcccaaccatcctgaacaaccatacccggctgtacagatctatctccaaaccaggaatataccattccaaaccaggagctaaacaaattattaccagttatagcatcttttattatggcatggactccctagcgacccccgtgggcttatctccgccacttctcagtctggtgctccgcaatgaaccatgctatacaaaagtggctcacggaaacgaacggccgagatcgatcctatccaaaacggacggccaagatccaacggtccacgaccaggccacggggaacgacgacgatgacgtcagcggtgacgtcaccaccggcggcggctcgggcgtgcatacttccatacccggctgtacagatctaactccaaaccaggagctaagcaaattattaccaggtataacatccataattattgtgagaggtgtgagactaatcacgaaaaacattgctcaacccgcccataaccgcgggcacggctattcgaatagttttactctggccagaggtgtaccactgtacccacaagacacagccccacaacatgtcaccctccggctccactcccacaggcagctcaactggggtataagctaaacgtcttcttcttctgaatcctttttcttcaactgagagaaaaggaagaggagatcgaggagattatttcccctctatcaattcggccggagaaggaaaggatcgaccgaattttggaaagcggcggcggagctgctcggctagggtttcgggcggcggcggccggaggaggaagacgaaaccgacaagtggggcccacctgtcagcggctgagagagagaggagaggacaccaacgggtagagggcgacgcggcgaactcaccggtgaccaaaacaacggtggaaaagcaacggacggcgtcggcgacgaggaagaagcggcggcggagatcgggtcgacggcggcgacggtgctccggcggtcttcggcggcggtgaagcggcggacgaggacggcgacgacttggcgaccacgatggcggcctccccgagcaacgacgacgaccgaaacgacggcggcgcacggctcattatcacagtcagaatcttcatccacgcttctagccatgagacaaacatcattcttgcctttgttccccttgtcatcatcttcatcactttcaaactcaacatcgcttgattcttgaacagccgcaaatgcctcatcaagcgccttctgatagaacttcttcatcttcatgttcttgaattgcttcttgttcaagtcctccacaatgaaagcaacgaggtggtcatcctcttttctataaagaacatccaaaatcaaagtgttcatgtcaacagattcctgaatagaggtcactttaacatcacaaactatcatatcaaaaccattcataaagtgacgagcaatctcagattgagaatagttaacatcacaagaatcatcaacagatctaagatcactcaaaattttattgaaacgccccaaataatcatccaaagattcaccagaactcatctcaaatttaatgtagtcctttttgaaaacatctttttgcaactccttaatgtttgtagatccagtatgaaaattattcaaagctttccaaatctcattagcagtttcaaggtgtgaaacacgatcaaaattagattgagaaatcccactaagaagaatattttgtgctttacaattgttttcaaaatcagttttttgggcaatagtttcaatacgttcaggaatctcataaactctagcaactttcatccagacatcatagccttgagatgtaatgtaagactccatctttttcttccaataatcaaaatcaactccattgtaaatatgaggtttgcttgaaaacttttcagccat

SEQ ID NO: 91766 - DNA, 259 bp, Oryza sativa
  Clone ID: PAT_MRT4530_90309C.1
aagagaaacagcaggatccatttcattgacaagcgctgagagtgcaagcgcaaagtcaactgggcgtcccaagcagcctgcgatattattacatatcactgaatggggagcaaatatggcttacgacagatggaccacgatctaagccgactttataacacatggttattcatgtcgataggataaaccagaggctgtctagacaacagtgactgggcacgtggagatgaacacgcacacatacggtgacctgcctaac

SEQ ID NO: 91767 - DNA, 2122 bp, Oryza sativa
  Clone ID: PAT_MRT4530_9030C.1
cccgggctgcaggaattcggcacgaggcccattaattgcgcctcctccgctcgctcctccgcctcgtctcgtcgtcgtcggcgccggcgcggagagggagggagaccgacgagcggcggcgaggaggaatggaggtgaacggcggcggggcggcggggctgccggaggcgtggtcgcaggtgagggcgccggtgatcgtgccgctgctgaggctggcggtggcggtgtgcctgaccatgtcggtgctgctgttcctggagaggatgtacatggcggtggtcatctccggcgtcaagatcctgcgccgccgccccgaccgccgctaccgctgcgaccccatccccgacgacgaccccgagctcggcacctccgccttccccgtcgtcctcatccagatccccatgttcaacgagcgcgaggtgtaccagctgtcgatcggggcggtgtgcgggctatcgtggccgtcggatcggctggtggtgcaggtgctcgacgactccactgaccccgtcatcaaggagatggtgaggatagagtgtgagaggtgggcccacaagggggtgaacataacgtaccagatccgggagaaccgcaaggggtacaaggctggtgcactcaaggaggggatgaagcatggctacgtccgcgaatgcgagtacgtggccatcttcgacgccgacttccagccggaccctgatttcctccgccgcaccatccccttcctcgtccacaactccgacatcgccctcgtccaggcccgctggcgtttcgtgaatgcagatgagtgcttgatgacaaggatgcaggagatgtccttggattaccacttcacagtggagcaggaagtgagctcctctgtctgcgcattcttcggcttcaatggaactgctggtgtgtggcgcgtttccgcggtaaacgaggcgggaggatggaaggaccggaccacagtggaggacatggatctggcaatcagggcgagtcttaagggatggaagtttgtctaccttggagatgttcaggtcaaaagtgagctgccaagtactttcaaagcctttcggtttcagcagcacaggtggtcatgtgggccggcaaacctgttcaggaagatgctgatggagattaaagtgacaatctggaagaagattcatgtcatctacaacttctttttgatccgcaaaatcatcgcgcacatcgtgacctttgcgttctactgcttgattatcccggcaactatctttgtccctgaggtcaggataccaaagtggggctgtgtgtacattcccacaatcatcacccttctcaattccgttggaactcccaggtcttttcacttgcttttcttctggatcctctttgagaatgtcatgtcactgcatagaacaaaggccactctcatcggcctgttagaagccggtagggcgaacgaatgggtcgtcaccgagaagctcggcaacgctctgaagatgaaatcatcaagcaaatcatcagccaagaaatcgttcatgagggtatgggacaggctaaacgtcacggagctcggcgtggcggcattcctcttctcctgtggatggtatgatcttgcattcgggaaggaccatttcttcatctacctcttcttccaaggcgcggcgttcttcatcgtcggtatcggatacgttggcacaattgttcctcaatcataaggccgccttcaaattcaccatgtcttcagcaagagtctagtagttatataaatcagtttgaagtaaagatcatgcagcatttttttactctcatttttctctgtttcttttcttttctttttcttttcttctttgcctttttctctgttatgtgctattgtaaaaaatagtgcagtgtaaggtcactgcaggaagaaaaaactagggcaattggtgtgatctgggcaaggaggaggtgaggaggatatcgtgatgtgtttttgcttgtagcaaagtacgtgagtggtatgcttaaagaggagcaggatgactctgcttccgttgtactgtaataacatacagaaaaaaaaaaggtcagacaagtgctggacaaaaccaaaatgttcagccttctctcgcaaaaaaaaaaaaaaaaaaaaaaatcgagactagttctctcc

SEQ ID NO: 91768 - DNA, 3037 bp, Oryza sativa
  Clone ID: PAT_MRT4530_90310C.1
atgagacaacctgatcgtcagatctatactacacccggcggattcaaatccccaaacaggagtctcgtgcgctaccccgttttattattgccgaattcatgtttcgacagttggcgcgccaggtaggggtgcgtcgaattacctgtcgaaaagtgcgatggaatcaacttcagaagaaaccccgagatcaatctcatcaatttcgatggctcaaatcttcaatcgggtctaccgttccaatttaatctatcgaaacacggccatcatcgtcgcctacttgggtgcccttgccgtgtccgagtgctcctctcttcctttcctggcagatggacgtgttgcaggagtggcacaggccgccaggattcgattcctgtttgcatgtatgatggttgatgggctccgccggctacctccgatgatggcatcatgccgaaagaacatcgagttagctgttagttgctggggcttatacatgttgcatggcacgtcgccggctatcactcatgatccagcctcactgctcgacttgagtttttcgtttcaatttgttatcaatatatattagattgatttctgcgattgatgctggtcatggactcgaggcgtctcagctttccggtcgatcggccgcgagtccactccgccggcttgtcctcgccaccgccattgctgatagcaacaacgacttcaccaccggcctgcctccgtcgccgccgactggtgtccccgcctatacggttggttggcctattatgccaccgctgttgggcgtctacgactacaccgccggcctgcctccgtcgccgccgactggtgtccccgcctatacggtcggttggtcacaccaccgttgatgggcatcgtcatcttcaccgccggccgctggcctgcctccgtcgccgccgagtggtgcctccgcctacacggctgacctattatgccgccattagtgggcatcttcgctttcaccgtcgaccgccttcgtcgccgctgactggtgcctccgcctacacggctggcctattatgccaccgctgttgggcgtctacgacttcaccgccggcctgcctccgtcgccgccgagtggtgcctccgcctacacggctggcctattatgccgccgctgttgggcgtctacgacttcaccgccggcctgcctccgtcgccgccgactggtgtcctccgcctatacggttggttggtcacaccaccgttcacgggcgtctacgacttcaccgccggcctgcctccgtcggcgccgactggtgcctccgcctacacggctggcctattatgccgccgctgttgggcgtctacgacttcaccgccggcctgcctccgtcgccgccgactggtgcctccgcctacacggctggcctattatgccgccgctgttgggcgtctacgacttcaccgccggcctgcctccgtcgccgccgactggtgtcctccgcctatacggttggttggtcacaccaccgttcatgggcgtctacgacttcaccgccggcctgcctttgctggatgtctacgtcctcaccgttggctcaccttcgctgccgtcgactggtgtttccgcttacacggctgacctattatgccgccattagtaggcatcttcgctttcaccgtcgaccgccttcgtcgccgccgactggtgtcttcattgttattgatggacgactttgttcccacattggccacttccgccatcaccaaggggaatattacaaagctaagtcatcggacagagtgtttaaacgtacagagtcatctgctcggggaaatcaaaattgacaagaggagaaatacatatttataaatatttcaaaatacttgattttttctcgagtattatatttatatcagatactactcatcctatatgtttgttctgcaggatccagatccagatatgcataaaagggattcatggctttaagcttatctcttacgctccaggaatggatcagtcagaacatcaccgaccggcttgccttcgccgccgccgactggtgtttccgcttgcacggctggcctattatgccaccgttgttgggtgtctacgtcttcaccgaccggcttgccttcgccgctgccgactggtgtttccgcctgcacggctggcctttatgccgccattgttgggcgtctacgtcttcaccgaccggctgcctcgaccgccgccgactggtgtttccgcctgcacggctgacttattatgctgccgttgttgggcgtctacgtcttcaccgaccggccgcctcgtccgccgccgactggtgcttccgcctgcacggctggcctattatgccgccgttgttgggcgtctacgtcgtcaccgaccggccacctcgaccgccgccgactggtgtttccgcctgcacggctggcctattatgctgccgctgttgggcgtctgcgtcttcaccggccggccgccgcatccgccactgactgatgtcaccgctagcacggctggcctgttataatgccaactgatgctatcttcttcacggctggctacatcgctgtcactactaataggcatcagtatcttcaacacaagctgcctacgtttgccatggctgccgactggtttcttcacttccatggctgcatgattctgccagtgttgattggcctattatgccgctgttcagctaccactactgatggacatcatcatcttccgtcgccgactgattatgctgccgccgattggtgcttttatcttcacaactacgcgtcttcactaccggtttgcttctgttgccgccgacttgtgttcacttcattacggcaatacaactttgtcatcatggtggagcgacttcatctttattatcttcggcaccggcaaactctattgctgctacttcgcaagttttactacttcaccaaccacgacgtctttgtgaacctcgacatctcggcatgcaatgccatgatattttactacaacaagtgactctccaatattcaggatttctacttggacaccttcaacacatatcttcaatcaagcaatgactac

SEQ ID NO: 91769 - DNA, 3411 bp, Oryza sativa
  Clone ID: PAT_MRT4530_90311C.1
atggatatctctgaggcaaatgaaggctacgcgagctgcggctcggtaatcgagatgtctaggcaaatgaagactacacgggtcggtgcccgtactacaaaggatggtctcaacgcccgacgagatctggaagatatgggtgttcggtcggagctacatcccataaccacagaatccggcaggaagatcattgatcccgagggactagatgaactacaggcagaacttgtgagaaccctatgtcatcttgagatgtactttcctccaactttctttgacataatggaacatcttccggtgcaccttgtgaggcaaacaaagtgctgtggtccagcattcatgacgcagatgtatccttgcgaaaggtacctggggatccttaagggttatgtatggaaccgttcacaccccgaggggagtatcatcgagagttacaccaccgaagaggccatcgaattttgtgtggactacatgtccgaaacatcttcaattggattaccacgatctcatcacgaagggaggcttgacggtgttggtactgttggaagaaagactattaggttggatcggaaggtgtacgataaagctcatttcacggtactacagcatatgactgaggtggtgccgtacgttgacgaacaccttgcagttatccgacaagagaacccaggccgatcagagagttgggtcaggaataagcacatgtcttctttcaacgagtggctgaagaaccgaattgccaggttgcagaacttgtctagtgaaacacttcagtggttgtcacagggtcctgaatggagtgccaccacctggcaaggatatgacataaatggatacacctttcacacggtaaagcaagacagcaaatgcacagtgcagaacagtgggttacgcatcgaggctgctagtgacggtggtcgtcgtgatcaatactatggtaaagttgagcaaatattggagctagattacttgaagttcaaagtcccgttgtttcgttgtcgatgggtcgatcttcgcaatgtaaaagttgacaatgaaggtttcaccactgtcaacttggctaacaacgcatacaaggatgaaccgttcgttctcgccaaacaagttgttcaagtgttctacatagttgacccgtgtaacaagaaactacatgttgttcgtgaagggaaaaggaaaattgttggattggacaacattgcagacgaggatgattacaaccagcacgtccacggcataggtcaagaaatacctctagaagaggaggaagaagaagatgaagttcaatatgcacggccgtcacaggtgacctcacctgtgacggcccagagtgttgggcccgtcacaggtggtcttacctgtgacggctccacggttggcgcccgtcacagaattgccgcaggaacaacatacgtcgatgtcgggcgggacaagtgcaagcccacggcccccaggactgttattggaagatggtctaactgctgcgggctagcggcacgtgagaacttcgggatcctccataaagatatcgggaaggtcacagaagccgagaaagagcgagcttggacggcaatggagaaatggttcacatttccagccgaagcaaaggataggctcaagcggaaggcattccaaaagatgggcaaagcttggaagaattggaagtcgaagctcttcaccgagtttgtcaacccgcccggcaatcatacgtcgttcgatgaataccctcaaataaccgaagcggtgtgggaggaattctgctctctaaagaccacccaagagtttagggaattaagcgaggcacatcgcgtactgcaacagcggaatgagcacccgcatcggctgggcaccgcagggtacatcggcaaggaggcaatatgggcccaagaagatgcagccgctgcagcagcgaatgtccctgccccgttttcagacatccctgaacaaagagctcgtaactgggcgcgggcaaggggtaaggtcaacccggacggctctgtcacatttgagaacaaaagtgatgccatcgtctatcaggaactgttgggcttggttgctgaacaagcttcacaaagcgaggttgagtccgcgccgaagaggcgcgaagatgacatcctcacaaaggcgctcggaaccaaagaacatcctggccgaactcggggaattggtagcgatgtgccctggaagcatggactccctcagtacagctcccaatacaggaaacgaaaagtctccaaggaagagagggacgctcgtttgaaggccgaacttaaggttgaggtcattcaagaactagaagctagcatgaatgcaagggtggaagaaagggttaacaaggtgctcgccgacatgaatataccccgagtcacaacacctgctgtgcaaccaactcctcgtgtacaacacgacgcgagtccgtcacagcataggagtagttgtgcatccacagaggtgccggcccctggtctcccgatcgcaccactagctgcagtggaccacatcgagggcgtagcacagtgtgtcctactagcgagagtccacccaactttcgctcctgaagtcgctgagggcatggctttcaagccctcggttacagacaaggtccacggtgcagacctgctagctgggtatgccaaggtgtccatcgatacagtaaaggacacctggtcaggctatccgctgcccgtgcccccaaatgatgaaatcatgactttgggcgatgcgcgcaagacgttcatacaatggcccaaagaagacatagttgtgaagatgactcctcgtccaagtcgaccgacggagcttacacctcccaagtctaagctatcaattgaggctccccgtggaccggcattgtcagtacctcattctcccggtggagctgatatggacttggcagatatagctcaaagcttggctccaataaagaccacaagaaaggccgatagctccccaccacttgtcaagggccagaagcgtgaacgcggcaaggggaaggtcggggagttggcgccggagccaaaaaggggcaaggctgcgacgtcgatgccggtgagcaaatcggggaaggtcgtgagggcgccagcccaatttgagctaggcatgccattggtggaggacaatgttgggttccttgatccatccatggtgaatgaggttaatttacgacagagcttcactgaggtggttgactatgtcaaccgtgaaatcaccaaggccttaaatatggcttggggcccatatgtggaaaagggtggtaggcacaaggagggcaagaacgaactttatcatgacaccaagtttgcatgcgcacaacagatcggagaccaatgtggtttccacgtgtgccacaacatgtcaacacttctaagagaggtgaaagatttcgaccctgaggttgttgctaatggcgaataa

SEQ ID NO: 91770 - DNA, 6829 bp, Oryza sativa
  Clone ID: PAT_MRT4530_90312C.1
ctactccttgtacatagcggtgccctttgtgaccgagcgttatcgcttccgctaatggcatatatcttcaccctttgtaaacaaatacaaggggtttgagcgagtcgggagtttggccaccaaaatatgaaaccttttcccgtataaaaggtgaggattttcaaagccatacggtttcatggccaggcgcgcaggcaggtgccgcgcgcgcgcctcggcccccggcagccccctccctgtggacgatgtccactcgacacaggccggttggcccccagtgcacgtgattcgtccacagtcgccctttagatttcgtcacggtgcgcttgttcgtctacccttttcatagagtccagcagaacttgcgttcttctcggcattgcccttttgtcttctggtcgtcgaatccgccagtggtattgttaataccgaacattctcatcgtactacctccaaaatctctaagagttcggaaagaaggatgttgttggagatgtgccgggtgtcatgtatccagcttccatgttgtagagcatccagtactgagcccttcttcatttttcatagcctgtataggttcggcgcttgactcttaagcctatgtccgctaatcaagttggattcccaatagttttcctttggccaatttaatttgcttttgccctcgtgcatttactcattaccagcccaaaggaaacatctttttggtttgtcgatttcttgaaaaaattgtttcggcggcttcaacaccgtgaggacatacgtagggatggagcttagcaccgagataacctcaacccagcaccctcctgtgtacaacaacaatgccttccaacttgataggcggcctttgatcttatcgtgcaccggctggagatgtaccttgcgtaggcggctaggagtgagtggtaacccgagatcagttagtgggaaactggcttttgatccagagaaattgcataaaacatcatcaaggtcaattccctggcatcgtatgggagccaccaagctcttatccaagttgacatgtagtcctgttgccttgccaaaacctctaagaatgccaatgagaacatccacttcattttgacatggattgagaaaaaccgccgcgtcatccgcatacaaggaggtcttgaatctggcatggcaactcccaatggtggttaactgaccactctctgttgctcgacttagaagtttctccaacagtagacgtgctatatcattaggaatcgtcgccatgttttgtacgtcttgtttcaaaaagagaaattctatgatgcttgagaaaatatgtgacttgaacccagctgcgcagtatatgaaatagtactcccatatgcggatgaacttgtcatcgaatcccagggactttatctcttctctgttagccatgaagttgtcccgccagcgtatcagcgtggggtagtagtggtacccaatattctccaagtgctcgatgcatagcctcgacgaggtggacatggcggatgttatccgagacaaggatggaaggcaacccccaggaaatatgtattccttgatgaagtctgaactcctcctgtattcttcgtaccgttcttcagggatggagatgaactggaggacgaacaggccatcctgtgccaggagagactcgcagcagccgaagaaatcgtccatgtattcatggcctaccccttcgatcatttcacaagatatgatcctgtcatattttcgaactgttggtatttgacggtagtcgcacagcaggaaagtcatgtggtcctctagaccagcttccttcacttttctctggcaatatttaagctgctcctcagacagtgtgaccccagtgtatttgcaaccagtctgcttgaccacctgtatcgctaggctgccccagccactaccaatctcgagaacatggtgatctcgctccaccctagccttgtggattagcaggctaactttgcgctgctgggctgcttctaaactctcgtcctcgtccaggtcgtagtgctgggagatgttctggcgagtctgtgtgacagtgttcttcctggacacgtggcgcaggaagtatttggcagacgcgaccccggccgtcagaagcatcggtgtccaccagcctcttattctgctggtgctggtgctgctctgcttgttggcgtctctgttagcaatcagaatcaatagaaggttgagaaggccctgtttcttgtcgacgaaagagcagtagccgttgatgtaggcatctgccagaccaaggtctgcttccgtcgccaccttccagtagaagagggggtcatggactcgcatgacacatttggcctgacatttcttccctgcctcaccaaaactgaacatggtgcctccttcctccagcaatgtcaggttaccgacggagacgtagccggcgaggaacctggtgactaggagccgcgccccggcctctgtccacgacggcaccatctgcctcggattcgccagcagccgccgctcgccggcgccgccgttcgccgcgagcagtaaccccctcgcggcggccatgccggccttgaggccgtcctcgtggaagccgtagccctggtaggcgccgcagaaccagaggccccggcatccctggacgcggcggagctcccccgccgccgccgccgccgccaccgacggcaccgggtggctggttttccaggcgagcaggacgtggtccgggacgcggggtgggttcagcgtcaccaggaacggacgcctccctctccccgccgactgctcgatgttctggagaaggttgagccagtaggtgacgcagacgccggtggtggtggtccccaggaagttccaggagctccacgccgacggattccgtggcatcaagctcttgtcgcagtggaggtagatgtcactgtagacgtactgaaaggcgccgaggattctgcgctcgtcgtgggtggcctcgtctcccaggatgttgagagcgtcaggcgcgtgcacggcgaatatgatgctgtcatacgcctcctctgtaccccctgcctcaacgaccctataccctcctccctcaagagctgaaacagactggacttcacagccggtcttaatctgacagcccaggctctcaagctcctcccttaccctgtttacgtaggtatgggagcggcccttcaccgtgagccactgtggacgaccgaacagctgcaagagatggtgattgcggcagaaggagaggacgaagaaagcagagaagcctagaaccccctgtgatgggcacgaccatatgcacgcacagatcgggacaaggtaggcctgctggaagaggcgagagtaaccgtgcgactggacgaagtgccccagcgtctcgttcctgtccagatcagggttcttgtcgtgctcctccaggtacgtgaggacgtcgtccttgaacttgaggatctcgcggatcatgcgccagaacgcggggctcacggcgttggtcttctgggcgaggaggcccgcgaggccgttgcggctgccccactccatcgtctgctcgtcgccatcctgcagctgggcgctcaccgagaaggacatgtccgaaagctccatctccacgcccagctcctcgaaccactccatcatgttcgggtacgtcacctgtggaggaatgctagtaggggcccacaattcattgctactgactttatttttcagccctccacagtcttcagatttggtaaaagtactcgggagatcatgacaaagatgattgaagtactcggccttggagtaatctctcattgagagggcctgaacctgtctaaatcctttgtctccgcatccatccacttttaggtctcgtgcgctacccccttttattattgccgaattcatgtttcgacagttggcgcgccaggtaggggttgcgtcgagtttcccgtcggtaaagtgcgttggaatcaatcaccaacatgaccggatcgtacacgcgcgtcattcaccgccgcaagaaggagcatcaccgatggacgtcctgcgggctatggccaccacgggccacacatgggaacagccagcctatggctaatcaggagagaacacgtgcagaaagttgatcttaccgatcaacaagcaccattaatttacttaatcatgcctatatatttttatcattaaccaagttggtttgttgtcttgttctgtaagcacgccgagccatggatcgcttgattagtcctagcgacagagtgcaacaccagcaaccaattttctccgtctcggagtcagtccggtcgagaaaatcaatctcggcgagttcaacaatttaaatctccgactccgccggtgttgccgactggtgtttccgcctgcacggctggcctattatgccgtcgttgttgggcatctacgtcttcactgtcggcctacctccgtcgccgccaactggtgtcctcgcctaaacggttggttggtcacaccaccgttcatgggcgtccacgtcttcaccgatcggctagccttcgttgccgccgactggtgttctcgcctatacggttggatggtcgcaccaccgttcataggcatccacgacttcaccgccggcctgcctccgtcgccgccgagtggtgcctccgcctacacggctggcctattatgccgccgctgttgggcgtctgcgacttcaccgccggcctgcctccgtcgccgccgagtggtgcctccgcctacacggctggcctattatgccgccgctgttaggcgtctacgacttcaccgtcggcctgcctccgtcgccgccgagtggtgcctccgcctacacggctggcctattatgccgccgctgttgggcgtctacgacttcaccgccggcgtgcctccgtcgccgccgagtggtgcctccgcctacacggctggcctattatgccgccgctgttgggcgtctacgacttcaccgccggcctgcctccgtcgccgccgagtggtgcctccgcctacacggctgacctattatgccgccgctgttgggcgtcttcgctttcacaatcgaccgccatcgtcgccgccgactggtgtcttcattgttattgatggacgactttgttcccacattggccacttctaccatcaccaaggggaatattacaaagctaagtcatcatttattttattctttatatgatatttttcctttttctctgcctcactacaccaattggtcttccattgagtagtgagtcgggggctacagatgttatatcatattttttataatatttatcttcattgcttgcgacataatctgagtacaaaagtacctatcgagttatggagttctatcttcctctgctttccgtttggtttgccaatggatggttgcctttgggccgattcctagcacccgggggctcgttggatggaccgagtaacgcaaggtgctaaatattattcggaataaatcaaaagcatagagatgagataaatttattttctgctcttaataattgcaaaagtacccgagtagtaaattctgatccgtgaaactttattccattaatgacgaactcatgtcactcatatgcatgtttgggaagtgcctaggccgactcccggtgcttgatggttatgactagtcggacagagtgtttaaacgtacagagtcatctgctcggggaaatcaaaattgacaagaggagaaatacatatttataaatattttaaaatacttgattttttctcgagtattatatttatatcagatactactcatcctatatgtttgttctgcaggatccagatccagatatgcataaaagggattcatggttttaagcttatctcttacgctccaggaatggatcagtcagaacatcaccaaccggccgcctcgtctgccgccgactggtgcttccgcctgcacggctggcctattatgccgccgttgttgggcgtctacgtcttcaccgaccggcttgcctcgtccgccgccgactggtacttccgcctgcacggctgacttactatgccaccgttgttgggcgtctacgtcttcaccgaccggcttgcctcgaccgccgccgactggtgtttccgcctgcacggctggcctattatgctgccgttgttgggcgtctacgtcttcaccgaccggcctgccgcatccgccgctgactggtgtcaccgcctgcacggctggcctgttataacgccaactgatgctatcttcttcacggctggccgccgcatcgctgtcactactaataggcatcagtatcttcaacacaagctgatgctacgtttgccatggctgccgactggtttcttcacttccatggctgcatgattctgccagtgttgattggccttaccatcttcatcgccggtcgtcttcacttccatggctgcatgattctgccagtgccctcgcctctaccatctggtttatacagctatcactactgatgaacatcatcgtcttccgtcgccgactggttatgctgtcgccgactagtgcttttattttcacaactgcgcgtcttcactaccagtttgcttctgttgccgacgactcgtgttcacttcatcacggcaatgcaactttgtcatcatggtagagcgacttcatctttattatcttcggcactggcaaactctattgctgctacttcgcaagttttgctacttcaccaaccacgacgtctttgtgagcctcgacatctcggcatgcgatgccatgttattttactacaacaagaggctctccaacattcatgatttctacttggacatcttcaacacatatcttcaatcaagcaataactattcgacgacaagaggctacagttctcgactctatgttcagttgtttcccaac

SEQ ID NO: 91771 - DNA, 2166 bp, Oryza sativa
  Clone ID: PAT_MRT4530_90313C.1
atggcgcccggaggcttcggagcaaaccaacgcgtggccgcggcggcgccgaggagtgcgcggccggtgctgaatcatccacaccttcatcgatattcagctacagcccatctacacctcgcgacagcacagccatcgatatatcgtcctggtgacaaggcgctgcacgccggtggccggacagaacgcgtggacagcggctgcgcagaacacggaggggagcgcttcatcatgcgtgcacgagatggcgacgagacgagttgccggtgctgcctgccggagatcgtgttggtccctctcgtcggagacgccggccaccaccgcggacgccgcctcatgccgattcaggaggtcttgttgacaacaacgcggatgccgccaagctgccctgatgaggacatcctccactattacccgctggcaaagacaccaacgtcggacagcgaccgtaccatagagtcactgaagcactaccaagcggtgctcgtccatgccatcccatcagaggccgccggccggcatgccatcgtcatcatgtcagattgtcggtcgatcgccgcctacgctacctgtccccatggagcggagccgctgtcaaccgtgaggttatctcgtcttccttgtgggcaacgccctaacgcttgtcgtacccgtcagaccaccgtgatgccgtccgccgagtgccatcccgctgaagaagccactgcagcagcgaatgtccctgccccgttttcgaacatccctgaacaaagagctcgcaactgggcgcgggcatgtggtaaggtcaacccgaacgactctgtcacatttgagaacaaaagtgctgccgtcatctatcaggaactgttggggttggttgctgaacaagcttcacaaagcgaggttgagtccacgccgaagaggcgcgaagatgacatcctcacaaaggcgctcggaaccaaagaacatcctggccggactcggggaattggcagcgatgtgccctggaagcatggactgccacaatacagctcccaatataggaaacggaaagtctccaaggaagagagagacgctcgtttgaaggccgagcttaaggtagaggtcattcaagaactagaagcaagcatggacgctagggtggaagaaagggttaaaaaggtcctcgccgacatgaatatacctcgaggcacaacacacgctatgcatccaactcctcgtgcacaacacaacgcgagtctgtcacagcgtaggagtagttgtgcatccacagaggtgccggcacctggtctctcggtcgcaccactagctgcagtggaccacatagagggcgtagcacagtgtatcctactggctagggtccaaccaactttcgctcccgaagtcgctgagggcatggctttcaaaccctcggttatagataaggtccacaacgcagacttgctagctgggtatgccaaggtgtccatcgatacagtaaaggacacctggtcagtctatccgctgcctgtgccccccaatgatgaaatcatgactttgggcgatgcgcgcaagatgttcatacaatggcccaaagaagacatagttgtgaagatgactcctcgtccaagtcaaccgacggagcttacacctcccaagtctaagctatcaattgaggctccccgtggttcggcattgtcagtacctcattctcctagtggagctgctatggacttggcagatatagctcaaagcttggctccaattaagaccacaagaaaggccgatagttccccaccacttgtcaagggccagaagcgtcaacgcggcaaggggaagatcggggagttggcaccggtgccaaaaaggggcaaggctgctacatcgatgtcggtgagcaaagcgggaaaggtcgtgagggcgccagcccaatttgaactaggcatgccattggtggaggacaatgtgttagccgtgatgggctttgatgacctcttcgacttgttcaggatccggaagttggacactggacttctaaaatgctactccttgcacaaggagggtaaggacgaactctatcatgacaccaagtttgcatgtgcacaacagatcggagatcagtgtggtttccacgtgtgccacaacatgtcaacacttctaagagaggtgaaagatttcgacactgaggttgttgctaatggtgaataa

SEQ ID NO: 91772 - DNA, 453 bp, Oryza sativa
  Clone ID: PAT_MRT4530_90314C.1
atggcgccgtgcatgcattgtcctggccggctcgctgccccgcctgccatcttcaggcgagaggagcatggcagtgcatcagtgtactaccgcgatggaattgaccactcacgtgcacgcactccccagtcgccgctctgcccgtactacgtctccgcgcgccccgcgcttgctgcttgctgctggagccaggaacgcctgagcaccgcgcggcaggagcaaaaccgtgcgtgtcctatccccttcccaacccgaaccacgacgacgagctgggagtgcctgcgtgtgcatgtcgcccatcggcacagcacgctggggatacagcagcgaccaaagctaacaatactaccgcaaatattggagatttgcctctacttggactcggacccggacaccagcacagtccaggacaccagcacagtccaggagtacgccaagacgtacaggggatga

SEQ ID NO: 91773 - DNA, 285 bp, Oryza sativa
  unsure (1)..(285): unsure at all n locations
  Clone ID: PAT_MRT4530_90315C.1
ggtacaacttcaccanggggcagactgtggtgttgtccncaaagatnacacaactnaanccnaaggtanaggttncnnnnggtgatncaatgnncnantnattttgtgtgcttncattcagacanccngtcccgttnagnacatatgctttnatttcagtggnaatgcttgnacaaaaaaanatnacncttnttgtacttccttgggcttnatgcncatctttnagttnattttcgncncaaaaaaaaaaaaaaaaaaaaaaaaaaaaaaaaaaaaaaaaaaaaa

SEQ ID NO: 91774 - DNA, 5718 bp, Oryza sativa
  Clone ID: PAT_MRT4530_90316C.1
atggagaaatggttcacatttccggctgaagcaaaggataggctcaagcggaaggcatttcaaaagatgggcaaagcttggaagaattgcaagtctaagctctttaccgagtttgtcaacctgcccggcaatcatacgccgttcgatgaataccctcaaataaccaaagcggtgtgggaggaattctgctctctcaagaacacccaagagtttagggaatcaagcgaggcacatcgcctactgcaacagcggaatgagcacccgcattggctgggtaccgtagggtacatcggcaaggaggtaatatgggcccatgaagatgcagccgctgcagcagcgaatgtccctgccccgttttcagacatccctgaacaaagagcgcgcaactgggcgcgggcaaagggtaaggtcaacccggacggctctgtcacatttgagaacaaaagtgatgccgtcgtctatcaggaactgttgggcttggttgctgaacaagcttcacaaagcgaggttgagtccgcgccgaagaggcgcgaagatgacatcctcacaaaggcgctcggaagcaaagaacatcctggccggactcggggaattggtagcgatgtgccctggaagcatggactccctcagtacagctcccaatacaggaaacggaaagtctccaaggaagagagggacgctcgtttgaaggccgaacttaaggttgaggtcattcaagaactagaagctagcatgaatgcaagggtggaagaaagggttaataaggtcctcgccgacatgaatataccccgagtcacaacacctgctgtgcatccaactcctcgtgcacaacacgacgcgagtccgtcacagcataggagtagttgtgcatccacagagggcgcagcacagtgtgtcctactagcgagagtccacccaactttcgctcctgaagtcgctgagggcatggctttcaagccctcggttacagacaaggtccatggcgcagacctgctagctgggtatgccaagcttacacctcccaagtctaagctatcaattgaggctccccgtggaccggcattgtcagtacctcactctcctggtggagctgatatggacttagcagatatagctcaaaacttggctccaataaagaccacaagaaagaccgatagcttcccaccacttgtcaaaggcaagaagcgtgaacgtggcaaggggaaggtcggggagttggcgctggagccaaaaaggggcaaggctgtgacgtcgatgccggtgagcaaagcggggaaggtcgtgagggcgccagcccaatttgagctaggcatgccattggtggaggacaatgtgttagccgtgatgggtattgcttgccgagagctacataagcaatacatggagctaagcaatgccaagcggaaaatgagggagtcatccatagttggacatcacgaccaccagccgttcctatcgtcgcctgcctatatagctataggctttgatgacctcttcgaccttttcaggatccggaagttggacactggtcttctaaaatgctacaccttgttgtgttggatcgagagtcgtcgccttggtaatcaggttgggttccttgatccatccatggtgaacgaggttaatttacaacagagcttcactgaggtggttgactatgtcaaccggtgtttatgggcccatcaagacaaggagtacatcatgtgcgcacacaaccaagagcgacagtggattctcctagtcatcgtacctaagtggagtagggttacctaccttaactccaataagtccaaagattatgatttcagtgaaatcaccaatgccttaaatatggcttggggcccatatgtggaaaagggtggtaggcacaaggagggcaaggacgaactttatcatgacaccaagtttgcatgcgcacaacagatcggagaccaatgtggtttccacgcgtgccacaacatgtcaacacttctaagagaggtgaaagatttcgaccctgaggttgttgctaatggcgaaaaagctcatttcaatacctacattgctattcaaaacgttgtggaggtcgatgacattattgctttaatccatttgagggcatggctagcaaatcctgaggctagccaatatttagcatttatttttttttctggaattaactcatcagtgacgggtcggaacaaaaatccatcaaagagacccaagcaaaatgtcatcggcaccaagtggatctttcgcaacaagcaagatgaacatggggtggttgtaaggaacaaagcccggttattccaaatggatgtcaagagtgcctttctcaatggacctatctcggagttagtctatgtggagcaaccaccggggttcaaggatccaaagttgccaaaccatgtgtacaagctccacaaggcgctctacgggctcaaacaagcccctagagcttggtatgaatgtctccgagattttcttttgaaaaatggttttgaaattggaaaggcggatactactctcttcactaaaaaatttaagagtgatttattcatttgccaaatttatgtcgatgacataatatttggttctactaatgcctctttttgtgaagaatttagtagtatcatgactaagaggttcgagatgtctatgatgggcgagttgaccttcttcctcgggctacaagtgaagcaagcacaagagggcaccttcatctcgcaaagcaagtacgtgaaagacatactcaagaagtttgggatggaggatgccaaacctatcaagacgcccatgcctactaatggccacctagacttcgacgataatggtaaatgtgcggaccaaaaggtatatagctccatgataggatctttgctttacttatgtgcatctcgtcccgatatcatgattagtgtttgcatgtgtgctcgctttcaagcggagcctaaagagtgccatttgattgccgtcaagagaattctaagatatttagttcatactcctaatcttggcttgtggtatcctaagggttgtgactttgagcttttgggctattccgattcggattatgccgggtgtaaggttgatagaaaaagcacaaccgggacttgccaatttcttgggcggtcccttgtttcttggtcctccaagaagcaaaattccattgcattatccaccgccgaagccgaatatgtcgccgccggttcttgttgtgcccaactcctttggatgaaaaaaactctaaaagactttggctacaacttcaccaagatcccactcctatgtgacaatgagagtgccatcaaaatagccaataatcccgttcaacactctcgaaccaaacacatagacattcgccaccacttcttgagagatcatgagactaaaggagacatatgccttacccatatgagaaccgaaagccaattagccgacattttcaccaagcctttagatgagaaaggattttgcgagcttaggattttgcaggccggaagttccggtgttcttggcctggaacttccggtctctgtccagccagccagtaaccttgattctgctactgtttcatttaaccattgcactccaaccttgttgattcttgttgcagtggtcattatgcctcgtgagaagagacagaagctttctcaagatgttcctgctgactcgagccccctggttcgtggtcctagggggagattgggcaaagaaaaagttggagatttttacagtgggagtcagattccgatccattccaggagggctggtagcattgtcattcgtgatgcaccccgctctccctctccagctgcatctgagtcagatgatggtggcaatgaggatgagcctggatctgaaagcaatcctttgaggctgtacaagacaagggctgttgatcctgatcctaaacgcacaagagtgaactatctgaagaatctactcaagtgtggaaaggacagaatggttagtcctgatactctgccagctgactctcaggatgacagattcaggaccttggtgcagtattcctggaatgaggaagtgattggacagttctactccactactttctttggcaccaccaagaaggggattgattttgtgaagtggaccattcaggggcagcagtatagggtttctatggcacagtttgctgcagctttggggttagatgatgatgacctgagtcgtccacatatctttgtagaggatgctctgtcaccgaccagcactacctttatgtatgagaaggatgctcccaaggattgtttggggactactcgagggttgcgtccatattatagagtgttgtactctatcttcaggtggtctttactccccaaagtaggagatgctacagctcttccagacaagttatcaccagaacaaaagaaggagtatgaactgatgatgaagagcgctcaggagcagttcatggaatcgtttgcagcaacccgacaaggaaaagttatccaaaagtacaaggtgaaggtggttgctgccgatgaagttggaacaagttcatcccaaggtggtaaaggtactacagatggctcgggcgataaaggtgatgggcttcaagatggtgtggttgaagatcttggtgaagatggtactgaagtgcgggaggaacctcctagtgcttgtcaatacactaacaataagatcaaatttgtcattgatggcacgatagctgagcatcagaacatggggccagtctacctaccaggtggtgtcttcccaaactacaggaatttggtgataggaaatcagcagcatgcttccaatgcaccatcagtccagccgacggcaacagtttatgctccagcaccggttgcaccttcgtcagctcaaaggcaggtggttaatcctcgtctcttgtctagagaccagccgcaacatgttgggcagaacatcaatcggctgactcaggagcagactgctacaatgttcccaacaactcagccgattgtcgagccagtacaatcagcattcacacggttttcttcattgccctgcaattctgttcaaggttgggtcgacttggagaaacaattccatagttacttctacaacgggacccatcagatgaagctctctgatttaacggcggttaggcagaggcatgatgaaactgtgcaagattacatacagaggttcagagatatgaggaacaagtgttacagcttgtctttgacagattcccagttaaccgatctcgcgttccagggtttgatagctccgatcaaggagaaattttcatcgcaggagtttgaaagtttgaccatgcatgagcaaagaaaggaagagaggtatgacattgatattactacagctgataaaatttttgacttgctacttcgggagaagcagatacaacttcttgctagccacataataccatcggctgaagagctagggaaaaggaagtattgcaagtggcataattctgattcccactctaccaatgattgtaaagtctttaggcagcagatccaaacggctattgaaggaggaaagatcaagtttgatgattctaaaaagccgatgaaggtggagagacttccttttctcgtcaacatggtgcacacagctggcagagcagctgatggaggaaaaactcgaagttctcagttgaattcagccaagatcatcaataaatatcagaaaaggcatgataagcaacaggagaagtactacgagcaagatgatggtggttttggtcctcattag

SEQ ID NO: 91775 - DNA, 3630 bp, Oryza sativa
  Clone ID: PAT_MRT4530_90317C.1
atgaagtcgcatgattgccacgttcttatcacacagctgttgcccgttgcaataaggaatacttttcctcctaaggtgcgacacacgatccagcggttgtgttccttcttccatgcaatcggccagaagatcattgatcccgagggactagatgaactacaggctgaacttgtgagaaccctatgtcatcttgagatgtactttcctccaactttctttgacataatggaacatattcccgtgcaccttgtgaggcaaacaaagtgttgtggtccagcattcatgacgcagatgtatccttgcgaaaggtacctggggatccttaagggttatgtacgtaaccgttcacaccccgaggggagtatcatcgagagttacaccaccgaagaggtcatcgatttttgtgtggactacatgtcagaaacatcttcaattggattaccacgatctcatcacgaagggaggcttgatggtgttggtactgttggaagaaagactgttaggttggatcggaaggtgtacgataaagctcatttcacggtactgcagcatatgactgaggtggtgccgtacgttgacgaacaccttgcagttctccgacaggagaacccaggccgatcagagagttgggtcagaaataagcacatgtcttctttcaacgagtggctgaagaaccgaattgccaggttgcagaacctttctagtgaaacacttcagtggttatcacagggtcctgaatggagtgccaccacttggcaaggatatgacataaatggatacacctttcacacggtaaagcaaaacagcaaatgcacagtgcagaacagtgggttacgcatcgaggctgctagtgacggtggttggcgtgatcaatactatggtagagttgagcaaatattggagctagattacttgaagttcaaagtcccgttgtttcgttgtcaatgggtcgatctttgcaatgtaaaagttgacaatgaaggtttcaccactgtcaacttagctaacaacgcgtacaaggatgaaccgttcgttctcgcccaacaagttgttcaagtgttctacatagttgacccgtgctctaactgtgaggccgtcacaggtgcccagaacgctgggcccgtcacaggtggcctcagctgtgacgaacccgctctttgcgcccgtcacagatccggccactctctcactctcactcactctctcgaccgccacctcgaccgccgacgctgctcgccctcgccgcctcgccctctccgccctcctctccaccgtcgccgcctcgccctctccgccgccatctctgccgccctctacgccttcctctccaccgccgcccctcgtcctctccgccgtccatccatcgacttccccgacctccccgaccccgacctccccgacaccgggatccacgatgccgtccacctccacctccacgacgccgggaccccgaccactgccggccctctccgtcgccatctccaccaccactgccgcctcgacctctccaccgccgcccactctgccaccatctccaccaccgccctcgtaatcgccccaggaataacatacgtcgatgtcggacgggacaagtgcaagcccacggcgccgaggactgtcattggaagatggtctaactgctgcgggctggcggcacgtgagaatttcgggatcctccataaagatatcgacaaggtcacaaaagccgagaaagagcgagcttggacggcaatggagaaatggttcacatttccggctaaagcaaaggataggctcaagcggaaggcattccataagatgggcaaagcttggaagaattggaagtcgaagcttttcaccgagtttgtcaacctgcccggcaatcatacgccgttcgatgaataccctcaaataaccgaagcagtgtgggaggaattctgctctctcaagaacacccaagagtttagggaatcaagcgaggcacatcgcctactgcagcagcggaatgagcacccgcatcggctgggcaccgcagggtacatcggcaagaaggcaatatgggcccaagaagatgcagccgctgcagcagcaaatgtccctaccccgttttcagacatccctgaacaaagagctcgcaactgtgcgcgggaagggttgggcttggttgctgaacaagcttcacaaagcgaggttgagtccgcgccgaagaggcgcgaagatgacatcctcacaaaggggctcggaaccaaagaacatcctggccggactaggggaattggtagcgatgtgccctggaagcatggactcccgcagtacagctcccaatacaggaaacggaaagtctccaaggaagaaagggacgctcgtttgaaggccgaacttaaggttgaggtcattcaagaactagaagctagcatgaacgctagggtggaagaaaggtttaacaaggtcctcgccaacatgaatataccccgaggcacaacacctgctgtgcatccaactcctcgtgcacaacacgacgcgagtccgtcacagcataggagtagttgtgcatccacagaggtgccggcccctggtctcccggtcgcaccactagctgcagtggaccacatagagggcgtagcacagtgtgtcctactggcgagggtccacccaactttcgctcccgaagtcgctgagggcatggctttcaagccctcggttacagacaaggtccactgcgcatacctgctagctgggtatgccaaggtgtccaacgatacagtaaaggacacctggtcaggctatccgctgcccgtgccccccaatgatgaaatcatgactttgggcgatgcgcgcaagacgttcatacaatggcccaaagaagacatagttgtgaagatgactcctcgtccaagtcgaccgacggagcttacacctcccaagtctaagctatcaattgaggctccccgtggaccggcattgtcagtacctcattctcctgatggagctaatatggacttggcagatatagctcaaagcttggctctaataaagaccacaagaaaggctgatagctccccgccacttatcaagggccagaagcgtgaacgcggcaaggggaaggtcgggaagttggcaccggagccaaaaaggggcaaggctgtgacgtcgatgccggtgagcaaagcggggaaggtcgtgagggcgccggcccaatttgagctaggcatgctattggtggaggacaatgtgttagccgtgatgggtattgcttgccgagagctacataagcaatacatgaagctaagcaatgccaagcaaaaaatgagggttgggttccttgatccatccatggtgaacgaggttaatttacgacagagcttcactgaggtggttgactatgtcaaccgggttacctaccttaactccaataagtccaaagattatgatttcactgaaatcaccaaggccttaaatatggcttggggcccatatgtggaaaagggtggtaggcacaaggagggcaaggacgaactttatcatgacaccaagttcgcatgcgcacaacagatcgaagaccaatgtggtttccacgtgtgccacaacatgtcaacacttctaagagaggtgaaagatttcgaccctgaggttgttgctaatggcgaataa

SEQ ID NO: 91776 - DNA, 752 bp, Oryza sativa
  unsure (1)..(752): unsure at all n locations
  Clone ID: PAT_MRT4530_90318C.1
gacaattaacaaaacatatatagatatataatagtacgtagtaagtagcacacagactgagtgtagccagcacactgcatgcacccagcacacagggttacacaatctagctacacaacacaggtggtagtacaagtttacaacaatacactctctctagtctctaatacctcgctaattactatagctatagtacttcatctccttgaagaagaaaaaccagtacttcttctaggacgtacggccatccatgaaaaatacatgacgtttaatttacacaaacactgtacaaccatgaacattattacatatttagcatcacatccgatcgatcgaagaactaaactgacgaactaattaaagttgagtagatactgtagataattttcgtactgtggacacacgcattcattcatatagcatagctatcagagatttcagagatgcagcggatgaacacacggacgagacgataatatggagcaaaacagagagcatgagtagagtgtcatcatcagtcttggtccaacccgaacttacgatcgatgtagccgccaacggcgtggaacgccgggccgaanaacccgccgccgccgccgttgcttcctgatccagcgccgccgccgccgccgctctcctcctcctgtcgccctcgctctcgtactgggacgacgagccgtagccgggctgggtgtggtagatgacttcactcctccgcgctgatgtacaccggcgtcgcccggactgcgtcc

SEQ ID NO: 91777 - DNA, 699 bp, Oryza sativa
  Clone ID: PAT_MRT4530_90319C.1
atggctctgtttcttttaaggctgtttgtcgccgcaccgacaccatatgcttgcagattttttatgtgggaaggtcaatatgagcaatttttggccgatggccgtgtaggtctgggacatcagacagaacatgagaagtttaatgttgaagcaatatcgtcgatggggattgagggcttagaattgaagggatttgcagcattgggacggatgctagtgtaccttgcagttgtgcaagctttgttgttgctggaccatggctacaggaaagtatgcaaaggactctgttcagtcctaggaacagaagatgtccaagctgtaaatgatgaagaaaatgatggacctagcactactgatgatcgttcagaggtatcatctgcaagcaagtcaaagaaagccaaaacacaagaaaatgaagatgaggggctgattggtgcattcactagtgttggtgacaagcttgtcgctgctatactaaaggtcggtgagccagacagtaagctgccagaaggtttatttgacacattgaaaaaccttcccagttttcaagagatccacaaactttttattgtgctcatttggtggccaaccctcacattgctagagctttcgatggacttctatttgaaaacaagctacattcggttgctatgttcatcggtgagaagtttcctggatcaatgtagggttgttggatga

SEQ ID NO: 91778 - DNA, 433 bp, Oryza sativa
  Clone ID: PAT_MRT4530_9031C.1
accggctgggagccaatgggggttgcaaacccttgaagctctttttggggagtgcttgctttgcgcaatgcaaacatagggatggaaagaagctggcctgggcgcaactgatgctgtgttgggatgcatggccaatggagtgtttggaggatgcatacaaatgagggtggttgttgagtgttggtgctgcatgcgtgggctggggaccccccaaaaaaatggaaatgcgagcgcagaacaagtggcagtgtgcagtgatgcgttgattgatgtgtgctggactggctggaggagatgacctggcgtggtggtggcaatggccgctggactgatggtgtgttgaatgtttgcctggtgtgctgtggggaaatggctgtgttgaaagtgacatgacccccctgtgatgattgcacaaaaaaaaaaaaaaaaaaaa

SEQ ID NO: 91779 - DNA, 5103 bp, Oryza sativa
  Clone ID: PAT_MRT4530_90320C.1
ttattcgccattagcaacaacctcagggtcgaaatctttcacctctcttagaagtgttgacatgttgtggcacacgtggaaaccatattggtctccgatctgtcgtgcgcatgcaaacttggtgtcatgataaagttcgttcttgccctccttgtgcctaccacccttttccacatatgggccccaagccatatttaaggccttggtgatttcactgaaatcataatctttggacttattggagttaaggtaggtaaccctactccacttaggtacgatgactaggagaatccaatgtcgctcttggttgtgtgtgcacatgatgtactccttgtcttcatgggcccataaacaccggttgacatagtcaaccacctcagtgaagctctgtcgtaaattaacctcattcaccatggatggatcaaggaacccaacctgattaccatggcgacgactctcgatccaacacaacaaggagtagcattttagaagaccagtgtccaacttccggatcctgaaaaggtcaaagaggtcatcaaaacctatagttatataggcaggcgacgataggaacggctggtggtcgtgatgtccaactatggatgactccctcattttccgcttggcattgcttagctccatgtattgcttatgtagctctcggcaagcaatacccatcacagctaacacattgtcctccaccaatggcatgcctagctcaaattgggctggcgccctcacgaccttccccgatttgctcaccggcatcgacgtcgcagccttgcccctttttggctccggcaccaactccccgaccttccccttgccgcgttcacgcttctggcccttgacaagtggtggggagctatcggcctttcttgtggtctttattggagccaagctttgagctatatctgccaagtccatatcagctccaccgggagaatgaggtactgacaatgccggtccacggggagcctcaattgatagcttagacttgggaggtgtaagctccgtcggtcgacttggacgaggagtcatcttcacaactatgtcttctttgggccattgtatgaacgtcttgcgcgcatcgcccaaagtcatgatttcatcatttgagggcacgggcagcggatagcctgaccaggtgttctttactgtatcgatggacaccttggcatacccagctagcagatctgtgccgtggaccttgtctgtaaccgagggcttgaaagccatgccctcagcgacttcaggagcgaaagttgggtggactctcgctagtaggacacactgtgctgcgccctcgatgtggtccactgcagctagtggtgcgatcgggagaccaggggccggcacctctgtggatgcacaactactcctatgctgtgacggactcgtgtcgtgttgtacacgaggagttagttgcacagcaggtgttgtgactcggggtatattcatgtcggcgaggaccttgttaaccctttcttccacccttgcattcatgctagcttctagttcttgaatgacctcaaccttaagttcggccttcaaacgagcgtccctctcttccttggagactttccgtttcctgtattgggagctgtactgagggagtccatgcttccagggcacatcgctaccaatttcccgagttcggccaggatgttctttggttccgagcgcctttgtgaggatgtcatcttcgcgcctcttcggcgcggactcaacctcgctttgtgaagcttgttcagcaaccaagcccaacagttcctgatagacgacggcatcacttttgttctcaaatgtgacagagccatccgggttgaccttaccccttgcccgcgcccagttgcgagctctttgttcagggatgtctgaaaacggggcagggacattcgctgctgcagcggctgcatcttcttgggcccatattgcctccttgccgatgtaccctgcggtgcccagccgatgcgggtgctcattccgctgttgcagtacgcgatgtgcctcgcttgattccctaaactcttgggtggtcttgagagagcagaattcctcccacaccgcttcggttatttgagggtattcatcgaacggcgtatgattgccgggcgggttgacaaactcggtgaagagcttcgacttccaattcttccaagctttgcccatcttttggaatgccttccgcttgagcctatcctttgcttcggttggaaatgtgaaccatttctccattgccgtccaagctcgctctttctcggcttctgtgaccttcccgatatctttatggaggatcccgaagttctcacgtgctgctagcccgcagcagttagaccatcttccaatgacagtcctgggcgccgtgggcttgcacttgtcccgcccgacatcgacgtatgttgttcctgcggcaattttggagaagcggcgtacttggagacggcggcgcaggccgtagtcgtcctggatcctggtggcggcggcggagaggcagtggcgaagaggtcgaggcggtcggcggtggtcggggatcccggcgtcggggaggtcagggtcggggaggtcggggaagtcgatggacggacggcggagaggacgaccggcggcgagggcggcggtggaggcagcggcggagagggcggagatggcggcagagagggcagcagagatggcggcggagagggaggaggagaggttgaggcggcgacggcggagatggcggtggagaggacggcggagatggcggcagagagggcagcggagatggcggcggagagggcggaggagaggttgaggcggcgacggtggagatggcggtggagaggacggcggcggtcgagagagtgagtgaggaggcggcggtggagaaggaggcggcgaggcggcggtcgagagagtgagtgagtgagagtgggtgccggatctgtgacgggcgccaaccgtggagccgtcacaggtaagaccacctgtgacgggcccaacactctgggccgtcacaggtgaggtcacctgtgacggccctatgccgtggacgtgctggttgtaatcatcctcgtctgcaatgttgtccaatccaacaattctccttttcccttcacgaacaacatgtagtttcttgttacacgggtcaactatgtagaacacttgaacaacttgtttggcgagaacgaacggttcatccttgtacgcgttgttagccaagttgacagtggtgaaaccttcattgtcaacttttacattgcgaagatcgacccatcgacaacgaaacaacgggactttgaacttcaagtaatctagctccaatattttctcaactttaccatagtattgatcacgacgaccaccgtcactagcagcctcgatgcgtaacccactgttctgcactgtgcatttgctgtcttgctttaccgtgtgaaaggtgtatccatttatgtcatatccttgccaggtggtggcactccattcaggaccccaactctctgatcggcctgggttctcttgtcggataactgcaaggtgttcgtcaacgtacggcaccacctcagtcatatgctgtagtaccgtgaaatgagctttatcgtacaccttccgatccaacctaatagtctttcttccaacagtaccaacaccgtcaagcctcccttcgtgatgagatcgtggtaatccaattgaagatgtttctgacatgtagtccacataaaattcgatggcctcttcggtggtgtaactctcgatgatactcccctcggggtgtgaacggttccgtacataacccttaaggatccctaggtacctttcgcaaggatacatctgcgtcatgaatgctggaccacagcactttgtttgcctcacaaggtgcaccggaagatgttccattatgtcaaagaaagttggaggaaagtacatctcaagatgacatagggttctcacaagttctgcctgtagttcatctagtccctcgggatcaatgatcttctggccaattgcatggaagaaggaacacaaccgctggatcgtgtgtcgcaccttaggaggcaaaatattccttattgcaacgggcaacagctgtgtgataagaacgtggcaatcatgcgacttcattccaatcaacttaagatcttgcagtgaaacgagtctactgattcttgatgagtaaccagatggaacctttataccactcaaacatgttagcaaatcaatcttctcttctttcgagagagtgtagcaggctggaggaaggtaaaccctgccggattccgtggttatgggatgtagctccgaccgaacacccatatcttccagatctcgtcgggcgttgagaccatcctttgtagtacctgggttaagcagtaatcccattaaactctcgcatacattcttctcgacatgcatcaaatctatgcagtggcgaacttcaagatcaagcttagcttgttccttgttcgcaaacattctcttcatgcgctccgcaattgggagataccacaccacctttgctgggcctcccctctttgacttacttccttcaccttcactctttgctcgtttgtatcttgatgccccacagatagggcagacatccaagtcagcgtattccttgtaatacaaaatgcagtcgttcggacatgcatgaattcttctgacctccaggcccaacggacataatacttgcttcgcttcatatgtcgtctgaggtaaattgttcccctctggcaacagatcctttaacagctcaaggagttctgtaaaactcttgtccgaccagccattactagccttaagcttcatgagttccaacacgcatgacaacttgctgtgcttcgacttgcatccatcatacaacggcatctggcaatcttccaccaacttactaaacttctcataatctatgtcgttgtcctctgcgtcttcaatgtcatgcaacattgtagatagacattgagtgtccaaatctatggtctctccacctaaaggagaaggtacgaacatgccttctcgagctgcggcggtgttctctacatcctgatccaacacttcttcagctgcgacatcaggcgcctcttgctctccatgcttggtccagcaggtatatttcttcat

SEQ ID NO: 91780 - DNA, 2385 bp, Oryza sativa
  Clone ID: PAT_MRT4530_90321C.1
atgtcaacgcccggcgcaaacccgccctccccaacacctgcgaggatccaggaagaagcaaacccagccacagaggcagttgccgaaggtcatcccgcgacaacggcggtccaacaacccgaaattcatgccgaagcaaaggataggctcaagcggaaggcattccaaaagatgggcaaagcttggaagaattggaagtcgaagctcttcaccgagtttgtcaacccgcccggcaatcatacgccgttcgatgaataccctcaaataaccgaagcggtttgggaggaattctgctctctcaagaccacccaagagtttagggaatcaagcgaggcacatcgcctactgcaacagcggaatgagcacccgcatcggctaggcaccgcagggtacatcggcaaggaggcaatatgggcccaagaagatgcagccgctgcagcagcgaatgtccctaccccgttttcagacatccctgaacaaagagctcgcaactgggcgcgggcaaggggtaaggtcaacccggacggctctgtcacatttgagaacaaaagtgatgccgtcgtctatcaggaactgttgggcttggttactgaacaagcttcacaaagcgaggttgagtccgcgccgaagaggcgcaaagatgacatcctcacaaaggcgctcggaaccaaagaacatcctggccgaacttggggaattggtagcgatgtgccctggaagcatggactccctcagtacagatcccaatacaggaaacggaaagtctccaaggaagagagggacgctcgtttgaaggacgaacttaaggttgaggtcattcaagaactagaagctagcatgaatgcaagggtggaagaaagggttaacaaggtcctcgccgacatgaatataccccgagtcacaacacctgctgtgcaaccaactcctcgtgtacaacacgacgcgagtccgtcacagcataggagtagttgtgcatccacagaggtgccggcccctggtctcccgatcgcaccactagctgcagtggaccacatcgagggcgcagcacagtgtgtcctactagcgagagtccacccaactttcgctcctgaagtcgctgagggcatggctttcaagccctcggttacagacaaggtccacggcgtagacctgctagctgggtatgccaaggtgtccatcgatacagtaaaggacacctggtcaggctatccgctgcccgtgcccccaaatgatgaaatcatgactttgggcgatgcacgcaagacgttcatacaatggcccaaagaagacatagttgtgaagatgactcctcgtccaagtcgaccgacggagcttacacctcccaagtctaagctatcaattgaggctccccgtggaccggcattgtcagtacctcattctcccggtggagctgatatggacttggcagatatagctcaaagcttggctccaataaagaccacaagaaaggctgatagctccccaccacttgtcaagggccagaagcgtgaacgcggcaaggggaaggtcggggagttggcgccggagccaaaaaggggcaaggctgcgacgtcgatgccggtgagcaaatcggggaaggtcgtgagggcgccagcccaatttgagctaggcatgccattggtggaggacaatgtgttagctgtgatgggtattgcttgccgagagctacataagcaatacatggagctaagcaatgccaagcggaaaatgagggagtcatccatagttggacatcacgaccaccagccgttcctatcgtcgcctgcctatataactataggctttgatgacctcttcgaccttttcaggatccgaaagttggacactggtcttctaaaatgctactccttgttgtgttggatcgagagtcgtcgccatggtaatcaggttggattccttgatccatccatggtgaatgaggttaatttacgacagagcttcactgaggtggttgactatgtcaaccggtgtttatgggcccatcaagacaaggagtacatcatgcgacattggattctcctagtcatcgtacctaagtggagtcgggttacctaccttaactccaataagtccaaagattatgatttcagtgaaatcaccaaggccttaaatatggcttggggcccatatgtggaaaagggtggtaggcacaaggagggcaagaatgaactttatcatgacaccaagtttgcatgcgcacaacagatcggagaccaatgtggttttcacgtgtgccacaacatgtcaacacttctaagagaggttgtgcaggtcgatgacattatggctttaatccatttgagggcatggctagcaaatcctgaggctagccaatatttagcatttatttttttctggaattaa

SEQ ID NO: 91781 - DNA, 5214 bp, Oryza sativa
  Clone ID: PAT_MRT4530_90322C.1
atgccgctagggtttggaaggatgcgggggttcgagggcaaggatacactacgccagatcctcacacctctgacgggatacctggactgtaagaatgaacagatgatcgaagacaaggatgaagtgcatgctcatttgataatgaatggattcatgaagaaatatacctgctggaccaagcatggagagcaagaggcgcctgatgtcgcagctgaagaagtgttggatcaggatgtagagaacaccgccgcagctcgagaaggcatgttcgtaccttctcctttaggtggagagaccatagatttggacactcaatgtctatctacaatgttgcatgacattgaagacgcagaggacaacgacagagattatgagaagtttagtaagttggtggaagattgccagatgccgttgtatgatggatgcaagtcgaagcacagcaagttgtcatgcgtgttagaactcatgaagcttaaggctagtaatggctggtcggacaagagttttacagaactccttgagctgttaaaggatctgttgccagaggggaacaatttacctcagacgacatatgaagcgaagcaagtattatgtccgttgggcctggaggtcagaagaattcatgcatgtccgaacgactgcattttgtattacaaggaatacgctgacttggatgtctgccctatctgtggggcatcaagatacaaacgagcaaagagtgaaggtgaaggaagtaagtcaaagaggggaggcccagcaaaggtggtgtggtatctcccaattgcggagcgcatgaagagaatgtttgcgaacaaggaacaagctaagcttgtgcgctggcatgccgaagaacggaaagtcgataggacagaggtgcacaacttagtgatgggaataaccaacgagtttggaaaaaagaggaaagttggaaagcgaaaagagaagagcacatcgaaggaaaaaacagaggagcatgtggaaaaacaaaagacaaaagagaggagcatgtggaaaaagaagtcaatattttggagactaccatactggaaggatcttgaagttcgccactgcatagatttgatgcatgtcgagaagaatgtatgcgagagtttaatgggattactgcttaacccaggtactacaaaggatggtctcaacgcccgacgagatctggaagatatgggtgttcggtcggagctacatcccataaccacggaatccggcagggtttaccttcctccagcctgctacactctctcgaaagaagagaagattgatttgctaacatgtttgagtggtataaaggttccatctggttactcatcaagaatcagtaggctcgtttcactgcaagatcttaagttggttggaatgaagtcgcatgattgccacgttcttatcacacagctgttgcccattgcaataaggaatattttgcctcctaaggtgcgacacacgatccagcggttgtgttccttcttccatgcaatcggccagaagatcattgatcccgagggactagatgaactacaggcagaacttgtgagaaccctatgtcatcttgagatgtactttcctccaactttctttgacataatggaacatcttccggtgcaccttgtgaggcaaacaaagtgctgtggtccagcattcatgacgcagatgtatccttgcgaaaggtacctggggatccttaagggttatgtacggaaccgttcacaccccgaggggagtatcatcgagagttacaccaccgaagaggccatcgaattttgtgtggactacatgtcagaaacatcttcaattggattaccacgatctcatcacgaagggaggcttgacggtgttggtactgttggaagaaagactattaggttggatcggaaggtgtacgataaagctcatttcacggtactacagcatatgactgaggtggtgccgtacgttgacgaacaccttgcagttatccgacaagagaatccaggccgatcagagagttgggtcaggaataagcacatgtcttctttcaacaagtggctgaagaaccgaattgccaggttgcagaacttgtctagtgaaacacttcagtggttgtcacagggtcctgaatggagtgccaccacctggcaaggatatgacataaatggatacacctttcacacggtaaagcaagacagcaaatgcacagtgcagaacagtgggttacgcatcgaggctgctagtgacggtggtcgtcgtgatcaatactatggtaaagttgagcaaatattggagctagattacttgaagttcaaagtcccgttgtttcgttgtcggtgggtcgatcttcgcaatgtaaaagttgacaatgaaggtttcaccactgtcaacttggctaacaacgcgtacaaggatgaaccgttcgttctcgccaaacaagttgttcaagtgttctacatagttgacccgtgtaacaagaaactacatgttgttcgtgaagggaaaaggagaattgttggattggacaaaattgcagacgaggatgattacaaccagcacgtccacggcataggtcaagaaatacctctagggccgtcacaggtgacctcacctgtgacggcccagagtgttgggcccgtcacaggtggtcttacctgtgacggctccacggttggcgcccatcacagatccggcacccactctcactcactcactctctcgaccgccgcctcgcctctctctctctcgatccgccaccctcctcgccaccgcctcgacctctccaccgccctcctcgccgccgcctcctcactcactctctcgaccgccgccgtcctctccaccgccatctccaccgtcgccgcctcaacctctcctccgccctctccgccgccatctccgctgccctctctgccgccatctccgccgtcctctccaccgccatctccaccgtcgccgcctcaacctctcctccgccatctccgctgccctctctgccgccatctccgccgtcctctccaccgccatctccaccgtcgccgcctcaacctctcctcctccctctccgccgccatctccgctgccctctctgccgccatctccgccctctccgccgccgcctccaccgccgccctcgccgccggtcgtcctctccgccgtccgtccatcgacttccccgacctccccgacgccgggatccccgaccaccgccgaccgcctcgacctcttcgccactgcctctccgccaccgccaccaggatccaggacgactacggcctgcgccgccgtctccaagtacaccgcttctccaaaattgccgcaggaacaacatacgtcgatgtcgggcgggacaagtgcaagcccacggcgcccaggactgtcattggaagatggtctaactgctgcgggatagcggcacgtgagaacttcgggatcctccataaagatatcgggaaggtcacagaagccgagaaagagcgagcttggacggcaatggagaaatggttcacatttccagccgaagcaaaggataggctcaagcggaaggcattccaaaagatgggcaaagcttggaagaattggaagtcgaagctcttcaccgagtttgtcaacccgcccggcaatcatacgccgttcgatgaataccctcaaataaccgaagcggtgtgggaggaattctgctctctcaagaccacccaagagtttagggaatcaagcgaggcacatcgcgtactgcaacagcggaatgagcacccgcatcggctgggcaccgcagggtacatcggcaaggaggcaatatgggcccaagaagatgcagccgccgcagcagcgaatgtccttgccccgttttcagacatccctgaacaaagagctcgcaactgggcgcgggcaaggggtaagttgggcttggttgctgaacaagcttcacaaagcgaggttgagtccgcgccgaagaggcgcgaagatgacatcctcacaaaggcgctcggaaccaaagaacatcctggccgaactcggggaattggtagcgatgccgaacttaaggttgaggtcattcaagaactagaagctagcatgaatgcaagggtggaagaaagggttaacaagcataggagtagttgtgcatccacagaggtgccggcccctggtctcccgatcgcaccactagctgcagtggaccacatcgagggcgcagcacagtgtgtcctactagcgagagtccacccaactttcgctcctgaagtcgctgagggcatggctttcaagccctcggttacagacaaggtccacggcgcagacctgctagctgggtatgccaaggtgtccatcgatacagtaaaggacacctggtcaggctatccgctgcctgtgcccccaaatgatgaaatcatgactttgggcgatgcgcgcaagacgttcatacaatggcccaaagaagacatagttgtgaagatgactccttgtccaagtcgaccgacggagcttacacctcccaagtctaagctatcaattgaggctccccgtggaccggcattgtcagtacctcattctcccggtggagctgatatggacttggcagatatagctcaaagcttggctccaataaagaccacaagaaaggccgatagctccccaccacttgtcaagggccagaagcgtgaacgcggcaaggggaaggtcggggagttggcgccggagccaaaaaggggcaaggctgcgacgttgatgccggtgagcaaatcggggaaggtcgtgagggcgccagcccaatttgagctaggcatgccattggtggaggacaatgtgttagctgtgatgggtattgcttgccgagagctacatacgcaatacatggagctaagcaatgccaagcggaaaatgagggagtcatccatagttggacatcacgaccaccagccgttcctatcgtcgcctgcctatataactataggctttgatgacctcttcgaccttttcaggatccggaagttggacactggtcttctaaaatgctactcctttgaaatcaccaaggccttaaatatggcttggggcccatatgtggaaaagggtggtaggcacaaggagggcaagaacgaactttatcatgacaccaagtttgcatgcgcacaacagatcggagaccaatgtggtttccacgtgtgccacaacatgtcaacacttctaagagaggtgaaagatttcgaccctgaggttgttgctaatggcgaataa

SEQ ID NO: 91782 - DNA, 262 bp, Oryza sativa
  unsure (1)..(262): unsure at all n locations
  Clone ID: PAT_MRT4530_90323C.1
atgataaagtccgattgactataatacacctttttactgggcatgctcaacgtatacacgacagggaatnannccgacaatagttcggctccatcacatcacacaaatttgcgcgcngcttcacttttagcncgctatgctatcagctgcttaatttattctttacgtactttgttaatttattaatnntnaggacacacacagaccacactaatatgggtgggccttattgcaaactaactaaggttaactacttccaccc

SEQ ID NO: 91783 - DNA, 285 bp, Oryza sativa
  Clone ID: PAT_MRT4530_90324C.1
atgggggtcgctggggagtccatgcctctggttgtagagggggtgattatgatccaggaaaggtgcactgtgtggtacacctctggccagagtaaaactattcgaatagccgtgtccgcggttatggtttgtgtacctcggctgattcctggacgaggattttatgcacaaattagttcggaaattactagtgaatttctgggcgtgacaacacaccagtggggttttggttactctagggtgaacaaggcaataatagcaataacaataataataaagtcataa

SEQ ID NO: 91784 - DNA, 591 bp, Oryza sativa
  Clone ID: PAT_MRT4530_90325C.1
atggacccgaaggcgacaacattgacatcgagggcatggcgctgctatagccctgcttctggggcgcgcggtggcagccgtcggaggaggaggcggccagccggcacgacgagccgccgatgctcgcgcgcggacaggctggacacgctccggccgtacgtgacgagcgccgccgccggcaatgacgccctgcggatcgaccctcccgccgaggatgtgtcgttgcttccatgctgccgcgcgctggtcgccgtcgctgagaaggacatactgagtgaacgcggccgccagtacaccgcccagcttcgcggcggcggtggtgggcgcgaggtgacacggaggagcttcatctccatggcagccgccgccgcatttttgcatcatttccccggcgatggcaacactccggcggcatcatcaggtgttcccacacatcagctcgtcctgtcaggggtgctttggcgtgaggcggtacatcctgcgccacaggaagacgcagcaggccccgacccctgcgcacgaccgtgcagcgccaccccagctgaggtgccgcactggcccgcgcctcgctgcgccggcgccctcggttga

SEQ ID NO: 91785 - DNA, 180 bp, Oryza sativa
  Clone ID: PAT_MRT4530_90326C.1
atgcagatcagggccgacgatgctgatcaactacaaaagatagtaaatctgagttcagctcacaagagagacgaaagtgttgtctctgatctcgccggacacgaactcgaggaggaagactaccctgttgtcgactacgagtcagaccttcagaccgccatgtcgacaacagttagatag

SEQ ID NO: 91786 - DNA, 347 bp, Oryza sativa
  Clone ID: PAT_MRT4530_90327C.1
ataataaacaataatgattgatactacttaaaggggttacttgtctgtttgatttaatacaaaacacgtgggggagccctggataacccgggccgggaccacaaagcggacaaacttctacaatagggaggcaacacctaatcgggaacttatcatgaccataaattaatacctggggaaaacatgatgccatgcgtgctactacagaccattggaatagaaattgtaagcttgaacatctctggacccaaatgaggcagcaaacatatattaattggcctggccctcatagaagctttcgaacatggaaacaagcctgggcaggtagaacatcaattaggcaacaa

SEQ ID NO: 91787 - DNA, 365 bp, Oryza sativa
  unsure (1)..(365): unsure at all n locations
  Clone ID: PAT_MRT4530_90328C.1
actatcatccnnttttattccttaagggcangaactttaataccaagcttttgcaccaaaaatttttcatttcccaattactaacattctttttcccaagctaagcccattctgaagcgttttttcaacaggggttttttttttacgacttcccccccaccatttcccacccccttttttttatttccatttgccccaccttttgtaattccagctcctgtgttcaccccctatttacacacaattcatcgcaggtcccaacccttttctttaattataaagtttaaaggcttaaaaacaattgacatcatcttccttgcttaaaaaaattttttccctttaaatttccacaaaattttctcccc

SEQ ID NO: 91788 - DNA, 150 bp, Oryza sativa
  unsure (1)..(150): unsure at all n locations
  Clone ID: PAT_MRT4530_90329C.1
tgggtatccgcnnatgtaagcccattccgcaacggttaantntcccnatacangtangtcagcanccatacnttngcacaancngcctattaagtggaactnggtctaacagtggtagagtccatgatctnngatctcccagcatcagga

SEQ ID NO: 91789 - DNA, 688 bp, Oryza sativa
  Clone ID: PAT_MRT4530_9032C.1
tcatctggaggcgggaatcgacgcgctggttggggcgtcggcgacatcgatctggaggcgggattcgacgatgatcggagtgagggtcgaggtggagagacgggaatcgacagcgacgcgagggggcgccggtggcgtcgatgtgaaggcgtgatggggcatcgatggcgtcaatctgaaggcgggagtcgacggcggctcgatggcagagcgtgggcggcgtcgcacgcgatggcggggcgtcggaatcaacggcagcatgggagagaggaggaggtggtggcgacgattagggttcgccagggggagtgcggcggcgcttgtggtggcagaggggaggcgacggagcgcgtacttgtagctggcgatgtcctccgtgatcatctccaggtccctggccgccacggccatcgacattgcccgccggtgccgccccgcctgcatcctcgccggctgctgctccgacgacgcgtccgccgccgccgcgggcttccgctgctcggcgccgccgccgccgatgacgtccgccgccacgtcctcgaggctggcgaagttctccggcagcacgaacacgctctgcgacgccctcctctggtgcctcccggctctctgcgacatcttgaagcttagcaacacacggcagcagcaacaacgaagaagctcttaagctgcgcgacttggttcgctc

SEQ ID NO: 91790 - DNA, 289 bp, Oryza sativa
  Clone ID: PAT_MRT4530_90330C.1
gcaataaaaaatcccaattttttgaaacgttcctgggggctggtgggaacatttgagcataaaaattcctggaactttccagccatacaagggggggggcctttgggggggcattttcacagaccatacttacaattgccacaactttgatagggattttggaaactaaaagttagataaggggtctgccccttacattttaacccttaaggggaatttttagattttcaccgcttagcccaaaatgggaagattttcaccaaggggggcctcataaattgatttgccg

SEQ ID NO: 91791 - DNA, 417 bp, Oryza sativa
  Clone ID: PAT_MRT4530_90331C.1
atgattgttgcacgagctccggcgcgtcatgtagtgtggatggcagaggacgcgatcgcaagcaacgagctccggcttggccaccggtgacgagctcccgacgtggcatggttgtggatggcggaggatgcaacctccgacgacgagctccggcgcatggatgtggatggtggaggatacagcctccggtgacgagctccggcgtgaccgctggcgatgagctccgacgcggcgcggcacgtggacagcagaggacgtggctatcagcgacgagcctggcgtggcgcgtggcggcagaggacgctaccgccagcaacaagcctggtgtggggcgtggtagcgaaggacacggccgccgacaatgacctccgacgtgaggcatggacgacggaggacgcggccgccggcgatgacctc

SEQ ID NO: 91792 - DNA, 369 bp, Oryza sativa
  Clone ID: PAT_MRT4530_90332C.1
atggcgtcggcggcggcggccgccgcgtcgatgtcggtcgtcggccatggagagagagagatcgagatcgagagagagagaggcagcggcggctctcacccaagagatgcgacggcggcgtctgcggcggaggcggcgaggaccgccaagcgacggcgagagacgacagcggcgtcggcgcggggttgccctaggcacggtggcggcgaaggagaagccgagatggaaaaacgtctaagtgttggtggagaagacgagagtgcaccgagaatatatataccccagatctttagtcccgatctttactcccggatgttctcaccaaccgggactaaagatcttttcccgctatttccaaattctttttaa

SEQ ID NO: 91793 - DNA, 387 bp, Oryza sativa
  Clone ID: PAT_MRT4530_90333C.1
atgtcggaggtcatcgccggcggccgcgtcctccgtcgtccatgcctcacgtcggagcgtcctctgccgccacgcgccacgccaggctcgtcgctgatagccacgtcctctgctgtccacgtgccgcgccgcgtcggagctcatcgccggaggttgcgtcctccgccgtccatagccatgccatgccgggagctcatcgccagcggtcacgccggagctcgtcaccggaggctgtatcctccaccatccacatccatgcgccggagctcgtcgtcggaggttgcatcctccgccatccacaaccatgccacgtcgggagctcgtcaccggtggccaagccggagctcgttgcttgcgatcgcgtcctctgccatccacactacatga

SEQ ID NO: 91794 - DNA, 2631 bp, Oryza sativa
  Clone ID: PAT_MRT4530_90334C.1
atggttatcccctccttccccctgcctcgcctccacctctccctccaactccacaaccccagcgccatcccgagtccccgccgccggccgcgccccgccccgacgagcgagacgctccgccgccgcctcctccgcaagggcgtctccccgacccccaaaatcctccacgcgctccgcaagaaggaggccctcaagtccctccgccgcgccaggaaggacaccgccgccgccgccgcggccgcggaggcggccagcaatgcgctgcccagggaggaggacggcgccgcggtggtgggcgaagacgacgaggcccgcttccgcgcggccgtcgccgagtaccgcgcgctcatgggccggccgtggcacggcggcgcctcggcacccccgcgtggggccctccgaggcgaaggcgagggcctcgacggcctccgcgagatgctcgcggcgaggagggccggcaagttcgagtggctactggaggatgatgacgtagaggagggtgaagaggaagcggcggtggggaggcgggggcgtgctggcgtcggctggaattcggattttcgggatgaggagaggaggattgagtcgctggtgaggaggctgaacgaagatgatctaagtatgcgtgattggaggcttactagattgatgaaaaaagctgacctaatatataatgaagataatctgctacaaatactggaagggcttgaggcaagaggaaattggaggcaggctttatctgttactgagtgggtgtacaatgagaacatctacaagcatcgaaaaagcaggttcgtgtatacaaaattactatcaatccttggaaaagcatggaggccaactgaagcacttcgagttttcaccatcatgcggagtgatgctcaaatataccctgatatggctgcataccatagtattgctgttacacttggtcgagctggccttctaaacgagctaatcaagattatagagtatatgagacagaagccttcgaaaagggtaatgaagatgcgtcgcaaagattgggatccttccttggagccagatgttctgatttataactcggtccttaatgcatgcgttctatcacagcagtggaaaggggtattttgggtgtttcagcaaatgagaaggaatagtttgatacctacaggagcaacatttgggttagcgatggaggtcatgcttaaagccaagaagtatgactttgtccaaaagttctttcagaagatgcaaaaaagtggggtacctccaagagcaataacttataaagttctagtaagagcctactgggaacaagggaaagtaaatgaagcagttgaagcagttaaggacatggaacaaaggggaattgttggagctgcaagtgtttattatgaactagcttgctgtctctgcaataaaggaaggtggagagatgctttgtcacaggttggggagcgaaaacagcttccgctcactaaaccgctagagttcacatttactggcatgatcttagcctcttttgatggtggatatatctcagaatgcatctcaatatttgagtcaatggaagggcactgtgcaccaaatattggtacaataaatgtcatgataaaagtgtatggacgctgtgatatgtttgtgaaagcaagggacttatttgagaccatcaaagttaatttgcctagttcaaatcattcatcacataaagcagacgcatatacatacagctctatgcttgaagcagctgcatctgcccaacagtgggaatactttgaaaatgtgtatagagagatgactctctctcagtaccacctagatcaaagcaaatattcatggatgctcatcaaggcatccaaagctggaaagtcatatttgctggaacatgcacttgattcaatacttgaaagaggagagacccccaatgtacagttatttagtgagatgatatgccaaactattgctcaaagaaactatgcaaagacacttcatctaataaatattatggctgaggcttcaactgatgtcagtgaacttcagtggagcaagctacttgagcaaaatatgcatcgattcagcgtgaatgctttgaaagatcttttaaagtacctcagtaccagtgatatcatcaaatcggatcccgaactttgttttgtaagtgcactgcaatctcaatgtgggacaacttttgtgaacgacacttcttttgtggctgatggtacatatactggacagtctcaactctctctgccagagaatataaccaagtcttcaaatagcaatctagatcagctttcttgcatgaattcgctaaacacaaatgtatttcccgatgagaaagttagcagtgagttctctgattacattatgaatactccacaatctgatgctaatgctggcttgagcgaggacattgttataggttcacattttgagagtgaacagaaagaacaacatgatctcggctggttggggacaggagtatctgcagttgacgaagtacttgattcaatgaatttgtatggtgatggttcatgcggagagatgccgtcagcatcagaaattcttgaattatgggagcaggataggataaatgggacgttttctgctaaaacggctgaaccaccatgtgaggataggtgatcttgc

SEQ ID NO: 91795 - DNA, 409 bp, Oryza sativa
  Clone ID: PAT_MRT4530_90335C.1
cccgtcttgatgccacgcgtccgtgcaaatcctctgtactgtactgctagtcccccatggccggatcgccatggattgattccccctgtttatgatgttgatataattgtactattcctatggctatataagttgtaaaggatccaattcgatgctgcaaaaaaaaaaaaaaaaaaaaaaaaaaaaaaaaaaaaaaaaaaaaaaaaaaaaaaaaaaaaaaaaaaataaaaaaaaaaaaaaaaaaaaaaaaaaaaaaaaaaaataaaataaaaaataaaaaattaaaagggggcggcctttttaagggacccaggtttacttccgcgtgcttgcaacgttaaagttttttattggggccgccaaaattaaattcacgggccgttgttttaaaacgtttggtttggaaaaa

SEQ ID NO: 91796 - DNA, 2553 bp, Oryza sativa
  Clone ID: PAT_MRT4530_90336C.1
atgggtggatcggccgtgaattgcgccgtgcagaacgtgtccctggacacgctcttcctcatcgtcatccagggcgccgccgtcatcgtgctcggcaagttcatccacctctccctccggcgccacaacctgcccagcgccatctcccagatcgtcgccggtgtcgccgtcggcagcctgggcctgcacgacatggtcgtccacgtcgaggtccagaacgtggaggacacctacgggtggtacgtctccgaggcccgcatcttctacatgttctacgtcggcctcgacgccgacctcgccgcgctctggaacgacgcgcaccgctgcaccgtcgtcacgtacgccagcgtcgccacctgcctgctcctcgccgccttcgtctccggcggcatctacggcagcatgatgcacaccccggtcaggtcccccgagctgctctccgccgtgctcatgctcacgctggccaacaccgcctccgtcgacgtctccaggatggccgccgagctcgacctcacggccacgggcggcggccggctcgccgtctccacggcgatcgccaccaacatcatctgcatcgtcggggagggggtgttctcgtgcatgaagctggcgtcgagcaggacgccggggtacagcgcgtcggagcggctggggatgggcgtgctcgcgctgctcaaggtgggcgtcaccatggcgctgctccggccggtggcagcgtacatgaaccggcgcaacgccgggcgccaccgcatcgggaactgggagctggtgctgctgctcgtcgccgtctccttcgtcggcaacttcccggagcacgccgggttcgacggggtgccggcgagcctcctgctggggctggcgttcccgagggaagggcccgtggcgaggagcgtcatggacgccatcgcctacccgctccacgccctggcgctgcccttctacttcggcgccatgggcatgaggatcaacttcggcgccatgtccggcgccatcgtcgtgcccgccgtcctcctcacgctgctcggcctcttcggcaagtgcgctggcaccatggccgccgccaggtacctcaagatgccgctcgccgacgccatccgcctcggcgtcctgctcaacatcaagggccacgtcaacatgatcgacatgagcttcgctagctcggaaggggtaacgtgtttgcacccgacgtctagcttagccaccacaatggcgccactaatttggccgcgcgtgcagatatgggcggagcaggcgctcatggcgatggtcgtcggcagcatcataagcaccgtcgtcgccgggccggtgttcgccgtgctgttccggaaggagaaggaggcgtacgcgtgcagcgaccaggcgctcgaacacatggcgccggacaaggagttgcgcatgctcgcctgcgtgcacggcgcgcgcggcgcgccggcgatgctcagcctcctcgagctcctggcgacgacgccccgcgcgcagcccaccatccacgtcctccacctgttcgacgccagccgcaagcacgtcggcccgaagcgctaccaccagcgggtccaggacagcgacaagcacattgaccgccgcatcgacgacgccacgcaggtgaactgggccgtcgacgtgttcacctccgtcaccggcctcgccatccgccagttcgacgtcggcgaccgcggcgccgccatgaagaacgcgaagaacatccaccgccgcttggaggaagtccgcgccgggctcctgttgttgccgtaccacaaggagcagcgctacgacggcaagatggtctgccggcgagacgaccgctgcgagctcaaccgcaaggtgctcgagctcgccccgtgcaccgtcggcgtcttcgccgaccgcccgttctggaggggcggcgccagcttccggctgccgaccaagatatcaacgagcgaggagacgacggcggcgaggaaccaaggcgaccagaaggcggggacccagatcgccgccgtcttcctcggcggccccgacgaccgggaggcggtggcgttcgcgtgccgcctcgccaagaacgacggcgccatcaggctgaccgtcatccgcctcgtgctaggcgtcgccaccaacgatgaccaccgcatcccgacgacgagcgccgccaatcacatcggcatctacgacgacgacgacgaggacggcggcgaggaggaggtgctgtccgtggtggttcaagacgacgaccccgacgagcggtgcgtgtcggagctgcggcgcgagtacgtggcgaaggagcgcgcggagtacgtggagagggcggtgagcggggcggtggacgtggcggcggcgttgcgcgcgacggcgggggcgttcgcgctcgtggtggtggggcgcggcgggcggcagccgccggagctggtggtggggctcgaggggtgggtccagatgatcgagtacccggaggtgggcccggtcggggagatgctcgcgtcggaggagtcgctggagatgggctccgtgctcgtcgtgcagcagaggacggcgccgccgccgccgtttcatctcaacattccgccggcgatctga

SEQ ID NO: 91797 - DNA, 1141 bp, Oryza sativa
  Clone ID: PAT_MRT4530_90337C.1
cctccttctcctcctctccgctttcgctttgaccaaacccaaaccacgcgcagcgctcccatcgcccagggcaacgccacgaaacctagccccaccgactcgcctcgcctcgcctcggaatcccccaacaccagagcgcggcggcgaccatggagccctcccccgtcggcggcgggtccgcctccgggtcggtggagcggtggcgcgcggaggcgtcgcgggcgttccagcactacctggatcgggcggcgccgcacacggcggggcggtgggccggcacgctcgtggccgcggcggtgtacgcgctgcgggtctactacgtgcaggggttctacgtcgtcacctacggcctcggcatctacctcctcaacctcctcatcgggttcctctcccccatggtcgacccggagctcgaggcgctcgacgccggcccggccctccccacccgcggctccgacgagttcaagcccttcatccgccgcctccccgagttcaagttctggtatgccatcacaaaagccttttgtgttgcttttctgatgacattcttctctgtattcgacgttcctgtcttctggccaatacttctctgctattgggttgtgctttttgtcctgacaatgaagcggcaaattgtgcatatgataaagtacaagtatgtcccattcagcataggaaagcagaaatatggtggaaagaaaggcccgggagccagtacgtctaaagactgagacctggattgcagatccctgtgttgctcttgaggcaacatgctggcatggtggttttttggtaccagctactgacagtggatgtacacctccattcgctagtcgagaggagcttaaagagactttgcatcggttgatgaccatttgtgttgtatatcagattcttctgtgcaatgactcgttcatttatagttcttgtgctgtgcggctcttgtgtggacgagtaatgaacctattgagtcaggtgcaatgcaaatcaaaactattggggcttgacatggatttgtactggaattcaacatgctcgtttccagacggggcccttaattactcgcatgttagtaacacatttgttattctatttagagtcctatgaaggttgtctgttttgtgtaaaaaaaaaaaaaaaa

SEQ ID NO: 91798 - DNA, 1080 bp, Oryza sativa
  Clone ID: PAT_MRT4530_90338C.1
atggcagcatgtttacaccaaatttacatgtcatatctgatacaattgggaccacaaaagcgccaccccttagaatgtgggctttttgggctttcagccttactcggtacagcgtcgggctatgccgggctcagattgaacaagcctactcggaacttatttgaccagggcatcacaatttacaaaattaattcgatcaaccttcgaatttcgcttgtgtccttaacggtaactccaattcgccggtcggccgcggccgtggtcatggctgacctcgacgcgaacagcggtagtggcatcgccgtcgccgtcgccgctgccagcagccacagtcacgtcatcgacatgcctcaactggacgcgagcagccgtaccgtcgccgccgcctccgccaccgaccacagccgtgccgtcgagacgaccaggatccgaacctcctgcagcgccggcgacgacgacaaatgtagcaccggctccgacgacattccctcctgcgcggtgtgcatggagcccctcgagtgggtggcggtcggcccgtgcggccaccgcgtcgtgtgccccgcgtgcgccgcccgcgtccgctccgcacccaagcccgaccacctgtgctgcatctgcaggacgctctgccccaccgtcctcgtcaccaaggcggcggcggcggccgacggtgagctcaccttctccgagatgccggctgccacccaagacggacaggtcggcgagtactggtactgcgccgccatgtcggcctacttcgacgacgagcggcagtacgaggcgacggccaaggcggaggcggcggccgcggccgggtgcctgaaacagcggccggcgggtgcggacgacgacgacggtgaacgggaccaacgatacgggacggcacagttcttgaagtatagcttcttcgcggcgctgttcggcgtgtgcatcggcttcgtcttcgccgtggatgccccaggttggggcggcagggtgggcatcgttgcaggatccgcagctctctcggttgcagtaggaagtgtgctgtggttcttgaggaagcacggctacttctgcgggcagcaacagcaggattga

SEQ ID NO: 91799 - DNA, 218 bp, Oryza sativa
  Clone ID: PAT_MRT4530_90339C.1
acctagcgatctcctctctcgtctcgtcagtcgcttcccggcactttccttaaaggactattcttgactttacgatgaccggactgcctggttgtagactgacgaccagtatattcggtctgcgcggttctagtcaattcaacagacgcagtaaaaataaagaagcaagaagcaagctgggtcaaataaaaaaaaaagcgcttcgctgctagggaacc

SEQ ID NO: 91800 - DNA, 517 bp, Oryza sativa
  Clone ID: PAT_MRT4530_9033C.1
cccacgcgtccgggactttcagttctccataaaattcaacattaaatttaccgtaagagagataatttgactagattgtttagttgtgttcttcctgtcatagtttcagcttataaaatcattttatcatttactaattcgtcatgtgtatccctaaaaggctggttagtaggaaagcacttaaatgagaaagtttcgtaagaaaatatgctgcataccgatgttcgtatgatattttattcgtaatatgaacaatcttcttgtacgttatacactgcattcatgtaaatgttaagtcagataattcttgtttcaccatttagtctcaatggtttcgtgtggaaatactaatggcgagtgagtttggggcatcagtgctagacatcttctttggatgctccttgggttcctgaccactccataagtgtcatattgtatccagcacccttaagagctttccccttttgttactttctgtcttcctctcgcagccaagtgagccagaatgcctcttccc

SEQ ID NO: 91801 - DNA, 626 bp, Oryza sativa
  Clone ID: PAT_MRT4530_90340C.1
gatccagaagcagcaaaaaaaagagaaaaaaatcagagaaaaaaaaatgaggagcccgaggagccgtgcgctagagcgcgacgccggcggcgtcgccgtcgagcacgtcgagctcatcccggggatgcccgacgacgtcgccgtcgactgcctggcgcgcgtcccgcacggggctcaccgggcgatgcggcgcgtgtgccgcgggtggaggagcgcggcggcgacgcccgcgttcgccatggcgcgcgccgaggcgggcgccaacgaggatttggtttacctgctccagttcgcgaaccccgcggcggccgcggcggccgcggaggaggcgaaggaggacggcgacgcgccggcgaactccccggcgtacggggtggcggtgtacaacgtgacgacgggggagtggaggcgggagaaggcggcgccgccggtgcccatgttcgcgcagtgcgccgcggtggggacgcgcctggcggtgctcggcgggtgggaccccgagacgttcgagcccgtggcggacgtccacgtgctcgacgccttcaccggcgtgtggtggagcgcgccgccgatgcggtcggcgaggtccttcttcgcgtgcgcggatgccggtgggaggatctacgtgg

SEQ ID NO: 91802 - DNA, 4065 bp, Oryza sativa
  Clone ID: PAT_MRT4530_90341C.1
atgtggaaaaagaagtcaatattttggagactaccatactggaaggatcttgaagttcgccactacatagatttgatgcatgtcgagaagaatgtatgcgagagtttaatgggattactgcttaacccaggtactaaaaaggatggtctcaacgcccgacgagatctggaagaaatgggtgttcgctcggaactacatcccataaccacggaatccggcagggtttaccttcctccagcctgctacactctctcgaaagaagagaagattgatttgctaacatgtttgagtggtataaaggttccatctggttactcatcaagaatcagtaggctcgtttcactgcaagatcttaagttggtaggaatgaagtcgcatgattgccacgttcttatcagacagctgttgcccgttgcactaaggaatattttgcctcctaaggtgcgacacacgatccagcggttgtgttccttcttccatgcaatcggccagaagatcattgatcccgagggactagatgaactacaggcagaacttgtgagaaccctatgtcatcttgagatgtactttcctccaactttctttgacataatggaacatcttcccgtgcaccttgtgaggcaaacaaagtgctgtggtccagcatttatgacgcagatgtatccttgcgaaaggtacctggggatccttaagggttatgtacggaaccgttcacaccccgaggggagtatcatcgagagttacaccaccgaagaggtcatcgatttttgtgtggactataggtcagaaacttcttcaattggattaccacgatctcatcacgaagggaggcttgatggtgttggtactgttggaagaaagactgttaggttggatcggaaggtgtacgataaagctcatttcacgatcaatccagatccggcacccactctcactcactcactgtctcgaccgccgactcgcctctctcgacctctccgccgccctctacgccctcctctccaccgccgcctcgacctctccaccaccgccctcgccgccgccaaatccgccgccctctccgccatctccgccgccctctctgcctccatctccgccctctacgccgccctctccaccgccgcctcgacctctccaccgccctctccaccgccgccgtctcactcactctctcgaccgccgccgtccatctccaccgccatctccaccgtcgccgcctcgacctctccgccgccatctccaccgccctctctgtcgccatctccgccctctacgccgccctctccaccgccgcctcgacctctccaccgccctcctcgctgctgccctctccaccgctgccgcctcactaactctctcgacggccgccgggacctcctctcagtctccacgccaggaccgtcgtcgccgccaccgggatctcctctccgccgcctccttctctcgaccgggacctccacagtgagcccactccccccgcctccccttatttactattgttcgccgattaaccccctcttctcctcctcagtgccgccgtgccaagaagccgccgccgcgccgccgtgccgagaagccgtgcgtcgtgcgccggccgggactcgtcatcgccgccgtgcgccgcctcctctgctcgtcgtctcctctccagaccatgacaacgcccggcgcaaatccaccctccccaacacctgcgaggatccaggaagaagcaaacccagccacggagacacttgcctaagaattgccgcaggaacaacatacatcgatgtcgggcgggacaagtgcaagcccacggcgcccaggactgtcattggaagatggtctaactgctgcgggctggcggcacgtgagaacttcgggatcctccataaagatatcggcaaggtcacagaagccgagaaagagcgagcttggacggcaatggagaaatggttcacatttccggctgaagcaaaggataggctcaagcggaaggcattccagaagatgggtaaagcttggaagaatcggaagtcgaagctcttcaccgagtttgtcaacccgcccggcaatcatacgccgttcgatgaataccctcaaataaccgagacggtgtgggaggaattctgctctctcaagaacacccaagagtttagggaatcaagcgaggcacatcgcctactgcaacagcggaatgagcacccacatcggctgggcaccgtagggtacatcggcaaggaggcaatatgggcccaagaagatgcagccgctgcagcagcgaatgtccctgctccgttttcagacatccctaaacaaagagctcgcaactgggcgcgggcaaggggtaaggtcaacccggacggctctgtcacatttgagaacaaaagtgatgccgtcgtctatcaggaactgttgggcttggttgctgaacaagcttcacaaagcgaggttgagtccgagccgaagaggcgcgaagatgacatcttcacaaaggcgctcggaaccaaagaacatcctggccggactaggggaattggtagcgatgtgccctggaagcatggactcccgcagtacagctcccaatacaggaaatggaaagtctccaaggaagagagggacgctcgtttgaaggccgaacttaaggttgaggtcatccaagaactagaagctagcatgaacgctaaggtggaagaaagggttaacaaggtcctcgccgacatgaatataccccgaggcacaacacctgttgtgcatccaactcctcgtgcacaacacgacgcgagtccgtcacagcataggagtagttgtgcatccatagaggtgctggcccctggtctcccgatcgcaccactagctgcagtggaccacatagagggcgtagcacagtgtgtcctactggcgagggtccacccaactttcactcccgaagtcgctgagggcatggctttcaagccctcggttacagacaaggtccatggcgcagacctgctagctgggtatgccaaggtgttcatcgatacagtaaaggacacctggtcaggctatctactgcccgtgccccccaatgatgaaatcatgactttgggcgatacgcgcaagacgttcatacaatggcccaaagaagacatagttgtgaagatgactcctcgtccaagtcgaccgacggagcttacacctcccaagtctaagctatcaattgaggctccccgtggaccggcattgtcagtacctcattctcctggtggagctgatatggacttggcagatatagctcaaagctttgctccaataaagaccacaagaaaggccgatagctccccaccacttgtcaaatgccagaagcgtgaacgcggcaaggggaaggtcggggagttggcgccggagccaaaaaggggcaaggctgcgacgttgatgccggtgagcaaagcggggaaggtcgtgagggcgctagcccaatttgagctaggcatgccattggtggaggacaatgtgttagccgtgatgggtattgcttgccgagagctacataagcaatacatggagctaagcaatgccaagcggaaaatgagggagtcatccatagttggacatcacgaccaccagccgttcctatcgtcgcctgcctatataactataggctttgatgacctcttcgaccttttcaggatacagaagttggacactggtcttctaaaatgctactccttgttgtgttggatcgagagtcgtcgccttggtaatcaggttgggttccttgatccatccatggtgaacgaggttaatttacgacagagcttcactgaggtggttgactatgtcaaccgggttacctaccttaactccaataagtccaaagattatgatttcactgaaatcaccaaggccttaaatatggcttggggcccatatgtggaaaagggtggtaggcacaaggagggcaaggacgaactttaccatgacaccaagttcgcatgcgcacaacagatcggagaccaatgtggtttccacgtgtgccacaacatgtcaacacttctaagagaggtgaaagatttcgaccctaaggttgttgctaatggcgaataa

SEQ ID NO: 91803 - DNA, 1197 bp, Oryza sativa
  Clone ID: PAT_MRT4530_90342C.1
atggaattctttgcaaatcattttatcatcctctcccctcctgctttcaacttgagtagctctaagacattggaacttgaagacgccaatgaggtctacttatggagtggaaataataacaatgaagggaacccaactcttgctcaagttctggctcaacagactcagttaatgaatatgatgatacagcagatgcagaaccagctcaaccaagggaacaacaatgctccaccgccgcagaacaagttagctgattttcttcgtgtgaggccacctacattttctagcactaccaacccagtggaagcaggtgattggctgcacgctattgagaagaagttggaactgctccagtgcacggatcaggagaaagtcgttttcgcttcacatcagttgcaaggacctgcatcagaatggtgggatcatttccggatgaacagagcagaaggacaaccaatcacttgggcggagttcactgaagcattcaagaagacacacatacctgcaggtgttgttgctttgaagaagcgtgagttccgggcacttaagcaaaaggatcgtaccgtgacggaatatcttcatgagttcaatcgtctggcacgctatgctccagaagatgtgtgtactgacgaggaaaggcaagagaagttcttggaaggtctgaaggatgaactgtcagttacgttgatctctcatgactatgttgattttcagcagctggttgacaaagcaattcgacttgaagacaagaagaacaggatggataaccgtaaaaggaaaatgactgtattccaggaggcacaaggtagtagccagaggcagtgtatcaagccactccaaattggtgaatcttcttccgctggtcaaggacagtcgcagcagttgaacatcggtggtgagatcaaatcagagactaatgaaagcaaagaagttaacatcgagcaagctaatcagccggtgccagttcagcagggtcagtttcaagagaataacagtagtggaagggagcagcaggtatgtttcaactgttacaagccaggccactttgcaagagagtgtccgaagccgaagcatcagcagccgcaaggtcaggtcaacaacattgttgtcacaggagccaatgcagtgccagttgcgtcttcaagagtcgtgtcttcaagtgttacagctcagccaccagtttcaaagcggcagtag

SEQ ID NO: 91804 - DNA, 1728 bp, Oryza sativa
  Clone ID: PAT_MRT4530_90343C.1
atgttgcatgacattgaagatgcagaggacaacgacagagattttgagaagtttagtaagttggtggaagattgtcagatgccgttgtatgatggatgcaagtcgaagcatagcaagttgtcatgcgtgttggaactcatgaagcttaaggctaataatggctggtcggacaagagttttacagaacttcttgaggtgttaaaggatctgttgccagaggggaacaatttaccgcagacgacatatgaagcgaagcaagtattatgtccgttgggcctggagcggaatgagcacccgcatcggctgggcaccgcagggtacatcggcaaggaggcaatatgggcccaagaagatgcagccgctgcagcagcgaatgtccctgccccgttttcagacatccctgaacaaagagctcgcaactgggcgcgggcaaggggtaaggtcaacccggacggctctgtcacatttgagaacaaaagtgatgccgtcgtcaatcaggaactgttgggcttgattgctgaacaagcttcacaaagcgaggttgagtccgcgccgaggaggcgcgaagatgacatcctcacaaaggcgctcggaaccaaagaacatcctggccgaactcggggaattggtagcgatgccgaacttaaggttgaggtcattcaagaactagaagctagcatgaatgcaagggtggaagaaagggttaacaaggtcctcgccgacatgaatataccccgagtcacaacacctgctgtgcaaccaactcctcgtgcacaacacgacgcgagtccgtcacagcataggagtagttgtgcatccacagaggtgccggcccctggtctcccgatcgcaccactagctgcagtggatcacatcgagggtgcagcacagtgtgtcatactagcgagagtccacccaacttttgctcctaaagtcgctgagggcatggctttcaagccctcggttacagacaaggtccacggcgcagacctgctagctaggtatgccaaggtgtccatcgatacagtaaaggacacctggtcaggctatccgctgcccgtgcccccaaatgatgaactcatgactttgggcgatgcgcgcaagacgttcatacaatggcccaaagaagacatagttgtgaagatgactcctcgtccaagtcgaccgacggagcttacacctcccaagtctaagctatcaattgaggctccccgtggaccggcattgtcagtacctcattctcccggtggagctgatatggacttggcagatatagctcaaagcttggctccaataaagaccacaagaaaggccgatagctccccaccacttgtcaagggccagaagcgtgaacgcggcaaggggaaggtcggggagttggcgccggagccaaaaaggggcaaggctgcgacgtcgatgccggtgagcaaagcggggaaggtcgtgagggcgccagcccaatttgagctaggcatgccattggtggaggacaatgttgggttccttgatccatccatggtgaacgaggttaatttacgacagagcttcactgaggtggttgactatgtcaaccgggccgtcagagatgagttacctgtgacggcctcatcattgctgccttcctccttcctccctctcagcatctcctccacacagtggcgggccgacggctccttcgcgcagtggtgggtcagtggcttgccgacggcgcagtggctcgagatctag

SEQ ID NO: 91805 - DNA, 459 bp, Oryza sativa
  Clone ID: PAT_MRT4530_90344C.1
atggttttgaaggtcgtgctcatgacaattaagcatggttcattacggggtgccagactgaaaagtggcgagaagtccgtgggggtcgctggggagtccatgcctctggttattgagggggtgattatgatccaggaatggtgcactgtggaagctgagaaatatgggaactatggtcttacaagtgagctttgtcgtatgacgtatgatcttggatatgaggttccaccaaagtacactaaagtatctagtcatgttggagaccaattgtattgcaagacaattgttactcttgttttcgacaaggaagatcttccccagctatcattcaatgccaaggctaattgtttcttgtatgctcgtgaaggtgtcgcttcgcaagttgtttcttctatgctcgtgaaggagtcgcttatgaagcttcgtgtcgtctctatcatcatttcaaggagcgtctag

SEQ ID NO: 91806 - DNA, 1863 bp, Oryza sativa
  Clone ID: PAT_MRT4530_90345C.1
tcatgatgacctcatcaatggccggaccaagatggcgacctcgccggagattggatggtcggctgcgactttggaggacatgaacacgtagaggacgacgagacgaacccaacggtactcaccctcgaaccaaacgacgaacgacgacggccggcgacgaggtctagcggcggcacggcttcggtcgacggcggcgacggggctccggtgaccggcgacagcggggagagagcggccgggcttctccacacctcggcgcaccttacggcggtgacggcgaccggcggcgacgacggaggcgacggcacgacgcggatggagctcggccggcgacgacggcggggtggagcacgtggcggcggcgactgattgagtagcttgctcatcattgtcttcattgcttgcattagtctctgagttgatctcaccactgatgcccaactgttgcgactgcccttgactagcggaagaaggttcaccaatttggagtggcttgatacgctgcctctggctactatcctgtgcctcctggaaaacaatccttcctctcttacgattgtccatcctgttcttcttgtcttccagtcgaattgctttatcaaccaactcctgaaaatcctcgtagtcatgagagatcaacataactgacagttcatcctttaagccttccaagaacttctcctgcctttcctcgtcagtacgcacatcttctgcttgtcacgcccggaaattcactagtaatttccgaacttatttgtgcataaaatcctcgtccaggaatcagccgaggcccaaccatcctgaataaccatacccggctgtacagatctaatctccaaaccaggagctaagcaaattattatcaggtataacatccataattatttcttcttgaatacttccggcgcactcgcgaaccttcgcaacgacggaaacgacaagctaacacgcaaaacgaggaaaaagactaataaaaaccaaataaacaatacataaaaagatcacctaaatgatcaaccgaaaccggcgaacggaaccggcggctctgaactaaaggacgactcaacacggacgaacgaacgaagcacggggaacacctcgttcgaacgaacgagcgaacgactcaacaacggctgtggctaaaccggtcggctagacacgattccgacggcaaaccgcagccgcacggcgtgcagcagctacgacacagcgacgacgacacacacggagacgatgatgacgctagggccaaacaagattagattagatcggattaaggccctagggaaaacctcacaggtgaacggcaaaggcgacgacgaacggcaacggaagatagccggcgacgagcttcaaagggcggcgaggtactgtccacggaggcgatgactttccggcgatgtgcggcgacaacggaggggtggccgggcttcacttcgcagctgcgaatccaatggagtcgatggcgacagagggcgatgacgggaggagcagcagctgcggctggagacacagcgaccacggcggcgctctggttcacgacgacgggcaacctccggtgggatttggcgcaaaacaaccggtggccgaggtagctctcacccttgcgaagccgagggaggcgacggcactgaccggcgatggccggggcgacggcgcacggcggctggagcggcgccggcgacgacggcggggtggagcacgtggcggcggcgctacgaggcacgggagaccacgggagagggggcaaacgaaagaggaggactagggggtcctttatatagccatgggagctcgggtccgggcccaaaacgacgggaaaaactcgggaaagtttagatcttcgccggaaaaaggaaaggt

SEQ ID NO: 91807 - DNA, 4300 bp, Oryza sativa
  Clone ID: PAT_MRT4530_90346C.1
atggtgaacactcgcgccagtggaagtggaaacaataacaatgaagggaacccaactcttgctcaaaacaagttagctgattttcttcgtgtgaggccacctaccttttctagcactaccaacccagtggaagcaggcgattggctacacgctattgagaagaagttggaactgctccagtgcacggatcaggagaaagttgttttcgcttcacatcagttgcaaggacctgcatcagaatggtgggatcatttccgaatgaacagagcagaaggacaaccaatcacttgggcggacttcacggaagcattcaagaagacacacatacctacaggagttgtttctttgaagaagcgtgagttcagggcattgaagcaaaaggatcaaaccgtggcagagtatcttcatgagttcaatcgtctggcacgttatgctccagaagatgtgcgtactgacgaggaaaggcaggagaagttcttggaaggtttaaaggatgaactgtcagttacgttgatctctcatgactatgctgattttcagcagttggttgacaaagcaattcgacttgaagacaagaagaacaggatggataaccgtaaaaggaaaatgactgttttccaggaggcacaaggtagtagccagaggcagcgtatcaagcaactccaaattggtgaatcttcttctgctggtcaaggacagtcgcaacagttgaatatcggtggtgagatcaaaacagagactaatgaaagcaatgaagttaacatcgagcaagctaatcagctggtgccagttcagcaggatcagtctcaagagaataacagtagtggacgggagcagcaggtatgtttcaactgttacaagccaggccactttgcaagagagtgtccgaagccgaagcatcagcggccgcaaggtcaggtcaacaacatgtcgtgtgctgcaatcaagatgattgctaaccatgtctaccacgcggacaagattgctaacaacattgtcgtcacaggagccaatgcagtgccagttgcgtcttcaagagttgtgtcttcaagtgttacaactcagccaccagtttcaaagcagcagtagttttctttaaagccttagaatgattatcggagttatggaataagatagactgcagtttgcctattccctttttctttctagctgttccgaatctcgggacgagattctttgtaaggggggtagtttgtcacatcctgattttcgtttcaggatttataaattatttaataaattaatagtagaatttatattaagtgttctttaatttacaagtgaagttaaatgtgggaaataaaatatcctaaatataaagcatggatggatttaatttttgttaaattctccatggttaattatactctctgaaattttctcggatttttcagagctcaattcctaaatgatacaaagaacagttcagtaattatttgatcattaatgatctaattatttttgttaagtgcttttcttgtttaaaatccttaaattataaattgttgtttaaaaggaataattagaaatgattttaaaagcctggaagagaagatctaattttaatttgctaaatctcaatataaaattgggctagataaaattttgttaaatactttgcttaattctataattcttagatttttctgggatttatttgagctaaggaagtatttttaataaatggaattgcatttcatgaataatttaaattgaaaaaggttttaaaagtcttcttttggctttgggccgaaagccggcccaaaacctctctttctctctccctccccggcccagtcggcccagtcggcccagtccgccgagccgctgctctcctctctctctcagccgctgacaggtgggccccacttgtcagggtcgtcgtcttcgtcgcgccgctgccgcccgaaacactagccgagccactccgccgccgctttccaattcggccgcgtctttccttctccggtcgaattgatagaggggaaatgatcctcgggatctcctctaccttttctcttttggaaacatcggctaatttgttttggaagttcgtggaatcgagttcgattcggatcggcctctttcctccgaaccccgaagtttccatctcgtcgccggccgccgtgggcctttgccgccgcctcctagtcgctttaaaaggctccccggtgtctcctctacccgtcgccaccttcgccttcgcctctcgtcgtccgtagcgccctagcgccatgagacctagcgccgccgtcgccgctgtcgctccagccgtgcgccgccgccgtttcagccgtcgtcgttgctcgggaaggtcgtcatcgtggtcgtcaagtcgccgccgtcctcgtccgctccttcgccgccgccgaagaccgccggagccccgtcgccgccgttgacccgatctccgccgccgcttcttcctcatcgccggcgccgtccgttgcccttccgccgttgttttggtcaccggtgagttcgccgcgtcgccctctacccgttggtgccctccgttcgcgtcgccgcgccgtcgttcgccggcgagcatgcgcgcccgagtcgccgccggtggtgacgtcatcgctgacgtcatcgtccccgtctcccgtgagccggtcgtggaccgatcgatctcggccgtccgttttggatagggttgatctcggccgttcgtttccgtgaactgaacttattcctttgttatggccaatttgcattgattattttattccttgataccttgggttattataacttgactagttgagctatatatattggatcagctagatattagatatgattgcttacccatgcttagaaacattagcacacaattgggataactaatgtttcactatcacttatggttatatttaatggtagctcacgatggtcaatcgtgattggttaattaattacttgccaactaaaacttgataatggtgggttgtgagcacatggttttgagagtcgtgctcatgacaattaaggaccggttcacgagctactattgtgaaacattaaccgtgccaaccacaagccagcgtgggcaacggctttatcttttgtataacatgattcattgcggagcaccagactgagaagtggcggagataagcccacgggggtcgctggggagtccatgccttgttttataagggggtgattatgatccaggaatggtgcactgtggtgagttgtgttgtgcaaagggtattgtcacagcctctattcgggtactttccagtatcgcgacacatggtagacatgatgttgaggccgtgtcttgtgggtacagtggtacacctctggccagagtaaaactattcgaatagccgtgcccgcggttatgggcgagttgagcaatgtttttcgtgattagtctcacacctctcacaataattatggatgttataactggtaataatttgcttagctcctggtttggaatggaaaattcctggtttggagattagatctgtacagccgggtatggttgttcaggatggtcgggcctgtgcagcatgggtgtgctgttcagtgttgattaaaatttctgattaactactctactgttttatttctcttaaatattttgctaaacgctgcttttgcaaatgagcctatattatgccatcctttggtatccttgtgcacttgcatatttgctgtgtggcttgctgagtatgtcatatgctcaccttgcaataatcaatcaacctcagttgaagaaaaaggatccagaaggagaagacgtttggcttataccccagttgagctgcctgtgggagtggagccggagcttcgctagattttattttccgctgcagttttcttcatggtgaggactacgcctcttcgaggagttcatcgttttcacaccaaaggaaaattggcaccgcgttttgtgggaccttataagattgtcagtagaagaggagaggttgcttatcagttggagttacctcaatctttggcaggagtccataatgtgttccatgtgtcgcaattgaagaagtgtttaagggtacctaccgaagaagctaatcttgaacagatagaagtccaagaggatctgacctatgttgagaaaccaatccgtattttggaaatagatgagagaagaaccagaaatcgagttatccgtttttgcaaagtccagtggagtaatcactcggaagaagaatcaacttgggaacgagaagatgaattgaagtcagctcatccgcatctgttcgccagttcttccgaatctcaaggacgagattctgtt

SEQ ID NO: 91808 - DNA, 4571 bp, Oryza sativa
  Clone ID: PAT_MRT4530_90347C.1
ccccttttattattgccgaattcatgtttcgacagttggcgcgccaggtaggggttgcgtcgagtttcctatcaacgagcgcgatggaatcaatttcatgagtcgccgacttcgctttcgctttgggagttttcacttcaatgttgttgacctgaccttgcagctgctgatgcttcggcttcggacactctcttgcaaagtggcctggcttgtaacagttgaaacatacctgctgctcccttccactactgttattcacttgagactgatcctgctgaactggcaccagctgattagcctgctcgatgttaagttcatcattagactgcctctggctactaccttgtgcctcctggaatacagtcattctccttttacggttatccatcctgttcttcttgtcttcaagtcgaattgctttgtcaaccaactcctgaaaatcctcatagtcatgagagatcaacataactgatagctcatcctttaagccttccaaaaacttctcctgcctttcctcgtcagtacgcacatcttctggagcatagcgagctagacgattgaactcatgaagatattccatcacggtacgatccttttgcttaagtgcccggaactcacgcttcttcaaagcaacaacacctgcaggtatgtgtgtcttcttgaatgcttccgtgaactccgcccaagtgattggttgtccttctgctttcttctcaatagcgtgcagccaatcgcctgcttccactgggttggtagtgctagaaaaggtaggtggcctcacacgaagaaaatcagttaacttgttctgcggcggtggagcattgtagttcccttggttgagctggttctgcatctgctgtatcatcatgttcattaactgagtctgttgagccagaacttgagcaagagttgggttcccttcattattattgtttccacttccattagcacgagtgttcaccatctattgcagataggaggagataggaggagaggggttacctagtatagttacacactcatcaatgaactactccaatgatgggaatgcaaccatacctacacacaagcaagcaacaagcgttctaccctactaactattcttcaaagacactttggcggcataggttctaaggtaggatccaaacttcattccatcttgaccacttggcacttcggttcttcctcgatccacttgactgacctccataagtagacctcattaacatcttctagtttcaacaactagttttagaactactcaagttgaaagcaggaggggagaggatgataaaatgatttatagagaattctagagaaggaagaaaggaaaattttcacacatcatgttttcggaaaattagtccttaaggtttgaccatttggcttatcctacagtcgagatggctctgataccaacttgtcacgcccggaaattcactagtaatttccgaacttatttgtgcataaaatcctcgtccaggaatcagccgaggtacacaaattgacaatttaatatacagattcatcaaattaactaaaacgataaatacttacttatgaggcacttagtcctcaccaagaagaaaattgcagcggaaaaataaaatctagcgaagctccggctccactcccacaggcagctcaactggggtataagccaaacgtcttctccttcgcaacttgtcttcaactgaggttgattgattattgcaaggtgagcatatgacatactcagcaagccacacagcaaatatgcaacactgtacccacaagacacagccccacatcatgtcaccatgtgcctcagtaccaccacggtacctcggaaaggggctgtgacagtaccccttgcataacacaatccaccgcagcgcaccattcctggatcataatcacccccttataaaacaaggcatggactccccagcgacccccgtgggcttatgtagaggacgacgcggcgaactcaccggtgaccaaaacggcggcggaagaccaacggacggcggcggcgacgaggaggaagcggcgaagctcttcgggtcgacgacggcgacggcgctccgacggtcttcggcggcggcgaagcggtggacggggacggcgacgacttggcgaacccgatggtggcgacagcgaccgacgacggcggctgcaacggcggcgcggcgcggctgaaccgacggcaacgacggcggcgactagggctacgcggaggcggcgctagacgcgacggcaggctaaggcaaaggaggcgacggattaattatcttgatttcaaagattttggatttagaaatattccaattggtccaccaccaagaatctctgtttggaaaggcggaatgataaaagagtattcaaaaatggatgaatgcaaaacaggagattttggaaagcgaccactcattgatgacatttccacagtttgcaagtggttcacaagagaactttctgacacaacatacggaaaaaatgcacaactagctgccaaggttttggattgcgtctacatgtcaaaagcaagcctattcacacaaaaagatagcaccataacaagagaagagaagagtagagaagagaagatcaaggagggaagaaagcagggtggcagcaatgtagcacataatggtaatgccccacccctagaacaaaaccacccaaacaacactgatgtctgttcccaactaccaaagacaccacaaacaaaatcaactgtagagcatgaaacaaagtctaacatcaacaacaccagcactagcaaaggagcaccccctacagagaatgttatatgttcccaactacaaaccacaccaccatcaaaacaaactgaacaagaaaactcaaagtcaaacagcaacaaggacaacgcttgcaaagaaacgcagtatgcagataaaaaagcatccagtaaggactttgtttgtagtcagcaatcaaacaactctgtggcatccaggactagagctaagatattacattcagcatcccctttgtcggttgtatcaattagcccatcgaaaaaaaattcttctgaccaaaagattcgcaaagcagtaaggaaacagcccttaaaagcaacacaacctatcagtactcaaccagacaaggaagaatcaaacaaggatggtcttttcgtggaacctatctgtactataccagccaaaaaggaggagaagcagatagacattgttttagaaaacacctcaaattttagaaaacagatgaaactagagcatacaggcacaaacatcatggacattgaacatagcagcattcaggtgacgcagggggagaggtacatgaacacacccaaaacatgcataaacaataaagttggagttcaacatttatcagcaaacttcactgcaaacatggggaataggaggcttgagggacagcactgtgatgaaaacgagtaccaagatgacttcgcagaattcttatatgaagaggaaccatcagataacatcgatatggttgaacaacgtgcgcaaccacaaataaacaatgagcaaagtagccctcaaacaccactgcacataaacattacttctgcaaggacacctgctacaaaaaagagttcacaatcatcacctaatatagaagaaagacaatattcaatgacaagaatcatcgactcactaaatgcttctggcaactgttctggtaccagacacaatctttatcgccctaaaagaattgtacatccaagtaaatacaagagctcaccatatgacaactacacacggcaccaaaccatctcggcagctgaactcaatcactacaacaacatactcagcattggtgagacgcaacaatataaaaataaatttgcagttctaatggacaatgtaaaagtcacatggtcatcattgtctaaatatttatcaccaaggggagtggtggatacatatgtcctcaacgcgtatgccaagaagattgccaacgaccagaataacaaagaaaatgaatacatgaatttttacttcttccacagaagtagtgtttatttcttgaagaattgggaaggtgctggaaaagaggaagactatgaaaattgcgcaagacaagcgtttacacttgctaggaacaagaaacctctgcactactatgacttgcttattttcccatgcctgtatgacaatcattggtttgtgtttactgtggacatcaaggggcatcactttgtcttcctggactccatttatgatgaaaacagcaaatatcataagaaaattcaagggctactgataccaggattcattgcaatgtgggaagaattctcagatgtggagaaagactttagtaaatttgatatccaatacccacaaattactcgccaaaacaatgggcatgattgcggaatctacgctatgaagtgtatggaatggtggaacccaaggatgcacttgaaagatatgatcagaccagaatatatcccaaacatgaggaagcaaattgcaaatgacctattgttctcagaatacaattcacaagaagaagcaaaaatactagctagaagcttcaatccaacaaagcatggaaaatatgcaaggcaacagtga

SEQ ID NO: 91809 - DNA, 392 bp, Oryza sativa
  Clone ID: PAT_MRT4530_90348C.1
cgtcttgtcgaaagtgaggcacacgtgcacggcgggggtgtttgccgaggctgcgacggtgccgcccctacaccttatttaccgaaacctaatagactactggcgagtccacctaccacgtgtacaccaggcgagtgaacggatgggcccggcctattcttcagatgacatcgatgctcccgagagctacctacaaagagcatcagacttcaactctatgacataaatctatctagtatggaagaatatacgaaatgtctacactctggttgatatgattaggacgaactgtggtctttggagatacattgagtggccgctgattgaaaccgcaatggaagatgacgactgggttgttatcaggtgatcctatagaacggtgttttatacgg

SEQ ID NO: 91810 - DNA, 172 bp, Oryza sativa
  Clone ID: PAT_MRT4530_90349C.1
actgagaagtggcgagaagtccgtgggggtcgctggggagtccattgcctctggttttgagggggagattatgatccaggaatggtgcactgtgtgccgtggtggtacttcggggcatggcaacatgtgtggaatcgtgtcttctgggtacagtggtacatctctggccaga

SEQ ID NO: 91811 - DNA, 1806 bp, Oryza sativa
  Clone ID: PAT_MRT4530_9034C.1
cgtcaccccgtcgctgtcgcctccgtccggtcgtcgttcccccaagacgaagtgctggccatcatcatcgtcgtcaagtccgcagcaccaagcccgtcgtcctccgcctcttcatcaagcccgaagatcgtcggagccatcctctcgtcgtcgatccgttcgtctccgtcgccctcctccgtttgtcgtcgccgcgccaaggtcgttgccgttgttgttcccttgccgcgtcgtgcccgtggtgagaaccctccccttcctgccctctcctcgtcctccccggctgcacagggtaccactagtgctgcccagggtgccactggtgagggttcccatggtgcaggccaagatggtcagggtgcgaatgctcgtgttagtggtgtttctttgatccagtggattgggatgaagcttgatagttttgatggtagtggaactccagttgaggctgctgattggttgtcctatgtggaggacaagatggaagtttttgatgtattgactccggatcgctttcattatgggacacaacttttaaagggtgaggcacagatttggtggaaaggagtgcaatcagctcacacagctgcacatggccccttgtcttggcccgagtttgttaggcaatttgagaggagattctacccagctacgttcctcgaccggttgaaaattgatctgaacaactatacccaggaaaagaagtcggtggcagagtatgaggtgggcttcaaccagattgttcgctttgtccctcatgtggctcgtgatgaggttgagaaggccagacagttccggcagggcctcaagccttccatccgacatgtgttgggtgctttcccggtggtggattttcgcaccatggtggagcaggctttgggagttgagatgcaacaggtcagcctcgtgctcaaggagggagtaatactaaatatcgtgcttttcctaaacctgggatgggaatgtgacttcttcagccactacaggcacagtgcagatgatggctacaccctctacaccacacctacctgcgtcccatgtgcaatagtacttgatggcgcctaccccacctcactacttaattgcacctcctccaccgcattgcctgatggcacccccagctatgcagatggcttctccgacccctcagtctggggctattcggctgccccaggctattactccttcagcacccgttgctccgtgggtttcttcatctcctggttttgccactggagccttttcttcatctggtgctccgggggcgtgacaactaagaacaagtatcccttgccccgtattgatgctttatttgacatgttgagaggtgccaaggtgttctcaaagatagatttgcaatcgggttatcatcagttgagaattcaggaagaggatattgagaagacagcttttagcacaaggtatgggcattatgaatttattgttatgtcctttggattaacaaatgcgcctgctgtttttatcgaggccatgaacaggatgttacatgattatttggatgactttgtcattgtattcatcgatgatatcttgatctactcgaagactgaggagaagcatgaaattcatctcggacttgttttagaagctcttcggaagaataaattctatgcaaagttgaagaagtgtgctttttgtctttctgaagttggtttccttggtcatgtgatcaaccagcatggaattacggttgatccaaagaatgttgcctcagttgtggaatggcaaaggccaactagtgtgacagaagttcgaagttttcttggttgtcacgaccggaaataa

SEQ ID NO: 91812 - DNA, 326 bp, Oryza sativa
  Clone ID: PAT_MRT4530_90350C.1
ttgattttcctgcgatagctatatgaaactcacattggcgcacatatcaaccctgagaggtggcgctcacctgctaggcgttcataggctctcctgtggaccctctagaattggcgtagatgatgagaaacccggtggacccgaattctataacgactgtcgctgcacaccgccggtcgatcgtgcgtagtgcgaaggatgtcctcgctctccttaggagatagacgatcccacctgggcaataaaattagattgagtactacctctaatcctgcgctgcatgggggctgttaatgacggccttggtttgaccattgaaccgacac

SEQ ID NO: 91813 - DNA, 752 bp, Oryza sativa
  Clone ID: PAT_MRT4530_90351C.1
atggcttcagctccactcccacaggcagctcaactggggtataagccaaacgtcttctccttctggatcctttatcttcaactgaggttgattgattattgcaagaatgagcatatgacatactcaacaagccacacagcaaatatgcaagtgcacaaggataccaaaggatggcataatataggctcatttgcaaaatcagcatttagcaaaacatttaagagaacgcactcacgaaccttcgcaacgacggaaacgacaagctaacacgcaaaacgaagaaaaacggccggctgcggatttggagggcatgtacacgtagaggacgacgagacgaacccaacggtactcaccacaacgacaaacgacgtccgacgacggccggcaacgacggggaacgggcggcggctcgggttgaccgacggcggcgagctacggcgaccggcggcgaagaaggacgggcggccgggcttcctctctcctcggcgcacctcttggcggcggttgaaatatacctgctgctcccttccactactgttattcgactgatcctgctgaactagcaccggctgatttgcttgctcgatgttaacttcattgctttcattagtctctgatttgatctcaccaccgattcctacagtcaagatggctctgataccaacttgtcacgcccggaaattcactagtaatttctgaactttatttgtgcataaaatcctcgtccaggaatcaaccgaggtacacaaact

SEQ ID NO: 91814 - DNA, 129 bp, Oryza sativa
  Clone ID: PAT_MRT4530_90352C.1
atggatgaggacaagtacagcttcagttcaggctatgtccagattacagaagatacgaacgacggagaactcaccaatgactacgacaatgacttcctatgtgagcctctagatgtcgttggcatatga

SEQ ID NO: 91815 - DNA, 639 bp, Oryza sativa
  unsure (1)..(639): unsure at all n locations
  Clone ID: PAT_MRT4530_90353C.1
tctatttgacacaactggatggtggctgaaatccanaaaggaaatctntgttcgtgtttcagattttcttttgcagagtatcaattagtcaaaaatcagtattgatcatcttattgattccttgcacttgcagttccatattatggaatgcaactaactaatacttccatgatgtttctgttgacagaataccctaccagctgtagtgttcatgtatcttactaaaccttttcaaactacaatatttgtcagccattaagtgtactcacataattaaattgaaatgcggaactcagaactacaccattaagtaactatgccgacaaacaatcttgcctagctttcacctgaatgatgatgattccagccagagctttgagcttgatcttggattttgtccctttttccacacgcacacacaaaaaataaaaaaaaaaactaaacctttggcgtggacatatctaaaggtggaactctgagtgttctactctagggtggtatccttactatcacttgagaaatgttgatgtatgatcaaatcttttattacactctatatggtaagaactttattcataagttcatctggagcctactgcatctagatatatctgattttcagatgatcggattgatttc

SEQ ID NO: 91816 - DNA, 1188 bp, Oryza sativa
  Clone ID: PAT_MRT4530_90354C.1
atggtgcgctgcggtggattgtgttatgcaaggggtactgtcacagcccctttccgagtttgtgtacctcggctgattcctggacgaggattttatgcacaaatatgttcggaaataactagtgaatttccgggcgtgacaagttggtatcagagccatcttgactgtaggataagccaaatgtgtaacccctctccttctatcctctctaataagcaacagatggtgaacactcgcgccagtggaagtggaaacaataacaatgaagggaacccaactcttgctcaagttctggctcaacagactcagttaatgaacatgatgatacagcagatgcagaaccagctcaaccaagggaacaacaatgctccaccgccgcagaacaagttaactgattttcttcgtgtgaggccacctaccttttctagcactaccaacccagtagaagcaggtgattggctacacgctgttgagaagaagttggaactgctccagtgtacggatcaggagaaagtcgtgttcgcttcacatcagttgcaaggacctgcatcagaatggtgggatcatttccggatgaacagagcagaaggacaaccaatcacttgggcggacttcacggaagcattcaagaagacacacatacctacaggagttgtttctttgaagaagcgtgagttcagggcattgaagcaaaaggatcaaactgtggcagagtatcttcacgagttcaatcgtctggcacgttatgctccagaagatgtgcgtactgacgaggaaaggcaggagaagttcttggaaggcttaaaggatgaactgtcagttacgttgatctctcatgactatgctgattttcagcagttggttgacaaagcaattcgacttgaagacaagaagaacaggatggataaccgtaaaaggaaaatgactgtattccaagaggcacaaggcagtagccagaggcagcgtatcaagccactccaaattggtgaacctttttccgctggccaaggacaatcgcaacagttgaatatcggtggtgagatcaaatcagagactaatgaaagcaatgaagttaacatcgagcaagctaatcagccggtgccagttcagcaggaccagactcaggagaataacagtagtagaagggagcagcagccgttccgaatctcgggacgagattctttgtaa

SEQ ID NO: 91817 - DNA, 218 bp, Oryza sativa
  Clone ID: PAT_MRT4530_90355C.1
ttatcttgcacgaattattttagaaaatcgtttgcagaagtacttgcttgggcgaaggaaagagaccgagcgtaactaatgcatggatgattaaataagttgattggggaccaaaccaagaccttcttcaagtctacttctacctcaccacgtcactattggtccatagaagacaagagatcaagttgtacacgttttggattcggattcgggcctcc

SEQ ID NO: 91818 - DNA, 330 bp, Oryza sativa
  Clone ID: PAT_MRT4530_90356C.1
atggcggctcgccggatctccttctctcttcagctcgcctgcgccaaatccctctcccctctcctcgtcggcgcctgctgttctgggcaacgacaactagcagcggggttgcggttgtgcggatgcctgacgaatcctggctattccctgacgaagaacgtgtgtcccattttggctccccgttcctcgcttggtcacgcttttgttaaagcaaaagccaagattttcccattatcgaaaaataaagcagcctccaaaccctgtacgggcaacggactgatgaatgtacgaacttctacagcgcagatatggactgtttcttctccctag

SEQ ID NO: 91819 - DNA, 502 bp, Oryza sativa
  Clone ID: PAT_MRT4530_90357C.1
gcccgaagatcatcggcatagagtcagtatcggcttaaaagtcatggaatcggccgacgggaattatcaagtcaccaatatttctttcttgtaaaaaaggattagtatctacccatataaatacgtacatccgtggttattgtaaactatctcacagatctatataattagtctcggcgcatcgccaccctcttttctgaggttttatttatcaaccagcgaaatttggcacctgacgcgaagctgcattggctttcgatctccggcaaagggataagtcctatgttacgccggcccaggcaattgtatcggctacgctgatgttgttcaaggctgcatcgctttgatctcttgggtcgcactagttcggttgatatagttgcctacctatttatcatatatcctagttaatctagtttggtagctcaatttacttgtatcagcttggatttgcttcagggttttttgccggtatcggctaaatcactttactagattagat

SEQ ID NO: 91820 - DNA, 2900 bp, Oryza sativa
  unsure (1)..(2900): unsure at all n locations
  Clone ID: PAT_MRT4530_90358C.1
gctggagctccaccgcggtggcggccgctctagaactagtggatcccccgggctgcaggaattcggcacgagtctctctccccttcgcacctgttcacctctccggcgacgagatggtcccaacctgcagcctgtcctcgatgcctagcgaacaccgccggccgcggagacctcggctncggatggcggagggcgttgtaggatcgctgatcggcaagcttggtgcggccttggcgaaagaggcagcaacctacggcgcatcgctgctctgccaggaagtctctgctctcaagcgtctctttgcccagatccgggacgtcaaggacgagctggagagcatggaggcctacctccatggagctgagcggttcaaggacatcgacgagactactggaaactatgtcaagaagatccgagggctggctttcgagatcgaggatgctgttgacgagttcacctacaagctggaggacaagcatgggggattcactgccaagatgaagaaaaggatcaagcatgtcaaggcatggcgtcgtctcgcactcaagctgcaagacatcaagcaaaggcttaaaaatgccgacgagaggaagatccgttatgatctgagtgggattgaaaagaatggtcactctaaatcccctgaacaatcttttcagtttgcgagggaagaggatcttgtggggattgagataaataaggagttgctgatgcagtggcttgtgggtgattcggaacaagggtgtaaaattgcaacagtttgggggatgggaggtgtgggaaagaccactttggtttcccaggtgtacaagactgtgaaattggattttgatgtttctggattcgtgactgtcacaaacagctaccagtttgatgatctattgaagaagatctccacagagttcgaaattccaatcgacgctgataacattgcagtgggaagcctagttgagagcattcatcaccatctgcaaggtaaaaggtacattttggttcttgacgatgtttggcaaccggatgtttggtttaagctaaggaatgcgtttcctactgaaagcactggtcggtttattttcactactagaatgcaggaagtagcattgctagcaactaaaaaatgtacaattgagttagcaccgttagatgcacattgttcatggcagttgttctgcaaagaagcattttggaacgctgacaacaaaacatgccctgaggaactacaagatatagcttcgatgtttgtagataagtgtgctggcttgcccattgccattgcatgcataggccgcttattatcctgcaaacacccgatatactctgaatgggaacatgtgtacaaggacttagagcttcagctcaccaacaatgtgatccttgatgttgatattgttctgaaagtcagcttggaggatcttcaacgtaatttgaagaactgttttttgcactgcacaatatttccagaaagttatgcattcaacagaaaaagattaatcagacattggatagcagctggatacattcaagaggtaggtagcaaaacagtagaggaagtggcagagggctacttaaatgaacttgtaaacagaagcctgttacaggtagttgagcgcaatctatctggtcgagttcgcaggtgccgaatgcatgacataatccgtttacttgccctcagaaaatcgaaggaggaatttttttgtcaagtttacaagggctctgaggcatgttcaatcgagaatacacgtcgtttatcaatccaaaatgtaagtattcaacacctttctggatcaagtgcaccatgtctccgatccctccatgttttcagtatttatcggagaattgattcgctggaggctttcctcaaatcattcaagtttctgtcaacgttggatcttcaaggtatttcaatcaagaggctacctaagattgtttttgacttgtttaatctacggttcttgggtcttcgcaaaacatatatcgagtatctcccaaaagaactgagtaggttacagaatttggaagtcctggatgcttatgattctaagctattgattcttccagtggaagtggccacactttggaaactgaaatatctatatgtggtaagagttccagagggatcttatgatagagttcttgcttttgacggcctccaagtgcctatgggtatctgtaatttgattgacttgctggccctgcaacttatcgaagctagcactgaggttctgcgtcatattggatgtttaaccaagttaagaacctttgcaatcggtaaagttagaaatgaacactgtgcagatttgtgcgacgcaatcatgagaatgacttgtcttgttcatattacaatcatttcagctgatgagaaagaagtgctacagttagaaacactttgtttaccttctactattgcaaagattgatctagggggcaggctaagcaaggaatccatgtcacagttgatctcaaccagttcaaacctcgttaaccttactgaattaaacttgtgcttctccaaactcaatgaagactcttttgcttgcatcttgaatttacacaacttagttgagctttatctttcaaaggcttatgacggaaaggaactaatcttccatgcaacatcatttccgaaactcaaattactagcagtatgggatgctccttatctcagaaaagttgcaatccaacaaggtgcgctacaaagtcttgttaggctatggctagctgattgtccagaattaagggatgttcctgatggcatcgagcatctgagaacccttgagcatctgagaattaagggaagttcagatgagctctggaggaagcttgagataaaaggaaaatcgaacaaacgcaatgaagatagaatgaagatcagccatgtcaaatgggtcgaaattgtttag

SEQ ID NO: 91821 - DNA, 2090 bp, Oryza sativa
  Clone ID: PAT_MRT4530_90359C.1
tttttttttttttttttttttttttttttttttctcgaatggattttttttttgtacttttatttgacacggatgagatgagctagtatacacagaggatgagtgatgagttctctgagtatcaagaattcatcatcgagtggagtagtagaatacacttgggattgattcgtccattcacggttacaaaaaaacatgaggcgaacatgtgtgttagctaaggccatacgagcagtagtatagtactagcggtgagctggttcttgtcgtcgtcaagctttctgcaggctccagatgccatggaagatgttcctgagcttgctcccgccaagcttcttcacgatcttcttggcgtccgtcacgttcgtctctgctagcctctcgagattcctgagatgctccgatgacatgatcttccggcggccggaggtgctgtcgctgaggtgcatcagggtggagagcaagaagcgcttcgccggcgagagcttctcgtcgtcggggccaagcagctgcagtacctgcgccacgttgcggtcttcctggacgaaccgcttccggttgcggtgcacggacaccatggcgcagagcgcctccgccgccatgtcccgcgcctcgagcgacttggcggcgtggaggatgctcacgagctccggcatgaacccggcgtcgcccatggccttcttggtgtcctccgaggcgtggcatagccggtgcgccgccttcagggcgcagtgctgcagcgtggcgtcgccgctgcggaggaagacgaggacgcggtcgaggaagccggcggcgacgagccgggatgtcaagggtggggaggagaggcagagcgcgtcgatggcgcggagcgcgacctcccgcgccttggaggagcgcggggaggccgggtcgagcacgctgaccagggactcgacggcgccttcctggagcacggcctccctgacggagctgtcgccggaggcgatggcggcgaggagctccatcgcctggatttgcgccgcctcgtccgcggcgccccggcagagcgacacgagcaccggagccgcgccggcctcggccaccatgtactttctgatctcgtcgacgccggcgaggctcctcagcacacggcaagccgcgcacacgagctcgccgccgctggcggtgtagtcggcgcagacgttgagcaatgccgtgacgccgccgtgcgcggcgacggcccacgcgttgtcggagttctcggtgagcttgcacagcaaccgcgccgcccgctccttcgccgagggcctgtccccggcactgtcgaggacacggatcaccggagcgatgacgccgccgacgacaaggtcgcctctgtaagcctcaaacccggcgatcacggagacggcctccaggacctcctcctggacgcaggcgtcggggcactcgagcagccagacgaggacgcagacgccgtcggcgacgtcggacacgacgacgcggacgcacttctcgtcgtcgtgcagcacctcggcgagcgcggcggcggcctccccccgcatctcggcgccgcccaccctgagcctcgcgaacaggtcccgcacgtagaaccgcacgtcgtcgcggctggcgccggcgcagggcctcgacacgacgagcgcccgcgcccgcgtcagcgcgcccgacgcgtacacctcgtccacccgcgccacgagcgcgtcgagcgtgcccgccacgacgtcgaggtcgctccgcagccgcagcttccctcccccgtagtgcctcccctggctcctcggcaccagctccgacgcctccctcgccgtctccaccaccgccccaagaacccccgccaacgccccatgcccctcgccgccttcaccgccgccggtggctatgtcggcgaggccggcgtggagccggttgagcctgtccctgatgagctgccacttgtacgggaagagcgaagcggccaaggaggcagacaccaaaccggtaatggcgtcgagcgccgccgtgacactcccctgctcatctcgctccgccgccgccgccgtcgccgcctcttctcccatgcctccgaccacctcacccgctaagctcaacgacgcattcttgcaaatgcgaga

SEQ ID NO: 91822 - DNA, 636 bp, Oryza sativa
  Clone ID: PAT_MRT4530_9035C.1
atgtcgtcggcggcggcgccggcggcgggatcgtctagcagagcggcgaagcggtacatcctcctcggcctcgccgcaaccctggtcgccgccgtcgtggcgggcttggtgtccgcggtcctcagcccggcggcgatgaaattctccgtcgtccaggtcgagcacgccttcgtggggaggaatggccccgtcgggatgaacatgaccttcaccatcgccgccgccacccgcgggaagcgcgccggcgtcaggtacagcgaggtcgccgtcgacctggtgcaccaggaggatctgacgctgttcacccggtcctactcggcggtggcgaggaacgcaggcacgaagttgccgttcgagcagccgcagccggggaacgcgacgaacatcacggtgccgctcttcatcggctacaaggactgggacaacgccaccaccggccgtgagcagctgagcgtgcaggtgagggccaccgtgcacttcatagtcggggtagcctacacaagggcctttcgcatcgccgtcctgtgccccctcaactactccctcaacacaaccgatcccgtcgtatcataccctaacactacttgtgctgaagcagggctgataaccaaatatcatgatccctccatccaataa

SEQ ID NO: 91823 - DNA, 1551 bp, Oryza sativa
  Clone ID: PAT_MRT4530_90360C.1
ccggccggccgcccgagaccacgctccccgccggatcgagcagctagggtttcgacctttttttttcccaccaggagggcgacgagatgttcgggcgcgcgccgaagaagagcgacaacacgcggtactacgaggtgcttggggtgcccaaggatgcgtcccaggatgacctcaagaaggcgtaccgcaaggccgccatcaagaaccaccccgacaagggcggagaccccgagaagttcaaggaattggctcaggcttatgaagtcctgagtgaccctgagaagcgtgaaatctatgatcagtacggtgaagatgctctcaaggaggggatgggtcctggtggtgggatgcatgacccatttgacattttttcctcattctttggaggtggctttggaggtggtagcagtaggggcaggagacagcgtaggggagaggatgtggttcaccctctgaaggtttctctggaggaattgtacaatggcacatcaaagaagctctccctttctcgcaatgtgctctgctccaagtgcaatggcaagggctcgaaatctggtgcttccatgaagtgctctggttgtcaaggttctggtatgaaggtccaaattcgccagttggggccaggaatgattcagcaaatgcaacatccctgcaatgagtgcaagggaactggtgagaccatcagcgacaaggatagatgcccaggctgcaagggtgagaaggtggcgcaggagaagaaggttcttgaggtggtggtcgagaagggcatgcagaatggacagaagatcaccttccctggtgaggctgatgaagcgcccgatactgtcactggagacattatcttcgtcctccagcagaaggagcatcccaagttcaagagaaagggagatgacctcttctacgagcacaccctgaacctcactgaggccctttgtggcttccagtttgttctcactcacttggacaacaggcagctgcttatcaagtccaagcccggtgaagttgtcaagcctgattcattcaaggctgtcaacgacgagggcatgccgatgtaccagcggccattcatgaaggggaagctctacatccacttctccgtggaattccccgactctttgaaccctgaccagtgcaaggccctggagaccgtcctcccgccaaggccggtgtcgcagtacaccgacatggagctcgacgagtgcgaggagaccatgccgtacgacgtgaacatcgaggaggagatgaggaggcggcagcaacagcagcagcaggaggcatacgacgaggacgaggacatgcacggcggcggcgcccagcgcgtgcagtgcgcgcagcagtaagcagcaagcagcgccgtgcatacatatctgcacggctttgacggcggcgacaaattgtttctttccgctctaggggcgataatactatcaagttttccatgttaggcatatgatgatgtgatactacttttggtcttttatactgcgtattaatgacgtacatcaaccggacctactggtccatgaaacaaaatctctactgcttctcctt

SEQ ID NO: 91824 - DNA, 257 bp, Oryza sativa
  Clone ID: PAT_MRT4530_90361C.1
ccacgcgtccgcgctaccatggcgctgagcagctccttcgccgccgtcgcagccgccgctggtggcgcgccatggctcgccgcggtacgctttccgactagacgacgtgttgcgctcatcggcagggcccacatcgagccggaggtggagtctacgaaggaggagacggttgacccctgccaccgactccgtgggtttctgtaggcagactcattgtgaaggaggggcatagcactggattgtggtgaactgctgac

SEQ ID NO: 91825 - DNA, 2511 bp, Oryza sativa
  Clone ID: PAT_MRT4530_90362C.1
gtaacaaggaggccgagaccacgctccccgccggatcgagcagctagggtttcgacctttttttttcccaccaggagggcgacgagatgttcgggcgcgcgccgctccgctagctccggccaccaactttgacccgtcctcctcctccgcatcccccatcccctcctccccggcggcggcggcggcgcggaggcggcggcacgggagcggctagtggtttcgtcggcggaggcggaggcggggccaagatgttcgggcgcgcgccgaagaagagcgacaacaccaagtactacgagatcctgggggtccccaagaccgcctcccaggacgacctcaagaaggcgtaccgcaaggccgccatcaagaaccaccccgacaagggcggcgaccccgagaagttcaaggagcttgcacaagcttatgaggtattgagtgacccggagaaacgtgaaatctatgaccaatatggtgaagatgccctcaaggaaggaatgggtggaggcggatcccatgttgatccatttgacatcttttcatcattctttggaccttcttttggtggtggtggcagcagcaggggcagaaggcaaaggaggggagaggatgtgatccatccgcttaaggtttctctagaagatctttacaatggtactccaaagaagctctctctttccagcactactcctactgcgacaaatgcacgggctacggtttctaatactcggtgcttaccatgatagaggttcaggcctgctagaaggatagtatggaaatgtccagaatgctagcaagggccttccatgatacagcagatgcagcagccctgcaatgagtgtaaggggactggagagagcattaatgagaaggatcgctgcccaggctgcaagggcgagaaggttattcaggagaagaaggttctggaggttcacgttgagaaggggatgcaacacaatcagaagatcactttccctggtgaagctgatgaggcgcctgataccgttacgggagacattgtattcgtcctccagcagaaggaccactccaagttcaaaaggaagggcgatgatctcttttatgagcacaccttatctctgactgaagcactttgtggtttccaatttgtcctgacacatctggacaacagacagctgctcattaagtcaaaccccggtgaagttgttaagcctgaccaattcaaggcaataaacgatgagggaatgccaatgtaccgagaggcctttcatgaaggggaactctacattcatttcacgggaggagttccctgattccctggcgcctgaacaatgcaaggctctcgaggctgtgcttccaccgaagcctgcatcccagctgacagaaatggagatagatgaatgcgaggagaccacgatgcacgatgtcaacaacattgaggaagagatgcgcaggaaagcccaagctgctcaggaggcatatgatgaggacgatgagatgcctggaggtgcccagagagttcagtgcgcgcaacagtaagcagagtatgtcatctaggaaactcgtcattggttcacaaatcaacgtcgtcgcaaaggtttgccgtaaatttttggacccaaagatgattgtgctctgtttcccgttgcggcgaacatgaagatagtgaagctgattttacaccccttaagccgggactgtatcccttttgtttgcgacttaaaaaatgctactcgtatctagtaatagctggctacgttttactatgctgtgagactcgtagagttttacctcctaaaaagaaactcggtatgttgtgaatgctacaactgacactgcaccgtgtgcagtggctcaacattttttgtggtcagatggctatgcttgcaccgtgagactcgtagagttgtgcatctaaatatgcatttcttcctttgctgttcaaaaaaaaaaaaaaaaaaaaaaaaaaaaatctccaagcagcgccgtgcatacaaatctgcacggctttgacggcggcgacaaaatgtttctttccgctctaggggcgataatactatcaagttttccatgttaggcatatgatgatgtgatactacttttggtcttttatactgcgtattaatgacgtacatcaaccggacctactggtccatgaaacaaaatctctactgcttctccttcctgtgtgtgttagtgcgctgcgttcttcccatgtgtaggatttgctgcttcctcgagatgagcagtagcagatggcaccgcgaatggaactgtcaatgcgcaatttgactcggtgcaactcgttgaggctcggtcatgcactgtgtcagggcccccggtgtcgggatctaacaacatggaacatgaaagaagaggctcctgcttagcaatggtaaactaaattgaactacaactgcaaagatagtgagagactacaaatcagacgcccaatttgttcctaaaaggaacaaaatcgtgcgttgtttcatttctagcagaaaaaagtttcaccactaaataaaaaagttccaatct

SEQ ID NO: 91826 - DNA, 606 bp, Oryza sativa
  unsure (1)..(606): unsure at all n locations
  Clone ID: PAT_MRT4530_90363C.1
tttgttttttttttttttttgtttttttttttttttttgatagggccaacatttaactgatgacaaatggacaaattacatgagaagatctgaatattttgattatgccaccacaaagtaagttccaattttggtaccaataacaaatggaatgccagacctatgtcagaatagatgtacaattacaatggcattcttgggtaaatgggagcaaagaataattagcatttctcacatgaaaaactgaggcaaatttttgcaattttgccactagccccgaaggagcacagttcgcaatccagtaccctggggcaattttaaatacgatccctcagtctgatcattggtgaaataattcacttgtattgacccttattttggctgattgcccctctgattcaacatcgttaacaactccacggcattttgggaatccacaataacaaggaagtcgctgatcactcgaaacaaacctataatcataagtcaactcttcccatggatttatatcccgcttgcaaaaatgatgatatgctcatccccgagaacacttatgacgcgtgaataacaattcggctcacaagaatgattaantaaaatgggcaa

SEQ ID NO: 91827 - DNA, 227 bp, Oryza sativa
  Clone ID: PAT_MRT4530_90364C.1
aaacacgaaaaaggggagttagattaatccagcaaaaaaagggcactgaaagaaacagagcaccagcagatcgatcaagatcgaaggtttgaagaggctggttgcaggaagctagaaaaaggatcgtttggtaggcaccctccaaacagccttaatgaagttggcgagctcgagcacctgggaaagcttgaggccttttttggactccgccgacgccctttttttct

SEQ ID NO: 91828 - DNA, 326 bp, Oryza sativa
  unsure (1)..(326): unsure at all n locations
  Clone ID: PAT_MRT4530_90365C.1
gaaacgcacaaagcgttcaaacctcaaaaccctaatcctccaagcccccacccacttgccatggccccgaagcgcccggccgccgcgtcgggctcggcctccgaggcgtccgactgcgaggcaggcggggcgggccgccgccgctcgccgtcgaggtcgcgctccccctcccggagcgcctccccgtcccgctcccgatccaagacccctccccacaacgccgccgtgctctcctccaccccggcctccgccgccgtcgactttcgtggccgcgtccgacttccgacgncggcgccgacggcgacggccgncttggcttcccgagg

SEQ ID NO: 91829 - DNA, 339 bp, Oryza sativa
  Clone ID: PAT_MRT4530_90366C.1
atggcggctgcacttggatccctcctgggtcgcccgccgctgaccacccacttccgccgcctcctccacggcgcgccggcgccagatcagaagctcgccaacaagatgatgaagaagaagctgcaggatgagcagcagcaagactgggatgccatcgtcagaatgatagtgcaatcaaagatgcaaacctacaacgttgtgccggatggggaagatcctccatgggctcgtcgagtattccatgtgctcgtcatgatccctgcttcattcatctgtggttgtaaccttggcgaacggatataccacgagctcggcctccggactaaccgccgtccatag

SEQ ID NO: 91830 - DNA, 360 bp, Oryza sativa
  Clone ID: PAT_MRT4530_90367C.1
atgaggaggatggcggcggcgcaacagccttcactgccgtggcaggatttcttggcggatctgcgagggctcgtgctcctccacctctcatccctccctgaccacgtccgcatccgcgccgtctgccgctccacaccgccgccaacgatgaggaggaggatggcgacagcgcagcagccttcgccaccgtgccaggatctcatgctcctccaactgctagggatcgtgctgctccacctcccatccctccccgaccacgtccacctccgtgctgtctgccacctccacgccagctacctcgccgtcaacaacaaaacttttgtgatttcagccgtgtcacgtttttgcggtgtcttctag

SEQ ID NO: 91831 - DNA, 399 bp, Oryza sativa
  Clone ID: PAT_MRT4530_90368C.1
atgatgaggaagcaatactctttcactctttgcctgatgctcctgcttgtggctgctctgctttgcaccatgaacaccatctccgtcgaagcagccaaaaacatatttagcctaaaatacacccccttctccaagagaggactaaaatttgggagcgcttctagttgcccaatatttggttcaggaaggagcggttacaattcagtgaatcccgatggaaggagtgggtacaattcagtgaatcctgatggaaggagcggctacaattcagtcaatcccgatggaaggagtggttacaattcagtcaatccgaatgggaggggtggctacaattcggtcaatcccaatggaaggagtggctacaattctgtccctagaaacggcggtggaagcccatag

SEQ ID NO: 91832 - DNA, 417 bp, Oryza sativa
  Clone ID: PAT_MRT4530_90369C.1
atggcttcagctccactcccacaggcagctcaactggggtataagccaaacgtcttctccttctggatcctttttcttcaactgagcggtgacgtcagcgatgacgtcagcaccggcgacagctcggcctcgcgcgctcgccggcgaacgacggcgcaacgacgcaaacggaggacaccaatgggtagaggacaacacggcgaactcaccggtgaccaaaaccacggcggaagagcaacggacggcgccgacgatgaggaagaagcggcgacggtcttcgggtcgacggtgacggcggtgctccggcggtcttcgacggcggcgaagcagtggacggggacggcgacgacctcgcgatcccgatggtggcgatggcgaccaacgacggcggctgcaacggcggcgcggcgcggctga

SEQ ID NO: 91833 - DNA, 231 bp, Oryza sativa
  Clone ID: PAT_MRT4530_9036C.1
atgtcgaacgaacgggaggcaactatagccgcgaagggcaactttaaccattaccatgtacagttcccccttaaatacctcgggaacgccagaactcctcttgctgctgttaacaatacattcagagcatatgaggatataagttcatggaacagccgtactcatggaattgagtatcgggactcatatggtaccctgatttgggtcaaggaggacccctatgactattaa

SEQ ID NO: 91834 - DNA, 545 bp, Oryza sativa
  Clone ID: PAT_MRT4530_90370C.1
tgaaacatggtcgccagatgaacccgttttgagacccgtttaagccttcttgggcctatgccatttcgggatactatcagtcctgcacagatggggcatctgctgaattcgaaaatcatactttaagctccagtgaattcagtggtattgcaagcttatttgcaacttccttctaccctcgaacaacaccgaatttatgagtgtcatggagatgagaatgtttccttgcagcaaaattggcacgtgcaactggaatgtggtttctgaaaatgatttccaatcgggttacgattccacatatgaatggctccttctggccgtttggagatcattcagcgataataccacatagtctatattgttgtaatttcactcttatcttttttatgtacatttcatttaaatttacccggccaatgtaaatgaaaaaaatatatataagaggttatgcaccatgtatctaggttcagcatataatgtaagatcattgacgctgttgttgaccataattacttctttttatagtgaaaaaaaaaaaaaaaaaa

SEQ ID NO: 91835 - DNA, 570 bp, Oryza sativa
  Clone ID: PAT_MRT4530_90371C.1
atgggggaaggattagtacctcctgcttccctcgccatgatctgcttgggagggacggccccctcagtgtacagcttcttcaacatagccgcgccggaagaggactggtccaggtctgccattgggagaggatcgccggtgcgcgggagggtggagaagcccggccgctatctctccgaagcctccgaccaccgcagccccgtcgccgccgtcgaccgaagccgcgccgccgctagacctcgtcgccggccgtcgtcgttcgtcgtttggttcgagggtgagtaccgttgggttcgtctcgtcgtcctctacgtgttcttgtcctcgaaagtcgcagccgaccatccaatctccggcgaggtcgccatcttggttcggccattgatgagactgagaagtggcggagataagcccacgggggtcgctggggagtccatgcctctggtttttgagggggtgattatgatccaggaatggtgcactgtgtggtacacctctggccagagtaaaactattcgaatagccgtgcccgcggttatgggcgggttgagcaatgtttttcgtgattag

SEQ ID NO: 91836 - DNA, 1521 bp, Oryza sativa
  Clone ID: PAT_MRT4530_90372C.1
atggcatctgctgtactagtgtttgcagggaggtcagtcgcaaccccagcgatctccttctttgtcaacaaggcattcagctacctgaacaagtaccacaagtctgaaggattgggagacatgaagaaaaggctgaagatgaacatacccaagatccaatcagtgatcgatgtagctgatcctgattacatcaaggagaggagtgaagaccttgatacatggctgtggcagctcagggatgcagttgagaaggctgaggatgctatcgatgagcttgagtactacgagctcaaagagaagcaaaaggatctaaaggatagtcacctgggatcttcttttgctaagatgaaccacaaatttttccagtctgttaagcatgttaaaatgttgggtaagacatctgattcccctctcaagaggttaaagaaagccatggaagatttagatgaggcggctaaaggcgttgagaattttctcacagttgtagatcaaatcacaagacccaatttaaacattccacaacggcatcattcgatcagtaggtaccgtgaaacaggaaggatgttaactgctgatagggtgtttggcagagaaaatgagaaggaacggattgttggatggttgactagtacatcaagtgaagagaacgaagttgtcatgaataataatcctgtccccattatgtcaatagttggccatggtggcatagggaaaaccactttggctcagcttatcgccaaagaaaacaggatcaaggaacattttaaaaccgtgatttgggtttctgtctctacaaattttaatgcagaaacattgataagtaaaataatacaatctgttacattatcaaaacctagtttcgatacctacgatgcactacaagaacatttggcaaggacacttgagaccattaaatatcttctcattctagatgatgtctgggaagataaggaaatctctgagtgggaaaaactatttgcctctttgagaacaggagtgtatgggaggaagattttgttgacaacccgaatgcaatcagtggcagatttagcatcagctatccccaaaaatttgaagaattacaagaagctggagaaaaaattgcaagaaactaagagggtgtcccttggtaacaaaggtatggaagatatcatgaaagttctgaaagtttgcttccgatattgtagcattttcccacaagatcatgaattcaaaaaagaagaattggtacagatgtggatagcttcaggattgatctcccagacaacaggtgaatgtgcaagaatctttgacgctaatggctccaagaaagtaaaaagaacagtacgtcacctatctgttgttggtattaatagttttccagctgacatcattaaaagtttctcccggttcaaaaatctccgcaccattgtctttgaagattgccatgatatccaggacaatactgtatgttcagtggaagaagttgtacgtagagaccttaaaagccctgcgtgtcgtgaaagctcacttattcagtag

SEQ ID NO: 91837 - DNA, 1116 bp, Oryza sativa
  Clone ID: PAT_MRT4530_90373C.1
atggcgggacgcgggcacgccgcgctgtgggtgaagctgtacgagcttgagctgcagctcaggctcatgcgcgccgcgcgcggggaggagggcgcggcggctgcggcggacgacgacgacgaggtcggcgacgtcgcgtcgcgcgcgggcgcggagggcgcgtgccgcggcaggcagtacgatgcctacatgcgccgccgcgacgccaggcgccacacgacgggtggcgtcgccgcggcggcgtcggagcggcatacgacccggccgcggggcggcgctcgagccgccggcggcggcggcggcggtgaagaggtcgccgccgggggtgtctactccgaccaccccgaggaaggagagttcggccgtggtgctgcccagggcgaggacggtgaacaccggcgcggccgcggcgaagccggcgcaccggaggcggagcagcctcggggcggtgccgtccgacttcggcgactgcgtcacgccgcggccgttcctccggcgcggcagcggcacgggcggcgccacgacgacgacgtcgacgacgccgcggctgcgtgcgccgccgacgccgagggtgcacgacgtcccaccgatcagcgacgcggccacggccagcccgaggcgacctcctcctccgcgagaccagctcgcgcaggcggcggcgcgtcgccgccaccactcccggtccgtgtcggagcttccactccaccaccaccacacggcggcgctggactccccgaggtcggcggtggagctgccatcgccgcagccgctacgggcgaggaagcagtggggaagcccggagacgacgacgacgccgccgacgccgcgggcgatcctctcctccgccggcggcgactcgcacaaggatttcgccaaggggatcaagaagctgctcagcttcgtgaggaagagcagcagcaagaacggcggcgaccagcagcattccccggcgcgtccggccgccggaaagcccgtgatgggcacgggatggcccgccgccgcggcggcgccagcggtgacagcttagctcagcttgctcccgtattgatggcgccatggctgcggctagcttggaggtggttcgccatgacgcagccagctggcatcttcggatga

SEQ ID NO: 91838 - DNA, 1884 bp, Oryza sativa
  Clone ID: PAT_MRT4530_90374C.1
ttattcgccattagcaacaacctcagggtcgaaatctttgacctctcttagaagtgttgacatgttgtggcacacatggaaaccacattggtctccgatctgttgtgcgcatgcgaacttggtgtcatggtaaagttcgtccttgccctccttgtgcctaccacccttttccacatatgggccccaagccatatttaaggccttggtgatttcaatgaaatcataatctttggacttattggagttaaggtaggtaaccctactccactttggtacgatgactaggagaatccaatgtcgctcttggttgtgtgcgcacatgatgtacttcttgtcttgatgggcccataaacaccggttgacatagtcaaccacctcagtgaagctctgtcgtaaattaacctcgttcaccatggatggatcaaggaacccaacctgattaccaaggcgacgactctcgatccaacacaacaaggagtagcattttagaagaccagtgtccaacttccggatcctgaaaaggtcgaagaggtcatcaaagcctatagttatataggcaggcgacgataggaacggctggtggtcgtgatgtccaactatggatgactccctcattttccgcttggcattgcttagcttcatgtattgcttatgtagcggcatcgacgtcgcagccttgcccctttttggcttcggcgccaactccctgaccttccccttgccgcgttcacgcttctggcccttgacaagtggtgggaagctatcggtctttcttgtggtctttattggagccaagctttgagctatatctgccaagtccatatcagctccaccaggagaatgaggtactgacaatgctggtccatggggagcctcaattgatagcttagacttgggaggtgtaagctccgtcggtcgacttggacgaggagtcatcttcacaactatgtcttctttgggccattgtatgaacgtcttgcgcgcatcgcccaaagtcatgatttcatcattggggggcacgggcagcggatagcttgaccaggtgtcctttactgtatcgatggacaccttggcatacccagctagcaggtctgcgctgtggaccttgtctgtaaccgagggcttgaaagccatgccctcagcgacttcgggagcgaaagttgggtggaccctcgccagtaggacacactgtgctatgccccctagcccgcgcctagttgcgagctctttgttcagggatgtctgaaaacggggcagggacattcgctgctgcagcggctgcatcttcttgggcccatattgcctccttgccgatgtacccacttcggttatttgagggtattcattgaacggcgtatgattgccgggcgggttgacaaactcggtgaagagcttcgatttccaattcttccaagctttgcccatcttctggaatgccttccgcttgagcctatcctttgcttcagccggaaatgtgaaccatttctccattgccgtccaagctcgctctttctcggcttctgtgaccttgccgatatctttatggaggatcccgaagttctcacgtgccaccagcccgcagcagttagaccatcttccaatgacagtcctgggcgccgtgggcctaccactagcgtcaacctctcttataacttgcactgtgatcagccatatattttgtgaccggggatttctactcgacctacttgcacttgtcccacccgacatcgacgtatgttgttcctgcggcaattcatgaatttcgggttgttcgaccaccgttgtcgagggatgaccttcggcaactgcctccgtggctgggtttgcttcttcctggatcctcacaggtgttggggaaggcgggtttgcgccgggcgttgtcat

SEQ ID NO: 91839 - DNA, 1402 bp, Oryza sativa
  Clone ID: PAT_MRT4530_90375C.1
gcacgaggcctccccccgctgccggcacgcggcgcctcgccgcgcctcacctagctaaccacgatacatacgtagccgtggtacttctccgcttcacaaatcacaagatcctgacatacacctcacacacactccccttcttgttggtttctcccccaattcgagccgaggttgagctgagctgagctctcgcagagacagggcgatgaacatcttgaaccagccgatcaaccctggcggccacccggcgttcccggcggcaagggagaccggccagctgatgccggcgtcagtccgcttcgacggcctgtcgacgcagcagagcacggccgccgccgtggggcgggcgcacgccgggcagtccccgcggtggcaggcgcagacgctgcgccggccaagcagctacgtcggcgtcgagcacgacgagccggcggacgccgccgccgccgacgcgctggcgccgttccagccgctgacgctcgacttcctgcggtcgctcctggacaggaacgctgccgtggcggccgaccagggcggcggcgcggacgtcgcgccgccgccgccgccgctgcacgcgctgcgggtggtggtgtcgtccgccgtggagctcgacgcgcgccagaccgagctcatcgcccgcaagatgcgccggatcaccgggttcgcgagcctcaccatcgagaacgtcgtcgacccgtcgctgatcgccggcttcgtcgtctgctacggccccggcgagtcccacgtcatcgacctcagcgtcaagggcaagctcgccatgctcaagaaccgcgtcgactccttcgaccagaccatcgcccacccgcaccaatagttccacacacacacacagcacattagcgccgtccgccgccggcggctcgccggactatatccaagtatagctccgccgtaaacccagtaaccatatcccatgctgaactctacagaagaacaacaccgacgacgcgccgtcgccaacaacagtttttcctatctattgttgttgccaatcgtgagacgctagctactcgatatggttcagctgagccatatattgtactggtaatattcccttgttcttgcagtatatttttggcggaaattaaacagcgggttctctatgctgttgcaaggttgcggtttgtatgcggaattcgggagtcacagctctgtaaaatgttagagcagagactgatgtgaggaagcacaggagttgtataacagacatgactattttcaaatgagaacatgtatcagcatctagccagtaactgcgccatgaaattcagctagttttatgtgtgctcagataatcagtgttctacaatgattagcgattaatgctcagttttatctatgttcaggtaattcagtacattatccaaagcatagtgagttc

SEQ ID NO: 91840 - DNA, 2184 bp, Oryza sativa
  Clone ID: PAT_MRT4530_90376C.1
atggcggtccaacaacccgaaattcatgaattgccgcaggaacaacatacgtcgatgtcgggcgggacaagtgcaagtaggtctagtacaaatccccggtcacaaaatatatggccgaccacagtgcaagttataagagaggttgacgctagtggtaggcccacggcgcccaggactgtcattggaagatggtctaactgctgcgggctagcggcacgtgagaacttcgggatcctccataaagatatcgggaaggtcacagaagccgagaaagagcgagcttggacggcaatggagaaatggttcacatttccggctgaagcaaaggataggctcaagcggaaggcattccaaaagatgggcaaagcttggaagaatgggaagtcgaagctcttcaccgagtttgtcaaccctcacggcaatcatacgccgtttgatgaataccctcaaataaccgaagcggtgtgggaggaattctgctctctcaagatcacccaagagtttagggaatcaagcgaggcacatcgcctactgcaacagcggaatgagcacctgcatcggctgggcaccgcagggtacatcggcaaggaggcaatatgggcccaagaagatgcagccgctgcagcagcgaatgtccctgccctgttttcagacatccctgaacaaagagctcgcaactgggcgcgggcaaggggtaaggtcaacccggacggctctgtcacatttgagaacaaaagtgatgccgtcgtctatcaggaactgttgggcttggttgctgaacaagcttcacaaagcgaggttgagtccgcgccgaagaggcgcgaagatgacatcctcacaaaggcgctcggaaccaaagaacatcctggccgaactcggggaattggtagcgatgtgccctggaagcatggactccctcagtacagctcccaatacaggaaacggaaagtctccaaggaagagagggacgctcatttgaaggccgaacttaaggttgaggtcattcaagaactagaagctagcatgaatgcaagggtggaagaaagggttaacaaggtcctcgccgacatgaatataccccgagtcacaacacctgctgtgcaaccaactcctcttgtacaacacgacgcgagtccgtcacagcataggagtagttgtgcatccatagaggtgccggcccctggtctcccgatcgcaccactagctgcagtggaccacatcgagggcgcagcacagtgtgtcctactagcgagagtccacccaactttcgctcctgaagtcgctgagggcatggctttcaagccctcggttacagacaaggtccacggcgcagacctgctagctaggtatgccaaggtgtccatcgatacagtaaaggacacctggtcaggctatccgctgcccatgcccccaaatgatgaaatcatgactttgggcgatgcgcgcaagacgttcatacaatggcccaaagaagacatagttgtgaagatgactcctcgtccaagtcgaccgacggagcttacacctccgaagtctaagctatcaattgaggctccccgtggaccggcattgtcagtacctcattctcccggtggagctgatatggacttggcagatatagctcaaatcttggctccaataaagaccacaagaaaggccgatagctccccaccacttgtcaagggccagaagcgtaaacgcggcaaggggaaggtcagggagttggcgccggagccaaaaagggcaaggctgcgacgtcgatgccggttgtgttggatcgagagtcgtcgccatggtaatcaggttgggttccttgatccatccatggtgaatgaggttaatttacgacagagcttcactgaggtggttgactatgtcaaccggcgacattggattctcctagtcatcgtacctaagtggagtaaggttacctaccttaactccaataagtccaaagattatgatttcagtgaaatcaccaaggccttaaatatggcttggggcccatatgtggaaaagggtggtaggcacaaggagggcaagtacgaactttatcatgacaccaagtttgcatgcgcacaacagatcggagaccaatgtggtttccacgtgtgccacaacatgtcaacacttctaagagaggtgaaagatttcgaccctgaggttgttgctaatggcgaataa

SEQ ID NO: 91841 - DNA, 4059 bp, Oryza sativa
  Clone ID: PAT_MRT4530_90377C.1
atgcgccccgcctccgcctccgccgccgacgagcgccccctcgtcgagctcacctccgccgccgcgaccgcacccgcgtccaccgagacctccacgttctcctccgcaccgggattcacccgcgcggtgcgctgcagcggcgcgggatcctcctcctcgtcctcatcctcctccgacgagggcggcggtggggtgtacccggggaacgcgatctcgacgaccaagtacacggcggcgagcttcgtgcccaagtcgctgttcgagcagttccgccgcgccgccaactgcttcttcctcgtcgtcgcctgcgtctcgttcagcccgctcgcgccgtaccgggccgtctccgtcctcctcccgctcgtcgtcgtcgtcggggccgccatggccaaggagcccgtcgaggactggcgacgaaagcagcaggacattgaagtgaatagcaggaaggtcgaggtttatgatggcacccaatcatttcatcagacagaatggaagaagcttcaagttggtgatatagtgaaagtgaagaaagatgagttcttccctgctgaccttgttttgctttcttcgagctatgaggatggaatatgttatgttgagacaatgaatcttgatggagagacaaacttgaagcgaaaacaatcattggacgtgactgcgggcttgaatgaggatcattctttccacaccttcaaggctttcattcaatgtgaggatccaaatgagaaattatattcctttttagggacattgcactataatgggcaacaatatcctctatccccacaacagatcctgttaagggattcaaagcttcggaacacaaatcaaatttatggcattgtaattttcacggggcatgacacaaaggtaatgcagaatgcaatggaaccaccatcaaagaggagttctgttgaacgaagaatggataagatcatttatcttctttttgtaattctctttgctattgcatcgtttgggtcggttatgtttggtatcagaacgagggctgaattaagtgcagggaactatgcctggtacctaaggccagataactcaactatgtactttgatccaaacagagcaacattagcagctatttgccattttctgacaagtctcatgctgtatgtgtgcttggtgcccatttccttgtatatatcgatagagatcgttaaagtcttacagagcacattcataaatcaagaccagaacatgtattgcgaagagtctgataaaccagcaagggctcgcacatcaaatttgaatgaggaacttggtcaagtgcacaccatactctctgacaaaacagccaccttaacatgtaattcgatggagttcctgaaatgttccattgctggtgttgcttatggaaataggcctatagaagtgcagatgccttatggaggaatagaggaagaatgtgttgatattgggcagaagggtgctgttaaatctgtaagaccggtaaagggattcaactttactgatgaccgcttgatgaatggacagtggagcaaagagtgccatcaagatgttatagaaatgtttttccgtgtgttagctgtctgtcatactgcaattcctgttgcagatagaacttctggtgggatgtcttatgaggcggaatcacctgatgaaggagctcttgttgcagctgcaagggaacttggttttgaattttatcataggtcacagacaagcatatcagtgcatgaatatgatcctgtcttcggtagaaaggtggatagaacctataagctactgaacaccctagagtttagcagtgcccgcaagcgtatgtctgtcattgtgagtacagaagagggtcggctatttctgttctgtaaaggggcagacagtgttattcttgagaggctctctaaggataatagcaaagcttgtctgacaaatacaaagtgccacatcgacgagtattctgaggcaggtttgcggactctggcacttgcatatcgtgaacttactgaggacgagtatgttgcgtggaatatggagtactcagctgcaaagaattctgtacataatgatcatgatgtagctgttgagaaggcatcagaaaatatcgagaaagatttggttcttttaggtgctactgctgtggaggacagattgcaaaagggggtcccagagtgtattcacaaactagctcaagctggaattaagatctggattctcacaggtgacaaattggagacagctgtcaacatagggttagtaccatatgttgcttacgttcctgacaattatgcttgcaaccttttgaggaaagggatggaggaagtttatataactctggataacccaggcacgaatgttcctgaggaacacaatggagaaagcagtggaatggctccatacgaacaaattggtagaaagttagaagatgctcgaaggcaaattttgcagaaaggaacttcagccccatttgcccttataattgatggcaatgctctaacacatgctctcatgggtggtcttaaaaccgcatttctggatctagcagttgattgtgcgtctgttttatgctgtcgcatatccccgaaacagaaagcgctgattaccagactggttaaaaataggataaggaaaaccacactagcaattggcgatggagcaaatgatgtcggtatgctacaagaggctgacattggggttggaataagtggtgctgaaggaatgcaggctgtgatggcaagtgactttgcaatagctcaatttcgttttttagaacggttactccttgtacatggtcattggtgttatcgccgaattgcagcgatgatatgctactttttcttcaagaatatcacatttggctttacacttttctggtttgaggctcatgctatgttctcagcccaacctggttacaacgattggttcatatctttctacaatgttgcctttacatctctcccggtcattgctctaggtgtctttgataaagatgtctcttcccgtgtttgcctcgaggtcccttcattacatcaagatggcgtgaataatttattcttcagctggtctcgtatactcagttggatgctgaacggagtttgctgttcaataataatatactttggagccctccatgctgtcctcattcaagctgtccgacaggatggccacgttgctggatttgacatccttggagtgactatgtatacttgcgtagtttggactgtcaactgccaactagcactctacatcagctacttcacctggatacagcatttcgtcatctggggcagcatactgatttggtacacttttctggtcatctacggctcgtttcctccaacaatatcaaccagcgcatatcatgttttctgggaagcttgcgcttctagccctttatactggttatccactctagtcattgttgtgacagccttgatcccatacttcctctacaaaatcacacagtcgctgttttgcccacagcattgtgatcaagttcagagacctaattcaaaagaattggtggctcaataaatatgggactgaaggggctcaattgagagattgctatggtatcctaacaactttacagttcagtttataacccatgatattttagatggtgaatatagtatcaaaacaaaaatagctagttaatgtgttagagttagattgtgtacatacttgagctcatacccaaaaaattagagtcgggctatagtgttgcatgagttgatatgggaatggaagtggctgcttcgacaggctcattgtttccattatactggtaaagtacagttgcttcagtggggaacttgtgttttcggacacaaggctgatatttttgctggtcaacaaacccgtgagttcactcttggtcctctgatatggctcgtccttttttttttgtttattagtaatcatggttgtaatttggttgccaggagggatgagatctgtcggcttgtgctttgtacagccgaattagatgtttattcccccttttatgcaccatcattgtaattaagtttaagcagataatgttggcgtttttttgtgaggccaaatgctgttctt

SEQ ID NO: 91842 - DNA, 4926 bp, Oryza sativa
  Clone ID: PAT_MRT4530_90378C.1
ctaccgccgccgttcgtccgtcccgcccgtcgcgccgccgcttacgcgtcccccgccgccgctgcctctgtccgactccgcgccgaggaggcggctgctcgtcgtggccgccgccgccgcctcccactccacaacctcagggtcgaaatctttcacctctcttagaagtgttgacatgttgtggcacacgtggaaaccacattggtctccgatctgttgtgcgcatgcaaacttggtgtcatgataaagttcattcttgccctccttgtgcctaccacccttttccacatatggaccccaagccatatttaaggccttggtgatttcacggttgacatagtcaaccacctcagtgaagctctgtcgtaaattaacctcattcaccatggatggatcaaggaacccaacctgattaccatggcgacgactctcgatccaacacaacaaggagtagcatttaagaagaccagtgtccaacttccggatcctgaaaaggtcgaagaggtcatcaaagcctatagttatataggcaggcgacgataggaacggctggtggtcgtgatgtccaactatggatgactccctcattttccgcttggcattgcttagctccatgtattgcttatgtagctctcggcaagcaatacccatcacagctaacacattgtcctccaccaatggcatgcctagctcaaattgggctggcgccctcacgaccttccccgatttgctcaccggcatcgacgtcgcagccttgcccctttttggctccggcgccaactccccgaccttccccttgccgcgttcacgcttctggcccttgacaagtggtggggagctatcggcctttcttgtggtctttattggagccaagctttgagctatatctgccaagtccatatcagctccaccgggagaatgaggtactgacaatgccggtccacggggagcctcaattgatagcttagacttgggaggtgtaagctccgtcggtcgacttggacgaggagtcatcttcacaactatgtcttctttgggccattgtatgaacgtcttgcgcgcatcgcccaaagtcatgatttcatcatttgggggcacgggcagcggatagcctgaccaggtgtcctttactgtatcgatggacaccttggcatacccagctagcaggtctgcgccgtggaccttgtctgtaaccgagggcttgaaagccatgccctcagcgacttcaggagcgaaagttgggtggactctcgctagtaggacacactgtgctgcgccctcgatgtggtccactgcaactagtggtgcgatcgggagaccaggggccggcacctctgtggatgcacaactactcctatgcttgttaaccctttcttccacccttgcattcatgctagcttctagttcttgaatgacctcaaccttaagttcggccttcaaacgagcgtccctctcttccttggagactttccgtttcctgtattgggatctgtactgagggagtccatgcttccagggcacatcgctaccaattccccgagttcggccaggatgttctttggttccgagcgcctttgtgaggatgtcatcttcgcgcctcttcggcgcggactcaacctcgctttgtgaagcttgttcagtaaccaagcccaacagttcctgatagacgacggcatcacttttgttctcaaatgtgacagagccgtccgggttgaccttaccccttgcccgcgcccagttgcgagctctttgttcagggatgtctgaaaacggggcagggacattcgctgctgcagcggctgcatcttcttgagcccatattgcctccttgcagatgtaccctgcggtgcccagccgatgcgggtgctcattccgctgttgcagtaggcgatgtgcctcgcttgattccctaaactcttgggtggtcttgagagagcagaattcctcccaaaccgcttcggttatttgagggtattcatcgaacggcgtatgattgccgggcgggttgacaaactcggtgaagagcttcgacttccaattcttccaagctttgcccatcttttggaatgccttccgcttgagcctatcctttgcttcggctggaaatgtgaaccatttctccattgccgtccaagctcgctctttctcggcttctgtgaccttcccgatatctttatggaggatcccgaagttctcacgtgccgctatcccgcagcagttagaccatcttccaatgacagtcctgggcgccgtgggcctggagaggagacgacgagcagaggaggcggcacacggcgacgacgagtcccggtcgagaggaggaggcggcggagaggagatcccggtggcggcgacgacggtcctggcgtggcgactgagaggaggtcccggcggccgtcgagagagtgagtgaggcggcagcggtggagaggtcgaggcggcggtggggagggcggcgtagagggcggagatggcggtagagagggcggcggagatggcggcggagaggtcgatggagatggacggcggcggtcgagaggcggcggcggtggagagggcggcagagaggtcgaggcggcggtggggagggcggcgtagagggcggcggcagagatggtggcggagaggtcgaggtcgaggcggtggagaggagggcgtagagggtggcggagagggcggcggatttggcggcggcgaggacggcggtggagaggtcgaggcggcggtggagaggagggcgtagagggtggcagagaggtcgagagaggcgaggcggcggtcgagagagtgagtgagtgagagtgggcgccggatctggatcgatctgtgacgggcgccaaccgtggagccgtcacaggtaagaccacctgtgacgggcccaacactctgggccatcacaggtgaggtcacctgtgacggccgtgcatattgaacttcatcttcttcctcctcctcttctagaggtatttcttgacctatgccgtggacgtgctggttgtaatcatcctcgtctgcaatattgtccaatccaacaattctccttttcccttcacgaacaacatgtactttcttgttacacgggtcaactatgtagaacacttgaacaacttgtttggcgagaacgaacggttcatccttgtacgcgttgttagccaagttgacagtggtgaaaccttcattgtcaacttttacattgcgaagatcgacccatcgacaacgaaacaacgggactttgaacttcaagtaatctagctccaatatttgctcaactctaccatagtattgatcacgacgaccaccgtcactagcagcctcgatgcgtaacccactgttctgcactgtgcatttgctgtcttgcttgaccgtgtgaaaggtgtatccatttatgtcatatccttgccaggtggtggcactccattcaggaccctgtgacaaccactgaagtgtttcactaggcaagttctgcaacctggcaattcggttcttcagccactcgttgaaagaagacatgtgcttattcctgacccaactctctgatcggcctgggttctcttgtcggataactgcaaggtgttcatcaacgtacggcaccacctcagtcatatgctgtagtaccgtgaaatgagctttatcgtacaccttccgatccaacctaatagtctttcttccaacagtaccaacaccgtcaagcctcccttcgtgatgagatcgtggtaatccaattgaagatgtttctgacatgtagtccacacaaaattcgatggcctcttcggtggtgtaactctcgatgatactcccctcggggtgtgaacggttccgtacataacccttaaggatccccaggtacctttcgcaaggatacatctgcgtcatgaatgctggaccacagcactttgtttgcctcacaaggtgcaccggaagatgttccattatgtcaaagaaagttggaggaaagtacatctcaagatgacatagggttctcacaagttctgcctgtagtttatctagtccctcgggatcaatgatcttctggccgattgcatggaagaaggaacacaaccgctggatcgggtgtcgcaccttaggaggcaaaatattccttattgcaacgggcaacagctgtgtgataagaacgtggcaatcatgcgacttcattccaaccaacttaagatcttgcagtgaaacgagcctactgattcttgatgagtaaccagatggaacctttataccactcaaacatgttagcaaatcaatcttctcttctttcgagagagtgtagcaggctggaggaaggtaaaccctgttggattccgtggttatgggatgtagctccgaccgaacacccatatcttccagatctcgtcgggcgttgagaccatcctttgtagtacttccttcaccttcactctttgctcgtttgtatcttgatcccccacagatagggcagacatccaagtcagcgtattcttgcttcgcttcatatgtcgtctgaggtaaattgttcccctctggcaacagatcctttaacagctcaaggagttctgtaaaactcttgtccgaccagccattaatagccttaagcttcatcagttccaacacgcatgacaacttgctgtgcttcgacttgcatccatcatacaacggcatctggcaatcttccaccaacttactaaacttctcataatctctgtcgttgtcctctgcgtcttcaatgtcatgcaacattgtagatagacattgagtgtccaaatctatggtctctccacctaaaggagaaggtacgaacatgccttctcgagctgcggcggtgttctctacaccctgatccaacacttcttcagctctgacgggttttcctttcggcccgtcacaggtaaggggatacctgtgacgggccgcggccagatgcctcaccggtgacggcat

SEQ ID NO: 91843 - DNA, 218 bp, Oryza sativa
  Clone ID: PAT_MRT4530_90379C.1
aactagattaaaatttttcaactagtggggcttcttaatttcaaacatgcatttaacaaacacaaccctaaaaggaaaactcaatctgtgacattatatctttagctccataaatctaatagatatatcctaatccaatttcatgaagaaagtccaacaccatccaaattttggtagctatcagtgttcaaatccctccatgctcctgttgcctacaa

SEQ ID NO: 91844 - DNA, 258 bp, Oryza sativa
  Clone ID: PAT_MRT4530_9037C.1
atggcagcagcaacaacaagccatcagatcggctacagcagggaaacgaaagaagaagagcagcagcacgaactcaccacaaataagcaaaacgaaaagaaaccaccggtggcgatagatgacgacgtccgtggcctccggctatggccgtggtggcggcgcaaagacggcggcggcaaccaggacgagggcggcagtggcaagagcgcaggcgtgagatccgaccttcacaaacttcccccggccaaccacaagtag

SEQ ID NO: 91845 - DNA, 3120 bp, Oryza sativa
  Clone ID: PAT_MRT4530_90380C.1
atggagagcaagaggcgcctgatgtcgcagctgaagaagtgttggatcagggtgtacagaacaccgccgcagctcgagaaggcatacgcagaggacaacgacagagattatgagaagtttagtaagttggtggaagattgccagatgccgttgtatgatggatgcaagtcgaagcacagcaagttgtcatgcgtgttggaactgatgaagcttaaggctattaatggctggtcggacaagagttttacagaactccttgagctgttaaaggatctgttgccagaggggaacaatttacctcagacgacatatgaagcgaagcaagtattatgtccgttgggcctggaggatcttgaagttcgccactgcatagatttgatgcatgtcgagaagaatgtatgcgagagtttaatgggattactgcttaacccaggtactacaaaggatggtctcaacgcccgacgagatctggaagatatgggtgttcggtcggagctacatcccataaccacggaatccggcagggtttaccttcctccagcctgctacactctctcgaaagaagagaagattgatttgctaacatgtttgagtggtataaaggttccatctggttactcatcaagaatcagtaggctcgtttcactgcaagatcttaagttggttggaatgaagtcgcatgattgccacgttcttatcacacagctgttgcccgttgcaataaggaatattttgcctcctaaggtgcgacacccgatccagcggttgtgttccttcttccatgcaatcggccagaagatcattgatcccgagggactagataaactacaggcagaacttgtgagaaccctatgtcatcttgagatgtactttcctccaactttctttgacataatggaacatcttccggtgcaccttgtgaggcaaacaaagtgttgtggtccagcattcatgacgcagatgtatccttgcgaaaggcccacggcgcccaggactgtcattggaagatggtctaactgctgcgggatagcggcacgtgagaacttcgggatcctccataaagatatcgggaaggtcacagaagccgagaaagagcgagcttggacggcaatggagaaatggttcacatttccagccgaagcaaaggataggctcaagcggaaggcattccaaaagatgggcaaagcttggaagaattggaagtcgaagctcttcaccgagtttgtcaacccgcccggcaatcatacgccgttcgatgaataccctcaaataaccgaagcggtttgggaggaattctgctctctcaagaccacccaagagtttagggaatcaagcgaggcacatcgcctactgcaacagcggaatgagcacccgcatcggctgggcaccgcagggtacatcggcaaggaggcaatatgggcccaagaagatgcagccgctgcagcagcgaatgtccctgccccgttttcagacatccctgaacaaagagctcgcaactgggcgcgggcaaggggtaaggtcaacccgaacggctctgtcacatttgagaacaaaagtgatgccgtcgtctatcaggaactgttgggcttggttactgaacaagcttcacaaagcgaggttgagtccgcgccgaagaggcgcgaagatgacatcctcacaaaggcgctcggaaccaaagaacatcctggccgaactcggggaattggtagcgatgtgccctggaagcatggactccctcagtacagatcccaatacaggaaacggaaagtctccaaggaagagagggacgctcgtttgaaggccgaacttaaggttgaggtcattcaagaactagaagctagcatgaatgcaagggtggaagaaagggttaacaagcataggagtagttgtgcatccacagaggtgccggcccctggtctcccgatcgcaccactagctgcagtggaccacatcgagggcgcagcacagtgtgtcctactagcgagagtccacccaactttcgctcctgaagtcgctgagggcatggctttcaagccctcggttacagacaaggtccacggcgcagacctgctagctaggtatgccaaggtgtccatcgatacagtaaaggacacctggtcaggctatctgctgcccgtgcccccaaatgatgaaatcatgactttcggcgatgcgcgcaagacgttcatacaatggcccaaagaagacatagttgtgaagatgactcctcgtccaagtcgaccgacggagcttacacctcccaagtctaagctatcaattgaggctccccgtggaccggcattgtcagtacctcattctcccggtggagctgatatggacttggcagatatagctcaaagcttggctccaataaagaccacaagaaaggccgatagctccccaccacttgtcaagggccagaagcgtgaacgcggcaaggggaaggtcggggagttggcgccggagccaaaaaggggcaaggctgcgacgtcgatgccggtgagcaaatcggggaaggtcgtgagggcgccagcccaatttgagctaggcatgccattggtggaggacaatgtgttagctgtgatgggtattgcttgccgagagctacataagcaatacatggagctaagcaatgccaagcggaaaatgagggagtcatccatagttggacatcacgaccaccagccgttcctatcgtcgcctgcctatataactataggctttgatgacctcttcgaccttttcaggatccggaagttggacactggtcttcttaaatgctactccttgttgtgttggatcgagagtcgtcgccatggtaatcaggttgggttccttgatccatccatggtgaatgaggttaatttacgacagagcttcactgaggtggttgactatgtcaaccgtgaaatcaccaaggccttaaatatggcttggggcccatatgtggaaaagggtggtaggcacaaggagggcaagaatgaactttatcatgacaccaagtttgcatgcgcacaacagatcggagaccaatgtggtttccacgtgtgccacaacatgtcaacacttctaagagaggtgaaagatttcgaccctgaggttgttgctaatggcgaataa

SEQ ID NO: 91846 - DNA, 2649 bp, Oryza sativa
  Clone ID: PAT_MRT4530_90381C.1
atgacaacgcccggcgcaaacccgccctccccaacacctgcgaggatccaggaagaagcaaacccagccacggagacagttgccgaaggtcatccctcgacaacagcggtcgaacaacccgaaattcatgaattgccgcaggaacaacatacgtcgatgtcgggtgggacaagtgcaagtaggtctagtagaaatccccggtcacaaaatatatggccgaccacagtgcaagttataagacaggttgacgctagtggtaggcccacggcgcccaggactgtcattggaagatggtctaactgctacgggctagcggcacgtgagaacttcgggatcctccataaagataccgggaaggtcacagaagccgagaaagagcaagcttggacaacaatggagaaatggttcacatttccggctgaagcaaaagataggctcaagcggaaggcattccataagatgggcaaagcttggaagaattggaagtcgaagctcttcaccgagtttgtcaacccgtccggcaatcatacgtcgttcgatgagtaccctcaaataaccaaagcgcggaatgagcacccgcatcggctgggcaccgcagggtacatcggcaaggaggcaatatgggcccaagaagatgcagccgctgcagtagcgaatgtccctgccccgttttcagacatccctgaacaaagagctcgcaactgcgcgcgggcaaggggtaaggtcaacccggacggctctgtcacatttgagaacaaaagtgatgccgtcgtctatcaggaactgttgggcttggttgctgaacaagcttcacaaagcgaggttgagtccgcgccgaagaggcgcgaagatgacatcctcacaaaggcgctcggaaccaaagaacatcctggccggactcggggaattggtagcgatgtgccctggaagcatggactcccgcagtacagctcccaatacaggaaacggaaagtctccgaggaagagagggacgctcgtttgaaggccgaacttaaggttgaggtcattcaagaactagaagctagcatgaatgcaagggtggaagaaagggttaacaaggtcctcgccgacatgaatataccccgaggaacaacacctgctgtgcatccaactcctcgtgcacaacacgacgcgagtccgtcacagcataggagtagttgttcatccacagaggtgccggcccctggtctcccggtcgcaccactagctgcagtggaccacatcgagtgtgtcctactagcgagagtccacccaactttcgctcctgaagtcgctgagggcatggatttcaagccctcggttacagacaaggtccacggcgcagacctgctagctgggtataccaaggtgtccatcgatacagtaaaggacacctggtcaggctatccgctgcccgtgccccccaatgatgaaatcatgactttgggcgatgcgtgcaagacgttcatacaatggcccaaagaagacatagttgtgaagatgactcctcgtccaagtcgaccgacagagcttacacctcccaagtctaagctatcaattgaggctccccatagactggcattgtcagtacctcaatctcctggtggagctgatatggactttgcagatatagctcaaagcttggctccaataaagaccacaagaaaggccgatagctccccaccacttgtcaagggccagaagcgtgaacgtggcaaggggaaggtcggggagttggcaccggagccaaaaaggggcaaggctgcgacgtcgatgccagtgagcaaagcggggaaggtcgtgagggcgccagcccaatttgagctaggcatgccattggtggaggacaatgtgttagccgtgatgggtattgcttgccgagagctacataagcaatacatggagctaagcaatgccaagcggaaaatgagggagtcatccatagttggacatcacgaccaccagccattcctatcgtcgcttgcctatataactataggctttgatgacctcttcgaccttttcaggatccggaagttggacactggtcttctaaaatgctactccttgttgtgttggatcgagagtcgtcaccttggtaatcaggttgggttccttgatccatccatggtgaacgaggttaatttacgacagagcttcactgaggtgattcactatgtcaaccggtgtttatgggcccatcaagacaaggagtacatcatgtgcgcacacaaccaagagcgacattggattctcctagtcatcgtacctaagtggagtagggttacctaccttaactccaataagtccaaagattatgatttcagtgaaatcaccaaggccttaaatatggcttggggcccatatgtggaaaagggtggtaggcacaaggagggcaaggacgaactttatcatgacaccaagtttgcatgtgcacaacagatcggagaccaatgtggttttccacgtgtaccacaacatgtcaacacttctaagagagaaaggcagagctggcttcaagatctcacccatcaaccccccgctatcagaggcgaagttgtggaggtcgaggacattatggctttaatccatttgaaacttgatgatgttgaaacatttttatattatgtccgaaacattaagttgtaa

SEQ ID NO: 91847 - DNA, 1468 bp, Oryza sativa
  Clone ID: PAT_MRT4530_90382C.1
atggtgggttgtgagcacatggttttgaaggtcgtgctcatgacaattaaggaccggttcgcgagctactgttgtgaaacatttatcgtgctaaccacaagccagcgtgggcaacggctttatcttttgtgtagcgtgattcattatagtgcgccagactgagaagtggcgagaagtccacgggggtcgctggggagtccatgccttgtttataagggggtgattatgatccaggaaaggtgcgctgtaatgggttatgttgtgcaaggggtattgtcacaactcctttccgaggtacctcctggtttggagttagatctgtacagccgggtatggttgttcaggatggttgggcctgtgcagcatgggtgtgctgttcagtgttgattaaaatttttaattaattactctactgttttactactcttaactctttgctaaatgctgcttttgcaaatgagcctatattatgccatcctttggtatccttgtgcacttgcatatttgctgtgtggcttgttgagtatgtcatatactcattcttgcaataatcaatcaaacctcagttgaagataaaggatccagaaggagaagacgtttggcttataccccagttgagctgcctgtgggagtggagctgaagccatcgctagacctgtcagtttgtgtacctcggctgattcctggacgaggattttatgcacaaattagttcggaaattactagtgaattttcgggcgtgacaagttggtatcagagccaggttgactgtaggataagccaaatggtcaaaccttaaggacaaatcttccgaaaacataatttgtgaaaattttcctttcttccttatctagaattctttgcaaatcgttttgtcgttcttcccccttcctctttcaacttgagtagtcgttaatcttgatggagaaactcgaagacgtcgatgttgtcaacttctgcaagtcaagtggatcgaggaataagaagatgatagtcgaatcttaagtgttcagatagagtgaagtttggaatctatcttagaacctatgccgccaaagtagcagaacgacaaccaatcacttgggaagagtttaccgaaggattcaagaagacacacgtacctgtaggagttgttgctttgaagaagcgtgagtttagggctttgaagcacaaggatcgtaccgtggcagagtatcttcatgagttcaatcgtctggcacgttatgctccagaagatgtgcgtactgacgaggaaaggcaggagaagtttttggaaggcttaaaggatgagctgtcagttatgttgatctctcatgactatgaggattttcaggagttggttgataaagcaattcgactggaagacaagaagaacaggatggaacaaaagattttgctaccaatccagctgaggattcgggatggagggagggcacgccaggatggtgttgatgatgaggctggagag

SEQ ID NO: 91848 - DNA, 1479 bp, Oryza sativa
  Clone ID: PAT_MRT4530_90383C.1
atggagaaatggttcacatttccagccgaagcaaaggataggctcaagcggaaggcattccaaaagatgggcaaagcttggaagaattggaagtcgaagctcttcaccgagtttgtcaacccgcccggcaatcatacgccgttcgatgaataccctcaaataaccgaagcggtgtgggaggaattctgctctttcaagaccacccaagagtttagggaatcaagcgaggcacatcgtgtactgcaacagcggaatgagcacccgcatcggctgggcaccgcagggtacatcggcaaggaggcaatatgggcccaagaagatgcagccgctgcagcagcgaatgtccctgccccgttttcagacatccctgaacaaagagctcgcaactgggcgcgggcaaggggtaaggtcaacccggacggctctgtcacatttgagaacaaaagtgatgccgtcgtctatcaggaactgggcgcagcacagtgtgtcctactagcgagagtccacccaactttcgctcctgaagtcgctgagggcatggctttcaagccctcggttacagacaaggtccacggcgcagacctgctagctgggtatgccaaggtgtccatcgatacagtaaaggacacctggtcaggctatccgctgcccgtgcccccaaatgatgaaatcatgactttgggcgatgcgcgcaagacgttcatacaatggcccaaagaagacatagttgtgaagatgactcctcgtccaagtcgaccgacggagcttacacctcccaagtctaagctatcaattgaggctccccgtggaccggcattgtcagtacctcattctcccggtggagctgatatggacttggcagatatagctcaaagcttggctccaataaagaccacaagaaaggccgatagctccccaccacttgtcaagggccagaagcgtgaacgcggcaaggggaaggtcggggagttggcgccggagccaaaaaggggcaaggctgcgacgtcgatgccggtgagcaaatcggggaaggtcgtgagggcgccagcccaatttgagctaggcatgccattggtggaggacaatgtgttagctgtgatgggtattgcttgccgagagctacataagcaatacatggagctaagcaatgccaagcggaaaatgagggagtcatccatagtaggacatcacgaccaccagccgttcctatcgtcgcctgcctatataactataggttttgatgacctcttcgaccttttcaggatccggaagttggacactggtcttctaaaatgctactccttgttgtgttggatcgagagtcgtcgccatggtaatcaggttgggttccttgatccatccatggtgaatgaggttaatttacgacagagcttcactgaggtggttgactatgtcaaccggtgtttatgggcccatcaagacaaggagtacatcatgtgcgcacacaaccaagagtaa

SEQ ID NO: 91849 - DNA, 191 bp, Oryza sativa
  Clone ID: PAT_MRT4530_90384C.1
ttttcggtttaagccaagccaacccaaccacacgccgagacacatacaaatggactagggtactactctatgcctgttgagaaggccactgtagctgagcggattctgctacgagagaagaagcaggctgtgtctcaaagggtgaagctggtgcgaatagggtaccatgctgtgcggatatggcggagcga

SEQ ID NO: 91850 - DNA, 2769 bp, Oryza sativa
  Clone ID: PAT_MRT4530_90385C.1
ttagctagcctcaggatttgctagccatgccctcaaatggattaaagccataatgtcatcgacctccacaactttctgtttaataaataagaggttaattagcatgttttgaatagcaatgtaggtattgaaatgagctttttctctattagcaacaacctcagggtcgaaatctttcacctctcttagaagtgttgacatgttgtggcacacgtggaaaccacattggtctccgatctgttgtgcgcatgcaaacttggtgtcatgataaagttcgtccttgccctccctgtgtctaccacccttttctacatatgggccacaagccatatttaaggccttggtgatttcactgaaatcataatctttggacttattggagttaaggtaggtaaccctactccacttaggtacgatgactaggagaatccaatgttgctcttggttgtgtgcgcacatgatgtactccttgtcttgatgggcccataaacaccggttgacatagtcaaccatctcagtgaagctctgttgtaaattaacctcgttcaccatggatggatcaaggaatccaacctgattaccaaggcgacgactctcgatccaacacaacaaggtgtagcattttagaagaccagtgtccaacttccggatcctgaaaaggtcgaagaggtcatcaaagcccatagttatataggcaggcgacaataggaacggctggtggtcgtgatgtccaactatggatgactccctcattttccgcttggcattgcttagctctatgtattgcttatgtagctctcggcaagcaatacccatcacggctaacacattgtcctctaccaatggcatgcctagctcaaattgggctggcgccctcacgaccttccccgctttgctcaccggcatcgacgtcgcagccttgcccctttttggctccggcgccaactccccgaccttccccttgccgcgttcacgcttcttgtctttgacaagtggtggggagctatcggcctttcttgtggtctttattggagccaagctttgagttatatctgccaagtccatatcagctccaccaggagaatgaggtactgataatgccggtccacaaggagcctcaattgatagcttagacttgggaggtgtaagctccgtcggttgacttggacgaggagtcatcttcacaactatgtcttctttgggccattgtatgaacgtcttgcgtgcatcgcccaaagtcatgatttcatcattggggggcacgggcagtggatagcctgaccaggtgtcctttactgtatcgatggacaccttggcatacctagctagcaggtctgcgccgtggaccttgtctgtaaccgagggcttgaaagccatgccctcagcgacttcaggagcgaaagttgggtggactctcgctagtaggacacactgtgctgcgccctcgatgtggtccactgcagctagtggtgcgatcgggagaccaggggccggcacctctgtggatgcacaactactcctatgctgtgacggactcgggtcgtgttgtgcacgaggagttggatgcataacaggtgttgtgactcggggtatattcatgtcggcgaggaccttattaaccctttcttccacccttgcattcatgctagcttctagttcttgaatgacctcaaccttaagttcggccttcaaacgagcgtccctctcttgcttggagactttccgtttcctgtattgggagctgtactgagggagtccatgcttccagggcacatcgctaccaattccccgagtccgaccaggatattctttggttccgagcgcctttgtgaggatgtcatcttcgcgcctcttcggcgcggactcaacctcgctttgtgaagcttgttcagcaaccaagcccaacagttcctgatagacgacggcatcacttttgttctcaaatgtgacagagccatccgggttgaccttaccccttgcccgcgcccagttgcgagctctttgttcagggatgtgtgaaaacggggcagggacattcgctgctgcagcggctgcatcttcatgggcccatattgcctccttgccgatgtaccctgcggtgcccagccgatgcgggtgctcattccgctgttgcagtaggcgatgtgcctcgcttgattctctaaactcttgggtgttcttgagagagcagaattcctcccacaccgcttcggttatttgagggtattcatcgaacggcgtatgattgccgggcgggttgacaaactcggtgaagagcttagacttccaattcttccaagctttgcccatcttttggaatgccttccgcttgagcctatcctttgcttcagccggaaatgtgaaccatttctccattgctgtccaagctcgctctttctcggcttctgtgaccttcccgatatctttatggaggatcccgaagttctcacgtgccgctagcccgcagcagttagaccatcttccaatgacagtcctaggcgccgtgggcctaccactagcgtcaatctctcttataacttgcactgtggtcggccatatattttgtgaccggggatttctgctagacctacttgcacttgtcgcgcccgacatcaacgtatgttgttcctgcggcaattcatgaatttcgggttgttcgaccgccgttgtcgaaggatgaccttcggcaactgtccccgtggctgggtttgcttcttcctggatcctcgcaggtgttggggtgggcgggtttgcgccgggcgttgccat

SEQ ID NO: 91851 - DNA, 141 bp, Oryza sativa
  Clone ID: PAT_MRT4530_90386C.1
atgtctggcctctcctccagcaaagatatgaatctgcaaagaggtggaggagttcaccggtgggctggaattgatgtgctgaagaagtggtttagggtagtccaaattgcaacaaaggtgaaaatacctagcccaaagtga

SEQ ID NO: 91852 - DNA, 556 bp, Oryza sativa
  Clone ID: PAT_MRT4530_90387C.1
aaaaaaatttaaaaaaaaaaaaaaaaaaaaaaaaaaaaaaaataaaaaaaaaaataaaaaaaaaaaaaataaaaaaaaaaaaaaaaaaaaaaaaaaaaaaaaaaaagggggttaaggggctcacccttattaagggaattggtttgggtcctttccctccattccattccaggacttcccaaaccttttttttggcggaaaattccttttaggccgtttgggggttaaaaattccctaattaattaattggcagccatttttttggctgttttgcccggcccattttttcccttaaggataaaaaaccctttttttttccttaaaaaaaaaaagaaacaaaatgggggcgccctttttagggatcccaattttccttccccgtgcttccaacgtattattttttttttggggcccccaaatttaattccctggcccgccttttaccacccccgttcttggaaaacccttggcttcccccattttattcccttggaaaaaattccccttttccccagtgtggttattacaaaaaggcccccccccgttcccctttcc

SEQ ID NO: 91853 - DNA, 261 bp, Oryza sativa
  Clone ID: PAT_MRT4530_90388C.1
atgtcatgggcctgtcgctccctgcctaactgcccgaatggcaagtcgtcgtggtcggagctggtggggaagaagggcagcgaggcgatggcggtgatcttgagggagaggcctgacatcaccagggccatccttgtgccgcaggacgccgtcatcaccgacgactactgctgcaaccgcgttcggatcctcgtcgactgcggcgacggcggcggcgactgcggcgacgccagcgtcactgccgtcccgatgatcgggtga

SEQ ID NO: 91854 - DNA, 611 bp, Oryza sativa
  Clone ID: PAT_MRT4530_90389C.1
acggcacgaggagggaggccgagctaggattcgaaagctatcgcagtcagtcccatatacaagtaatagaagcaagtttaattagaaaaagatgccgcctgcttatttacaccttcaatattcaagaaggtgaagattgagattagtaaatcaattgattgggaagtgatagactatattgatgaggatacagtacataggtatgtcatttgcctgaaagacaatcctgacaaggttaagattttgaattgtaattatgaggactcaattttgaagacattgagttgcccatgcagaaaattggagtgcgagagccttccatgtcatcacatttttgctgtactgtttcatttgaagttggatgccattcctaaattctgcgtagagcgcaggtggactgttcaagcaaaaaatgttttcccttctgataggtatggtgaagcatatacatggtcagaccagatggaaaggtatcgtaggcttcgcagcttcggttctgaagttcttttgaagtgctcgatgtccaaggaatgtactttgaaggtaatggaaatgctggaacagttggacatagaaactgaaggtagcgagcaaaaggatatagttttgac

SEQ ID NO: 91855 - DNA, 347 bp, Oryza sativa
  unsure (1)..(347): unsure at all n locations
  Clone ID: PAT_MRT4530_9038C.1
tcctttggtaataaccaccaacnagangcaggagccggcggggatttttaaacgggtttgggggttacaccctattggaaccgattctttgatacaaaggtactccagaaaatgcattgaagtgcaaagtatctttgttcaaatcagctgttactattaacaccgtattaacaaattgcaaaagatcttgtattcaccataaaacacatgctgtggcactattctttctaacttcttagaggcaataaccgtggtggctttttcttatgagcaaagtggtaagagaagctctcaagacctcttcttcctttaagtttcctacgacttgttagacgcgttcttgagca

SEQ ID NO: 91856 - DNA, 222 bp, Oryza sativa
  Clone ID: PAT_MRT4530_90390C.1
ataacatattattggggctattttttttctgagatgcaaaattttttttataaacataacttatattgacaatccaatgcaaaattgaattaacagtacatattataacctagaaaaaaatcattctagatcataattgacataaaatattaaccaaatctattatctataaaccatattaatcataaatatagacccaaaatacgaactatttaaaaacaa

SEQ ID NO: 91857 - DNA, 142 bp, Oryza sativa
  Clone ID: PAT_MRT4530_90391C.1
ccgggctgcaggaatcggcacgaggagagagtccttatgcatctctctatctgtagcaacattcatctattttaatttacaaagcgcgttaattgatgtaaacataaggttacaagttattctagctacaaaagagtataaa

SEQ ID NO: 91858 - DNA, 1431 bp, Oryza sativa
  Clone ID: PAT_MRT4530_90392C.1
atggcggcgacggaggcgacgacgatcgaggacacgccgacgtggatcgtcgcggcggtgtgctccgccatcgtgctcatctccttcgccttcgagcgctcgctgcactacctcggcaaggcgctggagcgccggaggaggacgctgtacgaggccttgctcaagctcaaagaagagctgatgctgctggggttcatctcgctgctgctcgtcgtgttccaagagccgatacagaggatatgcatcgccgagagcctcatgggccactggctgccttgccggagcgacgggaaggcgtcgtcgcatcacggcgtcgccgccgcatcggctgccgtcgtctccggtgccggcgcgaggaggctgctcggagaagggacagccggatctgggcactgttcgagcaagggaaaagttccattgctctcgctccatgccatagaacagatacacatattcatctttgttctagccatcacccatgtcgtcctcagcgccgtcaccgttcttctgggacttctgcagatgcgaagatggaggcattgggagaacgccatcaaggcagatggagactttggtcctaagatgatcaacagagcgcagcaattcaagttcatccaggatcggtacaaggggttcgataaagtcaccatggtcataatttggatgcgttctttcttcaagcagttctatggatcggtaaccaaggatgactacacagcaatgaggcttggttttgtcatggaacattttagggggcacccaaaatttaacttttacgactacatgattaaagctcttgagaaggattataagagagtagttggcataaaatggtatctctggatatttgtaatgatcttcctcctactaaacatcactggttggcactcctacttctggatctcattaatcccattggttctgctgctcctgatcggaacgaagctggagcacatcatcactcagctagcctacgaagtggccacgaagcacaccgccgtggagggggacatagccgtgagcccgtcagacaatctcttctggttccacagccccaggctcgtgctcgccctcctccgcttcatcctgttccagaacgcgttcgagtttgcgtatttcatctggacaatggcaacgttcggcttcaactcctgcatcatggacaggctgccgtacagagtgtcaagaattgtcatatgcgtcgtcgtccaggtcctctgcagctacagcacgctccccctctacgccatcgtctcccatatggggagttcgttcaagagtgccgtcttctcagacgacgtcgcggacaatctaagaaaatgggccgacgaagctcggcggcgcacaggaagagccgccgccggtgttggctgcctaggtgcggcggcaggatcatcaaggcgggaagggattcacatacaaaacatgtga

SEQ ID NO: 91859 - DNA, 168 bp, Oryza sativa
  Clone ID: PAT_MRT4530_90393C.1
atggatgatgtggcggcggaggagcttggaggtggcgacgcaatagacaatggtgacgacgtccgaccacgccacgatccccagcaacacgacagtggcgactacgcgctgcaccacgtcgcggacacgctgcaccgattcgcctccgacgagcatgaccaaagatga

SEQ ID NO: 91860 - DNA, 183 bp, Oryza sativa
  Clone ID: PAT_MRT4530_90394C.1
atggaagtgaaaaaaccagtcggcagcagacgtagacagcttgcgttgaagatgatgatgcctattagcggtggcggcgacatggccaaccgtgaagacgatagcaccagtaggcatcatacgaggcagccggcggagacaccagtcggcggcggtgaaggcaagccggtggtgaagacgtag

SEQ ID NO: 91861 - DNA, 1098 bp, Oryza sativa
  Clone ID: PAT_MRT4530_90395C.1
atggcggttatattccagctggatatacgccaccccttttattattgccgaaatcttgtttcgacagttgtcacctcccacggcgtcggcggcggcggcggcgtgaaggtgaagcacgtgctcgaggtcagcctcgacctgaagaggtacgagtactacacgttcggggagtatgaccacgccgctgacgcgtacgtgccggacgcggcgctcgccgacggcgacgacgggcttcgctacgactatggcaacttctacgcgtccaagacgttcctcgacacggcgaggcaccgccgcgtgctgtggggctgggccaacgagtcggactccgctgccgacgacgtccgcaagggctgggccggcgtgcaggcgatcccgaggaaggtctggctggcgcccgacggcaagcagctgatgcagtggccggtcgccgagatcgagtccctccgcggcaaccacgtcaacgtcacggacaagctcgtcaggggcggcggcggcgggaactacttcgaggtgtccgggctcgccacgccggcgcaggcggacgtggaggcgacgttccaggtgatggacctcgacaaggccgagccgttcgacccggcgtggcgcggcgccgacgcgcaggcggtgtgcgcggcgcgcggcgcggacgccaggggcggcgtcggcccgttcggcctgtgggtgctcgcctccgacgagctcaaggagaggacggccgtgttcttcagcgtgttcaagcgcgacgacgccgacgtcgcccgcgtcgacggcggcaagaagcacgtcgtcctcacgtgcaacgacccgtccaggtcgtcgtacgccgagcaactctacaagccaacgtacgccggcttcgtcgacgtcgacatcgcccccaccggcaagatttccctacgaactctgattgatcactcggtggtggagagcttcggagggcacgggaagacggcgatcctcgcaagggtgtacccgaccaaggccgtcggcgacaaggcgcgcctcttcgtgttcaacaacggcgagtcggacgtcaaggtcaccaacctgaacgcgtacgacatgggctcggccaagatcacaacagatgcatga

SEQ ID NO: 91862 - DNA, 690 bp, Oryza sativa
  Clone ID: PAT_MRT4530_90396C.1
atggacaggcccgcctgcgaaaatcatctcaggaaaataaaaaaaaaccacggggcgccgccggccagggctccgctccgtccgttgccgtcggcgccgtcgtcgtcgtcgtcgaagcggccggcggaggcggtgaggagagaagccggcggcacgtgtcgtcgttcgtcgtggccggcggcggagggatgcggcagcgcgcggacgtcgtcgtggagggagccggcggcgcggacgtgggagaggagggagccggcggcgcgcggatctggagaggagggagccgtcggcggcgtcgtggtcgtggtcgtcgtcgaggagggaggccgccggcggcgaggagggatgtggcggctcgcggacattgtcgtggagggcaccggcggtgttgacgttgggagaggagggagccagcggcgcgcggatctggagcggagggagccatcggcggcgtcgcggtcgtcgagtgagagagggcgccggcggcgaggatggatgcggcggcgcgcgcgacttcgttgtggagtggacgcggcggcgcggacgttggagaggagggagccggcggcgcgcggatctggagcggattgtgagccatcggcggctgtctcggtcgtcgtcgtcggtggagggagtgctgcgtgcagagaggagtggaggcggcggctctgcgtgacgtttggagagtga

SEQ ID NO: 91863 - DNA, 427 bp, Oryza sativa
  Clone ID: PAT_MRT4530_90397C.1
accttttatgcgttccgggctctgtgatttggtggaattggtgagccggatggaccatgtgtcagcacccgggaaacagctatgaccatgattacgcccagctttatactgactcactatagggaaagctggtacgcctgcaggtaccggtcccggaattccccgggtctgacccacagcgtccggcccggggtgccagttttgacaccggcaacttcctcacggcctgacgtgaaggggaagggcgggaaggcgtacgggcagtacggcgcgctgtgcctggagacgccacggggttccccgacgcccgtgaaccacccccacttcccgctcggtgatcgtgaggcccggaacacggtgtacacagcaccgagatggtgtacacagttctcgttttagtttaggtgactatacacctggatcatat

SEQ ID NO: 91864 - DNA, 891 bp, Oryza sativa
  Clone ID: PAT_MRT4530_90398C.1
atggcggcggctatgtggccgctgctgctggcctgggccgtcgagcttacggttgtgtgttgctgctgtgacaatgaagtgttggaggagcccgccgtgctgtttcttcctccggggaagttggtcgacgagatggcgccggagggcgtggcgtcgatcacctgcggtggcggcagcattccgggagggctgttcgacgccaccgggacgggaatgaacaccaccgactggttcgccgccgacggaggtgactgcggaggagcttgctgctgcccgccggaaggtttaggcggttggccattattgccgccacttgattgcggcggcgatggcggcggcgatgagcgaggcggagatggttccgacgatgacgctgacgagccactcgatggcggtggctggttagaggacggagacggaggaggtgatggagttgagcctccggactggtgctgctgctgctgctgcggagggggcgaccagtttggcggcggcgaggagcggccgccgccgccgccaccgccaccatttccagatgactcggatggcggagacggtgcctccggcgaagacttggaacctccaccactcgaagaagaagaagaagaagaagaagaagactggggcggcgccggcggtggagacgaatgcgactcggaagagctccccgacggcggaggcgggctaggcgaggacgagccttgtgacggcgaactcgagcctcctccggagtcggagtcggagctctgcgacgaaggaggtgtcgggctagacgacgacgacccattgctgctcgaattatcagactcttccggcggaggcgccttgttggaaccatttcctgacgacgacgacgacgacgacgagggcgagcttggcgagggggcttga

SEQ ID NO: 91865 - DNA, 468 bp, Oryza sativa
  Clone ID: PAT_MRT4530_90399C.1
gcacgagggtcatctgctgaggagtacatgctgttcttgtgcatgtggatagaagctgcgtggatggattcatgtggctgttggttgctccaacagttaaaactggtgcttgatgttggtatgggttcttgacaaaccacggcatgactaggtggcccgttgagcttgtctcggatctcagtagaattgtgttttctcaatttggtccggtcacattcaaaaaataaaagatagttcagtctatgaatgcaccatggagttgatagtgaactgtactagattaggagtttgctatgacttagtttggttgattatgaggatttttattagtgattcttctctttcggaataaatacaaatcaacctagcatcttcctgtacatgggtttaactgtgtgacaggaaaatattattctccttcgcgaatcattcaaagttacctgcatataacaatttcttactgctccc

SEQ ID NO: 91866 - DNA, 329 bp, Oryza sativa
  Clone ID: PAT_MRT4530_9039C.1
gtagaatcattctcggtcagggcaatctttatacacttttattagtgggacacatgatgaccattttacatttaaagcactatcatatccaaacatatcatatactttgcccaataagcgtatacttgtgtgccgtcaggtttacagaaatataacttgaaatcgacccatcaatttacaacaaaccaaaaaaaacaaaattcgccctttcatgggcaaataaaggtattttcctgactggacggagcctacaacacccaattctggccgatcgacaataaaaaacaatggatgcatttaccagggacaggccacctgggattgggctt

SEQ ID NO: 91867 - DNA, 324 bp, Oryza sativa
  Clone ID: PAT_MRT4530_903C.1
atgaatgcgttgcgcaaagagttcattcttataataagggtttttaagggtttatctatggatgcaaaagaattgggtgctgaatttagatgggctgcaattctgtgtcacccaatatcggactctaagaataagtctgttttgcgtctctcaactattgccataggtcgaatcgtatccctcaaccgtaaaatcgggtatataggctccttcaactataaaaaccaaaccaattacctcctcgaacggtttgaacggcagtttcgtcctgagtgtcgcattgatagggtatttatcccacttaacgtctacatggcatcatag

SEQ ID NO: 91868 - DNA, 927 bp, Oryza sativa
  Clone ID: PAT_MRT4530_90400C.1
atgaccgtcacacaaagtctcagccataaacctccccacctcacgcgtctgccactccggcgagatatgctcccgctccggcggctgccgccgctctcgttcccactcccgcgtggccccacgccgcgccgtctcttcgccaccgcggcttccgcctccaccgccgcctcgccgctcccatggccagggctccacgcctggcgccgtgccccgcccagcgacctccgcacgtggggcccgcacgggccctgcgcctccccggacgccgccgacgagtccggctcggaggaagccagcgccggctcgtcgctggccgagatgggcgcgctcgtgctgtccactgccgaccccctctccaaggcgcggctcacgcacgccgccttctcccggttggtcgccgggctccccgtcggcatggccgaagcccctgaccaccccgccaggcctgacaagcccatcgtggtgacacagaaggagatcaccacgcacaagcagatgggggtgcctctcaacgcgtacatgctccacatgttggcgcacgtcgagctcaatgcgatcgaccttgcctgggacacggtcgtgcgattctcgccgctccgggacacgctgggagatggcttcttcgtggattttgcgcgtgtggctgatgacgaaagccggcattttcgatggtattctcagcgtcttgctgagcttgggttcaggtatcaagagaagttcaaacatgaaacgccaagtaaactttcggagatatacatatacggccgttgcaccggtcaaacactggcggcgtcgcacggcaactcccacgaccgcccgtttggccctagcaacggctcggatctgcccctggcggattatctcaaccccggccccaagtctccaacaaccgttctacacttggcggcggcagaagggtgggtctga

SEQ ID NO: 91869 - DNA, 417 bp, Oryza sativa
  Clone ID: PAT_MRT4530_90401C.1
atgatgacatcatcaaaggcggccggctcggatggcgacctcgccggagctagggcgaccggctgcggatttggaggacacctacacgtagagaacgacgagacgaacccgatggtgctcaccgaagtgccgaacgacgaccgacgacggccggcgacgagaggggcgacggcggcggctcggttgaccggcggcggaggggctccggtggccggcgacgacggggaaggggcggccgggctagcccacacctcggcgcaccttacggcggtgacggcgaccggcggcgacgacggaggcggcggcgcgacgcggatggagctcggccggcgacgacggcggggtggagcacgtggcggcagcgctacgaggcacgggagaccacgggagagggggcaaacgaaagaggaggactag

SEQ ID NO: 91870 - DNA, 685 bp, Oryza sativa
  Clone ID: PAT_MRT4530_90402C.1
atggactccccagcgacccccgtgggcttatctccgccacttctcagtctggtgctctgcaatgaaccatgctatacaaaaggaaaagaaggattattgcgtcagcggctagggtttgcggtggaccgggtgcatggcggcggttcacgcgaacggacggccgagatcaaccctatccaaaacggacggccgagatcgatcggtccacgcccggctcacgggagagggcgacgatgacgtcagcgacgacgtcagcaccggcggcggctcggcggctctacggcacaaacggagggcaccaagacgtagatcacggcgcggcgaactcaccgatgaccaaaacgtcggcggaagaccaacggacggcggcggcgtcgaggaaaaggcggcggagaagatcgggtcgacggcggcgacggtgctccggcggtcttcggcggcggcgaagcggtggacggggacggcggcgaccttgcgaacccgatggtggcgacggcgactgacgacggcggctgcaacggcggcgcggcgcggctgaaccgacggcaacgacggcggcgactagggctacgcggaggcggcgctagagacgacggcgggctaaggcaaaggtggcggcgggtagaagagacactgggggtccttataaaggggctagcgagcggcgacggaggcccacggctgc

SEQ ID NO: 91871 - DNA, 903 bp, Oryza sativa
  Clone ID: PAT_MRT4530_90403C.1
atggcttcagctccactcccacaggcagctcaactggggtataagccaaacgtcttctccttctggatcctttttcttcaactgaggttgattgattattgcaagaatgagcatatgacatactcaacaagccacacagcaaatatgcaagtgcacaaggataccaaaggatggcataatataggctcatttgcaaaatcagcatttagcaaaacatttaggagacgcactggcgaaccttcgcaacgacggaaacgacaagctaacacgcaaaacgaagaaaaagactaataaaaaccaaaggcaccaaaacgatgcgggcgacgaggcgaactcaccggtgaccaaaacggcggcggaagagcaacggacggcgccggcgatgaggaagaagcggcggcggtcttcgggtcaacggtgacggcggtgctccggcggtcttcggcggcggcgaagcggtggacgggcgtcgccatcgccctgcgcgcgccgctgccacgcctcctcgcgtcctatcccgccgcgcaccgtcgccgtcgccgcaccgtctccaacccgtcgcgtcgcccgtcgccgccgcgtcgccgtcccatcgccgcgcgccgccgcgtcgccgtcccatcgccgcgcgccgccgcccgtcccgtcgccgcgcgcgtgtcgccatcaccgcctgccaccgcacgccgagccccgcgccgccccgagccccgcaccgccacccgtcgcatcgccgctccgagccctgtgcgctgccgtcgcccttttcgttcctcttccttttttctgtttcttcttctttcgctcgttctcgacttccacctccctcctccgcctcttccaccccttgctgccgccccccgccccctcccctcccctctgcctcccccgcccctcccccgg

SEQ ID NO: 91872 - DNA, 501 bp, Oryza sativa
  Clone ID: PAT_MRT4530_90404C.1
atggcttcagctccactcccacaagcagctcaactagggtataagccaaacgtcttctccttctggatcctttttcttcaactgaggtttgatgattattgcaagaatgagcatatgacatactcaacaagccacacagcaaatatgcaagtgcacaaggataccaaaggatggcataatataggctcatttgcaaaagtagcatttagcaaatatttaagagaagtaaaacactctcctccggaacgtcggaaacttaagcgaaagaacaaaatcaacaaaacaggccggccgattggagggcacctacgcgtagaggacgacgacgcgatctcaacgatactcaccaacgcgacgaacgacgacggatgacggccggcggcgagcttgtgcggcggcggcggttcggtcgacggcggcgacgggtctccggcgaccggcgacagcggggagagggcggccgaggttcctcacctccgtgcgcacctaacggcggcgagg

SEQ ID NO: 91873 - DNA, 261 bp, Oryza sativa
  Clone ID: PAT_MRT4530_90405C.1
atgggaaaagcttcattttttcccaggggacacataaccagggggggtgttctccagcccggaaaccttaaaaacattataccaaacacaacaaatcccgggtcttttaatgttttggaagacaggcaagtagtatctttggtttattcttattaacaaatttggatttcccacacggaaatttccttaatagatataccataacatttgggactgtatataaatagtttaaatgaaagttcaacctccaatagtgggatt

SEQ ID NO: 91874 - DNA, 1077 bp, Oryza sativa
  unsure (1)..(1077): unsure at all n locations
  Clone ID: PAT_MRT4530_90406C.1
cccacgcnttcgcggacgcgtgggcggacgcgtgggcttgcttcagatttcgatcagcttcagggttgacacaacagagaggttggttcacaaagtttcagtaagtaaagcattcattcagatcatgaagaggtttgcattcgaggacagcgatatggcgcgcgtgctgatgctcatgtcgtcgcacgggcagcaggagcaggcgctggctctgccggtgccggtgcagctgccgctcgccgccgcgcgcggcgaccgcgccccggagcgcgcgttcgtctgcaagacgtgcaaccgcgtgttcccgtcgttccaggcgctcggcggccaccgtgccagccacaagaagccgaggctcgacggcgacggcgacctctccctgtccaagcccaagctccacggctgctccatctgcggcctcgagttcgccattggccaggctctcggcggccacatgaggcgccaccgcgccatgaccggcggcatgccgcgggcgatcgtcgtcgacaagaagcccgacgtcgtcgacgtccacgtccacggccacgacgacgacggcggcatcaagcgcggcggcctgtggctcgacctgaaccatccaccctgcgacgacgccggcgacgacgacgccgagtgcggccacaatgccgccggcgccggcatcacgttccaccagttcttggataccggagccatggccgttgactgcgtcggctactagctctctttgccggatttttgccggatactacaatacttatatgcaccgattaatcttggtgcaatttctcttttaccttttctttttcttttcatttcttcttcttcttgttgagaaatccacattttgtagcggtagaatatattagttcctaatacaacagagcatggcacacgttttgggtgccaatgatcagatgctgtgctttggggttaatctggaggattacatgagataatattcacctcctgatgatttcctggatttgtgatcaaaaccctttgatcaaatggattaatgtaattatctgaattgagtaaattaagtatagagcttgtggttttcagttgctactc

SEQ ID NO: 91875 - DNA, 192 bp, Oryza sativa
  Clone ID: PAT_MRT4530_90407C.1
atggccatgagcgccctcaagttctgcggcgaatgcagcaacatgctctacccgcgggaggacaaggagacgcacaccctgctctacgcctgcaattcctgcgagcaccaggctccaactaagggggagaaaggcctgacactgtacttcatctgctgcaacccaagctgtggtcacaggtggagggattga

SEQ ID NO: 91876 - DNA, 2508 bp, Oryza sativa
  Clone ID: PAT_MRT4530_90408C.1
ttattcgccattagcaacaacctcagggtcgaaatctttcacctctcttagaagtgttgacatgttgtggcacacgtggaaaccacattggtctccgatctgttgtgcgcatgcaaacttggtgtcatgataaagttcgttcttgccctccttgtgcctaccacccttttccatatatgggccccaagccatatttaaggccttggtgatttcactgaaatcataatctttggacttattggagttaaggtaggtaaccctactccacttaggtacgatgactaggagaatccaatgtcgctcttggttgtgtgcgcacatgatgtactccttgtcttgatgggcccataaacaccggttgacatagtcaaccacctcagtgaagctctgtcgtaaattaacctcattcaccatggatggatcaaggaacccaacctgattaccatggcgacgactctcgatccaacacaacatggagtagcattttagaagactagtgtccaacttccggatcctgaaaaggtcgaagaggtcatcaaaacctatagttatataggcaggcgacgataggaacggctggtggtcgtgatgtccaactatggatgactccctcattttccgcttggcattgcttagctccatgtattgcttatgtagctctcggcaagcaatacccatcacagctaacacattgtcctccaccaatggcatgcctagctcaaattgggctggtgccctcacgaccttccccgatttgctcaccggcatcgacgtcgcagccttgcccctttttggctccggcgccaactccccgaccttccccttgccgcgttcacgcttctggcccttgacaagtggtggggagctatcggcctttcttgtggtctttattggagccaagctttgagctatatctgccaagtccatatcagctccaccgggagaatgaggtactgacaatgccggtccacggggagcctcaattgatagcttagacttgggaggtgtaagctccgtcggtcgacttggacgaggagtcatcttcacaactatgtcttctttgggccattgtatgaacgtcttggcatacccagctagcaggtctgcgccgtggaccttgtctgtaaccgagggcttgaaagccatgccctcagcgacttcaggagcgaaagttgggtggactctcgctagtaggacacactgtgctgcgccctcgatgtggtccactgcagctagtggtgcgatcgggagaccaggggccggcacctctgtggatgcacaactactcctatgctgtgacggactcgcgtcgtgttgtacacgaggagttggttgcacagcaggtgttgtgactcggggtatattcatgtcggcgaggaccttgttaaccctttcttccacccttgcattcatgctagcttctagttcttgaatgacctcaaccttaagttcggccttcaaacgagcgtccctctcttccttggagactttccgtttcctgtattgggagctgtactgagggagtccatgcttccagggcacatcgctaccaattccccgagttcggccaggatgttctttggttccgagcgcctttgtgaggatgtcatcttcgcgcctcttcggcgcggactcaacctcgctttgtgaagcttgttcagcaaccaagcccaacagttcctgatagacgacggcatcacttttgttctcaaatgtgacagagctgtccgggttgaccttaccccttgcccgcgcccagttgcgagctctttgttcagggatgtctgaaaacggggcagggacattcgctgctgcagcggctgcatcttcttgggcccatattgcctccttgccgatgtaccctgcggtgcccagccgatgcgggtgctcattccgctgttgcagtacgcgatgtgcctcgcttgattccctaaactcttgggtggtcttgagagagcagaattcctcccacaccgcttcggttatttgagggtattcatcgaacggcgtatgattgccgggcgggttgacaaactcggtgaagagcttcgacttccaattcttccaagctttgcccatcttttggaatgccttccgcttgagcctatcctttgcttcggctggaaatgtgaaccatttctccattgccgtccaagctcgctctttctcggcttctgtgaccttcccgatatctttatggaggatcccgaagttctcacgtgccgttagcccgcagcagttagaccatcttccaatgacagtcctgggcgccgtgggcctaccactagcgtcaacctctcttataacttgcactgtggtcggccatatattttgtgaccgcggatttctactagacctacttgcacttgtcccgcccgacatcgacgtatgttgttggaccgccgttgtcgcgggatgaccttcggcaactgcctctgtggctgggtttgcttcttcctggatcctcgcaggtgttggggagggcgggtttgcgccgggcgttgacat

SEQ ID NO: 91877 - DNA, 444 bp, Oryza sativa
  unsure (1)..(444): unsure at all n locations
  Clone ID: PAT_MRT4530_90409C.1
atctcatcccagccgccgccgccgcagcctcctcctctcgccatctcccgtcctctccttcaagncagctacctgcttaatcaaccatgggtaaggagaagacgcacatcaacattgnggncattggccacgncgactctggcaagccgaccaccacgggccatctgatctacaagcttggaggcatcgacaagcgcgggattgacaggctcgagaaggaagccggtgagatgaacaagagggccttcaagcacgcgcgggggctcgacaagctcaaggccgagcgcgagagaggatcaccatcggcactgccctggggaagcccgagaccaccaggggctactgcccggccatccgcgcccccggccaccgcgacgtcatcaagaacatgagcacggggacctcccaggctgactgcgccgcgctcatcattgactccaccac

SEQ ID NO: 91878 - DNA, 357 bp, Oryza sativa
  Clone ID: PAT_MRT4530_9040C.1
cacttcaggccgggtgcttaaggtatcatcatatcataagcgaaacattgcactgcactaataaaattcaatacacaaccttggtacacgcgaaacaaggggggtaacattctccatgttatgctacccaataaagcaaggctaccaatatctggtgcccccaaacaggacaccagatatattccaaatctgggggcctgtacgctaccaatatccatatatgtaccaagaagaattgactgaagcctttgaaacatccgaaaggctgatggaacccattttagcacataatgagccactggaccaacttggcgggggactggcaccccaaaaatgactgattacaaatggtccaca

SEQ ID NO: 91879 - DNA, 877 bp, Oryza sativa
  Clone ID: PAT_MRT4530_90410C.1
tggatccccgggcggccggggtcggctggagaggaggaggaagccatcgatggccatgagcgccctcaagttctgcggcgaatgcagcaacatgctctacccgcgggaggacaaggagacgcacaccctgctctacgcctgcaattcctgcgagcaccaggagcctgccactgacacttgtgtgtacaaaagggttctccgtaaacctgctggggaacccaaagatatcctaaaagatgcagcaactgatcccaccctgcctcgcaccagaagtattaaatgttacaactgtggccatccagaggctgctttttttcaggctccaactaagggggagaaaggcctgacactgtacttcatctgctgcaacccaagctgtggtcacaggtggagggattgacggcaaggttcatggtgctgaatcttggccgttcttgtgttcatgctcatacccggtgttatctgaaggaaggcggccggcgacgcggcggcgaggaaggggcggcgcgcgggcggctgggggaggcgcgacgcgctgacatccgggggcggagcggtgatgcggcggcgggggaggggcggcgcgcggtcggcgggagaggaggagggcggcgcctcgatggcggcagccagcggcggcggcggcgatggggaagcacgacggccacccgcggagaggaggtccatgcggaggaggaccatgaggtgctcccgctgaaaccgaaggtggcgccggcggcacggggggcatgagcctataggggagagcgtcgagctggcacatgaccttctcgatgtcgaggacgaggcgctcagcgagagtgcggctgaactcctcccggtcgccgctccgcccccggccgcccgcgcgccgcat

SEQ ID NO: 91880 - DNA, 4797 bp, Oryza sativa
  Clone ID: PAT_MRT4530_90411C.1
ttattcgccattagcaacaacctcagggtcgaaatctttcacctctcttagaagtgttgacatgttgtggcacacgtggaaaccacattggtctccgatctgttgtgcgcatgcaaacttggtgtcatgataaagttcattcttgccctccttgtgcctaccacccttttccacgtatgggccccaagccatatttaaggccttggtgatttcactaaaatcataatctttggacttattggagttaaggtaggtaaccctactccacttaggtacgatgactaggagaatccaatgtcgctcttggttgtgtgcgcacatgatgtactccttgtcttgatgggcccataaacaccggttgacatagtcaaccacctcagtgaagctctgtcgtaaattaacctcattcaccatggatggatcaaggaacccaacctgattaccatggcgacgactctcgatccaacacaacaaggagtagcattttagaagaccagtgtccaacttccggatcctgaaaaggtcgaagaggtcatcaaagcctatagttatataggcaggcgacgataggaacggctggtggtcgtgatgtccaactatggatgactccctcattttccgcttggcattgcttagctccatgtattgcttatgtagctctcggcaagcaatacccatcacagctaacacattgtcctccaccaatggcatgcctagctcaaattgggctggcgccctcacgaccttccccgatttgctcaccggcatcgacgtcgcagccttgcccctttttggctccggcgccaactccccgaccttccccttgcctcgttcacgcttctggcccttgacaagtggtggggagctatcggcctttcttgtggtctttattggagccaagctttgagctatatctgccaagtccatatcagctccaccgggagaatgaggtactgacaatgccggtccacggggagcctcaattgatagcttagacttgggaggtgtaagctccgtcggtcgacttggacgaggagtcatcttcacaactatgtcttctttaggccattgtatgaacgtcttgcgcgcatcgcccaaagtcatgatttcatcatttgggggcacgggcagcggatagcctgaccaggtgtcctttactgtatcgatggacaccttggcatacccagctagcaggtctgcgccgtggaccttgtctgtaaccgagggcttgaaagccatgccctcagcgacttcaggagcgaaagttgggtggactctcgctagtaggacacactgtgctgcgccctcgatgtggtccactgcagctagtggtgcgatcgggagaccaggggccggcacctctgtggatggacaactactcctatgcttgttaaccctttcttccacccttgcattcatgctagcttctagttcttgaatgacctcaaccttaagttcggccttcaaacgagcgtccctctcttccttggagactttccgtttcctgtattgggagctgtactgagggagtccatgcttccagggcacatcgctaccaattccccgagttcggccaggatgttctttggttccgagcgcctttgtgaggatgtcatcttcgcgcctcttcggcacggactcaacctcgctttgtgaagcttgttcagcaaccaagcccaacagttcctgatagacgacggcatcacttttgttctcaaatgtgacagagccgtccgggttgaccttaccccttgcccacgcccagttgcgagctctttgttcagggatgtcctgcggtgcccagccgatgcgggtgctcattccgctattgcagtacgcgatgtgcctcgctggattccctaaactcttgggtggttcggtgaagagcttcgacttccaattcttccaagctttgcccatcttttggaatgccttccgcttgagcctatcctttgcttcggctggaaatgtgaaccatttctccattgccgtccaagctcgctctttctcggcttctgtgaccttcccgatatctttatggaggatcccgaagttctcacgtgccgctagcccgcagcagttagaccatcttccaatgacagtcctgggcgccgtgggcttgcacttgtctcgcccgacatcgacgtatgttgttcctgcggcaattttggagaagcggcgtacttggagaccgcggcgcaggccgtagtcgtcctggatcctggtggcggcggtggagaggcagtggcgaagaggtcgaggcggtcggcggtggtcggggatcccggcgtcggggaggtcagggtcggggaggtcggggaagtcgatggacggacggcggagaggacgaccggcagcgagggtggcggtggaggcggcggcggagatggcggtggagaggacggcggagatggcggcagagagggcagcggagatggcggcggagagggcggaggagaggttgaggcggcgacggtggagatggcggtggagaggatggcggcggtcgagagagtgagtgaggaggcggcggtggagaaggaggcggcgagggcggcggagatggatggcggcggtcgagagagtgagtgcggcggcggtggtgcaggccggcgtcgggaaggtcgacggagagggtgagcggcagagaggtcggcagtggagaggtcgaggcggtggtggggaggtcgaggcagcggtggagaggagggcgtagagggtggcggagaggacggagagggcggcggatttggcggcggcgaggacggcggtggagaggtcgaggcggcggtggagaggagggcgtagagggcggcagagaggcgaggcggccgtcgagagagtgagtgagtgagagtgggcgccggatctgtgacgggcgccaaccgtggagccatcacaggtaagaccacctgtgacgggcccaacactctgggccgtcacaggtgaggtcacctgtgacggccgtgcatattgaacttcatcttcttcctcctcctcttctagaggtatttcttgacctatgccgtggacgtgctggttgtaatcatcctcgtctgcaatattgtccaatccaacaattctccttttcccttcacgaacaacatgtagtttcttgttacacgggtcaactatgtagaacacttgaacaacttgtttggcgagaacgaacggttcatccttgtacgcgttgttagccaagttgacagtggtgaaaccttcattgtcaacttttacattgcgaagatcgacccatcgacaacgaaacaacgggactttgaacttcaagtaatctagctccaatatttgctcaactctaccatagtattgatcacgacgaccaccgtcactagcagcctcgatgcgtaacccactgttctgcactgtgcatttgctgtcttgctttaccgtgtgaaaggtgtatccatttatgtcatatccttgccaggtggtggcactccattcaggaccctgtgacaaccactgaagtgtttcactagacaagttctgcaacctggcaattcggttcttcagccactcgttgaaagaagacatgtgcttattcctgacccaactctctgatcggcctgggttctcttgtcggataactgcaaggtgttcgtcaacgtacggcaccacctcagtcatatgctgtagtaccgtgaaatgagctttatcgtacaccttccgatccaacctaatagtctttcttccaacagtaccaacaccgtcaagcctcccttcgtgatgagatcgtggtaatccaattgaagatgtttctgacatgtagtccacacaaaattcgatggcctcttcggtggtgtaactctcgatgatactcccctcggggtgtgaatggttccgtacataacccttaaggatccccaggtacctttcgcaaggatacatctgcgtcatgaatgctggaccacagcactttgtttgcctcacaaggtgcaccggaagatgttccattatgtcaaagaaagttggaggaaagtacatctcaagatgacatagggttctcacaagttctgcctgtagttcatctagtccctcgggatcaatgatcttctggccgattgcatggaagaaggaacacaaccgctggatcgtgtgtcgcaccctgccggattccgtggttatgggatgtagctccgaccgaacacccatatcttccagatctcgtcgggcgttgagaccatcctttgtagtacttccttcaccttcactctttgctcgtttgtatcttgatcccccacagatagggcagacatccaagtcagcgtattccttgtaatacaaaatgcagtcgttcggacatgcatgaattcttctgacctccaggcccaacggacataatacttgcttcgcttcatatgtcgtctgaggtaaattgttcccctctggcaacagatcctttaatagctcaaggagttctgtaaaactcttgtccgaccagccattactagccttaagcttcatcagttccaacacgcatgacaacttgctgtgcttcgacttgcatccatcatacaacggcatctggcaatcttccaccaacttactaaacttctcataatctctgtcgttgtcctctgcgtcttcaatgtcatgcaacattgtagatagacattgagtgtccaaatctatggtctctccacctaaaggagaaggtacgaacatgccttctcgagctgcggcggtgttctctacatcctgatccaacacttcttcagctgcgacatcaggcgcctcttgctctccatgcttggtccagcaggtatatttcttcat

SEQ ID NO: 91881 - DNA, 709 bp, Oryza sativa
  Clone ID: PAT_MRT4530_90412C.1
atgagtagtgtgggactaatcacgaaaaacattgttagacccgcccataaccgcgggcacggctattcgaatagttttactctggccagagatgtaccactgtacccacaagacatgattccacacatgttgccatgccccgaagtaccaccacgacactgcaaagggggaaatcgtgacaatatccttcgcacaacacaactcaccacagtgcaccattcctggatcataatcacctcctaaaaaaccagaggcatggactccccagcgacccccatggacttctagacgcttcttagtctggcaccccataatgaaccatgctatacaaaagggaaagctgttgccacgctggcttgtggttggcacgggtggaaagcgagagcactaaagcgaagagtagaacaagaccgtccttacccacacttacacgacgacgatcgacgatgaacggcagccggcgacgagcttcgagcagcggcgagatcgggacgactgtgacggcagctttacggcgaacaccggcgaagaagaagggatggccggggtagagctcggccttgcggagccgagggaggcgacagcgcaggtcggggacgaccgaggaggcggcgcgacgtggctggagcggcggccggcataggagagagaagccgagcgtggcggcggctctagggctagggaaaaaatcgggaaaaaggaggaaacg

SEQ ID NO: 91882 - DNA, 1260 bp, Oryza sativa
  Clone ID: PAT_MRT4530_90413C.1
ctgtgacggtccgacgtttgcgagtccatcacaggtgaggttacctgtgatggatttttcttccaaaccatcacccatgaaagtcctcaaatgattaccaaaatttcttgtattctgttcgttgtgaacctccacaacctcagggtcaaaatctttcacctctcttagaagtgttgacatgctgtggcacacgtgaaaaccacattggtctccgatctgttgtgcgcatgcgaacttggtgtcatggtaaagttcgtccttgccctccttgtgcctaccacccttttccacatatgggccccaagccatatttaaggccttggtgatttcagtgaaatcataatctttggacttattggagttaaggtaggtaaccctactccacttaggtacaatgactaggagaatccaatgtcgctcttggttgtgtgcgcacatgatgtactccttgtcttgatgggcccataaacaccttagtgaagctctgttgtaaattaacctcgttcaccatggaaggatcaaagaacccaacctgattaccaaggcgacgactcttgatccaacacaacaaggtgtagcattttagaagaccagtgtccaactttcggatcctgaaaaggtcaaagaggtcatcaaagcctatagttatataggcaggcgacgataggaacggctggtggtcgtgatgtccaactatggatgactccctcattttccgcttgccattgcttagctccatgtattgcttatgtagctctcggcaagcaatacccatcatggctaacacattgtcctccaccaatggcatgcctagctcaaattgggctggcgccctcacggccttccccgctttgctcagcggcatcgacgttgcagccttgcccctttttggctccggcgccaactccccgaccttccccttgccgcgttcacgcttcttgcctttgacaagtggtggggagctatcggcctttcttgtggtctttattggagccaagctttgagctatatttgccaagtccatatcagctccaccaggagaatgaggtactgacaatgccggtccacggggagcctcaattgatagcttagacttgggaggtgtaagctccgtcggtcgacttggacgaggagtcatcttcacaactatgtcttctttgggccattgtatgaacgtcttgcgcgcatcgcccaaagtcatgatttcatcattggggggcacgggcagcggatagcctgaacaggtgtcctttactgtat

SEQ ID NO: 91883 - DNA, 139 bp, Oryza sativa
  unsure (1)..(139): unsure at all n locations
  Clone ID: PAT_MRT4530_90414C.1
gtcctcgcggtgactgagaccttcagcccgcaccttgtggggaggacgggtaagactcagggagccagcagaggaatatgcggcctgtgctctggcggatcttgctcccggtcggctcggctgcctcggnctctggcgg

SEQ ID NO: 91884 - DNA, 464 bp, Oryza sativa
  Clone ID: PAT_MRT4530_90415C.1
atggactccccagcgacccccatgggcttatctccgccacttctcagtctggtgctccgcaatgaaccatgctatacaaaagatggcgacctcgccggagattggatggtcggctgcgactttggaggacatgtacacgtagaagacgacgagacgaacccaacggtactcaccctcgaaccaaacgacgaacgacgacggccggcgacgaggtggacggcgggggcggcttcggtcggcggtggcgccggagctgcggtgaccggcgacagcggggagggagcggccgagcttgcccacacctcggcgcaccttacggcggtgacggcgaccggcggcaacggcggaggcggcggcgcgacacggatggagctcggccggcgacgatggcggggtggagcacgtggcggcggcgctacgaggcacgggagatcacgggagaggggcaaacgaaagaggaggac

SEQ ID NO: 91885 - DNA, 783 bp, Oryza sativa
  Clone ID: PAT_MRT4530_90416C.1
atgccatcgtcatcgtcatcctcggtcgccgctgccccttctggcagcaatggcacccgccgcgacggtgggagcgggagcgtcacgggctgcctcccggctgaccaggcatgcttcgcgctttcgtcgtcggccagctcgccaggctacctgcacgcctcggccacaacgacgcgtcgcgatgcttctgccaccgtggcgcgcgcgtgctgcaccaccgcgtcgtacgtcgtcgtcctcgggatcagcttcggctccctcctcgccatcctgctcatcctctgcatcatccggtggtacctcgtgtggaggtcggcgcgaccacggcgggacgacggcgccgcggatgaggcggttgggtcagccaagaagcggtcggctgggctggatgacgacgccatcgcggcgctgccggtgttcgcgtacaagcaaagggaggagggcggcggcggcgcggtgggggcagcagaggaggaggaagaggaacgggagtgcgcggtgtgcctccccgtgatggccgacggggaggcggcgcggcggctgcccagatgcatgcatgtcttccaccggggctgcgtcgatgtgtggctcagggagcactcgacgtgccccgtctgccgcgccgaggtggttgttaggccggccggtgcggcgcgcgttgagaagttgccggagagcagcgcgtcgcgggcattgacatcgccggtgccggcaccggcgccgaggccgacggggacagtggtggacgacggcagggagagggacctcgaggcgcagcagtag

SEQ ID NO: 91886 - DNA, 1266 bp, Oryza sativa
  Clone ID: PAT_MRT4530_90417C.1
atggcaacagtgtcacaaaagcttggtgactgtggcgactgcggagcaagtgctcaggctcatgggcagcgtggtcgtcggcgacacggacgcatatccgcggtggcgcgagagctcgtccgggccgtggacctcgacccctcgagcacccaaaccgttggcatgcctctcctccgcctcatcactccccatgaaagtcctcaaatgattaccaaaatttcttgtatcctgttcattgtgaacctccacgacctcagggtcgaaatctttcacctctcttagaagtgttgacatgttgtggcacacatggaaaccacattggtctccgatctgttgtgcgcatgcgaatttggtgtcatgataaagttcgtccttgcccttcttgtgccggttgacatagtcaaccacctcagtgaagctctgtcgtaaattaacctcgttcatcatggatggatcaagaaacccaacctgattaccaaggcgacgactctcgatccaacagaacaaggagtaggattttagaagtctagtgtccaacttcggaatccttaaaaagtcgaaaaagtcatcaaagcctatagttatataggcaagcgacgataggaacggctggtggtcgtgatgtccaactatggatgactccctcattttccgcttggcattgcttagctccatgtattgcttatgtagctctcggcaagcaatacccatcacggctaacacattgtcctccaccaatggcatgcctagctcaaattgggccggcgccctcacgaccttccccgctttgctcaccggcatcgacgtcgcagccttgcccctttttggctccggcgccaactccccgaccttcccgagttcacgcttctggcccttgacaagtggtggggagttatcggccttttttgtggtctttattggagccaagctttgagctatatctgccaagtccatattagctccataaggagaatgaggtactgacaataccggtccacggggagcctcaattgatagcttagacttgggaggtgtaagctccgtgggtcgacttggacgaggagtcatcttcacaactatgtcttctttgggccattgtatgaacgtcttgcgcgcatcgctcaaagtcatgatttcatcattggggggcacgggcagcggatagcctgaccaggtgtcctttactgtatcgatggacaccttggcatacccagctagcaggtctgcgccgtggaccttgtctgtaactgagggtttgaaagccat

SEQ ID NO: 91887 - DNA, 445 bp, Oryza sativa
  Clone ID: PAT_MRT4530_90418C.1
ataatccatggtcatgctgcttaacattaagataacctagctatcttctttaggagaaaaataagactaatcatcattgagaacctgaaatttctcaattatgcccaacatcaagaagtcagctagtgtccatacattttgggctttgatctttgacaaggcaagacctgtaggtcgtagattcatactgagggggttgatcgtaggctcgttgcagtcactccatgctttcattcaaagatcgtaggctcgtagcagtcacttcaagctttcactcaaaattgcctatgcgcaagctgaagtagtgacatcctgtgattgctgattttgaatgatatgtagcgtcgtgcacttctggagttcttcatgggaattaatgagatataaaattaaaaccagatgactgattgattgacatgagaaagcaagcaaaaaaaaaaaaaaa

SEQ ID NO: 91888 - DNA, 451 bp, Oryza sativa
  Clone ID: PAT_MRT4530_90419C.1
tttgtttttttttttttttttttttttttttttttttttttttttttttttttttttttttttttttttttttttttttttttgggaaaccctttcgaaaacatgttttatcggagggggggcccccccccccccgggggcccagggggttacaaaccctaattaagctgggcttaagcaaaaaaggaaggcgcctggtcctagctccaggctacaagacggtacggtggccccgcccccgggtggtaacccggggggtcaagggggcccttgaattgggcgcccttcctccgggtaagcccctccgggaacccgaccttaaaccgggtccctaaggttcccgggggggcgggcttgggggcgaatggaaagcccttcggcgggacccccaagttggacccgggggaccccacgggggccccggagcacctcgccctggggcccgggggga

SEQ ID NO: 91889 - DNA, 204 bp, Oryza sativa
  Clone ID: PAT_MRT4530_9041C.1
atggggtagtgtatacacatatggatatatatttacattattatcaatcgtattctcatgatgttaattttttccccttaattaaaaattacatcttatgtctatatggcataccaaagttttatgtgcttctttcccgagaaatcggtctccatgaaaggagctcagtgtttcctttcggactattagtgaacgaacgaattg

SEQ ID NO: 91890 - DNA, 619 bp, Oryza sativa
  Clone ID: PAT_MRT4530_90420C.1
tgctcccatgttacctatttaaagaaagttaaaacttatagagaaaattcgatctatagcacaggaaaaaacccgccgcttccgatcggcgctcgtcaccacgcttcccaccgttgcccgcgccagatccgtcgcaccaccactggatttgtgcgcgtggggtggagcaccggccagatccgcatggggaggaaggcggtggaggaggaggtggagacgccgcgcttctggcccgccagctcatggccgcctactcggcggcggcggcaccgcccgaggtcatggagctgacaaagcccgccgcccgcccgctcgcgaatcatcccaacatccgccagcgcgcgccgcagcccgcctgcataagcggcaggtcatcgtccctgtcgccgtcgttgtcacgtgcaagcagcggcaagccagcgcggcgtggcgtcgtggcaagggagatgctgttctgcggcaccgagtacggccaccacgggccacatccatccacgccgaagctagggccgcccacgtcatcgtcgttgtcctcgtcgtcaagctgccgccggcgcgggaggctcgccctctatcagcaacgccgagtgccagacggggtccacctcgccgtcggcgg

SEQ ID NO: 91891 - DNA, 610 bp, Oryza sativa
  unsure (1)..(610): unsure at all n locations
  Clone ID: PAT_MRT4530_90421C.1
actcggctcgagtccttctctaccttttcccttagagagagatcctcaaaccttataacncggaaaaaaaccacagctcttgggtttctgtcaattctctgagattttgggatatcggtcgaaatggcatcggaatccagtcaaccacagttccgttacactcagccaccgtcaaaggctctccattcgaggaactcgccatgggagcgcacagaggaggaactgattgagcttgggaagccgtgtggcaaagttgttaacacaaaatgcaatgttggggcgaatagaaatcaagcttgtactgaattcgcagatctgaatcaagccattgcaacgatatcgcactatgcctcatcatcagagcctgctcaagtacgtgggaaaactgtatacctacaatattcaaacaggcaagaaatagtgaataacaaaactactgcagatgtgcccgggaatgtattgctggtaacgatcgagggtgcagatgcacgtcttgtcagcattgatgtcttgcacttggttatgtcagcctttggatctgtgcataagattactactttcgagaagacagcaggatatcaggcactggtgcaattctcagatgcagaga

SEQ ID NO: 91892 - DNA, 533 bp, Oryza sativa
  Clone ID: PAT_MRT4530_90422C.1
aaagaaatggaaactaggtacattcatccacctgcaataaaatccacatgaacacatctgcaacacaaattaatatatgaattaacaaaaaaggggaagagaaataaatcctggaaaatcgtccaaaatcaagtctacctttgtttctacccttccctttctagagaacgtgagagaggaaagatcggcgccaacaactctcaggtgcgttcgatgcgtggcctcgacgtggcaacgtcgagcctcgtcttcacttcctgccagctgcatcgcctcctccccattacgacttctgatccgggcaaatcgagggaacgagctccggctgctcctttcttcctcatctccatcgtcggccaccaagaagacgaaggtcgccaacgaaatagagcagcggccgtttcatcttcttttgcgttccttaatctagtctcgatgccggttccatcccctctaatctcagcccctaaaatgcagtggttttatgggaacgcggacctagccatcgttgctccgggttcacgtcgtcgttc

SEQ ID NO: 91893 - DNA, 397 bp, Oryza sativa
  Clone ID: PAT_MRT4530_90423C.1
gtctgttctatttaatttacctccttcacctccacctccgcgcgctgatcggagggggccagctccttctcctacggcatcgggaccgacgaggtagataggacaagagggccgcactggatacatgcctatgtactgagactcatggaacgaggaccaccctgacaagctctgcgaccaggtctcagatgctgtgcttgaagtacggctagggggggaccctgacagcaaggtcgtttgtgagacctgggccaacacaaacatggtcatggtctttggggagagcactacctaggctaacggtgactgtgagaagattgatagggagacatgccgtgacatctgatgtgcgtcagctgatgattgtctccatgctgaccagtgcaaggtgcttgtg

SEQ ID NO: 91894 - DNA, 834 bp, Oryza sativa
  Clone ID: PAT_MRT4530_90424C.1
aatcactcctaagccgccatgtagattggtttagaaaatcgatggacataccatttaggttgttattagatttttattttaaaaaataccaaacctcctttcctccctcccctcccaaataattcctataaaaaaaatgtatcagtgtctgatttcctctccattgagacagaaggcaatttcacattgccattatctgtccaggccttccaggaatttcaagagcttacatctttcctattggatgttgagttggtcaatgaaaatgatatttggtcttacatttggggggatatgaagtattcctcatagaaattttatgctctaaatttcagagctgttaagccaccagttcattatctatggctttggaagtgtaaagcagtttcaaatgtgaaggtgtttggatggctcctcttgatgagtatattgaacaccaaatttatgttggaccataagaaatgtgctcctcctaattgtgatctttcttgtgttctctgtcaatcgattgttatagaggatttaatgcacttattcttccaatgcccttttgctcagaattgttggaaccttttgtgcattacctgggatacaacccgttctttggaaggcatgtttataaaggctaaattagattatcaggggagctgctttatggagaagtttctatgtgctgcttggaatatttggaagcaaagaaatagtttcattttgtatcaaaaaactccttctttgtcttcttggaggcgactcttgaagagtgatctctttcttttgttgtttaggattaatgcgagatatcacgatgtaattataagctggatcaatctgttg

SEQ ID NO: 91895 - DNA, 1339 bp, Oryza sativa
  Clone ID: PAT_MRT4530_90425C.1
cccacgcgtccgattgagagttcacatatcctcagtggtcagagttcagagttgagacgacagccgagccttgcatactgaccagagaagctcacatggatccgtacactagcagggctccggcgagtggtggtgtcgccgccggcgacgacgacgaggaggcggcgtgcctgcaggcgtttgagctaatgtgcatcttcaccgtccccatgacactgaaggcggcgatcgagctcggcctcctcgacgcactagccgccgccggcgacggccgcgcactgaccgcggacgagctggccgccgcgcggctcccggacgcggcgccggacaaggccgaggcggcgtcctcggtggaccggatgctgcggctcctcgcgtcgttcgacgtcgtcaagtgctcgacggaggccgggcccgccggcgaacctctccggagacgatactcgccggcgcccgtctgcaggttgttcaccgccggcggcaacagtcaccatggatctctggccccctcggtcttgttcggcgtcgacgaggactacctgagcacctggcgtcagttggcggcggcggtgggcggcggcggcgcggtggcgttcgagagggcgcacggggcgccgatgttcgagtacatggggacgaaccggcggctgaacacgctgttcaaccaggccatggcgcagcagtccatgatcgtgattaacaagctgctcgaccgcttccatgggttcgacggcgtcggcgtcctcgtcgacgtcggcggtggcaccggcggcacgctggagatgatcatgtcccggcacaagcacatcaccggagtcaacttcgacctgccccatgtcatctctcaggctccatcccttccgggtgtgaaacatgtagctggaaatatgtttgagagcatacctaatggagatgcaattttcttaaagtcgatcctccacctgcagaacgacgaggactgcatcaagatcctcaagaactgccaccaagctctttcggacaatggcaagctgattgctgtagagattgtcctcccggcgatcccagagccggtcccaacggcacaatatccatttcagatggacatgatcatgctcaataatttccggggaggaaaggagaggacggagctggagttcaccaagctagcgatggactctagtttcagtggtaccttgcggacaacctacatcttcgccaattattgggcgctggagtttaacaagtagatctcaaaacgcatgccgagttcatgtttactatgtattacaatgtgtgtatggctaacagttccaataccatgaaaacggttatgaaacaataaatgatgttcttcttt

SEQ ID NO: 91896 - DNA, 1902 bp, Oryza sativa
  Clone ID: PAT_MRT4530_90426C.1
atggcgctggccgctgacgctggaggggacgccgacgtggccgtggcagcagcggcaacagagacacggcagccattcacagcactcagcaggttgacgccagcgatcacccttgcccgcgtgctccaggtcagcgaaggcaacaattatgggagctcagatgttgggagctacgagtacgactacgaggatgaggaggactacaaggaggaactccgcgtgcctggaaacaagagcggatccaacatgggtgccaggggttcaagccaccctacaccgctgcatccccatcgagaggaaaaagagggaagggagaagaagaggggggtggaggaggaagaagatgtgcccccctctccaccattcctagaaccaccccttcatggaactaatattatcaacatgttaaaaagaacactactcacgtattattctagttcaagcaacacagatccttcagctagtatcgagaatttaagtcagccaaagaggcctagggcagagtttagtcattcggatataattggtgatccagggcttcacaaaccaattgaagcttatccacctgaaattagagatcaagtaaagtatagtgtttgaaaggatgcagcttattgcttgtattgttacattttctttgaaccgggaaaacgtgaaaagtttgagagtgttgtctttgctatggaaggttacgtcaattggaagaaagggtaaatttaaagagatgtttgattggtacaaagacaaggttcatgaagtgaatgatgcatatgaaaagggtcttaaaaattgccaaatgttatcacatcatattaagaaggatcttactaaagcttgtgcagaaaaagtgacggcaattattatgtatgagattggaaatagaaatttctctatgcttattgatgagtctcgagatgtatcaataaaggagcaaatggatgtcatcttgagatttgtgaatgatgaaggaaaggtgatggagaggtttcttggtcttcaacatattgagagatgtacagctattgctttgaaggaagctttatgtggcatgttgagcattacagatgacttgtcacgtgctttgcaaagaaaggaccaagatattgttgaggcaatgagtttgctcatagatgtgaaagagctcttgcaggacatgagggagaatggatggaagccactattgaatagggtgatttcattctgtaataaacatgagattaaagtgccaaaaatggacaaggaagttaatgaaagagggacatctacacgtcgaaggcacaatgtaacaaataagcattactatcatgttgagatctatcttgcagccatcgatgccattttggttgaaatgaaccatcgctttagtgaagttagttcagagttattagtatgcatgtcatctcttaatccacggaattccttctccaactttgatgtggataagcttgtgaggcttgctgaaatttatgctgaagcttgctgggtttgtgatcttatgctactacggactcaacttggaaattttattagcaaggttaggagaaataaagaatttcttggatgtaaagatcttgcaaaggttgttgaattaatggttcagactggaaagaataaaacttatcacttggtgtatagactcattgagttatcattgatacttccggtggcaatggcttcagttgagatggtcttttcagctatgtctcttataaagatagatttgcgaaacaaaatgggggatgaatggctcaatgactcgatgatttgctacactgaggagcagatttttataaatattagtgatgaaaaaaaatcatccaacactttgaagagatgaaaaggcgtcggacgttattgcctcaacaaaaatgagtggtatgctccatgcctccattatcttct

SEQ ID NO: 91897 - DNA, 522 bp, Oryza sativa
  Clone ID: PAT_MRT4530_90427C.1
atggcgccgccgaggacgtccgcgttcaaggtgttcgagatggtggagccgctgtcgggcacgcgcatcgaggccctgtacgcatggaaggagctggaatcgctgggtgggcggatgctgttcgtcgcgcgaggctgctccagatcgtatgacgcgggcgactatccgggcgatgagttcggcgagggcgtctacttcctggatgacgggaggctctaccgcgagtcggcagtgttcacggctcggcgacggcgatatccctgcagagacaccggcaagtggctaccggcggcggcggcggcggttccgcgtatgattcgctgtcgatttgatccctcgagatgtggtacagacttttcgatcagcatggccctagacatgaagataaggctttgctttcacctttctctaaaggctggattaaagttgggagtactggatgatcaaatagcgtttgtcaggcatcgtcgccaaaacgccaatcaacatagcagtcggcacttcggtaatggtggaggttaa

SEQ ID NO: 91898 - DNA, 799 bp, Oryza sativa
  Clone ID: PAT_MRT4530_90428C.1
cctcgagcgctagggctttctccttcccctccgagcaccgccgccgccgccgccaccgccaccgcagcctgaccgctcggtctccggcaaccagacaaaatggtgagagtcagtgtcctcaacgatgctctgaaaacaatgtacaatgctgagaagcgtgggaagcggcaagtgatgatccgaccctcatcaaaggttatcatcaagtttctcatcgtgatgcagaagcacggctacattggtgaatttgagtttgttgatgaccaccgctctggcaaaattgttgttgagctgaacggactcctcaacaagtgtggtatggacgcctcaacaagtgtggtgtcatcagccctcgcttcgatgttggtgtcaaggaaatcgaatcatggactgcgaggctgcttccctccagacagtttgggtacattgtccttactacttcagctggcattatggaccatgaggaagctcgcagaaagaacgttggtgggaaggtcctcggtttcttctactagaaagatatatcttgttgacactctacggggatttcttatacagtagatggattctcccagtaggtgttagtggaagagcattttattagcagttgagtcaaaaaccttgttaagatgatcctcgaatgtctgaattgccccttaatgccataatgttgcctgtttaattttgcttggcgacttgagtaagctgctgtattcttgctccttggatgccgcatgctttttttgtaaacttttataagctattactgaaaaattctggaagatattctatccttttt

SEQ ID NO: 91899 - DNA, 180 bp, Oryza sativa
  Clone ID: PAT_MRT4530_90429C.1
gaagccccaactgaaaaccatgagtgatgggagatccaacaaaacgcgccataattgccacatcactaatgaacttcatcaaaacacaaacccaccacacgatcttcatacgcttcagacactcacaaaaaacttttacctaccaatctacgcaagaacctaaccacaaatacatattat

SEQ ID NO: 91900 - DNA, 432 bp, Oryza sativa
  Clone ID: PAT_MRT4530_9042C.1
atgaccgtcaacagaggctgggagggcgggggcctggcggcggcggccgggagggccgcagagcggcgggtggctgggcaggcgcccggcgaggccggcaaggcgacgcgcggcgaaatttatcttggtgttggagctcttgatagattaaggcaggtctctgagcatgggagagggagagattgtcggcggatctgcgcacaaaagggggagaggccacctgtttctcccctcccgccgccgccaccgatggatccatgcgcaaaggaaagggaaagtcctacggcggaccgccccttccaggatagcggtgccaaatccaccgcctttgagaccgccatcgtcatcgtcagatcgcaccgcaccgccatgcaagcaacgcagggagctacagctgaggccaccatcgaattgcgtcacaacgctgcgtga

SEQ ID NO: 91901 - DNA, 366 bp, Oryza sativa
  Clone ID: PAT_MRT4530_90430C.1
atgccgaggcgtcttcaagccgacgctctcgtctacaccgccaggcgatggagattgctgtccatgcgatcccgccggaggttgccggcaagccatcgtcgttacatcggtcttcgcccatgccgtccaatggagtggagtcgccgtcaaccgggaggccatgacatccactttgtcatcgacgctctaaatctcgccaacctcgtcgagccgccagtgacaccgtctgccgaaggccatctcgtcggaagacgccttcgtgccgtcatcgccgcaccaccgttggactctgagcatgtctcgtcattgagactccgccgaccggcaacactttcacgctcgtcgcggtatctgaggcgctgctga

SEQ ID NO: 91902 - DNA, 505 bp, Oryza sativa
  Clone ID: PAT_MRT4530_90431C.1
gcgcaggtatgtagaggtgatttttgtactatatcaaatacaactgtcctatatcaggatatacccccatcatcctcgggggcgcgactatacaagctcggacatcatcttgctgaagctatacatgaaccagatgttaccaaattcactgatgccatttaggtatatgacatcattacccttatcaacacctgcaacacatccctccttcttagggcaaagaatgagctcaataaaatggaggaacacgaggatgaactacacctaaaatccatgcatagacaccttcatccttaatatgaaggctttcttaacatagttgttgctacatcatccatatgatccgcctgagagctcgacatataccctttgaatagaactactatcagttatcatattatatctttggatagcctgcttctttgatgtctatcaccttaagtcgtcgcagacatgaaactagtaccctactattgttgctgataccatatattataacatgttt

SEQ ID NO: 91903 - DNA, 2681 bp, Oryza sativa
  Clone ID: PAT_MRT4530_90432C.1
attggttcttcttccgctcaatcctcgatttctcttcttctgtagcatctcacccaccaagttgcgtttccttgtataactgatgaattccagtttttccttggcctaatcggcaatctagaccccacagaatttatcaatggagaaaccaaccaaattccctttagatttgctaacctagatctgagctgctggaagaacaccttcaaatcctggccgttggccgaaaaaagcttggcctgcttggtataagaggatatcggctaccaaatcaacccactgggaagaaatcggcatatcccaagccttggccttaactgcagcggatatggcaagagatgagcctatgatggcagccacttcttacttctggtccagagccatgaataccttccttttctcccaagggccgatgaccccaaccctgttagattccatcatgatcaccgggctagatgtcacttcatcggctaacttgtctagtttggatacccaactcacccacgagttcaagactagaagcataggcggttggacaagttatgttgcgaagaacatgggaactgggccagtctctccaagggaacatgcagctttccttatgatgtggctcgaaaaattcttgttctgcggtccaagctgtggtcctaccgcaaactggcagcgtgtagccgagaacttggtagaaaagaagcacttcccccttggaaaatacttgctaggctatctatatcagactctcaataccgcaattaacaagatagcctctggagaattattcggtacagggggtccatggtggttactgcggatctggctaaatttgcacaccaggatggttgtcaatcggccaccattagtcgatgcaagatctccaagatttgagccgatcatcgatgatgatggagaaacgagcaccacgcgccgatgtatgtcttttggagaagcagcatcggtcagcattacatccaggctatcggctaagcccttcggagagtggttcaacaacttttatgatgggttccccaagaatagtagaatttggtttgcatatgaaggacatggcatttttgagctactaggcgattttcggtttgatgaaatcaactctaaaaaatatgacaaatccagagaagtattctcagcagctatcagcccttgcatcattcctgtcggtattcaccagggcaaaaacatccaaatgacctacgaattttatcatccgacaagtgctgcaaggcaattcggcatgggtcaactgccaatcagcctattctttgctgacaaaatccaaagtagaggagaaatcacatcattgctcatgatggatcggctgctaaatctaccaagaccacctttgggcagcatcaacaatatcaattttaggatgctgagaggtgcagcttttgaccgatgatggatagagtggaagaaacatttattccatcaaccggcttccatgtacttgacaaatcttttccctaaagctgtccctcaaacaacagaatcttctcctcctcatcacagcaacagcggtgtagacatccaatatgctccaggactcctgccaacggtggtggactaacacctctagttatcggctacaatgccccctaagacctccacattgctgcatggcctgcctcgtgtgccgattgctcctgctgctggaaagaaaagagcaaaatcggctgctgcaccatcggctgcaaagaagaaggccaggaaacaaaagactgctgccgacgatctaccagccattgatccagatgtagctgaattcctggaagatgaagcaatggcagaagaggtggacgaagcagctgaacacattagtgaaacaagggagcatactcctccaactgattcacctagtccttagagaacaccatcacctccaatacgtcccacttaccagccaagggtatgcatcaagaagaaggtggcttccaagaaacctcaggggacatctccaccgcagcctcctcgacctccaactcttgtctctgaatcaagtgaaaacactccatcggctgtgggaagtcaccatgtagaagaagaagaagtagcatcaccagctcctgcatgctatccctgttttagccgatatgttctcttttgacattaggccattcttggatgaagaggaagaaacaacaagccaagctctggtgcccttagccgatgataccaagtcaactatcccggatgaactagctaatgccatcactccaacagcataccttgagcaacatcggcttaagcttgaaaaagctcaaaagaggattgccgatcggcgtgagagaagagatcttgaagcaaccatccaagccaatagagcatccatcaacgaagaaaaagctaagctggatgaattggaggctggtccaagtgcaactcaagctaacattgatcggctgaataaccggaagatagaactcctagccgaaccggaacaacgcaatgcacaacttgctcttgaacaagaaaagcttgccgatttgccaaaagccatcgaagatcagaaatccaagctgaaagcatctgtaaagcatctaactgaactgaccaagtctttgaagccgatctctagcactgatgcagccgatgccaagacaatagatgaagtagatcaaattaggcaaagggcaatatcggccatccaaagatacgtgtctgga

SEQ ID NO: 91904 - DNA, 1017 bp, Oryza sativa
  Clone ID: PAT_MRT4530_90433C.1
atggagttcaaagcagccatgttcgcggccgccgtcgtagccgtcctcctatcgtcgccgtcaccggcattggctcagaagaagagcccgccggcggcgccgtcgccggtgtcgcttccaccgagcttggctccggcgccggcgccggcgccgcactacgtcgacctcgccgagctcctcagcgtggccgggccgttccacacgttcctcaactacctggagaagacgaacgtcatcgagacgttccagagccaggcgaacaagaccaaggagggcgtcaccatcttcgtccccaaggactcggcgttcgccgccatcaagcagtccaccttttccaacctcaccggcgaccagctcaagacgctgctgctgtaccacgcgttccccaagttctactccctggccgagttcaagaacctcagcgagctcaacccggtgaacacgttcgccggcgcgccgtacacgctgaacctcaccgacgacatgggcaccatctccgtgcagtcgatgtggtccaggcccaagatctcgagcagcgtgtacgccacgaggcccgtggcggtgtacgcgctcaacaaggtgctcctgcccatgcagatcttcagcaaggacccgccgctggcgccggcgcccgccccggcgccggtgtccggggcgtccgacctcgcgcccggcccggcgtccggcaagacgggcgccggcggcggcaaggcggactcgacgagcgccgcgtgcggcgtcggcgccggcgtcgtcaatggcttggtgatggcattggctggtagcttgatgctcctgtggtgatgatcagagagagagagagagagagagttcttggagtcaaatttgcaacagcagcacattgttcatgcttctccacacttgattctattttgaattgatttgaaagagccattcttttggacatagtaggcaatgtttgtaggatcgaattggagtatttttttttttacaacgtattacgatcataattcataattactcatctgctgatgg

SEQ ID NO: 91905 - DNA, 197 bp, Oryza sativa
  Clone ID: PAT_MRT4530_90434C.1
ttttggggttaaaaattttttgccatgaattttgaggaattttttcccagaaaaaggcaagccaacccttgcaaaaggattaggtatccttccccatcctaaaccacattccaattaacaaactgaatcccttgtttttttgctcattcccccaaaaaggaaagaggaaagcttctattacaattctgggagtttac

SEQ ID NO: 91906 - DNA, 1804 bp, Oryza sativa
  Clone ID: PAT_MRT4530_90435C.1
ggccgcttttttttttttttttttctttttttttggtgacaaaaacatgcatggtacaccaacattcatctcccacaactatatacaagaagcaaacatcgtgctaataaaaaaaaaacaatcgcaagaatcagatgtacatgacgcatcccacgaagcaaaagcccctctgcagcaaataattagagcatctctctacctactctacagcatcgccaacttcagtaaaggatttagcaatctgctggcactcgacaatctatgtctggctgcctgtgcatgtattgctgaagaacttccaccatcatagcaaattggtgtctgtccacaatctgttctgagttgctcacatgactctgggatcacagagtttgaataaccttcgataagcgaacaattccagggatgcatagactgtacactgagggaaacattggacaggcaaatgctgctgaagttgtccccctcaattccttccaagatgccagcgacaccaacattgacgccgaccacattttcgattgtaatattgcttatcattgggagagcatttctatcatatttgtcatcaggatgttcaccaaagtttccggtgatcctgatggccatcgaaacattgtccatgctcacatcagatatgtacacgttcttcacataccctccacgccctggagcggtcttgattctgatcccgtgcattgagttgacgatgcggagaccctcagcccggacttcggatatgccacctgacatctcacttccaaaggcaatccctgcaccaccccttgtctctcctgtgatgttgctgatactgatgtttgtgctaggacgagcaaaggaaatgccatactcatcccacccactttttatgacaataacatcatctccatttctgacataacaatgatcaatgcagacatttgtggacgaatctggatcaatgccatcagtgttcggtgaattcaggggcgctaggattgtgacatgctggacaagcacttggctgcagtatacaggatggatattccaaaacggtgagttcttgaaggttaaattggatataacaacatcggtggagtacatcaactcaacaagatgtggcctagtataattcagtgtgttgctgtggaaccaatcccaccataggcctccctgtctttcaatggtaccattagcgcctcgcccataggatggaagaggatcaatgactggccaatcggatgaatccggagatccaattatttctgcatccttatccagtgacaaagtgagatggctgataagactaaaactccctgtcagccaccttcccgcaggcacgaagagctgtgcgccacccttgtctgcaaatgaattgaggtagaagattgcgttctggaatgctttggtattgagagtcacaccatccccaacagcaccaaattcagttattgtgacactgtggggtcgatatacgcttgatgccatgtccttgcagtatgtactggatacattggaccattgagtcccaaccatggttatgaaaaccaaaaggactcggagtagctagcataaattcaaatagaacagtatcagtatccatcacatattagcatcaacactaaacagattaagcatgaatacttccatctatgaacacaagtgatgcaaattgtccagaattatgcatctttgagagcataattcttcatagatctgaataaacttgtctctacttgtgtcagaaacaccaatcaagcacaatttagggtagtctcatgtatttttcagatgcagatctcctcctcgtgccgaattcctgcag

SEQ ID NO: 91907 - DNA, 849 bp, Oryza sativa
  Clone ID: PAT_MRT4530_90436C.1
atgtcagcagaaaagcaatcaccgccattaacaggcaagccgccagtgcctcctcaaaccaagctgccgaaacctccagggactaatctaccttcaattggggttgagtccaaggtcaatgagacaaacatcgtcccagtcactgtagacaagttatcaccagaacaaaagaaggagtatgaactgatgatgaagagcgctcaggagcagttcatgaaatcgtttgcagcaacccgacaaggaaaagttatccaaaagtacaaggtgaaggtggttgctgccgatgaagttggaacaagttcatcccaaggtggtaaaggtactgcagatggctcaggcgataaaggtgatgggcttcaagatggtgtggttgaagatcttggtgaagatggtactgaagtgcgggaggaacctcctaggtgcacaaatttccaagaccaagttgattatgccgtacaacgtgccttgatcaaccaatctggagtgcttgtcaatacactaacaaataagatcaaatttgtcattgatggcacgatagctgagtatgagaacatggggccagtctacctaccaggtggtgtcttcccaaactacaggaatttggtgataggaaatcagcagcatgcttccaatgcaccatcagtccagccgacggcaacagtttatgctccagcaccggttgcaccttcgtcagctcaaaggcaggtggttaatcctcgtctcttgtctagagaccagccgcaacatgttgggcagaacatcaatcggctgactcaggagcagactgctacaatgttcccaacaactcagccgattgtcgagccagtacagtcagcaccaattcagtag

SEQ ID NO: 91908 - DNA, 1137 bp, Oryza sativa
  Clone ID: PAT_MRT4530_90437C.1
atggagatcgaaccgcaccaaattcttcccgacgatcttgtcctcgagatcatcgcgagaagcagtcctgctacgatcatccgctgcggtgccatctcaaaacccctgcgccgccgcatcctccatccggccttcctccgtcgcctccgcgttgtcaatgctggggacgacaccggcaattcccgatgcggattcgtcccatctctcctcctcggcttgtaccgccgagcaaaagacctgtgcagcccgctggctttggtgccacctgatacagccggcgccgcgagcattgccacatcgctggccctcgtcccgcccgcgacaccgatcaaccatggcgccaaccacagcgcgtgcatctttggtccctacctgcccctgtcatcgcgcaggtccctcatagtcctccgccggcggtgcagggtcatcggccaccaagactatctccacagcgggctcaccgtgtgcaacccagtgtcaggcgagcgttgggtgctcccgccccacgaggtgtccgacgagaccgtcgtcctcctcgacgtcaaccacaacgaccaggcgattggaacccactcgttcaagttgctcgccgcgcagctgctagtgagccctgccaggacgctcatcttccaagtcttctcctccgacgagcgcgagtggggcactcccgttgcctgccccatctacaggatttgcttatccgacggcgactccaatgttgtcgtcctgcgcggcgccgtctactggttgtgctgcgaatactcgggttacagcatcctcagcctaaagcgacgaggcgacggcggggagccgaaggcttcactagtgaacctcccggagtcgtgcaaatccgggatgcacaacatgtgcctcgcgctatcgccggccgcggcggcggacgacggcacgagcaacgcagcattgctgagcgtggtcgtccacggaagcgaccgcattctcgtgtgggtccgcagactccgcaccaccgcgcgagggaggtcacgccgctgggagctgcgtcacgttatccgcgagaatagcatcaggcggcctggattttcgcgacggatggttgagaggaaggtggctcgtgcggttctgcgaggggagtggcgccctcgttttggagggggatga

SEQ ID NO: 91909 - DNA, 1715 bp, Oryza sativa
  Clone ID: PAT_MRT4530_90438C.1
tcaagtgaggctaacaaactccaaatggattaaagccataatgtcctcaacctccacaacctctcttagaagtgttgacatgttatggcacacgtggaaaccacattggtctccgatctgttgtgcgcatgcgaacttggtgtcatgataaagttcgtccttgccctccttgtgcctaccacccttttgcacatatgggccccaagccatatttaaggccttggtgatttcaaaggagtagcattttagaagaccagtgtccaacttccgaatcctgaaaaggtcgaagaggtcatcaaagcctatagttatataggcaggcgacgataggaacggctggtggtcgtgatgtccaactatggatgactccctcattttccacttggcattgcttagctccatgtattgcttatgtagctctcggcaagcaatacccatcacggctaacacattgtcctccaccaatggcatgcctagctcaaattgggctggcgccctcacgaccttccccgctttgctcaccggcatcgatgtcgctgccttgcccctttttggctccggcgccaactccccgaccttccccttgccgcgttcacgcttctggcccttgacaagtggtggggagctatcggcctttcttgtggtctttattggagccaagctttgagctatatctgccaagtccatatcagctccaccaggagaatgaggtactgacaatgccggtccacggggagcctcaattgatagcttagacttgggaggtgtaagctccgtcggtcgacttggacgaggagtcatcttcacaactatgtcttctttaggccattgtatgaacgtcttgtgcgcatcgcccaaagtcatgatttcatcattggggggcacgagcagcggatagcctgaccaggtgtcctttactgtatcgatggacaccttggcatacccagctagcaggtctgcaccgtggaccttgtctgtaaccgagggcttgaaagccatgccctcagcgacttcgggagcgaaagttgggtggaccctcgccagtaggacacactgtgctacgccctctatgtggtccactgcagctagtggtgcgaccgggagaccaggggccagcacctctgtggatgcacaactactcctatgctgtgacggactcgcgtcgtgttgtgcacgaggagttggatgcacagcaggtgttgtgcctcggggtatattcatgtcggcgaggaccttgttaaccctttcttccaccctagcgttcatgctagcttctagttcttgaatgacctcaaccttaagttcggccttcaaacgagcgtccctctcttccttggagactttccgtttcttgtattgggaactgtactgcgggagtccatgcttccagggcacatcgctaccaattcccctagtccggccaggatgttctttggttccgagcgcctttgtgaggatgtcatcttcgcgcctcttcggcgcggactcaaccttgctttgtgaagcttgttcagcaaccaagcccaacagttcctgatagacgacggcatctcttttgttctcaaatgtgacagagccatccgggttgaccttaccccttgcccgcgcccagttgcgagctctttgttcagggatgtctgaaaacggggcatggacattcgctgctgcagcggctgcatcttcttgggcccatattgcctccttgccgatgtacc

SEQ ID NO: 91910 - DNA, 2262 bp, Oryza sativa
  Clone ID: PAT_MRT4530_90439C.1
ctagtgcagtccgctgccaccgttcttgagggattttgagtagggattgagagtaaccagcgtatcggcgacttcggcgttactcatccacacgacaaacatacttgggcaccgagcgtccctggagattccaactcgtttgttcaaatggattaaagccataatgtcctcgacctccacaacctctcttagaagtgttgacatgttgtggcacacgtggaaaccacattggtctccgatctgttgtgcgcatgtgaacttggtgtcgtggtaaagttcgtccttgccctccttgtgcctaccacccttttccacatatgggccccaagccatatttaaggccttgttcaccatggatggatcaaggaacccaacctgattaccaaggcgacgactctcgatccaacacaacaaggagtagtattttagaagaccagtgtccaacttccggatcttgaaaaggtcgaagaggtcatcaaagcctatagttatataggcaggcgacgataggaacagctggtagtcgtgatgtccaactatggatgactccctcattttctgcttggcattgcttagctccatgtattgcttatgtagctctcggcaagcaatacccatcacggctaacacattgtcctccaccaatgctatgcctagctcaaattgggctggcgccctcatgaccttccccgctttgctcaccggcatcgacgtcgcagccttgcccctttttgactccggcgccaactcctcgaccttccccttgccgcgttcacgcttctggcccttgacaagtggtggggagctatcggcctttcttgtggtctttattggagccaagctttgagctatatctgccaagtccatatcagctccaccaggagaatgaggtactgacaatgccggtccacggggagcctcaattgatagcttagacttgggaggtgtaagctctgtcggtcgacttggacgaggagtcatcttcacgactatatcttctttgggccattgtatgaatgtattgcgcgcatcgcccaaagtcatgatttcatcattggggggcacgggcagcggatagcctgaccaggtgtcctttactgtatcgatggacaccttggcatacccagctagcaggtctacgctgtggaccttgtctgtaaccgagggcttgaaagccatgcccccagcgacttcgggagcgaaagttgggtggaccctcgccagtaggacacactgtgctacgccctgcatatgtgaaagtcttgttaacactttcttccacctagcgttcatgctagcttctagttcttgaatgacctcaaccttaagttcggccttcaaacgagcgtccctctcttccttggggactttccgtttcctgtattgggagctgtaccgtgggagtccatgcttccagggcacatcgctaccaattcccctagtccggccaggatgttctttggttccgagtgccttggtgaggatgtcatcttcgcgcctcttcggcgcggactcaacctcgctttgtgaagcttgttcagcaaccaagcccaacagttcctgatagacgacggcatcacttttgttctcaaatgtgacagagccgtccgggttgaccttacccctagcccgcgcccagttgcgagttctttgttcagggatgtctgaaaacgggacagggacattcgctgctgcagcggctgcatcttcttggacccatattgcctccttgccaatgtaccctgtggtgcccagccgatgtgggtgctcattccgctgttgcagtaggcgatgtgcctcgcttgattccctaaactcttgggtgttcttgagagaaaagaattcctcccacaccgcttcggttatttgagggtattcatcgaatggcatatgattgccgggcgggttgacaaactcggtgaagagcttcgacttccaattcttccaagctttgcccatcttctggaatgtcttccgcttgagcctatcctttgcttcagccggaaatgtgaaccatttctccattgccgtccaagctcgctctttctcggcttctgtgaccttgccgatatctttatggaggatcccgaagttctcacgtgccaccagcccgcagtagttagaccatcttccaatgacagtcctgggcaccgtgggcctaccactagcgtcaacctctcttataacttgcactgtggtcggccatatattttgtgaccggggatttctactcgacctacttgcacttgtcccgcccgacat

SEQ ID NO: 91911 - DNA, 1916 bp, Oryza sativa
  Clone ID: PAT_MRT4530_9043C.1
atgtcgtccaagaagaactactacaaggagaagatgatgcggcggaagagtatatacatatcacaagctgttgatccagcagaatggcatttaagagaggagaaaaaagaagaaccagagacaccaaggtatcgagatcgtgctaaggagcgtcgtgaagatcaaaaccctgattatgaacctacagagcttggttcatttcatgctgtggcacctcctggagcagatttaaggctagcagatgcacacaagatatctattgagaaaagcaaatatctcggaggtgatctggaacatacacatttggtcaaaggcttggactatgctctacttcacaaagtacgaagtgaaatagaaaagaagcctgaagcagaagatggaaaggatacacagtcaaggtctacaaaagaagatcaagcagtctcattccgcactgcagctgcaaaggaggatggacttaccaatgatattccgacaacacttcacaggagcaaagctgattgctctgttccagaggagatggtaactgtcagtgtggatggttctgtacttgataggattgctaaaatcatgtcataccttcgacttggatcatctgggaaagtcttgaagaaaaagaaaaaggagagggacacaaaagggaagaacagtttagcaagtggtgactacgatgaggtagctagacctggccaaactaatgggtctgctctgaaacatcaatttcaaaaggacatgccgccgccgccaccccctcgaaataataacttaagcaagaatgaggaaccgtctgctcctgttgctagagcagatgaagatgacatttttgttggagatggggttgactattctgttcctaacaaggaaatgagccagagccctgtctctgaagatatggatgagtccccacataaccatcagaagcagtcctatttcactgaagagaaacctgtctatgggcccatcccaccatcggaccctgctcaagcttggccacaaccgaatgcgtacgatgctattcaagctcaaatggtagctgctggatatcaaggggagtggtcaggctatcagtatggcgaacaacagatggcttatccagaacagtacatgcaacaaagcgctcaggactgtgatgtactagctgatccaaatataacccaggatccaaggttgatgactcaagcagataaagacagaggtcttggttctgttttcaaacgcgatgatgaaaggcttaaacagctgagggagaaagatgcacgggagaaagatcctaattttatctcggatagttactccgagtgctatcctggttatcaggagtataatcatgagattgcaggcagcgatgaagaagatgatttatcgaagatggacatgggtggccgggctaagggccgtcttcacaggtgggactttgagacagaagaggagtgggccacatacaacgaccagaaggaagccatgccgaaggctgcattccagtttggggtgaagatgcaggatggcaggaagacgaggaagcagaacaaggaccagaagctcacgaatgacctccacaaaatcaacaagatacttgcgagaaagaaaggtgacaaagatggaggggatgatggcgggcattacgatgatgatatgccaagtgggaagaagcaacgtgcctgatgctattagacacttatagtttatcctgcgagaggtaaaactgtatttgtactaggaattacagtgccatgaacacctgacagttgtaatgttctgcgttttggccggtgcagaagggaaaaagaacgggatggccatgctttcgagctgaaacagtgataatatgtagctcatccatttttataacagaacagcccgtaatttgctttgttttactcacgaaaagaaaaaaacatcgaaaaaaaaaaaaaaaa

SEQ ID NO: 91912 - DNA, 545 bp, Oryza sativa
  Clone ID: PAT_MRT4530_90440C.1
atgagtagcgtgggactaatcacgaaaaacattattagacccgcccataaccgcgggcacggctattcgaataattttactttggccagaggtgtaccactgtacccataagacacgattccacacatgttgccatgccccgaagtaccaccacggcactgcaaagggggaaatcgtgacaatacccttcgcacaacacaactcaccacagtgcaccattcctagatcataatcatcccctcaaaaaccggaggcatggactccccagcgacctccacggacttctcgccgcttctcagtctggcaccccgtaatgaaccatgctatacaaaaggtaaagccgttgcccacgctggcttacgataggccggtaggaacttaaagttgcacctacggctagataactccactaccgagcaacgggctaaagcggcggctaggtttaagcggcacacggctacgatacggaacagcagcgacggcacagcacgacagcaaggcgcaacagcggtagcgactcaacaacgacttagtgagatggctaa

SEQ ID NO: 91913 - DNA, 375 bp, Oryza sativa
  Clone ID: PAT_MRT4530_90441C.1
atggagaaggcatcggacgaccccgatgacgtcagcaatgacgtcaccgacagcggcggcggctcggcggagcggacggctcggacggcgcacgctcgccggcgaacagcggctctacagcacaaacggagggcaccaagacgtagatcacggcgcggcgaactcaccgatgaccaaaacgtcggcggaagaccaacggacggcggcggcgtcgaggaggaagcggcgaagctcttcgggtcgacgacggcgacggcgctccggcggtcttcggcggcggcgaagcggtggacggggacggcgacgaccttgcgaacccgatggtggcgacggcgaccgacgacggcggctgcaacggcggtgcgacgcggctga

SEQ ID NO: 91914 - DNA, 596 bp, Oryza sativa
  Clone ID: PAT_MRT4530_90442C.1
atggagtgccaaaaccttacccttgctgctggggagtggccgcgccgcgccgccgttgcagtcgccgtcgtcggtcgccgttgccaccatcgggttcgccaagtcgtcgccgtccccgtccaccgcttcgccgccgccgaagaccgtcggagcgccgtcgccgtcgtcgacccgaagagcttcgccgcttcctcctcgtcgccgccgccgttttggtcaccggtgagttcgccgcgtcgtcctctacgtgctggtgccctccgtttgtgccgaagtgccgccgttcgccggcgagcgtgcgccgcccgagctgtccgctccgccgagccgccgccgctgtcggtgacgtcatcgctggcgttatcgtcccttctcccgtgagccggtcgtggaccgatcgatctcagccgtccgttttggatagggttgatctcggccgtccgttcccgtgaaccgtcgcccgtgcgcccggtccaccgaaaccctagccgctgacgcaataatccttcttttccttttgtataacatgattcattgcggagcaccagactgagaagtggcggagataagcccacgggggtcgctggggagtccat

SEQ ID NO: 91915 - DNA, 312 bp, Oryza sativa
  Clone ID: PAT_MRT4530_90443C.1
cccagaccgagactaaccctgcattgaccatacttggtgcttggggagctacacatcggaacattacactgacgggaacaaaggccgaatctttggtgaataggctgatcaggaggaccatagaggcatgcaagaatcgctcgaaggatgctgacataactaccaaggcggttgacgaggtccttcttgttggcgtcatgacaagagacacgcaagtgcagtacatcgccttctagatcttttgcttgtccacaacgctaggcggataccacataaaagttacggcgatcggtggatgcatacacgacggca

SEQ ID NO: 91916 - DNA, 495 bp, Oryza sativa
  Clone ID: PAT_MRT4530_90444C.1
tcatgatgatgacctcatcaatggccggaccaagatggcgacctcgccggagattggatggtcggctgcgactttggaggacatgaacacgtagaggacgacgagacgaacccaacggtacccaccctcgaaccaaacgacgaacgacgacggccggcgacgaggtctagcggcggcgcggcttcggtcgacggcggcgacggggctgcggtggtcggcggcttcggggagatagcggccgagcttgcccacacctcggcgcaccttacggcgatgacggcgaccggcggcgacgacggaggcggcggcgcgacgcggatggagctcggccggcgacgacggcggggtggagcacgtggcggcggcgtttcggcgcttcacggtagtgtcagatccagtagcgcgcacagtccagcacggcacacatgaaaagcggcagctcgagtagtcactatcaactttcggcgctgcaactaacgagaatggaagcgccat

SEQ ID NO: 91917 - DNA, 2033 bp, Oryza sativa
  Clone ID: PAT_MRT4530_90445C.1
ttttttttttttttttttttttttttttttttactatcagggagaaaaatgatagtattaattttattgtagccgcgtacacagcctgatagtctatagcatttatgtgtgtaattcagcatctatttacagcgtacctagctatatatactaacaaataaaaaaaagtagctactgtttctccttgtgaatatcaagttgcttgtaaggttggatcatctggctcccttcacaatcctaaattggtcctggactgccgacgtgttcgagtttacaaactgaaccaacatatcagttttcgtcgcatgtaccctggcatatccaaactctgaaatccttgataagctccagctatgcagaccaatcttagggaagccatccaagttgaacccccctgctccaacaacggcatgaacaggtgcggcgtagttgctgttatcgtaggtatcaactccttttgcgtccttctttggcatgcctttgcaattgccctggtataccgcacacgttctctcgtagttgtgtacatggccaaagaagaccaaatcgacctgttttgtttcagaaaataatatcttttgtttgtttgatctacaacaaaatttggagagtgacatgaacatgtaaacgatgtactcttggtctgacttctctgaccactcgtgctcggtggacatcacaacgaagtgaacgctcccttgctcgatcgaataccatggtttgtccctaccggaagcaggcatggggaagtaggactcgtaggggactccacattcgccgcctgaatccggcgtcggatataccgatccagatcctgcatagtctctctcgtggttaccaatggcggtcatgtaggacacctgcgacgcgagcggcgtgatgaggtgaaggaagaaatcccattcgacaaggaagcccgtggcgtagctgatgtctccgatgtggaagatcgagtcgacctttccggtttgcatctctgcagctactgctttggccacggaggtcgatccaggctgaatgtagtgttccactgatgggtccagtggagccttccccatatcaccaaagatcacgaaggacagctcgcctgaacctgcagctggtggggttctgaattcggttgtgttactccaacccacggaatcacttccgtaacggtaattgtaggactgagatggctggagaccggtcatgagtgccgaatggatgtaacccggatcatgccacccgaagtccttcgcaggactcggcagcacggcgatgctgcacatgtccttatgagtgaatgtcgtggcgacagaggtagcagtcttgcccgtcccgtactgaacctgctgcggcctcgcgtctccgctcacccacgtaagcctcatcgaggtggccttggagtcgacgctggagaggtggccgtggagcggcttggcggggttggcgaacgggagcgcaccggagcgcttgaggacgcacggcgtcgcgaagccgccggagaagaggacgaactcgacgtcggtgcggaagttgatgacgtggaacgccagcgtggcggcgcaggtccggaccttgcaggtgccggacgcgcggcgcttctggcacgccgaggccttgcagcccaggtagcccgggtcgcttgtcaggtactgggccttgacagggtagtggcacagaagagggaggctcgccagatcacctgtctcgatgtaattgacaccgttcagagggcaccccaagacactggagtttgaaggcgtgatcatggcgagccagtgggagcggtcgggcctgcggacgccggagacggtcacgttgaggaacgcctcgtcggggagcggcgccccgccggtgctgacgctgatctccaggtacgggctcgggtccaggcacgtacccagcggcttcctgttcaccgtcctgaactccgacttccccgcgaagctcacgcgcatcgtctccgccgccgggagtagcggcgagctcgccgcggcggcggcgcagatgccgccgatgagcacgagcagaagaaggaggcgcgccat

SEQ ID NO: 91918 - DNA, 190 bp, Oryza sativa
  Clone ID: PAT_MRT4530_90446C.1
ttccgcggccaccgccgacagagcagccgccgcggtcctcctagtcgcgggcggtcattgttcgtcgttggtcgtcgtggtaagaaccgttgggttcgtctcgtcgtcctataggtgtacatgtcctcaaaagtcgcagccgaccatccaatctccggcgaggtcgcaaacccgggccggccatggatga

SEQ ID NO: 91919 - DNA, 168 bp, Oryza sativa
  Clone ID: PAT_MRT4530_90447C.1
atgtctcaagcttgccgcatcgtgctccttgctagctcctcgctgctcgtctccattgtttacaggaacctggttggggaaggcgcggtcctgctcaaagtagttgcggcggcgctccgcgccaccgcaggcgaggtattgcccgtggaggcgcatgataccgagtag

SEQ ID NO: 91920 - DNA, 528 bp, Oryza sativa
  Clone ID: PAT_MRT4530_90448C.1
atggagacggcggcgcggcggcaccggagatggccggcggcggcgacggggtggagcacgtggcggcggcgctacgaggcacgggagaccacgggagagggggcaaacgaaagaggaggactagggggtcctatttatagccttggattgaagagatcggactcctcccgcaagaaatcgatccgggaaatcaaaaactcggttttggagataaactcgaaaacgagtttgattcggataagatactcaacgatttgctccgatttttggggggtaaagatagaggaggataagaggaatatttcccctcaactaaattggaaaaaggagcaacggggaggcgagatttggaaggaagaggcggcggcacagggcacagcacgggcggctcggctctgtccagagctggaagatgaacagtgccagggagggaaagtagactttctgctgggcttctacttccaaagactgattaaaggagggacaaaagcagacttcgggaaagagaggaaaagggctgcaggctga

SEQ ID NO: 91921 - DNA, 1173 bp, Oryza sativa
  Clone ID: PAT_MRT4530_90449C.1
atggctctcgtcctgttcgcctcgtcgtcctcctgtaaacgccctaagcacgtggcgttcttcgacagcaaccacgacggcatcatctccttctccgagacgtacgaagggttccgtgcgctcggatttggagttgttacctccagattcagcgcgaccgtaatcaatggcgccctcggtaccaagaccagacctgaaaatgcaacagcatcacggttttctatctatatagagaacatccacaaaggggtccatggaagtgatactggcgcattcgattcagaaggaaggtttgtcaatgaaaagttcgatgagatatttaccaagcatgcaaaaactgtacccgatggcctgacagcagccgaactggacgagatgcttcgtgcaaacagagaacccaaggactacaaaggatgggtcggagcatcgacggagtgggagacgacgttcaagctcgggaaggacaaggatggtttccttcgcaaggacactgtcagaactgtctacgatgggagcttcttcagtaaagtggcgtcgaagaagaaggcggaggctcgacgacggcggctgtcgtccctggccggcgacaacgatatggcggcggtcgcggccgtgcctctcctcctcctgtccgccgcatgcttctggagccagccggcggcggtgggcggcgacgccccggcaacggagctacagaagcacgtggcgttcttcgacagcgaccacgacggcatcatcacctttggcgagacgtacagagggctccgcaccctcggatttgggattttcggcgccaccgtgagtgctaccttcatcaatggcgacatcggccccaaaactagacctaacattcataaagggatccatggaagtgatacgggtgcattcgattctgaaggaaggtttgttagtgaaaaattcaatgagatattcaccaggcatgcaaaaactgtacccgacggcctgacatcagacgagctggacgagatgcttcatgcatacgcagatcatacagagcacaaagacagctcaggatggctccaggctgcaacagagtggcgggcgacattcgaggccgccaaggacaaggacgacatccttcgcaaggacaccgtcagagccgtctacgacgggagcttcttcagtaaactggcgaaggagaatgacgactaa

SEQ ID NO: 91922 - DNA, 171 bp, Oryza sativa
  Clone ID: PAT_MRT4530_9044C.1
atggtggaggactcaacttggaagaggtcgtggctccaggaggtcgaggcgacaggtattggcggcagaggcggcgctgctcctgcgtcgggggactgccctgtgggcgtcgggatcctcattcagcaagaggcccacagtgatggtcgcaccctcatcggtgaggcctag

SEQ ID NO: 91923 - DNA, 556 bp, Oryza sativa
  Clone ID: PAT_MRT4530_90450C.1
aatacatatgttcccccggttacacaattgaaacaatttccgatgttccagaggagagcgtttcagttgaggaaggttcagaggtttttaaacctggttaaggtgggttgtgagcatatggttttgatggttgtgctcatgacaattaaggaccggttcgcgagctactgttgtgaaacaattatcgtgccaaccacaagccagcgtgggcaacgactttatcttttgtatagcatgattcattatagtgtgccagactgagaagtggcgagaagtccgtgggggtcgctggggagtccattgcctctggttttgagggggaggttatgatccaggaatggtgcactgtggtgagttgtgttgtgcgaagggtattgtcacgatttcccccttagcagtgccgtggtggtacttcggggcatggcaacatgtgtggaatcgtgtcttctgggtacaatggtacatctctggccagagtaaaactattcgaatagccgtgcccacggttatgggcgagtctaacaatgtttttcgtgattagtcccacactactcat

SEQ ID NO: 91924 - DNA, 1155 bp, Oryza sativa
  unsure (1)..(1155): unsure at all n locations
  Clone ID: PAT_MRT4530_90451C.1
atggaggagaagaagctgtccttctccatcccctccaaggcccggccggccaggccggccttccgccccgccgacaccgacggcgccgccggcgcattcgacgacggcgagtactccgcgcgcgccccggccccgcagttcgtcaccgagttcgaccccacccaaaccctagccaccggggccgcgccgtccgtcatcgcgccgctacagaactccggccacttccttaaccaccgctcccgcaagcccttctcgctccccaccccggaggaggaggcncgcctcgncgcgtncgccgccggcggcccctccttcgtgctcgacaccggcgaccttatgctgcggaggtacaaggaggacatggccagtctccccgatcaccgcggcctagatgagttccgcgatgtgcccgtcgagggatttggtgctgcgctgcttgctggatacggctggtcggaaggtaaaggtattggcaggaacaataagggggataccaaggttgttgaatatgaccgccgtgccggtacacaagggttaggctacaatccctctgaggccgaccctaagaagactcgcgctggcgaatgggttgttggtgggaacaaggagacccagaatggaaatgcgaagaagagagaccgtgacagtagaggtagaacagaggatagagactcaagctcccgccagaagagatccggtgagcggagggcagagagagaggtccaagaaaaggatagaaattctcgacatactaaacaagttaagattggtggtggtggaggtgacaagatgcggtggttacacagcgatatcaaggttagggtggttagtgagaggttgagcaagaagctgtacttgaagaaggggagagttctcgatgttgtgggacctacaacatgtgacataattatggatgatcagtctgagctggtgcaaggggtagagcaggatatgctcgaaacagtcctgccacggatgaatgggctggtgcttttgcttgctggggagcacaaaggattatgtgggcaccttgttgagaagaattcagaggaggagaccggagtggtggagctgtccaatacaaaggacatgatacgagtgaaatacgaccagatcgcagaatatattggagacccagagtctcttgagtactag

SEQ ID NO: 91925 - DNA, 1307 bp, Oryza sativa
  Clone ID: PAT_MRT4530_90452C.1
ttctaatttgcgcagccgccatggaggagaagaagctgtccttctccatcccctccaaggcccggccgcccaggccggcctcccgccccgccgccaccgccgccgccgccgccgcatccgacgacggcgagtactccgcgcgcgccccggccccgcagttcgtcaccgagttcgaccccacccaaaccctagccaccggggccgcgccgtccgtcatcgcgccgctccagaactccggccacttcctcaaccaccgctcccgcaagccctcctcgctccccaccccggaggaggaggccgccctcgccgcgtccgccgccggcggcccctccttcgtgctcgacacgtccaccgcccccgacaacccctcctcccacatcgcctatggcctcaccgttcgcaacgccgcggcggagttggagaaggcggcggagccggagaagacgcccccgcctcctcctgcagctggtgcccccagcggcgaccttatgctgcggaggtacaaggaggacatggccagtctccccgatcaccgcggcctagatgagttccgcgatgtgcccgtcgagggatttggtgctgcgctgcttgctggatacggctggtcggaaggtaaaggtattggcaggaacaataagggggataccaaggttgttgaatatgaccgccgtgccggtacacaagggttaggctacaatccctctgaggccgaccctaagaagactcgcgctggcgaatgggttgttggtgggaacaaggagacccagaatggaaatgcgaagaagagagaccgtgacagtagaggtagaacagaggatagagactcaagctcccgccagaagagatccggtgagcggagggcagagagagaggtccaagaaaaggatagaaattctcgacatactaaacaagttaagattggtggtggtggaggtgacaagatgcggtggttacacagcgatatcaaggttagggtggttagtgagaggttgagcaagaagctgtacttgaagaaggggagagttctcgatgttgtgggacctacaacatgtgacataattatggatgatcagtctgagctggtgcaaggggtagagcaggatatgctcgaaacagtcctgccacggatgaatgggctggtgcttttgcttgctggggagcacaaaggattatgtgggcaccttgttgagaagaattcagaggaggagaccggagtggtggagctgtccaatacaaaggacatgatacgagtgaaatacgaccagatcgcagaatatattggagacccagagtctcttgagtactag

SEQ ID NO: 91926 - DNA, 345 bp, Oryza sativa
  Clone ID: PAT_MRT4530_90453C.1
atgggttgcataggcgaggtgattgctggtggagcaccgcgcgctgcggccaacgatgctatggtagagacgaggttggggatggagacccacacgccacctcgttttctccaccacgacctccagagacgtcttccctgcgatggagccctacacactacggctgatgacgctatggtggagacgaggtcgaggacagagacttgcatcgcctcatcttctcccccaccttcgcagccgacgacgccacgccgagtgctggagctcgctccctatgtgctatcgtccatgagcccaagtgatgccagagaattgcctgagttgaagaacaaagggaggcattag

SEQ ID NO: 91927 - DNA, 670 bp, Oryza sativa
  Clone ID: PAT_MRT4530_90454C.1
ttggtcgcttgcttgtgctttgctttgctaggacgagaagaaaagaaaagcggcgagagctaagcgaggaaggatgcgtggggcgtcggcattggcatctctcgtcgccgcggcggcggtggcgctgctcctcctcatcgacggctgcggcggcgccatgtacaaggttggcgacctcgacgcctggggcatcccgccgccgtccaagcccgacgtctactcgcgctgggccaaatccatccacttcgcgctcggcgactccatctggtttctgtacccgccgagccaggactcggtggtgcaggtgacgccggtggcgttcgccgcctgccaggcgtcggacccggtgctgaagctcgacgacggcaactccgtcttcaacctcaccacgcccggccgcgtctactacatcagcgccgcgctgggacactgccggaagggccagaggctggccgtcgacgtgcccatggccaacggcacctacctgccgcccaccgccaacgacctcgccgccttcgcgccgatgccggccgaggcgccggcggggttcgagtcggcggcgctcggccccgccggagcgcgacagtcggcggcgccccgagccgccgccgccggcggagctggatccgtccttcttgctgctcttgccttcgccgtcttcttgctgtga

SEQ ID NO: 91928 - DNA, 1085 bp, Oryza sativa
  Clone ID: PAT_MRT4530_90455C.1
aagtggcttatagtatgctcaagcttttccctaagcaggtatttatttggctggatcacgttgagggagagtttccctataaaataccttggattgccactacttcttggaaggatgcgcaagacggatattcaaccaatcttcgataagatcgcagcacgggtcaccggctggaggggaaaaacatgggaccagtagggagatcaactctggaagccgtaggcctcctcgaagtgaagagaaagaggttcctatggaccggtgaacaagaagcttgaccggttcgatggccggtccggctttttgcactatgctcccaaccgtgcaaagaggactgggagttcttaacatggagaagttcacgagggccctgcgcctgagatggctctggcacgaatggaaagaccccaccaagccgtgggtgggcctcaagacaccatgtgatgaaacatataaattgctcttcaccacgaccactacaataacgattggggataataaaacgattcgcttctgggactcatcctggctagatgggcaaaggcattatgccactaccctatgcagtctccaaaaataaaaagagaaaaaaatactacgtgaaggaataaaaaacgacgtttggattgatgatctggacttaaatggcagcacccatttcacagtggatctgatcaacaaactcgtgtccctgtgagacacaacccagagcatccttctagatcaaaacaagcctgaccatactgcctagaagctttcaagccatggagaatacttgggagcgtcggctgatagagcgatgcatgggaaccataggtaccaattttaacggcttaatatggaaatcatgggctcctacaaagtgcaaatttatgcatggcttgtgatccaaaatagagtttggacttctgatcaactcgtagccagaggttggccaaatagcgggacatgccccctctaacgtacgtcaactgaaacagcaagccacctggttgcccaatgtagatacaccaaaagaatttggagcctaactaccgcatgggtagcatatcaacaactagacccgagtcactaggacccatgcc

SEQ ID NO: 91929 - DNA, 840 bp, Oryza sativa
  Clone ID: PAT_MRT4530_90456C.1
atgctgccaagttacatcgactactacgccagccatgccccagcagcacccatgccgacaacgttggtgtggactcaagtcggatcgatcgccttcccagtctgcactactgccacagtcactcccggtcaaccggcggtcgtgaacctagcagatgcagaggggaagtccaaccagaagtggacgacccttcccgcccaggcggaggacagggcactggctattatgacaacaaaggagcaacctcccgaggccaccttccgatatcaggcaccggctagggaagttcgcatcaaggtgactacttggtgtgccatccataagaccaccaagcactctttggaagactacaaggcggtacaacgcgtcaaggcctatgtggaagagaacggacaacaagagggagcacgtatgttcgccaattggtgtccaatccacaacagtaaggcgcatagtatcctggattgcagggttttcctgaaggctgtgaagtacgttgcacctcgagaagcgcccagaagcactcgggcccgacgcgacacggagaagacggaagaggaatatagctccgactgctttgttggagccattattttcgacgaacaggaatcctacacgtcagatggcgatgacggttactcggcgtctgagtccgataacacaagaggagtctacgccattaatgacggcaaaaacacggcttcaacctccgggacacccgcacaacacctcgcgactatgcgagagatactcaacgagacaccctttgacgccgccgcaaatccggagatagcacaatgggccgagcgtattcgcacaatggccacaaacctcgactag

SEQ ID NO: 91930 - DNA, 1237 bp, Oryza sativa
  Clone ID: PAT_MRT4530_90457C.1
gcacgagggaactcctgcgagctccgatctcttcttcttcttcgtgagctctcaccaaaccaagcccaaccactgccctcctcctgccgcgatccactcctgctctccagctcagggaatccacctccacccgcagagaccaaccagcagctgtccgtcctctgcggcggcggcggcggcggcgagatggggcaagctctgcggcggctcttcgacgccttcttctccaccagggagatgcgggttgtgatgcttggtttggatgcagctggcaagacaacaattttgtataggctgcacatgggagaagttctttcaacggttcctacagtaggttttaacgtagagaaggttcagtacaagaatgtggtatttactgtgtgggatgttggcggacaagaaaagctcaggccattatggaagatgtacctcagcaattctgatgcactgatctacgttgttgattcattggacagagaaaggattatagacgccagacaagaatttcagaccattatcaaggacccactgatggcaaacagcataatcttagtatttgcaaacaaacaggacctgagaggtgcgatgagcccagatgaggtgagcgaggggctaggcctgcacgacctcaggaacaggatatggcatatacaagggacatgcgctctccgtggtgagggactctacgatggacttgattggctcgcatccaccctgaagcaattgcaagagacaggccatgcaacttcagtcgccggcccttccatctgatttcgctagagaagagatgccaatgcctcaactagtcaaccaatctgatgctcctgggcagtcatccttctgttcatccaatgagaatattgagttccttggtgcatgcgtgatcttcgctatcggctttcttggtgtggctgctcgcagaggagggcattcaatcgctgtgttcatatgagcaaactcatttgacagtaacttgcggcataattttctcctaaaatgtttgtaaagtgtttggacgtctgtgtactttgttgtagtgaacaagagctgagtagtttgcacggaccgtgcttgtgtatacttgatggcacgtccacatgattgtttgctgattgcctatcaataagacggttggatgatggatgttgtttggtgatatataaactgggctttggctgaatgttcctcctaaaaaaaaaaaaaaaaaaaaactcgagactagttctctccctcgtgc

SEQ ID NO: 91931 - DNA, 965 bp, Oryza sativa
  unsure (1)..(965): unsure at all n locations
  Clone ID: PAT_MRT4530_90458C.1
tttttntttttttttttttttattttcaaatccttttttcatttttatgaaactaaaaggggtacattgtgtaaagtttaatccaacaaacacatcacaacggacagattcagggattcagtaaaacattgccgagattcctactgatgctattgcttcagtgacctacaaacaaaaatgcaggaactgtgaaagcatgaatccatccctaggcatcaagacttgaacatttgaaacagctaaacggtagcgccatcattttgctcccaaccgccaagtctatcttcgggatcataatttgtgaacaagcggaattcatttcctagcttgtttgaatgctgaggcttgaatccacagggacgcacatttaggagctcaaatgccctgtccctctgaacttcccctgtcagtaacagcaggaatgagccttcaggatgtgcgaggaaagataccgtcttggcaaccttctccaagcactccttactcaggtagggagggtcggcgacgacgatccggtaggcgtgcttcatcgccgccggaagctcctccggctggttgtagtcgtagaaggtgaagtcgccgccgtactgcccgaaccgcacgtcgtactccagcagctgcgcggtcacatcagggctgctcgtcttgaggtaggtgtagagcgtcgggcacgcgacgcaggccaccgctgcggaggaggccgggccggagagggagacgaggcgggcgacctcctcggcgagcgcccgcgccgtgcgctcgtcgtaccagaactggctcagccgccagtcctccgccaccagctccaccccgccgccgccttcctccccttcctccccaccgtcccgcccctgttccagaagaaactcccgcagcgcctccgccgccgccgcgctcagctgcggccggtcatcctcctcccctctcacctcgcccctcactctctcctccacaccgctcgccat

SEQ ID NO: 91932 - DNA, 1751 bp, Oryza sativa
  Clone ID: PAT_MRT4530_90459C.1
atggtctccgccaaccagccgccgcccgacgcggccgcggcagcggcgggctcggctggggaggacgccagcaagaaggtgcggaagccgtacaccatcaccaagtcgcccgagagccggcaggaggagaagcctgcagagccagagactctgagccgccgtgccgacgccgacgcctacgccgagccgcccgcacgctccgctcccatggtctccgccaaccagccgccgcccgacgcggccgcggcagcggcgggctcggctggggaggacgccagcaagaaggtgcggaagccgtacaccatcaccaagtcgcgcgagagctggacggagcaggagcacgacaagttccttgaggccctccagctctttgatcgtgattggaaaaagatagaagcttttgttggatcgaagactgttattcagattaggagccatgcacagaagtattttttgaaggttcaaaagaatggaacaagtgagcatgtaccggcagattcatcttccatgcttagagaactcaggcatgaatgccactgtttcgtcatggacacacaattctatcccaccaattgtagcctcatccatggtgaaaggtttgttgtccgtgttatgccagattttgcacaagtatacagcttcttgggcagcgttttcgatccaagcacaagtggccatttacagaaactaaaggagatgaatccaattgatgttgagacggcattgttgttaatgagaaatctctccatcaatttgactagtcctgattttgaagatcagaagaagttgctatcttcatacagtaccccgtctgatgggcttgagctaggaagcaccagaagctcagttctagctgatagaccattaagtgctccattcataatgtgtaagggtgcaaccgtgtacagtaggcttgcacagctggtgatggcattctcgtttctgtcatctggcagagaaggcactactgccccaagtgacccatggcatagccagaaacagaatgctccatcagtccatctgatgagatatgtgtgaccccattcatgattaagggcgaatagtgctgagaaagtgtgaggtctcttccctggccaaactggctaaaaggtgctgagaagtctctccaccgataatttcagctcgtcagtcattcggagcttggtgaagcactaggaaggcactttgcaacattgtatctctagctaagcttcaagccttcaactgcagtatcccttagggcgcagccgtgggcaccgggcttgcgctcgtgggagctgtctttagcggtataatagcctaattgtgtatatatgttagccctgaagcgtgtagttttcctcacccaatacctcggtcccctgggcgcgcaaatctttctctagtttaaaaggctgttcttagtaatgggaaatggaaaggaaattttgagtgatgctggattgctggttgctccctttttcctccattgagttcagctggtgatggcattctcgtttctgtcatctggcagagaaggcactactgccccaagtgacccatggcatagccagaaacagaatgctccatcagtccatctgatgagatatgtgtgaagaggtttcagctgagctgattatagtgctgtaaagcggcttagcactatgtaaatcatgtgttatgcaccatgtatcatgtatgatccttggaagttctggatgcaaaagtgagttgtgcacttgccatgtaaaaaaaaaaaaaaaaaaaaaaaa

SEQ ID NO: 91933 - DNA, 353 bp, Oryza sativa
  Clone ID: PAT_MRT4530_9045C.1
ttccaagcaaaaccaccaccggccagtttcaaaggaacatgtcaaactggcgaaagatttccttcagattcatgcatgggtaagattgttggagctaggtggtttgcacgtgctggtcaagcaactggagagttcaatgctacaatgcacttgcattttcttaccaaccttatggccatggcagccacacagcgtccactgcagctggcaattttcatacgccagcaatatcaaagggctacaactttgggcatgcaagtggcgtaacaccttgagctcattttgcaatctacaaagctgcctattcttttggtggatacatgtcagatgttatagctgcagttgacaaggct

SEQ ID NO: 91934 - DNA, 327 bp, Oryza sativa
  Clone ID: PAT_MRT4530_90461C.1
gcagcttctctggtataattcctgtcactcgtagaactggtatgtactatataatctatgcaattcttcaattgcaattattggatggggtgtttcttttgtccaggttgtagaaaagtgagcaaatttcaaataacgccagacatagtgttttgtcaaacgtactctgtaaaatttgattgaatacgtccttatggtgtgagtatgttaactgtggtgccatgtttttttcccttcggtccagagtttttgtactgaagagctgatattatctgttgtattttcagctaaaagtttgaagagagtttgtgattctgtaaccaggca

SEQ ID NO: 91935 - DNA, 869 bp, Oryza sativa
  Clone ID: PAT_MRT4530_90462C.1
gcacgaggcgcggagctcatcggcggcgaggccgagcgctcgcactcgccgcgggcggactaccccggccgcctccggtccggccgccccgccgacctcgccgcccgcgccgactccgtcgcgtggatcctgaaggtgagagagttgtacggtatgcttccggtgacggcctacctcgccgtcagctacatggaccgcttcctctccctccaccgtctcccgcagggtaatggatgggcaatgcagctgcttgcagtcacctgcctctcccttgccgccaagatggaggaaactctagtgccatccatcctagatttacagatggaggatgcaagatacatatttgagcatcggacaatttttcggatggagcttctagtccttgatgcgctagattggaggcttcgatcgataacacccttcactttcatgtacttgtttgctgacaaggtcgatccaaatggcaagcacatcagggaattgatccatcaagccactcaagtaacattagccacaattcatgacactgagttcttggatcactgcccatcatccatcgcagcagcagcagtgctatgcgcctccagtgagatcatgcaacttgtgtccattgatcatggaactctggttagctggcgcattattggccttgacgaggaagcaatcatcaggtgctaccggctaatgcagcaattgatatctagtaacaatgttgggagagaatcgacagagataacaatggcgacgacgacgacgacggcgacaactgctgtgagctcagaggaggttgtgtcctcttctcccccatcaaagaggaggaagatgtgaccaggcacatgacagaatttgatgcaacattgttaattttc

SEQ ID NO: 91936 - DNA, 312 bp, Oryza sativa
  Clone ID: PAT_MRT4530_90463C.1
atggattgtgtcgtcatcgcctccggcttgccgatgggctgcactgtggacaccaatctagtcgtcatgactcatgacgtggccgtggactggttgtcgatcgaatcgtcgccgtcgatgccgagttgccgacggatcacgctgccgaaaatcctcgatggatctagaagaaaaggagaaaacaggatggacataccagaatcaatcacctgggaattgatcaagccacccgcaggtggacgaactgcattgccgccgaggccgtatgattcgatggatcacgtcggcgtcagcgcgtcgcctccaaattga

SEQ ID NO: 91937 - DNA, 243 bp, Oryza sativa
  Clone ID: PAT_MRT4530_90464C.1
atgctggcggacaatcatggtggtaggtccaccctgctgtccgggtcgactctggaggatcccccgtcatccaggcctgctaggaacttctcctgcttctctgcgtcagtgcgaacattctctggcgactttctcctgatcattgcactgcagaaggttgagcttcttctctatggcatggagctagtcatttgcctccatgaggttgttggtgctggagaaggtgggtggcctgacgcgtag

SEQ ID NO: 91938 - DNA, 241 bp, Oryza sativa
  unsure (1)..(241): unsure at all n locations
  Clone ID: PAT_MRT4530_90465C.1
cgatccgtcgccaccgtcgtgttatgctgtgtacacacttcgcctgtttttggatcaagctgtgtgaatgacctgcctagaagcactatatttcacgtggatacgttgcatgcctgtagtgttagcctccatattctacatattaacttggtgccagagactggtatactgcaacttttttgtgtgtggcggttggtctttggctggactaatcatncggattgtgacagagtattacaca

SEQ ID NO: 91939 - DNA, 3416 bp, Oryza sativa
  Clone ID: PAT_MRT4530_90466C.1
atgcggcgcggcgccgcagcgtctgtccccacggcgtgcagcgagatgcggtacgggagacggatggtgcagttgggagcgagcgtgagcgtgatgcagggaggcagacgagcgcgatgcagcgtggcgccgcagcgcctgtccccacggcgtgcagcgagagggatgcggtgggggaagcggagcgagatgcgggagaggaagccgatgcgggcgctcgcgcaagagaggagcgatgcggtggggcgtggagccggcggagcgagatgcgcgatgcggaatcagattactgtcatggttcttatattgtgcacttccacttacttcatgttgctggtagtcagtggtgatgtcaggcagcagaacttcaatgagtcaggcgcggccataatggagcgtcaaacagcacgaaggaccccaagtagtgtgacacagatgccagaatttccacctgcttgtgttaaccttgctaaagagctcactgcaagatgcagagccagagcactgcaacttacggatgatgagatattgagcataacacaagacttggaaagtgtcatcgagaatttatgtgattatattggcagggtacctacatcagcacttggcagcaatgcttacacagatggtgcggtcaaagcactctcagtgaggggcttcttagaggatgatatgctgacaaatgcagtgaacagcatgcctaataggaagtatttccatgacagcaacatgccaaggctagtggaatttctgcagggaatgtaccatgaatccgatgaatttggaggccacttgttcagctctctcccagaggtctcagaatacattgaaccactgtatgatgcactcttctgtccactgacaaatcaggtaatgactgatcctgtgttaacggagagcggtgtgacatatgaaaggagagccatagaggaacattttgagaggtttgctgatagttctgaaaatgtcatatgccctgtcacaaaaatgccattgcaaagcaagacattgatgaacaatgcttccctgaagagcgtgattgcagaatggacaatgaggaatgaggcaatgcggatcaggattgcccgcactgcgctctcactgtcaagtacggaggctatggtgcttgaggccatacatgagctgaagtcgttggcaaagctgagggggaaaaatagggagcagatgcataagattggggtcaccaggctcttagcacggttgttggacaaccacaatgtgcagattcggcatagcgcgctggagcttctgtgctttttagttgaggatgaagaaggaaaggatatcattggaaaaactaaggccattgcccggacaattaagctcttgtcaactaatggcaccgatgaaaggcatgcagccatctctttcttgctggagctttcaaagtcacagctattgttggaggatattgggtcaactgctggaagtatcctgatcctcaccacaatgaggataaatgattctgatgatccaattgctgctcagaaagctggagaggtcctaaagaacctagagaaatgttcaaagaacatcaagtacatggctgaaagtggctatctagaaccccttcagagtcatcttgttgaaggttcagaagagatgcaaatggagatggtcggctacctagccgagctaatccaagagcaggagctcaccattgacatcaacggaagcacgtcgggggtcctcatcaagatggtgcacagctgcaacaccgtggcgcgtaaggccgcgctcgacgtccttgtccagctttcctctcaccgccccaacagcaagacgctcgtcgaggcaggcgtcgtcccggtcatggtggaggagctcttcatccgaaaggtagacgacgagccgctcagctacaaggccatggccgccgccgtcctcgccaacgtcgtcgagtccggcattgatccggacaacaccgtggtgaacaaggaaggccacgtcctcacgtccaagtactccatctacaacttcgtccacatgctcaagtgcttcatgcccgacgagctcaacctcagcatcatccgtgtcctgctcgcgctcaccgcgcacgccaaggcgctcgccgccgtggtctcggtcgtcagggagaaccaccggggccactccatcgtggagctcatgagctcctggacggaggcgctcggcgtcgcctcgacgaggctgctcatcaccctgtccgcgcacatggggcacaccatcgccgagaggctctgcaagacgcagggccagccgaggaggctggtcaggagcatcttccgcgccggccgcgccgccatcaccgagcggcacgccgccgcggtgacgctcctgtcgaggctaccgtaccggaacgtctcgctcaacctggccctcgtgcaggagggcgccgtgccggcgatactgcgcgggatcgaggagatggggagcggcgcggcgaggatgacgacgagcaggcacgccgcgccgtacatggagggcctcgtgggcacgctcgtgcggctcaccgcgacgctgtacaacccggacgtgctcaaggcggccatggaccacgacttcgcctcggtgctcaccgccctcctcgccggagcagccggtagcggcgaggtgcaacggctcgccgccgtggggctcgagaacctcagctaccattccatcaagctgtcccggcctccgccgccgccggaggacgagccgcggccaaagaagatgaccatactcaagcgcctgaaagacgcaagggtgcataaccatagcagcagcaagaacccaccgctgaacgtctgcccggtgcaccgtggcgtgtgcacgccggcgacgacattctgcctcctcgaggccggcgccgtcgagggcctcctcgcctgcctggagaacgacgacgcccgtgtcgtggacgcggcgctgggagcgctgtgcacgctcgtcgacgacagggtggacgtcgagaaggccgtggtcgccctcgccggacagggcgcggcgaggcgcgtgctcgcggcgctgaggcagcacagggggaacagcctgtggcacaggtgtttctccgtggtggagaagctgctggtgcacggggacgacgtgtgcgtgagggaggtgaccggcgacaggatgctgcccacggcgctggtgagcgcattccaccgcggcgacgcgaacgccaagcaggcggccgagagcatcctcaggaggctgcacaagatgcctgactactctgcaacctacatgtccgtggaattctagtgctttcatttcatcgagtaaataaatatataccaccggtaaatagcagcagatatttgctgccgtgcatatatgaacatgatgtttcatacatcatcttgtacatccggtcgcaaaatttatctcagtagcatatccatgatatgttgtatgaaatcttcccaacg

SEQ ID NO: 91940 - DNA, 1140 bp, Oryza sativa
  Clone ID: PAT_MRT4530_90467C.1
atggtcaacaccaggaatggcagccgtgcagcaggtgagggcagcaacggcgaagaacgcaccgacggtgggcatcccaacagcgactccgtcaatggtccgccaccgctccccgagaatccgactctggcccaagtaatggctcatcagactcagatgatggcagccatgatgcagcagatgcagcagcagcaccagcagatgcaccagaggatgtagcagcaaaccaagtagcagcagcagcagtttggtccccctccccctctatccaagttgccggagtttctacgcgtcaggccacccaccttctccagcaccaacaacctcatggaggcaaatgactagctccatgccatagagaagaagctcaaccttctgcagtgcaatgatcaggagaaagtcgccttcgccacacatcagctccagggtcccgcgtcagcttggtgggacaaccacatggctacccgtccgccaggtatggaggtcacttgggcagaattctatcgcagctttaggaaggctcaggtgccagacggggttgtggcatagaagaagagggaattccgagcactccactagggcaacaggacagtgactgagtacctgcatgagttcaatcgcctagcgcggtatgcaccagagaatgttcgcactgacgcagagaagcaggagaagttcctagcaggcctggatgacgggggatcctccagagtcgacctgcaggcatgcaagcttgagtattctatagtgtcagacaacgcaatccgtcaggaggatcaatgtgggacctaaaatggacaggaagagaaaggtagctcagttccggtccaaccaaggaagccatcagcgaccgcgcttcacacccggacagcagggtggacctaccaccatgattgtccgccagcatcgcccgttaaactcaagcagtttccaccagggcgcaagtggcagccagagccaccagggaggtcagcccaaccgcagtgcagctccgcgcccaccaatggcaccagcacagtcagctccattagcccaagccaagaaggagattggaacaaagccagggtcctattacaggggatcctctagagtcgacctgcaggcatgcaagcttgagtattctatagtgtcacctaaata

SEQ ID NO: 91941 - DNA, 364 bp, Oryza sativa
  Clone ID: PAT_MRT4530_90468C.1
gacccggggggtcttttgccattgggttttcattccccgtttcgctgcaaccgttccggaaaaggtttaacgtccaagatgctctgaggtaccggcggaagtgtgctaccagcgttccccggattccaaggggtgcaatgaaccgtccattcccccaagccccgaatttcccttgcttggaacggggccggaagggtttaggccggccccgtgtaaccctggccgcctgttcccggccgccaatggtgaaaaattccttcctttgtgtttctatttagtttaagcccctttcccgtgtaccttccccttgttggaaccaattgttaagcccaatttggccaacccgccccaaaaggaagtttaa

SEQ ID NO: 91942 - DNA, 352 bp, Oryza sativa
  Clone ID: PAT_MRT4530_90469C.1
aacctcaccatcgctactagatgattttgaggtggcttcccaacacatgtgccacatttgtactggtgctttcggctcttatcaacttctgctagggttggattccagactcccgtaccttccttgcgcatcatcttaaccataacggaccaaatagacagtctgccttaccttacacggagacctacctaacactctgccctttgggggattaagaaccttctcgcacacatccccgaagtttttaacagaagaggagaaaccacataagcttaagcccttgtgctcaacacccgaaagcccagttactccttcttctttggagcttggactgttaccaaaatccacaaag

SEQ ID NO: 91943 - DNA, 266 bp, Oryza sativa
  Clone ID: PAT_MRT4530_9046C.1
cattaggaacaccctacagtcgaagctcaaggggtgacatgaaggatccccgcggattatcgcatcagcgcttcagtgcttgtgaccggataaggtttgggagtaggccaagtgatgttgacaccactactgagatatggtggttccatctgatgatgagaatgtcgaccaggaaccacctagtgcatatagacgatcaaccaatgccatacggctatcgggcgtccactcggatccgaggataacagacgacagctgatgaacac

SEQ ID NO: 91944 - DNA, 317 bp, Oryza sativa
  Clone ID: PAT_MRT4530_90470C.1
gatttttgacggcctatacctgtcagcagtatctcacacggaggcttcaacttccggcctggagttgcaagggccctgatgcggcttttttaagatagcgacggcatcgccctttgattgagaacctgtaactttattatgggatagtgtaatgtgccaagatcactagtctgtatttgctgaagaaacacttgtcgcgatttttgatgatgttgttgtactgatgccaatgaactggctatagcgttgcagttcaagggacactggataactggactacatagtccatacacatttccaaacggtgccagttgtgc

SEQ ID NO: 91945 - DNA, 2316 bp, Oryza sativa
  Clone ID: PAT_MRT4530_90471C.1
atggagttcaccacaggggcattgggcacgctacttcccaagttaggcaagctcctcaaggaagagtatgacttgcaaaagagtgtaaaggagggaatcatattcctgaagactgagcttgagagcatacaagcagccctagagaaggtctcaaaggtgcagctagaccagctagacaagcaaatcaagatatgggctagagacgtgagggagttgtcctacgacattgaggacaacatcgatacctttatgttgcatatcaatgacattgagccaaataagaaatataacttcacatggttaattgataagtgccagaagtcattgtccaaggtaaagatccgccataaaatagccaatgacatcaaagatatcaagcgccaagtcatggaggtgatggaacggcacaaaagatacatgattgatgatattgcaactaagcttccaacaactattgaccctcgcatattgacattatatgagaaggtcaccaagcttgttggcattgataaggcaagtaatgatctaataaaaatgttgtctgtgggggacgcggtgtccgagaccatgctcaaaatggtctctgttgttggatttggaggattgggcaagacaactcttgccaaagtagtgctcgacaagcttaaagtgcaatttgattgttttggttttattccggttggacagaaccctgacatcaagaaagttctcaaggacatcttaattgaagttaataaggacaggtatatggtacttgatgtatcaacgctaagtgaaaggcatatgattgatgaactccgagaatatcttggaaatagaaggtacttgattgttattgatgacgtatgggagatattcacatggaaaaggattaattgtgctttggtggatagtaattgtggaagtaaagtaattacaacaactcgtatttctgaagttgctgaagtagttggtgatgtttataggatgaagccgctttccagtgacaactccaaaaggttattcaacaatagaatatttggtattggttccaatggaccaactaataatcaatcagttgaagcaactgagaagatcttaaagaaatgtaatggcatgcctttgtctatagttacaatggctagtttgttggttaataaaccagtggaggactggatcgaagtgtacgactctattggttttgggcctacaggtcaaaatcaagaagttgagaacatgagaaagatattatcttttagctactacgagttgccttcatacctaaagacttgtctactatacctaagcatatatccagaagaccaccggatcatgaaaaaaccattgatatggaagtggatagctgaaggctttgtccaagaggaacaacaaacctggttatttgaggttggcgagaggtatttcaccgagcttgtaaatagaagcatgatccaaccaattgagatgtatggccgggtgtttgcctgccgcatccatgacatggtgctagatcttattcgcatcttggcaaccgaagagaactttgtaaagatactagacaggttatatgatgttcatagctcatcttcacaaagcagcactgcccgtagggtagcatggcacaagagcttgaaccaagataaattcgataacttgaccacagggatggcacaactgaggtcactcaatgccattgagtgtcctattagtatgattcccccgttagtgagctttgagattctacacgtgctagcactggaatcgtgtggtgtcataacaggatatcacttgaagcatattgggaagctacaaaggttgcgttacctgggacttagaggcacacgaattaccgagctcccaagtgaaataggggatctcatgcatctgttggtattggatgtcaggggcactaatgcactgccagcaactgttggaaagctaagaaggctgatccgactatgcgtcggaggcaccatagttccttctggggtaattgggaacctgacctcactgccacacctctcccatctgaaccttcacttgctggctgtggaacaaagggacttggatgcccttgcgatgatgccggagctccgcgtcctcgaagtgaactccgatttgtcaatttcatggacaatcgctggtggcggtttgttcccaagcctgagatgcttctccacggacatagagatcatgtttttgcagggagcaatgccaatgctcacgaatatttcatttgagccatctggtgatgattcagccaatgacattggattaaggtacctcccttagctgaatgatgtttttatacatctgctgtactgctcagatctgacg

SEQ ID NO: 91946 - DNA, 1116 bp, Oryza sativa
  Clone ID: PAT_MRT4530_90472C.1
ctactgccgctttgaaactggtggctgagttgtaacacttgaagacacaactcttgaagacgcaactggcactgcattggctcctgtgacaacaatgttgttaacctgaccttgcggctgctgatgcttcggcttcggacactctcttgcaaagtggcctggcttgtaacagttgaaacatacctgctgctcccttccactactgttattctcttgagactgaccttgctgaactagcaccggctgattagcttgctcgatgttaacttctttgctttcattagtctctaatttgatctcaccaccgatgttcaactgttgcgactgtcctggaccagcgggaaaagattcaccaatttggagtggcttgatacgctgcctctggctactaccttgtgcctcctggaatacagtcattttccttttacggttatccatcctattcttcttgtcttcaagtcgaattgctttgtcaaccaactgctgaaaatccacatagtcatgggagattaacgtaactgacagttcatccttcaaaccttccaaaaacttctcctgcctttcctcgtcagtgcgcacatcttctggagcataacgtgccagacgattgaactcatgaagatactctgccacggtatgatccttttgcttcaaagccctaaactcacgcttcttcaaagcaacaactcctacaggtatgtgtgttttcttgaatccttcagtaaactcttcccaagtgattggttgtccttctgctctgttcatccggaaatgatcccaccattctgatgcaggtccttgcaactgatgtgaagcgaacacgactttctcctgatctgtgcactggagcagttccaacttcttctcaatagtgtgcaaccaatcacctgcttccactgggttggtagtgctagaaaaggtaggtggcctcacaagaagaaaatcagctaacttgttctgcggcagtggagcattgttgttcccttggttaagctggttctgcatctgctgtatcatcatattcattaactgagtctgttgagccagaacttgagcaagagttgggttcccttcattgttattgttttcacttccactggcgcgagtgttcaccat

SEQ ID NO: 91947 - DNA, 534 bp, Oryza sativa
  Clone ID: PAT_MRT4530_90473C.1
atggacctcggcggtggtggtcgtgagggaagcgagaagataacggccacaatcaccaaggccgccatctccacgaacaaggttggcaccgaccagatccattgcctcgctcgaggcctgctccaccttcctgtaggacaggccgccgtaacaacaatagctcctgctgtcgtggtcgccatgtcccgtctctactcacaccccagcgtcgccgacgcatcagacttgatctttgtcgatgacgacagcgacaacctctctcacctcatcgagctctactctcccctctcctctaccggcgggggcgccttcaccgtcttcctccccagcggtaatgtcagtatttcatctcatagtgtcggcaactgtaactttgacggtcaacatggtggactgctcatgggtggcttgcaaggcataggtgtgacgggacgggtcgctttttggcttggagctgtagatattacggaggggtatgggacgccgttcgatcagggaatcactgtctcttttgcacgatatgtgactgtgtga

SEQ ID NO: 91948 - DNA, 768 bp, Oryza sativa
  Clone ID: PAT_MRT4530_90474C.1
atggactccccagcgacccccgtgggcttatctccgccacttctcagtctggtgctccgcaatgaatcatgttatacaaaaggaaaagaatgattattgcgtcagcggctagggtttgcggtgaaccgggtgcacggcagcggttcacggaaacgaacggccgagatcgatccatccaaaacggacggccgagatcgatcggtccacgaccggctcacgggagagggcgacgatgacgtcagcgacgacgtcagcaccggcggcggctcggcggctctacggcacaaacggagggcaccaagacgtagatcacggcgcggcgaactcaccgatgaccaaaacgtcggcggaagaccaacggacggcggcggcgtcgaggaaaaggcggcggagaagatcgggttgacggcggcgacggtgctccggcggtcttcggcggtggcgaagcggtggacggggacggcgacgacttggcgatcccgacggtggccttctcgagcgacgacgacgaccggaacggcggcgacgcatggctggagcgacggcggcgacggcggtgactagggctacgcggaggcggcgctagacatgacggcgggctaaggcaaaggtggcggcgggtagaggagacaccgggggtccttatataggtgcaaggaggcggcggcgaaggcccacggcggccggcggcgagaaggaaagatcggggattcggaggaaagagaggaatccgattcgacctcgaatccacaagtttccaaaccgaat

SEQ ID NO: 91949 - DNA, 1020 bp, Oryza sativa
  Clone ID: PAT_MRT4530_90475C.1
atggatgatgcggacattccacccagacttcttagtgactccgatctcgatctcatgggtgagcgagagatgcaagcctaccatatgctcaaggataggtcgtttgctcacacccgagcatacgaccctgaactgcttcgaaagacgtgcgctaagaggggccgtattcttggacatttgcctatattcccgtgtggctacatgggtaagttgggcgacggggatgtcgagtcctttgagagggtgggggggcttatgcataaatggcttggcatgactttattccttagagctgatcttagacccattcatgaggatgagttgattatcttgttttccatggttagaaaaattaaggttactcctgtgcaatgcatgatttgccagtggttagaaaatatcaagtttactggtcctattgaatgcacttctttaggtactcgcatagccaatggacttggggttatacagggtaatctaattgcctatatttccacaattcgttcttatgttgatgaagcttatttagtgcaaggtcatacagttaaccacgggccagataatacacttgtgtttttctttcttggctatacaaatgaatcccgttacctaacccgaggtacttcgcatagggctacccacaacatggcatgggaagaacctgaggaatcaacgtcttcaccaccagtgatgatgtgtgaggccgactgggccccaaccaaggatgctcctggttggacccaagttccataccacgacgccggaagtttggcctggcaaagcgcgattgacagccggtggcaagcgcctcatgacacacactgggggcactctcgttcttctagttccattagcatgcccccattctccaggatgtggagctcaagttcctctcgaggaaacctgggtaagctcactaggaggatgggcacgctggaactgcaagcaggagaaatccagtacacgctcgaaggacacatagcacaagcacataagtggcaggaaaatattgatgcatga

SEQ ID NO: 91950 - DNA, 906 bp, Oryza sativa
  Clone ID: PAT_MRT4530_90476C.1
atggcaacgcaaggtaaacagtgcaacactctagaagatttgctattcgatgacataggagacccattgcctattaagctatcagtactgcaaagcatcacaaatgacttctcggaagagcagattattggaagtggtggcttcggaatagtttataagcaattaacatatagagttgaaaattcacagggagtgcttggagatgagcttgttgcggtgaagaagctttactcatttcatgcaattaaagacgaaccatttcaacgcgaggttgattgtctcatgaggattaggcactgcaatatagtatggtttgttgggtactgtgctgaaacatctacaaatgtgatttgttaccaaataatcaaaggtatttgcctgggtttgcactatctgcatgagaggaagataattcatctagatctcaaaccagataacgtactgctcgatgacagtatggtgcctaaaattgcggattttggtttgtcaaggctcttgagtgaagaaaaaagccgcatggtcactgagagaatttttggaacaaggagatacatggcacccgaatacttagttaatggagatatcacagtcaagtcagatatatacagcttgggtttgataatcagagagatggtgatgggtcctaataatgaaggaacaacgacagaaaatgtactagaaatctggaggcataggttggaacaggattcatcaaagatgaggcagacgccaatcgaaatgcgttaccggcaaataatagaagcgtgcattgagatatcagagacatgcatagcgggtaaaccagataagaggccaaccacaggggatatccttcgtcggcttgagaaagaggaagcagggaattggtctatcgtcccagttactccagttgtagattgggtataa

SEQ ID NO: 91951 - DNA, 898 bp, Oryza sativa
  Clone ID: PAT_MRT4530_90477C.1
atggatccaccgaacatgaagggagacctatggtgccgggtgtggtgccagtataaatttacagctccgacgttggcgagaggtgtacgtatcaattgcaccaggaaaaggccaaggcttgctgaaaatacatggatgggtactggagtgctacaccgctacctcactacgtcaactgcgagtgcatcacgtgaatctctccagactttcggcaattctcatagttcattgccgaaagaacgtgttgatgtccccccattgcatatgtcgtatgaagagccctctatatcatattcttatgatacatcacacttcaatgcttttagtccacagcaaattgattgtgcatatactgggatcatggccgagcagaattcagatactaagagcattggggggcaatttgtagaggaattcaatgtaaagatagatagtcttacagaaaaaatctgtagagatgtggaggaaaaattcaattcttatattttaagtaaagggtcaaaaccaattttttcacaagaacaaaagccgataaatccagaattatcggctaatgaagacaaggtgagtacatggaatactccgcaagccacacagcaaatatgcaagtgcacaaggataccaaaggatggcataatataggctcatttacaaaagcagcatttagcaaacatttgagaattgtaaaacagtagagtaattaatcattaatattaatcaacactgaacagcacacccatgttgcacaggcccaaccatcctgaacaaccatacccggctgtacagatctatctccaaaccaggaatgcaccattccaaaccaggagctaatcaaattattaccagttatagcatcatttattatgatgagaagtgtgagactaatcacgaaagacat

SEQ ID NO: 91952 - DNA, 375 bp, Oryza sativa
  Clone ID: PAT_MRT4530_90478C.1
tggaacgttagttggaacgtgttcctacgttgtttggaacgtccctctatctctccatggtcgtaccacagcgtgatgagggcaatgcttggcgattctccactgcatgatggtgctgacgctcgtacatgcacagcagaacgttggcgagcagcgagtgagcaacaacagcgttcgtcccatccagatgagttcaaatttagtgaaagttaatcaaattatagattttgcttgaaaattttggattgcctttccatcattttccatcgtgccacattaatttctctatcagaccactctacttgttactccataccttgtactaggacgactctcaagacaagttccatccattttcgggacgaagtccacata

SEQ ID NO: 91953 - DNA, 1064 bp, Oryza sativa
  Clone ID: PAT_MRT4530_90479C.1
agcaaatcctggcacaggtagccacatgcagcacctctgcagagcaaggttcactttctcggtttgggacttttgatagggggtcaccgaaatcccgaaatttcggaaattttgagctatcagtactgcaaagcatcacaaatgacttctcggaagagcagattattggaagtggtggcttcggaatagtttataaggtatgtctgactaattatgagcttgttgcggtgaagaagctttactcatttcatgcaattaaagacgaaccatttcaacgcgaggttgattgtctcatgaggattaggcactgcaatatagtatggtttgttgggtactgtgctgaaacatctacaaatgtgataattttgcaatttatactacaaggctatgatgtactatttatttgtcgtacagccggatcttgtgtgcttcaatggcagatttgttaccaaataatcaaaggtatttgcctgggtttgcactatctgcatgagaggaagataattcatctagatctcaaaccagataacgtactgctcgatgacagtatggtgcctaaaattgcggattttggtttgtcaaggctcttgagtgaagaaaaaagccgcatggtcactgagagaatttttggaacaaggagatacatggcacccgaatacttagttaatggagatatcacagtcaagtcagatatatacagcttgggtttgataatcagagagatggtgatgggtcctaataatgaaggaacaacgacagaaaatgtatattcaaaaatctggaggcataggttggaacaggattcatcaaagatgaggcagacgccaatcgaaatgcgttaccggcaaataatagaagcgtgcattgagatatcagagacatgcatagcgggtaaaccagataagaggccaaccacaggggatatccttcgtcggcttgagaaagaggaagcagggaattggtctatcgtcccagttactccagttgtagattgggtataaataaatcatctcttactataaaattattttatagatcactaattcctaaaatttaacatgcaa

SEQ ID NO: 91954 - DNA, 302 bp, Oryza sativa
  unsure (1)..(302): unsure at all n locations
  Clone ID: PAT_MRT4530_9047C.1
agagttaactcttttttttatttattcacaagctacttgttacacaaacgatacatcgaatgcgatgtttcgaatactttttaagactaggcgtcatcgcttagaagcattttctgtggacgatcgaaggaccggattcgtcgtactcctctttcgagatccacatttgttggaatgtggagagcgacgctaagatcgagccaccgatccagaccgaatacttacgttcgggtggagcgatgatcttaatcttcatcgncgacggggctaaggccggttaactccttttgcatacggtcggc

SEQ ID NO: 91955 - DNA, 745 bp, Oryza sativa
  Clone ID: PAT_MRT4530_90480C.1
gtcctcctctttcgtttgccccctctcccgtggtctcccgtgcctcgtagcgccgccgccacgtgctccaccccgccgcgtcttcagccacgccgcgccgtcgcttgcgtcgtcgccgccgcttgccgccgccgccgttaggtgcgccgtggtgaggagaacctcggccgcccgtcccccttcgccgccgaccaccggagctccgccgtcgccgtcaagccgagccgccgccgccgtcctcttcgtcgccggccatcatcgttcgtcgtttgtcattgtggtgagtaccgttgggttcgcctcgtcgtcctctacgcgtaggtgtcctccaatcacccggccaaggtccctagagccagcgtgggcaacggctttatcctttgtatagcatggttcattatagtgcgccagactgagaagtggcgagaagtccacgggggtcgctggggagtccatgccttgtttataagggggtgattatgatccaggaacggtgcactgttttgagttgtgttgtgcaaagggtattgtcacgatttccccctttgcaatgccgtggtggtatttcggggcatggcaacatgtgtggaatcgtgtcttgtgggtacagtggtacacctctggccagagtaaaactattcgaatagccgtgcccgcggttatgggcgggaatgagctcgcactccagaacggcctcgtggacctgccggacggtggccttgaggagaagatgggcaacggctag

SEQ ID NO: 91956 - DNA, 375 bp, Oryza sativa
  Clone ID: PAT_MRT4530_90481C.1
atggccgtgatgtgggcgggcctctgcaccgggtccactgaaccagggtggtgcggggcccacgtgacagtgggatggtgtatgcagaccgggtgtagcaggggaggcggtgaggcgtcgaactccggcagggaggcgacggtgctgtgcgcgcctcggccgcggaggatccagatccacccctgcagcgctgacctcatcctcagccctcctcacttcctcctcacctccaacaccaccaacaaggaggtggccgcgcacaaggcagcagcgccggtgcttcgtgacagggcgagcgagccggagaggagcagcgctaggggcaatctcgctatttcaaaaaaattctcacctcttctgactcagaaattataa

SEQ ID NO: 91957 - DNA, 649 bp, Oryza sativa
  Clone ID: PAT_MRT4530_90482C.1
atggtcggctgcgactttggaggatatgaacacgtagaggacgacgagacgaacccaacggtactcaccctcgaaccaaacgacgaacgacgacggccggcgacgggtctagcggcggcttcggtcggcggtggcaccggagctgcggtggtcggcggcttcgggggtcaggcggccgggcttctccaccctcccgcgcacctaacggtggtgacggcgaccggcggcgacgacggaggcggcggcgcgacgcggatggagctcggccggcgacgatggcggggtggagcacgtggcggcggtgctacgaggcacgggagatcacgggagagggggcaaacgaaagaggaggacaagggggtcctatatatagccatggaaggccaggatcgagcccacaacgacgggaaaaactcgggaaagtttagatcttcgccggaaaaaggaaaggttgaaccgcgaaattggaaaggatttccatataaacttttggggatttcttggggacaaggaagaggagattgagaggattccattcccgcaactaatttggaaaaaagagcaacgaggtggccggattttggaaggggatcggcggcaacaggacacggcacggctggctcggctctggctggaggttgaagaagga

SEQ ID NO: 91958 - DNA, 288 bp, Oryza sativa
  unsure (1)..(288): unsure at all n locations
  Clone ID: PAT_MRT4530_90483C.1
cgcccgcaaggcccggnccggnagtcctcggcgcgncccacggcggcgcccacgcgaacgcaggaccgaagngggagtttaacggaaccacagaggaaacaacagacgagaggaagncacncggcgccgaaaaccaaacaagncgaggaagccccagaaaaccagcnggaacgaagcagnccanggnagcagcagggggagcaacangaacaccacngcanagnnaaaaaaaaaagcacgcaacnccaaacaaagaanagaagnngaccnngacgaacaagccagacc

SEQ ID NO: 91959 - DNA, 481 bp, Oryza sativa
  Clone ID: PAT_MRT4530_90484C.1
ttatatcttacagatttctataagaattaataaccctggccggagagagagttgatgagagtcgataataatgaaccaacactaagtcccactgcgcaaatcagcgtgtgtgtctattaatgttaatcctccttaatgcacttctactgctttgtggtaaggcaagtaagttgcggtcaacattgatgtatgtgaactttcgcatgtgaatcagtcagtctatatattaagaaaattcgaaccaccgcatagttgaaacatctcgagatctgaagaagcctagggaaactgcagcgacttcgaagtcaactcgcctcagagtatgattaaccatccagatgtgaacttcactcaacagtctatcgcggtctaacaactatatcaaacatccagtctctaacaattctagcatctactacaactcatcactctctctcaaaaaatattcagtaagtcagacgctcagtcaaacaaaggtcac

SEQ ID NO: 91960 - DNA, 442 bp, Oryza sativa
  Clone ID: PAT_MRT4530_90485C.1
gaagctccggctccactcccacaggcagctcaactggggtataagccaaacgtcttctccttctggatcctttttcttcaactaaggttgattgattattgcaaggtgagcatatgacatactcagcaagccacacagcaaatatgcaagtgcacaaggataccaaaggatggcataatattaggctcatttgcaaaagcagcgtttagcaaaatatttaagagaaataaaacagtagagtagtttatcagaaattttaatcaacactgaacagcacacccatgctgcacaagcccgaccatcctgaacaaccatacccggctgtacagatctaatctccaaaccaggaattatccattccaaaccaggagctaagcaaattattaccagttatagcatccataattatgatgagaggtgtgagactaatcacgaaaaacat

SEQ ID NO: 91961 - DNA, 373 bp, Oryza sativa
  Clone ID: PAT_MRT4530_90486C.1
gcggttaccatcaacctgcaaacgcgggaaagatgggcattatctgaacctggtcaagcacgtgcgagaagcatatgaagcatgtgaacttgtccgagaaggatgctcacgtcacaataagagctagtgcacatggcctggcgctagtctgagtgatgctcgtatcctgtacctgactaggctatggagttagaacatatccttgatgcattagggaaagatcggatatcgtccctagctcccttagacggaattgcttttaaagtggctagcgaccagctcttgcatacgcaaagagccaggatctgggagtgctctgacaccaattgcgcttggctacaatgccccgttttttaagaagatgcccttgatt

SEQ ID NO: 91962 - DNA, 1032 bp, Oryza sativa
  Clone ID: PAT_MRT4530_90487C.1
ctactgccgctttgaaactagtggctgagctgtaacacttgaagatgcaactcttgaagacacaactggtactgcattggctcctgtgacgacaatgttgttgacctgaccttgcggctgctgatgcttcggcttcggacactctcttgcaaagtggcctggcttgtaacagttgaaacatacctgctgctcccttctactactgttattctcccgagactgatcctgctgaactggcatcggctgatttatttgctcgatgttaacttcattgctttcattagtctctgatttgatctcaccagcgatattcaactgttgcgactgtccttgaccagcggaagaagattcaccaatttggagtggcttgatacgctgcctctggctactaccttgtgcctcctggaatacaatcattttccttttacggttatccatcctgttcttcttgtcttcaagtcgaattgctttgtcaaccagctgctgaaaatcaacatagtcatgggagattaacgtaactgacagttcatcctttaagccttccaagaacttctcctgcctttcctcgtcagtacgcacatcttgcttcttcaaagcaacaactcctacaggtatgtgtgtcttcttgaatccttcagtaaactcttcccaagtgattggttgtccttctgctctgttcatccggaaatgatcccaccattctgatgcaggtccttgcaactgatgtgaagcgaaaacaactttctcctgatccgtacactggagcagttccaacttcttctcaacagcgtgtagccaatcacctgcttctactgggttggtagtgctagaaaaggtaggtggccttacacgaagaaaatcagttaacttgttctgcggcggtggagcattgttgttcccttggttgagctggttctgcatctgctgtatcatcatgttcattaactgagtctgttgagccaggacttgagcaagagttgggttcccttcattgttattgtttccacttccactggcgcgagtgttcaccat

SEQ ID NO: 91963 - DNA, 369 bp, Oryza sativa
  Clone ID: PAT_MRT4530_90488C.1
cagaagacaattagacgccgttagtgttgtggacctgcccgcatgcctacctttctacccgagatttttggattaagagactgtaggtacaccggtggacagccaattgcgccctatattggattcatacatatccggcgggtgagtgacagatatgaaggttgttgtactggacagatccacaaaagctgtctatacaaggccagtaagttcactgcgggaaaaaaatgaatgtaacagccagtacacttgatgagaaggacgaaagcctaattgatcactctgaacaatatatggggtggaggaactgagggggccgtccttatgcagctaggaactggggtttctgcaccttaggatagcgaactg

SEQ ID NO: 91964 - DNA, 758 bp, Oryza sativa
  Clone ID: PAT_MRT4530_90489C.1
atggactccccagcgacccccgtgggcttatctccgccacttctcagtctggtgctccgcaatgaatcatgctatacaaaaggaaaagaaggattattgcgtcagcggctagggtttgcggtggaccgggtgcacggcagcggttcacgggaacgaacggccgagatcaaccctatccaaaacggacggccgagatcgatcggtccacgaccggctcacgggagagggcgacgatgacgtcagcgatgacgtcagcaccggcggcggctcggcggcgcggcggcgcaaacggagagcaccaggacgtagagcgcggcgcgacgaactcaccgatgaccaaagcaacggcggaggagcaacggacggcgccggcgacgaggaagaagcggcggcaaccttcgggtcgacggcggcgacggtgctccggcggtcttcggcggcggcgaaggggcggacgaggacggcgacgcgacggcgaccacgacggcgaccttcccgagcgacggcgacggctggaacggcggcggcgcacggctggagcggcggcggcgacggcggcgcaaaagctcacggggctagggcgctacacacgacggcgggcgaaggcgagggaggcgatgggtagaggagagctcggggatccttttaaaggggctagcgagcggcgacggaggcccacggctgccggcgacgagaaggaaaggttggggaaaaacgaatccgaatcaaactcgaatccgcctatttccaaaggaaat

SEQ ID NO: 91965 - DNA, 195 bp, Oryza sativa
  Clone ID: PAT_MRT4530_9048C.1
cggggaattatttgacttattaaacggggcatttcagtttactacatggaggatcttaacatattttcccaaaagggggctacttttacaaggttacaatctaaactttttagggcccaggattcacacaacctaaactttacaggtgggattaaacaggctttccccctccccaggaaggcctttttatagcat

SEQ ID NO: 91966 - DNA, 879 bp, Oryza sativa
  Clone ID: PAT_MRT4530_90490C.1
aattgaaaaaggtttttaaaagtcttcttttggctttgggccgaaagtcggcccaaaacctctcttctctctctccctcggcccaagtcggcccagtccgccgagctgccgctctcctctctctctctgtcgctgacaggtgggtcccaccgatcctttccttctccggtgaaattgatagaggggaaatgatcttctcgatctcctccaccttttctcttttggaatcaccggctaaaatcgtttggaaattcgtggattcgaggtcgattcggatcggtctctttcctccaaaccccgacctttccttctcgtcgccggcagccgtgggccttcgccgccgcctccttgcccccgtcgccaccctcgccttcgtctctcgccgtcggaagcgccctagcgccgtgagatcttgtgccgccgtcgtcgccgtcgctccagccgtgcgccgccgccgttccggtcgtcgtcgtcgctcggggaggtcgccatcgtggtcgccaagtcgtcgccgtcctcgtccgccgcttcgccgccgccgaagaccgccggagcaccgccgtcaccgtcgacctccgttgctcctccgccgcttcattggtcaccggtgagtttgccgcaatgcccgcatcgtcctggtgccctccgttcgcgtcgccgcgccgtcgttcgccggcgagcatgcgttgccgagccgccgccggtgctgacgtcatcgttgccgttcccggtggcccggtcgtggaccgatcgatctcggccgtccgttttggatggatcgatctcggccgtccgttctcgtgaaccgccgccgtgcacccggtccaccgcaaaccctagccgctgacgcaataatcctctttttcttttcaaaaataa

SEQ ID NO: 91967 - DNA, 582 bp, Oryza sativa
  Clone ID: PAT_MRT4530_90491C.1
atggactccccagcgacccccgtgggcttatctccgccacttctcagtctggtgctccgcaatgaatcatgttatacaaaaggaaaagaaggattattgcgtcagcggctagggtttgcggtggaccgggtgcacggcggcggttcacgcgaacggacggccgagatcaacccaaccaaaacggacggccgagatcgatcggtccacgaccggctcacgggagagggcgacgatgacgtcagcgacgacgtcacctccggcggcggcggctcggcggctcggacggctcggacggcgcacgctcgccggcgaacggcggctctatggcataaacggagggcaccaagacgtagagggcgacgcggcgaacttaccggtgaccaaaaccacggtggaagagcaacggacggcgccggcgacaaggaagaagcggcggcggagatcgggtcgacggcggcgacggtgctccggcggtcttcggcggcggcgaagcggcggacgaggacggcgacgaccttgcgaacccgatggaggcgacggcgaccgacgacggcggctgcaacggtggcgcgacgcggctga

SEQ ID NO: 91968 - DNA, 125 bp, Oryza sativa
  unsure (1)..(125): unsure at all n locations
  Clone ID: PAT_MRT4530_90492C.1
agcacaattcatcctcccttaagcattgaattttggttgcaaaagcctgggtcaccagggaaggtaccagcaacctatggctgggttcctccctttcncaacgggggggggggcctnncctttcc

SEQ ID NO: 91969 - DNA, 2173 bp, Oryza sativa
  Clone ID: PAT_MRT4530_90493C.1
tatgtattcagaaagcactaatcatgtaacttagtgatgatgattgatgagggagtatcagatgagagaggcaataaatgaaaaataatttcaaccgtccccttttttttttttttgaataaaacatgttttcaattaaatggtcaatacaattatcgtttcatactgaacacatgataatgaaaaatcaaatgacaaatttttttagaaaagtacattattgattactaatagcacatacaacacatcaacacattgccacaatctctactgtcatttcacttgtcaaaatatttaacattaagactgttcgttcaatgattgtggttgtggctgctcaccttgccaagcccatacaatatcctttagtgctggtctcatctcttgtttgaccttttgatactcaagtgtatcaccatttatcttcgtaaattccactaaatgaaaatctggtgtgatctgaaatatttcagcattgatggacattacacctttccttccaggttttgatccttccatctttaacaaaccaccatttttcttcaagaattttaatcgtaaattcttcgcaacatcctcaagctttttggtgattgtcgtagctgtgttagtggatgtaaattttgattcctctttgctgttttcatcttcaaacatagcagaaagatcaaatcctgatgaaagagaaataatatcaaaagcattcaagctagtaagattttctgcttcttgttttccttcatttatattgttgcttaaattaccaaatgttgaatccatgtcaacatgcacaactttatcaactttatctgttggtatggtcttgttaagtagatctgaattaagacctactctaaaccaaggatcttccataatttctgaaactgagatccgtgtcgcagggtttggatcaagaatacgtcgcaaaagctttcggatatcagaagaaaaccaacttggccatttgaattccgctttgcatatcttcttatacatgtttatcacatttttatcttgaaatgggagataaccagccaatagtacataaagaatcactccacaagcccatacgtcagcctttgcaccatcatatccttttctgttaatcacttctggagcaacatatgcaggagttccacaagttgtgtggagcaacccatcttgtctcttacattctgcaagtgcactcaaaccaaagtctgagattttcaaatttcgattttcatcaagaagaaggttttctggctttagatcacgatgataaacccctctgctatgacaaaagtcaatagcactaattaactgctgaaagtacttccgtgcaacttcttcctttagtcttccacgtcgaaccttgttgaataactctccccctttcacatactctaggataaaatatatcttagttttggtagccatcacctcatacaattgaacaatgcacggatgtcttactaggttcatcactgaaatctctcttcttatttgatccataagctcacatttcaatatcttttctttgtcaatcaccttgattgcaacactttgtgaattcttaatattacggccatggtaaactttagcgaaacttccttgcccaagtaattttcctatctcatatctcttcatcaaaatattccccttttgttctaccatcttatcaaatgccttatgtattcagaaagcactaatcatgtaacttagtgatgatgattgatgagggagtatcagatgagagaggcaataaatgaaaaataatttcaaccgtccccaacaagatggtaatctaacatgatggttgaactgccacatctagccccatcgtgcaaatgcacaaggagcacttgctgtgcataaacccgtacttcactatcatcaagagcacacaaagcataaatattttgagctaccttgccaattcccacacaaggtagctctctatcatagaagcacatcttccggcattccttttgttttgtgcttctagcaaaaagcctaatactgatcccggctctgtccgggaaggataaagagatcggaattaaccctgccgatcgagcagtcccccctaaaatcaagccctccaactcaaagaagatgaaaaagaaaaatatccagagaagaatgggggcagccgaggagtaggagtgagacggaggaaacgaatcaggag

SEQ ID NO: 91970 - DNA, 495 bp, Oryza sativa
  Clone ID: PAT_MRT4530_90494C.1
ctagctaggctggtgcactgcgtgcagtggcagcgcagcgcagaagggggggagagaaaagcgaagagcctccccttttccccgtcgcgctctcctctgccaggctgcgccctgcagcgcttttgtgcgtcggttccactcttgggggaattctactgaagctctgctctgctctgatgccccgttgcgactgcagtgtgtgcctttcagtgcgccactcccttggcgcttctgctcagggctgtcaccctgcctctggattgaacctatgtggcggtgatgcgtgcatgatgtggcttcccacgggtttcgagcgatggagctgaggctgcgctgtcggcgtatagttcccgttgcgttgctccggtcgtcgtgcattgttgagtcgggcgacgacattgctgctgcccgttcgcgccgtagcgcgcggctgcgcgtaggtggacgattagctcggagtttatcggtggttggctgcaaatgagactttctcca

SEQ ID NO: 91971 - DNA, 151 bp, Oryza sativa
  Clone ID: PAT_MRT4530_90495C.1
caccaaactatccaaaccgctggagcatatggataggtagaacgatggccgcgtcacggctacaccaatgtacctgatgaacgaggaccgtgccttgtcggacagagctcactcctggtgtctcctattacgctgggcgagtcactcatgc

SEQ ID NO: 91972 - DNA, 242 bp, Oryza sativa
  Clone ID: PAT_MRT4530_90496C.1
atggtaaccgtattacgtacccttctcttgggggacgaaactacaactctactacccctgttaaatttacaaaactagcaaaaccacttaaagtcggggatacagaggtttttgtagaagatatgaggacatatgatattggtgcagttgacaccacagctaacaagattacgttaaacaagccatgggcagttgcaaacccaaatagttcagatgggattttcccaatacgtataaactaa

SEQ ID NO: 91973 - DNA, 3469 bp, Oryza sativa
  Clone ID: PAT_MRT4530_90497C.1
atgagggccaccggggagcacaccgcggccgtccccatccccgcgccgccgcagctgccggctccgggggccgtgacggaggacgccgctgagaaggagaggaggcggcggcgacgcgcgccgcggaggaccaagcaggccgcggcgcagcaggaggagccggcggcggcggcggggccgaggtcgtgcagatcgatgccgcccatgcacgtgagcgccccgttggatgccgaggcggtggaggaggaggaggccgcggggacgagccggtcatgccccttgctgcccacgccgagccccgtggaggcgctgcccgtggcgggaatgggacgaggagctgctgggaggcggttcttccagtcccactggcccgaacaggccgtggaggaggcgatcaaggcgtactgtacgattgagggtataccagtggatgttctcattactggggtggcgcaaaaccgagcgattgaaggtgatcttgttgctatgacacttgaacctgttgcttactggactagaatgaaaggaccaaacattacgtgcaaccctgctataggagagggttctgctgttcgtgaagttggtgaaacaaatgggaatcatgatgggaagaaagaaaattgtggaaaggacttaggtgaaggaaaatctgaggcttctagagcattgcataggatctgttctatggtatactctaacccaagcagacgtcccactggaaaggtattagctattattaagaagtctcctcgccgtgacactgttgtaggttttcttgctcctttcgcagtgtgtcctgatccagagcagcagaaaaatcagatgagtatgctttcaaagaggatgaaccatagagcatcatcctatttttcaggactgattcttctcttgccaactgattccaaattccctcatatggttgttaatgttagtactttgccagatagtgtcagaaaccatttggaagaaggtgatgcagctaaagaattagtcgctgcacgaatttctgattggaatgaggaaagtctctatccctgtgctcatgtcatacagttgttggggaagggtggacaagtcaaaacacacatggatgctatactttttgaaaatgcaatatctgatgctgaattctctcctgagtccatggaatgccttcctgatatttgctggaaaattcctcaggaagaacttgaagtaagaaaagatttgagaaatgtcttgacctttacaatagacccccctactgcaactgatcttgatgatgccatatctattgagatgctttcagggggaattgtgcgtattggggtgcatattgcagatgtttcttactttgttcatcctgagactgcactggatgctgaagctcagatccgatctactagtgtttacaccttacgacgcaaaatatcaatgttgcctttgagactttcagaagatctggtctcccttaatcctggggtagacaggcttaccttttcgatcatttgggacatagatcctcatgggaacataattaatcgttggattggacgtactgttatttcttcatgctgcaagctgtcatatgatcttgtgcaggatttgatttgtagcgatggaactaagtttaaatctgcttcttctcttcaagtacatggcatatttgaacaagatgatgttatcaagtcccttaggtgcttatatgagatctcaaagaatctgaaggagattagatttaagggtggagctttgtcccttgaaactgcaaagcttatgatccaatttgatgaaggtggagctccatgcgatagctttcgctatgagaggaatgatgcttgttttattgttgaggagttaatgttgctagcaaatatgtcagctgcagaagttatatccaatgcattcccaaattgtgcgttacttcgtaggcaccctgaaccgaatttacggaagtccagagagtttgaggcattttgtgctaggaatggttttgaattggatggttcatcatctggtcaacttcacctttcactttctagaatgaaggaaaagttaaaggatgatcctgttttgtttgatattctcatgttttatgcttcaaagcaaatgcagtcagcagaatacttttgcacagcagacctgataagcaagagggatgattgggctcactatgcgttatctgtccctctatatacacatttcacatcaccacttcgaagatatcctgatataattgttcacagaacactgaatgcagtaattgaggctgaaaagatgtatctgaaacacaggagatctctcacaggccaaaacggattcaacaccgcatcttgtgagatgatgcacggatgctttacaggtctccaatttagtaaggatgctgctgaatccaaagaagggagtgaagcattatctgctgctgctaagaagtttaaagtcccttcccctgataatcttggagaggttgctgaacactgcaacgaaagaaagtgggccagtcgtcgtgcagaagatgctggtcagaagctctacatgtgggccttgataaagaggaaagaggtcctggttgccaatgctagagttctggggcttggaccaaagttcatgtcagtttatgtgcccaaactagcgatggaacggaggatacattatgacgaagttgagggcctatctattgagtggttggaggccactggaacattggtgcttgattcatgcaggaacaggcctcctcaaaggaggggaaatcaggtgaagtatagagcatttgaggaagtcgccatgatggttaacccatctgaatcaatattctccgaagaagatgaggaatctggagcaacagaagctggttgtgacactgccaagtcagttttgctgagtgatgaagcagtgaaagcgcaagttgccccggccgtcctgcctctggtgatacaatacttgagcgaaattcctgtggttcttcatgcgattggtggtgaggactctgcgttggacattggagtaagactatacatgtcatcatatttcaagtgataggaaataagcattaagacagaaatctattttctttggtgaacaacagtaataaaaaaaatgacagaagagtagcatttaaaagttcctttcagggttcagcaagcaaatatcaactagtgttgcagatgctccattcctgtgtagcttctttctccgttatcatatttacctccatttgacatccaaggttctcgcggtcaagtagccttccttttttacttcaggccacttgaccaagtcccagattcagctttgacagaagactctgtatcggtgatgtattcattagttgctccttagatgcttttgttcttgtgttgagccacctgcagttttttatactggtgaactcttacacatgtttgtcatcttgctttgttactttggaaaagaataaaaatactgaagctttattgaatatttcaataacatattcaagctctttaaattc

SEQ ID NO: 91974 - DNA, 275 bp, Oryza sativa
  Clone ID: PAT_MRT4530_90498C.1
tacatcaggaaagaaaagaataaagaattaaaaaaaggaaaacaaatcactgatcgaattttcgatgatttcgatcggaatttcgccaaaaccgaccggttttcgataacttgtcggcaaactcagagaatttgtattcaaattttggtttataaaatttgttcggaatttaccgattttccaccaaatttcgcgaaattccgaattccaccagtgcccgaaacggaagggcctgtcggaatcacttggttattgtgccctacattgtcataatt

SEQ ID NO: 91975 - DNA, 678 bp, Oryza sativa
  unsure (1)..(678): unsure at all n locations
  Clone ID: PAT_MRT4530_90499C.1
atgagtaaaacgcttataggngtcggtagaagttatgctatgattgccccatatgacgtagatggtaaccgtattacgtacccttctcttgggggacgaaactacaactctactacccctgttaaatttacaaaactagcaaaaccacttaaagtcggggatacagaggtttttgtagaagatgttagtctatggaacggacaggcaccgcaagactaccaacgtagtattatcatgtggggttataaaaactcgttcggctatacttatcccgatggaacgtatagtcagctaatgcagatgaggacatatgatattggtgcagttgacaccacagctaacaagattacgttaaacaagccatgggcagttgcaaacccaaatagttcagatgggattttcccagtagggcatacacttagcccaacttctgacggctccacatatttgtatttgaatggtcacgtaaatatacaagtacctactacgtacaccaagtacagccatttgattagtggctcttctgagtttgctaatacaacgattatcccagtagaaacaggttttattcaacttggattcttgttgaaccgtgatacaacaggtgaaaaatcttggctaaatggtttacgtctacgtgactatacagatacgtataaactaaacgatgacgtttga

SEQ ID NO: 91976 - DNA, 364 bp, Oryza sativa
  Clone ID: PAT_MRT4530_9049C.1
gatattgattggaaccatattctacggatttgatgaggacatcacttcgtcggatacacacataattcacacgttctaatgataattccaagtccaagtccagttcagccttaagagacatcactgacttcaaacggacctagcgtcttcatgccaactctgatttgggtgatcttggacttcatggaaagattatctcgccacctttcaaatacatttggtctcatatccaaattcattccgagtcaacaggaatcatcaaaacaagacagtgttgttcctgaaaccgaatttgggccttgggctttgtaatagactaggcctatctcggaaatgtctccctccacctccacgaattaacact

SEQ ID NO: 91977 - DNA, 383 bp, Oryza sativa
  Clone ID: PAT_MRT4530_904C.1
ataaatgccaattttactttatgttcatgttatactgattatattgctagcttatctgggagatgcataggtacgggtataatgtttgcttatgcaattattctatgtcatgacgatttagagtagtatctggtagtttaggcgtggtgtctagattattagatatcattatttggggttatatgttgcggatgagaggtaggccgctgttggtgacagctcaacacggtattcctctacgcgtgtatatactcctaagttactttcctggagagggtactcctccgtatttagccctgtttgtatggtcatgacgggctgtcgtgaggaactcgacagtaagggatggcttctcgaagtactaggagggcatcggaaaaagg

SEQ ID NO: 91978 - DNA, 1035 bp, Oryza sativa
  unsure (1)..(1035): unsure at all n locations
  Clone ID: PAT_MRT4530_90500C.1
atggaggagatggccatggccattgccgtcggcctcgggcgggggcggcggggaggcggctcggcgaggagagcgaaggcggtagttcggcgaggaggaggacgcgtggcggggacgagcggtggcggcagggaggcagctcggcgaggaggagcggcggcggcggttcggcaaggaggacgcgtactggggaggagcggcggagaggaggatcgcctcctcctccacggccggcgaacgaaggggcggcgacaccggtcggggaagggcaggagcggcgccggcgtcgggttggccggcgtcggttggggatgggcggggacggcatcgggtggcaccggaggggaggtanaggcgggcgacagtggagtcggcggagtcggccttgacggcgggcggcggggacaccggtacctcgncctccatctcctcctcctccccttcgtactcctcttcctcctcccccacctcctcgtcggcggatttgggccagcgcgggacgagaggggcggcggcggctcgttgaggaggagtggcagtggcggcgtctcggcgaggaggagcggcggtgacgacgaattgtggcttttgggtcctttggttggcttttggcttttgcaaaagcaaaagcaggttgaaaagcctaaccaaacacatccttctcatagagggttgaaaagcccaaccaagaaaaccgccttcgtcctcctgctctcccttctcttcctcgtccacatcgccatctcccacgccctcttctcccccatcgactccgatgactccaacgactccggcaccctcgcccagcgctgcctcgtcctccgtctcgccaacgactggctcgccctcctcttcaagaacgccggtcgatggcggctggtggagcggatcgacgagcgggtagctccgtgggagagaggcgagggggcgaggattggagggggatttggggggagcggcgaggagacgggagcatgcagcgggtctcctcgcaggagcgaggcccgactctctgcgaaaagctggtgctcctag

SEQ ID NO: 91979 - DNA, 463 bp, Oryza sativa
  Clone ID: PAT_MRT4530_90501C.1
gcggtggcggcggcgggcttggtcaggttccgccacgtggcgccggcgttcgccacggccgactacgcggaggccgccgcgccgacgctggtgaccgcggcgggcggcggcggcggcggcgaggtccccgcggtggcagcgtccggggcgcagagggcgtcgtcctgggaggaggacgactgggagttcgcggactggagggacgaggcggcggcggagcccgaggagacggctgacgggaagccgaggctggagttcgcgccgacggcgcgggaggaggccgaggaggccaccaccgagctcaaggacgccatagacagggtatatttttctgaggctcccatagaaattgtgaaagaacaggataaagatcttagcaagctgggagccgatgcaaaattaccgctagccaggacatgtgatgcaagctttacccttgtgaaacaagcccagaagcacaggg

SEQ ID NO: 91980 - DNA, 484 bp, Oryza sativa
  Clone ID: PAT_MRT4530_90502C.1
tcgtttatgcgtcacaaaattataagcagatctacggtggtgcgagggagctatggaactagataatagtacacactgtgcataaacttcggtataagcgtagaacgcataggccatacagcgcaggaatagatgttctgcgaccaatgttgataggagatagcatctaagggagaaacagccgagtctgcaacaagctcgcactggaggagaagaaatctaaatgtcacgacattaacaatgagcaggccatatcgcaccagatacagctccaggagtggggaaataactagtttgatcggaatctggtgcactctgacgctatgatggctattaacgtgccatctagatatgggatctaccataggtactatggggcacacaggaccattaccacccttgaacgcgtcttgtagtgagaagtaacaggatggtgggtcataaggtaacattaagatcagatattatgatatgtgacatggga

SEQ ID NO: 91981 - DNA, 474 bp, Oryza sativa
  Clone ID: PAT_MRT4530_90503C.1
tggtgggggtgcgactgctcctcattctctcccgctcgcgcgctcaagccgctggccaccgccacgtccgccgcggcggccgcgctcaagaccctgcgtgtgctagccgccgcctcgtccccgctcgtcgtagtcatcgcgacgtccaaggcgacctccaagtcctacaaggcggcatgcacactcagtctcgccacatgcctcccttccctcccttccgacaagtgcctgaaggccgcctttgccgccgccacgtcgcttctctgcctcacggccggcgcgccgcccccctccccccgtcgcttcccccaccgatgtcgcggccctcgtattcctcaagtctgggtacaagctgtccaagaacacgacggcgacgacgaagacataggtggatacagccgtggcgacgacgacagggaggatgcggcggcgacgacacgggagaagggaggcgacggcagctacgacgcttga

SEQ ID NO: 91982 - DNA, 936 bp, Oryza sativa
  Clone ID: PAT_MRT4530_90504C.1
atggagtccaacgccgccgacgagctactgctcgagttggactccctacgcatctaccggagcggcaagatggaccgcctccaccatcccgtgcttgcgcctgccggcgtcgacgcggccaccggcgtcacgtccaaggacgtggtcgtcgacgctgacaccggcctgtccgtgcgcgtcttcctccccgcccgcccagatccgtccaagaagctacccgtcctcgtcttcttccacggcggtgccttcgtgatcgagtcggccttctccacgacgtaccatggctacgccgcgtccctcgccgccgcggccggcgtcgtcgccgtctccgtggagtaccgcctcgcgccggagcaccccgtccccgccgcctacgacgacgcctgggccgcgctccagtgggccgcgtcggggaaagacgagtggctcgccgagcacgcggacaacggccgcctcttcctcgccggagacagcgcaggcggcaacatggttcacaacgtcatgatcagggcggcgtcctcccatccagcgccgaggatcgagggcgccatactccttcacccttggttcggcgggaacgcggtcatcgaaggcgagtccgaggcgacggccagggacatggccaagatctgggagttcgcgtgcccgggcgcggtgggcggcgccgacgacccgaggatgaaccccacggcggggggcgcggcggggctggagaacctccggtgcgagagggtgctcgtctgcaccggcgagaaggactgggccggggcgcggggatgcgcgtaccacgcggcggtggccgcgagcgcgtggcgagggagcgccgcgtggctggagtcggaaggggaggggcacgtgttcttcctggagaagccggagtgcgccaaggccaaggagctcatggaccgcgtcgtggcgttcatctccgcctcctga

SEQ ID NO: 91983 - DNA, 459 bp, Oryza sativa
  Clone ID: PAT_MRT4530_90505C.1
atggaggcggccgtcggcgtggcgagctggctcctcggtaaggtgttgacgcaattgtccagtgacttggtggcggcgtacgttgccagcaccgagctaggccttaacgtggaggagatcaaaagggacctcaagtacacacaagggctattgcacatggcccaggggaggaaggacatcagggacaacattggcttacagggccttctgcaggatctaagcaagaaagccgacgaggccgaggatgcattggacgagatccactacttcatcatccaggatcagattgatggcacccatgaggtcataccggaggcagatggtggcctccgaggtcatgccctccacggccgccatgctcttcgtcatactgccgttggccctggaggaattggaaaaacaactttcgcccaacacctctacaatgacaaaagaacagatgcctacttccctatcaag

SEQ ID NO: 91984 - DNA, 451 bp, Oryza sativa
  Clone ID: PAT_MRT4530_90506C.1
gacccttgaattcttaaccgtttcctgaaggctaaccactataccaaaaaggaagaaaaaaaaaaacagggaaaaaaaagggaaaaaactgcttaaagaaaaaaatggaaaaccagacaaaacaaaaaaaaaaaaagaagccgaaagaaaaaagaaagaagccgggggggaaaaaaaagggaaaaaacaaaaatgaatggcgtagagccaacaaaacaaaaaagcaggcgggaaacaaggggggcaacaaggaaaaaaaaaagggccaacgcgcgggaagaggcaggttgcacaccggcccccagggtgaaaatacaaaaaaccggggagacggccaataaaaaaaagcccacaaccgccgggggagaggaaagtagcaaaaagcgccccagggagaattcccccaaaaggaaaaaaacggggaagaagagggacaacgaaaccatgtaac

SEQ ID NO: 91985 - DNA, 3813 bp, Oryza sativa
  Clone ID: PAT_MRT4530_90507C.1
tcagatgtagaatacttgtaaatcttggtttgattcttctaatctcttgagttgatccttcaggtcgacgctgcaacgcattgctagtagttttttcagtgaagctgggatgccctcctcgggcaacgatctgatttcaggacatccgacgatgcctaatgtgcagatagaagaaaggagatgcaacccttcgggaagggactgcagacggtggcactcatagaattctagatttcggagggaggtgaggagctgaagtgcctgctcctgctcttttgtgaaatttttcatccacaaatcataagtgaacctcaacctgtagagggtggaagcgaggaggctgcaaatgggggcaacaaacaccgctgagatgctgtccacctcaagcttcttaagctgttggaatgaaccaacaggtattgccttcgtcgttgacaccgctgcgaacaaatgtgctgctacggagcagcgatgattattatcgtctatatctggcttattataaatcaccaattcactgaggctgcctgtcatgacaggatcgaacccaaccactgttaagttatcacagtctactagtcgcagacgagtgagagatgtgaggcttgagagcacagccatcgactgcacgcttgactcgctgtaaatagtgagttccttaaggggagccaggaagggcttgctagtgtgatgagttcctgcctctaccatgaaccacgaagcgaaaatcttgccgcaacgccaaaattcgagttcttggagtgaggagaaatcctggaaactccctccaacctccataggtagaaccaggttctcgtagccaaagatcttgacatagcgcaacagtctgggggacgggaaacgcagttctgcttcctcaacctcttgagcttcaccggacctgttcaactcgaactttgtaagagctgggaaacagtttaatagctttgccaaggatattccggcaagatgacacttatagagattgagctgctcaactgaatggaagataacaccttcgtctacttcactgcacaacaagcttttgcatcctatgatggtaaggcttgatagggagttcagcttctggagatcggtccatgaaatgtgtgacatcttttcaattttcatgttttctactttctgtaggttatggaaggccaaactaccaccataaccatttacactcagtatcttttcttccaaatgcaacacttcttgataatctccttccacaataatatgcgttagagtggaagtatgaggcatggggggcagtgataacttggggcaatttcggatattaagagaacataggttgggaaaacaagtgatatttatatcttgtgcatgagagatacagcgctcagaggatggtggtagtagcatagagagattgggacactcttcacactcaatgcttgcaagctttgaaaacaaatggcaatgagctcccccaacccactccacaagttctggcatggcaacaaatctaactttcttcaggtgtaagaaactcctctgtgtaacaccaccaaaatctggtccgaactgacgaatgccagcaatattgatcaaagtaagttcctctagatatatgaattgcccgaaaggtggaagagtgccccaagagatgccctctagatggagagatctcaatcctttcacacaaatatcatcacataaccaactaggaccagtggaaccaccatgatttcttattccaaatgctctaagattagaaggtggctgaagaccttcaataatctcagatccactattctgctgctctgcaccccaaactagttctagtgtctttagattccttttcaacatcaattcagcaccatttgcttcttccgttgttgctatattttcaagattatttatttgtagtgctcctccaagctctttcaaataccccaattctctaagttcaaacccagtgcgctctttcttaacatggaattcttgcagcctccgtaaatacttcatctttccaatcccacgaatattggaacaaagttcttttttggcaaggaaataatgtaaattggctagacgattaatgtcgtcaggcaaaatataattaccatggcgttctgctagagcagcagcgcttcttcggaatacattgtgcgtggcggcgaaccgattgtcgacggacgagcacgcgtggaggcagagcgattccttcatgaggaaaccattacctattagctcatccaaatacttcaatcctattgcttcagctctatcgttttgatatccagaatctataatgcctattgcttcccaaaaacaagtaatttctaaattattaaaccggtggtcctcagggtaaagggcgcaatacgaaaaacacttttttagatagtaaggaaggtagtcgtagctaatttttagtgctggcataatgtcaacgttactttgcagatttttccactcatccatttccagaacttctgtccaacattcatgggaaaggttgttcttcaataaacgatcaacagtttttgctgctagtggggaacctctcaatttctttgaaatttctttcgcaataccaatcaagtcgcgtttgtaacactcaggtttgtcttgaccaaatatacactcttcaaagaatgtgaagaattcactatcctcgagaccctgcagttgtattgtctcggttgttttcaacatttgtgctatagatggaaatcgagttgtgacaagaataacgctgcctttggcttccccttttgtgaatggagctactagatttttccactctgcctcactaccgcatttccacatatcatccaagacaagtaaaaacatttgtgatttcaatctttctgcaatagctttttggagctgatccaaattggaagagttatgcaccgcttcgcttcccgcgcttttatcgtgaggtatgcactttaggatctcctgagtgagcctaagcacatcgaaattagtagacacacaaacccagaccttgatagggaagtaggcatctgttcttttgtcattgtagaggtgttgggcgaaagttgtttttccaattcctccagggccaactatgggcaaaaccgatagtgttccactcggaatattgcagttagtcaagtcatgaagagtttgtctaaagattatttccctcccaaacaatttatcctgcgtaatcgttgagctagtgggaggccgctccagggatgtatcccattctcctgcagtttggttaatttggagcaatctagatatacacgtacacaagtcatgtatgccctttaccactgacttgattttattggacatgtctactcgattgaatggcaagttgccaacctggtcaatgacgtcaccatgggagttggctgtatcttgcgagtcgtcggcatcatgtcgtgctcgtgcagaagaacaaaaaaagcatgaaaaccagttaccggcagtatgacgaagagcatggcggccgtggagggcatgacctcggaggccaccatctgcctccggtatgacctcatgggtgccatcaatctgatcctggatgatgaagtagtggatctcgtccaatgcatcctcggcctcgtcggctttcttgcttagatcctgcagaaggccctgtaagccaatgttgtccctgatgtccttcctcccctgggccatgtgcaatagcccttgtgtgtacttgaggtcccttttgatctcctccacgttaaggcctagctcggtgctggcaacgtacgccgccaccaagtcactggacaattgcgtcaacaccttaccgaggagccagctcgccacgccgacggccgcctccat

SEQ ID NO: 91986 - DNA, 219 bp, Oryza sativa
  Clone ID: PAT_MRT4530_90508C.1
ccgactcgggaaaaggatcaaaccaccccgcttcggaaggattcaaccatggctgccctgtcagacacgcgaccggataagctaggcaagacctaaccgccactgccgagttggttcccagccctagtggctactgggattcgagtcggcgggaaattggtcgcgctatctgtcgcgccatcggttcttgtatcggacggaccgggagcggtggggaag

SEQ ID NO: 91987 - DNA, 424 bp, Oryza sativa
  Clone ID: PAT_MRT4530_90509C.1
aaaaccagaagtacaaaatattaactaaatcaaaggatatacgtgtacttaaacttacaattacaaaaatatacacacaagaaactaattaatcaatgctaccacaatggcagaagagcatgcaggagcacgaggactaagcggattccggcgacggaggcggtcacggacgacgtcgacagcagctgcgcggcgggggctgcagggccttatgaggcggccgcgactacttcaatgcggatcttcatgcctttgccgcaatagccagtgaggccacagaggaagtagcgaatgccaacggccccgagggcgacaaggtcgatgtcggagcggaaggcaaagaaattgttgtcgttgcaacaggcgccgtaccctttcttggacacctgcaccacgtcaagcaacttacgcgagtacgtgaacg

SEQ ID NO: 91988 - DNA, 1572 bp, Oryza sativa
  Clone ID: PAT_MRT4530_9050C.1
tcactcactcagctgtttcttggcctccgtctcctcgtcctgtccgtcctcgccgccgccttccttggggctctccaatgccctcttctcctcctcctcctcctcctcctcgttgtcgccgccgccggtcgcgttcccggccgccgccgacggcgggcgcttctcggcgcgcgccttgagcacctcgaggagctgttccatggcttgctcgcgcccgttcctgcggttcttgatcagcacctcgctcacgtccgccggcgtgatctccgccgcgtcgatccacgtctccagcccggccatggtggcggcggctgcagcggaggaggaggaggcggaggagtcgtcgtcgaggtagttccggaggaggatcttgagcgccgggaacgtgcagtagctcatgaagatgtgcatgtccatgcggccggagcggagcagcgccgggtcgagcttctcgatgtggttggtggtgaagacgaagatgcgctccgagccgcagcacgaccagaggccgtcggtgaagttgagcaggccggagagcgtgatcgaccgcgccgccgcgccggccggcgccgccgccgcgtcctggtcgatcgcgccgccgtcgatgctcgcccgcggcttcggcggctgcgccgcggccgcggcggtggcgcggttggtgaggtcgacggagcagtcgatgtcctcgatcacgatgatggacttggaggtcgtcttcatcagcagcttccggagctcggcgttgctgccgacctcggtgagctcgaggtcgtacacgtcgtagccgaggtggttcgccatggcggcgatcatgctcgacttgcccgtcccgggcgggccgtacaggaggtagccgcgcttccacgcgcggcccgtgcgctcgtagaacgcgctcccgtcggcgaagtcgcggaggtcggccatgatggcggccttgcgctccgggtccatggcgagcgtgtcgaacgtgctggggtgcttgaacgggacggggtcccacggcaggccgcgcgcgtccatggcgccgccgcgcgcgttggtgtagagcagccggtcctggctgcggcgccggatgtccgcggcggcggcgaggatgtggtcgaggtacgccgggagcagaacgccccggtcgccgcggcggatccggagcgtgaaccggcgcttctcctcggggagcgggcgccacgagaagccctgcgcctggcgcggcgcgacgacgtgctcccacgtgacggcggcgccgcggaaggcgtcgagcacccggtcgctggcggcgaggccgaaggtgaaggacgacgcgttgtgggggcgcgacagggtgagcctggcccccgcggcgggcgccgccgagctgctgaggtagagctgcacggcgtcgtagatctcgttggtgcccatcccctccgtctccgtcacgtcgaagtagcagtagggcgagaaggcgcgcgtcgcccgccccagcagccgcgccaccgccgcccggagctccgccgggaacaccgcgtgcaccaccccctgcaagaacgccaccgcgcccatcagcgacgccagcgacgtccagtactccctcat

SEQ ID NO: 91989 - DNA, 1012 bp, Oryza sativa
  Clone ID: PAT_MRT4530_90510C.1
ggaaaagaaggattattgcgtcagcggctagggtttgcggtggaccgggtgcacggcagcggttcacggaaacgaacggccgagatcaactctatccaaaacggacggccgagatcgatcggtccacgaccggctcacgggagagggcgacgatgacgtcagcgatgacgtcaccaccggcggcggcggctcggcggctcgggctcgcatgctcgccggcgaacgacggcacggcgacgcgaacggagagcaccaggacgtagaggacgacgcggcgaactcaccggtgaccaaaggaacggcggaaaagcaacggacgacgccggcgacgaggatgaagcggcggcggagatcgggtcgacggcggcgacggtgctccggcggtcttcggcggcggtgaagcggtggacgaggacggcgacgacttggcgaccacgatgacgacctccccgagcgacggcgacggctggagcgacggcggcgcacggctggagcggcggcgacgacggcggcacgagacggcacggcgctagggctctacggacgacgagaggcgaaggcgagggtggcgacgggtagaggagagctcgggggtccttttaaaggggctcggaggcggcggcaaaggcccacggcgaccggcggcgagaaggaaaggttgggctcgaagagaggaaagccgatccgattcgaactcgaatcaaactcattccaaaccgatttagccgaagtttccaaaggagaaaaggtagaggagatcccggagattgtttcccctcaattgatttggccggaaacggaaaggaacggccggattggaaagcggcggcggcggcgcgaaactagggttacggccggaggaggacgacgatcctgacaggtgggacccacctgtcagcgacagcgcgctcgcgcgggcgggcggctgcggctgcggactgggccggctgggccgaggagagagagaagggattttgggccgactttcagcccaaagccaaaagaagacttt

SEQ ID NO: 91990 - DNA, 768 bp, Oryza sativa
  Clone ID: PAT_MRT4530_90511C.1
atggactccccagcgacccccgtgggcttatctcggccacttctcagtctggtgctccgcaatgaatcatgctatacaaaaggaaaagaaggattattgcgtcagcggctagggtttgcggtggaccgggtgcacggcggcggttcacgcgaacggacagccgggatcaaccctatccaaaacggacggctgagatcgaacggtccacgaccggctcacgggagacggggacgatgacgtcagcgatgacgtcaccaccggcggtggcacggcggctctacggcacaaacggagggcaccaagacgtagatcacggcgcggcgaactcaccgatgaccaaaacgtcggcggaagaccaacggacggcggcggcgacgaggaagaagcggcggcaaccttcgggtcgacggcggcaacggcgctccggcggtcttcggcggtggcgaagcggtagacggggacggcgacgaccttgcgaacccgatggtggcgacggcgaccgacgacggcggctgcaacggcggcgcgacgcggctgaaccaacggcaacgacggcggcgactagggctacgcggaggcggcgctagacgcgactgtaggctaaggcaaaggtggcggcggatagaggagagctcgggggtccttttaaaggggctaggaggcggcggcgaaggcccacggcgaccggcgacgagaaggaaaggtcgggctcggagagagaaaagccgatccgattcgacttcgaatccacggatttccaaaccgaaa

SEQ ID NO: 91991 - DNA, 159 bp, Oryza sativa
  Clone ID: PAT_MRT4530_90512C.1
atggagatgagcgaaggatcagatttgctgacgtgctactgcgtggagaggggtgacagggaggtgaccaccaagtggttcccgcgatcaatggtcacacgggcgagccccgcgcacgagcagaactcgacggcaatccacgacaatgcacggcagtga

SEQ ID NO: 91992 - DNA, 1916 bp, Oryza sativa
  Clone ID: PAT_MRT4530_90513C.1
ggcacccttatcctgagtggtttgagagagttccactgccgaaccgatacaaagtgctagatttttcaaagttctcagggcaaaacaacatttcgacgtacgagcatgtcagccgattcttggctcaatgtggagaagcatcggctgtcgatgctttaagagttcggttgtttcctttgtctttgtccagatcagcattcacatggttttcttcattgccctgcaattctgttcaaggttgggtcgacttggagaaacaattccatagttacttctacagcgggacccatcagatgaagctctctaatttcacggcggttaggcagaggcatgatgaaactatgcaagattacatacagaggttcagagatatgaggaacaagtgttacagcttgtctttgacagattcccagttaaccgatctcgcattccagggtttgatagctccgatcaaggagaaattttcatcgcaggagtttgaaagtttgaccatgcatgagcaaaggtttgtggaggctaagaaaagtttcaagaagatcaatcacgtgtatccttatatgtatattctcaagaagaagccaaaagaaagagaggtgaaacagagtagagagaatcgggtgcttccagtgattagttgtcagaaagcattgagttctagaaaggaagagaggtatgacattgatattactaaagctgataaaatttttgacttgctacttcaggagaagcagatacaacttcttgctagccacataataccatcggctgaagagctagggaaaaggaagtattgcaagtggcataattctgattcctactccaccaatgattgtaaagtctttaggcagcagatccaaacggctattgaaggaggaaagatcaagtttgatgattctaaaaagccgatgaaggtggagagacttccttttctcgtcaacatggtgcacacagctggcagagcagctgatggaggaaagactcgaagttctcagttgaattcagccaagatcgtcaataaatatcagaaaaggcatgataagcaacaggagaagtactacgagcaagatgatgaggggatgaggctgccatcaattgaagattgccctggctgcaatgacaacgcaggaagttcaagccgatcttatgatagaagcaatcggctgagtgataagagggttcctgttcattagaggttgggtccggtcaatcaagattgtcatcaagatgagaacgaggataggaagacgcaatggtgctcttctggtattttcacgaagaatcagaagaggaggaagacaaaacccaggcatgagtggcgtgtcaagagtaaggttgcaacagccgatgaagttgaggccgacaaagcaaaaaggttggctagaggaaagaatgtcgcatctacatcggtgaacatggtgtttatgttacctgcagaatttgacgctagataagccaatgttgatgatgttgaagaggcctctgctagattggttttgtcgccagagcaagcaatttttgagaaaccagaggggacagagaatcggcatctcaagccattgtatgttaacgggtttgtcaatgggaagccgatgtctaagatgatggttgatggtggggctgctgtaaatttgatggcataggctacattcaggaagctgggcagaagttcagatgatcttatcaagacaaacatggttctcaaagattttggcggcaatccattggagaccaaatgtggagctgacagtcagtagcaagaccgttcctacaacattttttgtcatcgatgggaagggttcttatagcctattgcttggaagggattggattcacgctaattgatgtattcctttgaccatgcatcagtgcttgattcaatggcaaggtgacaagattgagatcgtgccagccgacag

SEQ ID NO: 91993 - DNA, 996 bp, Oryza sativa
  Clone ID: PAT_MRT4530_90514C.1
atggcttcagctccactcccataggcagctcaactggggtataagccaaacgtcttctccttctggatcctttatcttcaactgaggtttgatgattattgcaagaatgagcatatgacatactcaacaagccacacagcaaatatgcaagtgcacaaggattccaaaggatggcataatataggctcatttgcgaaagcagcatttagcaaagagttaagacgacgcactcacgaaccttcgcaacgacggaaacgacaagctaacacgcaaaacgctagggaccttggccgggtgattggaggacacctacgcgtagaggacgacgaggcgaacccaacggtactcaccacaacgacaaacgacgaacgatgatggccggcgacgaagaggacggcggcggcggctcggcttgacggcgacggcggagctccggtggtcggcggcgaagggggacgggcggccgaggttctcctcaccacggcgcaccacagtgcaccattcctggatcataatcaccccctctataaatataaccagaggcatggactccccagcgacccccacggacttctcgccgcttctcagtctcatcaatggccgaaccaagatggcgacctcgccggagattggatggtcggctgcgactttggaggacaagaacacgtagaggacgacgagacgaacccaacggtactcaccctcgaaccaaacgacgaacgacgacggccggcgacgaggtctagcgtcggcgcggcttcggtcgacggcggcgacggggctgcggtggtcggcggcttcggggagatagcggccgggcttctccaccctcccgcgcacctaacggtggtgacggccaccggcggcgacgacggaggcggcggcgcgacgcggatggagctcggccggcgacgacggcggggtggagcacgtggcggcggcgctacgaggcacgggagatcacgggagagggggaaaacgaaagaggaggactag

SEQ ID NO: 91994 - DNA, 740 bp, Oryza sativa
  Clone ID: PAT_MRT4530_90515C.1
ggcctgcgcccacgcttttgcccagtcgtccggccctcctgctcaggacctcaaacttgttaaagaacaataatgggaaggctttcttgagcgaggatgcttccaagcgtgtggaggagcctttcaaggtggaggaagcagaaaccgtgaaggtgccaccgccttccccggacaaggcaatctacttgaacctgattccctgaaggatattatggaaggtgtttctgctgtggtatcatgtgttggaggctttggctcaaattcttacatgtacaaaattaatggaactgcaaacatcaatgccatcagtgttgcagctgagaaaggtattaagagatttgtgtatgtgtcagcagcggactttggttttgtgaactacttgttgcaaggttattatgagggcaagagggcaactgaagctgaactgctatcaaaatttacctatggcggagtgattttgaggcctggttttattcatggaactcgccgtgtcggtagcgtaaaaatacctcttggacttgttggttctcctatgcaaatggttctccaaagtgcgaagccgttgacgagattgccgctggttggcccactgttgacccctccagtgagtgttgcctccgtggcgaaggtcgctgtaagagcagcaactgatccagtgtttccttcgggtattgttgatgtgtacggcatcatgcgatacagtgaccagaagtagaagtaataaatattacacccggatc

SEQ ID NO: 91995 - DNA, 942 bp, Oryza sativa
  Clone ID: PAT_MRT4530_90516C.1
atgaggtcggccatgacccgcctgatccgttcctcgtcccccgtagtctcgccctcccgtctcagcgccgcaaacttgttaaagaacaataatgggaaggctttcttgagcgaggatgcttccaagcgtgtggaggagcctttcaaggtggaggaagcagaaaccgtgaaggtgccaccgccttccccggacaagcttcttgtgctaggtggaaatggttttgttggttcacatgtttgcaaggaggctttggacaaaggatttactgttgctagtcttaatagatctggaaagccatcaataagtgaatcttgggctgacaaagttatatggaacaaaggcaatctacttgaacctgattccctgaaggatattatggaaggtgtttctgctgtggtaccattcattagactactagacttgaaactaccaagaggttctatgagcactggattaattagtatgatggaaatatttccacttcgtgttaaaccttttatcatcatccctggaacaccgttgataccttttaaatttattatgcaccgatactctaataaggtatcatgtgttggaggctttggctcaaattcttacatgtacaaaattaatggaactgcaaacatcaatgccatcagtgttgcagctgagaaaggtattaagagatttgtgtatgtgtcagcagcggactttggttttgtgaactacttgttgcaaggttattatgagggcaaggggttgaactacctcatggagataaagatgattgacttagggagtgaacggggaaggggagagagagagacataccggcgtcggtctttgagcttgatgcggccatggcgacggtgtggcggcgtcggtgtggacgatggcggtggtggtggtgcggctgtgaggaatccccccacttcaacgccttcccggatcggagggttctag

SEQ ID NO: 91996 - DNA, 1248 bp, Oryza sativa
  Clone ID: PAT_MRT4530_90517C.1
atggcttcagctccactcccacaggcagctcaactggggtataagccaaacgtcttctccttctggatcctttttcttcaactgaggttgattgattattgcaagaatgagtatatgacatactcaacaagccacacagcaaatatgcaagtgcacaaggataccaaaggatggcataatataggctcatttgcaaaagcagcgtttagcaaaacatttaagagacgcactcgcgaaccttcgcaacgacggaaacgacaagctaacacgcaaaacaaggaaaagagaacggctctaaactaaaggacgactcaacacggacgaatgaacgaagcacggggaacacctcgttcgaacgaacgacgacagaagatggccggcgacgagctccgaagggcggcgaggtactgtccacggaggcgacgactttccggcgatgtgcggcgacaacgaaggggtggccgggcttcacttcgcagctgcgaatccaatggaggcagcgacacgcacatcccctccccaccccccgagtcgccgacctctcctcgttcctcacaaccaccgcgatctctcgccctcgatggctcgatccctctctccgccgctccctccaccgctcctggcatccaccgcgcctcctccgcgctctcctccccatcgccactgcggcgcctcgctgaaagacgtcgtccccactcatccatccagggcgtcatcgtcatgcgatcctgtcacaagccagatctcgtccacctccattcttcccttcccattttccgcttttccggtttcctcccacccaccccgcacccagcgtcgtcatctccgacccgcgcaccatgcagctcctctgcgtcctccccatgccatcctcctccctcgcctccttcgtcaccgccgtccgctgggtgccacccagctcgcgcttccacgccgcggggatcgacgacgacgacgacgaacgccgcccgctccgcctcgccgccggcgaccgccacggccgcatcgccgtctgggacgcgcgcgcgcgcctcgtccttcactgctagacaggcggagctacctcctgggcaggtcgggcgaccgtacagactccgccgctgatcgcctgttgccacctaacccgcaatctaaccggtctgtgaccggtcacacactgcgaccggtcacggaccggataagcgtgcgatgcgctgcattgaatgcggcgtggtgcgctcgtctaacccgctataaatgcggttaggt

SEQ ID NO: 91997 - DNA, 258 bp, Oryza sativa
  Clone ID: PAT_MRT4530_90518C.1
atggacgtggcgcggcggcctgcgagcagcaggaggacggcggtcggcgacagcgggaggcacacgcgcaagggcgacgccgctgggcttgctcactgcctcttgctcgccgcggatcctgcttggtgcggcttggtcgggggctggagcccctaccagccccaacagtggattcgccagtgggtcgggtcacggatgacggctgttgcttgccaccgcctggctggcgtactgatgccgcagccgtcgccgctctag

SEQ ID NO: 91998 - DNA, 549 bp, Oryza sativa
  unsure (1)..(549): unsure at all n locations
  Clone ID: PAT_MRT4530_90519C.1
cggccctttggaangagggtgtntcggccnggagananacaccggacgtatccgnnactctantatcancagntcnannggtncnctntnnatgcttctactatcgccctgcgtggttgaccncctacncatcagganatntnggtggnncanttggtcnaanccngacnggctacngaanttgtactncnnggtgtgtaacttntccntnanattgtccantgangattggangctgaaattatttcatgantgangaccngctaatanatgtcacttgtcacagcaaacaggacctgcatctntatngtcncttgtccattgaagtaannngctgtntttatattnataggantacatntcncttacccttcntgactnctgacacttatctgtcctcttgttataaagcnganaaactcnccanggggggcccggtanccaanncgccctatattnattcnnattncccnncnctggccgtcgttttacaacgtcntgactgggaaaaccctggcgttncccaacttaatccccttgcagcacatc

SEQ ID NO: 91999 - DNA, 265 bp, Oryza sativa
  Clone ID: PAT_MRT4530_9051C.1
gatgctctcccattccatggctccatccatttcgattcccaaacagccgcagctagagctagagctgagctaagctagctatttcacgtgtccatcgagccaaagccaacctgttgctacaaggtgagctgctgccgcctacaacaaccgcgcgctatccaatggaggaaacctagcttcttcttgatccacagtttgttttgtgcgtgcgtgcgtgcgtgcaaaaggtgtctcgttgagaggtgagatcctgcggaggcatggc

SEQ ID NO: 92000 - DNA, 1234 bp, Oryza sativa
  Clone ID: PAT_MRT4530_90520C.1
caaactcgcaagaggaaccggccgggattcgcgtcgcgtgcgtattctttgcttccgctctcgatagatcgcgaggaaaggagtagtacggcggcggcggcggcatcgtcggcggcgatgaggtcggccatgacccgcctgatccgttcctcgtcccccgtagtctcgccctcccgtctcagcgccgcaaacttgttaaagaacaataatgggaaggctttcttgagcgaggatgcttccaagcgtgtggaggagcctttcaaggtggaggaagcagaaaccgtgaaggtgccaccgccttccccggacaagcttcttgtgctaggtggaaatggttttgttggttcacatgtttgcaaggaggctttggacaaaggatttactgttgctagtcttaatagatctggaaagccatcaataagtgaatcttgggctgacaaagttatatggaacaaaggcaatctacttgaacctgattccctgaaggatattatggaaggtgtttctgctgtggtatcatgtgttggaggctttggctcaaattcttacatgtacaaaattaatggaactgcaaacatcaatgccatcagtgttgcagctgagaaaggtattaagagatttgtgtatgtgtcagcagcggactttggttttgtgaactacttgttgcaaggttattatgagggcaagagggcaactgaagctgaactgctatcaaaatttacctatggcggagtgattttgaggcctggttttattcatggaactcgccgtgtcggtagcgtaaaaatacctcttggacttgttggttctcctatgcaaatggttctccaaagtgcgaagccgttgacgagattgccgctggttggcccactgttgacccctccagtgagtgttgcctccgtggcgaaggtcgctgtaagagcagcaactgatccagtgtttcctccgggtattgttgatgtgtacggcatcatgcgatacagtgaccagaagtagaagtaataaatattacaccggatcatacaaattctatctccgaatgaataagcagatgtggctggcacgttagacttttgcgcttgtttcgttttcatagatttttacagttagtaggggaaccttatttaactgatccatgtcaatcagtggtgaagatgtatatagtaaataaatcgtatcatgctccccatgtttgattgcagtcaaaaataaaaaaaaatccatgttgcctctg

SEQ ID NO: 92001 - DNA, 2455 bp, Oryza sativa
  Clone ID: PAT_MRT4530_90521C.1
ttgatgagttaattctagaaaaaaaataaatgctaaatattggctagcctcaagatttgctagccatgccctcaaatggattaaagccataatgtcgtcgacctccacgacaagtgttgacatgttgtggcacacgtggaaaccacattggtctccgatctgttgtgcgcatgcgaacttggtgtcatgataaagttcgtcgttgccctccttgtgcctaccacccttttccacatatgggccccaagccatatttaaggccttggtgatttcagtgaaatcataatctttggacttattggagttaaggtaggtaaccctactccacttaggtacgatgactaggagaatccaatgtcgctctgggttgtgtgcgcacatgatgtactccttgtcttgatgggaccataaacaccggttgacatagtcaaccacctcagtgaagctctgtcgtaaattaacctcgttcaccatggatggatcaaggaacccaacctgattaccaaggcgacgactctcgatccaacacaacaaggagtagcattttagaagaccagtgtccaacttccagatcctgaaaaggttgaagaggtcatcaaagcctatagttatgtaggcaggcgacgataggaacggttggtggtcgtgatgtccaactatggatgactccctcattttccgcttcgcattgcttagctccatgtattgcttatgtagctctcggcaagcaatacccatcacggctaacacattgtcctccaccaatggcatgcttaactcaaattgggccggcgcactcacgaccttccccgctttgctcaccggcatcgacgtcgtagccttgcccatttttggctccggcgcaaactccccaaccttccccttgccgcgttcatgcttctggcccttgacaagtggtggggagctatcagcctttcttgtggtctttattggagccaagctttgagctatatctgccaagtccatattagctccatcaggagaatgaggtactgacaatgccggtccacggggagcctcaattgatagcttagacttgggaggtgtaagctccatcagtcgacttggatgaggagtcagtcatcttcacaactatgtcttctttgggccattgtatgaacatcttgcgcgaatcgcccaaagtcatgatttcatcattgggggcatgggcagcggatagcctgacaaggtgtcctttactgtatcgatggacaccttggcatacacagctagcaggtctgtgccgtggaccttgtctgtaaccgagggcttgaaagccatgccctcagcgacttcgggagcgaaagttgggtggaccctcgccagtaggacacattgtgctacgccctctatgtggtccactgcagctagtggtgcgaccgggagaccaggggccgacacctctgtggatgcacaactactcttgtgctgtgacggactcgcgtcgtgttgtgcacgaggagttggatgcacagcaggtgttgtgccttggggtatattcatgtcggcgaggactttgttaaccctttcttccaccctagcgttcatgctagcttctagttcttgaatgacctcaaccttaagttcggccttcaaacaagcgtccctctcttccttggagacttttcgtttcctgtattgggagctgtactgcgggagtccatgtcgccaccttgcgccgctcgcccgccgcgccgccgtcggcatcgtcgccgtcggcctcgcgccccgtgccgccgcctcgagccccgtgccgctgcctcgcgcctcgcgccgccgctgccacgctgtcgccatcgccgtgggtcgccgtcgtctcgcaccaatgtcgcccgtcgccgccgcatcgccgtcccatcgcgccgcgcaccgtctcgtcgccgctcgtccgtcgccatcgcaccttgcgccccgcgccgctgccgcccgcccatcccatcgccgcgcgcccgtcgtgtcgccgctgccgccccgtcccgtcgcctcgcgccccgcgcgccgtctcgcgccccgcgacccgcgcgccgctcgcccatcgcatcgccacctcgcgtcccgcgccgctgccgcgccgcgtcatcgtcgcgtcgccatcgccatcacaccaagccgccccgagccccgccgctcctcccctctctacaaatacccccccctctctccattctcccccaccccatctcatccttcctctcccctctcccctctccactgcgccgccgttctcgtgccgccgcgccgccgttctcgtgccgccgcgccgccgttcccgtgctgccgcgttgccgttcccgtgccgccgcgccgccgttcctgcgccgccgttcccgtgccgccgtgccgccgctcctgcgccgccgtgcgccaccgtcgccgccgccgtcgtcgccgctgccgccgccggtgagccgccctccttctccctcgcgtccat

SEQ ID NO: 92002 - DNA, 1872 bp, Oryza sativa
  Clone ID: PAT_MRT4530_90522C.1
atgaagaaatatacctgctggactaagcatggagagcaagaggcgccggatgtcgcagctgaagaagtgttggatctggatgtagagaacaccgccgcagctcgagaaggcatgacgatcgggatccacaacaccgggatccacaacgccgggatccaggacgaccggcgaccagcgccgccatcgcctctcagacctcttctcctcggccagttctccctgaccagaatcgccccagcaagaacatacgtcaatatcgggtgggacaagtacgagcccacggcgccgaggactgtcattggaagatggtctaactgctacgggctggcggcacgtgtgaatttcgggatcctccataaagatatcggcaaggtcacagaagccgagaaggagcgagcttggacggcaatggagaaatggctcacatttaaggctaaagcaaaggataggctcaagcggaagtcattccataagatgggcaaagcttggaagaattggaagtcgaagctcttcaccgagtttgtcaacccgcccggcaatcatacgccgttcgatgtttaccctcaaataaccgaagaggtgtgggaagaattttgctctctgaagaacacccaagagtttagggaatcaagcgagaaacatcaccaactgcaacagcggaatgagcacccgcatcggctgggcaccgcagggtacatcggcaaggagccaatatgggcccaagaggatgctgccactgcagcagcgaatgtccctgccccgttttcggacatccctgaacacagagctcgcaactgggcgcgggcaaggggtaaggtcaacccggacggctctgtcacatttcagaacaaaagtgatgtcgtcgtctatcaggaattgtacaactcccaatacaggaaacggaaagtctccaacgaagagagggacgctcgtttcaaggccgagcttaaggtggaggtcattcaagaactacaagctagcatggaagatagggtggaagaaagggttaacaacgtcctcgccgacatgaatataccccgaggcacaacacctgctgtgcatccaactcctcgtgcacaacacgacgcgaggcgtagcacagtgtgtcctactggcgaggatccaccaactttcgctcctgaagtcgctgagggcatggctttcaaaccctcggttacagataaggtccacggcgcagacctgctagccgggtatgccaaggtgtccatcgatacagtaaaggacacctggtcaggctatcggttgcccatgccccccaatgatgaaatcatgactttgggcgttgggcgcaagacgttcatacaatggcccaaagaagacatagttgtgaagatgacttctcgtccaaatcgaccgacggagcttacacctcccaaatctaagctatcaattgaggctccccgtggaccggcattgtcagtacctccttctcctgatggagatgatatggacttgggagatataactcaaagcttggctccaataaagaccacaagaaaggccgatagctccccaccacttgtgaagggccagaagcgtgaacgcgtcaaggggaaggtcggggagttagcaccggtgccaaaaaggggcaaggctgcgacgtcgatgccggagagcaaagcggggaaggtcgtgagggcgcctgcccaatttgagctaggcatgccattggtgaaggacaatgtgttagccgtgatgggcagcaccaagctggaggattttcggctggcaaggctcgtcgactatggcgccgacccacggactacgcaggaggttggccgagagtgtggcaccgtagaccgtgactgcgattggcagctccagcgtacggtcaccgtcgggctcgagtga

SEQ ID NO: 92003 - DNA, 288 bp, Oryza sativa
  Clone ID: PAT_MRT4530_90523C.1
atgtcggtgcccatcggagggtttgaaatgggtggcggcgggaggacgcaggaggaggggatggagtggagaagagaaccgaacataagctcaagtgaggggtacgggacaaacacggcggcgctgtttaacaacggcctcagctgtggcgcgtgcttcgaggtaggggcgtacctatgtataggttacaggtgtccaaggacaccgggacctccggtaaattttgttatgggtttgccactgcttcgaggtgtggtgcgcatattgctcgatgaaatgccgctgtaa

SEQ ID NO: 92004 - DNA, 1119 bp, Oryza sativa
  Clone ID: PAT_MRT4530_90524C.1
atggtgaacactcacgccaataaaagtggaaataataacaatgaagggaacccaactcttgctcaagttctggctcaacagactcagttaatgaacatgatggtacagcagatgcagaaccagctcaaccaagggaacaataatgctccaccgccgcagaacaagttaactgattttcttcgtgtgaagccacctaccttttctagcactaccaacccagtggaagcaggtgattggttgcacactattgagaaaaagttggaactgctccagtgcactgatcaggagaaagttgttttcgcttcacatcagttgcaaggatctgcatcagaatggtgggatcatttccggatgaacagagcagaaagacaaccaatcacttgggcggagttcacggaagcattcaagaagacacacatacctgtaggagttgttgctttgaagaagcgtgagtttagggcattgaagcaaaaggatcataccgtggcagagtatcttcatgagttcaatcgtctggcacgttatgctccggaagatgtgcgtactgacgaggaaaggcaggagaagttcttggaaggcttaaaggatgaactgtcagttacgttgatctcccatgactatgttgattttcagcagctggttgacaaagcaattcgacttgaagacaagaagaacaggatggataaccgtaaaagaaaaatgactgtattccaggaggcacaaggtagtagccagagacagcgtatcaagccactccaaattggtgaaccttcttccgctggtcaaggacagtcgcaacagttgaatatcggtggtgagatcaaatcagagactaatgaaagcaatgaagttaacatcgagcaagctaatcagccggtgccagttcagcaggatcagtctcaagtgaataacagtagtagaagggagcagcagtcgccgtcgtcggtcgccgtcgccaccatcgggttcgccaagtcgtcgccgtccccgtccactgcttcgccgccgccgaagaccgtcggagtgccgtcgccgtcgtcgacccgaagagcttcgccgcttcctcctcgtcgccgccgccgtccgttggtcttccgccgccgttttggtcaccggtga

SEQ ID NO: 92005 - DNA, 339 bp, Oryza sativa
  Clone ID: PAT_MRT4530_90525C.1
atggatcagaacggtgctctttcaggagctggaagatcaatctcatcaacgacaacgaagaaggccgaggcggcgtcgcggtcgccgcagcagcagcagccggatcacgacgtggaggcgatggaaccagatgcggagtgggaaatactacgcccgttgtcaccggaccctcctgagttggaggaggcgctgcgacggctagcggaagccgagcgtatcacgggcgacgagagagctgctgccgccgcccgcgcgaggcccggggagaagaggatatcggtcctctcctggctcgtggcgccgccgtcatcaactacgccgaccgcgacccctaactaa

SEQ ID NO: 92006 - DNA, 447 bp, Oryza sativa
  Clone ID: PAT_MRT4530_90526C.1
tcagccgcgccgcgccgccgttgcagccgccgtcgtcagtcgccgtcgccaccatcgggttcgcaaggtcgccgccgtccccgtccaccgcttcgccgccgccgaagaccgccggagcaccgtcgccgccgtcgacccgatcttctccgccgccttttcctcgacgccgccgccgtccgttggtcttccgccgacgttttggtcatcggtgagttcgccgcgccgtgatctacgtcttggtgccctccgtttgtgccgtagagccgccgttcgccggcgagcatgcgccgtccgagccgtccgagccgccgagccgccgccggtgctgacgtcgtcgctgacgtcatcgtcgccctctcccgtgagccgggcgtggaccgatcgatctcggccgtccgttttggatagggttgatctcggccgtccgttcgcgtgaaccgccgccat

SEQ ID NO: 92007 - DNA, 1926 bp, Oryza sativa
  Clone ID: PAT_MRT4530_90527C.1
atggagaaatggttcacatttccggctaaagcaaaggataggctcaagcggaaggcattccataagatgggcaaagcttggaagaattggacgtcgaagctcttcaccgagtttgtcaacccgcctagcaatcatacgccgttcgatgaataccctcaaataaccgaagcgttatgggaggaattctgctctctgaagaatacccaagagtttagggaatcaagcgaggcacatcgcctactgcaacagcggaatgagcacccgcatcggctgggcactacagggtacatcggcaaggagccaatatgggcccaagaggatgcagccgctgcagcagcgaatgtccctgccccgttttcggacatcgctgaacaaagagctcgcaactgggtgcgagcaaggggtaagttggggttggttgctcaacaagcttcacaaagcgaggttgagtccacgctgaagaggcgcgaagatgacatcctcacaaaggcgctcggaaccaaagaacatcctggccggactcggggaattggcagcgatttgccttggaagcatggactgccgcagcacagctcccaatacaggaaacggaaagtctccaaggaagaaagggacgctcgtttgaaggccgagcgtaaggtggaggccattcaagaactagaagcaagcatggacgctagggtggaagaaagggttaacaaggtcctcgccgacatgaatataccccgaggcacaacacatgctgtgcatccaacttctcgtgcacaacacgacgcgagtctgtcacagcgtaggagtagttgtgcatccacagaggtgacgacccctggtctcctggtcgcaccactagctgcagtggaccacatagagggcgtagcacagtgtatcctactagctagtgtccacccaactttcgctcccgaagtcgctgagggcatggctttcaaaccctcgattacagataaggtctacggcacagacctgctagctgggtatgccaaagtgtccatcgatacagtaaaggacacctggtcaggctatccgctgcctgtgccccccaatgatgaaatcatgactttaggcgatgcgcgcaagacgttcatacaatggtccaaagaagacataattgtgaagatgactcctcgtccaagtcgaccgacggagcttacacctcccaagtctaagctatcaattgaggctccctgtggaccggcattgtcagtacctcattctcctaggggagctgatatggacttggcagatatagctcaaagcttggctccaattaagaccacaagaaaggccgatagctccccaccacttgtcaagggccagaagcgtgaacgcgacaaggagaaggtcggggagttggcgccggtgccaaaaagggacaaggctgcgacgtcggaggcggtgagcaaagcggggaaagtcgtgagggcgccggcccaatttgaactaggcatgccattggtggaggacaatgtgttagctgtgatgggtattgcttgccgagagctacataggcaatacatgcagttaagcaatgtcaagcggaaaatgagggagtcatccataattggacatcacgaccatcagtcgttcctatcgtcgcctgcctatataactataggctttgatggcctcttcaacctgttcaggatccggaagttggacactggacttctaaaatgctactccttgttgtgttggatcaagagtcactgccttggtaatcaggttgggttccttgatccatccatggtgaacgaggtcaatttacgccagaccgtcactgatgttgttgactatgtcaaccggtgtttatgggcccaccaagacaaggagtacatcatgtgcgcacacaaccaggagtcgtgtaggttcacaacgaacaggatacaagaaattttagtaatcatttga

SEQ ID NO: 92008 - DNA, 329 bp, Oryza sativa
  Clone ID: PAT_MRT4530_90528C.1
ttttgggggttattttttttttttttgggtttattttttttttttttttttttttttttttttttttttttttttttttttttttttgtttttctttttactatgttactctctgatttcaagaagacgaggctgtttttttttttggcccagcccctgctatttttgggttttgcaggatccgtgaagaattttccccccctgacctccgaaattctttaaagggacggttgtccttttgggtcaacagccacctgctggacggcttcttcgggctgattttttttgcgcccacgggggccgcgtagggggcactcactttttttttc

SEQ ID NO: 92009 - DNA, 423 bp, Oryza sativa
  Clone ID: PAT_MRT4530_90529C.1
acatgaataacaaaattactcaattgcaatcccaaaccaaaataaaaaatctccacaaaatcaacatcccaaatcaaaccggcgtcgtactgtggttactatatcaacattccaaatcacaaaatcctcaaaatattcacaaataaaaaaatcaaaccaccgtcggctccacgtcggggaggtgaggggcagccagggaggcggggagttgctgccaacaccaggggagggaagcagctgtcggccgccactccggggaggggggagcagcagccaccggataactgctagaggagccgctgccctcgaatccgccgcaggaggaagctgctgccacccgatccactctcagccagcgccaccgccaccggatccacacgcggtcgccgtccccgctgtcagatccaccgtgggagggaggag

SEQ ID NO: 92010 - DNA, 1388 bp, Oryza sativa
  Clone ID: PAT_MRT4530_9052C.1
atccccccttctcctcctcgcggcgctcgctgagcatgatggcggcggagggggaggccaagaaggacagcgccagcaaccctcccgggggaggaggcggcggaggtggaggggaggaggaggaggatagcagcctggctgtcggggaggcggcggtcggggtgggcgaggctggtggaggaggaggaggaggggagaaggcggatcgagaggaggaggaggggaaggaggatgtggaggagggcggcgtgtgtaaggatctggtgctcgtcgaggacgccgtccccgtcgaggatccggaggaagccgcagcaactgcagcacttcaggaagaaatgaaagcgctcgttgaatccgtcccagttggtgctggggcggcattcaccgcgatgcaactacaggagcttgagcagcaatctcgtgtctaccagtatatggctgcccgtgtgcctgtgcctactcatctcgtcttcccaatatggaagagtgttactggtgcatcttctgaaggcgcccagaagtacccgacattgatggggttggcaacactctgcttggactttggaaagaacccagaaccagaacctgggaggtgccggcgaactgatggaaagaagtggcggtgctggagaaatgcaattgcaaatgagaaatattgcgaacgccatatgcaccgtggccgcaagcgtcctgtacagcttgttgtcgaggatgacgagcctgattctacctcagggtcgaaaccagcatctggcaaggccaccgaaggtggcaagaagactgatgacaagagctcaagtagcaagaagcttgcagtggcagcaccagctgctgtggagtctacatgattgatgcagcatttaggagctgcataaagagcataactgtgctggcaattagagttcgcttcttattgtaatcctgaaaagactgtagtctggtctagctataacctcatcaagcaagaaaagtgtctgtggaaagaagccacaaaaactttcatttagctgtcactgaaattttcagtttaggtgtatagtttgatttagctttgccgtgccctctgccttcaggcagatgagcggcattattggataaatcctctctgactgacaatatcgcattgtgactcaagaagccgatggaaggatctgcgagactagatacgaagctatttgttgtgtatcattttatatggcctgcacaattgtgtgattttgtcagttgcataacatgtggaagatccataattttatgcactatggagattcaattaccttcctgaatgtctgagcttcgacatgttattggttattgtaacttaaaagcaacctgagattcaatgtgaaagggttttagattccagctaaaaaaaaaaaaaaaaaaaa

SEQ ID NO: 92011 - DNA, 966 bp, Oryza sativa
  Clone ID: PAT_MRT4530_90530C.1
atgccctccacaaccacggcgccggagaccgatcctagcaagaccgtcgtcgaggagatcaccggctggctccgcctctactccgacggcacagtcgagcggctgacaccaccgggcgcggagcccttcaccgtcatcgtcccgccctacaccgagccgcgcaatggcgtcaccgtgcacgactccatcgtgggctctttaccacaacttctacgcgcctctcttacgacgaagctcgacgtcgccggcatcgtctccgtcttcctcccccttgcgcccgagcaccgcctccctgccgccattgacgctggccatgccgcgcttctctggctgcgggacgtcgcttgcggcgaggacgagaacaacaacggcgccgcccaccaccttgatccggcggtggaacgcctacgtgacgaggccgacttcgcgcgcgtgttcctcatcggcgacagctccggcggcaacctcgtgcacctcgtcgcggcacacgcggcggcgaaggatgacggcgcgggggctgatctccacccagtgaggctcgccggcggggtacttctcaatccggggttcgcacgggaggataagagccggtcggagctggagaacccgccgagcttgttcctgacggaggagatggtggacaagctcctggcgctcggggtgccattggggatgaacaaagacagcccgtacacctcgccgtcgctggcggcggaggccgtggcgcgcttgcatatgccgccgatgctgctgatggtggcggagaaggacttgctccatgatccgcaggtggagtacggcgaggccatggcgcgcgttgggaagacggtggagacggtggtgagccggggcgcggtggcgcacgttttctacctcaacttcttcgcggtggagtccgaccccctcacggcggagcggacaagggagctcatcgacaccatcaagacatttatcgacagatactga

SEQ ID NO: 92012 - DNA, 151 bp, Oryza sativa
  Clone ID: PAT_MRT4530_90531C.1
ttcacaagcaagcgcgagaggagacacctccatcgatcattgccgccaccgcgactgccgtgtggggcgcctctgtccgtggcctggggtgtgctcgggaggccgctggctcgcgtctcgtcgccggcggcgccgatgaaagccgcctccc

SEQ ID NO: 92013 - DNA, 705 bp, Oryza sativa
  unsure (1)..(705): unsure at all n locations
  Clone ID: PAT_MRT4530_90532C.1
ccggccgggacccacaatcttcgccaacttacaatcagctaaagaaataaccaatttcaaaacctctcttcttctttttaaccaaacctctttcacttcgacatctgtctgccccgctaccccgccaaaaccgcaacacccctccataactctatcaatcttattataacgaccaaggcatagacctttggtcactacagtcgtcaagacgttttccaatctccttaactcgacgcatcacccgtttgcaggagcccgctgctcagccgcttctggaggctcagcggactcgacctttgaacagtaaaggtctaatcacaaaaaagaaacccgtccaatctcaattaaaccgcaaacttccacgctaaagccaattcaaacactatggctcctcacgcggaagtcggcacgggctcctcaaacgggtcggtatacaacggccgaggctcctccgctacccaggacctctttaccgtcaactcacccaacgtcacctacacggatgcggagattcgctcacgatacacctaccgcaccacaaaggttgaagttgatgccagcggcaagtatgttgctactcctaacgagactctctacgacttcaaggtcgaccgcaaggttcccaaggtcggtatgatgttggtcggacttggaggcaacaacggcaccaccgttaccgctggtatcctcgccaaccgncgtcag

SEQ ID NO: 92014 - DNA, 1071 bp, Oryza sativa
  Clone ID: PAT_MRT4530_90533C.1
atgccctccacaaccacggcgccggagaccgatcctagcaagaccgtcgtcgaggaggtcaccggctggctccgcctctactccgacggcacagtcgagcggctgacaccaccggacgcggagcccttcaccgtcatcgtcccgccctacaccgagccgcgcaatggcgtcaccgtgcacgacgtcaccacggccaggggtgtagacgtccgcctctacctcccggccgagccgccggcagccgcgccccggccacggcggcgtcgtcctctcctccttcacctccatggtggtgggttctgtctatcgcgtccatcgtgggcgctctaccacaacttctacgccccgcttgctgccaagctcgatgtcgccggcatcgtctccgtcttcctcccactcgcgccggagtaccgcctccctgccgccattgacgctggccatgccgcgcttctctggctgcgggacgtcgcttgcggcgatgaaggaaaccttgatccggcggtggaacgcctacgtgacgaggccgacttctcgcgcgtgttcctcatcggcgacagctccggcggcaacctcgtgcacctcgtcgcggcacacgcggcggcgaaggatgacggcgcgggggctgatctccacgcggtgaggctcgccggcggggtacttctcaatccgggcttcgctcgtgaggagaagagccggtcggagctcgagaacccgccgagcttgttcctgacggaggacatggtggacaagctcctggcgctcggtgtaccattggggatgaacaaggacagcccgtacacgtcgccgtcgctggtggcggaggccgtggcgcgcttgcatatgccgccgatgttgctggtggtggcggagaaggacttgctccatgacccccaggtggagtacggcgaggccatggcgcgcgtcgggaagacggtggagacggtggtgagccggggcgcggtggcgcacgtcttctatctcaacttcttcgccgtggagtccgatcccctcacggcggagcggacaagggagctcatcgacaccatcaagacatttatcgacagatactga

SEQ ID NO: 92015 - DNA, 627 bp, Oryza sativa
  Clone ID: PAT_MRT4530_90534C.1
atggccaggagttgttgtggtgcagtggtgggcaaccgacgggtgtggggaggagaccggtgggggaggcgggagacgggactccggcggtcggcgacgggcgacgaggcggcggcggcgacgacgcgggagcaggagggcctccccccacgccgccgccggcggaggaacgcagcggcgagggacaaggccgccgagagcaaggaccagactagcggcttcctcggcgagaagaccgagaaggccaagcagaaggccaccgagaccgacgagacggcgcggtggaggcctgttgcgcttgcacccagtgaacgtgcacgagtaccgccgctccagctgctgcttgtccttaccaccgccgccggcggctttgtcagcatgggcacgctcttgatttcatcctcctccgccggcgccgccaagcagaagaccaccgagacggcgtacttccgccatcgccgcctcgtcgcccgctgcctcctcctctcccgcctcgccccgacgacctctccccacccgccgggcggcttgccgcttgcagttgcagagaaggagaaaaggatcttcggggtactttttccttttgcaaaactggtgatgtcgggtgagggagatctcagccgttag

SEQ ID NO: 92016 - DNA, 516 bp, Oryza sativa
  Clone ID: PAT_MRT4530_90536C.1
ctaggcacttgggtaagcccaatctacccgcaagctacggccaccgaagctaaagcagttgagcccctcgatggcctcgtcggcgtgctcccgccgctcgaacacgacggcggcgaaccccttgcactcccggggcccgtccatggcgacgtgccacatccgcagcggcccgaacccggtgaggagcccggcgaggtcggccggccggcagctcgccggcaggttgctcacgcgcacgaagcggcggaggaagcggcggcgctccgacgcccccgccgcgtcccccctccaggcggcgcgcctcgcccggcacggcacgtagcagcgcgcggccgccggggcgaggtagttgtaggggcacgtgagctccgtgtgctcctcctcctccgcctccgccaccgtcgtcgccgccgccgcctcgccgccgcagatgcagcacgactcggcgtttgggtccttccagaagttgatcgtcgccgccgtcgacgacgccgccgccgcggcgttcacgtccat

SEQ ID NO: 92017 - DNA, 294 bp, Oryza sativa
  unsure (1)..(294): unsure at all n locations
  Clone ID: PAT_MRT4530_90538C.1
cgctaccngnacgncnttgtnctcanatgccaaanttcccaagcacacacagntttantgttcacaaacacagncttccttntngtccaaatccgtcaaccatntcgctgatccgccgaggcaacntttcnaccccttttccctcgacctctggnatcccgtcnacggcttccccntcgantccggcggcanancagnagcagcggcagctcttccctcgggccaactncnacgnggcggccttcgcngagagcgcatcgantggaaggagacgccnaggtgcacgttttcaag

SEQ ID NO: 92018 - DNA, 2406 bp, Oryza sativa
  Clone ID: PAT_MRT4530_90539C.1
aagtctacaagccccacgtcgtcgtcaagagtgtggtgttcgagacgtaccacatccagggcggcacggaccggacgggcgtcccgaccaagatgatgtccgtcaacgcgacggtcaggctgcgcttccgcaaccggggcaccttcttcagcctgcacgtcacctccacgccgttccacctctgctacgacgacctcaccgtcgccaccggccacatggcggagttctatcagccgcggcggagcgggcgcgtggtgacggtgtccgtggtggggaagcaggtgccgctctacggcgccggcgcggagctgcacagcaagcccaacaacggccgcctcggccccgcggtggtgcccgtcaggatggccttcgtgctgcgggcgcgcgcccacatcctcggcctcctcgtccgctccaagttctaccgccgcgtcctctgccgcctcgacgtccgcgaggcaagcctcggcaagcccgtccacggcgtcgccgccgactgcgagtaccacgacgggaggtgaccacgggcccttgcattcagacgctgcgtcgataccgtgggcgtggattgttaattggaagctctgaaactagacttctgggggtggtagtagtattggtaacacgaggtaaaatccaatccgttgtaatggaacaagtgttgatgctaacagtaatcctgctaattctagaaaattttacttgctgttgaaatctgtactaccattggcattaactcatgtctgaagctccggccgaaatatgtaggccatcattccagcaatatacactactaggtgatattacaacaagctgggctggcttctatgacatagcagttgtcaatttactatctgaagaagaatccttcccttccctgatggagatttgcagaggaataggggaatagtcattcgcccatcaggatagtagacaatgggatggtttcacgttggccaaatttacaatgtacagtatgtaaatttacaatggtttcaggttggccaaatttacaatctactagcatactcatcatgcttgctcatgctgcacaatggccaacatctcacttgcaccagattgccctgctcgcatcctcatgctgataatgaaggcaatgagcgtacaaaagccagcacacatgatactgaaacctttgaatttgaatggcgctgtttctgaaaggacccatgctgttagaggggtaaaaattagtggagctaatatgctggcaaacgagcttatgcccgatatacagccttgagcaattccctgctcatttgatccaacactcttcgatacattggttcttatagaagggtgaacaaaagcactcagaattataaacaccgcagataaatatggtacccaatatgaccatgcaatgccatacaggaaaacatgagtacatcctcctaggagtcctataataagcagtatatcctcgccaacaaatcgagccaagaccggcattacagtcagctgtgacagcattcctgcagcaccagcaattaacagaagattagcgaactcatctttgctgtaaccaaactgtgccttcaggtagtacagtaatgcagtctgaagcccatgttccccaagactgtaaaagaaggtaacaattgctgcccctgacagggtcaaactgccagtgagaagcgaaaccatgtctgacaacgacggcaccccgcccttgtgcggcggaagtctcggtgagatctcctcatcggaggaggacgaagacgaagtcgcggcggagcaggatgagccttgtaggaagggatcacatgcttcgtcaacgaaggagttggctccgccggaatctgggacaacggccctgagatagatggccgtcgccgcggcgacggccgccgccacctggaaggtggttgatgtctggaggaaccgcgcggtgagtgttccggagacgaaccccgctgccgacacgccggagaggagcccgaacgccgccgctcgccgcctggcgccgacttggtcggccacgtaggcgagcaagaggcaatgcatgctgccctcgcagaagatgccggcgaggaccttaacgacgtagtacacgtagaagtacaccttggagcggttgcaggccagtataaacaacggcagaatggccacggtcaccggcagtgtcatcagcgccttcctgccgtatttgtccgacaaattccccacgatgggagtcaccacaagagcccccatccctgtgatggcgctctggaagccgctgaggtagatggcgacggagcactcgtcgcggccggggcagacggcgtccatcgtcacgtcggtgatcgccgggatgaccatgtaggaggcgaagtggaacatgaacgccgccacgaacaagtgccccagcacagccaagtccttcatcctggcgtctcaaac

SEQ ID NO: 92019 - DNA, 540 bp, Oryza sativa
  Clone ID: PAT_MRT4530_9053C.1
atgattaagactattgctaaaacccgggattttacatcttcttcgtcatctgcacatgactccactccgtctcctccgcggcgtggaagaggaagtcatcgttgtcgtccaccccgtcaacagcgaagtcgaggatccgcctcacggcgccgacgggacgaaagcgcgacgcttggcctcgtagtgggtccactccgtctcctccgcggtgtgaaagaggaagtcatcatcgtcatccaccccgccggcgacgaagttgaggatcccgcctcacgacggtggcggtgggatggaagtgcgatgcttggcctcgtagtggctccactccggctcctccgcagcgtggaagaggaagtcgtcgtcatcgtccagcacgttggcggtgaagtcgaggatcggtctcacggcgatggtgttccatcggcctccgtgcgtttctccggaggggatggcgcgattcgtttgtggactgcgcgtagactcacgatgagcaagaaaactcgtctccctgtgtggagtagctatggaagggacgtgcac

SEQ ID NO: 92020 - DNA, 453 bp, Oryza sativa
  Clone ID: PAT_MRT4530_90540C.1
gcacgagggggggctcctctctcaattcctcatcctcatcccatcaaaactctcatgtctcccagtcgaaacagaatagttaatagcctcatccctctaaactcccaatccctcctaaaaactccccccaaccaaacgcaccctaaggggtttagtttgttcgcaaattgcaaacattatatattgaattgttaatacgtatcacaaacgtttgagctaactagcaacaagaactttgctccaaacccctcttatccaaagtccaaacagaccctttggctggttttgttatgagatttggtataattctacacaattattctgataccaaacacctggtaattgcactatttgccttttttgtaggtacaatgaacgagttgtgtggaatgataagcagctcaatctaaagcttctcaggaaaggagtgctgactcgcatatacaccccaat

SEQ ID NO: 92021 - DNA, 1188 bp, Oryza sativa
  Clone ID: PAT_MRT4530_90541C.1
atggcacggcacgcgaagacggactccgacgtgacgagcctggcgccgtcctcgccgccgcggtcgccgcgccggtcggcctactacgtgctcagccccgccgcctcccacccggacgtcgtggtggcctcgggcggcgcaggcggcggcggcggaggcgtggccgcggccgagaagatgtcgttcgcgggttctaccccggccgagtcgccgctgcactaccactaccaccactccggcgccgccgtgcaccactcccgggagtcttccaccggccgcctcctcttctccgaccagctccgctccggcgccgctgccggcgtcccctggcgacgccttgcgcagggcagcggcgccggcagcgtcggggacgacgacgacgacgaaggaggactcgccggggccgcctcgcagtggaggtgctacgccctcggggcgttcgccttcgtggccgtgttcgccttcttcctgctcgtgctctggggcgccagcaagtcatacaagccccacgtcgtcgtcaagagtgtggtgttcgagacgtaccacatccagggcggcacggaccggacgggcgtcccgaccaagatgatgtccgtcaacgcgacggtcaggctgcgcttccgcaaccggggcaccttcttcagcctgcacgtcacctccacgccgttccacctcttctacgacgacctcaccgtcgccaccggccacgcaggacttggatttagcgttttacacacagaacctcttagcgtttacacacacacagacggtgagctcatggcggagttctatcagccgcggcggagcgggcgcgtggtgacggtgtccgtggtggggaagcaggtgccgctctacggcgccggcgcggagctgcacagcaagcccaacaacggccgcctcggccccgcggtggtgcccgtcaggatggccttcgtgctgcgggcgcgcgcccacatcctcggcctcctcgtccgctccaagttctaccgccgcgtcctctgccgcctcgacgtccgcgaggcaagcctcggcaagcccgtccacggcgtcgccgccgactgcgagtaccacgacgggaggtggccctgctcgcatcctcatgctgataatgaaggcaatgagctgcagagtagatatactctattcttagtatggcataaaaagtgtgcactgaacatattcagttga

SEQ ID NO: 92022 - DNA, 1409 bp, Oryza sativa
  Clone ID: PAT_MRT4530_90542C.1
gcacgaggctcttcctctagctctcttcttgttcttgcccccggctccaggaattcggcacgaggctgccttcttcctcagtaactgctagctgggcaacggattggtgattgatttttttctcttctctagttgcagcttcaattagcaagtatacccatggcagatgatggtaggaattcggacgaactggacaaaataatgcaacagatacaaaacctgcaagtcgagagtagctccagcgctgatgatcgccggagaagacacgaaaggagtgcaatctttcacgtgaatgagaagtacggagcgtatctggacacattcggtgtggttttatccagggctacgagttcgactgcgagagaggagacgcggtggctcatgggctggtgaccgtggagtgcgaccctgacaccggagagatcagccaccgggaggcgacgttcctcgtcctgaggaggggcgagtccgggaggagggacgcggtgaggatgttcgaagcgacctgcaggctcaggggatccgtggcgatcgccaacgccttcctcgtcgccaattgtgatggcctcaagagatgggtcatctgctacgagaagctggctggcattctgagtgactaccctgatgatcatatgctgacaacctttggggccttctcttcaaatgggacagacagcctctcgccgtattggagcaatcagatcaagatgatcattacaacattgtcagacatggggataagaaatgtaagtcacgggggcatgtcaaaccctgaaagttatgctcttaccgaaagtctagacatcaagttgattaacatgggcaaaaatgaaaattcgaggacgtatcagcacgaccttgcagattttggtacatttctgtgccagactccatacatcggtgcctccaaatgcactagttggacgggatttcatttcttaataaattcaaatgcaatgtcacaacggtacttatgggctgacatagttaaggggcatccactttttcttgatccgccatcaaaacttagatgttacgtgaatctgtttgagtggtcagaattgatccaaatatcagagaaaacggctttttgtgatgcatgttacaaattaatgcctgatctcacacaaaaaacactttggggttggataagttgttgcccagcttctgtcaagatttatttgaatcaagcttataaaggaattagcatctatgaagatatcatcacttttgtaaagaacatgatacttcatggaagacaggaactcatgaatgcaaatggggggcgatggtcagatgcacatttctgccacaaaatagagcaactttttccagggttcatgagtgtggcctacgcactttcaaaggctacaaggagtgacttgaataagttgctgggaagggcttga

SEQ ID NO: 92023 - DNA, 129 bp, Oryza sativa
  Clone ID: PAT_MRT4530_90543C.1
atggctagtcccctacggtgtctacggatactgtcaggagagatctcgccggacacggattcgaggaggaagactattctattgtcgactacgggatggttttatggcctccaagtcgacaacagatag

SEQ ID NO: 92024 - DNA, 193 bp, Oryza sativa
  Clone ID: PAT_MRT4530_90544C.1
gcagctaaattacctactaaagggaatagcttcggcgcgccaaaacacgggctcgagacctggctgacggcttcgggtcagatcttgagttgtagtagcagattattcacatgataactttgaagtgccgaagaggagaaaggttccctgtgaactggcacttgcatcatgtctgagccgatccgtaagggac

SEQ ID NO: 92025 - DNA, 1162 bp, Oryza sativa
  Clone ID: PAT_MRT4530_90545C.1
ttcgttttttttttttttttttttttgaagaaaaaaaaacatttgtatgtagtaacttgtatttaataaggaagtacattatatatacctttctgggcgatcaacctcccatgcactgatgcacaaatatatcccggactcaactacaacactttttctttctttttgctaatctccaagaccaagacgcctatatatgccgctgcgagaaatattgataaaaacatacgcactgcatgctctccccattctccccatgaccagtgtacatacagacaccatgtacgctagtacacacgtatacgtacatgaaaaggcagagtgtgcgcagtacatgcagtacgtgtcgttgtagccttgcacgctcgcctgcagccagaagcagcctacaaacctagcgcggccggccggcgcggcacgtgtgcgtccacgccatcgatcagttttctttgatggtggcagccaggtcgaggcagttgctgacgaggcggttgacgtggcgctgcgccccgggtatgggcgacgtgaggtccgggaactcgtcgaaggcttccccgcagtcggtggagaaggtggaggcggacgacagctcggtcatcaggtcgtcgtggctgccgccgctcttgatcgtgtcgcgcgccttctgcagcgcgtcggccagcgacgagtaggcgcccttgcacgtgtcgagcgtcgacgacatgctcgtgccttcggccttcaccgcgcgcgacttcatcacgtcggccagccgcttctccgccatcatggccttggactccgccacccgcaacgccgcgtccagcagctgctgcggcgtcatcacccccggcagcgtcgtcagcgtgccgcacagcgccttgtagtgcacctcttggcatatggcggcattgccgccgagcccgatcaggcgacggctgggcttggcggcggttctgatgacgacgtggtacgggccggtgtggacaggacgggcatcgacgacgccggagcttgtggacgccgccaagacgacggcggacaggatcagggcggcgaggtgtcggaacattggtcgtcggtcgtggaatgaaaaaggataatacgtgatccaaataagagagatgtagaaagtagctaccgaaaagaaaaatacaaaaaacaagttcctttggtgtctaaa

SEQ ID NO: 92026 - DNA, 840 bp, Oryza sativa
  Clone ID: PAT_MRT4530_90546C.1
atggcggaggaggtcagcgacaacaacggtagaggggtctctctgcctccctcgtggatctgcggttggctggcctcaagaggggcgaatcctacagcggtggtgctaggggaggcggatccagtggtggtgggtgggaggcttggcggcggtggacgagctagccctaccatacgcgaaaacccctttcgggccgtctgtaaaaaccctttcagtactagtgtctgttctcgtttgaagaggccgccatattttgttaccaaagcatacattggactggtggcccacattgccacatccactgccgccaccgacaacgccgtcgcaagccagtgccgcagatgggagggtgatctcgggccgccgccgtccttcctcccgccagatctggcggagggagagcgcctccagccggccactgctcctcccgccgaacgccgccgccgccccacgctgctacagcggaggggacggcgctgtcgggccgccgccgcccttcctcctgtcggatctggaggagggagggcgcctccgggcagccgccgctcctcctgccgcacgccgacgacgccgacacacgttgctgatgacaccgacaccgacaccgctgctcctcccgccgctcttcctgccgccgggagaggagaaagagaggacgaagagaagagaagaggagtagtgggcgaagtggtgaagttggatgagctcgtgcagactgatgaggaacttgtcaaattggccactaaccctcttgctgcacaacatgccctcttgctgcgcgatacacccttgtctcctcacttaatttcctatctaattggcccgccgttggcgcgttag

SEQ ID NO: 92027 - DNA, 2463 bp, Oryza sativa
  Clone ID: PAT_MRT4530_90547C.1
atgtcgtcctccgccagtccgtccgtggcgccatcggccgaatacgtagagcacttgtccaatctggtcgtgatccttgtcacatgagcaccactattttcttggtccgatcggcaatcttgatcccactgagttcatcatcgccaaaaccaataggatcccttttagattggccaatccaaatctaggccactgaaagaataccctcaaatcttggccttctcttgagaaaacttctcctgagaaaagttgtgctgtgtggtataagcgcgtatcggctagcaagcaggtccattgggatgaaccaggaatcggccaagcgcttgctcttactttggcaaattcggctaaggatgaacccctgatggcctctgccgcttatttttggtccaataccctcaatgcttttctgttaaaccaagggccgatgaccccaactctgatcgacatcactatgattaccggattagatgtaatttcatcggctaaccccatgagcttgaacaacaagaaccagtttgactttaggaccaaaagcatagggggctggtctggctatgtagcaacatacatgggcaagggatctgtcacccctcgagaacacactacctttctcatgatgtggctcgagaagtttctcttttatggatcgagctatggtccgactaccaactggcaattcttagccgaagcccttgaaactaagaggcaacttcctttgggcaaaatcctcctcgactatctgtatcagatgttgagtaatgcatcggccaagatagccaccggttcagtagtgggtgcgggttgtgaattggccacccctgacagaagctgaattcccgaggctggaacccactacagtttctatgaaggcttccagagagatgcttgagtttggttcccttatgaggactcagtgaattttgatcacccggcagacttcaggtttgaggatatcaactctgaaaagtataaaaaatccacagaagtcttctcggctgccattagtccatgcattcttcctattggcatccaccaagggagaaatatacacgtgtcctatgagttctatcatccgatgagctcagctaggcaatttggaatgggacagatgccaattagcttattctttgccgataaaatccaatgcagaggggagatctcatccacactaatgatggatcggctgctcaatatcccaggaccctctctgggtagcattgataacatagagttggcaaggtttaggagcagaaactttgacagatggtggggtgaatggaagcaacatatattccattagccggcctctacgtacatgacagttctgtttcctgatgttgtccctcagacaacataatctccccctcctcgcaagagtaacagtggaagggacatagaatatgctctaggacttttaccaaatggaggcaggaagagaaagaccaaggcaccggcagttgatccatcagctctggttcacaaaaagaaagccaagaagcataaacccaagctagccgacgacttgcctgccttagatccatccatcgagcaagctctggatgaagaagaaattgaggaagacgtcgatcaagcggcagccgaactgagcgatgaaggagaaaaaacaccattagcttcacccaagcaaactcctccaactcctgctgccccgactcacttctcaaggaaaaagaagactgctgtgaggaagaaatcgacagcaacaacacttaaaccagctccaccacaaatgtcaattgaccgtaccccatcggctacaggaagtcatcatgttgaagaagaggaacaaccagccgctcctgccatcctaaccttagccgatctattctcctttgacatcaaagattactttgataaagaagtagaagaagaatccacaagcaaggctctagcccctctggatgaaaatgtcaagaaaacactcgaagatatatcccttcggctagagtcatcattagacaacttggtggccgactgcggttccatccgggcacggtttgctgaaatccaagccttaatcccggatgatctggcaaataccattactccagctgtgtcactcgagcaacatcaattcaagctggagaaggctaagcaacggattgccgatcagcaggtgcgaaaagatattgaagccactatccaagccaatcggcaactttcgaacatagatcggcttgaagcccacaagattgatcttatagctcaacttgaagaatgcaatgccgaattagatcatgaaaagcaaaagctagccaatcttccaagtgctgttgaagaacagagtctagattgagatcggctatcaaaaatgtggctgacatgaccaagtccctcaaagtcatctctggaaccgacgcccaagacatccaagccatcgaagaagtagatcaaattagacaacgggctgtgttggctatccagcgttacttgtctgga

SEQ ID NO: 92028 - DNA, 1722 bp, Oryza sativa
  Clone ID: PAT_MRT4530_90548C.1
cccacgcgtccgcccacgcgtccggaatgcgcgcaacctcgcgcgccacgccgcccgtgtaaatctattggtgggattttcccttcggttccccaagaggcggaaggaagattggccggataagccggaggccacggaggggcggtgacgagcagagcggccacggcggccggaatgaagggcggcggcggtggcggcaaggaggccgtcaccgcctccatcctccggttcctcctcctgctccttctccccctcaccgccctctatttcttctacacgctgcacctcctcctcgcctccgccgcctcgtcatcctcctcctcctgcccacctgacgctgcctcctcctcctcctccgtgcgcttgtcgaccaatggcaccagcgcgggtgctgctgcggtgacggtggcggcagggaagaaggcccccgccgcggcctccacggagacgacgctgcagcatgtcgtgttcggcatcgcggcgtcgtcgcggttctgggacaagcggaaggagtacatcaaggtgtggtggcggccccgcggcgccatgcgtgggtacgtgtggctggaccgcgaggtgcgcgagtccaacatgtccacggcgcggacggggctcccggccatcaggatctcgtcggacacctcgggcttcccctacacgcaccgccgcggccaccgctccgccatccgcatctcccggatcgtctcggagaccttccgcctcggcctccccggcgtgcggtggttcgtgatgggcgacgacgacaccgtcttcttcccggacaacctcctcaccgtcctcaacaagttcgaccaccgccagccatactacatcggctccctctccgagagccacctgcagaatatctacttctcctacgggatggcgtacggcggcggcggcttcgccattagccggccgctcgcggaggcgctcgcgcggatgcaggacgggtgcatacgccggtaccccgcgctgtatggtagcgacgaccggatccaggcgtgcatggcggagctgggcgtgccgctcaccaagcacccgggtttccaccagtacgacgtgtacggcgacctcctcggcctcctcgccgcccacccggtggcgccgatcgtgacgctgcaccacctcgacgtcgtgcagcccctgttcccgaacgccaagtcgcgccccgccgcggtgcgtaggctgttcgacgggccgatcgagctggacccggcggggataatgcagcagtccatctgctacgacggcggcaaccgatggacggtgtcagtggcgtgggggttcgccgtgctggtgtccaggggagtaatgtcgccgcgggagatggagatgccggcgcggacgttcttgaactggtaccgccgtgccgactacacggcgtacgcgttcaacacgaggcccctggcgcgaagcccgtgccagaagccggcggtgtactacctctcatcggcgcggcgcgcggccgccctgcgcggcggggacaccacggtgacgcggtatgagcggtggcgccgcgccaacgagacgcggcccgcgtgccggtggaatatcgcggatccggacgcgcatctcgatcacatcgtcgtgctcaagaacgcccgaccccgggctatgggacagggtattcttctctgccaatccatcttcagctgcgacagtctagcagatcatcttctgtcgcaacaaaaaaattcgtcttctgttgcttactgctag

SEQ ID NO: 92029 - DNA, 491 bp, Oryza sativa
  unsure (1)..(491): unsure at all n locations
  Clone ID: PAT_MRT4530_90549C.1
agcttgcaagaggttgctataagggcaagccactggcctgcacgccattctatgcttcgcaagaggaacgttctcaaattcgtcaaggactccagtattctcagacctggctattacattgccattgatccacgcactaaatnggtcatccttgggattcgtgggactcacactgtttatgacctagttaccgatttgattgctctaagcgataagaaggtatcacctaaaggtttctcgacacactttggaacatatgaggccgcccgttggtaccttcgccatgagttgggacttatcagaaagtgtttggaaaagcataaggattacaagttgcgcctggtagggcactcccttggaggtgcttcagccgcgttgcttgctataatgctaaggaagaagtcaaaggaagagcttggatttagtcctgacgttatatcagctgttggatatggaaccccgccttgtgtctcaagagaaattgctcaaag

SEQ ID NO: 92030 - DNA, 624 bp, Oryza sativa
  Clone ID: PAT_MRT4530_9054C.1
atgacgtgtggtgaccggagaccggaggtggcgacaacgcacccactccccagcgaaggaggtggcggatccggcaccgtcgtgcccgcatccggtacttccgtagctagatctagtgctaggggtgggcgttcgtcattgaaaactcagcaccgaatttcatccgaaaaaactcaggaccggcaaattcggtctcagttttttcagtctcagtctcggtctgaccgaaatcactggagaagttcaccggctcagcggcaagcactggtgaaggccacgccgctgctcgccaggtgcgccgcggacaacggcgctagtcggggccgcggtggaggcggcctagctggaggcagcgccgatgtggacggcggcactcgtcagggccgcggcggccagctggaggcggcgcgaggcggacggcggcgatcatcggggctgcggcggaggcgggatggctggaggtggcgcgaggtggacggcggctctcgtcgggccgtggcggaggcggatggcggtgctcgtcggggccacaacggaggtgggctggccggaggcggcgccgacgctgtggatgcccgcgacgcgacacgcgatggggatggatcggaggtagaggcagcatga

SEQ ID NO: 92031 - DNA, 493 bp, Oryza sativa
  Clone ID: PAT_MRT4530_90550C.1
atggccatgccaaaggtgattgaggagtcaatcacaaaggcgccgctgctctgcggtgctgatcggcgtgggagcacggcgaggagaacgcacgaggaggagaaggtcgagccggcgagggcggcggcccgcaccgacggcgacggcggcgggtgtaggcgagggcggtggcccgcggcgacggcgacggcgatgacggcgcgtggtgggcgtaggtgacggcaaccgccccccgcgcggatccggcggcagcggccaccccccgcgcggatccggtggtgcaacggcggcggcgtccgcccccgcgtggatccggcggcggcggccgccccccgcgcggatccggcggcgtgacggcggtgacggcgacgggaaggcgacggcgactacgggaagacgacgggaaggcggcagatctggcgacggcaacggcgacgacgacgggaaggcggcggatctggccatggcgacggcgacgacgacgggaaggcgg

SEQ ID NO: 92032 - DNA, 317 bp, Oryza sativa
  Clone ID: PAT_MRT4530_90551C.1
tgtgttttttaatttgttggggtttaacttttttaattttttttataaattatttaattagatccgaaaccatacaaatacatatgaagcactggtgattcccacaaatataacacacaatacaaatacacccataaactgccttataaaccaccaaattgattcaaaagaataaacggccctgagggatcctcccaccgagactgactaagcctaactacagacaattggatccactggacccacattattcaaaaacagatggatatgactgcctcagtcctgaacaaccgaagggaacttgcaaataaggatat

SEQ ID NO: 92033 - DNA, 589 bp, Oryza sativa
  Clone ID: PAT_MRT4530_90552C.1
acccccccccccccccccaaccccccccccccccccccccccccccccccccccgcccccagaagaacactggttttgtttagggttgggttttttttggttttttttttgaatagttaaaaaaaaaataggggtaggttaataaaaaaaaaaagaaaatagggggccgagaagaaaaaagaaaaaggaaaaaaaggggggaaaagggggagggggaaaaaaaacgaaaagcgcattaagggtttaaactactaaaacactgggaaaaaaaggggaaaaaaggaaaagggggtgtgtggacttgggaggagaaggaaccggggaggaatggaagccttgggcgattcgagaactggcgggttgcaggcgagcaagaaactaattaaaggctggggcttggggaaggggggggccggggaatggggggcaagggtgaaagggactaagggtacttgcccatacgggggaatgaaggacaagtgagtgggtgctaaggaagaagggttgggaagttgtctggggggtgggaagatactcactgcccaaggcatgttattgaatggtaacagaaaggcaaaggcacgctata

SEQ ID NO: 92034 - DNA, 758 bp, Oryza sativa
  Clone ID: PAT_MRT4530_90553C.1
atggactccccagcgacccccgtgggcttatctccgccacttctcagtctggtgctccgcaatgaatcatgttatacaaaaggaaaaggaggattattgcgtcagcgagctagggtttcggtggtccgggtgcacggcaacggttcacgggaacggacggccgagatcaaccctatccaaaacggacggccgagatcgatcggtccacgaccggctcacgggagacggggacgatgacgtcagcgacgacgtcacctccggcggcggctcggcggctctacggcacaaacgaagggcaccaagacgtagatcacgacgcggcgaactcaccgatgaccaaaacgtcggcggaagaccaacggacggcggcggcgtcgaggaaaaggcggcggagaagatcgggtcgacggcggtgacggtgctccggcggtcttcggcggcggcgaaggggcggacgaggacggcgacgaccttgcgaacccgatggcggtcttcccgagcaacggcgacgaccggaacggcggcgaaggacggctggagcggcggcggcaacggcggctcgaggctactcggcgctagggcgctacaagcgacgagaggcgaaggcgagggtggcggcgggtagaggagagctcgggggtccttttaaaggggctaggaggcggcgacggaggcctacggctgccggcgacgagaaggaaaggttggggaaaaatgaatccgaatcaaactcgaatccgcctatttccaaaggaaat

SEQ ID NO: 92035 - DNA, 950 bp, Oryza sativa
  Clone ID: PAT_MRT4530_90554C.1
tcacgggaacggacggccgagatcgatccatccaaaacggacggccgagatcgatcggtccacgaccggctcacgggagagggcgacgatgacgtcggcgatgacgtcagcaccggcggcggctcgggcggcgcaagctcgccggcgaacgacggcgcgacgacgcaaacggaggacaccaacgggtagagggcgactcggcgaactcaccggtgaccaaaacaacggcggaaaagcaatggacggcgccggcgacgaggaagaagcggcgacggtcttcaggtcgacggtgacggcggtgctccggcggtcttcggcggcggcgaagcggcggacgaggacggcggcgacttggcgaccacgatgacgaccttcccgagcgacagcgacgactggaacggcggcggcgcacagctggagcgacggcggcgacggcggcacaaggctacacggggctagggctctatcggcaacgagaggcgaaggcgagggtggcgacgggtagcggcgacaccggggtccttttataggggcaaggaggcggcggcgaaggcccatggcggccggcgacgagatggaaaggtcgggctcggagagagaaaagccgatccgattcgacttcgaatcaaacactttccaagccaatttagccgatatttccaaaggggaaaaggtagaggagatcccgaggatcatttctcctctatcaattcggccggagaaggaaaggatcgaccggatttggaaggaaacggcggcggcgcggcgctagggtttcgggcggcggcggccggaggtagacgacgggtccgacaggtgggacccacctgtcagcgacagcggcactcgcgcgggcggctgcggctgcggactgggcctactgggccgagggagagagagagaggggggtttttgggccgactttcggcccaaagccaaaagagactttt

SEQ ID NO: 92036 - DNA, 2565 bp, Oryza sativa
  Clone ID: PAT_MRT4530_90555C.1
atgtcaacgcccggcgcaaacccgccctccccaacacctgcgaggatccacgaagaagcaaacccagccacagaggcagttgccgaaggtcatcccgcgacaacggcggtccaacaacccgaaattcatgaattgccgcaggaacaacatacgtcgatgtcgggcgagacaagtgcaagtaggtctagtagaaatccgcggtcacaaaatatatggccgaccacagtgcaagttataagagaggttgacgctagtggtaggcccacggcgcccaggactgtcattggaagatggtctaactgctgcgggatagcggcacgtgagaacttcgggatcctccataaagatatcgggaagatcacagaagccgagaaagagcgagcttggacggcaatggagaaatggttcacatttccagccgaagcaaaggataggctcaagcggaaggcattacaaaagatgggcaaagcttggaagaattggaagtcgaagctcttcaccgagtatgtcaacccgcccggcaatcatacgccgttcgatgaataccctcaaataaccgaagcggtgtgggaggaattctgctctctcaagaccacccaagagtttagggaatccagcgaggcacatcgcgtactgcaacagcggaatgagcacccgcatcggctgggcaccgcagggtacatcggcaaggaggcaatatgggcccaagaagatgcagccgctgcagcagcgaatgtacctgccccgttttcagacatccctgaacaaagagctcgcaactgggcgcgggcaaggggtaaggtcaacccggacggctctgtcacatttgagaacaaaagtgatgccgtcgtctatcaggaactgttgggcttggttgctgaacaagcttcacaaagcgaggttgagtccgcgccgaagaggcgcgaagatgacatcctcacaaaggcgctcggaaccaaagaacatcctggccgaactcggggaattggtagcgatgtgccctggaagcatggactccctcagtacagctcccaatacaggaaacggaaagtctccaaggaagagagggacgctcgtttgaagccgaacttaaggttgagggtggaagaaagcgttaacaaggtgctcgccgacatgaatataccccgagtcacaacacctgctgtgcaaccaactcctcgtatacaacacgacgcgagtccgtcacagcataggagtagttgtgcatccacagaggtgccggcccctggtctcccgatcgcaccactagctgcagtggaccacatcgagggcgcagcacagtgtgtcctactagcgagagtccacccaactttcgctcctgaagtcgctgagggcatggctttcaagccctcggttacagacaaggtccacggcgcagacctgctagctgggacacctggtcaggctatccgctgcccgtgccccccaaatgatgaaatcatgactttgggcgatgcgcgcaagacattcatacaatggcccaaagaagacatagttgtgaagatgactcctcgtccaagtcgaccgacggagcttacacctcccaagtctaagctatcaattgaggctccccgtggaccggcattgtcagtacctcattctcccggtggagctgatatggacttggcagatatagctcaaagcttggctccaataaagaccacaagaaaggccgatagctccccaccacttgtcaagggccagaagcgtgaacgaggcaaggggaaggtcggggagttggcgccggagccaaaaaggggcaaggctgcgacgtcgatgccggtaagcaaatcggggaaggtcgtgagggcgccagcccaatttgagctaggcatgccattggtggaggacaatgtgttagctgtgatgggtattgcttgccgagagctacataagcaatacatggagctaagcaatgccaagcggaaaatgagggagtcatccatagttggacatcacgaccaccagccgttcctatcgtcgcctgcctatataactataggctttgatgacctcttcgaccttttcaggatccggaagttggacactggtcttctaaaatgctactccttgttgtgttggatcgagagtcgtcgccatggtaatcaggttgggttccttgatccatccatggtgaatgaggttaatttacaacagagctccactgaggtggttgactatgtcaaccggtgtttatgggcccatcaagacaaggagtacatcatgtgcgcacacaaccaagagcgacattggattctcctagtcatcgtacctaagtggagtagggttacctaccttaactccaataagtccaaagattatgatttcagtgaaatcaccaaggccttaaatatggcttggggtccatatgtggaaaagggtggtaggcacaaggagggcaagaatgaactttatcatgacaccaagtttgcatgcgcacaacagatcggagaccaatgtggtttccacgtgtgccacaacatgtcaacacttctaagagaggtgaaagatttcgaccctgaggttgttgctaatggcgaataa

SEQ ID NO: 92037 - DNA, 696 bp, Oryza sativa
  Clone ID: PAT_MRT4530_90556C.1
atggtgaacactcgcgccagtggaagtggaaacaataacaatgaagggaacccaactcttgctcaagttctggctcaacagactcagttaatgaatatgatgatacagcaaatgcagaaccagctcaaccaagggaacaacaatgctccaccgccgcagaacaagttaactgattttcttcgtgtgaagccacctaccttttctagcactaccaacccagtggaagcagaatggtgggatcaattccggatgaacagagcagaaggacaaccaatcacttgggcggacttcacggaagcattcaagaagacacacatacctacaggagttgtttctttgaagaagcgtgagttcagggcattgaagcaaaaggatcaaaccgtggcagagtatcttcatgagttcaatcgtctggcacgttatgctccagaagatgtgcgtactgacgaggaaaggcaggagaagttcttggaaggcttaaaggatgaactgtcagttacgttgatctctcatgactatgctgattttcagcagttggttgacaaagcaactcgacttgaagacaagaagaacaggatggataaccgtaaaaggaaaatgactgtattccaggaggcacaaggtagtagccagaggcagcgtatcaagccactccaaattggtgaatcttcttccgctggtcaaggacagtcttaa

SEQ ID NO: 92038 - DNA, 3637 bp, Oryza sativa
  Clone ID: PAT_MRT4530_90557C.1
atggccacctccctctcctccgccccgacccagctccgcccctccccgtccccctcccaccaccgcctcctccaccgctcctccctcctccccttcccccgccgccaccaccaccgccgccgccgctgcggcgccctctccatcgcccgcgcctccgcctccgccaaggatggcgtcacggtgcggcgcttcccggcggcgccgaccgagggcgggaggctggccggggtgaggaagatcatgatcctcggcgccggccccatcgtgatcgggcaggcgtgcgagttcgactactccgggacgcaggcgtgcaaggcgctcgccgaggagggctacgaggtggtgctcgtcaactccaacccggccaccatcatgaccgaccccgacctcgcccaccgcacctacatcggccccatgacgccgcccctcgtcgagcgcatcatcgccgccgagcgccccgacgcgctgctcccaaccatgggcggccagaccgctctcaacctcgccgtctcgctcgccgactcgggcgccctcgaccgccttggcgtccgcctcatcggcgcctccctcccggccatccgcgccgcagaggaccgccagctcttcaagcaggccatggaccgcatcggcctcaagacgccgccctccggcatcggcaccacgctcgaggagtgcatctccatcgccgaggacatcggggagttcccgctcattgttcgcccggccttcacgcttggtggcaccgggggaggcatcgcgtacaatcgggccgagttcgaggacatttgccgtgccgggctggcggcgtcgcacacgcagcaggtgcttgtggagaagtcgctgctcgggtggaaggagtacgagctggaggtgatgcgcgatatggctgacaatgtggtcatcatttgttcaattgagaatattgatccaatgggcgtgcatacgggggattccatcacggtcgcgcccgcgcagacgctcaccgacaaggagtaccagaggctcagggactactccgtggcgatcatccgggagattggcgtggagtgtgggggttccaatgtgcagttcgcggtgaaccctgccgatggggaggtgatggtgattgagatgaaccccagggtgtcgaggtcatcagctcttgcatcaaaggcgacagggtttccgattgccaagatggctgcaaagctctctgtaggttatactttggaccagattccaaatgatattacgaagaagactcctgctagctttgagccttccattgactacgtggtcactaagattccacggtttgcatttgaaaagttccctgggtctgagccagtattaaccacacagatgaagtctgttggtgaggccatggctctaggacggaccttccaggagtctttccagaaggctgtccgttcattggagactggctttgcaggatggggttgtgcacccatcaaggaacttgactgggactgggaaaagttaaaatatagtttacgggtacctaacccagatcggattcatgctatttatgcagcttttaagaaaggcatgaggattcaggatatccatgaaattagctttattgataaatggttccttactgagctcaaggagctagtggatgttgagcaattccttatttcaaggggcctagatcagctgtcaaaagatgacttctatcaagtgaagcggaggggttttagtgacacgcagattgcctttgcgacatcttcttcagaaactgatgtgagattaaggcgcctggcactagaagttgctccaacatacaagcgggttgatacttgtgcggctgagtttgaagccaatacaccttacatgtattcctcgtatgagtatgaatgtgagtctgttccaactaataagaaaaaggtgttgattttgggtggcgggcccaatcggataggccagggtattgagtttgattattgttgttgccatgcttcatttgcccttcgagaggctggatatgaaactataatgatgaactccaacccagagacagtttcaactgactatgataccagtgaccgtttgtactttgagccattaacggttgaggatgtaaccaatgttattgatttggaacgcccagatggtataattgtgcagtttggagggcaaactcctctcaagcttgcgcttcctatacaacagtatctggaggacaagaagctggtgtctgcctcaggcactggacttgtgaagatatgggggacctcaccagattctattgatgctgctgaggacagaaaaagatttaatgctatacttgaagagcttggaattgagcagcctaaaggagggattgcaagaagtgaatcggatgccttgtctattgcctcagaagttggttaccctgttgttgtccggccttcgtatgttcttggtggccgagctatggagattgtgtacaatgatgagaaacttattaaatacctcgcaactgcagtgcaagtagatccggagcggcctgtcttggtggataaatatctaattgatgcaattgaaattgatgttgatgcattggctgactcagttggtaatgttgtgattggtggaattatggagcatattgagcaggctggtatccattctggtgattctgcctgttcccttcccactagaacagtctctgcaaagtgtttagatataatccgttcatggaccacaaagctggcaaagcgtctcaacgtctgtgggctcatgaactgccagtatgctattactacttctggtgaggtattccttcttgaggcaaatccccgagcctcacgcactgtcccttttgtctcgaaagcaattggacatccattggcaaaatatgcatctctggtcatgtctggtgtgaccttgccagagcttgggtacactcaggaagttgttcctaagcatgtttctgtcaaggaggcagttcttccatttgagaaattccagggctgcgacattcttctgggaccagagatgcgcagcaccggagaggtgatgggcattgactatgagttttctggtgcattcgcaaaggctcagattgccgctggacagaagctcccattaaatggaactgtcttccttagtctaaatgacctgacgaaacgccaccttgctgaaatcggacgagggttcagggaacttgggttcaacatcattgccacatctggaacagccaaagtacttcagctggagggcatcccagtggagccagttctgaaaatacatgaggggcggccaaatgccagggacatgcttaagaatggtcagatacaggtgatggtgataactagctcaggtgatgctcttgactccaaagatggcctccagctccgcagattggccctggcctacaaggtcccgataattactaccgtggatggggcgcgtgctaccatcgatgctatcaaaagcttgaagaacaaatcaattgagactctcgcattgcaagattacttccagactacagatgcatcccagaacttgcaagcagcgcaaagtgcctcttagggtcatgcccttctattgcatttttctaatgctattggaagtatcaactatagacttctgttctgtaggattttgtttaccttctgcatgcgcaagcataaacatgttgactgcaagt

SEQ ID NO: 92039 - DNA, 414 bp, Oryza sativa
  Clone ID: PAT_MRT4530_90558C.1
atgacctcatcaatggtggccggctcggaaggcaagcttgcgggagctagagcggccggctgcggatttggaaggcatgctcacgtagaggacgacgagacgaacccaacggtactcaccctcgaaccaaacgacgaacgacgacggccggcgacgaagtgggtggcggcggcggcttcggtcgacggcggcgacggggctccggtgaccggcgacagcggggagagagcggccgagcttcaccttgctcctgcgaacacaacggtggtgacggcgaccggcggcgacgacggaggcggcggcgcggcgcagatggagctcggccggcgacgacggcggggtggagcacgtggcggcggcgctacgaggcacgggagaccacgggagagggggcaaacgaaagaggaggactag

SEQ ID NO: 92040 - DNA, 448 bp, Oryza sativa
  Clone ID: PAT_MRT4530_90559C.1
tttttttttttttttacttatttattgtttaacatttttagggaattctgttttagggggagttcacataacttgaactcgacatcgttggggggcaaaacttttggcaaaacgggggagagaagaggaaaacagaaaacgcaaaacagacaccgaacaggggaatggtggtaccaagcgaagcagagggacatagcaacgagctagacagcacgaagacatggatcactgagacacgccataaccaagaccggccaacaccttcgcctactaggaaggctgacagactaccggggcgtgctataagactgccatgcgcaaattcgtccacggggcccaaatgcgccgatacaagagggaaaatcattttgccaaggcggcggaaggggcggcccaccggggggggggggggaatttccgactggcccccaaaggtgttctttctatc

SEQ ID NO: 92041 - DNA, 497 bp, Oryza sativa
  Clone ID: PAT_MRT4530_9055C.1
cgcaaagcttttttttttctttttggatatatggacttcctgaaagctatggatgcatacaaggaaacgatggtagataaggaggaaggaagcaaattaacattggagcatacaaagtaaagcgtttccactgtacagctcatgtgaagctattggttggtatgcttctctttcttccttgcacttttgtctccctcatatgaagaaagaaatctaagctacctttcttctgtacagaaaccaaacatatcccgactcctgaatgatgtataggttcggacgttcattggtgtcgtcgacatgtttacaggtggccttctggctgcaaaagctttataccaacagtgcttgagcttttgttgaccatcgtatttcaagttatccttgggttaacttcaatcgtggaacaacgttcattgcttgcagctcctggaataaaagcttgcaagcatacggcatcctcattttggcatatttctccatttttgacatgaaca

SEQ ID NO: 92042 - DNA, 219 bp, Oryza sativa
  Clone ID: PAT_MRT4530_90560C.1
atggcggccaagcaacgcatccaagctttggacgacaatgtgagatcacacctcctcagcacagatcccttccagttccttgccaagttgcaactgatgaatcaagcaacagcgttggagcgagaacggaacagcgacagaagcgccaccatcggaggaatcagctcgtcagaactcggaagtgttccaaggacaacagatatggatgtcagaagataa

SEQ ID NO: 92043 - DNA, 760 bp, Oryza sativa
  Clone ID: PAT_MRT4530_90561C.1
ccaattccacgcggtaggagtccgatctcttcaatccaaggctataaataggaccccctagtcgtcctctttcgtttgcccccttccccgagttctctcgtgctccgtagcctcgccgccgccgccggccaaccgccagccgcgccgcgccgccgcatccgccgtcgccgtcgccctccgtcgccgccattaggtgcgcacgggagtgaggaagcccggccgccacttccccgtcgtcgccgtgcgccgtagcccgccgccgccgtaagtccgagccgccgccgccgcgcctcttgtcgccggccgtcgtcggtcgccgtttgtcgcttcggtaagcaccattgggttcgcgtcgtcgtcctgtacgtgtaggtgtcctccaaaaccccggccgaccaccctagcgccggcgaggtcgttggctttatcttttgtatagcatgattcattatagtgtgccagactgtgaagcggcgagaagtccgtgggggtcgctggggagtccattgcctctggttttgagggggagattatgatcaggaacggtgcactgtggtgagttgtgttgtgcgaggggtattgtcacagttcctttctaaggtaccgtggtggtactgaggcgcatggtgacatgttgtgggattgtgtcttgtgggtacagtggtacacctctgatcagagtaaaactattcgaatagccgtgcccgcggttatgggtgagttgaacaatatttttcgtgattagtctcacactattcat

SEQ ID NO: 92044 - DNA, 767 bp, Oryza sativa
  Clone ID: PAT_MRT4530_90562C.1
atggactccccagcgacccccgtgggcttatctccgccacttctcagtctggtgctctgcaatgaaccatgctatacaaaaggaaaagaaggattattgcgtcagcggctagggtttcggtggaccgggcgcacggcggcggttcacggaaacgaacggccgagatcaaccctatccaaaacggacggctgagatcgatctgtccacgaccggctcacgggagagggcgacgatgacgtcagcgacgacgtcacctccggcggcggctcggcggctctacggcacaaacggagggcaccaagacgtagagggcgacgcggcgaactcaccggtgaccaaaacaacggcggaggagcaacggacggcgccggcgacgaggaagaagcggcggcggagatcgggtcgacggtgacggcggtgctccggcggtcttcggcggcggcgaagcggcggacgaggacggcggcgacttggcgaccacgacggcgatctccccgagcgacgacgacgactggaacagcggcggcgcacggctggagcgacggcgacgacggcggcgcgaggcggcacggcgctagggcgcttcggacgatgagaggcgaaggcgagagaggcagcgggtagaggagacaccggggatccttttaaaggggctaggaggcggcggcggaggcccacggcgaccggcggcgggatggaaaggtcgggcccggagagagagaagtcgatccgaatcgaactcaaatccaccggtttccaaagaaaat

SEQ ID NO: 92045 - DNA, 738 bp, Oryza sativa
  unsure (1)..(738): unsure at all n locations
  Clone ID: PAT_MRT4530_90563C.1
ccggccgggatcttccaactcaggcagagcccgagccagccgtgccgtgcacagtgccaccgcctcctccttccaaatctcgcctccccgttgctccttttttcaatttagttgaggggaaatattcctcttatcctcctctatctttaccccaaaaatctgagctaatcgttgagtatcttatccgaatcgaactcgttttcgagtttatctccaaaaccgagtttttgatttcccggatcgatttcttgcgagaggagtccgatttcttcaatccaaggctataaataggaccccctagtcctcctctttcgtttgccccctctcccgtgatctcccgtgcctcgtagcgccgccgccacgtgctccaccccgccatcgtcgccggccgagctccatccgcgtcgcgccgccgcctccgtcgtcgccgccggtcgccgtcaccaccattaggtgcgcgggagggtggagaagcccggccgcctgacccccgaagccgccgaccaccgcagctccggcgccaccgtcgaccgaagccgcgccgccgctagacctcatcgccggccgtcgtcgttcgtcgtttggttcgagggtgagtaccgttaggttcgtctcgtcgtcctctacgtgtacatgtccttcanagtcgcagccgaccatccaatctccggcgaggtcgccatcttggtccggccattgatgaggtatcatgacgtcatcatcgtttttctttttcca

SEQ ID NO: 92046 - DNA, 441 bp, Oryza sativa
  Clone ID: PAT_MRT4530_90564C.1
atggcttcagctctactcccacaggcagctcaactggggtataagccaaacgtcttctccttctggatccttttacttcaactaaggttgattgattattgcaagaatgagcatatgacatacttaacaagccacacagcaaatatgcaagtgcacaaggataccaaaggatggcataatataggctcatttgcaaaagcagcatttagcaaacatttaagagtagtaaaacagtagagtaattaatcatcaatattaatcaatcactgaacagtacatccatgctgcacaggcccaaccatcctgaacaaccatacccggctgtacagatctatctccaaaccaggaatgtaccattccaaaccaggagctaatcaaattattaccaattatagcatctgttattatgatgagaggtgtgaaactaatcacgaaagacat

SEQ ID NO: 92047 - DNA, 435 bp, Oryza sativa
  Clone ID: PAT_MRT4530_90565C.1
cccacgcgtccggttctagatcgcgagcggccgctcgcgatctagaactacccacgcgtgcggctggcgttcccgggttgaggaacgttgccaccaaccccgtttccaaatatacaaagttgagttgcataattgcattagtttcccctaatgcaagtgtttacgttatattgtaatatgtcatagatctttatttcaagaagcaaaaaagtacattggatccagtactaataggtgtcttttctttataataattgaaaacttggccctgggacaatttaaattcttagatagggcaaggttctttactacacttcaactcttaatggtttcaaattttggcaactagatccttactttactggagactttcgattttattggaattgcttggttttctgggataagcgaggaggtgctgttttgaggggcatt

SEQ ID NO: 92048 - DNA, 711 bp, Oryza sativa
  Clone ID: PAT_MRT4530_90566C.1
gtgagtagtgtgggactaatcacgaaaaacattgttaaacccacccataaccgcaagcacggctattcgaatagttttactctagccagagatgtaccactgtacccacaagacacaactccacaacatgtcaccatgcgcctcagtaccaccacagtaccttggaaaggaactgtgacaatatttctcacacaacacaactcaccacagtgcactgttcctggatcataatctccccctcaaaaccagaggcaatggactccccagcgacccccacggacttctcgccgcttctcagtctggcaccccataatgaatcatgctatacaaaagcactggacgacgcgaccaccagcgatagagggctcggccgggctatccgaggacacctacgcgaagaggacgacgacgcgaactcaccggtgcaagaaataacgaagtacggcgtccggtgacgaggaccaatggcagctcggctcggctcgatgtcgacggtggcgctccggcggtctttggcggttgcgaaggggcggacggggtgctcctccaccgtgcgaacccggtggtggcgacggacggcgatggcgacgacgctggcggcggcgcggcgcggctggagcggcgtcggcggcggcggcgctagggctacgcggcggtggcactacgggcgacggcgaggctcgggacttgaggcaaatggaagaggatgac

SEQ ID NO: 92049 - DNA, 521 bp, Oryza sativa
  Clone ID: PAT_MRT4530_90567C.1
atggcataccacgtcagcacatggagcgggttgaagcctattgcgccgccaccgctactcccgtctctcgcgtgcgatcccccgccgccaccgccccaccgcgccgccgcccgcctcgccggctggccggagggcgtcaacggcaccggcgaggcccccccggccagcctcctccccctccccctcccccctccttcctcctcgagccgtctgcggcgagatgccctcgccaccaacgccggcccaccgccatcctccagccccgcggctccgacgcctcgccgcccatcgccgggctgccgcctcacccagtcatccctctaagcccggcgaactcccccttcttccccctccccctcccacccttcccaccccaccccactccaggaccctaattcgtcggctcttcgccggagtttgggttgtcgccggcgccggagaagaagaggagttcgtcggagttggagaagaagcagctggagtacgaatcgtgaagcacatccagtgaaccaaaatttgca

SEQ ID NO: 92050 - DNA, 294 bp, Oryza sativa
  Clone ID: PAT_MRT4530_90568C.1
gaaaaagggattattgcgtcagcgggctagggtttggtggaccgggcgcacgggcggcggttcacacgaacggacggccgagattgatccgatccaaatcggacggccgagatcgatcgggtccacggcggttcacggcggacggccttgatgacgccagcaatgacgtcaccgacggcggcggcggctcggcgaggcagacggctcgggcggcgcacgctcaccggcgaacggcggcaccacggcaccaacagagggcaccagcacgtagaggacaacacggcgaacacaccg

SEQ ID NO: 92051 - DNA, 157 bp, Oryza sativa
  Clone ID: PAT_MRT4530_90569C.1
aatgcaaatgacctgagactgcttgacaacattggatgctggacctgagagatctgacaagactgacacaccgcagatgcgtgcatgcgcaagcatacctggtgacaggctgtgggagttacttgagtgcactggggaaggtctggtgcgcgaaatg

SEQ ID NO: 92052 - DNA, 6349 bp, Oryza sativa
  Clone ID: PAT_MRT4530_9056C.1
aaagaaatttgctggcagcagcagttccactcggcctcgtcttgctccatctcctgcggttcgtcctatggcacctcagccacctcggcagatgtatgtgcctccacgtccgcaaactcagttagttcgtcaagttcctcgcgcagttcaagctgcgggagatgcatctcgtaatgccaatgtcacctgctacaattgcggcaagaggggcattattctcctagctgtccttatccgaagactccagctccaacttttggaaggggccggctcaaccatgtcactgcagaagaagcaaccgacgcacctggtgtcgtacttggtacatttcttgtgcactccattcccttaacagttctttttgattccggtgcaactcattcattcatgtcaaccttgaaagcaaaacaacttgacttgaaaacagaatttcttagcgatgctatgcgcatccaatctcctggatccaccatggtcaccaaacttctatgcaaaggtgtagaacttataatagacggggtaaagtttaaagctaacctcatattattagacaccttgggcctaaatgtcattcttgggatggattggttaactaaacatgagggaaccattgattgtgctcatagaactgtaactcttcgtagcaccgatggtcaatttgttaggtttacctttgaacaaacctccacttcaaatcaaccctctatacaatctctctctataccggagttaaaatcagtacccatcgtgaatgaatattccgatgtgtttcctgacgaattaccagggatgcctccagatcgtgacattgaatttgtgatagatttaatccctgggacagcacctatagccaaaaggccatatcgaatgacttctgaaaatttgatggaattaaagaagcaactcaatgagcaattggctaaaggtttcattcgtcctagttcatctccctggggctgtccagtgttgtttgtaccaaagaaagatggaaccatgcgaatgtgcgtggattatcgacctctgaatgaagtcaccatcaaaaataaatatcctcttcctaggatcgatgatttatttgatcagttaaccggaactcgtgtcttctcaaaaattgatcttagattgggatattttcagcttaaaatcagaccggaggacattcctaaaaccgcattcacaactcgctacggtttatttgaatacaccgtagtctcttttggattaaccattgctcctgcttctttcatgaatatgatgaataaaatcttcatggaatatcttgataaatttgtggtggtattcattgatgatatactcatctactccaagagtgaagaggaacatgcgcaacatttacgtatggtactcgataaactccgtgagcatcaactttatgccaaattctcaaaatgtgaattttggttaaaagaagttgaatttcttggtcatgtactttctgaaggtggtattgctgtgaatccaagaaatgtacagaacgtacttaattggaagcaaccacaaaatgttcctgaaattagaagttttcttggactagctggttactaccgtcgtttcattgaaaatttctccaaaattgctaggcccttgactcaacttcttaaaaaagaaaataaattcatatggtctgaggcatgtgaaacaagttttcatgaacttaaaagaaggctcacaacagccccagtgctagtgatgcctgatgttcttaaaccttttaatgtttactgcgatgcctcacatcatggtctcggttgtgtactgatgcaagaaggaaaagtagtggcttatgcttctcgtcagttacgaccacacgagatcaattatccaactcatgacttagagctagcagctgtggtgcatgctctaaagatttggcgccattatttggtcagtaatcggtgcgaaatctttaccgatcataagagtttgaaatatttctttacccaaccagatctgaacctaaggcaaagaagatggttagaactcattaaagattatgatctcggtattcattatcatcccggtaaagcaaatgtagtagctgatgctttaagccggaagctacatcaccttgccgttattgagacaataaatcagccatcgttgtcctctgaatttcagaaattgaatttgggattggtagaggatggttatgttgctgcactagcattacaacctactctctattctcaaattaaagctgctcagtccattgatgaggaagtagctgaaattatgaaagaaatcaattcaaagccacaatctatatacactcttaattctgatggtatggttatgcttggcaaacgaatctttgttcccaataatcaacaccttcgagaaaccattcttgatgaagcacatcaaacacctttgtctatccatccgggttgcactaagatgtaccaggatattcgcactcaatattggtggcctagcctgaggcgtgacatagcagcatatgttgcaatttgcgatgtgtgccaacgtgtcaaagctgaacatcaacgacccgctgggctactccaacctttgcaagtacctgaatggaaatttgatgaagttggaatggattttattaccggtcttcctaaaacacccaatcatgtgacttatggtggagccaagctagcagagttatatttgactcatattgtaaggcttcatggcgtaccaaaagtcatagtatccgatcgaggaacacaatttacatccagattttggaaaaatttacatgaacttctcggaaccaaattgttcctcagcaccgcctttcatccacaaacaggaggtcaagtggaaagaacaaaccaaatacttgaagacatgctccgagcttgtgtgcttgaacataacactaactgggagaaatgtctatcttttgctgaattctcctacaacaatagctttcaatcaagtatccaaatgtcaccatttgaagctctttatgggagaaattgtaggactcctctttattggtccgaagtaggagaaagacaattctttggacctgctatcattaatgaagctgaaaagaatgtcactcttattcgggaccgattaaaagaagctcaaactcgtcaaaagagctactctgatcgtcgtcgacgagagctaagttttgatgttggtgaccatgtctatcttaaagtatcacccatgagaggcactcaacgattccaaattcatggcaagcttgctccacgatatattgggccataccaaataatatctaagcgtggacaagtagcctatcaattggaattgccatttcagttgtctaatatacatgatgtattccatgtttctcaacttaagaaatgtcttcgaactccgattgagcacacctcacttgaagacattaatctaaagccaaatctctcctatcaagaatacccaattctgaactcgcatgccacgcgtgtgagcacgcgtcgagcacgggagagggcgagctcctcctgtccatctccgccggcgaccatacttaacccgaccggccgttttgaggaagaagcactgcctcacatcctgtggcttatgctgcaacatctaggttatgatcatccaccggagtatcatttcttttctcatgagcggagttcatctctcgagcatatatggctgagctgtgtatacagggactttggacccatgaaccacccctttactttcaagcttgtggttgggatgcaccctcagcaatgcaggaagctgcattacaagcaattgtgtattaccgacattataggccagggttggacgggttctttcatttctttccagctcgcgcaaaccaatcctccgctaattactatccaggtcttgagggaaacatgagagagattgacactccaggactattcttagctggcctggttcgtgctatggatagatatctcgcaaaaactatggtggtcatgcttgatagacgaatagaaccactcgggcatcaaggacattttgataatgccatcatttatgggaatcatgaactccagcctcttacagagactttgcctcctcccatgggtatttatcataatacagctcatgtacttttgtactttgagtgcaggatgacacatactcactctatggctgctcttactgatgatgccaatggtgagggagcgagtcagcctcgcactggcccatattcttctggacgtgccgggggtagtcgccgtgctgccactgcagaacagcatgatgatgaaccatctcttgctcaactcctggctaatcagaaccgactttttgaaaggatggtagcgaactctgaaaacatgggggctgccatggcacagcaggccaatcaagcaccctccaagctagcagatgttcaacgaacacatccacctcatttctcctctgcggctgatccactcgcagcagatgattggcttcgtgatattgaaatcaagctgaacctttgccggtgtgatcctgtagagaaggctacctttgctgcttactacctgcaaggtgcagcagctgcttggtgggagacatacaagactctcattcctcctgacgagccaatcacttggactgttttccgtgagggattcaggtctgctcacatccctgctggtctcatggaaatcaaaaagaaagaatttcttaacttgaagcaaggaaacatgcccttcatggagttcatggaacgcttcaattatctgggtagatatgccgcttctgacttgaacactgaaacaaagaaggttgagctatgcagagatcgtcttgcacctgaactcaagcatgctcttgctgctcatgaaatcaccagcatgaagacactggttgataaagcccttcgtgttgaatcaagtgaaaaggaagtggttgaagaccgtaagcgtaagtgggctgcaattcctcgcgcagttcaagctgcgggagatgcatctcgtaatgccaatgtcacctgctacaattgcggcaagaaggggcattattctcctagctgtccttatccgaagactggaaaatccggaccgtactcacagggagcaccgcagcagcctcgtggggccggctcaaccatgtcactgcagaagaagcaaccgacgcacctggtgtcgtacttggtacatttcttgtgcactccattcccttaacagttctttttgattccggtgcaactcattcattcatgtcaaccttgaaagcaaaacaacttgacttgaaaacagaatttcttagcgatgctatgcgcatccaatctcctggatccaccatggtcaccaaacttctatgcaaaggtgtagaacttataatagacggggtaaagtttaaagctaacctcatattattagacaccttgggcctaaatgtcattcttgggatggattggttaactaaacatgagggaaccattgattgtgctcatagaactgtaactcttcgtagcaccgatggtcaatttgttaggtttacctttgaacaaacctccacttcaaatcaaccctctatacaatctctctctataccggagttaaaatcagtacccatcgtgaatgaatattccgatgtgtttcctgacgaattaccagggatgcctccagatcgtgacattgaatttgtgatagatttaatccctgggacagcacctatagccaaaaggccatatcgaatgacttctgaaaatttgatggaattaaagaagcaactcaatgagcaattggctaaaggtttcattcgtcctagttcatctccctggggctgtccagtgttgtttgtaccaaagaaagatggaaccatgcgaatgtgcgtggattatcgacctctgaatgaagtcaccatcaaaaataaatatcctcttcctaggatcgatgatttatttgatcagttaaataaatttgtggtggtattcattgatgatatactcatctactccaagagtgaagaggaacatgcgcaacatttacgtatggtactcgataaactccgtgagcatcaactttatgccaaattctcaaaatgtgaattttggttaaaagaagttgaatttcttggtcatgtactttctgaaggtggtattgctgtgaatccaagaaatgtacagaacgtacttaattggaagcaaccacaaaatgttcctgaaattagaagttttcttggactagctggttactaccgtcgtttcattgaaaatttctccaaaattgctaggcccttgactcaacttcttaaaaaagaaaataaattcatatggtctgaggcatgtgaaacaagttttcatgaacttaaaagaaggctcacaacagccccagtgctagtgatgcctgatgttcttaaaccttttaatgtttactgcgatgcc

SEQ ID NO: 92053 - DNA, 789 bp, Oryza sativa
  Clone ID: PAT_MRT4530_90570C.1
atggagagggcagcaggaggtctgaacagcaaagccgtggagcgccacgtcgggcaggtgatgatcagtggtccgacaacggcaagtaacatccccgtgcccctttgtgaaaaaggggcggccgaacgtgatgacgctatcaacgctcttcctctgactgacatcatcgggccgctcacggaccatcaggtggcggcgtctctaaaagagaaggtcgccaaggaggcgtctgatgctgctgcggccactactagtggtggcaatgttctgacaaaggggaggaagttctcctctgtaagcggacatcgtcgcaagacgtcgaccccctcggagctccaagtcgaaatggggcgcctcctcgaagctggtgctcacggcatcggccgcgagattgcacaggcgaggtcggaagcagcgttggcgaacgagcgtgctgaccggctggtgcgcgagttggcggaagctcgtgaagacctcacgaagatgagggaattggtggccggcaacgagcgacaacggcaggggcttgaggaccgcatgtcggaactcgggaacaacctgtcagaaatccggggctcgttgcgggtcacctacacaggcctgcaccagcttgctggggagtgcggcatcaagtctaccatcccagtgaatcctgacgaattctcgctgacatcctcccttgcggaactggcgacggcgatgggggagatcccctccaagcatgcggccaggatcgcggaggagacgtcgaacgggatctacaccggggcgtgtcatgtcctcgcatga

SEQ ID NO: 92054 - DNA, 1974 bp, Oryza sativa
  Clone ID: PAT_MRT4530_90571C.1
atgacgtcttcaaaattgcttcccatcaagccttctgtctgggatcggtcagaccggccacgcaatgtcggtcagaccaccctgtctgcccggtcagactggccatccagagccggtcagaccaccggtaccaccggtcagaccggccgtgcaatgctggttacaaagggaacaatggaactcgatgaagccggcgagatcgtaatcaagttgattcgactagatccccggcgatttggctcctgcaggctccgacttctagcccccaacttctgcttaaatgaacccgtgcgaccaataacgacttctgatgtcgaggctgatgtcgttctcggtgtgggaaccgtagagacaggacatgatcgagaacaccgtgtgaagcccaacggtcacgacaacttaggtcctttcaccggcgatcttcgatcagcgatggacctcggcaagtcatcttccaccagcgcatcgctgaaggagcttcaggaagacggcgcccttcctggtcgtggagccatggagagggaagcaggaggtactaatccccagcccgtcttagagtcttttcttgatctttttcgcttctactacgaactgcgttggatggagtccaacagggtatctggctccgttgggttccgacttcgagatggcctgaaaacaaccgggcaagatttcgtcttggaccgccaagcctcctttgacccctttcttcagtcgtttatcgacttcatcaacgatctccgagtgcggggcttgtcggggtatgaagtcgttgcggacttcgttggtttgagcagtagggccgtggagcgccaagtcgggcagttaatgatcagtggaccgacaacggcgagtgacgtccccgtgcccctttgtgaaaagggggcgacggagcgtgatgccgctattaacgctcttcctctgactgacatcatcgggccgctcgcggaccatcaggtggcggcgtctctaaaagagaaggttgtcaaggaggcgtctgatgctgctgcggccactactagtggtggcaatgctccgacaaaggggaggaagttctcctctgtaagcggacatcgtcgcaaagcgccgaccccctcggctttggacgcatctcccccgcctccgcgacgacaacgtcttgtgacgatcggcgagaaggaagcgtgggcaaaggccgcgcagagcaagtcaggaggggcttccagcgcctcgcctaccgcggcctcgacggatgtcgtactcgcagctgggagccgggaggtgacgcctagtggcccagtcagcgatcccgcggcaggtcgtggtccgcccactgctatcctcgcctgggaggagctccaagtcgaaatggggcgcctcctagaagctggtgcccgcagcattggccacgaggttgcagaggcaaggtcagaagcggcgttggcgaacgcgcgtgctgaccggttggtgcgcgagttggcggaagctcatgaagacctcacgaagatgagggaactgggctcgttgcgggtcacctacactggcctgcaccagcttgccggggagtgcggcatcaagtctaccatcccggtgaatcctgacgaattttcgctgacctcctcccttgcggtactattgacggcgatgacggagatcccctccaagcatgcggccagggtcgcagaggagacatcgaacgggatctacactggggcgtgttatgtccttgcagatgctgatgacgagggtgtccagcagcgcgggcaacctgagtcgccagtgatccctccgattcttgcgtttgagggacacgcgttgctggacgatgtgaatgacattgtacccgggagagcggggacggcgacgacttcctttggttggtggccttttcatccttttcgctcctccgacttgatcaaccgtgttctcgagagagaagagcagcctaacgtagtcgtttccatgtcgaacagacctcgagaacgcacttgctga

SEQ ID NO: 92055 - DNA, 759 bp, Oryza sativa
  Clone ID: PAT_MRT4530_90572C.1
atggacctcggcaagtcatcttccaccagcgcatcgctgaaggagcttcaggaagacggcgcccttcctggtcgtggagccatggagagggaagcaggaggtttgagcagtagggccgtggagcgccaagtcgggcagttaatgatcagtggaccgacaacggcgagtgacgtccccgtgcccctttgtgaaaagggggcgacggagcgtgatgccgctattaacgctcttcctctgactgacatcatcgggccgctcgcggaccatcaggtggcggcgtctctaaaagagaaggttgtcaaggaggcgtctgatgctgctgcggccactactagtggtggcaatgctccgacaaaggggaggaagttctcctctgtaagcggacatcgtcgcaaagcgccgaccccctcggctttggacgcatctcccccgcctccgcgacgacaacgtcttgtgacgatcggcgagaaggaagcgtgggcaaaggccgcgcagagcaagtcaggaggggcttccagcgcctcgcctaccgcggcctcgacggatgtcgtactcgcagctgggagccgggaggtgacgcctagtggcccagtcagcgatcccgcggcaggtcgtggtccgcccactgctatcctcgcctgggaggagctccaagtcgaaatggggcgcctcctagaagctggtgcccgcagcattggccacgaggttgcagaggcaagctcagaagcggcgttggcgaacgcgcgtgctgaccggttg

SEQ ID NO: 92056 - DNA, 316 bp, Oryza sativa
  Clone ID: PAT_MRT4530_90573C.1
atttttgcatgcatggatcgctagctaagagcgcgtgtacctattggggtgagtgccaactagagctccattgacttggagatcatggaggccgatgttgctcacagtgcggggcacaccgactcagttgatccatttggcgtggcggctaggccagaacacgcgatgagatgcatccatcggaagacaggagggagggcaggcccgggaggcgacagcgggatcctggccttccccgcacaacgcccacaggcgccggaactgcacaggatacggacagggcacgctcgatccttggaatctgtactctactacc

SEQ ID NO: 92057 - DNA, 465 bp, Oryza sativa
  Clone ID: PAT_MRT4530_90574C.1
ctagtttgcccttgtatgttgacctcgggaatttttgtcctttgtagagatgctgatgacgagggtgtccagcagcgcgggcaacctgagtcgccagtgatccctccgattcttgcgtttgagggacacgcgttgctggacgatgtgaatgacattgtacccgggagagcggggacggcgacgacttcctttggttggtggccttttcatccttttcgctcctccgacttgatcaaccgtgttctcgagagagaagagcagcctaacgtagtcgtttccatgtcgaacagacctcgagaacgcacttgctgaccgagatcgtcgtatccaatattggaagacgaaatttgaagtggtggaactcgagagagccatgttggaagtaaagaaggagcaggccgtggaaacactttgaggtcgtgaggtgtggttcaactcatacctgaagagttgctgcacgtccat

SEQ ID NO: 92058 - DNA, 457 bp, Oryza sativa
  unsure (1)..(457): unsure at all n locations
  Clone ID: PAT_MRT4530_90575C.1
ggggattttctcatggtggagaatgtatcctgtgcatgtcgcttccagaatgcattatgtgaacttgtgaatataccaatgggccttccgtgcatccttaacttttttgtcgcggttccgtctttagtgatcagaagttagatagaagacttagattttgcaaaagtcaaacaatgatttctgcagagttgctaaaatttgttccaccttgttcaaactattaatttcaatttatatacttagctgttaagttgttccttgctgatgagaaaccattttattccttctgtcaactccgtattaataaccatatatatgtgttattaccatattgctttcatgctttgtttgtttatgcatctagcaaacaaatcaaaagtggcttaaataaataaagactggtgagtataagacaaataagttggtttgtaatattccttgngatttgggcatacta

SEQ ID NO: 92059 - DNA, 219 bp, Oryza sativa
  Clone ID: PAT_MRT4530_90576C.1
atgacctcatggtggtcttggcgcagcctcttctcctcattgggcaatggagggggcagcaatgccgatgcttcctccggatccggcacctcctcccccccacccccgccacagcccgcgccccgcaagaatcgtccttcaccccgaaaggccatgcccaaggcgtccaaggcgaaggcgcagctgcacctcggcgacgtcgagccaaagaaaagctag

SEQ ID NO: 92060 - DNA, 333 bp, Oryza sativa
  Clone ID: PAT_MRT4530_90577C.1
atgacctcatggtggtcttggcgcagcctcttctcctcattgggcaatggagggggcagcaatgccgatgcttcctccggatccggcacctcctcccccccacccccggtcccttatcctcaacaagcagcagcaggggcgcctcgctggcgaagcaattgcacgatgaagccttgggaggaagggccggccgaagcccaagccaaaccctcgcaatcgcagccacagcccgcgccccgcaagaatcgtccttcaccccgaaaggccatgcccaaggcgtccaaggcgaaggcgcagctgcacctcggcgacgtcgagccaaagaaaagctag

SEQ ID NO: 92061 - DNA, 1185 bp, Oryza sativa
  Clone ID: PAT_MRT4530_90578C.1
atgacacctgcacggggaatcggatggtggctcaacggagaaggaggatttggcggtggtgctcagcggccggagttggggaagacggagtcgatctcccagcttgctccaccgatcttggtggttcttggggcgttttgcagagggggacgaggagaccttcacggcgtagtggcttggctcggggcggacaggttcagccgggcgacgatgacgctgaagcggcggcgaagaccggtgcgcgcctcctcctcgccggcgcctgcggaccccatgccgacgcctgcggcctcctccgcgttggcgcctgcaacctcctctccgcgccccgcgtcaccgccgacacctccttggaccaccgcgccgccaccgggcattgcggcgccaccgctgtggatcaccttctcgcagcagtcgccgaccaagagaggaacaagaaagaacaataaggaggcttcaccatctaacacaaatggagaagaagagacaattcagcgggagaaggctgcgccgcaggagtactgcgacaccaacctgctgccattcccccagcataaccggaagccatccatcgatgagcaattcgctcgctttattgaagcgatccaaaagatccacatcaacatacctattttggatgcgatgcaagtacccatgtacggttgctatctaaaggacattctcaacaacaagcgaccgatgccaaccgcggaagtgctagccgattcctcggtccgttacccagcaggtattgctgaggatgccctagtaaaaattcgggatttcttcatcctggtggactttgtggtcttagacataaactctgacaaggagacgccgctcatcttggggcgtccgttcttaagcatcgtggaagccaacattgatgtaggagctggagaaatccggctcgacctcaatggaaaggaggagaagttcgaattccgaccgagaatagaacaatgctctatggtgaagatcaagtacgggccaaatccacaaaatatccgagaggtcgaagttaaaccctcaaagacggatagcctcattgcattcatgaagaacttcctggagaaggaagcgatgggcaggcaccgtccagatccaaaggtggcatcaagaacgcaagctaaaaagcctgtgacaccagccgccaagaagccacaggatgcacccaagacgtaa

SEQ ID NO: 92062 - DNA, 480 bp, Oryza sativa
  Clone ID: PAT_MRT4530_90579C.1
atggcgaagctggaggagccggtcgggccgaggatggggaacagcgcaccgacgacgaggatcacgacgacgacgacgaccagaccgagggctgggcggtggccggccgccgaccaccacatcagcgccacacagtttggccacaagttcgacttggagattgtggcactctatgcaaattgccggctgccgatgatggagcacaccatggaggacggagctcccctcgtcctcgtcctcgtcctcagcctcggcgtcaccgtcgtccccgctgcagcctgccacttttgcgcctccgggatggacgccggcagcccacatcgacctgcaacaggtatggccgtcaacatccacctcggctcctcctcgagacttctcgcgctctctggctcgggcctcgcccctcacctcgtcgtgcctcctcaacgccatcctccaccgttgcagccctccatcccccacgtctcctcctctttttga

SEQ ID NO: 92063 - DNA, 1333 bp, Oryza sativa
  Clone ID: PAT_MRT4530_9057C.1
atggctgctcttactgatgatgccaatggtgagggagcgagtcagcctcgcactggcccatattcttctggacgtgccgggggtagtcgccgtgctgccactgcagaacagcatgatgatgaaccatctcttgctcaactcctggctaatcagaaccgactttttgaaaggatggtagcgaactctgaaaacatgggggctgccatggcacagcaggccaatcaagcaccctccaagctagcagatgttcaacgaacacatccacctcatttctcctctgcggctgatccactcgcagcagatgattggcttcgtgatattgaaatcaagctgaacctttgccggtgtgatcctgtagagaaggctacctttgctgcttactacctgcaaggtgcagcagctgcttggtgggagacatacaagactctcattcctcctgacgagccaatcacttggactgttttccgtgagggattcaggtctgctcacatccctgctggtctcatggaaatcaaaaagaaagaatttcttaacttgaagcaaggaaacatgcccttcatggagttcatggaacgcttcaattatctgggtagatatgccgcttctgacttgaacactgaaacaaagaaggttgagctatgcagagatcgtcttgcacctgaactcaagcatgctcttgctgctcatgaaatcaccagcatgaagacactggttgcccttcgtgttgaatcaagtgaaaaggaagtggttgaagaccgtaagcgtaagtgggctgcaaagaaatttgctggcagcagcagttccactcggcctcgtcttgctccatctcctgcggttcgtcctatggcacctcagccacctcggcagatgtatgtgcctccacgtccgcaaactcagttagttcgtcaagttcctcgcgcagttcaagctgcgggagatgcatctcgtaatgccaatgtcacctgctacaattgcggcaagaaggggcattattctcctagctgtccttatccgaagactggaacatccggaccgtactcgcagggagcaccgcagcagcctcgtggtcctcctcaagttcagcctggacagcgtggagctcctgctgttcccaagccagctccaacttttggaaggggccggctcaaccatgtcactgcagaagaagcaaccgacgcacctggtgtcgtacttgggatgcctccagatcgtgacattgaatttgtgatagatttaatccctgggacagcacctatagccaaaaggccatatcgaatgacttctgaaaatttgatggaattaaagaagaaactcaatgagcaattggctaaag

SEQ ID NO: 92064 - DNA, 472 bp, Oryza sativa
  Clone ID: PAT_MRT4530_90580C.1
gtggctacggcgacggcggcgtgtagccggagctcaccggaaagcggcggagcgcgggctcgagcggggagcacgggagacggcatgaggagctcggggaggagggggaaacggaagaggagagcacgagggtgctttttataggctcggggaggagaaatcgtggccggacgtggctgttttgaagcggcaacggccgtttttttgtgcgacatcgtgggtgaagtgggggctcgatttggcgccgaaaattggggagaagtgggggatttggtggaggaggtggaggggaaccgattttatgcggtttgggggcgagggcgcgagcgggagggcgccagatttggcgggacgtgggcggcaaccgccggccatggcggcttcggcctgggaagccgaagtagctaacgctaatcttatattacgactttcattaccaaaggtaggatggactgtgtccaagtgtttccaa

SEQ ID NO: 92065 - DNA, 161 bp, Oryza sativa
  Clone ID: PAT_MRT4530_90581C.1
gggctgaggaattcggcacgagggtgagcaaacatggatggcgatggtattttcatgctattacgtcctttgtcccctgagggggtctactcgatagtatgtcatggttgacgattgcctaatacttatagattgctgatttccagtacagagtcgatcac

SEQ ID NO: 92066 - DNA, 854 bp, Oryza sativa
  Clone ID: PAT_MRT4530_90582C.1
cccacgcgtccgcccacgcgtccgctgagctgaacaccgcatcagcagcagcaagcagctaatcgcgcacgtacgcacaccgcgacccggggcgagatggcgcagtcgatgctggtgtcgggagccaatggcacggtggccgccgcgagcaccagcaggctgcagcccgtgcggccgacgccgttctcgcggcagcttcgtcgacgaccagccggtgacgggcctcgacaaggccgtcatcgccccgggcaagggcttccgctccgcgctgggcctcagcgagggcggcccgctgttcggcttcaccaaggccaacgagctgttcgtcggccggctcgcgcagctcggcatcgccttctccatcatcggcgagatcatcaccggcaagggcgccctcgcgcagctcaacatcgagaccggcgtccccatcaacgagatcgagccgctcgtcctcttcaacgtcgtcttcttcttcatcgccgccatcaaccccggcaccggcaagttcgtcagcgacgacgacgaagagtagaattacgaggatcgatcgatctaccgaggtttcgccgccattgttgtgcttgcgcatcattgagactttctttcaagtgtatatgtactgtgtacgtgtaggtgtaaagacgtaccttgtttaattagttgttaattaatgcccatggagaaaattaacgtgagatttagctacttgctgcggtaaatctaattggagatgcctctccaattagtcttaaccagagacatccaattagtcttaaccagagacacccatactttaggagttttggttgctattaatccattgagcatctatgcttgaaataaaattatctctt

SEQ ID NO: 92067 - DNA, 2112 bp, Oryza sativa
  Clone ID: PAT_MRT4530_90583C.1
atggatcgcctccggcgtcggaaccctaaaagtgtcccttccggctcctcttctatgaagcccccacggcccccgcgtggcccgtccttccaggccccagcggtgccgaggccccttccagagccctcctccccaggtgggaggccaaggaaaagggttcgatttgctagtgaagccagcagtcatcagatatgcgtgagacaggatgctaacacaggcaaaagaccccaagaatcgcataatgtaatgccaggcagaaagctccctgcccagaagagcactttctcttctgaggagacccccgctacaccttgtaagaatgaagaaatctaccatgagcaagtcaatgcgaaagcttcccattctgaacatggcaataatgatacacctcagttgaacccacatgattacttgactgttcatgttcacacacccataactcaggtttcgtttgaagccgtaggaatttcaagaaacactgaattttttgctgacatcctgcaaaggctaggcgccaacagcatgataaaaaagcaccgtaaggagtccatgagaatgatgaaggtctgtggccatactcctactggcaccggatgccattttgaaaatatgcttgattacaggattagtgactttgatttgcgaactaaactgagaacagaaaaagagtcatcctcttatgcaacccaggaatcccgtcaattcatggctttgccatggggatacaatcagggcccttcaggttctcttgattggaaaattgatttacctcacaggggcaatgaagcacgtgagagcatggcattaccatgggtgcacactgtgggtcttccaaattctggttggaaaagagacactgctcacaaccaggtttctaatttgttgctagaggatgtccaaccacactccgaaggcaaactggcttcagctactgagttgaactgtaatgttgaaacaaggccatgcacttatcatggatgggtgcctatgttgtcacaaggattctctggatccattccaaatagatttttcaccccctgtcagattgaggagacacatgtggtaccatatgaaatatcaaacacttaccggcgacctgacccttgtaaccccttggaacaatgttttcctccagttggattggataggcaaggccaaaaggaggcaagattctctcataattatggtgctgaacttctagagcaatttacttctagttcagttggactggaaaggcaagaccaacatgggtcagaattagttaattttgacactggacttctatctagctttgatcagttatatgcaaaatgttctgcttcaagctttttggacactagaaatggaattctcaatcacagtgattttagctatatctccaacttagctgcaagtgagagcaacgatattgtgtcgaatgcaagcatgagttgtctgaattccatattttcaacttcagagcatccttttcaattgggctcaaagaggttgcatgaaacttctttggctggactggaggagaaatattcgaaggaggcagagatttttgataattctgatattgggcctatacaggaattggatcagttacctgcgaaattcacttatacaagcttttcaaactacatatctggaactctggatcatcaacatcatctcagatatatgcctccaaaggacagcagtagtactttgttcatggatgcaaacggtgcttgtttgaactctctatcgccatacacagatcatccttgtaagcaagatggaaaaggcttgtgtgactcttccacagaattgtggtcatcagtgcatcatctccaatctcatgatgatgattttggagctgtacttggcttcatgtcagaggaaaatacttacaatgatttggaagatcactgcagcttcatgttagctgaaggaaacccaaatgacttgtgcacttctgatcttccattatttggtttgtgctctgctatggatggcatcagggaggcttctgtgcgtcttgatggcctaaggtttattctgttagcagatggtacttcgatgaatgttgagggtacagaagtgtatgtagatgatgttatgagatattcacagatgttcacctga

SEQ ID NO: 92068 - DNA, 1544 bp, Oryza sativa
  Clone ID: PAT_MRT4530_90584C.1
agctgcggagtcctctagtagtgggcgccctttttttttttttttggaaggttcacccatcatgcattcaggagtaccgattgattgttgtgtcctgaatttttgctagtatatgcatataagtagatactactccactacagtacagaggagaggattgacattgactagctagtccacttaaccgtctccttactactatcagaagaagctaatttaattaagtggagtaaaagcaaaatgaggggtgggctgggctcattggctaaatctcacgttaattttctccatgggcattaattaacaactaattaaacaaggtacgtctttacacctacacgtacacagtacatatacacttgaaagaaagtctcaatgatgcgcaagcacaacaatggcggcgaaacctcggtagatcgatcgatcctcgtaattctactcttcgtcgtcgtcgctgacgaacttgccggtgccggggttgatggcggcgatgaagaagaagacgacgttgaagaggacgagcggctcgatctcgttgatggggacgccggtctcgatgttgagctgcgcgagggcgcccttgccggtgatgatctcgccgatgatggagaaggcgatgccgagctgcgcgagccggccgacgaacagctcgttggccttggtgaagccgaacagcgggccgccctcgctgaggcccagcgcggagcggaagcccttgcccggggcgatgacggccttgtcgaggcccgtcaccggctggtcgtcgacgaagctgccgcggtcgccgagcgcgccgatggcgccgaggagggtgaagaggatgaagaagaggaggaggggctccgcctcgtagatcgggatccccgtctccaggttcagctgcgccaggattcccttcccggtgatggcctcacccaggatcgacgcggcaaacccgagcatggcgacacgcccgacgaacagctcgttctccttggtgaaaccgatcccaccggacgtgccgaagatgccgtcctcggtcttgaactttggcttcggctcagcctttcttgcgggcgcggccttggtcttggacctgccgaacagcgccaccgtcttgacggacaccgcgcgccccagcgacgacgacggctgcgacagcacgagccgcgagaacggcgtcggccgcacgggctgcagcctgctggtgctcgcggcggccaccgtgccattggctcccgacaccagcatcgactgcgccatctcgccccgggtcgcggtgtgcgtacgtgcgcgattagctgcttgctgctgctgatgcggtgttcagctcagccatcctccagctgaaccatcggcgatgaccgaggagcggtgccaaggtcagacactaccatcatcggcatcgccatgctctgctgcagagccattaagcttagatggattcaacaattagctagatggatcgatcaaagcatgcagtcgctaatagcttgcagctgcactagctagctgctaaattactacaaaatacgatatgatcgatctcttgatcttggctaaca

SEQ ID NO: 92069 - DNA, 244 bp, Oryza sativa
  Clone ID: PAT_MRT4530_90585C.1
ggacctggatttgggccaagaatgtggagggataacaccaactatgaggagccaggttttggggggagaagtacttcaggggaaacttcaggagctgccaatgtgaaggttgagttggatcctgatcactgttctggagtgacacgagcatccctcctctgttgtgagcacaagggatgctggattggtttcagatagctgatgatggttcagtctgcagcttgatgtatagtaagaatctgtg

SEQ ID NO: 92070 - DNA, 525 bp, Oryza sativa
  Clone ID: PAT_MRT4530_90586C.1
atgaggagagagaccgcagtgggtcctattccctcctcacattcttggcatgttggtttttggaattggccccgctgtcgtccctttcatagatcctcggtggttgatggctgcggtgttgctggaccatgggacgataactccggtgcttggtgggtcccactccacaccacgctccacgtgatcgtcgcccgcttcccgaccgtctccaagctcgccctcaagtgcgactatcgcgctgagggcgtcaccaaccccacgttcgtgctcctcgtcgaccgcctcgacccgacccttcaacgactcaagctccgctccctccgcctcgtcaccgattacggcgtcgtcgtgctcgctgtcgccgccactagcctccgcaagctctccatcgcctcatgcacctttggtgccaaggggatcgaggtcgtcctccgctcctacctccaactcaaggagctcttcgtcaatgctgcctcccacctccaggacaacggggctgattggagcagcgctgacagcaagtga

SEQ ID NO: 92071 - DNA, 1491 bp, Oryza sativa
  Clone ID: PAT_MRT4530_90588C.1
gtgaaaggtgtgagactaatcacgaaaaacattgctcaacccgcctataaccgcgggcacggctattcgaatagttttactctggccagaggtgtaccacccctcaaaaaccagaggcatggactccccagcgacccccgtgggcttatctccgccacttctcagtctggtgccccgcaatgaaccatgcggctcatgacggacgaccccgatgacgtcggcgatgacgtcacctaccagcggcggcggctcggcggagcggacggctcgggcggcgcacgctcgccggcgaacgacggcgcggcggtgcaaacggagagcaccaagacgtagatcacggcgcgacgaactcaccgatgaccaaaacgacggcggaggagcaaaggacggcgccggcgacgaggaggaagcggcgaagctcttcgggtcgacgacggcgacggcgctccggcggtcttcggcggcggcgaagcggtggacggggacggcgacgacctcgcgaacccgatggtagcgacggcgaccggcggcgacgacggaggcggcggcgcgacgcggctgctgctcccttctactactgttattctcctgagtctggtcctgctgaactggcaccggctgattagcttgctcgatgttaacttcattgctttcattagtctctgatttgatctcaccaccgatattcaactgttgcgattgtccttggccagcggaaaaaggttcaccaatttggagtggcttgatacgctgcctctggctactgccttgtgcctcttggaatacagtcattttccttttacggttatccatcctgttcttcttgtcttcaagtcgaattgctttgtcaaccaactgctgaaaatcagcatagtcatgagagatcaacgtaactgacagttcatcctttaagccttccaagaacttctcctgcctttcctcgtcagtacgcacatcttctggagcataacgtgccagacgattgaactcgtgaagatactctgccacagtttgatccttttgcttcaatgccctgaactcacgcttcttcaaagaaacaactcctgtaggtatgtgtgtcttcttgaatgcttccgtgaagtccgcccaagtgattggttgtccttctgctctgttcatccggaaatgatcccaccattctgatgcaggtccttgcaactgatgtgaagcgaacacgactttctcctgatccgtacactggagcagttccaacttcttctcaacagcgtgtagccaatcacctgcttctactgggttggtagtgctagaaaaggtaggtggcctcacacgaagaaaatcagttaacttgttctgcggcggtggagcattgttgttcccttggttgagctggttctgcatctgctgtatcatcatgttcattaactgagtctgttgagccagaacttgagcaagagttgggttcccttcattgttattgtttccacttccactggcgcgagtgttcaccat

SEQ ID NO: 92072 - DNA, 409 bp, Oryza sativa
  unsure (1)..(409): unsure at all n locations
  Clone ID: PAT_MRT4530_9058C.1
gaaatggcggcactgaagctggtcagatcaggatgaagcagcaaaggcctgccgttggttggccaagaaattctgaaactatcaagtacaccttcaggatcaatatatggtagcatcatccttttgaagcgtcgtctaaaatccttacgtaccaagccctgttagctcagtttttctactgaacatgaacacatttacttgtctatagctagctagtatttgtcgatccggaggttagaaacacaaacaaaaatgatatcgtggtccgaccaaaatgggacggacataccccacaatggcgccgtgtggacccaactgaaacattngggtagttggcgccagctcttttgggctgaaacttctaagttttcaagtgatgaggtatattctattaaaaaaaaaaaaaaaa

SEQ ID NO: 92073 - DNA, 439 bp, Oryza sativa
  Clone ID: PAT_MRT4530_90590C.1
ggaattcaagctccactctcacaggcagctcaactggggtataagccaaacgtcttctccttctggatcctttttcttcaactgaggttgattgattattgcaaggtgagcatatgacatactcagcaagccacacagcaaatatgcaagtgcacaaggataccaaaggatggcataatatcggctcatttgcaaaagcagcatttagcaaaaatttaagagagtaaaacagtggagtaattaatcagaaattttaatcaacactgaacagcacacccatgctgcacaggcccaaccattctgaacaaccatacccggttgtacagatctaatctccaaaccaggaatataccattccaaaccaggagctaaacaaattattaccagttataacatccataattattgtgagaggtgtgggactaatcacgaaaaacat

SEQ ID NO: 92074 - DNA, 185 bp, Oryza sativa
  Clone ID: PAT_MRT4530_90591C.1
gtgtgcctggccgcgcgcgaatatgcatgccaacaaaaggacagcccaagggggataaggtgatggacacacgcggggtggcgagcgagcagaagtgcggcacacgccggcaccctgaccccccgaccccggcccagagccgcacgcgcctcgtgagagagccaatggacgacgctgcagcaact

SEQ ID NO: 92075 - DNA, 443 bp, Oryza sativa
  unsure (1)..(443): unsure at all n locations
  Clone ID: PAT_MRT4530_90592C.1
ttattatttgaggttatagtgcaaattgatgccttaggagtaataaaactcacattctgaactattaatgcgccatctagtattttaattcagtcagctaaaatgtctacagcgaatagcggngtactattgtggcggatatcctacacagggtcctaatgattgtagaagtttatccatcatgtgaatataaacagttgtcaataatactcctgcgatatcatacatatcaagtctgaaatcttaagtaaccacagtaatagttcttcactatagccgatttgttagaataaataaaataaattttaggtctttaattttttatgatgcgaggtctatggtcaaatatatttcttnggggtactaaaacaggaacttcaattccttaaacctaaaacatgnccccataaaattccccatttggggctaggtacttggaccat

SEQ ID NO: 92076 - DNA, 468 bp, Oryza sativa
  Clone ID: PAT_MRT4530_90593C.1
atggactccccagcgacccccgtgggcttatctctgccacttctcagtttggtgctccgcaatgaatcatgttatacaaaagatggcgacctcgccggagattggatggtcggctgcgactttggaggacatgtacacgtagaggacgacgagacgaacccaacggtactcaccctcgaaccaaacgacgaacgacgacggccggcgacgaggtctagcggcggcgcggcttcggtcgacggcggcgacggggctgcggtggtcggcggcttcggggagatagcggccgggcttctccaccctcccgcgcacctaacggtggtgacggagaccggcggcgacgacggaggcggcggcgcgacgcggatggagctcggccggcgacgacggcggggtggagcacgtggcggcggcgctacgaggcacgggagatcacgggagagggggcaaacgaaagaggaggactag

SEQ ID NO: 92077 - DNA, 486 bp, Oryza sativa
  Clone ID: PAT_MRT4530_90594C.1
atggccggcgcgcgcatacagacgcagcactttggcacacaccgcacaccggatgtacagaccaaggcgcatgcaagagctgtaaagacattcaacgctattggcagcggtggctttcctaagcacaacattgaagatggatggcggaaccagtggaggagacgggaagcggtggagacagatgttaaaggtggcccaatgggcaactccggcgcggtggagccgccgcctccaacgtgccatgccaactgcctcacctcacctagattttacagcgacatgtcgtgcaaacaaaaaatgccgcaagtcaatcccgtcgtcaccctccttccgcttgacgcacggcttgctccaataacgataaggcggagggtaggagatggagtggggcggatagggttcggttcaccccctaagatcgcccattcggaggcccatcctatagccctcttgtttggattagagagcaaattgctgaatccatga

SEQ ID NO: 92078 - DNA, 285 bp, Oryza sativa
  Clone ID: PAT_MRT4530_90595C.1
atggcggagcaagaagccctcatcggagacgatcctgtcgaccagtgtaggaatgccgtcgccgcgggcgttcaggaggacacacgcacatggcacgttgccgtcctccttgtcatcctagtacgacagcttgagcaccgtgaagctgtcatggcaggcgataagctccgcatgaattgcactatggtggcggcgcccgtggcatactggtggcagcggcgcccgcgcgtggcatactgcaactgtcgcactgaggtgctgaaacggggttggggatggatttga

SEQ ID NO: 92079 - DNA, 396 bp, Oryza sativa
  Clone ID: PAT_MRT4530_90596C.1
atgacgtcaacaccggcggcggctcggcaatgcatgctcgccggcgaacgacggcgcgacgacgcgaacggaggacaccaacgggtagagggcgacgcggtgaactcaccgatgaccaaaacaacggcgaagagcaacggatggcgccggcgacgaggaagaagcggcgacggtcttcgggtcgacggtgacggcggtgctccggcggtcttcggcggcggcggagcggtggacgaggacggcgacgcgacggcgaccacgatggcgacttccccgagcgacggcgacgactggagcgacggcgaagcacggctggagcggcggcaacgacggcggcggctagggctacgcggaggcggcgctagacgcgacggcgggctaaggcaaaggaattga

SEQ ID NO: 92080 - DNA, 788 bp, Oryza sativa
  Clone ID: PAT_MRT4530_90597C.1
atggactccccagcgacccccgtgggcttatctccgccacttctcagtctggtgctctgcaatgaaccatgctatacaaaagggaaaagaggtttattgcgtcagcggctagggtttgcggtgaaccgggtgcacggcgacggctcacggaaacgaacggccgagatcgatccatccaaaacggacggccgagatcgatcggttcacgacgggtctacgggacagcgacgatgacgtcagcaacgacgtcagcaccggcggcggctcggcaacgcatgctcgccggcgaacggcggctcgacgacgcgaacggagggcaccaacgggtagagggcgacgcggcgaactcaccggtgaccaaaacaacggcggaaaagcaacggacggcgccggcgacgaggaagaaacggcgacggtcttcgggtcgacgacgacggcggtgctccggcggtcttcggcggcggcgaagcggtggacggggacggcgacgacctcgcgaacccgatggtggcgacggcgaccgacgacggctgctgcaacggcagcgcggcgcggctgaaccgatggcaacaacggcgacggctagggctacgcggaggcggcgctagacgcgacggcgggctaaggcaaaggtggcagcagatagaggagagctcgggggtccttttaaaggggcaaggaggcggcggcgaaggcccacggcgaccggcgacgcgaaggaaaggttagggttagaggagagagatgaatccgaatccaactcaaatccaccggtttccaaagaaaat

SEQ ID NO: 92081 - DNA, 2559 bp, Oryza sativa
  Clone ID: PAT_MRT4530_90598C.1
tcactgatgagttaattccagaaaaaaaataaatgctaaatattggctagcctcaggatttgctagccatgccctcaaatggattaaagccataatgtcatcgacctgcacaacctctcttagaagtgttgacatgttgtggcacacgtggaaaccacattggtctccgatctgttgtgcgcatgcaaacttggtgtcatgataaagttcattcttgccctccttgtgctcttggttgtgtgcgcacatgatgtactccttgtcttgatgggcccataaacaccggttgacatagtcaaccacctcagtgaagctctgtcgtaaattaacctcattcaccatggatggatcaaggaacccaacctgattaccatagcgacgactctcgatccaacacaacaaggagtagcattttagaagaccagtgtccaacttccggatcctgaaaaggtcgaagaggtcatcaaagcctatagttatataggcaggcgacgataggaacggctggtggtcgtgatgtccaactatggatgactccctcattttccgcttggcattgcttagctccatgtattgcttatgtagctctcggcaagcaatacccatcacagctaacacattgtcctccaccaatggcatgcctagctcaaattgggctggcgccctcacgaccttccccgatttgctcaccggcatcgacgtcgcagccttgcccctttttggctccggcgccaactcctcgaccttccccttgccgcgttcacgcttctggcccttgacaagtggtggggagctatcggcctttcttgtggtctttattggagccaagctttgagctatatctgccaagtccatatcagctccaccgggagaatgaggtactgacaatgccggtccacggggagcctcaattgatagcttacacttgggaggtgtaagctccgtcggtcgacttggacgaggagtcatcttcacaactatgtcttctttgggccattgtatgaacgtcttgcgcgcatcgcccaaagtcatgatttcatcatttgggggcacgggcagcggatagcctgaccaggtgtcctttactgtatcgatggacaccttggcatacccagctagcaggtctgcgccgtggaccttgtctgtaaccgagggcttgaaagccatgccctcagcgacttcaggagcgaaagttgggtggactctcgctagtaggacacactgtgctgcgccctcgatgtggtccactgcagctagtggtgcgatcgggagaccaggggccggcacctctgtggatgcacaactactcctatgctgtgacggactcgcgtcgtgttgtacacgaggagttggttgcacagcaggtgttgtgactcggggtatattcatgtcggcgagcaccttgttaaccctttcttccacccttgcattcatgctagcttctagttcttgaatgacctcaaccttaagttcggccttcaaacgagcgtccctctcttccttggagactttccgtttcctgtattgggagctgtactgagggagtccatgcttccagggcacatcgctaccaattccccgagttcggccaggatgttctttggttccgagcgcctttgtgaggatgtcatcttcgcgcctcttcggtgcggactcaacctcgctttgtgaagcttgttcagcaaccaagcccaacagttcctgatagacgacggcatcacttttgttctcaaatgtgacagagccgtccgggttgaccttaccccttgcccgcgcccagttgcgagctctttgttcagggatgtctgaaaacggggcagggacattcgctgctgcagcggctgcatctttttgggcccatattgcctccttgccgatgtaccctgcggtgcccagccgatgcgggtgctcattccgctgttgcagtacgcgatgtgcctcgctggattccctaaactcttgggtggtcttgagagagcagaattcctcccacaccgcttcggttatttgagggtattcatcgaacggcgtatgattgccgggcgggttgacatactcggtgaagagcttcgacttccaattcttccaagctttgcccatcttttggaatgccttccgcttgagcctatcctttgcttcggctggaaatgtgaaccatttctccattgccgtccaagctcgctctttctcggcttctgtgaccttcccgatatctttatggaggatcccgaagttctcacgtgccgctagcccgcagcagttagaccatcttccaatgacagtcctgggcgccgtgggcctaccactagcgtcaacctctcttataacttgcactgtggtcggccatatattttgtgaccgcggatttctactagacctacttgcacttgtctcgcccgacatcgacgtatgttgttcctgcggcaattcatgaatttcgggttgttggaccgccgttgtcgcgggatgaccttcggcaactgcctctgtggctgggtttgcttcttcctggatcctcgcaggtgttggggagggcgggtttgcgccgggcgttgacat

SEQ ID NO: 92082 - DNA, 1766 bp, Oryza sativa
  Clone ID: PAT_MRT4530_90599C.1
ccggccggggtcgtcacctgtcacactgcgttgcacggattatcgtttttaattaatcgtcaccagattgttttttttctttctttttggcatctcgcttcgcttttggagtgggaggaattaattgtggagttgggtagatcgatcaggggcagcgcgagcgaggcccggttggtagcagtcggtgcgtgtttgtgcgtgtgcgcgctgcttctgcttgcatcgtggtgcgaggaggggagaggaggggtgctgctataaatacggctcagatctgggaggcttccttcctcgtccgcctccggtctaatccgattcaaacccgccgtttccaagcttgctctcctctcccccccaatccttccctcccgagtggcagggtgctcgacgggatggcgcagaaggaggccaatggcagcagcaacggggagcacaccacccgcccgccgccgacgccctcgccgctccggttctccaagttcttccaggcgaacctgaggatcctcgtcaccggcggagctggcttcatcggctcgcacctcgtcgacaagctcatggagaacgagaagcacgaggtcattgtcgcagacaactttttcactggttcaaaagacaacctgaagaagtggatcggacacccaagatttgagctaatccgtcatgatgtcacccagcccctgcttgtggaggttgaccaaatctatcaccttgcttgccctgcttcaccaatcttctacaagcacaaccctgtcaagaccatcaagacaaacgttatcggaaccctgaacatgcttggacttgccaagagagttggagctaggattttgttgacttcgacctctgaagtttacggtgatccgcttgagcaccctcaaacagaggcctactggggaaatgttaacccaattggagtcaggagttgctatgacgagggtaagcgtgtcgcagaaacactgatgtttgactatcacaggcagcatggcattgagatccgaattgccaggattttcaacacctatggacctaggatgaacattgatgatgggcgtgttgttagtaacttcattgctcaggccgtacgtggcgagcccctgactgttcagaagccaggaacacaaactaggagcttctgctatgttgctgacatggttaatggtcttattaagctgatgaacggggacaacactggaccaattaatttgggaaacccaggtgaattcaccatgctggaacttgctgagaatgtgaaggagttgatcaacccagaggttaccgtcacaatgactgagaacactcctgatgatcctcgtcagaggaagccagacattacaaaggcaaaggaagttttggggtgggagcccaagatcgttctgcgtgatggcttggtgctcatggaagatgatttccgggagcgcctccaagtgcccaagaagaaccaggcctaagctgctgcatcgcatttggcgaaagatgtcactggagcatacttaatagttgggtttcaccattatttgtgtcgcagttcattgtggaatttgggttccaataaattctgatacacctttgttgttcacctgaaatattgtgttactagaatcgtcatacggggctgggctatttgtatcattaccgcttttggagaactctttatacttttgtttgtagcctgtgtactcgcctaaatcaattatagcaatgttgatgaatttttagcttgtttgttttaaaaaaaaaaaaaaaaatttcaaaaaaaaaaaaaaaaaaaa

SEQ ID NO: 92083 - DNA, 4371 bp, Oryza sativa
  Clone ID: PAT_MRT4530_9059C.1
atgccgggcctcgccgcggccgacaactcgccaccggtggcggccccgccgccgaggcggctgtcgtcgccgctgcccaggagccgggcgccgccgtcgccgtcgccttccacctcgtcgcgggccaagcccaggaaggtggcggcgcagccggagacggacgaggcggcgctcgacaacccggatctggggcccttcctgctcaagcaggcccgcgacgccatggtctcgggggagggcgggggcgccgcgcgcgcgctcgagttcgccgagagggccgcccgcgcgctcgagcgccgcggcgagggggccgagctcgagctcgccatgagcctccacgtcgccgccgccatccactgcggcctcggcaggcacgccgacgccatccctgtcctcgagcgcgccgtcgccgtcgtcacgccgcctccgcctccgccgccgcctgagggtgagagctcggcggaggagcagccgcccgaggaccagcagaagggggaggagtgggccctcgccgccttctccggctggatgcagctcggcgacacccacgccatgctcggccgcatggacgagtccatcgcctgctacggcaagggcctcgagatccagatggccgcgctcggcgagcgtgatccccgcgtcgccgagacctgcaggtatttggcggaagcgcatgtgcaagccctgcagttcgatgaagcagagaagttgtgccgcaaagccctcgagatccaccgggagcacagcgctcccgcttcgctcgaggaggcctccgaccgccgcctgatggcactcatccttgacgccaagggtgactatgatggtgccctggagcaccttgtgcttgcctccatgaccatggtcgccaatggacgtgacattgaggtcgcgacgatcgatgtcgcgataggcaacacctaccttgccctcgcccgcttcgacgaggctgtcttctcctaccagaaggcgttgacagtactcaagtctgcccgtggtgatgaccacccttcggttgcatctgtctttgtccgcctcgcagacctttaccaccgaacagggaggctccgcgagtccaaatcctactgtgagaatgcactccgtgtctatgcaaagcccgcgcctggcgctgcccctgatgaggttgctggaggcctaatggagattgctgccatctatgaggcgcttggagaccttgatgaggcactgaagcttttgcaaagggcactaaagttgcttgaggactcaccaggacagtggagcactgttgctggcatcgaggcacaaatgggtgtgttgtactacatggtagggaggtatgccgattcaaggaactcatttgaaaatgcggttgccaaattgagagctagcggggagaggaagtcggcattttttggagttctgttgaaccagatggggctagcttgtgtgcagctattcaagattgatgaggctgcacagttgtttgaagaggcaagggcagttctagaacaggagtgtggtgcctctcatccagatactctcggcgtctacagtaatttggctgcaatctacgatgctatgggcagggttgaggacgccattgaaatactggaacacgtacttaaggtgagggaagagaagctcggcacagcaaacccggatgtcgaggacgagaagctaaggcttgcggagcttctgaaggaggcagggcggtcccggaacaggaagcagaaatcgctggaaaaccttttcgtgaccaactcgcagcgtgttaagaaagatgctgggaggagattcattcatttattgatccctggtgttcatatgctctctcatgttcccttgtcgtgtaagaaatgtttctgggtatgtctgagctgctgtgctgtataccagctttgtgattttgcttgtgctgtggctttcatcagctggtgggggtgggtgggtgaggtgaggatttcactgttgttgtttgatcggacaacacgggttagggtttggaacatgcgtagcttgtgcagttacttttggctgaggcttagatttgaagctggtatcttaggtagagaaatgggtaatcctaatgatattaaagatctttttggtgattctatttcttctgaatatgaaagttctccaaatgatgatgaattttgtgacaatgaggactccgaatctagttatgttggaatttctaaggatgaacttttgaactctttgaaaagaaagttgagtaagaagaaaaatactgatgaaggcacttccaagttggattcagccttgcttgagatatatagagataatgttctaaatggaatgaaaaggaaactctattctcataaaagcaagaaaaatccaatgaagagtgctgcaactttagatactaaactgacaagcacgaaatatctgagtgtttttgaagatcttagttgtattgacaatttggattggagcagtcttgtctttgattggttaatgaaacatctgagcaagcttgacaagtcaaaaacttttggaggttgcttctattgtctggtggtgaattatttggattttctgaattttggtatgcgattagtactgaaacatgttccaagaataaaagtatggaaagggtcaatgatcaaaaaaatttcaaagtttgataaaatcagcaaaggtgtctatggcaaaagaccagttaaagatttttctgagtgctgttacaaaatgattggaagtgatgatgtaaaagaaaatgttcctgttaaacctattgagagaagctttctagatatgcttgattcttcagttggtgctgatttaactcaagatatgaaaaacaagatcaatgaattgcttattcaacattttggtcctgatgagaactgcattgatgaaagagcaaagaatcttcttgtagatgtctttgttcttttatctaatagcaagccaattgttcctgaaaacactaatgttaatctgaatgaagatgacaagagtaaattcaatgatgatagttcaatggtaaaagaccagaatacctgtaatgataatgcaattggaaatgagcaaactcctatgaaaatatcatcttctccaaaggataaaatagctgttgttgatggaattatgaaaaagctttccaagccaggactcagtaatacttctccaaagaaagcaatatcaagcattgttggtttcaatgaaagaaaatcaatattcttgggtcatgagaagcctagctttaaaatctgggattcagatgatgattttccaaatgaagaaaaacatttcaggactcaaatcattccaaaggacctgtcacaagatttcgatgatgattcacaaagccaattgaacgattcaactaatgaggacaagttagtaatgataactttggaggataccgatactgaaatcttgactcaacataatgaagaggaaaacttgaacattgaacaactacagaaaaaggattcacctgatgtcatatttcttggagaaaaacaatgtccagacaattgttttgacataacttcgaagactaatgttttgtacaataagatcaacacatttgtagttaaactagacaagaagttgaagatgtctacaggcagtcctgagaggattctgttgtgcaatgttgataaatctgttggacagtgcagcacaagtcaaaaaccaaaacatgatctcagaagaattttacaaccagctagatactatacagatccatacagccctgagagacattcttttccagtgacacaatatgatagacaagtttataatgttgtttgcaagatcagcaagagtaattttcaagagatgacacatactcgctctatggctgctcttactgatgatgccaatggtgagggagcgagtcagcctcgcactggcctacattcttctggacgtgccgggggtagtcgccgtgctgccactgcagaacagcatgatgatgaaccatctcttgctcaactcctggctaatcaaaaccgactttttgaaaggatggtagcgaactctgaaaacatgggggctgccatggcacagcaggccaatcaagcaccctccaagctagcagatgttcaacgaacacatccacctcatttctcctttgcggctgatccactcgcagcagatgattggcttcgtgatattgaaatcaagctgaacctttgccggtgtgatcctgtagagaaggctacctttgctgcttactacctgcaaggtgcagcagctgcttggtgggagacatacaaaactctcattcctcctgacgagccaatcacttggactattttccgtgagggattcaggtctgctcacatccctgctggtctcatggaaatcaaaaagaaagaatttcttaacttgaagcaaggaaacatgcccttctaa

SEQ ID NO: 92084 - DNA, 255 bp, Oryza sativa
  Clone ID: PAT_MRT4530_905C.1
atgccggcatgccgcggagagtacatcggagatccagatcctcctggagttttgacggcgcgtccgcagccagctgctcgctgccggagccagaattggggaatcggcggcgtcgggggaggagaggaagcaacaaggagagtggttctaacttctccaagagaacccatcaagttcaagaacacagaggatggtaggtgcctcacagcagcacaaggtcttgcggtccatgtagcaacagaaaaactaccatga

SEQ ID NO: 92085 - DNA, 1689 bp, Oryza sativa
  Clone ID: PAT_MRT4530_90600C.1
gaagctccggctcaactcccacaggcagctcaacctgtgtataagccaaacgtcttctcctcctagatcctttttcttcaactgaggttgattgattattgcaagaatgagcatatgacatactcaacaagccacacagcaaatatgcaagtgcaccaggataccaaaggatggcataatataggctcatttgcaaaagcagcatttagcaaaacatttaagagaagtaaaacagtggagtaattaatcagaaattttaatcaacactgaacaatacacccatgttgcacaggcccaaccatcctgaacaaccatacccggctgtacagatctaactccaaaccaggagctaagcaaattattaccagttatagcatcaataattattgtgagagcactgtacccacaagacacaactccacaatatgtcaccatatcatcatgtgcccatgctgaacatgtcaccatatcatcatgtgcccatgctgaacatgtcaccattagtgtagttgtgacaagacccctcgcataactcaaccaaaagcagtgcaccgttcctggatcgtagtcacccccttcgaaacgacggaaacgacaagctaacacgcaaaacgaaaaagactaataaaaaccaaataaacaatatatataaagatcacccaaatgatcaaccgaaaccggcgaatagaactagcggctctgaactaaaggacgactcaacacggacgaacgaacgaagcacggggaacacctcattcgaacgaacgagcgaacgactcaacaacggctacgacgaaaccggtggtctagaaacgaacatctcaccggaccaaaatgatcggagagggagagatgacgacggcgacccagcggcaacacacggagacgatgacgatgctagacaaacaacggattagattgaattaaggccctggggaaaaaactacaccggtgaacgacgccggcgacggtgggtgatgacggcagacggccggcagcgaggtagaggcggcgatggggtcgggtcagcgatggcggcgacgggcttcccggggttttcggtgcaagagaattggctgccgggcttcaccttgacgctgcgatcccggaggtagcgacggcacagagtggagacgaccgaggcgatggcgaggtgcggctggaccagcggccggcggcggtgaagcttggattcacatcggcgaggtacttccagaggtcttcggcgtcgaggaagtggaggccggtcttcttctcctccttgcgaacccaacggcggcagcgacgaccaaaggcgacgaccacagcgactacatggggctgctggagcggcggccggaggtagagagagaaggagctcgcggggagaaggtttcgggcggcggcagaagaaggaggaggtggcggccgaaagaggagagggaggggctctatatatagccatgggaggccggaatcgagcccacatcgacgggaaaaactcgggaaagtctagggttctcgccggaaaaaggaaagattgaaccacgaaattggaaagaatttccatagaaacttttggggatttcttggggaaaaggaagaggagattgagaggattccattcccacaactatttggaaaaaggagcaacgaggtggccggattggtgggaggaggcggcagcactgtgcacgggctcccggccgg

SEQ ID NO: 92086 - DNA, 359 bp, Oryza sativa
  unsure (1)..(359): unsure at all n locations
  Clone ID: PAT_MRT4530_90601C.1
ggcaaaaaggggttttactttgcagtttcaagtcccactttaacttcaacccaatttgctttacaggatgggggtttgaaactgcagtcnttttaaactcccatcctgtaatgcaaattgggtgtttgttcaagcgggccctttaccctgcttggttctccccttttcgccgcgcgtggctgtacaactttcttttcccttgtgtgtatactcttaggattcctaatctctattcttatgggggcccccgcttcttggattccatgctttttttcgcgtttttgtgacatttttatcttttttttttgtggcccccattttcattttctctgtccttattttaaccaatcttttttttt

SEQ ID NO: 92087 - DNA, 753 bp, Oryza sativa
  Clone ID: PAT_MRT4530_90602C.1
atggcttcagctccactcccacaggcagctcaactggggtataagccaaacgtcttctccttctggatcctttttcttcaactgaggtttgatgattattgcaagaatgagcatatgacatactcaacaaggcacacagcaaatatgcaagtgcacaaggataccaaaggatggcataatacaggctcatttgcaaaagcagcatttagcaaaacatttaagagaaaaaaatttagcaacttgaaccacctgaaacggatctacggttatttagttatgattttccgaagatttcatctattagaaaaaactggaaaaggagaagatgatgatgtcatgctgacatcatccatggcggccggctcagatggcgacctcgcaggagctagggtggtcggccgggaaaaaggagggcatgtacacgtagaggacgacgagacgaacccaacggtactcaccacaacgacaaacgacgtcggacgacgaccggcaacgagaggggcgacggcggcggctcggttgaccggcggcggaggggctccggtggccggcggcgaaggggaacgggcggccgagcttccccacggcttggcgcacctaaaggtgatggcggcaagcggcggcgacggcggagaaggctgctcggcgcggctgcaacccggccggcggcggcggcggatggtttcacgcggcgacggctctacgggtcacgggaggggacgggagagggggcaaacgaaagaggaggactag

SEQ ID NO: 92088 - DNA, 351 bp, Oryza sativa
  Clone ID: PAT_MRT4530_90603C.1
atgacgtcggcgatgacgtcacctaccagcggcggcggctcggcggagcggacggctcgggcggcgcacgctcgccggcgaacgacggcgcggcggcgcaaacggagagcaccaggacgtagatcacggcgcggcgaactcaccgatgaccaaaacgacagcggaggagcaaaggacggcgccggcgacgaggaggaagcggcgaagctcttcgggtcgacgacggcgacggtgctcgggcggtcttcggcggcggcgaacggatggacggggacggcgacgacctcgcgaacccgatggtggcgacggcgaccgacgacggcggctgcaacggcggcgcgacgcggctga

SEQ ID NO: 92089 - DNA, 711 bp, Oryza sativa
  Clone ID: PAT_MRT4530_90604C.1
atgagtagtgtgagactaatcacgaaaaacattgttagacccactcataaccgcgggcacggctattcgaatagttttactctggccagagatgtaccactgtacccacaagacacgattccacacatgttgccatgccccgaagtaccaccacggcactgcaaaggggaaaatcgtgacaatacccttcgcacaacacaactcaccacagtgcaccattcctggatcataatcaccccgtcaaaaaccagaggcatggactccccagcgacccccacggacttcttgccgcttctcagtctagcaccccgtaatgaaccatgctatacaaaagcactggacgacgcggccaccggcgatagagagctcggttgggctatccgaggacacctacgcgaagaggacgacgacgcgaactcaccggtgcaaagaacaacgacggacgacgacgtacggcggccggcgacgagctccgacgacggcacggctcggcccgacgtcgacggcagcgctccagcggcttgcgacggcggcgaaggggcggccgaggtgctcctcctccgcacgaacccgacggcggcgacggggagcggcggcgacggctacagcggcggcgcggcttggctggaaaggcggcggctagggctacgcggcggcggcgctacgggcaaagatagagctcgggacttgaggggaaacgtagaggacgac

SEQ ID NO: 92090 - DNA, 344 bp, Oryza sativa
  Clone ID: PAT_MRT4530_90605C.1
aaaccccaaaaaagaaaaacagacattttattacaggggggggcctcactttggggtccaagacttggaaagaccaaccaggcttaattccccttaaacataaggttacattccgaccgaccgaccgattgactcccaaaaaactcaattattccccaggaaaggggggggaaaaagaaaaaggggaaacatttggggctccctataacgggctttagactaataacttattaaacgcccctttaagcaaaggggttaaatgaaagaatatgggtctgggaccggccattgggatgctttgggacacacgggggggaacttttttgggttccaagatttgaaac

SEQ ID NO: 92091 - DNA, 306 bp, Oryza sativa
  Clone ID: PAT_MRT4530_90606C.1
aaggggttaaaaaaacctcgcattttttttgtggctaaaaaaaaatcccaccattttttgcccccccgttctttcgccagaaaaaagggtgttaccaccttttaaacccggggcttgggtgggaattcccctccccccccccaaagggaaacttcgccaaatccccattaaggttttttttaaagagatcccctcccccccagttcatacccttgggatttaatttgcacctaccagggaccaagaaccgggcaacattaccctttttttttttccctctttttaaaaccctcccccctttttttt

SEQ ID NO: 92092 - DNA, 1386 bp, Oryza sativa
  Clone ID: PAT_MRT4530_90607C.1
ccgcccgggagccttcccctcctccgccgccgccatctgccgtcgagagccccggttgcccacccccgcggcgacgatggcgggccaggagtcgctcaccctggcgggcgtcctgcgcggccacaacgacatggtgacggcgatcgcggcgccgattgacaactcgcccttcatcgtctcctcctcccgcgacaagtcgctgctggtgtgggacatcaccaacccgtccaccgccgtggccacggatcccgaggcggccccgccggagtacggcgtctcgtaccgccgcctcaccggccactcccacttcgtccaggacgtcgtcctcagctccgacggccagttcgcgctctcgggatcctgggacggcgagctccgcctctgggacctagccaccggccgcaccacccgccgcttcgtcggccacaccaaggacgtcctctccgtcgccttctccgtcgacaaccgccagatcgtctccgcggcgcgcgacaacaccatcaagctctggaacaccctcggcgagtgcaagtacaccatcggcggcgaccatggcgccggcgagggccacaccgggtgggtctcctgcgtcagattctcccccaaccccatggcccccaccatcgtctccggctcgtgggatcgcagcgtcaaggtctggaacctcacgaactgcaagctgcgcaccaagctcgagggccacaacggctacgtcaacgccgtcgccgtgagcccagacggctccttgtgtgcctccggtgggaaggacggaaccaccctgctctgggatctcaccgaggggaagatgctgtacaagctcgacgccggcgccatcatccactccctctgcttctcgcccaaccgctactggctctgcgccgcgacagaggactccgtcaagatctgggacctcgagtccaagctcgtcatgcaggacctcaagccagaagtccaggccttcaagagccagatgctgtactgcacaagtttgagctggagcgctgatggcagcaccctcttcgctggctacactgatggaactatcagggtttggaaggtctcagggtttggcggctatgcaatctaggtggtgaatttgttgaaaggcttaggaatcttaatttaaacatcgtgatgcctatcaagtttttgacagttctgaggcataacatttgcctggtactttctacttcattttcattaattaatgattagatttgccaatgagcttatcggtactctggaactatggaagaggatccttatgcatattttttgtttttggctaagttgaaaagatattagttatgcaactttcggagcctcattgcctagatgtaaataatgcttcatcaattgctattttctgatgattttgatggtgct

SEQ ID NO: 92093 - DNA, 171 bp, Oryza sativa
  Clone ID: PAT_MRT4530_90608C.1
atggccgccgccgccgggcttgccgcgccgcctcctacctcccggatttcctccttccccagggctttctccaccgttgccgagttgggtagttgtggtatggcctatggggaattggggatcaaaggttctgcgcgttggaacggggtgactcggctgtttctgctctaa

SEQ ID NO: 92094 - DNA, 617 bp, Oryza sativa
  Clone ID: PAT_MRT4530_90609C.1
ggccgcgggttttttttttttttttttgcagagtaccgataagctcattggcaaatctaatcattaattaatgaaaatgaagtagaaagtaccaggcaaatgttatgcctcagaactgtcaaaaacttgataggcatcacgatgtttaaattaagattcctaagcctttcaacaaattcaccacctagattgcatagccgccaaaccctgagaccttccaaaccctgatagttccatcagtgtagccagcgaagagggtgctgccatcagcgctccagctcaaacttgtgcagtacagcatcgaaatgctggtttccaaatagttacacaggcacatgagggaccaatcagcaccatggttgatgaaactggctcttgaaggcctggacttctggcttgaggtcctgcatgacgagcttggactcgaggtcccagatcttgacggagtcctctgtcgcggcgcagagccagtagcggttgggcgagaagcagagggagtggatgatggcgccggcgtcgagcttgtacagcatcttcccctcggtgagatcccagaacagggcggttccgtccttcccaccgggagcacacaaggagcccgtctgggctcacggcga

SEQ ID NO: 92095 - DNA, 2496 bp, Oryza sativa
  Clone ID: PAT_MRT4530_9060C.1
atgcgtagcttgtgcagttacttttggctgaggcttagatttgaagctggtatcttaggtagagaaatgggtaatccaaatgatattgaagatctttttggtgattctatttcttctgaatctgaaagttctccaaatgatgatgaattttgtgacaatgaggactccgaatctagttatgttggaatttctatggatgaacttttgaactctttgaaaagaaagttgagtaagaagaaaaatactgatgaaggcacttccaatagaaaaaaaaccaaaacagtagatgttgatttcaaaaataagttggattcagccttgcttgagatatatagagataatgttctaaatagaatgaaaaggaaactctattatcataaaaacaagaaaaatccaatgaagagtgctgcaactttagatactaaactgacaaggttttctgtgaaatacttttctcatgtgctaacttcattgtctgaacatcagagagagattatttctaaaacctgtttcaaaactctcttactctttgaaaaatgtcccgtgccatataaatttgctttatgggtggcacaaagagttgatgtcacctcttgtgatatcatcgttagagataaagtcattccactttccaaagaatcagttcatattgttttgggtttgcctattggaggtttaccgattagttcagattttgaagttggcaaacagatccttcttgactctttcggcctctcttctttgccctctgtcaaatattttggagagaagcttatcaaaaatgaaacaatgtctgatgagcaaatcttaatgtgtttcatgattgtatccttgaattgcttcctgtgcccaaattcttctcttcaacctagcacgaaatatctgagtgtttttgaagatcttagttgtattgacaatttggattggagcagtcttgtctttgattggttaatgaaacatctaagcaagcttgacaagtcaaaaacttttggaggttgcttctactgtctggtggtgaattatttggattttctgaattttggtatgcgattagtaccaaaagatgttccaagaataaaagtatggaaagggtcaatgatcaaaatattttcaaagtttgataaaatcagcaaaggtgtctatggcaaaagaccagttaaagatttttctgagtgctgttacaaaatgatcaatgatttgctgattcaacattttggtcctgatgagaactgcattgatgaaagagcaaagaatcttcttgtagatgtctttgttcttttatctaatagcaagccaattgttcctgaaaacactaatgttaatctgaatgaagatgacaagagtaaattcaatgatgatagttcaatggtaaaagaccagaatacctgtaatgataatgcaattggaaatgagaaaactcctatgaaaatatcatcttctccaaaggataaaatagctgttgttgatggaattatgaaaaagctttccaagccagatgatgattttccaaatgaaaaaaaacatctcaagactcaagtaacacccaaacatcaagacaattcaaatatcattccaaaggacctgtcacaagatttcgatgataattcacaaagccaattgaaaaattcaactaatgaggacaagttagtaatgataactttggaggataccgatactgaaatcttgactcaacataatgaaaaggaaaacttgaacattgaacaactacagaaaaagatcaacacatttgtagttaaaccagacaagaagttgaagatgtctacaggcagtcctgagaggattctgttgtgcaatgttgataaatctgttggacagtgcagcacaagtcaaaaaccaaaacatgatctcagaagaattttacagccagctagatactatacagatccatacagccctgagagacattcttttccagtgacacaatatgatagacaagtttacaatgctgtttgcaagatcagcaagagtaattttcaagataaggtagctgttgatattgacggtgttcattgcaaattctacacatttggagattcattcaagcctagtggtgaactgtcaaactttgtagcttgtgttttctgccgatatatgtttcgatcatgtcacccttcaaaatcgaagaaacattacttcttctcttcaattggagatgatctccttaaggaccgttctatgacaaatttctcggctgtaaagaagtgttttgatggagcttcactagcaagacctgttcacacatgtgacctgctctttttcccaattgtcaagagttgtcactgggtcgtatttgtcattgatttgaaatttgaaagatttgtttttctggattcattgtatgatgaggagagcttctatcatgctgaattaagacctaaattggctttactctcttatatgaagattttgaatgaacatggtaggacttgccggactatatggtggtcttttagtagtgtacttgctggtcgatag

SEQ ID NO: 92096 - DNA, 1310 bp, Oryza sativa
  Clone ID: PAT_MRT4530_90610C.1
ccggccgggagccggcgctaatcatgccgtcaagctgccctctatctgacgacccacacccaccgcctctctctcctcccccaccacgcggcggcggcagcagcagcagctagggtttagagagcagcccccaatcccatggccccgccctccgactccgacgactcggccccgatccccgccggcgccatctccaagctcctcatcgtcatagcgatgcagacggaggcgctcccgctcgtcaacaagttccacctcgtcgaggcggaggaatccatatttcctaaaggtgccccatggattagataccatggcaactacaaaggccttcacgttgaccttgtatggcctggaaaagatcctgttctcggagttgactgtgttggcacggtatcagcagcacttgtgacttatgcttctattcagtcattgaagccagatctgatcatcaatgctggcactgctggtgggtttaaggccaaaggagcagacattggagatgtctacttagcatccgatgttgcattccacgataggagaatacctatccctgtcttcgacatgtatggaattggaacacgaaaaacatttgctacccctaatatattgaaggaactcaatttgaaggttgggaagctctcaactggcgattctctagatatgtctccccatgacgagtcagcaatattgaacaatgatgctacagtcaaggatatggagggagccgcggtggcatatgttgctgacatgttttcaacaccggcaatctttgtgaaagctgtgactgatattgttgatggggagaaaccaacagccgaggagtttctgcagaacctggttgctgtgacagcagctctggacaaggcagttacagaagtggttgatttcatcagtgggaaatgcatatcggatctttgaatgatgaagcttagaaacctgttcatcaaatccaagctctgctgcttcaatgcactatactatactacatcactgctgtatgatttttcatggggatgcgtatacaatttttaggttcccctgaggccctgatcccccgtatgtacaaaattcttggcaattacttggatcaatagcgtggaattttgtagaatattctgcaaaatgtgcagtgtaatgaaactaaataaggtgatattctgtcaaactaagataagtggtgggcggtggagttattttcttaataaaaaaaaaaaaaaatcttcattgtttgctctacgattggtaaactgtgaaaaaaaaaacccgaagaagcaataaacatagtttacgtgtaaaaaaaaaaaaaaaag

SEQ ID NO: 92097 - DNA, 357 bp, Oryza sativa
  unsure (1)..(357): unsure at all n locations
  Clone ID: PAT_MRT4530_90611C.1
atgtttggggatgtccaaaagggtgttcgccagaagccggtttccgctgaaagcaaaaaaaagctgaaagttcgaaaagccgcttttgcccttcttccagnnccagggttctncgccagtagggatgcccatgggctgaatggccagcttgntttgcccttctggttgccctggggtcccgtcctggggagctttaccnatcagtaatacctgtaataccagtgaatatgggagtctactgctttatgtttccttgtattttgctgtttttttcatatatttttagaacnaatnttgaacaaaatggggtataactaaaaagtntacttcaacaaaaaaaaaaaaaaaaaaaaaaaa

SEQ ID NO: 92098 - DNA, 177 bp, Oryza sativa
  Clone ID: PAT_MRT4530_90612C.1
atggcggcggcggaggaggcaaggtcgtgcgcgaacgacgacgccaacggaggctggctaatcacgacacagcatgcatcaggtcaggcaagggcaaagaaccttcagggtggtaaccaaacaacatctaaaatgtgccaggctagtctcaggtcaggccacttcttctcaggatag

SEQ ID NO: 92099 - DNA, 376 bp, Oryza sativa
  Clone ID: PAT_MRT4530_90613C.1
aaaaacccttaaaaatacccttttcaggcaaaacaacagggaaaattggtcattccccataaaaaccgaaacgaatggttatcccccactttttcctagggggggggtttttttatgaagggcaaaaaagccttatggtggtagcacaaggttttttttaaaacgacacaacttaaacattcactttttaaattaactgggccaaaatcccctaaaaggaacagtttcaccaaaaacttcttagtttaaaggggggattaatacttgggccaaaaagggaccctttttactggggggcacactggacttttgggggaacccccccctaaatttcgggggacgcttccgggttcctttgaaaccgggggggcccaaa

SEQ ID NO: 92100 - DNA, 583 bp, Oryza sativa
  Clone ID: PAT_MRT4530_90614C.1
agggcctcccggggctcaagttcttcgccaggcaatcgaccttgtcgtccgcaagcgcgagtatgcgaactctttggccatttggcaaatgatgatctcggatgctggccgtggtccaaacctccccatgtacaatgccatgatcgacctctgttgcagtgttggtgataccgactacgccctccgcatgctcgacgaaatgcccttcaatggcgtctttgcagattttatcacgtacaatgccatacttgaagggctcatcaagcagcgcaaggctcgtgaggctgaggctttcctcgcagagatgagcaagaacgagcagctgccctccccaaccaattgtgctgctgctatcagcatgttctctaaggagtttaacccgtcagcagcaatcgatgtgtggcactgcattgtggagcaccagattactccggctgatgagtcagccagagaactaatagttgggttgcttgattttggcaggtttgctgaggtgaagaaatatactgatgaaatgcttgacatgggaattgagttacctcagtcaaccattgataatatgaagcgcacatttgataaggtt

SEQ ID NO: 92101 - DNA, 331 bp, Oryza sativa
  Clone ID: PAT_MRT4530_90615C.1
aagccccaaagaagagcagagactttaagaggagccaatgacacagctggggattggggtaacaagcttttccaacttgacagtaaggagccaaggaacagatctgggttatggcaaatattataactcaagacatgggctcgggctgagcttttgttccataacaatcatccttgtttcattacaggttcaccacgctcaaacatgaggcctaaaggacctccagggagccgtacgctttcggcgtcgccggccaagcaaggaggggtctgaatatatccgacgggaagccctttcataagctgttcaggttggagaaggtgtatactta

SEQ ID NO: 92102 - DNA, 214 bp, Oryza sativa
  Clone ID: PAT_MRT4530_90616C.1
ggaacattgaagttaattatttattcaccatatggatatatgcttcctgacaaatgaaagcactagttattaaacaaccccacagagtcatacacacagctagctttagtagcctagggaccagatctcggggtcctaggataacccacccagtagcagacaccacctgtcccattggggatggccacgttgcaaaacgccgggagggttaccc

SEQ ID NO: 92103 - DNA, 1593 bp, Oryza sativa
  Clone ID: PAT_MRT4530_90617C.1
atggagtttggcggcgagggggatcctgtcccaggtcatgatgatcaggttgaagcagatggctggattgattatgatggcgcagcacgagatttttgttgtactgatgaggaccagggcggggatggcggccgtgctgctgatgtgggtgatgttcaagatgatgctggtgctgctcctgcttatttaggtcttggtgttccggatggcattcaaggtgatccgtctcatatccatcctgctgctgttgatccggttcttgttcctgctggtgttcaagcagctgctgctccatccaatgctcaacaggctgcctatccagggcttcttcctgggcttggctctggtggtactcaagtagttgttgggcttgttcctgtagcaggtgcttttcttggtgctgataacgccttctctagtgacgtcatcgataatatggtggaaggaggcatgtggtttgaactggatggttatctgcagagatttacgcccagatcattcagctcaaatgatcctgccatattgcacaagatactttatcttatctgccgaaaaggatgcctgaagatgttacttgatgctaagctattcgagcaagcagatagtttcttcgcaagttcaatcttgcctctcgcagccgcacctgcaagtccatatgctagggacgacgatgtgcaggctaggatccacgtgctgcagcaagctgttgagctcagagatggaagacttctggagctccctgctgatgagaccgctgtgcccaaattgcaacagaaaatcaatgactacctcaggttttatctcccacgggaaattgggtatactccagaacctggccttagaagtacaatgtgggagttcgctattaaatgtgacaacaggccgtacaagaggggcaacaagcctgacataagatgcttgctctgtcagaagttgttcctacatgctgacataacacaatgcatgaaaggccacttgtcaaaacattgtccaatgagcacacaaagctctttggaacgcttccatattgcccttaagaaggaggggaaaaagaagaaaccagtaacagatgaatttgagaagaacaaacgcatcaaaattggtggcacaatgcctaaccagcaaggtcagctttcattaatcaatcatattgattcttcagacattgataaacagattgatgctgggcgcaaggttctggacaaattcaggtcgtgcgaaaatgagatgtgcaaaagtgccttagaagaaatggaacaagttcttaacaatatctctcgatcagcgagacagcaaactcacgagaaccgccaggttgccattggaatgccaccgctcgctcctgtgctgccaagcgatgctgctgctgggcatcctcaactgccagctgcagctgcagctggtcctcaagatttgccagaggctggcgatgttcttcctcagcctcatcagccagagccccatcatctgcaagatgctcctgacttgccagcggcaggcaatccacttcaaccagagccccatcttcttcaagtgcaagctcctcttgagaaccctccttttgctgggcctcctcatcagcctgaggcctga

SEQ ID NO: 92104 - DNA, 218 bp, Oryza sativa
  Clone ID: PAT_MRT4530_90618C.1
gctgatatagatgtgcctggtcacaacagtgacccgttgagctgcattggctggaaaatagcaagattttcttggtgatgggggtggttgaaagggtaaggctcacactatatacttcagtgctctcctttggtcctttggtgatgtacctggaacaaacaccgcaaggtcatgcctactggactgctacaagtgtttagggggttcggagatggatc

SEQ ID NO: 92105 - DNA, 2599 bp, Oryza sativa
  Clone ID: PAT_MRT4530_90619C.1
ctagtggatccccggccattcggctttcctccaccacctaaaccgcaccgaaccccgctcgcactttcgcagaaacacccctcaccgaccccgtatttacattaaagttacctacctttcctctttattggattttttgcggagagccccctggtaagtttgtgattatcgcatcggtgcccttcgccggagctgtgggtggtgccctctatgaatggtcaaaccccgatggggctcgccgccgccgccgcagccgcagtgaggccgtgccgccggaggctgctgtcgtcggccacggcggcggcggcggcggcgacggtcgccaccgcgaccccgctgttccccagatgcccccacccgcaccaccacctccacggccgccgcctgcccttcctcgcatccgcggcgtcgcagcagcagcagcagtccgggcagaccgccgcctcgccggcgaccccacctataccctccgatccccgcgccgccgtctccggcaacctccccttcttcgaccgcgtcctcttcccggacacgttcccggtcgagaccccaccgccctcgtcggcggcggcgtccgcggcggctgcggccgatgaggaggtggcgtcggcgctcaaggcgagggaggagacggaggcggagcgggaggcgtggaggctgctgaggagggcggtggtgagctactgcggcgagccggtggggacggtggcggcggaggaccccgagtgcacggagacgctcaactacgaccaggtgttcatcagggacttcgtgccctcggcgctcgccttcctcatgcgcggcgagaccgagatcgtccgcaacttcctcctccacaccctgcagctgcagagctgggagaagactgttgattgttacagccctgggcaaggcttgatgccagctagctttaagattagggctgtgcctcttgatgacaataacgaagcatttgaggaagttttggaccctgactttggagagtcagctattggacgtgtagctccggtggattcaggactttggtggattattttgctgagggcatactgcaagattacaggggacaatgcactgcaggaaagagtagatgtgcaaaccggcattaaacttatcttaagcttgtgtttgtccgatgggttcgatatgtttccaactttactggtcacagacggatcatgcatgatagacaggaggatgggaatacatgggcacccccttgaaattcaagctttgttctactctgccctacgatgctcacgagaaatgcttgttatgaacgatgggtcaaaaaacctccttcgtgccattaataacaggctgagtgcgctgtcctttcatattagggaatactactgggttgacatgaagaagataaatgagatatacagatacaaaacagaagaatactctcatgatgcaacaaacaaattcaacatttatcctgagcaaatcccttcttggcttgttgactggattcctgaaaaaggtggctatctcatcgggaacctgcagccagctcacatggatttcaggttcttctctctcggcaacctttgggcaataacttcatctctaactactccaaaacaagctgagggaatacttagccttattgatgagaaatgggatgatctcatagcaaacatgcccctcaagatatgttaccccgcaatggaagatgatgaatggcgcattattaccggcagtgatcctaagaacaccccatggtcatatcataatggtggatcctggccaacgctgctgtggcagtttacattggcctgtatcaaaatgggaagaccagagttggcccgaagagccattgctgtggccgaggagaagctggcagctgacaaatggccagagtactatgacacccgctctggaagattcatcgggaagcaatctcggtcatatcagacatggactattgctggttttctgacctctaagatgctattggaaaaccccgagctggcttctattctgacctgcgatgaggacctcgagctgcttgaaggctgtgcatgctgcctttctaagaagagaactaggtgctcacgccgtgcagccaagtcccatgtcgtcgagtaaaacagcagagtcccttttatacatgctactctgcacgcacaagtatactacgagtacttgtcgacaattaacttgagacgaacacactatagccatgtacattagtataggtttacactagatatccatccattcattttcctcgatgcgcgctcattcgtttttgctgagctgccatcgatgggattggagctaccctgggtgataccggtggtcgacgagagcaacaccgattcaggtctgtggctctcgtgtacacaggaaattgaagtttgttgttgtgttcggtccaccagcagctcctaattcgggagtgctgcgaagccctaaccattgtatccattgtcattatttaagctgtatcttgtatcacttggcaaactgaaccaagacaccattttcctgttatcttgatgaaatataacaatgctatgaatgttatgattaaaaaaaaaaaaaaaaaaacggcgaaaaaaaaaaaaaaaaaaaaaaaatttattaa

SEQ ID NO: 92106 - DNA, 4497 bp, Oryza sativa
  Clone ID: PAT_MRT4530_9061C.1
atggctgctcttactgatgatgccaatggtgagggagcgagtcagcctcgcactggcccatattcttctggacgtgccgggggtagtcgccgtgctgccactgcagaacagcatgatgatgaaccatctcttgctcaactcctggctaatcagaaccgactttttgaaaggatggtagcgaactctgaaaacatgggggctgccatggcacagcaggccaatcaagcaccctccaagctagcagatgttcaacgaacacatccacctcatttctcctctgcggctgatccactcgcagcagatgattggcttcgtgatattgaaatcaagctgaacctttgccggtgtgatcctgtagagaaggctacctttgctgcttactacctgcaaggtgcagcagctgcttggtgggagacatacaagactctcattcctcctgacgagccaatcacttggactgttttccgtgagggattcaggtctgctcacatccctgctggtctcatggaaatcaaaaagaaagaatttcttaacttgaagcaaggaaacatgcccttcatggagttcatggaacgcttcaattatctgggtagatatgccgcttctgacttgaacactgaaacaaagaaggttgagctatgcagagatcgtcttgcacctgaactcaagcatgctcttgctgctcatgaaatcaccagcatgaagacactggttgcccttcgtgttgaatcaagtgaaaaggaagtggttgaagaccgtaagcgtaagtgggctgcaaagaaatttgctggcagcagcagttccactcggcctcgtcttgctccatctcctgcggttcgtcctatggcacctcagccacctcggcagatgtatgtgcctccacgtccgcaaactcagttagttcgtcaagttcctcgcgcagttcaagctgcgggagatgcatctcgtaatgccaatgtcacctgctacaattgcggcaagaaggggcattattctcctagctgtccttatccgaagactggaacatccggaccgtactcgcagggagcaccgcagcagcctcgtggtcctcctcaagttcagcctggacagcgtggagctcctgctgttcccaagccagctccaacttttggaaggggccggctcaaccatgtcactgcagaagaagcaaccgacgcacctggtgtcgtacttggtacatttcttgtgcactccattcccttaacagttctttttgattccggtgcaactcattcattcatgtcaaccttgaaagcaaaacaacttgacttgaaaacagaatttcttagcgatgctatgcgcatccaatctcctggatccaccatggtcaccaaacttctatgcaaaggtgtagaacttataatagacggggtaaagtttaaagctaacctcatattattagacaccttgggcctagatgtcattcttgggatggattggttaactaaacatgagggaaccattgattgtgctcatagaactgtaactcttcgtagcaccgatggtcaatttgttaggtttacctttgaacaaacctccacttcaaatcaaccctctatacaatctctctctataccggagttaaaatcagtacccatcgtgaatgaatattccgatgtgtttcctgacgaattaccagggatgcctccagatcgtgacattgaatttgtgatagatttaatccctgggacagcacctatagccaaaaggccatatcgaatgacttctgaaaatttgatggaattaaagaagaaactcaatgagcaattggctaaaggtttcattcgtcctagttcatctccttggggctgtccagtgttgtttgtaccaaagaaagatggaaccatgcgaatgtgcgtggattatcgacctctgaatgaagtcaccatcaaaaataaatatcctcttcctaggatcgatgatttatttgatcagttaaccggagctcgtgtcttctcaaaaattgatcttagattgggatattttcagcttaaaatcagaccggaggacattcctaaaaccgcattcacaactcgctacggtttatttgaatacaccgtagtctcttttggattaaccaatgctcctgcttctttcatgaatatgatgaataaaatcttcatggaatatcttgataaatttgtggtggtattcattgatgatatactcatctactccaagagtgaagaggaacatgcgcaacatttacgtatggtactcgataaactccgtgagcatcaactttatgccaaattctcaaaatgtgaattttggttaaaagaagttgaatttcttggtcatgtactttctgaaggtggtattgctgtgaatccaagaaatgtacagaacgtacttaattggaagcaaccacaaaatgttcctgaaattagaagttttcttggactagctggttactaccgtcgtttcattgaaaatttctccaaaattgctagacccttgactcaacttcttaaaaaagaaaataaattcatatggtctgaggcatgtgaaacaagttttcatgaacttaaaagaaggctcacaacagccccagtgctagtgatgcctgatgttcttaaaccttttcatgtttactgcgatgcctcacatcatggtctcggttgtgtactgatgcaagaaggaaaagtagtggcttatgcttctcgtcagttacgaccacacgagatcaattatccaactcatgacttacagctagcagctgtggtgcatgctctaaagatttggcgccattatttggtcagtaatcggtgcgaaatctttaccgatcataagagtttgaaatatttctttacccaaccagatctgaacctaaggcaaagaagatggttagaactcattaaagattatgatctcggtattcattatcatcccggtaaagcaaatgtagtagctgatactttaagccggaagctacatcaccttgccgttattgagacaataaatcagccatcgttgtcctctgaatttcagaaattgaatttgggattggtagaggatggttatgttgctgcactagcattacaacctactctctattctcaaattaaagctgctcagtccattgatgaggaagtagctgaaattatgaaagaaatcaattcaaagccacaatctatatacactcttaattctgatggtatggttatgcttggcaaacgaatctttgttcccaataatcaacaccttcgagaaaccattcttgatgaagcacatcaaacacctttgtctatccatccgggttgcactaagatgtaccaggatattcgcactcaatattggtggcctagcctgaggcgtgacatagcagcatatgttgcaatttgcgacgtgtgccaacgtgtcaaagctgaacatcaacgacccgctgggctactccaacctttgcaagtacctgaatggaaatttgatgaagttggaatggattttattaccggtcttcctaaaacacccaatggacatgattctatatgggttattatggatcgactgactaaagtggctcacttcattccggtgcatgtgacttatggtggagccaagctagcagagttatatttgactcatattgtaaggcttcatggcgtaccaaaagtcatagtatccgatcgaggaacacaatttacatccagattttggaaaaatttacatgaacttctcggaaccaaattgttcctcagcaccgcctttcatccacaaacaggaggtcaagtggaaagaacaaaccaaatacttgaagacatgctccgagcttgtgtgcttgaacataacactaactgggagaaatgtctatcttttgctgaattctcctacaacaatagctttcaatcaagtatccaaatgtcaccatttgaagctctttatgggagaaaatgtaggactcctctttattggtccgaagtaggagaaagacaattctttggacctgctatcattaatgaagctgaaaagaatgtcactcttattcgggaccgattaaaagaagctcaaactcgtcaaaagagctactctgatcgtcgtcgacgagagctaagttttgatgttggtgaccatgtctatcttaaagtatcacccatgagaggtactcaacgattccaaattcatggcaagcttgctccacgatatattgggccataccaaataatatctaagcgtggacaagtagcctatcaattggaattgccatttcagttgtctaatatacatgatgtattccatgtttctcaacttaagaaatgtcttcgaactccgattgagcacacctcacttgaagacattaatctaaagccaaatctctcctatcaagaatacccaattcgtattctcgaagaaagtgaacggcgtacccgcaaaagctccatcaagatacttcgagtacaatggagcaatcatactgcggatgaagccacatgggaacgagaggaccgacttaaggccgaattccctagtttcttctag

SEQ ID NO: 92107 - DNA, 750 bp, Oryza sativa
  Clone ID: PAT_MRT4530_90620C.1
atggggaacattgtcctgcagctgctcgcgattcttgcactctgcattgcaccggcgaggtccggctggctccagggcaccgccacgttctacggcggcgccgacggctccggcaccatgggtggtgcgtgcgggtacgggaatctgtacgaccagggctacggcatcaacaacgcggcgctgagcacgccactgttcaacaacggggcgtcgtgcgggcaatgctacctcatcatctgcaactacgacaaggcgcccagcgggtgcaggatgggcacggcgatcaccgtgacgggcaccaacttctgcccgcccaactatgacctcccctacggcggctggtgcaacacgacccgccctcacttcgacatgtcccagcccgcctgggagaacattggcatctacagcgctggcatcgtcccgattctctaccaacaggtgaagtgctggagaagtgggggagtgagattcaccatcaccgggttgaactacttcgagctggtgttggtgacgaacatggccgggagcgggtcgatcgcgagcatgtcggtgaagggctcaagcacggggtggattcagatgtcgaggaattggggcgccaattggcagtgtctcgccggactggctggtcaggcgctcagtttcaccgtcacctccaccggcggccagaccatcgtcttcgacagcgtcgtgccggcggggtggtcgttcgggcaaaccttcagcacctaccagcagttcgactactaa

SEQ ID NO: 92108 - DNA, 801 bp, Oryza sativa
  Clone ID: PAT_MRT4530_90621C.1
atggggaacattttcctgcagctgctcgccgttgttgcactctgcattgcaccggcgaggtcggactggctcccgggcaccgccacgttctacggcggcgccgacggctccggcaccatggtaactttcgtatacaaaatttttgcaaaatctataccgtttagtagcttgaaaaacgtgcgagcggaaaacgagagaggtggcgcgtgcgggtacggcaacctgtacgaccagcgctacggcatcaacaacgcagcgctgagcacgccgctgttcaacgacggcgcgtcgtgcgggcagtgctacctcatcatctgcgactacggcaaggcgcccgactggtgcaagctcggcaaggcgatcaccgtgacgggcaccaactacggcggctggtgcaacgcgacccgcccttacttcgacatgtcccagcctgcctgggagaacattggcatctacagcgctggcatcgtccccatcctctaccaacaggtgaagtgctggaggtatgggggagtgaggttcatcatcaacgggttcaactacttcgagctggtgctggtgaccaacatgcccgggagcgggtcgatcgtgagcatgtcggtgaaggggtcatgcacggggtggatccagatgacgaggaattggggcgccaattggcagtgtctcgctggactggccggacaggcgctcagcttcaatgtcacctccaccggcggccagaccatcgtcttcgacgacgccgtgccggcggggtggtcgttcggccaaaccttcagcacctaccaccaattcgactactga

SEQ ID NO: 92109 - DNA, 628 bp, Oryza sativa
  Clone ID: PAT_MRT4530_90622C.1
ggcaggatgtacgaccgggaggcgaggcggcagggggcggtggccgtggcggcggggaagaaggagctgacgtgcattggggtgaagtgctacaaggattccttcttgatcgtcgccggggtgacggtggccgcggcggtggtgatggcggcgctcgcgtggcggaccaggaagttctacgccggggacatctacgcgcgcttcagggaggaggcggctgccggtggcggtggcgctggcaatggcaccggcgccggagaagatgagaaggtggaatccaaggaggagaaggcggtgatgacgccgacgagcacctgagctgcaattctgctgctcgatcagaagatctgagagatagaggagcaaaaaggactccttttttctttataactgttcttttagtttttaagaagtgctatactacaacattgcaacacccacatttagagggataattgacccacattttcaacttatctgggctagcccgattcctccaaaacaaaaacactttttatggctggctataaggggaaagattcaatcggctgttcaactgaagaaatttaattgggaaggctctgaattctgtcaactgtgtgatagaagtgaagatgcagttcatatc

SEQ ID NO: 92110 - DNA, 156 bp, Oryza sativa
  Clone ID: PAT_MRT4530_90623C.1
atgaaagccacctccgaccacctcgtgcaaaagggaaatatcaatggaattgacctgactaaacaggagaagctgacaaagaagacaacgattactactacttctactagacaagcaaggacgcacgacccctctcacaccctccattgtcgatga

SEQ ID NO: 92111 - DNA, 381 bp, Oryza sativa
  Clone ID: PAT_MRT4530_90624C.1
gtgtttttttattattttgtggttcttttttttttttttttttttttttttttttgggcctcaatccaaggggaaaacatattggcatcccaatattttaagaaaacacaaaagggaactgaaaaccaaatccccacaagggtacaaaaactgaaccgccggtcaacaaaaaaaaaaacaggcttccccacagggtaaaggtccaaaacacaccaaggacatactacaaaacttggaggctcaaaaataaaaggccaaccaagttaaaaaacccccccccccctcagggggagagcaggtagctgatcagtgggggtatttgcctgatgatgcggagcaataccgaaaacttccatagcctcaaggaccttggccttaaaa

SEQ ID NO: 92112 - DNA, 2800 bp, Oryza sativa
  Clone ID: PAT_MRT4530_90625C.1
atggcggataaagcgaggcgaggtcaaggcgacaacgccggcgaagcggcccacgcgtcgagggcgatgactctaggcggagcaactcttctccaaaggaaaacccaacatttcttcccttctctctctccagctccgcctccttgtcctactcgtcggcggcgctccagctaaaccctagtcccgtcgccgccgccaccgcggttctcctgccgggccccgtgatgccgcttcttgatccaggaaagctgcctctttggtcaccgaactgcaggcaaccactggtcctaacctgagctgcgtcagcggttggatggcctccccagcatgcggttgttagttgtgaagccggtgggtcaggagcatggagcgcggtcgtgctccgtcgaggatgatctcgataggctcattagatcgattaatgtgcgcacatccgcacgggcttctgggcagacgagcacggataggaggcttatcgcgctcgggaagtcgccgatatcgagctcggagattgttgagtctgtgagcctgaaacaggccctgaggaagatgtgcatctcgcaggcgtcggagatggccgccatgaagaggatgccgaagccgacggcggtgtcaaataccccagaagctggggcaattaagaagctttatacatctgttgtggttcaaaccaacaaggagcgggatgaaaagaataagtttggaaaagtgtccgttttgcctgagaaggatgtaataagttcatcggtgaagtcaacggaagccaagaacaaggtacggaacaaaagcccagctaagaaaaatgtgcgttcagcatctccaaccacaacaaaggtccagaaaaccagaatccaagatgtgatcagtaataagtcatctgaggcaagtgaagatttgcctgcaggtcctgcggtggctaaacagagaaagggcaaaatgaaaacatctagcccccgtgcagttcctgtgggcggttcacgcctggtgttccggagtaaaacctccaccaagaagaaggtcaaaccagaaccagctgctgcagtggtatctcacaagacttgtgaggcaaaaagttccaattctcaagctaataagaagcacgaggccctacaggatgaacccagaactccaacaccaatcaacaagaaggctgcggctagctctatcagcactgatggagctaattgtggcaccaaaggatgtggtgttggtgagatccatggttcaaagcccagtgagttgtcaagatcgaaggaaaagggtgaatgctcccaaagctcaaagagcagcatgggtgattatagcaccagcacaagcataagcgatgatagttatggtagtttcagtggcaatggctgcaggcctcacatgtcaaaagatgtgagatggggggccattaggcgcatggcaatccaacaagggagcctgggactgaagaacttcaagcttctcaaacaacttggttgtggagatattgggactgtttatctagctgaattggtgggttctgaatgcatgttcgcattgaaagttatggatatcgagtacctgataagtagaaagaagatgcttcgagcacaaactgagagggagatcctgcaaatgctcgaccacccatttcttccaactctgtattcttttttcacgaccgataatctgtcttgcctagtcatggagtattgccctggcggtgacctgcatgttctacgacagaaacagcctaccaggaccttttcagaagctgctgctaggttttatgttgctgaagttctcctagcattggaatatctacatatgttgggggtcatatatcgcgatctgaaaccagaaaacatacttgttcgtgaagatgggcacattatgctctctgatttcgatctgtccctgaggtgctcagtaaatccaatgcttgtaagggcctcatcagtaggaagagatgaacctagtagaccttctggcccttgtgcggaaagctgcattgatccactctgtatccaaccgtcatgggccaattcttcttgcttcacgcctcggctagtttcctctaccccttccaggccacggcggccgaggggtgagcctcagaagaaaccatcactgccacagcttgttgttgagccaactgatgcaaggtcaaattcgttcgtcggtacccatgaatatcttgcaccagagattatcagaggagatggccatggtagctcggtcgactggtggactcttggcatctttctctatgaattactctatggcaggacaccgttcaggggacccggcaatgaggagacactgacaaatgtggtctcgcaggggctgaagttccctgataaccctgctgtcagcttccatgcccgggatttgatcagagggttgcttgtgaaggatccggagtaccggctaggctcaacgaaaggagctgctgagatcaagcggcatcccttcttcgaaggcctgaactgggcattgatccgatggactgcaccgcctgagactccgaaaagcttcgacgcggcaagcctcacgacggcacggaagaagaaggaaggcaagtgcctggagttcaggctgaatggagacgacattgagtttgagctcttctagtggtggtaataatactactttgtattcggaagaacatccatagcatgtagctagaggtagtttcccttccctgcagctttctgttggaaatgagtaaaatcttgtgtcacctgccaatgttggggaagtgaagtatgttcggctgttaaacctgctactactttattccttgttaataccatcaaaataccagattagc

SEQ ID NO: 92113 - DNA, 519 bp, Oryza sativa
  Clone ID: PAT_MRT4530_90626C.1
ggcgggcgtccggaaaaatggtgcagcttctaaaatagtgttcacaaatggctctcaagatccatggcgccatgcctcgaaacagaaatcgtcgaaatatatgccatcatacataatcaaatgtagaaattgcggacatggcactgatctgagaggatgcccccaactccctttcaggattgaaggtgacccttcaaattgctcatccccggcagccgtgagcacagtgaggaagcagatcgccagccacatcagcttgtggctatcacaatgccaagaaccaacaagggcatggtgatgatgactcgggagtcggggctacaataaacacagttacacagaccaatctacggtatccattgatctactctagtacaattaaggtggtgtttgaatgtcctgaagatgaaggttaagtttttcacgcaaaacgaggtggtaataacgtgtgattaattgagttttaattattataaacttgaaaattggattaatctgatattttagaacaactttcat

SEQ ID NO: 92114 - DNA, 511 bp, Oryza sativa
  unsure (1)..(511): unsure at all n locations
  Clone ID: PAT_MRT4530_90627C.1
gtggaaaacgcacacacggatttattgacccccaaaacctgggaaaaacggggggaaacaccttttcatttattctttcccagtagaggaaaacccgaagaaaaaaaaaaagggaaaaaagggcctcgaacggctttgatgcttgttataaagcccgccgggggcccggggccgatgccccttcactgattgcgcagctacttgataaaacggggccgttagggagcaaagcttccttgatcagggaaacaatgccagttttgataaaggatccatcagtctttttgggagtttctgggacttgggcaacctgggttattttgacattttctccaaaacaaacctcttgggggaggatggcccttctaagggggaaatccttcccagccccaaggggaaggccacctttttcaccaaggagtttcttgtccgcttaaggctggnagaaggcacctcccatgaaaaatgagccctctattatggggccttcaaaaatgcgggaccggggccc

SEQ ID NO: 92115 - DNA, 666 bp, Oryza sativa
  Clone ID: PAT_MRT4530_90628C.1
agtgggccgggagggggagggaaagggagctgggccgaggggaaggcggggggagcggcccaagagagaggagggaaggaaaaagagagggaggagatggagactttggccacaggccgagggagagagagagggaagatacagatcacccctcgcaccgtgaggcttgtcctggggaccccgcttggtggaaatgacattgtactcccatcccacaaggttgtgcgaaccgttcaagaaagcatcaccgatgaactgggaattcataagaaggctaggttatcagcaaaacagttgatcgagggcgatgtccgggtcgcctccgacctcgaccgagtcgctgctattgactggtccaagactgtgttccgggctttaagcgacagcattaggtgttggcgccaaaacccggcatcgtcaatagcttcttgtgtcgtattcctcgtgatgtttactaaggacatcgtggataagctcgttgctgctgatcaggaagcaagcagggacggcatgccgccttttggcaacctccccctgcgaccgttggagagtacttgctacgccaacaagcctgccgacaggggaaaggggccgatggttgaagatatcagggcagcggcgtacaccttccccaatatgtctactattctcggcatggctaagtaa

SEQ ID NO: 92116 - DNA, 1341 bp, Oryza sativa
  Clone ID: PAT_MRT4530_90629C.1
atggagatgactgggaaaatgccggctagggtcaagcggattaggtttgccgactcacaaaacgagtgcgaggtcgtcctgccccaaacacttcctagcggcggagcgtcttcctcaagggcggtcggtgaagcagcacagagcaagccaaaaaggagacggcgcgctacgtcggccggcgagggcccatcagtggacgagccatatgagacaaagggccctaacctcacacgatgtagcgccgctatagcggcgaaggcttgtagagcgctatctcccgtacaccatgagaaattggaggagattggacttgatgcggtagcgtgcatgtcacttgaaagccttgagcagccagacctaatacgatggctcatggacaggactgatcccgacacaatgtgcatttcaataaatgatgacatgaagatacagatcacccctcgcattgtgaggcttgtcctcgggaccccgctcggtggaaatgacattgtactcccatcccacaaggttgtgcgaaccgttcacgaaagcatcaccgatgaattgggaatgcataagaaggctaggttatcagcaaaacagttgatcgaggtgatcaagagccagaaagatgaccaccgggctgttcgatatttcatcatggtacttatgtcaaagctgctagttcgaactaccgatttttatgtgcccaagggcgatgtcggggtcgcatccaacctcgacagggtcgctgctattgactggtccaaggctgtgttccgggctttaagcgacagcatcaggtgttggcgccaaaacccggcatcctcaatagcttcttgtgtcgtattcctcgcggttttatatctggacaacattctgccaccaagagacattgggctggatttaaccttcaccccacgtattcagatgtttaccaaggacatcgtggataagctcgttgctgctgatcaggaagcaggcggggatggcacgctgccttttggcaacctccccctgcgaccgttggagagtacatgctatgccaacaagcctgccggcagggcaaagggaccgatggtagaagatatcagggcaccggcatacaccttccctaatatgtctaccatcattgggccacacttcgcggggctgccccccgaccagaggctcggattgttggagtccatagccgagtatgacaggcaggcaaaagagagtgcaatggagatcgagcgccaattcaggctcgttgttgacaagcagcacatgctatgtcagagtgtcattgatgcgttgcaagcgaaccgagtaccacaccccccaaccgttgcgccactgtcacgcccggaaattcactaa

SEQ ID NO: 92117 - DNA, 330 bp, Oryza sativa
  Clone ID: PAT_MRT4530_9062C.1
tcaatcggtctgaccgccgatgtcgcctgccgcgcctgttgccgccgccggtctgaccgccgtgctcccgccggtctgaccgctgcttgccgccagttcccggtccatcaccgtaaatactctcccgagacatcgagtcaccgcgggctgcgccagtctgaccgcgagatacacgccggtctgaccggctaccagagcccgatctgaccggtcacataaaatgacgatcttgcgattcactgcctcggccggccattccctattccccatggagtcagatttgaaggcgccctcgttgacgaggttgttggtgcgcgacgtcggtgccat

SEQ ID NO: 92118 - DNA, 1257 bp, Oryza sativa
  Clone ID: PAT_MRT4530_90630C.1
atggacttggagaagccgggcttgatggacaccgcctccagctcggcctccgtcaaccacgcggcaaagccatccaagacgtgctggtacgagtgcacgagccgcgcgccgcttgccggaggctgtcatgtcgccggggaggaacgacatgtgccagctccgcagctcgccgtcgtccatcatgcgggcgtctgctcgcggcttcaggaggacaaagaggattgggcgaatgtggtgggagtggagatgatcaggatggtggcacaaaaggcgacaagtataactcgtacggacgccattgctacggatgagtggagaatgcgcacaactgcccttgccgaacttgttgccccaccgtccgaggtgtcgaagcgccgactctctgccgccacgggcgtctcatgcgagcgtgagcgctggctcccccgcctccgtatatgcctccatctctaccgccgctgtggacgcctcctagtgagcgccagcttcctcaccataaggggtggacaggaagctcatggctcggtgcataaggagtacaagattctgaagaaggaagggcgatacaatgtcaaagctgtggtagagattgttctgagcggagaggtgtacaggatcatcgacggcggcgcgtcacacaaatcggagtacagaatcgtcggcgcaggaggcgagcgtggaaggcatagagccgccgacggcgccgaggatggacctcgctggtcgccgccgtcgcccatgatgcgccgcgccgacgaggagctccgagctcatcaaagccaacgtcgtcgactcgcggggcactcgccgatgccatcaatgtcgaaccacagcctttgctacttcaggctcacccaccgcgctgagcaggagctcgccgagccagcatccaatcccgcgccaccgcaggagctcgctacgcgcgcggatgccgacctacaaggcagaggggagctcgagtcgctagcttatagcgaggtgcggatgcagacggcgtggaagcgtgaccgcagggcgatcctcgccgtcgaacttcttcttcctcccgacggcgacgacatcaattgtggcctggtcgagcccaagccccgtgtcgtggccttgtcgggaaggccggtcgggacggcctgcaacggcagtggtggcgacgacgacagcagcggaaggagggcggcgcgtgctggcgtcgacgacgaggttgagtataatgtttgtgagggagatggagctggttcaggccgcgtgttgacgcggtga

SEQ ID NO: 92119 - DNA, 244 bp, Oryza sativa
  unsure (1)..(244): unsure at all n locations
  Clone ID: PAT_MRT4530_90631C.1
caaaaacttcctctgctgcttagctaaagaatcatcgccatcatnagtgtngagatcctcgacngcaagacggtccggagcttcgtngaggacgagggcnccttcaacncctcggtcgacagccgcttcnccgcgctcgacncaaccgcgacngcctcctctcctacaccgagatggccggggagctgatgagcctccgcgtgctggagaagcacttcggcgtcgacgagagngccgccatggg

SEQ ID NO: 92120 - DNA, 764 bp, Oryza sativa
  Clone ID: PAT_MRT4530_90632C.1
ttacgccttcgtccatctcagcccgcttttgtccgttaccaggcaagcctcccctctgttgcccttcacccactcgatccggtggaggggaaaattgttgtcatcttcaactggggtgttggccagggagaaggagaggagagcccccgatgaactctcacccagatccgcaccgccgccatcgagcttgccgtcggacgagagtggtggcaccggccaggggagtaggagaggacaggccccgacgagctctcgcgaggaggaggggccgtggtggtggatgtggtcaccgccactgctgacagatccaccagcggacgccgccggatcagccgcgggaggaaggcgagagagggcggagggagccgccgccactagatctgcccgtggccgcggccgccgctgccaccaccgctggcgaatctgccttgaaagggaggctagagggaaagatggagccgcccctaccgccaccgccaccgccaccgccaccgctgctatatccactgcgggagagaggcgagagggagaggaggagggggcgagggaggcgagacaaggcggagggagtggtcgccggcgagggaggcgagacggggaggaggaagccggcggctccgtcgccgccaccgctcgcggggagggaagaagggcgccgccgcagctgctcgtgtttagggctccggaccgtccatttgatcggatggctctggcttctcccgcatcgggccgccggactattgggcctccaaatgggtcgcgac

SEQ ID NO: 92121 - DNA, 212 bp, Oryza sativa
  Clone ID: PAT_MRT4530_90633C.1
tttttatttttaaaacacacacaaactccccactgggggggcttatatattatatgggggggctacacaccccataacaatttctatactccatgacttattaccacaggattgcacacttgatgacaacggcagaactcactcaacctgtccatcacggaacttaatggcatctcagcatctcctactatcacctcctgacctacttggat

SEQ ID NO: 92122 - DNA, 349 bp, Oryza sativa
  unsure (1)..(349): unsure at all n locations
  Clone ID: PAT_MRT4530_90634C.1
ctttcataatacatgattccccattgtttcagggatgcatgatagttttatatatattgctgggattccatttgtttaacagcaatgtggttatagcacatattttcatttttttacacacagcaaaatagcatgcacaaagagatattggcctgatttttttccctatgtaattgtacgatgtgaccatatacctatggttagtgcatgatgccacataacaatgcaccatgaaggggaaacctataaaaaatcattgtgctacttgtccgattgcacatgttctatntgtgcatgcataggaaataattagttactgctttggtgtacaataaaaattgtttttttt

SEQ ID NO: 92123 - DNA, 163 bp, Oryza sativa
  Clone ID: PAT_MRT4530_90635C.1
ccagtttgcgccacccaagaaatttggcccaacataaaccctcaccccttaggggagtccaatttgggcggcccctattatataaagggggggctcatttgcggccttttgtgttggaggcaagtttggaaaaccccgatttcgcaccccctatcaaatcgtg

SEQ ID NO: 92124 - DNA, 292 bp, Oryza sativa
  Clone ID: PAT_MRT4530_90636C.1
ctgtcatcgatcgttccaattaccaagtctcccatcgatccacaactccagttggtactgcctatgctgatggcgacgatagcctacaggcgaaggatcagctgcgagttcgagaggcggcggcggcggagcaggaggccggagcgcgttacgatcgcgaccacaggacgcgacgccgccaggaggttcgccaccgccgccgccgccgcggcggctcctcctagcagggagcgcgtccgccgccgcgtcgtcctcccgccggcgtcgtcgttgtaccgcccgggccacgcca

SEQ ID NO: 92125 - DNA, 402 bp, Oryza sativa
  Clone ID: PAT_MRT4530_90637C.1
aaaaaatagccagttcatttcctggaggaattggacaaaaacccccctggtctgaatgtttttttttttggaacttcacctccctgtggggaaataaaaattggaaacccttgcaatttaactgaattcctgataaagacgggatttttttttcgggtaaaaattgctggggaatgcatgttttttttcacaggtgaatcaactttgatcatgctaataagtttctagctttaaaattagggccggaacctggctctgaatttttttttcaataattctgccaaaaattccaaatgaacaacaattcctttgaagttcaatccccccatttgattttgatctggtggggagctgaaccttttgatttcttcaaactcattttttcaaaaggacaagcttggg

SEQ ID NO: 92126 - DNA, 324 bp, Oryza sativa
  Clone ID: PAT_MRT4530_90638C.1
gggccttaattcgacctgccgggaaatgctaactcaaaaaaagagccatgaatgcttatagctggagctgtaaaagaaaggggaagagctcaaataggagaaacgacaaaattgctggtgcacacgcacaatgaatacttgcgacacaagaagctcctacatcaccagtgatcgtggtctgatcacatgaggtataacaaatctgggaacagttatacgcattaacaatcctcttggctatttacaaatcctggccgagccactgggtcaaggctctgagtattatttacaagatgccaacgggggcatacatttgggttctta

SEQ ID NO: 92127 - DNA, 906 bp, Oryza sativa
  Clone ID: PAT_MRT4530_90639C.1
atggtagcgcaagcagcgcccgtgcctccacgcgtccttccgcttcgccattatcgccgtcttccgcgtcgccatcgtcgccatctttcccggccgccgccgttcccgtcttccccggccgccgccgtcgccgtcttccccggccgccgccgccgccgtcttccgcgaccgccaccgtcccgccaccctcgcccgcagcccacggccgcccgtcctcgtcctcggccgcagccgccttcttcgtctttcgtgtcgtcatcgtcgccgtcttccccagccaccatcgtcgccatcttcctcggccgccaccgtaccgccaccctcgcccgcagccatggcagccgcccgtccttgtcctcggctgcaatcgccgtcaccgttttccttgatcgtcatcgtcctcggcggccgccgccatcgcctgcggctgtcccaccatcctcgcccgcggtcgccgtcctcgtccttcgcgcgatggcccatgtccctcccgccgtcctcttctacgacaaccaccgccatcgcccgcggccgtcccgccatcctcgcaagcggtcgccgtcctcgtccctcatgtccgccccaccatcatcactcgcgtttgccgccgtcgctcgcatccgtcgcgctgtcctcgtcctccgcggttgtcctcgtccacgcccgcggtcgccgtcctcgtccaccgcagccgtcgccgttgcctgcactcgtcccgccgtcctcgtccacggcggacgtcgtcctagtctgcggccgccgtggctgtcgacaacgtcgcccttgtccatcaacgccatcaccctccccttgtccacagcggtcgccgccgccctcgtccgcattcacagccatcgttgtcacccatgttcaccgccaccttctccgttgccggcgtccgtgtaa

SEQ ID NO: 92128 - DNA, 567 bp, Oryza sativa
  Clone ID: PAT_MRT4530_9063C.1
atgcaggaagctgcattacaagcgattgtgtattaccgacattataggccagggttggacgggttctttcatttctttccagctcgcacaaaccaatcctccgctaattactatccaggtcttgagggaaacatgagagagattgacactccaggactattcttagctggcctggttcgtgctatggatagatatctcgcaaaaactataactgagttgcgtagattgcaagctagggtggtcatgcttgatagacgaatagaaccactcgggcatcaaggacattttgataatgccatcatttatgggaatcatgaactccagcctcttacagagactttgcctcctcccatgggtatttatcataatataaacactagagcccgcatgagagttggttttcatcgaaatcgtcgaaccatgccagaccctgcacttgctggagatccggtgctgctggggccattctatgagttcgagcggaatgggagacaataccgtttgactatggccactccgtcaaccacagtgcctcaacctcccatcggattctccgaagttccatag

SEQ ID NO: 92129 - DNA, 1341 bp, Oryza sativa
  Clone ID: PAT_MRT4530_90640C.1
atggactgcgcgctcatcactttgctgccgctgctgacggcctcccccttgccctcgccgaccttcgtccgcactcctaccacgaggtggttcaagggcactggcgacaatggagactcgggactgggccacgtcaacccgctcctctgcctgggcgggcgcctctcttccaggggcctcctcgtcaccttcaccaccgtaccccacgatggactcaagctgaagcttcagccaaacgatgacggcgccgccatggacgtgggaagcggcaggctgcgcttcgagcccctgcgcggcggccgcctgtgggcacccgccgatccccggtaccgcgcccccggtgacatgcagcgccacatccaggacgccggtccagctgcgctcgaggggctcatccgccgccaggccaacgccgggcgcccggtgtcgttcatcgtggcgaacgccttcgcgccgtgggcggccggcgtcgccagggacatgggcgtcccgcgcgccatgctgtggacgcagtcctgcgccgtcttgtcgctgtactaccaccacttatactcgctcgtggcattccccccggccggagcggagacgggtctcccggtccctgtccctggcctcccggcgctgaccgtcggcgagctcccagcattggtgtacgcgcccgagccgaacgtctggcgccaagcgctcgtcgcggaccttgtcagcctccacgacacactgccctgggttctcgtcaacaccttcgacgagctcgagcgcgtggccatcgaggcgctccgcgctcatttgccggtggtgccagtcggccccctcttcgacaccggcagcggtgcgggcgaagacgacgactgcgtggcgtggctggacgcgcagccgccgcgatcggtggtgttcgtggcgttcgggagcgtcgtcgtcatcggccgtgacgaaacggcagaggtcgcggagggcctcgcgagcacggggcatccgttcctgtgggtcgtgcgcgacgacagccgcgagctacacccgcacggcgagagcggcggcggcggcgacaagggcaaggtggtggcgtggtgcgagcagcggcgagtgctcgcgcaccccgccgtcggttgcttcgtgacgcactgcgggtggaactcgaccacggaggcgctggcggcgggcgtgccggtcgtcgcctacccggcgtggtccgaccagatcaccaacgccaagttactggcggacgtgtacggcgtcggtgtccggctcccggtgcgtcgacgaggtcatgagcgggccggaggcggaggcgatgcggctgagggcgcgggagtggagcgacaaggcgagcgcggcggtggctaa

SEQ ID NO: 92130 - DNA, 380 bp, Oryza sativa
  Clone ID: PAT_MRT4530_90641C.1
ggcgggcccccttttttttttaggggaaatttttttgacatatccccctgaaacccgaggatgttaacagtttcccccaggacataaattaaaatttcggggtggggcaaaaaaaaaaaaaaaactttcctccaagggtttttaaaatttaaaattacattgccaattccccttttttttttttaaaaaaaaaaaagtttattttaaagggggttttacattcccaaaaatgttcccgggccttttttctaaaccccaaaaagaaaaagggggggaaaactttttaaaggggccaccccccatgggtacattaaaaaaacaaatccctaaagggctaaaaaaaacttttcccaatttgaaaatcggttttttttcctggg

SEQ ID NO: 92131 - DNA, 210 bp, Oryza sativa
  Clone ID: PAT_MRT4530_90642C.1
caccataaacaaagcttcccggtttttccggttcgggggccatggaatcccttggcaaccaaaaggattttcctgggttttggccatggggcggaccaggtcaataacccggttgctgaaacccccctctttgtcgacccaggcaacaagcttgacaaagttatggttaaaaacaattccacccttggcatcaaaaatcccctcgttcca

SEQ ID NO: 92132 - DNA, 1824 bp, Oryza sativa
  Clone ID: PAT_MRT4530_90643C.1
atggatcttgggaagtcgacctccaccgccgcgaccctgaagaaacttcaggaggagggtggcctccctggccacgacaaggcagagagggaagcaggagtgcccctcttctcgcagcacgtccccttccagtgcccctcttctcgcagcaaatggcagaacaggtggttttatctcgagattaaggactcgaatcctgccctcattgttcctgacgagcagccaaacaagattccggtttggaccgccaagccccctttgaccccctctctccaatcgtttatcgacatcatcgatgatcttcgagaacggggcttatcggggtatgaagtcgttgcagacttcgttggtaggagtatccagccgcttcaggctcgagcccacccggcgtataattattccaggccagatgacgcgacccgggtttctcctcgggctctgagcagtgacggcgtggagcgacgcgttggtcaggtgatgatcagcggcgcgacaaccgcgagcgacatccctgtgcccctttgtgaaaagggagaggcggaacgcgacgaggcgatcaatgtggcggcttctctgaaggagaaggtggtcgaggaggcatccgacgccgctgctggtagtggtggcaaggctccgagtttccgacgcatcccctcctcttgcagtcgtcaacgccttgtgacgatcggcgagaaggaggcacgagcgaaagcggctcgggccaagtctggggggacttctagcgcgtcccctgtaacagcgtcgactgacgtcgctcccgtgatcgggactcgggaggcgacgccaagcggccccagcggcgaccccgtcagaaaccgtggcgcgccagagtccatcctcacctgggaggagctccaagtcgagatggggcgccttctcgaagccggcgctcgcggcattggtcgcgaggtcacggaggcgagggcggagacagcggcggctaacgcgcgcgcggagcggctgttgcgggagctggccgaagcccgcgaggacctcgtgaaaatgagggaactagtggccggcaacgagtgccaacgcaagggactcgagaaccgcatggcggaactcggagataacctctccgagatccgtggttctctgagggtcacatacaccggcctccaccagcttgccgcggaagatgtcgatgatgaggatgtccggcagcgcgggcaacctgaatcgatggcgataaccccggtactcgagttagaaccgagcgcggcgcatatcgtcgatggccaggttgctgatgcagagaccgaagtggcggcaactgacccgaatctcgaggatgcctttgcgactcaagatcgtcgtatccaatactggaagacgaaatgtgaagtggcggaactcgagagggcgatgctagccatgaaaaaggaccaagctgtggaaacactccgaggtcgagaggtgtggttctcctcttatctgaagaattgctgcacctcgatggcgagggtgtgccgagatcttcgggtagcccgcggtgatcctgaagagtcggcggccgggtacatctcgtggctcaatggagcctgcgctcaactcgacggcattggtcagcggatcgacgaggccctgaagcaagagtgtcgtcgagcgagtcgatatgccggggggcatgtgttggcctgtgtgcgagatcaccgcccgcgcctggatctcgaatttcttcgtgagggttttggccgttctcggagaaatccggcagagattgaccatctcgcgagatcaatgtcgccgctggccgagaagattttcgttggccttcttggtagaatttgtaccctgtaa

SEQ ID NO: 92133 - DNA, 1767 bp, Oryza sativa
  Clone ID: PAT_MRT4530_90644C.1
atgaccccaactctgatcgacatcaccatgatcactggattagatgtaacctcatcggctaaccctatgagtatgaacaccaagaaccaatttgattttaggaccaaaagcatagggggttggtcggggtatgtagcggcatatatgggcaaagggcctgtcacccctcgggagcatgtagctttcttgcttatgtggctagagaagttcctcttctgtggatctagctgtggtcctacaaccaattggcaatttgtagccgaagccctagaatcaaagaagcaatttcccttaggcaaaatcctcctcggctatctatatcatatgttaaataacgcatcagccaaaatagccgtcggcttagtggttggagcaggtggaccatggtggctgctacaatcttggctcaacctaatggtcatgaaagtagtcaatcggccatctgtgacagaagctgaattcccaaggttggagccgattgtagaagatgatggagaagaacgcactcatcgtagatgcaagtcatatggagaatatgcatccacaccagccgatgccagggcaaaattatcagctgaactgctcaaggattggttctgtagtttttatgaaggctttcagaaagatgcccggatggtggggcgagtggaaactgcatctattccaccaatcggcttctatgtatatgatggatctctttcccgatgttatacctcaggtctaattcctaatggaggtgggccatctcctcctgtcatcggctatcatgcccccaagacttcgactcttctccaaggcttaatcagagaactagccgatgcaagcaagaagagaagaaccaggtcatcggctgcagacacgttagctctagccccaaagaagaaggccaaactcaagaagcctaaaccaaccgatgacctgcctgtcctagatccatatattgaacaagctctagatgaagaagatattgaagacgatgttgaccaatccgcagccgaagtgagcgatacagaaagaacaccatcggcttcacccaagcagacccctccaactccttctgccccaactcatttttcaagagccttagccgatctattttccttcgacattaaagactatcttgatgaagaaacagaagaatataccaccagcaaatctttagttcccttgtccgatgatgtaaagaaaacccttgaagacatctctcatcggctagaagcatcatcactggacaacttggtggtaaactgtgggcctattaggactcggctacatgagatccatcctctaatcccagatgagctagccgatatccttactccagctatctatcttgagcagcatcaattcaagctagagaaagccaagctaagattagccgaacgtcgggagcgtaaagatatcgaagcaacaatccaagccaatcgtcagcttgtgcacgaagagaagtccaagcttgatcagctacctgagggcccgatcaaatccaacattgatcggcttgaggcttgcaagattgagctcttggtacaacttgaagaatgcaacgccgagctggacatagaacataaaaagctggctgatctcccaagatccattgaagaacagaaggcaagattaaaatcgactatcaagaatgttgccgatctcaccaagtctttaaaagtcattcctggaaccgacacccaagatgcccaagccattgaagaagtggaacaaatcaggcaaagggctatttcggctatccagcaatacttgtcttggtga

SEQ ID NO: 92134 - DNA, 1329 bp, Oryza sativa
  Clone ID: PAT_MRT4530_90645C.1
atggatcttgggaaatcgacctccaccgctgcgaccctgaagaagcttcaggaggagggcggcctccctggccgcgacaaggcggagagggaagcaggaggtactactccccaacccgtcctaggtcgcatggttgcgattgaggattacattgtctgcggcgttttcgtgcatctttgtgaggcctacattggagtagagccttttctagatttgtttcgcttttattacgagttgcgttggatggaatccaacaaagtgtctggctgcgttgggttccgacttcgtgacggaatgaagtcgcgctacgtccccttccagtgcccctcttctcgcaacaaatggcggaacatgtggttttatctcgagatcaaggactcggatcctgccctaattgttcctgaggagcagccggacaaaattccggtttggaccgccaagccccctttgaccccatctctccaatcgtttatcgacatcatcgatgatctccgagaacggggcttatcggggtatgaagtcatcgcagacttcgttgctctgagcagcgacggcgtggagcggcgcgttggtcaagtgatgatcatcggcccgtcaaccgcgagcaacatccccgcgcccctttgtgacaagggagcggtggaacgcgacgaggcaatcaatgtggcggcttctctgaaggagaaggtggtcgaggaggcgtccgacgccgctgctggtagtggcggcaaggctccgagtaagccgaggaagttctcgtccgtgctcggacaccgtcgcaaggcggagacttcgacggtctcggaggcgagggcggagacagcggcggctaacgcgcgcgcggagcggctggtgcgggagctggccgaagcccgcgaggacctcgtgaaaatgagggaactagtggctggcaacgagcgtcaacgcaagggactcgagaaccgcatggcggaactcggagataacctctccgagatccgtggttctctgagggtcacatacaccggcctccaccagcttgccgcggagtgtggggtcaagtcgacgatccccaagaaccccgacgagttctccctaacctcttctctggaggagctggcgacagcgatgggagagatccccgcgaagcaggcggcccgacttgcggaggagacgtccaacggcatttataccggggcgtgtcacgtcctcgcgtgcgtgcggttgtcgcgtcctgagctagatctccgcgagatcttggaccagggggcggcgagcgacgcacgtaagggggtgatggaggaagtcggtgacctgggggagtctgtcgtccccctcttcgaagagtag

SEQ ID NO: 92135 - DNA, 565 bp, Oryza sativa
  Clone ID: PAT_MRT4530_90646C.1
atggatcttgggaagtcgacctccaccgccgcgaccctgaagaaacttcaggaggagggtggcctccctggccacgacaaggcagagagggaagcaggaggtactactccccagcccgtcctagtcgcaatacgtccccttccagtgcccctcttctcgcagcacgtccccttccagtgcccctcttctcgcagcaaatggcagaacaggtggttttatctcgagattaaggactcgaatcctgccctcattgttcctgacgagcagccaaacaagattccgacttcgttggtaggagtatccagccgcttcaggctcgagcccacccggcgtataattattccaggccagatgacgcgacccgggtttctcctcggggtgatgatcagcggcgcgacaaccgcgagcgacatccctgtgcccctttgtgaaaagggagaggcggaacgcgacgaggcgatcaatgcccttcccttgactgacgtcatcggaccgctcgcggatcaccaggtggcggcttctctgaaggagaaggtggtcgaggaggcatccgacgccgctgctg

SEQ ID NO: 92136 - DNA, 390 bp, Oryza sativa
  Clone ID: PAT_MRT4530_90647C.1
atgtgaactagatcaacacggctgaatgaaccccaatctcagtcacagccaagcccaagcttaggagtgaactccaacatcttagcaccaacaagcagtagcttctcctcctacgaaaccaaccagctgccgccggtgaccgtcgatccgtcgaccgccgccgccatgagcagcgatgttcctgggtacttcgtggggcggccgatgaaccaagcggagcctgcgaaagaacagcagcagggcgccgacgagcagcggcctgctaccaacgcgcagatccctggtgctgcccatgcctcgacagccgagctgagggatagacgaacaagtgcggcggcgggcgtgaccgtaaattcgatgggaaaattgaagcaaatttgcttggagtga

SEQ ID NO: 92137 - DNA, 2067 bp, Oryza sativa
  Clone ID: PAT_MRT4530_90648C.1
atggatcttgggaagtcgacctccaccgccgcgaccctgaagaaacttcaggaggagggtggcctccctggccacgacaaggcagagagggaagcaggaggtactactccccagcccgtcctaggtcgcatggttgcgattgaggattacattgtctgcgggtttcttcctcccccctctgaattccttttgctggtcttaaacttctatgggctttcacttttgcacttgaatcccaactccatcgcatttctcagcattttcgtgcatctttgtgaggcctacattggagtagagccttttctagatttgtttcgcttttattacgagttgcgttggatggaactcaacaagtcgcaatacgtccccttccagtgcccctcttctcgcagcaaatggcagaacaggtggttttatctcgagattaaggactcgaatcctgccctcattgttcctgacgagcagccaaacaagattccggtttggaccgccaagccccctttgaccccctctctccaatcgtttatcgacatcatcgatgatcttcgagaacggggcttatcggggtatgaagtcgttgcagacttcgttggtaggagtatccagccgcttcaggctcgagcccacccggcgtataattattccaggccagatgacgcgacccgggtttctcctcgggctctgagcagtgacggcgtggagcgacgcgttggtcaggtgatgatcagcggcgcgacaaccgcgagcgacatccctgtgcccctttgtgaaaagggagaggcggaacgcgacgaggcgatcaatgtggcggcttctctgaaggagaaggtggtcgaggaggcatccgacgccgctgctggtagtggtggcaaggctccgagtttccgacgcatcccctcctcttgcagtcgtcaacgccttgtgacgatcggcgagaaggaggcacgagcgaaagcggctcgggccaagtctggggggacttctagcgcgtcccctgtaacagcgtcgactgacgtcgctcccgtgatcgggactcgggaggcgacgccaagcgggcccagcggcgaccccgtcagaaaccgtggcgcgccagagtccatcctcacctgggaggagctccaagtcgagatggggcgccttctcgaagccggcgctcgcggcattggtcgcgaggtcacggaggcgagggcggagacagcggcggctaacgcgcgcgcggagcggctgttgcgggagctggccgaagcccgcgaggacctcgtgaaaatgagggaactagtggccggcaacgagtgccaacgcaagggactcgagaaccgcatggcggaactcggagataacctctccgagatccgtggttctctgagggtcacatacaccggcctccaccagcttgccgcggaagatgtcgatgatgaggatgtccggcagcgcgggcaacctgaatcgatggcgataaccccggtactcgagttagaaccgagcgcggcgcatatcgtcgatggccaggttgctgatgcagagaccgaagtggcggcaactgacccgaatctcgaggatgcctttgcgactcaagatcgtcgtatccaatactggaagacgaaatgtgaagtggcggaactcgagagggcgatgctagccatgaaaaaggaccaagctgtggaaacactccgaggtcgagaggtgtggttctcctcttatctgaagaattgctgcacctcgatggcgagggtgtgccgagatcttcgggtagcccgcggtgatcctgaagagtcggcggccgggtacatctcgtggctcaatggagcctgcgctcaactcgacggcattggtcagcggatcgacgaggccctgaagcaagagtgtcgtcgagcgagtcgatatgccggggggcatgtgttggcctgtgtgcgagatcaccgcccgcgcctggatctcgaatttcttcgtgagggttttggccgttctcggagaaatccggcagagattgaccatctcgcgagatcaatgtcgccgctggccgagaagattttcgttggccttcttggtagaatttgtaccctgtaa

SEQ ID NO: 92138 - DNA, 8767 bp, Oryza sativa
  Clone ID: PAT_MRT4530_90649C.1
atgggtgacgacctcaaggcctccatcgaggccctctccaaggacatggcgctgatgcacgagtcgatcaaggccaacgccgcctccatcgcggccaacgccaaggcgatcgctgcgctcgccaccaccaccagttcatctacgtccggcgcccgccccggctttggcgatcagccgccagaccggccgcccaagcactggcgacccgacttcccgcactacgacggcaagagcgacccgctaatcttcatcaaccgctgcgaatccttcttcctgcaacagcgaatcatgcaagaggagaaggtttggatggcctcccacaacctcctcgagggcgcccaactttggtacatgcaggtccaagaagacgagcgcggcacgccgacgtggactcgcttcaaggagctcctcaatctccgctacgggccacctctgcggtccgctcccctgttcgagctgtcctcctgtcgccgcacgggcacagtggaggactaccaggaccggttccaggccctgctcccccgcgccggtcgcctcgacgaagaacagcgagtgcagctgttcaccggaggccttcttcctccgctcagcctccaagtccagatgcagaatccccagtcgctggcggctgccatgagcctcgcccgccagttcgagctgatcgagcagtacaccgccgttcccgccaaagctcctggtcggggtgtcctgccggcacctgcgcctcggccgcaactcgccttgccggctccagctggggctgccaagcccgcgccgcccgccgccaccgctgctgataaccggccggtcaggcgcctgaaccaggccgaacaggaggaacgtcgccgcctcggcttgtgcttcaactgcgacgaaaagtacagtcgcggccacaacaaggtttgcaaacgtctgttctttgtggacagcgtggaggacgaggacgaggaagcgccggaggacgaggtcgacgcggaggcaccggtgttttctctccatgccgtggccggcgtcgccgtgggacacccgatcctgctccgggttcagctgggcgcgaccacgctcgtcgccttggttgatacagggtcgacccacaacttcatcggcgagtcggcggccgctcgcaccgggctgtccgtccagccgcggccacggatgacggccacggtcgccaacggcgaaaaggtggcctgcccaggcgtcctccgccacgcgcccatcaccatcgagggcatgccgttccacgtcgacttgtacgtcatgcctctcgccggatatgacatcgtcctcggcacccagtggatggccaagctgggccggatgtcctgggatgtcaccacacgcgccctgacgttcgacctggagggccgtaccatctgctggcagggcgcgccaaaccaggacgggccggcagtccgcgcggccagcgcagacgactccctattgggggggctcctcgactccttcgccgacgtcttcaccgagcccacaggcctgcctccacagcgcggccgtgaccacgccatcgtcctcaagcagggcacgtcgccggtggctgtccggccctaccgttacccggcggctcataaagatgagctcgagcggcaatgcgccgccatgatctcccaaggcatcgtccgccgcagcgactcggcgttctcgtcgccggtcctcctcgtcaagaaggcggacggttcgtggcgcttctgcgtcgactacagagcgctaaatgcgcttaccgtcaaggacgcttttccgatccccgtcgtcgacgagcttctggacgagctccatggcgcgcgcttcttctccaagctcgacctgcggtccggctatcaccaagtgcgcatgcggcccgaagatatccacaagacggcgttccgcacccacgacgggctgtatgagttcttggtcatgccgttcgggctttgcaacgccccggcgacattccaagccctcatgaacgatgtgctccgctccttcttgcgccgctttgtccttgtgttttttgatgatattttgatctacagtgacacatgggctgatcatctccgtcacctccgggctgtgctgacggtgctcagggagcacaaactcttcatcaagcgcagcaagtgtgcctttggcgtcgactccgtggcataccttggccacgttatctcggctgctggtgttgccatggacccggcgaaggtccaggccattcgggagtggcctcagccacgctcggcgcgtgcggtgcgcggcttcctcggcttggcggggtactaccgcaaattcgtccacaactacggcaccatcgctgcgcccctcaccgccctgctcaagaaggaaggattcgcctggaccgaggcagccacggcggcgttcgacgccctcaaagccgcggtctcctcggcgccgatcctcgccatgccggacttcaccaaggccttcaccgtggagtgcgacgcctcctcccacggctttggcgcggtcctcattcaagacggccatccgctcgccttcttcagccgtcctgtggcgccacgtcaccgcgccctcgctgcgtacgagcgcgagctcatcggcttggtgctggccgtccggcattggaggccgtatctttggggccggcacttcaccgtcaagaccgaccactacagcctgaaatatcttctggatcagcggctgtccaccattccccagcaccattgggtgggcaaactgctgggcttcgacttcacggtggagtacaagccgggcgcagcaaatactgtggcggacgcgctgtctcgtcgcgacaccaccgaggacgcttctgtcttggtgctgtctgcgccacggttcgacttcatcgagcggcttcgccaagcacaggacgtcgacccggcgctggtggcgctacaggcggagatccgctccggcacacgcgcagggccgtggtccatggccgacggcatggtcctgttcgctggccgcctgtacctgcccccagcgtcgcccctgctccaggaggtcctgcgcgctgtccatgaggagggacatgaaggcgtccagcgcactctccaccgactccgccgggatttccactttcctaacatgaagagcgttgtgcaggattttgtgcggacctgcgaggtctgtcagcgctacaaggccgagcacctccagcctgccggtcttctccttccactgccggtgccacaaggagtgtggactgacgtcgcactggactttgtcgaagcgctgccccgtgttcgcggcaagtccgtcatactgactgtggtggacagattcagcaagtactgccacttcatccctttggcgcacccatactcggcggaatccgtcgctcaagtcttcttcgccgagatcgtccgtctccatggcgttccacaatccatggtgtcggatcgcgacccggtcttcacgtccgcgttctggagcgagctgatgcgtctggtgggtacgaagctccacatgacgacggccttccaccctcagtccgacggccagtcggaggcatccaaccgtgtcatcatcatgtacctgcggtgccttactggtgatcgcccccggcagtggctgcgctggctcccgtgggcggaatttgtcttcaacaccgcctaccagacctcgctgcggcataccccgttccgggtggtctatggccgcgaccctccctccatccggtcgtatgaaccgggggacacccgcgtggcagctgtggccaaaagcatggaggagcgctcagagttcctggaggacattcgctaccgcctggaacaagctcaggccatccagaagaagtactacgacaagtcccatcgtgcagtgtcgtttcaggttggggactgggtccttctgcgtctccgccagcgcgccccagcgtccctgtcgctggcagtctccggcaagctgaagctgcggtatttcgggccctaccgcatcgcggagatgatcaacgaggtggctgctcgcttggcattgccggccggcgcccgccttcacgacgtgttccacatcgggctgctcaagaagtggcacggcgcgcctccagacgctcccccgccgctgccgaacgtgcaccacggcgcggtggcctgtgagcccgagcgagtcatcaaagcccgcttggcccgtggggtgcgccaagttctggtccagtggaagggcacttcagcggcgtctgctacctgggaggacagggagccattcttcgcccgctaccctgctctacagctcgaggacgagctgcctctcgacggagggggagatgtcatgtgggggcgcacgtatgtgcgacgccgcagagcgcgagacgttcgccgagctgcggaacgcgcggcgcgcgcagaggcagaacgcgcggctgcggcagatcaggccacgccaggggccagctaccctagggatcaacgcccttgacaacctggtatcgcggtcacgtcgatcttcgtcttccgttgccgactccacctctgccccagccaccaccgatcccatctacgactccaccaccactccagccgccgcccctgctgtcgctccgcccaatttcccacctgctgccgccgcctcccctgcgtcctcaccctcagtcgcgtcctgctcggcccaccacatgggtgacgacctcaaggcctccatcgaggccctctccaaggacatggcgctgatgcacgagtcgatcaaggccaacgccgcctccatcgcggccaacgccaaggcgatcgctgcgctcgccaccaccaccagttcatctacgtccggcgcccgccccggctttggcgatcagccgccagaccggccgcccaagcactggcgacccgacttcccgcactacgacggcaagagcgacccgctaatcttcatcaaccgctgcgaatccttcttcctgcaacagcgaatcatgcaagaggagaaggtttggatggcctcccacaacctcctcgagggcgcccaactttggtacatgcaggtccaagaagacgagcgcggcacgccgacgtggactcgcttcaaggagctcctcaatctccgctacgggccacctctgcggtccgctcccctgttcgagctgtcctcctgtcgccgcacgggtacagtggaggactaccaggaccggttccaggccctgctcccccgcgccggtcgcctcgacgaagaacagcgagtgcagctgttcaccggaggccttcttcctccgctcagcctccaagtccagatgcagaatccccagtcgctggcggctgccatgagcctcgcccgccagttcgagctgatcgagcagtacaccgccgttcccgccaaagctcctggtcggggtgtcctgccggcacctgcgcctcggccgcaactcgccttgccggctccagctggggctgccaagcccgcgccgcccgccgccaccgctgctgataaccggccggtcaggcgcctgaaccaggccgaacaggaggaacgtcgccgcctcggcttgtgcttcaactgcgacgaaaagtacagtcgcggccacaacaaggtttgcaaacgtctgttctttgtggacagcgtggaggacgaggacgaggaagcgccggaggacgaggtcgacgcggaggcaccgctgggcgcgaccacgctcgtcgccttggttgatacagggtcgacccacaacttcatcggcgagtcggcggccgctcgcaccgggctatccgtccagccgcggccacggatgacggccacggtcgccaacggcgaaaaggtggcctgcccaggcgtcctccgccacgcacccatcaccatcgagggcatgccgttccacgtcgacttgtacgtcatgcctctcgccggatatgacatcgtcctcggcacccagtggatggccaagctgggccggatgtcctgggatgtcaccacacgcgccctgacgttcgacctggagggccgtaccatctgctggcagggcgcgccaaaccaggacgggccggcagtccgcgcggccagcgcagacgactccctattgggggggctcctcgactccttcgccgacgtcttcaccgagcccacaggcctgcctccacagcgcggccgtgaccacgccatcgtcctcaagcagggcacgtcgccggtggctgtccggccctaccgttacccggcggctcataaagatgagctcgagcggcaatgcgccgccatgatctcccaaggcatcgtccgccgcagcgactcggcgttctcgtcgccggtcctcctcgtcaagaaggcggacagttcgtggcgcttctgcgtcgactacagagcgctaaatgcgcttaccgtcaaggacgcttttccgatccccgtcgtcgacgagcttctggacgagctccatggcgcgcgcttcttctccaagctcgacctgcggtccggctatcaccaagtgcgcatgcggcccgaagatatccacaagacggcgttccgcacccacgacgggctgtatgagttcttggtcatgccgttcgggctttgcaacgccccggcgacattccaagccctcatgaacgatgtgctccgctccttcttgcgccgctttgtccttgtgttttttgatgatattttgatctacagtgacacatgggctgatcatctccgtcacctccgggctgtgctgacggtgctcagggagcacaaactcttcatcaagcgcagcaagtgtgcctttggcgtcgactccgtggcataccttggccacgttatctcggctgctggtgttgccatggacccggcgaaggtccaggccattcgggagtggcctcagccacgctcggcgcgtgcggtgcgcggcttcctcggcttggcggggtactaccgcaaattcgtccacaactacggcaccatcgctgcgcccctcaccgccctgctcaagaaggaaggattcgcctggaccgaggcagccacggcggcgttcgacgccctcaaagccgcggtctcctcggcgccgatcctcgccatgccggacttcaccaaggccttcaccgtggagtgcgacgcctcctcccacggctttggcgcggtcctcattcaagacggccatccgctcgccttcttcagccgtcctgtggcgccacgtcaccgcgccctcgctgcgtacgagcgcgagctcatcggcttggtgctggccgtccggcattggaggccgtatctttggggccggcacttcaccgtcaagaccgaccactacagcctgaaatatcttctggatcagcggctgtccaccattccccagcaccattgggtgggcaaactgctgggcttcgacttcacggtggagtacaagccgggcgcagcaaatactgtggcggacgcgctgtctcgtcgcgacaccaccgaggacgcttctgtcttggtgctgtctgcgccacggttcgacttcatcgagcggcttcgccaagcacaggacgtcgacccggcgctggtggcgctacaggcggagatccgctccggcacacgcgcagggccgtggtccatggccgacggcatggtcctgttcgctggccgcctgtacctgcccccagcgtcgcccctgctccaggaggattttgtgcggacctgcgaggtctgtcagcgctacaaggccgagcacctccagcctgccggtcttctccttccactgccggtgccacaaggagtgtggactgacgtcgcactggactttgtcgaagcgctgccccgtgttcgcggcaagtccgtcatactgactgtggtggacagattcagcaagtactgccacttcatccctttggcgcacccatactcggcggaatccgtcgctcaagtcttcttcgccgagatcgtccgtctccatggcgttccacaatccatggtgtcggatcgcgacccggtcttcacgtccgcgttctggagcgagctgatgcgtctggtgggtacgaagctccacatgacgacggccttccaccctcagtccgacggccagtcggaggcagccaaccgtgtcatcatcatgtacctgcggtgccttactggtgatcgcccccggcagtggctgcgctggctcccgtgggcggaatttgtcttcaacaccgcctaccagacctcgctgcgggataccccgttccgggtggtctatggccgcgaccctccctccatccggtcgtatgaaccgggggacacccgcgtggcagctgtggccaaaagcatggaggagcgctcagagttcctggaggacattcgctaccgcctggaacaagctcaggccatccagaagaagtactacgacaagtcccatcgtgcagtgtcgtttcaggttggggactgggtccttctgcgtctccgccagcgcgccccagcgtccctgtcgctggcagtctccggcaagctgaagccgcggtatttcgggccctaccgcatcgcggagatgatcaacgaggtggctgctcgcttggcattgccggccggcgcccgccttcacgacgtgttccacatcgggctgctcaagaagtggcacggcgcgcctccagacgctcccccgccgctgccgaacgtgcaccacggcgcggtggcctgtgagcccgagcgagtcatcaaagcccgcttggcccgtggggtgcgccaagttctggtccagtggaagggcacttcagcggcgtctgctacctgggaggacagggagccattcttcgcccgctaccctgctctacagctcgaggacgagctgcctctcgacggagggggagatgtcataggcagaacgcgcggctgcggcagatcaggccacggtcagtggctaggatggaaaggataa

SEQ ID NO: 92139 - DNA, 1331 bp, Oryza sativa
  Clone ID: PAT_MRT4530_9064C.1
cgcactgatggcactcatccttgacgccaagggtgactatgatggtgccctggagcaccttgtgcttgcctccatgaccatggtcgccaatggacgtgacattgaggtcgcgacgatcgatgtcgcgataggcaacacctaccttgccctcgcccgcttcgacgaggctgtcttctcctaccagaaggcgttgacagtactcaagtctgcccgtggtgatgaccacccttcggttgcatctgtctttgtccgcctcgcagacctttaccaccgaacagggaggctccgcgagtccaaatcctactgtgagaatgcactccgtgtctatgcaaagcccgcgcctggcgctgcccctgatgaggttgctggaggcctaatggagattgctgccatctatgaggcgcttggagaccttgatgaggcactgaagcttttgcaaagggcactaaagttgcttgaggactcaccaggacagtggagcactgttgctggcatcgaggcacaaatgggtgtgttgtactacatggtagggaggtatgccgattcaaggaactcatttgaaaatgcggttgccaaattgagagctagcggggagaggaagtcggcattttttggagttctgttgaaccagatggggctagcttgtgtgcagctattcaagattgatgaggctgcacagttgtttgaagaggcaagggcagttctagaacaggagtgtggtgcctctcatccagatactctcggcgtctacagtaatttggctgcaatctacgatgctatgggcagggttgaggacgccattgaaatactggaacacgtacttaaggtgagggaagagaagctcggcacagcaaacccggatgtcgaggacgagaagctaaggcttgcggagcttctgaaggaggcagggcggtcccggaacaggaagcagaaatcgctggaaaaccttttcgtgaccaactcgcagcgtgttaagaaagatgctgggaggaggtggtccaactttggcttcaggagttgaggaacacaccctcacctcacctggtgatggagggtggcctttgtaacataaagggaagaagaagaaaaaaccacatgtgtaaaggtgttgtagactaggaagaatatgatgatgattgtgtttgccgtttgagattctaaaatgccattgttgtgaattacagctcgctattatctcgagtatttttttttctcccccacagttttaactggttcttagtgttgtatttggataatgtattgatttgtgctggtggttgatgatgaattaatactactactgttaccacctgtgatgtgatttgtttgtc

SEQ ID NO: 92140 - DNA, 734 bp, Oryza sativa
  unsure (1)..(734): unsure at all n locations
  Clone ID: PAT_MRT4530_90650C.1
gccagcaatggagcagaatattcatttcaaggaaggagaaaaggcatgccggtttggaatggacaatttcatcgaattcgcactctgatgatacgaatgaacaattggtatacaaatgaatagaagcaaccttcagttacaaacatctattagcaaaacttgcaacacaaacacagatccgagccttatcactccaagcaaatttgcttcaattttcccatcgaatttacggtcacgcccgccgccgcacttgttcgtctatccctcagctcggctgtcgaggcatgggcagcatttggccaagaagctcgatctctcctgcgcccgcggaggttgcgacggcggctgctgcgggtttgccggacgcccgacgaagtagtcaccagggatctgcgcgttggtagcaggccgctgctcgtcggcgccctgctgctgttctttcgcaggctccgcttggttcatcggccgccccacgaagtacccaggaacatcgctgctcatggcggcggcggtcgacggatcgacggtcaccggcggcagctggttggtttcgtaggaggagaagctactgagcacacaaggagatggagaagaagacgaagagggtaaggagaggcacaggaagatgcttccttcctctcttcccaggctggcctacggccaatgnattcgcgccgaggttgtgatttttttcggccgcgacgacctaaaacccaagtcgttgctcaagtggc

SEQ ID NO: 92141 - DNA, 366 bp, Oryza sativa
  Clone ID: PAT_MRT4530_90651C.1
aggtgtggttctcctcttatctgaagaattgctgcacctcgatggcgagggtgtgccgagatcttcgggtagcccgcggtgatcctgaagagtcggcggccggtacatctcgtggctcaatggagcctgcgctcaactcgacggcattggtcagcggatcgacgaggccctgaagcaagagtgtcgtcgagcgagtcgatatgccggggggcatgtgttggcctgtgtgcgagatcaccgcccgcgcctggatctcgaatttcttcgtgagggttttggccgttctcggagaaatccggcagagattgaccatctcgcgagatcaatgtcgccgctggccgagaagattttcgttggccttcttgg

SEQ ID NO: 92142 - DNA, 444 bp, Oryza sativa
  Clone ID: PAT_MRT4530_90652C.1
atggcggcggtgattctggcgaactccggtaagggcggcggccatggtgagcatcagtggagcaaggggagcgcggtggtggcggcggctcggcctggggcggccggcagcggcggcacgccgtacggctggcgacggccgaacagagcggcgacgtcgggaggcggcgccggcgatgttccggcgatggatttgaaggggaaagagaggggaaagggagtactcggcatggagaatccatttgtaccttcaatttcagaagatttgcaacttgagggacgaaggagttacggaggcgggaagctggaggtgtcatctgggcattcgttcgtcgttcgtcctcgtgtgcgcgcgtgcgagcgtgtggcatacgcgggctggcacgagctgggcgtgagcgtgcgcgagcatggtgcgggatcggcgcgtgacaacacggggtga

SEQ ID NO: 92143 - DNA, 309 bp, Oryza sativa
  Clone ID: PAT_MRT4530_90653C.1
atggacctccaaggaggaaacttcatgtacctcttccttcttggctaccgacatctttgccttggcgtggaccaccagccaatattcggtgtcctctgcagcagcagcactgacctatcggtgcggtgcggccgcgcgtcgcgcgtggctttgtggaagttccaccccgacccccgcgccgagaggtggagtccatttcctactttggctctccgcgacgtcacgatcgggcggtgccgggtggtccagggggacacacgccggtggatcgcggccgtccgtccgtccgtgccggcgcccctgagctga

SEQ ID NO: 92144 - DNA, 228 bp, Oryza sativa
  Clone ID: PAT_MRT4530_90654C.1
atgaggaagaaaatgaagtggtgtgggcgggggaaggaccgggttagtgttacggctcgccggcggagagcggtggcgcgcgggtgggagaagaggcggggggcggcggcgccggcggcggcggacgcgacgctcgactcgaacgttggacctttcgaatgcgttgaacaaccacatcacgaggtgatcgccggccttaggctgaggatgaagggcaattggagatag

SEQ ID NO: 92145 - DNA, 263 bp, Oryza sativa
  Clone ID: PAT_MRT4530_90655C.1
aaaacaagaaaatttgtaaatgctcgttttgaagtactttttcggtcccgaaaaacaaaacctgaacaacccccctacaacattgaaaacctgatttacgggccaacttggagaagtcacagtccttgtacaaaatgtttgcagttgatgatcgagtttgaccaagtttaatttaacaatgcagggaattgtttgatgccgcaaagggggatgcattgtcagttcacccccacttggccatgaaggacattcccccggccccc

SEQ ID NO: 92146 - DNA, 963 bp, Oryza sativa
  Clone ID: PAT_MRT4530_90656C.1
gtgagtctccccagtttcctgatcttggaagaaccaccaatacttggcaaactgaggttccatccaacattcaggatcgtggtcacaaagataacatgtcgcaagccacccgtgcatatgaatggccccaaaattgaacctgtctcaagcttcacatcatccaatcagattccgctgctgggaaatgagatgcagggccaagtagcatcactagctagcaatgttccaatagcattcaatcaggacacatgaccattcaactatggaagcggcacaaactcaagagacatgctaaataacagccatgtatttagtaactccagcatcaacacatcgttgcccaaccttagcttagacaatccggctgtaccaaggcagacactggatcgtgggaatacgggcattgtttctcccatgcaagatggaaggattcatcaccaagctgttagcaatcagctaaactataatgacgatcttatgcggacaactgggctgcaaaggggtctcagtggtggtctagatgacattgttgttgacatgtttaggccggaccgcgaagacgacggcgttccttacatcgatggggactgggagctggtctagccagcctccatttcaatcattagtccgcgtacgaggtttttctgcattcgcggtgtcggctgctgattggtccatgctcacttgtcagcacaaagtggtgttcatagtggctagccttcatcacaagtgcatttcacatttggcttcttttttcagcttagtgattattagttggccagtcagtctgtgaaatttatgtggagaaacggctatgtggtgtgtttttatcatgacttatactataataactatgttagttcaggtataaccggttatcctgataatatagtatgcttggtaaaattctcgttaatcatccctgcagcccgggctcccgactagttctctctctctctctcc

SEQ ID NO: 92147 - DNA, 216 bp, Oryza sativa
  Clone ID: PAT_MRT4530_90657C.1
attcccagggtcagacaccactgctgtccagcactccgcatcctcataggcaccacagggcttgccccggagatcccggaggaccatcgatacttccttgatcaagaaaggctgtctctgctattaggaagacatcttggagaggacacacggataggaccacaggactccacagttcaggcgttattccttgttgagaccacggatcacaaccgc

SEQ ID NO: 92148 - DNA, 349 bp, Oryza sativa
  Clone ID: PAT_MRT4530_90658C.1
gtttccagttggcttgtactacggtcaaggtcggctctgataccaacttgtcacgcccagaaattcacgaaccagaatttctaagctgaatgtgcattaaacccctgtccaggaccagccagggtacacaaacgacaattgttgatatacagatccacgtcttacaaaaatataaaacattacaaatgcagcggaaaacgaggcgactccattccacaggcatccttgacggcagcgacgaagccaacttcttcgagacatcttcaactgaaaaggacttcaactctagtgtgggggaaaagagagcaagactgagtactatccactgtactcagcaagtcataccgga

SEQ ID NO: 92149 - DNA, 249 bp, Oryza sativa
  Clone ID: PAT_MRT4530_90659C.1
agcccgaatagtgcggaccgattggcactgttcattttattgcaccagagagaaggcacgaagtgaccctgaccaccaagcctctacatggacaaactgttttgcaaccctgcatagtacataaacgctcgcattgaacaaaacaagaacgttgtacacagatctggcatcccgtgcttataaacgaaataaatggggatatgtagatatacggtctcctgaaacaaaatgcccggcccaggatggcgt

SEQ ID NO: 92150 - DNA, 125 bp, Oryza sativa
  Clone ID: PAT_MRT4530_9065C.1
tttttttgttttatcaacatcacctattcaaatttataagctcctgatgtaactaactcccaacggtcagttttgataggaagaacaaagtataaaatcatgcgagaatctatctggtgctcaag

SEQ ID NO: 92151 - DNA, 595 bp, Oryza sativa
  Clone ID: PAT_MRT4530_90660C.1
atggtgggcggcggcggtgggagaaggggagaccccaccaccaccacgcgagcggaagcgggggcgccggggcgggtgcggggggatgggaggggtgacgtcgagcgtggcagcgaagatgccttcttcccgccgacgccgccatcgtacgcgctggtggatgaccacctggcgggggtgaccaccatgacgggccaaccacacagggagaacatcgaggtgctccacctccggacgcggcggtggaacaccgtggtggcggtgtacgtccgccacctggatgccaccaccacgttgctctactcccacggcaacgctgctgacctcgggcacctctaccagctcttcctccatctctccttcaacctccgtgtcaacgtcctcagcgtcttccacgcgacggggatacctctagagggctggcgtggctggcggctggcaggggaggagcgctgcggagaggagggccgatgtgacgggcgccgccgccgatggctactgtcgcgcggatggccacggcggcgcggccgcgcgggtgttcgacttccggtcgccgctcgtcgacctccttgccgtctccgccgcgcgcttctga

SEQ ID NO: 92152 - DNA, 674 bp, Oryza sativa
  unsure (1)..(674): unsure at all n locations
  Clone ID: PAT_MRT4530_90661C.1
gnaattgtaatacgactcactatagggcgaattgggtaccgggccccccctcgagttttttttttttttttttgttctcccccgangtgctctaaatgcacnntttcatctcgagtatgattnttcatctcanacccaactcccatgaaagcgatgnacacaatanatctactttaattacgattggcccnntggccaaatnngtatatagaacacnggangcttgtcttcccactccaaattcactccgacggagggtttgggnggtcnngnnctcgtcctngagcantcngtccaataccccctntantcgnngacgaaanntcaagtcttgantcanganaatgtccggaccatgantcacttcttcaccgattaaaacactcgtctcganggggtggattccggcanaggcnatngtnaccagaagttggagaanacggtggaagatatccacactcgtngcaccgccttcgatatcttaaacgggagttgaagaagaagtccangcgaagagctggccgacngnttggccaggttngttcaataacgggaaggggatantttgctgcgnngtgccanaccggnctnancactttnctgggggtnccccgctntnaaaataangaaggattaacccctttttcctgnaataaangttnttgttnnaaana

SEQ ID NO: 92153 - DNA, 380 bp, Oryza sativa
  Clone ID: PAT_MRT4530_90662C.1
atttatatgttctgttttttctatatatgacatggtgttataaatgagtttcttgtccttttttcataaggattgactttatccatagaataattctaattaaaacaatactaaatttcttccaaccaaccctagattgttcgagcaccacattattatctacattttattatgtagaaatagaaatatgttttgagtggatatgagtcgcattttattatgtagaaatagaaatatgtttgagtggatattgagtcggttgttagagatttggcaagagactgcctatgtggtcttgtttgtatattagcatattatgccatgacaagaagtactgccctgcccttgatgtatgcttctgtgctctaattgattcaata

SEQ ID NO: 92154 - DNA, 519 bp, Oryza sativa
  unsure (1)..(519): unsure at all n locations
  Clone ID: PAT_MRT4530_90663C.1
cggcacgagggtaaatacaatattacctctgcttattgtaggagaggtttcagctgaatgtgctgctgagaaacttggcattcgagttggggatattattctctctctccagggnagagagcatttcaagtataatccagttggagaatatattgctcagtattggtgagagatatcttgaggagggtaacgactccagctctaaggttgatatcaaggttggtctatttcatgtgcgtaaatgtaccagaagatttatcactttatcagtacggttgtctggtgatattgaagtctttcgctgagctcgatggcgacctcctgacgaacagaagagatggtgagacgacaagttagtactgcatgttggaaggaatgaagtctttttagaggagtggtgttcaaagtttttggtctggcaggttatactctgatgtctgcaagtctgttcgtggtcttgatacatgatttctattgttgggtttccaagtgtgtgcttgcagttgcacccattagtcc

SEQ ID NO: 92155 - DNA, 330 bp, Oryza sativa
  Clone ID: PAT_MRT4530_90664C.1
atgccggaggagggcggcggcttcgctaccacgggcgggggtgcccagtggcggcttgctggcatggaggaaacgaagagaaatagatggagaagagaggaagagaggaggaagaaggagaagctcgaccttggccccagtggacttcctgttgtcaagtgcccaagatgtgggagatgcagtagtggagtgcaaatcgtgaaggcaaggtggtcaggctgggatctagcacctggattcagtggtgccttccttggtgacctcctacttagtcctgcaactggagctggctgtgagctggagcctgcctacaattgctttccttggtga

SEQ ID NO: 92156 - DNA, 333 bp, Oryza sativa
  Clone ID: PAT_MRT4530_90665C.1
atggtgccggctcaggtggcaccggccaaaggggcagtgccggccaaggaggcaccgaccgagggggcaccaatggcatcgttgaccgcggtgaccgtgccgtccggcaagcggcggccgaagagggggaaggagctggaaaggcaaggagtggtgaacggaggaagagggtctccggctgagaaggtaggtagcggtggcgagagcctcagcccagcaggacggaaacatggaagcctggataagaagggtgcttatggagttgttgatggtgcggagcatccgttcggctttaccattttggggagaggtgtaagggcaggagagtcgtag

SEQ ID NO: 92157 - DNA, 641 bp, Oryza sativa
  Clone ID: PAT_MRT4530_90666C.1
atcatcgccgtcgcagctgctcccctgggaacagagggagagggagaggatacaatcaccgcccatgagtgggagggcatcatcgccgtcgcagcaactcccctgggaagagggggcatgcccggagagggtacgatcgtcgccgatgagtgggagggcatcatcgtcattgcagcagctcccctgttgaagagaggacatgcccggagaggataccatctctgccaaagaagcagcagctcccctgtgaagagaggacatgcccggagaggataccatctctgccaaagaagaaaatgtattggtttgctcgctctcgggaagccaattccgtgcaagtatcacgtccagtggaagcatcatatcctgaggcaaccgagggcaaaccagagtataatctgcacgtcttgaagagcatgaagaagaagaagaaaaagaagaagaagcggggcaaaaggaataagagaggtcaaggcggctccgaggacaagagccaagagaagcaagaggtagcacaagagcatctgggctcggtgtcgtcctcatacagctctccgctgcgtgaaccgcaagctccacttgtgcctatgtggacgagtccttctggagaggtggtgtatggcatcaccgatgatcccaca

SEQ ID NO: 92158 - DNA, 585 bp, Oryza sativa
  unsure (1)..(585): unsure at all n locations
  Clone ID: PAT_MRT4530_90667C.1
ttttttttttttttttttttttttttcaaaacaaatcgattcatttatgaggtacgttgactcattctcacattacagtttatctaaacagctgaaacctattcagagtccccaaattctcaatccaggcacaagcgtttttacggttcgtgaacatatttgtcttttcaaactaaaacaaaccaatacaaagttcaggagcgtggaactccaattcttcagagcaaatcaggcggtctccttgggggattcagcgttgacgtacgcgaggaactccttgaggtgctggttgtagacgcagggcctctctatgtgaaccaggtgccctgccttgctgatgctctgcagcattgccttctctccgagctgctctttcatcgtcatggcgagctcaatgttgaaaatgtngtcgttctccccccatagcaggagtattttctgcggcagaacgggnacggtggcgtctttgttgctgaccaccaaaccttccagcagctcggctctttcctttcggttggtgaacatcacctcgaggtagtctctgtgaatgcggtcagggaaccagagcttcctgtgggtggcaat

SEQ ID NO: 92159 - DNA, 5475 bp, Oryza sativa
  Clone ID: PAT_MRT4530_90668C.1
atgggcggagacaaaggcagggtggcgggcgggagcggaggcagcgccgaaggagagctgagggcagcagtgggggcgttggcagagggaggcgaggacggcggcggggcgaagagggacgaggatggcggcgagcatgggtggagacaaaggcagggcgaccgaacacccgaggctgacgccaccgttgacgaccttggggagtttgacttcgaagacgaggacggcttcaacgcttaccctttccttgtcgtcgatgatggcgtaaccgaggacatcgataacatcattggcaaactcagcatggagaagaactcagtggctgcaacccacgtggacgccgttttgtacaaggccgccatacgcccatacctaataagcctcaatgcctcgctgcgcgaactcatcagaagcgccgcctccaccctaatcccacttctgtcggcctgcggcctgtgcgagctccgatccgccgcctccaccggaatcgcctccgctgccgtcggcctgcgggagcgcttcgaaccggcaaggatgaaatcgcgcagggcgctgtggatttccagggaacggaccagaagaacggcgaactacgaagaccgggagaaccccttctgggcccttgcaggtatgccgccgccgtcgtctgtgccatgccaactacagtcgactggtggcactgggatggagtcaagcccggagcacctcccttcgccgccgtgccaggcaaggacaccatcgccgcccccgagtgggagggcatcatcgccgtcgcagctgctcccctgggaacagagggagagggagaggatacaatcaccgcccatgagtgggagggcatcatcgccgtcgcagcaactcccctgggaagagggggcatgcccggagagggtacgatcgtcgccgatgagtgggagggcatcatcgtcattgcagcagctcccctgggaagagaggacatgcccggagaggataccatctctgccaaagaagaaaatgtattggtttgctcgctctcgggaagccaattccgtgcaagtatcacgtccaggggaagcatcatatcctgaggcaaccgagggcaaaccagagtataatctgcacgtcttgaagagcatgaagaagaagaagaaaaagaagaagaagcggggcaaaaggaataagagaggtcaaggcggctccgaggacaagagccaagagaagcaagaggtagcacaagagcatctgggctcggtgtcgtcctcatacagctctccgctgcgtgaaccgcaagctccacttgtgcctatgtggacgagtccttctggagaggtggtgtatggcatcaccgatgatcccacagctgcagaagcctatcattgggcttttcacgagtacaagaacaagagagatggtagagagattaatcagggaactggtataattatcgagtgcgatgaagtgaagaattctgctatcattttaacttctgcttggctcatttgcataaagaaaccttttgatgattggtcgcataaagattatgctcctgaggctaaggtcactgttcacatgttggatgacacgatctcagtgtgtcgattgctgtacttcagcaagcatttcgatattgccttatttgaaactgtaggagggctaactataccgattatgccattgaaatctgatttggaatatggccaggatttctgtgtgctcaccagagacataaatatagatttgatttgcacaacagtcaaagtgaagtacttagatccgtatgagcaccaacacaatcactatatgttcattggtggttccattcccaagtgtggtactggaggtgcattggcagatttcagtggaaacactgttgggatgttattctgcaccttgcccatggttgcattcctaccgagctccctgatcctcacgtgcctaagattgtggaagaagtttgggcaaattgttcgacctcagcttggtttgaagtttaaaacagtggattttcaagagatgacgcttattgagttgctgtctcgtaaatacaatattacctctggtcttattgtaggagaggtttcagctgaatgtgctgctgagaaacttggcattcgagttggggatattattctctctctctccagggagaaagcatttcaattggagaatatattgctcagtattggtgagagatatcttgaggagggtaacgactccagctctaaggttgatatcaagcacgtcgtcgtcgcaactgtgttctccaccatgtcaactgaatccactcagtcctctacctcatcatcctccagtggtggatcctcttccaacatcactagcgagtttcttcatccctacgccaccgtcgccgtcaaatcacacgtccccatcaccctggagaacaaccacccaaactacaacaaatggagggccttcttcacctccctgtgcggcaagttcgggttgatggctcacatcgacggctccgctcctccacgccctgacgacccggcctgggaacaggccgactgctgcatccgtagttggatcttcggatcagttacggacaacgtcgttgacctcgccatggagctagatcagaccgctcgggagctctgggtcgccatcgaggacatgtttcacgctaacaaagaaccccgagcgatcttcctcagccaccaatttcattccatgcttcaaggggactcctccattgccgactactgccagaagatgaagacagccgccgacgcccttcgcgatgtcggccacgccgtctccaagtcccaactcgtgctcaaccttctccgaggactaaacgaccgcttctccaacaccgccgatcagatcgcaagcgcggacgtcctcccgagcttcacatcggcgctcaacaccctcctgttgaaggagttgcgcatcgccaaccaggccaaggtggccgcggcgacggcgctggtcaccggcgccagctcgggctccggctcctcttgccctcccggcggctgcgcttcttccggaggtcaagcatgcactggcggcaacaacagccgccgcagcggcaagggcaatggcagctggatcggtggcgggaatggaggggccggaactggaggcggatggggtagcggcagtgggggtggtggcagcggctgcccgcttcctcctgctggtggcggtggctaccagggggtggccaaccctagctggaggccggccgggccctggcttgtccattgcgatgtgtggacatctccggtgttgagtacttcgggttttaaatattactttgtggtgcttgatgatttcagtcatttctgttggacgtttccactccgacacaaatctgatgttcatcgtcatattgttgagtttgccgagtatgtttccacccaatttggcttaccgctcaaatcccttcaggctgataatggcggagagtttgtcaataccgccaccacttcctttgtcactaatcgtggcacccagctacgactctcctgcccttacacctctccccaaaatggtaaagccgaacggatgctccgcaccatcaacaactccataagcacccttcttatccaggcttccatgtttccgtcctgctgggctgaggctctcgccaccgctacctaccttctcagccggagaccctcttcctccgttcaccactccttgcctttccagctcctacatctcaccactccagactactcccatcttcgggtttttggctgtctttgttacccaaacttgagtgccacgactccacataaacttgcccctcgttcaacagcttgcgtttttcttgggtacccggcctcccacaagggataccgatgtctggatctctccactcgccgcatcatcatttcgcaccacgtcgtcttcgacgaatcccgctttccctttgcggcgactcccactgctgcctcgtcttttgattttttgttacagggattccctccagcagtcgcttcctcctccgaggttgagcaaccgcgaccactcacggaggctccctcctcagaggtcgagcaaccgcaaccactcacagtggctcccgagcaaccgcgatcccttacggtggctccctccgtggagctgcattccatggtgacgcgctcccagactggctccctgcggccggtcgaccggctgacctacacagctacccacgccaccgtctctcctatcccggccaactatcgcagcgcgttggcttatcccaactggcgtactgctatggccgatgaatacaaggctttggtcgacaacggcacttggcgcctcgttcctcgcccccttggggccaacgttgttacgggcaagtggatcttcaagcacaaattccactctgatggctcccttgcccgccacaaggcccgttgggtgctcaaggagaccgtctactgtcagcaaccctctgggtttgttgaccctgctgcccctgatgctgtatgtctgttacagaagtccctgtatggtctgaagcaggctccccgtgcgtggcgtatcctccgctacgtgaagggtagtctccaccagcctccacatcggctccggaccggttcagtccctgacagcatactccgatgcggattgggcgggttgtgccaattcttgttgttctacgtccagctactgtctcttccttggagacatttggtttcttggtcctccaagcgccaaactactgtctcctgttccagtgctgaggcggagtaccgtgttgttgcccatgccgtcgccaagtgctgccggttgcggcaattgctccaggaacttcatgtcccggttgctttggctattatcgtctattgtgacaatgtgagcgctgtttacatgacaacgaatcctgtgcatcatcgctggacgaagcatattgagattgacatccattttgtccgtgagaaggtggctttgggacaaattcgggtgcttcatgttccttcatcacaccagttcgcggacatcatgaccaaaggcttaccagttcagttatttactgaatttcagtccagtctttgcgttcgtcatcctcccgttgcgactgcgggcgggttggtctatttcatgtgcgtaaatgtaccagaagatttatcactttatcagtacggttgtctggtgatattgaagtctttcgctgagttgcacccattagtcccttgccacattcttgcggttttacacctatccttgtgtgaattttcggtcgggatctcgtcagcgtggacacccgaagatgaattggaatcaaagacaaaacaacgacggacgaaacctattcctgttgaggaagaaaacgaacactaccagcggcgaggattttgcaatgcacaatcaggaggtccatgcgtctccgcgctctgtgggattgtggcagagctcgtagatggcgccaccgctgaatatgctaccggagctgcacgcgcggcaggggtggcctgcacgccgcgctccaacgatgggtccagagcatctcaacatccctaa

SEQ ID NO: 92160 - DNA, 1745 bp, Oryza sativa
  Clone ID: PAT_MRT4530_90669C.1
ctcatctgaccgcagtttagctccctcttagacagaggccagagggagaaagagagagagagaggagaaggctgagactgaacattcaagatggccggaggtgtcatcgtggcgaacgacggtgatggctccgccgtggaccacggcggacggctgacgttctcggtggtcatcacctgcctcgtggcggcctccggcggcctcatcttcggctacgacgtcggcatctcaggcggcgtctcgacgatggagccgttcctgcggcggttcttccccggcgtggtgaggaggatggcggaggcgaggcccgggaacgagtactgcgtctacgacagccaggcgctgacggcgttcacgtcgtcgctgtacgtcgccgggctggtggcgtcgctcgtggccagccgcgtcaccagggcgatggggcggcaggccgtcatggtcatgggcggcgcgctcttcttcgccggcggcgccgtcaccggcttcgccgtgaacatcgccatgctcatcgtcggccgcatgctgctcggcttcggcgtcggcttcaccaaccaggcggctcctctcttcctcgccgagatggccccgacgcggtggcgcggctcgctcacggccgggttccagttcttcctcgccgtcggcgtcgtcatcgccaccgtcaccaactacttcgcgtcgcgcgtcccctgggggtggcgcctctccctcggcctcgcgggggcgcccgccgtcgtcatcttcctgggcgcgctcttcctcaccgacacgcccagcagcctcgtcatgcgcggcgacacggcccgcgcgcgcgccgcgctgctccgggtgcgcggggctggcgccgacgtggaggcggagctgaagggcatcgtgcgcgccgtggaggtggcgcgccagggggaggacggcgcgttccggcggatggcggcgaggcgggagtaccgcccttacctggtgttcgccgtggccatgcccatgttcttccagctcacgggcgtcatcgtgatctccttcttctccccgctggtgttccgcaccgtcgggttcggcagcaacgccgcgctgatgggcaacgtcatcctcggcgccgtcaacctcgtctgcctcatgctctccaccctcgtcatcgaccgctacggccgcaaggtgctcttcatggtcggcggcgccatcatgatcatcgcccaggttggggtggcgtggatcatgggggcgcaggtggggaagaacgggtcggaggcgatggcgaggccgtacgcggtggcggtggtggcgttcacgtgcctgcacacggcggggttcgggtggtcgtggggcccgctggggtgggtgatccccggcgagatattcccggtggacatccggtcggcggggcaggcgatgaacgtgtccatcggcctcggcctcaccttcgtgcagacgcagtcgttcctcgccatgctctgccggttcaggtacggcaccttcgcctactacgccgcgtgggtcgccgtcatgaccgtcttcatcgccgtcttcctgccggagaccaagggcgtcccgctcgagtccatggccaccgtctgggcgcgacactggtactggaagcggttcgcgcgggagcaaccaaagacgagcgccgacgaaccgaccgggacgtactgatgtttcacgatgtgtagatgtacttaattctgtggagtacatgtcttgtataacttttgaatcatggtacttggtcctagttcactcgtctgtttcaatcg

SEQ ID NO: 92161 - DNA, 412 bp, Oryza sativa
  Clone ID: PAT_MRT4530_9066C.1
gttagcatattttattggttcatgaaaaagagagccatgggcgggggcaattttttatcaaagacaaaaacaagaggtttcaaccgcacacatgcaaactatttttggaacgaggctaacttcttcttggcggcaaactgggccacctgggcaccgggggggtacttcttctccacgttcttgatgacgccaacagccacagaatgcctaaggggacccaccgcataacgaccaagaggaggggactaaaaaaaggcctccaccccccccggctggggaggaagcaccttgaccatacaaacctccccggtattgaaaaacttgggcaaaataaaaaaaaacatgggggaggggccgccaatattgggcaccaactccccaaacttgagagcactgtgggaggcgcggcacc

SEQ ID NO: 92162 - DNA, 1605 bp, Oryza sativa
  Clone ID: PAT_MRT4530_90670C.1
atggccggaggtgtcatcgtggcgaacgacggtgatggctccgccgtggaccacggcggacggctgacgttctcggtggtcatcacctgcctcgtggcggcctccggcggcctcatcttcggctacgacgtcggcatctcaggcggcgtctcgacgatggagccgttcctgcggcggttcttccccggcgtggtgaggaggatggcggaggcgaggcccgggaacgagtactgcgtctacgacagccaggcgctgacggcgttcacgtcgtcgctgtacgtcgccgggctggtggcgtcgctcgtggccagccgcgtcaccagggcgatggggcggcaggccgtcatggtcatgggcggcgcgctcttcttcgccggcggcgccgtcaccggcttcgccgtgaacatcgccatgctcatcgtcggccgcatgctgctcggcttcggcgtcggcttcaccaaccagcacgacgggttcgatcgtgtcgtgtgggttcttgacgaacgaaatgggcaggcggctcctctcttcctcgccgagatggccccgacgcggtggcgcggctcgctcacggccgggttccagttcttcctcgccgtcggcgtcgtcatcgccaccgtcaccaactacttcgcgtcgcgcgtcccctgggggtggcgcctctccctcggcctcgcgggggcgcccgccgtcgtcatcttcctgggcgcgctcttcctcaccgacacgcccagcagcctcgtcatgcgcggcgacacggcccgcgcgcgcgccgcgctgctccgggtgcgcggggctggcgccgacgtggaggcggagctgaagggcatcgtgcgcgccgtggaggtggcgcgccagggggaggacggcgcgttccggcggatggcggcgaggcgggagtaccgcccttacctggtgttcgccgtggccatgcccatgttcttccagctcacgggcgtcatcgtgatctccttcttctccccgctggtgttccgcaccgtcgggttcggcagcaacgccgcgctgatgggcaacgtcatcctcggcgccgtcaacctcgtctgcctcatgctctccaccctcgtcatcgaccgctacggccgcaaggtgctcttcatggtcggcggcgccatcatgatcatcgcccaggttggggtggcgtggatcatgggggcgcaggtggggaagaacgggtcggaggcgatggcgaggccgtacgcggtggcggtggtggcgttcacgtgcctgcacacggcggggttcgggtggtcgtggggcccgctggggtgggtgatccccggcgagatattcccggtggacatccggtcggcggggcaggcgatgaacgtgtccatcggcctcggcctcaccttcgtgcagacgcagtcgttcctcgccatgctctgccggttcaggtacggcaccttcgcctactacgccgcgtgggtcgccgtcatgaccgtcttcatcgccgtcttcctgccggagaccaagggcgtcccgctcgagtccatggccaccgtctgggcgcgacactggtactggaagcggttcgcgcgggagcaaccaaagacgagcgccgacgaaccgaccgggacgtactga

SEQ ID NO: 92163 - DNA, 496 bp, Oryza sativa
  Clone ID: PAT_MRT4530_90671C.1
ggcacgcactggctttcccgtctttggacgacttgcaccactccctctcataccacgagctgaacccacccatacggtacggttccgtgtccggtgcaccactacatggcctggccgttgtgccactacttcatctacactggctcagaagtgctacctcaccagcaaccagctgagctgctactgcagggacctgcccatgcatcagggctatgcagaggggcgtccgcgtgatctagctctacatgtggcccaactcctccaaggataacttcaacctcctccatggccggacgctcaccacgcaggtctacctcctcctgtgccttctttccatcaaggaacacgcctttgatgcctgcttttaccctgttatcatcacactcgaagaccaccttactcccgatcttgatgacaaatcagccaaaatggctcttgaaggcttcggcgactttctctactaccctgacttagatcacctcaaagagttcccttt

SEQ ID NO: 92164 - DNA, 972 bp, Oryza sativa
  Clone ID: PAT_MRT4530_90672C.1
atggcggcgcgtggttgcccgcggcggcgagaacagcggcacgacgtgggaggggaaaagaacgatgcgaccgtggcgagaatagcagggaggaggcgagacgacgttggtgataagggctcggaagcgagaaaggggatgccggcagcaaggatgtccttggcgggtttgacgccgaggtgggctgatggagttgtccgcccgtggcgagatggtcaccgcgacgggagcggcaaggcgccaagacggcgcggccggggaagaagaggggagcgcgaggatggggcggtccggtggcggcgaagcgacgttcttggtagcggcggcgacggccagcgacaaaggaggcggcggcgtggtcaaggtgggggcggcgaggcgctgcagcggcgtcagcggctctgcctcttgagcaagaagccaaggagtggaggcagggagctcgctacccaggagggggaaaaagcgaaaggaggaggaggaggaaagggagctttgctccttccgttttgggaggaaagggatgagaacgagccgcgcctcatggttttggatgcacgtggcatggggcgccaggcccgagaggatgacgccggcgatgactgtaaaaaggacggggacggtttgaaggcgagcgtggacacggtggttgtcggggcaagcgacgaccgagggagaaagagagagagagagagagggcgctctctctcgctcagagcgcgtgcgacacacgtgctggggggaacgtgccgagagaggagagttgggccagggaaggaggaatcagcccaaaagatcgacggaggtaaaatagacttttacccagaaaatttctttaaggaatatgaggagcatttgacgctggatttgaattcaaattggatatttgaactcaacagaatatggagaaaccaaggaggggattcaaagagtgaattcgataccttcgaaaatgggaaggaatttcgatga

SEQ ID NO: 92165 - DNA, 323 bp, Oryza sativa
  Clone ID: PAT_MRT4530_90673C.1
atggctaaccccagacctgctcccgctttcgcactcgcacacgtcgacggctcacccaaaccagccaacgctcaattatcaacagaaggctctgggtgccgcagcgtgaagaaaaataccccggaactccgagcaccgctcgagaagcaggcatttgacctaaagatttgtgcccagcggaatggactccatgccatcgcagctagacaaatgcaggatgttgagagaggcattgacagtcctagatcgctggagctgtcgatctctatggacttgatggatggcaagtattccggggacaagcaccgatcaagattctgcag

SEQ ID NO: 92166 - DNA, 517 bp, Oryza sativa
  Clone ID: PAT_MRT4530_90674C.1
tccccgggctgcaggaattcggcacgaggatgatattccagtcccgaattgatcatttcttacctgttccatttttatcaaaatcttttactagagagctctacatggaccagtttctcttctgtgattttgtattgctagatgctgctataggcacagaagtcccaacatttttggcaataagttatgggaaggatttattaagtgggaactccatgtcaaatgggagaaaatggactctgaatcctttgatcaacttgtggacgatttgtgtttatagaatctttattatggtcaaagtagatgattatcactaccacaccaattaaatagcttgcaattgtgactcatgaattcatgtgcttccattatcagcagagttttcaccagaacttagaaatgaggccccttggaacccagaaaagcatgcatttctttagtagtgttcctctattactaaaaggttgtttaatcaattatgctaaaattctgtcttgtcatctccagtcctctatcc

SEQ ID NO: 92167 - DNA, 2811 bp, Oryza sativa
  Clone ID: PAT_MRT4530_90675C.1
atggctaaccccagacctgctcccgctttcgcactcgcacacgtcgacggctcacccaaaccagccaacgctcaattatcaacagaaggctctgggtgccgcagcgtgaagaaaaataccccggaactccgagcaccgctcgagaagcaggcatttgacctaaagatttgtgcccagcggaatggactccatgccatcgcagctagacaaatgcaggatgttgagagaggtgaggctctgtaggcaggccgggaagtcaaccttacggccagacacaatagagagtcgtcggagtgagggtggcaaaaccattccctgcgggcataacaatttgcagtggattttcagatcttgtaggtatttgaatcccacgaaactatcgacaggcattgacagtcctagatcgctggagctgtcgatctctatggacttgatggatggcaagtattccggggacaagcaccgatcaagattctgcaggtcctcacaactgtaaagacctatataggtgagtccactaagacatgttgtgccattgctgctactgctactgctgcttgcatgctgcatcgtttcaccaccagtcgaaccaccaagaattgttactgttttcagccaaatatttcctgatagcattagaagttcgagggaaggaaacgatgggattgacagatttttcaagacgccacaatggaaaagcaccaggctccttaaagtcagcaggctctctagtctaaaccaactaggagaaaagctatcacccccaaaaccttggactgtaaggtgttcaattcttggtggaggatgcaaggcttcgagcactccattctcactactcttcactaaacttgtgactttctttcgccattgtagaactagattctggaggtaccgtttttcaacaaggctagcctcagcggcctcttcctcgttcttaacattacaaatagaactaataagtagagctacactgagctgattcatgcccctcaactcaccaattttccgcccatcccctgtttcaactataaaatattgcaagttccgtagacgagacagatttccaagcctacttatctctgataactttggagagcaaccgctataagaaatatcaagataacggagactgttcaactcgcctatgctctcaggtagcttgaccaccgtgcaaccctttaggctcaaatataggatgttggagagctgattgaaccaggtaatctcaacattgaaattgattccaaacctaagtgaatgtaatttgttcaaatcctgaatgcctctcattccgctcttcagggattcatcagcgacctcgactgacatatggcgaactgcatatagcattctcctctcattccgagacctaatccccatatcttcaagacgtgtgcttccacttgacacaacaaagccctcggccacccaaatgtcaacgatctcatctcgttcaaagctgtaatcttttggaaacatgcagcaaaatgcaaagcatctcttaagttcttgtgggagatataagtagctcagttggagggccggtaatatctcattctctcgatgtggcagctcccacaattcactgttccgaactgtctcccaatgttgcacggtcagctccatattcaacaaacgtccaatagttttggcagccaaaggagatccacataacctagaggcaatgttgtgaccaatatcttgcaattgaggatatgattctggacgctcttctccaaatgaacacttgctgaagaactcccaaaatatatctctatccaagccttcgagttggataggcttacaattgttggtggcaacacgatcagcaacagttgtaaatcttgtagttactaagatcatactgcctttaggtccgttcttgaatggtgcataaaatgactcccactcgtcaatagcttcttgccaaatgtcatccaacaccaaaaggaactttcgtctccctagctgctccatcatttccacctgaagagcatctaaactgaacagtggcttatactcttccttggtgaaagactcaatgatctcttttgttattcttctcttgtcaaagaggtctgaaacacagacccataccctcctcttgccaaagtgagcttgcacccttggatcattgtagatgaactgagccagggtagacttccccaccccaccaatgctaaaaatcggcaagacagaaacattgccgatgcatttggcctcatcaagtctaggggccctgctgctctctcccttcagtttcttcgttctgcaggatgctgatttcgtgccagtgacagtggctgctgctctcttctctttagcccgtgcagcagcacccctggtgagtggcacacccagtaactcaatcacctgatctcgttgactattacgtccaatcatcgaacgcacacccagcttctcaatcactagatctcgttctttatcacggccaaacacttgagacacatctatgactgaacttgtctccggcatgtgttgaactgcctcgatactaagacccactgaattgatcgctccctctgcccagctccggtcagcgtcctccatcttttgccgcagcgcctggtcatcgaactcgcggagaagatcctcggcgtcgtaggtggtgtccttgagctgcgacagaaggatcgccatgtccttgttcttgaacctgccccactcgccgcgattgatgaggaagcgagccttgggcaaggtggcctgcaggcgggacagttcatcgctcagctgggtcgcttcatagatgttgatcccggttgagatgatcgtttccacggcgtccat

SEQ ID NO: 92168 - DNA, 552 bp, Oryza sativa
  Clone ID: PAT_MRT4530_90676C.1
atggacaccgaggaggcggttcacctcgtggtcgtcggggtggtggccgtgggggcggtcgtcttcctcctcgccgccgccgcctcgggggcgtgcggttgcgccgccgcgttcccggccgcccggtggaggaagagggcgcaggtgggcgacgacgacgacgatgtcgagagcgcgctcgggggcgccaccacggtcacgacgtacgagcaggcggcggcggcgtcgtcgtcttcgccggcggcaggggcagcggcggagggagcggacacgtgcgcgatctgctgtcaggaatactccggcgccgacaaggtgcggcgggtggtgcggtgcagccatttcttccacgcggggtgcgtcgacggttggctccgggagaagcggaattgcccgctgtgccgcgccgtgctgtcgtcgttgccgccgcttcccaaccctggctgccgccgcggacgagccgccccgccgtgtccgccgccgctgccgccaccgttgtcgtcggctaattacttatcaggattttgcagatctcattttgttttggattattga

SEQ ID NO: 92169 - DNA, 3276 bp, Oryza sativa
  Clone ID: PAT_MRT4530_90677C.1
atggacgccgtggaaacgatcatctcaaccgggatcaacatccatgaagcgacccagctgagcaatgaactgtcccgcctccaggccaccttgcccaaggctcgcttcctcatcaatcgcggcgagtggggcaggttcaagaacaaggacatggcgctccttctgtcacagctcaaggacaccacctacgacgccgaggatcttctccgcgagtccgatgatcaggcgctgcggcaaaagatggaggatgctgaccggaactggttcggtaaacgctattcttccattctaaatcttgcaaaaattttgatccgtggtagcaaaacaaaaataaaggaggcccgagagaagctcgacaaggctgtggctgatttagaaggagtgcttaattcagtgggtgttagtatcgaggcagttcaacacatgccagagacaagttcagtcatatgtgtgtctcaggtgtttggccgtgacaaagaacgagatctagtgattgagaagctgggtgtgtgttcgatgattggatgtgacagtcaacgagatcatgtgattgagttactgggtgtgccactgatcaccagaagtggtgttgcacgagcacgggctaaaggaaagagagcagcagccccggtcattggcaacacatcagcatcatccagagcgaagcaactgaaaagagatactagggcaagacccagacttgctgaggccaaatgcatcgacaatgttcccgtcttgccgatttttggcattggtggggtggggaagactaccctggctcagttcatctacaatgatccaagggtgcaagctcactttggcaataggagggtatgggtctgtgtttcagacctctttgacaagaaaagagtaacaaacgagatcattgagtctttcaatagggaagagtataagccactttgcggtttagatgctcttcaggtggaattgatggagcagctggagaggcaaaagttccttttggtgttggatgacatttggcaagaagctattgacgagtgggagtcattttatacaccattcaagaacggacctaaaggcagtatgatcttagtaactacaagatttacaactgttgttgatcgtgttgccaccaacaattgtaagcctatccaactcgaaggcttggatagagatatattttgggagttctttagcaagtgtgcattcggagaagagtgtccagaatcatatcctcaattacaagatattggtcggagcattgcctctaggttatgtgggtctcctttagttgccaaaactactggacgtttgttgaatatgaagctgactgtgcaacattgggagactgttcagaacagtgaattgtgggagctgccacatcgagacaatgagatattaccggccctccagctgagctacttatatctcccacaagaacttaagagatgctttgcattttgctccatgtttccaaaagattatagctttgaacgagatgagatcgttgacatttgggtggccgagggctttgttgcgtcaggaggaatcatgcgtcttgaagatatgggaattaggtatttggatgatttgaggagcaggtttctttttcaaaccgatcccatgtaccctgatcaaactagatatgtaatgcatgacttgatccatgatatggcacaatccgtttatgtggatgaatgcctcttgatgcaagatttgaggtctcggaatgagaggagaatgctacatgtagttcgccatatgtccgtgaaggtggctgatgaatccctgaagaacggaatgagaggcattcaggatttgaacaaattgcattcacttaggtttggaatcaaactcaatgttgagattacctggttcaatcagctctccaacatcctatatttgagcctaaagggttgtaagctggtcaagctacctgagagcataggcgagttgaacagtctccgttatcttgatatttctcgtagcggtgtacaagaattgccgaagaaattctgtagcctttacagcctacaggttgttgatgcaagtcgttctagtctgaaagcaattagtctggatgtcataaagctaatcaacttgcgtcgtctagcattgccaaatgataaagaagccgctgaggctagccttgttgaaaaacaatacctccaggaactagttctactctggcgagggcatggcaaagagatagggaagagcagtgagaatggagtggtcgaagccttgcgtcctccaccaagaattgtacgccttaaagtccaaggttttgggggtgatagcttttctcctagttggtttagaccagaatgcctgttgaatttaaggagtctggagctttccaagtgtgatggcttgaaaaatctatcgatcgcatcgttaccttctctcgaacggctaatgctagaagcaaatttacggatggaagcagtaacaattcttggtggttcaactggtggtgaaaagacgaagcatacaagcagcagtagcagcaactgcactgcatgccttagaggactcactactatacgtcttgtcaactgttatcagctacagaatcttgatgggtgcttgtccccggaatacttgccatccatcgagtgcacagagatcaacaaatccagccatctaggactgtcaatacatgtcgatagtttcgtgggattcgaacacctacaagagatgaaaatatggcgctgcaaattggtgtgtccgcaaggaatggttttgccaccctcactccgacgactctctattgtgaattgccgtaagcttgatttcccggcctacctacagagcctcacctctctcgacatcctgcattttcgtgcctgtaacaacatggagtccattccgctaggcacaaatcttcgggtcaaatgcctgattctcaagtcgtgctcggagctgtcatccatcggtggatcgcgcgctctttcatccatgcaggtcgtgagcatatcggacggcccgaagctgcacgaagtagagcagccctttacaaagggcctgctgactaaggaggagaaggtggaactgttgaaatttactggttccatgtactacttgaatcccctctgtccgatgagtggtaacggcgatggttggtccatgggcgaacgtggcagcgaccgtgatgacgaggtggtgttggcggcagcggcagctggtgcgtgggtgaccatggcggctgcggtgtgtggtgtcgaggtggtcatggagtcgtcagagccggcgatatggcggcagcggcaggggctttggcggttgcagtga

SEQ ID NO: 92170 - DNA, 290 bp, Oryza sativa
  Clone ID: PAT_MRT4530_90678C.1
atggacgcacacgctcgccaggcgcgccagtgcggcgccgcgccacggtccggagttctgtttttcttctacgggttgcgtctcgtccgacgtcaaatcgccggagcgatgagacggtgtgcaggggatggaagcaaactcaaagggagaccactgtactgtctgcgtgacacccccccgtgcccgtgccctggcacggtcggcccgaattacgagggaggggagccgcccggcaatggaacggcaccatacactggcacgccgcccgcccgggcgacccgagaacccgt

SEQ ID NO: 92171 - DNA, 338 bp, Oryza sativa
  Clone ID: PAT_MRT4530_90679C.1
tttttttttttttttttatttttttttttttttttttttttttttttttttgttacatattttttatgattttttaaaaaaccacacgcaatacacaggaaaaatgggcttaaagggttaaaaccaaaaggttaaaagccaatttaggagggaccgataaggaagaagctaagaaacttggtccagcctaatattgcaattaccggaagaaaggttcactgccaaaaattttttgggactttagaatttaagttggtcacagcaaatattaacgtactaacatacttttatagggaaactagaagggcccgaaagacaaatgcgggttttggggtgtc

SEQ ID NO: 92172 - DNA, 622 bp, Oryza sativa
  unsure (1)..(622): unsure at all n locations
  Clone ID: PAT_MRT4530_9067C.1
ctcgttaattttttgttggaatttggttgagccggataccattttcancaccacggaaacacgctatgaccactgattacgcactctaatacgacaccttagggaaagctggtacgcctgcaggtaccggtccggaattcccgggtcgacccacgcgtccgggcgccatcaaggccatcgacacggcttccaccttttgcccggcgtgcttgagcttgttggaatcgggtatacacgggtggtttacatgaccggaacctgcatcttccagccagacacgggaagctctgggtgagcaaaatcaagagcacctgacaatgaaatgcacccgggagcagcagctaatgttcatgaccatgtttcgagaagatgttgctgtgaaatcagagagcagcaggactgcatctgtcggcaagccatggccaagtgaagaggaggttggctgaacgttttgagattgggtgccctgcccttatttgccatgcttgatgcccctgggctgcaaagcaagacaaaaatgactgattattggctgatgagttgctcatgtacctattctaattccaaccataatgaaatatgttttcagtttccgctcccacaaaaaaaaaaaaaaaaaaaa

SEQ ID NO: 92173 - DNA, 480 bp, Oryza sativa
  Clone ID: PAT_MRT4530_90680C.1
ctattggtatttcttacgaccacagataaatccacaagtgcacggaataccgccgtagcacttcacctccgagtgacctcaaaaggatatcgaactcagggaacgattattaggacggaattcagagctgtcaccacctgtcgtctacctctaacaaatctatgggatacacaacaaacaaaaagatgtttctccgaactcggagcagagtgtaccgacagctccaatactcctccagaattcctcctagaaacctacactcgtcaaggtagaagtcagagagattgccaaactttcaagcactcctccagagcttccactcactatctaactattttctaatgtgtaaaagatataatagaacctcttgtaattcagctcaaagttgtgtgccttggaagtgagatgagctcatccttttataggctccatatgacagttaaagccatgggaaatgtccaaaataccctccaaccgtca

SEQ ID NO: 92174 - DNA, 1393 bp, Oryza sativa
  Clone ID: PAT_MRT4530_90681C.1
agagggcgaaatgagaggcgatgctattgacgattctgaggcgatttgttcttcggttccctaggcgatcttagtggaatttgagttctattatctgaaatcctcgtcgttaaatggatttgtgagccactaatttgactggatttgaggttcttcttcgattccgagacgttgagctccctcgttatctaggcgaaaggcttgcgaggaatgtggtgaccatggcggtttgggaggcgtcgaccaagccgctggctggcaataatggagacgaccgagttcatcaacgccttgaaacaggagtgggacagaattgaggacaagtacacggggtccccccgcccgcccgctgcgtcgctcaggatgtggagccggcggagttgcatcggcaattggcatgcctcatgttattcctggtctaatgaaggctgttggcattgtgtacagtgaaggtaagattatgcacatcagaagttcaggaaaaaaaaatctccccatttataagtaatataaattctttgacatatagatatactttgtgcagttttctaggtacatgcctaaatctgatatactctgaattttttgacatttttgctattgactttggctgtaatataaattctctgaaatccaaattttgatataagttctgttctgaatacagtacatatgcagtacatattctttgaaatgcacctgcacatatgttctcctagttgttcaaaattggttttaaatctgtactgctacttattgtaagacagattacttgatagattatatagattctatattgttaacagtttctatagattctataaactgaatcaaacatatactaaatctttgatgtttctgtaaagtctcaagtctacaagatgttagttacatatttttagtattgaaattacagtgttttttttatgtaattcttgtacaaaatgactgtaatttaacaaccaaaatttagaatcctgctgaatattctcaatatagtgatttgaatcgtttatggccacttgtagcaatttttagtttatttttagattgtaatgcattatgttattcggatttttttgtgctatgaatttctgaatttcctgctaatcagtagatatgcaatgatttgtctgttttctgaatattctcagtgagttatggtctgaatttagaattctttgaagagcaaaaaaataatctgaagttgtatttcattgctgcctaaggactgctagattgcaatctaagacgtttcctgacaacttgtactttaaatagtcaaaatgctagcttaagacaattgtcatctttttttgtaaccatctatgtctctgacacttgatcagccaagtgagtaatgtaaagagagtggtgtatttgaatttttaaa

SEQ ID NO: 92175 - DNA, 1594 bp, Oryza sativa
  unsure (1)..(1594): unsure at all n locations
  Clone ID: PAT_MRT4530_90682C.1
ngaaaagaagaacaaattgaaacatatctcccactctcgtcagtgtcagacggcgccgacgcgatctcctactcccaccctcgcgccaaaaggagatcccccactccgcccggcttaattcctgtcgggttgccgacttgcaaccccgatttgatcgaggtcgaggatcgtcgctgctgctaccatgggtttgctggcgctgacgcgtctcatggctacgcagccgcctcgtcgccgccgccgccgccgcaacgatgcccaagcccaagcccgaaatggagtgattacttccatggctaaacggaagggcacactcctccaagggggtggtagttctcagggtggtaaaagattgagatattcagggccagacctcccagaggacatttggcgccatatacatttcctaatgccactgcgagatgctgcccgtgctgcttgtatttctcaagcttttctacgttcatggagacaccatcctaaccttatcttaagaaagaaaacaatgggcttggaacataaagcatataggagggttggtatggcaagggatttcactagcacagttcacagcattctgaaaaatcactcgggcattggtgtgaagagactgaagcttgacatcatctatgatcaccgcaatctcaacatatgttatctcaataattggcttcagattgctattacaccaggaattgaagaaatcactctcttgctgccttcaaaatacactttcccatgctcacttttatctggtggcattggaaggtcccttcagtatcttaagcttgtcagatgcgccttccgtcccacagctagccttggtttcttgagtagtctgacaaagctgcatttatgtgaagtgcgtattaaggatgacgagttaacttgtcttatttccaagtctttggctctgaagcagttggaactcctaaactgcagacaaataatctgtctgaagataccgtgtttgctggagcaactcagctgcctgaatgtatccttgtgcgagaatctgcaaatgatagagagcaaagctccaaacctctccacttttagctatataagtaacctagtagtagaactctcacttaaacaatcatcgcaagtgaagaccctagatatcgactgttatgacgagtccaactttctctgtcatgttattaccaagtttccaaatattgtcccaaatcttgaaactcttaccttacattcaattgatgaggtacaacagggagaaatgaagcatgattcagtttttggcgacgcctcaaatttgaggacgatgcctggacacaagcacgaaagcctcaaggatgtggaaatcattggattttgctctgcgacgagtatggttgagctaacatgttatttactcaagaatgcgatatcactggaatatattacattggcactaagaagggagatgatcttggaagcccatagaggggtcatggcaatcgaaagatacatcagggggaaagttccatccaaggttgagttaaccgttctcgagctttgcatctggtgccatgatcttgaacgtttagatgccttagacaaaggaaaattgatcacattccccacttcttga

SEQ ID NO: 92176 - DNA, 316 bp, Oryza sativa
  Clone ID: PAT_MRT4530_90683C.1
tcgtatttccaagggctatgattctctggcaccaaaaggtgtgccggaaacttctacttctgtcggccccgtacatggggcttctccaagtgtggaacccaaagtgagggattctcctatacaaaccgttttatcaggaaacattgctactgattgtgccaaaaggcaagatccattggtatcaagagtggcacctgtagctcataatggcctcttaaggatgccatctggaaaattagcatctctcgcagcgcaagtctgcaactctgtcagaccatgcacaggacctttaggctgagctttacagaaccaaata

SEQ ID NO: 92177 - DNA, 984 bp, Oryza sativa
  Clone ID: PAT_MRT4530_90684C.1
atggtcaccttcaaggcaaaccggagcgatcctgagctagtgccaccggcattggcaacacctcgagagatgaaggccctctctgatgttgacacccaacctgctctacgcttctatgccaccggagtggagttcttccgccatcaccccattgtcgacgacggccatgatcagccggagaaccaagccaaggttgtcaaggatgctgttgcaaaggcgctcacatacttctacccggtggctggtcgaatccgtgagctccccggaggggagttggttgtggagtgcactggagaaggggtggtttttgttgaggccgacgctgatgtgtggttggatgagtttgggaatcccatcatgccaccatatccatgcgtcgacgagttcttgtgtgaccctggtgacactagtgtcatcattggcaagcccctggttttcatgcaggtgactaggctcaaatgtggcggatttgttatcggcacttactcatgccacaacattgtggatgcctttggccacacccaatttctgaaagctatagtcgacatagcacgtggtgatgatcacccaactgttcttcctgtgtggggaagagagcttatggcagcgcgtaacccacccaatgtttcactcctgcagcacttgacaccaagcaagctatccccagatcacccagtagagcccaattcggcagcacaacatgtgtcgtcgtcgacagatcatatggttggcgactacttcttcttcggcccaagagagattgcagctctgcaacaccatgcccaactgcagtactcaagcacagcatttgaggtcatcacagctgcaatgtggaagtgtcacacagtagctctcgggtatgtgccggaccagaataagaaggcatgcttgttgatgaccatgaacgctcgtgggaagtggaagcgtgatccacctttaccgcaaggattctacggcaacggattcgtctaccttgttgtgtag

SEQ ID NO: 92178 - DNA, 943 bp, Oryza sativa
  Clone ID: PAT_MRT4530_90685C.1
ccgcacgcctccagcgactccttcccggcggtacccgaggcgcacacgtagggcgcttggtgtcgaagggagggtgcaagaagatgaggaagtggttgcgccgacgacgaggtgagcgggttgacggaggaggaggcagcgcgcgccggcttcgggtgtcgttgtccctgctcgccaggtgcgtggttgtttgtcacatactgctgagcagaaaaccagcacccatcggcttagtacctgtctgctctgctgtctcagcctctcaggttgcaaaccccatatcccagagctcgacgccacccatgtggtttttcaacttcaaccgtaatggcccctctggcttctccggggcctcctgcgccgaggaggtctccgccggcgtcgacgcccggggcttggccgccgtcgtcacaggcgcgtcgagcggcatcgggctggagacgacgcgcgtgtcggcgttgcgcggcgtgcacgtcgtcatggccgagcgccacggcgccgccgggcccaacgcccgcgaggcgacccgagcggagatccacgtcgtcatattcgctgtggcgtcaaccgaaatggcccctctggcttctccggcgcctccaccgccgaggaggtcaccgccggcgtcgacgcccggggcttggccgccgtcgtcacaggcgcgtcgagcggcatcgggctggagacgacgcgcgtgttggcgctgcgcggcgtgcgcgtcgtcatggccgtgcgcaacgtcgccgccgggcacaaggcccgcgaggcgatccgggcggagatccacggcgccatagtccatgtgctggagatggacctcagctccatggattcggtgaggaggtttgcctccgagtttgattctctgaacctgccgctcaacatactcatgccattttctactgacaaatctcttgatggagaacatgaagagcacaagtag

SEQ ID NO: 92179 - DNA, 425 bp, Oryza sativa
  Clone ID: PAT_MRT4530_90686C.1
aaaagccaaaccagtttaattttttcatcactttctcctggggcacaccctttcaagggtatttgggtattagggtaaccactaactttggacattggttaatccattttacacacacacgcgctctatatttattgggtaagcgccaacccaaatggccaggcttttttatttttgtgaattagaccaacgtcttactcgtcttccttgcggctggccctgaagtactttttcaggttaccggggatcttgtcgagggggatcatcaccttgacgcatgagcggggttccttgattgtgcgggcggctgaatctgcttgaccttttttttcggggccactcccagtatgtatgggggccttgggggctgggtgtttttctttttccagggtgggggttttttttttttcggtaggtagcaagtt

SEQ ID NO: 92180 - DNA, 1932 bp, Oryza sativa
  Clone ID: PAT_MRT4530_90687C.1
atgtggtttttcaacttcaaccgaaatggcccctctggcttctccggcgcctccaccgccgaggaggtcaccgccggcgtcgacgcccggggcttggccgccgtcgtcacaggtacaatcattcaaccaatgttgctgccatgccatttaattaagctcgcaaccttggtcagagagattcagagtgaacttgacgacctggctgcaggcgcgtcgagcggcatcgggctggagacgacgcgcgtgttggcgctgcgcggcgtgcgcgtcgtcatggccgtgcgcaacgtcgccgccgggcacaaggcccgcgaggcgatccgggcggagatccacggcgccatagtccatgtgctggagatggacctcagctccatggattcggtgaggaggtttgcctccgagtttgactctctgaacctacctctcaacatactcatcaataacgctggaatcctgtccaaggactgcatacgctccattgacggcctagaattgcattttgcaactaatcacattggccattttcttctaacgaatcttttactggagaacatgaagagcacaagtaggacaactggtgtcgaaggaaggatcataaatgtgtcgtcttcggggcacattttgacctatcctgaagggatatgtttcgatagtgtaaaagatctttcgagattctccacttatattgcttacggccagtccaagcttgccaacattttgcactctaccgagcttgcacgaattctgaagggagatggtgtgaacatttcagcaaatgcgatccatcccggttttgttggaaccaacctattcaagaactggactatggctaatgctgtggtgaacaccattggaagaatcgtatgtaaaactgtagaacagggtgctgcaacgacatgttatgtggcattacatcctcaagttactggaataagtgggaagtacttcagcaactgcaatttagagaccccaagctcacaggcttcaaatgcagagttggccaagaaactatgggaatttagctccaacattgtgtcggctgccaaactaacatactttaggctgcgtttggcaagactagttgagaacccactttatttttcccgcgtgaccgcttttcaaactgttaagcggttggatggaggaagtccggtcacttcatgggccgacatcgaggctgttataccgaggtcaaacaagattttgacccaaccagatgagcagccccataacgagggcgagacgtttgaagaaggcgaggcacacgtctcggcgttttcctccgttcggcagcacaaccagaaccgtctccggtctctccttcccggcgatgcccatggcgacgacgaagggtgctcgcgacggaagagagggagacgttggaacttggaagtccacggcaccgtcgacggcgaggcgatcgggcggacggaggaggaggcgcgccgctgcgccgggctccggcttcagagccttgcaaacaccagtacgccactattccctgagctcgacgtacgccagcttggtacggagtcggcgatgtgctggttcaaccgcaaaggcccctccggcttctccggcgcctccaccgccgaggaggtcaccgccggcgtcgacgctcggggcttggtcgccgtcatcacaggtgcgtcgagcggcatcgggctggagacggcgcgcgtcatggcgctgcgcggcgtgcgcgtcgtcatggccgtgcgcaacgtcgccgccgggcacagggccagcgaggcgatccgggctgagatccccggcgccggtatccatgtgctggagatggacctcagctccatggattcggtgaggagatttgccaccgagtttgaggctctgaacctacctctcaacatactcatgccactttcttctaacaaatctcttgctggagaacatgaagaggacaagtag

SEQ ID NO: 92181 - DNA, 745 bp, Oryza sativa
  Clone ID: PAT_MRT4530_90688C.1
aatggctgataccaagacttcgaagatgatgtgctttcttgtagaacaaggctgggaaggctcatccaagctgctgggagggaactacttgaaaagctgaactctgccagaagcaactcccccacgaagatattccttgtgctgtttggcttttataccgccaacgcattggcgacaatcctagggcagactggtgactgggatgttcttgtggctggtgttgtagtggctgccatagagggaattggcatgcttatgtacagaaaaccgatgagtagacctcctggacgattccagtcattgattgcaatggtgaactactggaaagccggcgtatgtctgggcctttttgtggatgccttcaaactgggaagctgagttcccttcccactatcaacttcttgtatcaacttactaatgttattgattcattgagctcacaatgacacgtggaatgaactcccaaggctccaaactgctaccgtgttgttgtatgcagataaatttgctgcgaagcgtaaacattacttctcggctataaaatgtacatatgttgatgtagtcttctatgaaattcttgtagtattacactagtctgatgtccatatgtgtctatagataaataatggtgtctgttgtaagatgactattgttggctatttccacaccaggcaaaccatttaataagctgcttctctcattgattattacccaaaaaaaaaaaaaaaaaaaaaaaaaaaaaaaa

SEQ ID NO: 92182 - DNA, 1814 bp, Oryza sativa
  Clone ID: PAT_MRT4530_90689C.1
cgcgaacccgtctctcgctggaatggggatcagaatgggaaggcgactcctcttcaccttgttcttgggagctctgttctgcaatggcgtttacgccaagtttacccggtacagcttccccaaggacttcatcttcggcacaggttcagcagcttatcagtatgagggcgcctacaaagaagggggcaaaggtcctagcgtctgggacaacttcactcacattccaggtaaaattttaaacaatgataacggcgatgtggcaaatgacttctatcaccgatacaaggaggatgtgagcctcctgaaggacatgaacatggatgctttccggttctccattgcgtggaccaggatcctgccaaatggatccttgagtggaggaataaacaaagaaggggttgctttctacaacagcttgatcaatgatgtcatagcaaaagggatgatcccatttgtcactatcttccactgggacacccccttggctctggaaagcaaatacggaggattcctcagtgaagacatagtgaaagaatacgtggacttcgcggaggtgtgctttcgcgagttcggcgaccgtgtcaagtactggaccacatttaatgagccattcacatatagcgcctacggctacggcaagggcgtgtttgcgccgggacgatgctcttcatatgtttccaagtcatgcggcgtcggtgactccagtcgcgagccctacctcgtggcacaccacatccacctctcccacgctgccgctgtccagctttaccgcaccaagtaccagccaacacagaagggacagatcggcatggtggtggtcacccactggttcgtgccgtacgacaactccgacgctgaccgtggcgctgtgcaacggagcctagacttcatctatgggtggttcatggaccctatcgtgcatggtgactacccaggcaccatgagaggttggctcggcaatcggctgccagagttcacgcctgaacagtcggcgatggtgaagggctcctacgacttcatcggagttaattactacaccacctactacgctaagagtataccgccgcctaactccaacgagctatcctacgacctcgacaaccgcgccaacaccaccggcttccgtaatggcaaacccatcggtccacaggaatttacaccgatcttcttcaactaccctccaggtctccgtgagctcctcctctacaccaagaggagatacaacaacccgaccatctatgttacagaaaacggcatcgatgagggtaacaacagcacactgccagaggcgctcaaggatggacacaggatcgagttccactcaaagcacctgcagttcgtcaaccacgccatcaagaatggggtgaacgtgaagggctacttcacgtggacattcatggactgctttgagtggggtgacggctaccttgacaggttcggcctcatctacgtcgaccgcaagacgctcaagcgctaccgcaaggagtccagctactggatcgaagacttcctcaagaggcactgatccagccccacaaaatttcggattgatcacgagatcgatcggctggccaccagatttgtgtttcgtcagtctagctttcagctggttaatttgtgatttgtgcatcagtggtgatgaccgatatgatggcgtgatgaattatgctgcattactattgaatgtgtacctcagtacctgtgcatcattgctggctgatcccattgagccggacaataataagaagaaacaataatgctccctgtcgagcagtgttgggctggttcaggcttaaaaaaaaaaaaaaaaaaaa

SEQ ID NO: 92183 - DNA, 417 bp, Oryza sativa
  Clone ID: PAT_MRT4530_9068C.1
atgtttttgaccggaatgaaaaatatcaaaaagcaccaaaacatgatttttggacatattggagtgtattgggtgcgttaggcaaaaaaaatcacttcgtgattcgcgcggcgaacttttttcaattaatgctaatattggcacacgtgggtgcgatgtttttcaccggaatgcaaaagttcaaaaagcaccaaaacatgatttttggacatatcggagtgtattgggtgtgtttgtggcaaaaaaaatcactgcgtgattcgcgcggcgaacttttgtcaatttatgccaatattggcatacgtgggtgcgaagtttttcaccagaatgcaaaagttcaaaaagcaccaaaacatgaattttggacatattggagtgtgttgtcgaaacgacaaccgcataagtcgaaagacgtgg

SEQ ID NO: 92184 - DNA, 1374 bp, Oryza sativa
  Clone ID: PAT_MRT4530_90690C.1
gagttaaaaccacgattttagtccgtggaccgtgtaacagtttttgtctcttatgccatgcacgaatctcagcatagcgtgaatctcaaatacacccaatggtaaaaaaaaagtgcaagattaagccatacaaaatctgttagtagatggatagctatttcgattttatttaccgatcttcttaaaaaatcatatctaggggtattattttttttcaaagaagtacaagtagtatttactcttgaccactctttgctccgtatatacaccggtttatcattacaccatatttcctccgtcctgagtccctcacaccaaagttgaacaggttgacgtggcaggatcgaacaaagccggaagcaggtatttcctcccgtgtgctccattggcgttgtagctcgctcccgtcgcggggtccaccgccaggttcccggcataaccggggtacgcaccgctgccgtagacccccggacacgccgtcgcggcctccagcggcgcctccttggggccctggtagaacccgtcgccgaacgggttggtcacgacgccggcgaccatgctggcgatgttcatcaccatgccgtccatcccgacgtcgccgctgggcggcaccagcgccggcgtctgaggcccgtacaccggctggtggaacggccacgcgcactggccggggcactgcgtggcggagttgccgacccagacgtaggccgtgcgggccttggcgttcgacgcgtgcgtgccgcaccggctcatgcagaacccctccacggacacgtcctgcgcggtgagaaccagcgcgatcccgcccttcttgggcttggccctcgccgccagcgccggcagctgggacagcttgaggctcttcccgagcgagcactggtcgtcggtgagttggccggcgagcctcacctgcgtggtgatcttgccgcctccgccgccgttcttgccctgcgccgccgccttggacaggtacagctggttgatggtgttccaccactgcgacacggacggggtcggcgccggcgaggcgacggtgagcaagaggaggaagtcggagacgacggccttctgcgccggcgtgaagcggccgtaccagacgaccgacacggggatgtcgccccgcaacacggtgccgttgtggtacgtgagttgctcgctgggcggtggcttgtacagctccatgagcctcctggctcccgcggagggatgtgccgagcacagcagcagtactgaaaccagcacgattgccgcgtggctcatgtggtggacggtgcaaaccctacgatccgaggccatgatctcgtagtgcaattgttgtgcacgcttgcttggtgcgagagctgtgtatacaagtacgctcgtgccggccccctg

SEQ ID NO: 92185 - DNA, 329 bp, Oryza sativa
  unsure (1)..(329): unsure at all n locations
  Clone ID: PAT_MRT4530_90691C.1
attggcggggtggaagcggcccgccggtgaatatgacgcnggtggctntggcgccgtcagctggggccgnccggagcangnangtacacgctgangcgtcgccnatgcaacagatgttccnggcttgccnccccatcttcaagggcacccgcnncntcccggccccccgnnaagtccaccngctctgctccatnctccacaanatnaanccccaccatgtnngccttacnncacacccanagggngccccggccccanatcacccccaangaatcccnctcacattcccccnccctcnncttacnncnnctttttttttttttnccctc

SEQ ID NO: 92186 - DNA, 230 bp, Oryza sativa
  unsure (1)..(230): unsure at all n locations
  Clone ID: PAT_MRT4530_90692C.1
caataaatctcggctcaatctgccactctgattcatcacctcattgcctctaggcctgctgctcctgctcgtggtagtagtccattcattcgaactgcctcccaatcctgagaggctcgtgtatttagcaattgtcgtttcactatctctctcgttgctggccncatatattttgccaccaagacactactaacctggttgctccgcctaggtaactcataatcctaccc

SEQ ID NO: 92187 - DNA, 571 bp, Oryza sativa
  Clone ID: PAT_MRT4530_90693C.1
cctatttatagggctaggaggagcggatgagctcggacaccgtcatcgccatggatgagctcgggatttggatagagctagggcagcagaggctgtgagagggcgggtaagatcgatttgagtggcgggaggccacgttcaaatacttaccggcgaaggattgacttgaccgcggttggaatcggctggcgacgtgagggcgccaatccaggcgcgacacgcaatggcggcgagggtgaaaacggccggctcgggggtgaatgcaagaattggcgcgattcaccccggatagaaacgaaatcacactcggcggcggcttggacaggagcgcacggcgtcgagcggcgatttcgtgcggcggtcgtcgtcctggctttgtcctcgttgcgattggtgcagtggcagtggggttgatggcgtcggacgggcgacggcgcgccaaggaggtcgggcacgcgcaagcggctccgaggccgacgcgcagcgacacggcgcgcgactaagtcggatgcccgggccacgcgcgtgaaggggaggaagaggcaaagaaagccacggttttaagtgggtt

SEQ ID NO: 92188 - DNA, 434 bp, Oryza sativa
  Clone ID: PAT_MRT4530_90694C.1
aggacagtgaaatgccaacaagacctcatattggtaagatcatgactggctgtaacgagcacggacatacattcccttaatggaagcgactatgaatggtactggagaatccacgtacctacgtacccaacacgattgtaaccgaaagagcagtcgtaatcatatgcaacacgtgaaggttaatgaacggccacttgctttagaacgcacatgtggtgctgtaccatggggtaaataacactcaccagcaggtccttcacttgaccaaatccatccttgatctgactaacgaggctatacatcatgggtggagcctgagagatatcctacgcggtacctcgattgcagctaacattactcatataatgcatcctaatatatatcaatgagctggtgctccttactgtttacatgcgggacatgacattcgttaa

SEQ ID NO: 92189 - DNA, 213 bp, Oryza sativa
  Clone ID: PAT_MRT4530_90695C.1
tcttggacgagtgcgcgccggtttcggacgggggcggcaaacgcatatacgatggttaggatgatcactcttcctaccagagagagacagagagagagagagagagagagagagagacggttattccttgctagggatctgggtaacgcagcacgagtgcggcgagctgctgcagctgagcattatcaatcgtgcggcggggctgccccacct

SEQ ID NO: 92190 - DNA, 515 bp, Oryza sativa
  Clone ID: PAT_MRT4530_90696C.1
cgcggaattttaacgaagaaggggtgaatggaacggcccgcccaatggcgaatggcgacggcatggctcggcacggcatctagcggcggctagcggcgactgaaaaggcggtggcggcggcggccaggagggcgacggcgctagggcgatagagagcatgggagcactcggcgagatggggaaaaagagagaggggatggcggtggtgggcgacgtgggcgacgtagcctgggagacgcgtgagcggggcggggcgacggttgcggggcgcggcggcgccggctggactagggagacgggcccgacaggtgggccccacctgtcggcgacccggagagaggagggggctcgggcggctggctaggccgtggccttcggccggcccagcggggaggggaagagaagagggaatgggccggcggcccattcgaaagagaaaagagaaaaagagaaaaagaaaaagaaaacgaaggaaatgaattttccagggattaaatattgcttgtgctaaattt

SEQ ID NO: 92191 - DNA, 182 bp, Oryza sativa
  Clone ID: PAT_MRT4530_90697C.1
gcgtggaggaaacccagcacacagctcgccggcgcatggacgcgctcgtggatagggccaggagggcgcgtagcgcgggcagagggaggcgcgtgactcccccaacgaccacgccaggccatagggaatacaaggctgggttgctacactctcacggctttgatgctcatgtccacagaaga

SEQ ID NO: 92192 - DNA, 1266 bp, Oryza sativa
  Clone ID: PAT_MRT4530_90698C.1
atgaacaactgctggttcagggtgaagacgaagacgtgcaggccgcacaagggggagatcgggctggtgttcgagcacccgacgcagccgggcaaccaggccggcgggtggatggcgaggcagaagcacctcgagacgtcggagagcgcggtgagcacgctgaagcgcagcacgtccacgccgttcctcaacacggccaccacgcagtacaccatgtccgaggtgcgccgccacacgacgccggagtccgcctggatcatcgtgcacggccatgtctacgactgcacggggttcctcaaggaccaccccggcggcgccgacagcatcatgatcaacgccggcaccgactgcaccgaggaattcgacgccatccactccgacaaggcccgtggcctcctcgagatgtaccgcatcggcgagctcatcgtcaccggcagcgactactcgccgcagagcagcagtgctgacctcacgtccatcgttgagagccctacggcagcggcggcgcccgccgtgccgcctgtctacaacgtgcgcctgttccggttcgcgctgccgtcgccggaccagaagctcgggctaccggtcggcaagcacgtgtacgtgtgcgcgtcgatcggcggcaagctctgcatgcgcgcgtacacgccgacgagctccgtcgacgaggtcggctacatcgagctcctgatcaagatatacttcaagggcgaggaccccaagttccccgacggcgggctcatgtcgcagtacctggactacctgccgctcggcgccaccatcgacatcaagggcccgatcgggcacatcgagtacgccggccgcggcgccttcacggtgaacggcgagcgccggttcgcgcggcggctcgccatggtggccggcgggacggggatcacgccggtgtaccaggtgatccaggccgtgctctgggaccagcccgacgacggaacggagatgcacgtggtgtacgcgaaccggacggaggacgacatgctcctccgggaggagatcgaccggtgggcggcggcgcacccggcgcggctcaaggtgtggtacgtggtgagcaaggtggcgcggccggaggacgggtgggagtacggcgtggggagggtggacgagcggacgctcagggagcacctgccgccgggcgacggcgagacgctcgcgctcgtgtgcgggccgccggcgatggtcgagtgcacggtgcggccgggcctggagaagatgggctatgacctcgacaagtcctgcctcgtcttctga

SEQ ID NO: 92193 - DNA, 843 bp, Oryza sativa
  Clone ID: PAT_MRT4530_90699C.1
atgcaattaaatcctgaaaaattcgctcctatgaggagtcgaaccaaggacctcagttattactttatttcacatgatagtacaaccgtgggcgacaagatgagagggatagaggatgggaggggacaagaggtcttcggctccctcgactgggttagcgagatccagaacgagatttcaaccacgggtacctacaagaaacctcgctacgtcaccaagcagggcgtgaagatcatggaccaagatgggaagctggacctcctcaagaaaatggaggaggtggagaagaagcgcgaggaaagtgagaagaagagggagcggtcagaggagaagagcagggctgagctcatggctctcaaggcggcggtagaatctcgtttcccagctgtgaagaagagggtggatgctctggaagtttgtggagagttgaaacaggaaatcaggtcagcagttctgatgcagaaaccacaggatctggattcagcttgctcattggccttcttgcaggacgaaatcttggaaggttccaagtctgtcagtcataaaaagtctgataagcctattttagtcaagaactctttgaagtctctctctcctcaaagccattctaattctgttgttaagggcaatgcatcacctccatcagaggacaggagagggtctgacaataccagggctagagatgacaggctagccgctctgagatcatatagaagatccaaggtgctgtgttttacttgtggggagcgttggagtaaggaacacaaatgtgccaactctgttcaacttcatatttgtcacgcccggaagtttccccctctccttgctttaaaaattggctaa

SEQ ID NO: 92194 - DNA, 2209 bp, Oryza sativa
  Clone ID: PAT_MRT4530_9069C.1
atggttgttccatcggcattgctgctgccgctgccgctgctattgctgtgttacggatttggaaacatccattgctcaccagttcataggagcagcatcgatctccactcgctgctcgacttcaagcagggcatctctagtgatccaaatgaagccttgaagtcctggaacaccagcacccactactgtaagtggacgggcgtcatgtgcacccaaacgcgaccatggcgcgtctcagggcttaacctcactggtctaagcttgggtggccaaattagctcctctctcggaaacctgaccttccttaattatctggacctctcctataataatttctttggcccgcacggggctattccagtctcacttacaaattcttccagcttgtcatacctggacctctccacaaaccttctagttggtgcgattcctgcgaacataagcttactttcgaacctagagtatttggatcttgatcagaacaatctcaccgggaccgtcctgcaaaccataggagacattacgtcattagaaatactttatctttttcaaaatcaactaagtggaagcattcccgataagatttggcaattgccgaatcttatgcaattggtgctcggtgaaaataatttgtcaggtggaataccacaaaccctccataatatatcttctctacaaagattaggtttggagtacaatatgctaagcaaagcattgccacctaacattggtgatgccctctccaatctcgaagtacttgggtaacaatatgtttgaaggtcaaattccagcttctttaggtaatgcttcagggctacaaataataatgttcttaaacaatgcattcgttgggaaaattcctcctttgggaaagctttccaacctaaatttcttagacctagggagtaacaggcttgaagcaagtgacagtgatagctgggaattcttacatgcactagggaactgtagttatctacaagatttctcactatcacaaaatcagctagaaggacatataccagattcaattggcaacctatcatccaatcttcagagtctcgtatttagtgcaaacaaactatctggcatagttcctctgagtatagggaaccttcaaaacttaacctggctagggctagatttcaacaatctgactggtccaattgacgagtggattgggaagctaacacaactcgtacatttaaatcttggtgagaacgactttattgggccaatccctccatctattggcaatctcaaccaattagcaacactctttctaggagcaaatggattcacgggttacataccgcctagcttgggaaaccttcagtacctagtcaaattggatgttagtttcaataatctccatggtagcatatatacataaggagttattcatcagtgtagcaacaatgatagtatgtgcattgacccataacgatttagatggtaatcttcgacaactctcagagctacacctttcatctaacggggcatattcccgacagtttgggggcaatttcagagatagaaacaattcgcacggaccataactttctcacaggtaaaattccgatatcgttgagcaacatgaagagcttgagcattctcaacctttcccacaacaatttgtcgggtaccatccatatggccatagataatctacaagttctcacccatttctcacccagttagacctatcggacaacaacctcaaaggagaagtaccaactaatggggtattaaaaaattctacggcaataccactcaacggcaattgtacctctgtggaggattgccagatctgcatatgcccccttgctatactgatttccagagaaaacaaatacaataccacttggtcagagtattgatcccagtatttggcatcatatcagttttattgttgtttcactttttactcatagagaggaagatttcaagtggaaaatatttattgcggctctcttttggcaaacatttatctaaaagtttcttacaatgatctagctcgagctacatcaggcttcttcgagtaaaacctaataggaagagaaatctatggttcaatacttagatttaaattataggtgcaagatgatcaaaggtcacttgccttgctcaaggccttcattgagcttcacgaatcttcaagaaaacccgcgatcgacgaaaatccggtaatcgcaactatacgcaaacaatc

SEQ ID NO: 92195 - DNA, 303 bp, Oryza sativa
  Clone ID: PAT_MRT4530_906C.1
atggtgcaacggtggttatggtgccggttggccgagggtggtgacaccgtgatagcggaggaggttgccgatcagccgggcgcccccatcggcggtcgcccctcgcgccgagatggcggtgggctggtagtccaagagcggaggaggattccgacgtcgacggcggccctatgggcggcggggcttaggaatctggcgaagcataagcaaatgctttcagctagtgtctggtcatctagttctgaccagatgatgatggatgaaggtgggctacccggcagcgagtggcattacttcacttga

SEQ ID NO: 92196 - DNA, 2931 bp, Oryza sativa
  Clone ID: PAT_MRT4530_90700C.1
atggcggcctcggtggagtacaagctggctccgcacccgtgggcgagcaatgctccgtcgagcaacctcgacttgttcccgtccggcggcggcaagcgccgttcgggctccgagaccgactccgacgacgaggacagcataccaccggactggaggtcgctgtaccacccgcggctggaggtggcggagccggccgtcaaggacccccgcgacgaggccacctccgacgcgtgggtgcgtcgccacccggcgctcgtccggctcaccggcaagcacccgttcaactccgagccgccgctgccgcgcctcatgtcgcacggcttcatcacgccggcgccgctccactacgtgcgcaaccacggcgccgtgcccaaggcggactggtcgacgtgggccgtggaggtgaccgggctcgtcaagcgccccgcgaggctcaacatggagcagctcgtgaccgggttcgaggccgtggagctccccgtcacgctggtgtgcgcgggcaaccggcgcaaggagcagaacatggtgcgccagaccgtgggcttcaactggggccccggcgccatctccacctccgtgtggcgcggcgtgcggctgcgcgacgtgctgcggtggtgcggtgtcatgggcgcctccgccggcgcggccaacgtgtgcttcgagggcgccgaggacctcccaggcggcggcgggtgcaagtacggcaccagcctgcgccgcgaggtggccatggaccccgcccacgacgtcatcctcgcctacatgcagaacggcgagccgctcacgcccgaccacggcttccccgtccgggtcatcgtcccgggcttcatcggcggccgcatggtgaaatggctcaagcgcatcatcgtcgcgtccagcgagtcggagagctactaccattaccgcgacaaccgcgtcctcccgtctcacgtcgacgccgagctcgccaatgccgaagcttggtggtacaagccggagtacatgataaacgagctgaacataaactcggtgatcaccacgccgggacacgatgaggtgctccccatcaatgcgctgacgacgcagcggccgtatacgatgaagggatacgcctactccggcggtggccggaaagttacaagggtagaggtgaccctggacggcggcgagacgtggcaggtgtgcaaccttgaccacccggagaggccgaccaagtacggaaagtactggtgctggtgcttctggtccgtcgatgtcgaggtgctcgagctgctcgccgccaaggagatcgccgtccgcgcctgggacgagtccctcaacacccagccggagaagctcatttggaatctcatgggcatgatgaacaactgctggttcagggtgaagacgaagacgtgcaggccgcacaagggggagatcgggctggtgttcgagcacccgacgcagccgggcaaccaggccggcgggtggatggcgaggcagaagcacctcgagacgtcggagagcgcggtgagcacgctgaagcgcagcacgtccacgccgttcctcaacacggccaccacgcagtacaccatgtccgaggtgcgccgccacacgacgccggagtccgcctggatcatcgtgcacggccatgtctacgactgcacggggttcctcaaggaccaccccggcggcgccgacagcatcatgatcaacgccggcaccgactgcaccgaggtggtcgacgccatccactccgacaaggcccgtggcctcctcgagatgtaccgcatcggcgagctcatcgtcaccggcagcgactactcgccgcagagcagcagtgctgacctcacgtccatcgttgagagccctacggcagcggcggcgcccgccgtgccggtgtcgaccgtcgcgctgtccaacccgcgggagaaggtgaaatgccggctcatggacaagaagagcctgtcctacaacgtgcgcctgttccggttcgcgctgccgtcgccggaccagaagctcgggctaccggtcggcaagcacgtgtacgtgtgcgcgtcgatcggcggcaagctctgcatgcgcgcgtacacgccgacgagctccgtcgacgaggtcggctacatcgagctcctgatcaagatatacttcaagggcgaggaccccaagttccccgacggcgggctcatgtcgcagtacctggactacctgccgctcggcgccaccatcgacatcaagggcccgatcgggcacatcgagtacgccggccgcggcgccttcacggtgaacggcgagcgccggttcgcgcggcggctcgccatggtggccggcgggacggggatcacgccggtgtaccaggtgatccaggccgtgctctgggaccagcccgacgacggaacggagatgcacgtggtgtacgcgaaccggacggaggacgacatgctcctccgggaggagatcgaccggtgggcggcggcgcacccggcgcggctcaaggtgtggtacgtggtgagcaaggtggcgcggccggaggacgggtgggagtacggcgtggggagggtggacgagcggacgctcagggagcacctgccgccgggcgacggcgagacgctcgcgctcgtgtgcgggccgccggcgatggtcgagtgcacggtgcggccgggcctggagaagatgggctatgacctcgacaagtcctgcctcgtcttctgaaacgtgacgtgtgtagtgtacgacactgcaaaaactgtacatatacgtagcatagttgcataaattttaattcaaagtttggagctctctcgagttccggtacatcggagtagcgcgcggcggtcgcattcgatggccatggaaaaagtgtagagtgtagattgatggatggttgtgcacatggttcatttgagaatcaagatgtatatttcattggtcatactagagcaaataaaaccgagatattactacgactgtttc

SEQ ID NO: 92197 - DNA, 370 bp, Oryza sativa
  Clone ID: PAT_MRT4530_90701C.1
ctcctcccccaccggcgacgccgcttcccctacccttcagccagcgcgccctccctctccccccaccgacgacgtcgcttcccctaccactcacccagggcgcccttcccttcccttggcagccggcgtctcagcgcggtgccctcccctggctctcggggcgtctcacctttctcgcacaacacacgacgttcacagctcggcgcgacctctcgagagcgggctcgctcctgacaggcggctattagttttgtggcagctggcggctgtgctgtctctcgtctggctcctgtggtgagtgtattggccgctgtgtgttggtgctgctgactatcatcggctgttgatgctgtcacaacaagtcctccag

SEQ ID NO: 92198 - DNA, 384 bp, Oryza sativa
  Clone ID: PAT_MRT4530_90702C.1
aatgattggtttttaaatttttacgacaactttttttttcttcataaggccgaaagttacacatgggacaagggatgatgtctgaactgaaaaataacaaacaggccacaatgctgttgagaccccagacatgactgctgttaaggtggcaagtgtgacaagggagcaacattgaacctacgccagagaccatatctagaagggacgggcaaagccaacagagtttgagctgccagccagcattcgaccgaagaagatgcggaccaaactgctgaatgtagaccgtcgggcgctatgagcctgaacaatggaagcgtcctgcaagtgacaaaactgaacccacagcgcgagctgtgaccacactatggggactgtcagttgaaa

SEQ ID NO: 92199 - DNA, 288 bp, Oryza sativa
  Clone ID: PAT_MRT4530_90703C.1
tttttttttttttttttttttttttttttttttttttttttgggttttatttttattaacgtttgtttaaatgaaaatttttttactctaattttttaattgaaaggggggcccccggggtttaaaaaagcgggcggccgtttccccaacccaattccagacccgttcgtaaacccgaaaaaacataccctggtccttataggtttacaaatttttttttttgtgagagtattttgcaacaggtgcaaaaaggataaaggtgttttctgggaaaaatttgtttccgtt

SEQ ID NO: 92200 - DNA, 257 bp, Oryza sativa
  Clone ID: PAT_MRT4530_90704C.1
gcgtccttttttgcaaacacgcgtcacacacacacgtgaagctttcacgtctagcgctcacgccattaatcctcctatatcgatacggctcgtgtacagctagcgttggtcgccgtcgtggcagctatgcttctggcgctgccatacaacatcatgggcgccatcagctgtggccagggcaacttcgtccggtggccgtggctgaaggacgcgggccgggtgtccggaccctagggtgcctgttgcagtgggggtag

SEQ ID NO: 92201 - DNA, 793 bp, Oryza sativa
  Clone ID: PAT_MRT4530_90705C.1
atggcagggaatgcgtcagtgatgcggaggctctacctctctttctacaactggattgtcttcatcggatgggttcaggtgtcgtggtccatgatattggcattgttggagaacggatatgaggccgtctatgctgccgtagagcagcatctgctgttcgcgcagactgctgccatcatggagacacacactcatatttttgttacctccttgctcataagctggtgcatcactgaggttaccagatattgtttctatggcatgaaggagtcatttggatttacaccttccttgctcttatggcttatgtacagcaccttcatagtatgctttcctattggtacggttagtgaggttggcctaatctacattgttgttcctttcatgaaggcatctgagaaatactgccttaggatgcccaacaaatggaatttctccatcaaatacttctatgcctctgtctttttcatggctttgtatgccccagtatacccgcacttgttccactatttgatcgtccagcggaagaaggccttggcaaaatcaaaaaccacataactactcaagagctatctaatctggtttctgctcgcagctacagctcaggttgctaccacttcttgaacaaagaagtaaaaatgtattagaatggaaatgccgaactacacagactatcttttcccttggtaaataaaaatggacatgagtactattttcatgatttgttaatggtgtgttgtaccaaactttggcttttccatatgtaaataaaattgcactccatatcgatgcc

SEQ ID NO: 92202 - DNA, 736 bp, Oryza sativa
  Clone ID: PAT_MRT4530_90706C.1
gtggatccccgggctgcaggttttttatatagtattttttttcaagacggtaataacgacaaatttcaataccattgcattgtccagaaaggatctggatatgtctagcttgccaatttacagtttaatcttgctatttatcttcaggtaaaaacagaacgaagaaaaaaaagcaacagatggtcatataattgacaccgacggtgccagaacactgaaatgcatggtatgcaaccctataattctaggtatcacaagtttatatcaaacagaattaacacgcaactgaacatgcgatgtccattgcaatcactgtacatcaagtcacgcagaaggttgttcagcctggggagcagttgagctgctaccgttcttccgggacatactgaaaggcccggccacagtcttgcccatgaatttcccagctttaccgaggccgctgccgacagcgccaatacccgaaccaacaagcccaacacccgaaccaacaagcccaacaccagcaccaattcctgatccaacaagtccaaccccgccgacaatgccagtgcccacaagtccaacaccagaaccaactagtgaagcagcaccaccaagagcatccattgtactaccaataaccccagcctccttgagtcgctttctctcctcgatagctctcttttcagactctagggcttccatctgttcttcctttgaaaatgggtgatatgtgaccaaatgcaccattgttcct

SEQ ID NO: 92203 - DNA, 1458 bp, Oryza sativa
  Clone ID: PAT_MRT4530_90707C.1
atggcgtcagtcttgcggaggctctacctctctgtctacaactggattgtcttcatcggatgggttcaggtgtcgtggtccatgatattggcattgttggagaagagatatgaggccgtctacgctgctgtagagcagcatctgctgttcgcgcagactgctgccatcatggaggttaccagatattctttcaatggcatgaaggagtcatttggatttacaccttcctggctcttatggcttaggtacagcaccttcatagtatgctttcctattggtatggttagtgaggttggcctagtctacattgttgttcctttcatgaaggcatctgagaaatactgccttaggatgcccaacaaatggaatttctccatcaaatacttctatgcctctgtctttttcatggctttcgatgaggactgtgagcatctttttgtttcctgccctatgatcaagggttgggctggaattggcttccaactgccggctgaaacgcggcaaggacttcggaccagctacaagggcgctttcgacactctggagcggagttggcagagctgctccacaaaattgtactatgggggtggagctgggtttttgctgctctacaactctactccaccccaaaagacccactaccctttaaaatttcagtgtatttacaccaaaatgccattgaactaccccttcctagttcctaccccatctcctcccgttctctctcctcatcctccttcctcggtcgaggccggcggcggcggcggcggcgtcggcgtcggcgtcggcagcggcggaccgccgacggtgggacaggcggcggcatcggtggagcatgggctgagcagcagctgcgacgcctaccaggtgttcgggaatgcgtcaggggtgcggaggctctacctctctctctacaactggattgtcttcatcggatgggttcaggtgtcgtggttcatgatattggcattgctgaagaacggatatgaggccgtgtatgctgccgtagagcagcatctgctgttcgcgcagactgctgcaatcatggaggctctacattccattgtaggtttggtgaggtctccagtgccttctactgttctacaagttactggaaggttgttcatgatctggggcatcttgtggagcttccctgagacacactctcatatccttgttacctccttgattatatgctggtgcatcactgaggtatatgctactccctaaaacctttcaccaaattactcacttggaagatcatgaatttcggatgcaattttattatagttctgcttcttgaaatgacagtagttgttgaaattcttgaaagaaaattcctggtcgcgtcagctgcctcctgtgcagctgtcccttcccccgacagaggagagagtttgggagacaaagaccctgtctagatgggactaaaacttttttagttctatcacatcggat

SEQ ID NO: 92204 - DNA, 444 bp, Oryza sativa
  Clone ID: PAT_MRT4530_90708C.1
acgctccgatcgcaaatactctctctcgccgatagcagcagcagcagcaatggccggcgtcgacgtgcgatccaccggcttcgccgccaagccgcgcctggcgcgcgcgccgacttccacggccgcgcggatctgcgggtcgagctccgcgacgggcaacaagcggaggcgccggcgagatggcgcagaacattggcggcgacgagccaagacgttctccagggcgctggcgctggccttggtgctgctctacgtgagggtgaacggcatcgcgctgcgcgtgccgaccatgaacgtgtccgcggcggacctggtgatcaacaccgtgaagaccggcatcaccgccgacgacgagaacgccgagttccgcatggacgaggacgggccactcagcggcatcctcgacgtctgcgacgtgccgatggagaacgacaacttccgctg

SEQ ID NO: 92205 - DNA, 1846 bp, Oryza sativa
  Clone ID: PAT_MRT4530_90709C.1
cggacgcatggagcgcatttcgtcgaacaggtcggcgatggaccacggcggtcaggtctctcccgtgccggcgacggcgacggcgccgcggaaggtcaggagagaacacatgaggctgggggtgtaccacgacgtgctgcagcggctcagggacgccggcgcgcccgaggccctcgcgccggacttcgccgagaagctctggacgcacttccaccgcttcaacgccagttatgccatggatgtcaatgttgagagggcagaagacgttctgatgcacatgaagctgcttgagaaggctatccatcctgaaaatcagcctgccttctcagtgagaattgttcaggttcctctagatattgatgcgagtgaagccgattcacagtcaaacatcactgaagatgacaactgtcctacgccaagaacaccagctgaacaccctgcacctatttttggctctaccacagcccttaaggctcttgttcgtcaagcaagcagcaagaacctcctggatgacaaccaagacatagatgctattctcagacccatgcatgagatcacctttgcatctgatgacaaaccaaagggccttactcaactgtcttcacttctaggcaatctcaatcttgatatcaaagaagtacatgcactttcaacaaatgatggttacttcttagatattttcatcgtaatcggatgggatcacaaggaaacccaacttctcgaagaagcgttggagaaggaaattcacaattacgaaccacagatgccctcaaaatcttcttgctggcctcctgaattagcaggcaagcagtctttgattaactcgcaagtcaaccatgttcagatacctaaagataacacagatgaatgggaaattaacttcgacgtattggatattcaagagaaagtggcatctggaacgtatggtgatctctatcgcggtacatattttggtgaagatgtcgcaattaaggtgctcaagtcagatcgtcttaatgagaacatgcaggaggaatttaacgaagaagtattcatcatgaggaagattcgtcataagaacattgttcgatttcttggggcatgcaccaaatccccaaccttatgtattgtcacagattttgcccatttatatgtgatgcttatcaaggttgctgattttggtgttgcacgtgtaaaagctgaatcagggattatgactgccgaaactggtacatatcgttggatggctcctgaggttattgagcataagccatatgattcaaaggctgatgtctttagctttggtgttgttttgtgggagctacttacgggaaagggtttaagaccagttattcccaaggccacagatcctaaactcgcgctgttacttgagagttgctggcagcaaaatgctgtcaacagaccagactttgtacaaattttgcaaaagcttgatgaaattgctggggagcatggcattgatcttacccatccccataaagagaaggagaaaggaggcttctttacttttgggaaggtccattgatgaaattcttgtatcatatctaaagttgcacattgtttttctgcagctactttctcgatagatttctctgaaagatactgtgtattcaggggtttattattgtacagtgtggtagctgactggcagatcacttagccgccatttgtcttttccaccaaatgtaaagcaagtacccgtgtaattttcaattgctgtatagtgtatactacggaaagcagaaaatattagtgaaattgcagtaaaaaaaaaaaaagggcgcgcgctctatagagtacaagcgcacgcgcgcgtgcgcatgacgtcacagcgcttgtatagagt

SEQ ID NO: 92206 - DNA, 419 bp, Oryza sativa
  Clone ID: PAT_MRT4530_9070C.1
catgtgttcgatcgtcgtcaacaaaggaatacataatgctaagggacaacgtcagcgggttagtgcaaggtaagagttagggagttagaagttagcgaaacggaaagtaaaggagtcagcgggttagtgagttaggggttagcgaatccaaaaagaaagagttagagagtcagaggttagcgaaactgaaaatggaagagtcagtgaaacagaaagaaaaaggttagctggttagtgagtcaagggttagatgttaaagttagtcgttctcgggtgatcaatggtgcggcagcctatccgtcctcttgctcaactgaggcccagccggagccggccgcggcggagcaaatggagggatggcagcttgtgcacgggactgaggagtgcagtggcagagctcgagcgtggaggtggagaag

SEQ ID NO: 92207 - DNA, 385 bp, Oryza sativa
  Clone ID: PAT_MRT4530_90710C.1
atgagaggatgctgtttgacatcccgaggttctcccatgtggtgattgaggactgccggccaacgtcgctgaccttctgtgatcacagttcagaagagttattttaagggccctgataaggattgctttttgtctgaagtatccctgtcttatctggggggggggggagtgataaaggtgggggttctgttttaaaagtccctgtggtcgtagaccatttcccaatttttatgccctgcttatgggaattttttattctagcttctattctgtgaggagggaggattcttttacttttattatatctattttaaaactatgtatgaccgaatgatttatttatttttcatggttgactatttcccaaaaaaaaaaaaaaaaaaaa

SEQ ID NO: 92208 - DNA, 420 bp, Oryza sativa
  Clone ID: PAT_MRT4530_90711C.1
acccggagtgccggcggtcggccccgggggccctgttgataccctgtgtgcccggagtgccggtggatggccccgggatcccgtttgtgccagtgatcccatgggtggccggaaattgtgtcgatcatcctcggctatgccgatgatcgcctggcatgacaaccttgccagtgccagcatttgtgccgcagattgatcctggagcggcgaccggattgcctggcgtgccgtcggctttttgagaccaccttgcaggaagacccacagtcgctgatgccgttcgttgttacacctgcgccataagtgtaaagcaaatcctgcgagtcactatgcctgtcgttaagatataccgctgattacgctgtcttgatgtgtgaactattgttgcttaatttaatgagcctgcttactgtgggttaa

SEQ ID NO: 92209 - DNA, 191 bp, Oryza sativa
  Clone ID: PAT_MRT4530_90712C.1
ctctagagcggccgccatgcccgccggcctgtactggtagagagacaccgggcaccgtgcgtgccgaggggtaagcgatagcccggcccgtgtggtggtccccccggcggcctggcctggctgccggtgtgcggccatatggatggcaggctgctgtgttcttgcatgtggcccccattcttcggcctggc

SEQ ID NO: 92210 - DNA, 341 bp, Oryza sativa
  Clone ID: PAT_MRT4530_90713C.1
ctgctcccagtctcaataatcgaattcgtgcggcgtaaagaaggtgactgactacatggttgatcgagctggtgcgtgcgctgactagtttgtcaagactgcgagaccattgcatggccgttaaggggtattcttatttggatgaatcaaatgcgtgctgcgtccagagacttgaatcacttggacttgataacaccaaggctcaatgacaggcttaccggagcctagtttgtaccacatctggctcgggacagtacatatcctggtgctatgctgtttcaggaaactcttcatcattcaactgcagatgcgaataatattgaagacattctatctgagca

SEQ ID NO: 92211 - DNA, 667 bp, Oryza sativa
  Clone ID: PAT_MRT4530_90714C.1
ccggccgggatcatcaaccaaaaaaacggacatctccgtttttttcgtcctcatcccttctccctccagcctaacggcctctctgcaaacgtaggggaggccgccgccccctcaacttgaatcaatggcagcagcgtgtgcatccgccgccgcctgcagcctcgcctcggccatgtcctggtagtctgctcgctgccccggcgtcgttacctagtaacgatctcggcatcgatcctggtctgcttctctttgaaaactattttccctacttggaatttctaccggccgattacaacgggtttgatggagcgacgtgggatttcgggaacatcgccaacaataataacaccaccgctgccaccaacgacaatgacgttcagaacttcagcggtgatgggctattcgacaatatcatgatcccggaattgaacgttttggatacacagtcttcgctcgatgtggctggagatggcttcctctctcaggagcagcctctcctcactgtcaactctacaacacccatcgagtaccctgctactgcaagctcttcatccagcactcctcatcccccaccaacgattagaaccaaatctccaacatcaacatccgccatcccaggaacatctaccttttctctccacccctccccctctttatcatcatcatc

SEQ ID NO: 92212 - DNA, 274 bp, Oryza sativa
  Clone ID: PAT_MRT4530_90715C.1
aaacacacccatacgcgggcaacattcttggggacacaccattaggggttacgcaatttgggcgctcaaggtctcaatagcaaatgcagtttaccggatatgttctacgctgcctgatgcattttgtcgcaaatacatggatatatgtgcagaaaaagggtttgtggctttgtacaaaaatgtaactcttgctggcttcttaatttgaggtgacctacaagactaacgcctgctcacacgtgaaccttttgccttttggggacctttgatggat

SEQ ID NO: 92213 - DNA, 150 bp, Oryza sativa
  Clone ID: PAT_MRT4530_90716C.1
atggggaggagccctattgggtgggcccaaccaacaatattgacagcttccaacatcgatgagggcttgcagcgccagatcaatgccatgcacgaagaagttacacatgttggctctccggccaagtgcgtccaactgtccaagatgtag

SEQ ID NO: 92214 - DNA, 389 bp, Oryza sativa
  Clone ID: PAT_MRT4530_90717C.1
gaaagttaaggtttttttttttttgttttaggggttcttttttcttttgtttttttttttttttttggggcaaatgaaaaataggagataggcaattgaaaaataggggtctggggggctaaaaaaaaatataattgaacattttctgatgttccaaaatgccattctggactggtcgtggggggagactcaggggaaaaacaggaacaccacgcaagcaaaagacggcttttggttccacccacaaacaaaaactacgcggggggggacaaactgaccatttcttaaaaggggggggggccttacattcccaagggttgaaaattttgttcatgcaaggcattgaccaatataatacttggcgtttttgtacaggggggggattattt

SEQ ID NO: 92215 - DNA, 348 bp, Oryza sativa
  Clone ID: PAT_MRT4530_90718C.1
ctaagcgcgggcctgtgcctcaggacatcccctccacatcctctcagtcgccttttgctcctgagtgtccttcctctgtggctcgtcgtgagccgtctcccttatttcgcattttgcggactctttttggcctttgctctcaaggcgaggtatcacgaggaccaccacattgatatccctccttcccctccgggtttcgaggctgaacccgatgagcccgaggaggaagagatagaggatccatttgttggggtgcctcctgattatgatttctttggttatggccatggctatggctatccccctccgcctcctccagaggatcctcctcaggcgccccttgcttga

SEQ ID NO: 92216 - DNA, 1539 bp, Oryza sativa
  Clone ID: PAT_MRT4530_90719C.1
gcacgtcacagctcatcatcaagacatcaactgactagtcttgtactacatctttggtttctgctaaaagatcttgcagaaacatcaaagcaacagcatcacacaaatggtacaaccattaaaagaaactaatggaagaatagggccttcagttataagttacagcgacaagatcaacctaatttaatcacacttaatatgttggcatcgaactgctgttgttgtttttccaccttgtccatagcaggacctccagggtgataatggtgatcaggaggatggccaggttgaagccatagccgatcttccacgagttgccggcggctccgaccttgattccaaggacaatgttgatggctgcaaagaagagcgcaagcctgcctacccaatggtggtaccagttccagtatttccgatattttgagtccttgtgaggccttaggaagaaggccagaatctgcaggatacccagcacaagcacaaatatgccaaggcccctatgcgccgggacatctgcttggatcttattgtacaacgatactccggccacaatgccagccagaccaaggatgaagcccacaagctggatgccggcgtgaaggtagaaccacagagggtcccatctcctgcagtaccgcgcgatgatagcaccgataggcaggagaactccccaggcaaacaggttgagtgccccatgggccctcttcagaccatccgggtaagacgaacctgaagagctgccagtggtgaaatcgaaggtgaaggacgtcttgccctggtgctcagtgaggcggtcgttgacggggatggcgttgccgaaggcgaggagcacctgctgccgcctgagcggcgactggaacctgagctggaaggcgaggtagatcttggcctgctgcaccacgacggtgtggtcgtggtccttggacaggaggaagccctcgtcggcgaccacctgcgacggcgtcttcccgcggaggctgaactgcttgacgtgggacagccccgtcttgccgacccacccaaccatggcgctcgatcccaccatcatcccgtccttggagaaccccatccccacccaccccgtgctgtacatcgacgagatcaccacccgcagcacgttgtccttcccctgcgcgtaccggaggacgaagttgttccagaccgggcggcaggccagcccggagtagttgccggcgagcgccgggggcagcgcgtcgtcgcagctggatgtctgcgccgtcgccgcccacggcgccaacagcaccgacgccgcggcgagcaccaccacgagcaccgcaccggcgcgcgccatttgccgggtgtcccgccggccggcgacgtgaaacggtgaaagtctgaaagaactaatcacctatctgctgctggagctaatcacccaaaatcgcaattgctggaagctggaaaccgaactgccgattattttatctccttcttttctcggcgatttgggagggagagggaggcagaggctggtcggacgcgtggggcgacttgatggatggatgcagctcgtgattt

SEQ ID NO: 92217 - DNA, 1536 bp, Oryza sativa
  Clone ID: PAT_MRT4530_9071C.1
atggccggcgcgtggaggaaggcgtggctgtcgatgctggaccgaggcggcggatcaggcgcgggcggcggaggcggcgggagcagcgggtcgctgcacgtgcacctccacggcctcctctccccgtcctcgtcgtcgtcgtcgctcaacggttacaagcgcggcggcggtaagcacggcggcggtggtggttgcggcggcggccatgtgatgacgagtagcaaggccgtgctggcatgcttctccgtcgcgctcgtggtggccttcttctacgtctccgtcgccagcggccccaccgcggacgccgcctcgttcccttccccgacgggggcgtcgtcgtcgtcactcctgtcgtggctgtcgtcgaactcgacgtcggcggcggcgctgccgaggagcaccgtcggcgacaaccgcgtcgtctggacgtccggcgtgcagagtggcctggtctccttcgccaagtgcgacgtgttcagtggccgctgggtgcgcgatgacgacgagggcggcggcgcctacccgttctacccgccgggctcgtgcccccacatcgacgacgacttcaactgccacaagaacggccgcgccgacaccggcttcctcaggtggaggtggcagccgcacggctgcgacatccccaggctgaacccgattgattttctggagaggctgagagggcagaggatcatattcgtcggcgactcactgaaccgcaacatgtgggagtctctggtgtgcattctgcggcatggtgtcagggacaagaggaggatgtatgaagcgtcagggaggaaccagttcaagaccaggggatactactccttcagattcagggattacaattgctccgtggatttcataagatcaatatttctagtcaaggagatgatcaacgagaccaaaggcggcgccgtggtggacgctaagttgagattggatgaactcgatgaaacgactccggcgtaccggactgccgacatcgtcgtcttcaacaccggccactggtggacgcactggaaaacatcaagagggctgaattactaccaagaaggtaactacgtgcaccccagcctcgaggtgatggacgcatacaagagagctctgaccacctgggctagatgggtcgacaagaacatcgactccacaagaactcaggtggtgttcagaggatactccctcacacatttcaggggagggcagtggaactcaggagggagatgccacagggagacggagccgatcttcaaccggacgcacctcgccgagtacccggagaagatgaggatcctggagcaggtgctggggcggatgaggacgccggtgatctacctcaacatcagcgccatgacggactaccgcaaggacgcccacccgtcggtgtaccgggtgcggtacgagacggaggaggagcggatggcggcggtggcgaagcaggactgcagccactggtgcctgcccggcgtgccggattcctggaacgagctgctgtacgcctcgctgctccaggcagggagaggatcgtggagactatga

SEQ ID NO: 92218 - DNA, 454 bp, Oryza sativa
  Clone ID: PAT_MRT4530_90720C.1
cccacgcgtccggcttcttgctgagaaaggtgaactcccaacaagatttggctcagctacactgggaatcctcctcctgcaggatattgctgttgttcctctcttggtcatactccctgtgctagagagtcagaatgtggtggagcaaagtgtgtggccaatgttattagctgaaagtctaaaagcactcggtggacttggcctactttcccttggagggaaatacctcatcagacgcatcttcgagtttgttgcagagtcaaggagctcagaagcatttgttgcactctgtcttcttacggtttcaggaacatcccttctcacgcaatggttgggatttagtgatacattaggtgcatttctggctggggccattcttgcagagacaaatttccgtacccaaattgaagctgacataaggccattcagaggtttgctgcttgggttgttcttt

SEQ ID NO: 92219 - DNA, 710 bp, Oryza sativa
  Clone ID: PAT_MRT4530_90721C.1
gaaaagaaaacactacactgataaaccttgttgtaagttgtaacatccatgcaacgcaagccaaagattatcgttgattatgggaaaccaatgcctatcactagtgatgtactaagctcccaatttcgggaaatttattcgtcaatggtgggcacgctgctggcgctgcgcctggcgctgctgaacgggccagtgacggtccggccgacgaacttgccagccttgctgaggccggtgccgaacgctccgatgccgctgcccacggcgccgatgcccgtgccgaccagccccacgccggagccggcggcggtggcgcccgctccgggcgcggcggctcccgcagcgacgcccgccccagccgcgggggtcaccgtggacgtcacgccgctcgccgcgtccgcggcgccgctgacggccgccgtctcctccttggtcttccgccgctcctccaccgtcttcttctccagctccagcgcctcgagcgcctccgccttggtgaacgggtggtacagcaccttgatggtgagcacgcccctgtccttcttgtccttgaccttggtcgtgtccagcgacgacagcagctgcaggttgatctcctgcacggactccatctccaggtcgttcaggggcagcttggctatgcccagcctcttgtcttgcttcagcttgtcctcgtcgaacacctgaaggatcagatgctgggtctcctt

SEQ ID NO: 92220 - DNA, 2013 bp, Oryza sativa
  Clone ID: PAT_MRT4530_90722C.1
atgccgtcgcggcggctgctcgccgccgcggcctccccgccgccggctgcggaggagaaggccgtggtcgacggcctgcgggggtctcacggcgcgcggcgccacgccgcgggctcggcggtgggcgccggggtggcggcggtggtagcgctggtgctggtggcgttgggtctgggtctgttcgtgtggctgcggcgcgggaggaagcgtggggcgggcgcgggtggtggtgcggcggcgaggatgggggtggggcttccagcttggagagtttttacagtccttgaagaaaggaggtaccaaatccaagtcgtccattacgcaccatccaacggttgcaaaggcttggtacctcgcggtaccgcgtctctaggaaagcaggaaacatgcatacatactatatctatatcaatatcaagaacttcagatgttgggtttctctcatccagatttttcaacaaggatgaacacttaggcagatttgcccaggctgcagatgtcaatgcacttgcatctctcgaccgcgaagacgtgaagaaaatatgtggagaaaatctcccagaatgggtgtcattcccagagtatgaacaggttaaatggctcaacaaacaattgagcaagctttggccttttgttgaagaggcagcaactatggtcatcagggattcggtggagcctatacttgatgattacaggccggcagggatatcctcactgaagttcagcaaactctccctggggactgttcctccgaaaattgaaggcattcggattcagagcttcaagaaagggcaaattacaatggacgtcgactttcgttggggcggggatcctaatattgtccttgcagttgacactctagttgcttcacttcccattcagttcaagaaccttcaggtttacaccatcatccgtgtcgtcttccaattgtgtgatgaaataccttgcatctctgctgttgttgttgctcttctggcagagccaaaaccaaggatcgactacatactgaaggctgtcggaggaagcctgacagcaatgcctggtctttcagatatgatcgacgacaccgtggcatctttgatcgctgacatgctccaatggccacacagaatcgtcgtcccactgggcggagtcgacgtcgacgtaagtgaccttgagctgaagccgcatgggaagctgacggtgaccgtggtgcgcgcggagtcgctcaagaacaaggagctgatcggcaagtccgacccgtacgtggtgctgtacatccgcccaatgttcaaggagaagaccagcgtcatcgacgacaacctcaaccccgagtggaacgagacgttctcgctcatcgccgaggacaaggagacgcagcatctgatccttcaggtgttcgacgaggacaagctgaagcaagacaagaggctgggcatagccaagctgcccctgaacgacctggagatggagtccgtgcaggagatcaacctgcagctgctgtcgtcgctggacacgaccaaggtcaaggacaagaaggacaggggcgtgctcaccatcaaggtgagctcatgtccacacggcggcgcgtcttgggttcttgggacaagagacgcgaaggtgttcgacgctgaccgtcgtgataatacgcaggtgctgtaccacccgttcaccaaggcggaggcgctcgaggcgctggagctggagaagaagacggtggaggagcggcggaagaccaaggaggagacggcggccgtcagcggcgccgcggacgcggcgagcggcgtgacgtccacggtgacccccgcggctggggcgggcgtcgctgcgggagccgccgcgcccggagcgggcgccaccgccgccggctccggcgtggggctggtcggcacgggcatcggcgccgtgggcagcggcatcggagcgttcggcaccggcctcagcaaggctggcaagttcgtcggccggaccgtcactggcccgttcagcagcgccaggcgcagcgccagcagcgtgcccaccattgacgaataa

SEQ ID NO: 92221 - DNA, 434 bp, Oryza sativa
  Clone ID: PAT_MRT4530_90723C.1
gggggccccagccgaccccggaattattacccggttgggcctttaacctttaaggggggaaaaaccatcctcattgaaagtgaagggttccattttaaccccaaaccggcttcagttcctattggcccccccaaccaacccttaatgggtattcaaaccttttaaatggaggtttaaccggtattcaaaccttccgatttttttttttaatttttggcccccgtccgccttaccctgcctaagggaaaatttaattcttgtggaccccaccattgcccaacttttgaatgacctcatcccttggttcggggtaaaagtagccctaattcaacctttcacccgacccagaatcttggccatgggccataataattggcatttcctggatcccgtacccaaccggaacaggcttgattcccccccaaaggaggcct

SEQ ID NO: 92222 - DNA, 771 bp, Oryza sativa
  Clone ID: PAT_MRT4530_90724C.1
atggacccggccccctcgctcgcggcggagctctggcggccgcatcaccaccgccaccacttcgaggcgtcgtccgtcgtcaccgaccaggggagcggaagccgcggcggaggaggaagcgggcgcaggaggccgcggagcgacgcggggcccgaggacgacgacttgtccaaggtcgtctccacctccgccgcctccggcggcggcggcggcggcgggcaggactcggatgctccagaagcaaaacgtttgaaaccaatgaaatctagtgataagaatgatagtttaaggacagaagctggaaccgattcaggaaacagcagtaaggctgctgataaaaatgctacaccaccagagccaccaaaacaagactacattcatgtgagggcaagaagaggtcaagcaaccgatagccatagccttgcggagcgggcacggcgagagaagataagtgaacggatgaaaattcttcaagatcttgtccctggatgcaataaggtcattgggaaagcatcagtccttgatgaaataataaattacatccagtctttacagcatcaagttgagtttttgtccatgaagcttgaagcagttaatagtcacatgattaacggaattgttgcttttccatctaaagattttggtgctcagccatataacacagctgctggtttgacatttgatccacaaacaacaagggaatttgcccagggttcaacatcagagtggcttcacatgcagattggaaatgcatatgaaagagtgacatga

SEQ ID NO: 92223 - DNA, 592 bp, Oryza sativa
  unsure (1)..(592): unsure at all n locations
  Clone ID: PAT_MRT4530_90725C.1
aagcctggagtgaattttattcatcatttcctgtgtattacaccatggaaatatatgcttcaaaaaacatgcacatgtatggactgcattctggtattcgcaaaaacatcccgtgtattgctagtgtttctgtcgctaaccttgtgttcccgcttcacatctctgcctcaaatttggactggggaattctcccgatccaatgaggaaaaaaaattaggagcggggtgacttgcatctgctctgctgaataggaaagcgggcttttgacaggaacaaccttattcgggttactaaaaaaggctcatcaatcaaattgctggatgtggattacagtggaaattgatccccctgcgttaacggggggctgaaacccagnngcaaaaatcgtganggtcactggatgggaaccannnttataacantaccgggggaanctnttttcaaancccgtnaattattgcaatnctgcaaaaaaccnaanacctggaattttttnttttggntgaanaaacccnctaatccggananatttgnncatanagaatcctntgggnaaattaccnngntnggtcccttgacaanattcnaaang

SEQ ID NO: 92224 - DNA, 1379 bp, Oryza sativa
  Clone ID: PAT_MRT4530_90726C.1
aattgtaatacgactcactatagggcgaattgggtaccgggccccttttttttttttttttttttttttttgaagaagaacaaaggtatatatatatatataagttaacactttctaaatctgtaacaacaccagattgcatttttacacacgatggtaccctgagattctaaaggcttcctcttacaaaagctggggcaagctcgaaagcaagtgtggtatctttcacattgccttttctgtatttaccacgctgtatagactactcataagaaaacctcttctgtccctgccagggctgctctaatgaattggatgatattgtgtgatcccccgtttcggtggcagtttccttaggatgaatagcaccaaagctgaaggtacgatctcaaccagcaagtaataaaagaaattcagaatcggatggttcagaacatcaaggtcagctgctttatcaaatgtgttgagacacatcatgacacatctgatcaagaaacaagtaaagcagattgtagtcacatagccaacctcctgcaatttcttgcgccgtcctttcgattcaactgggaaacgttgcaacatcaggaataacctcccaccgtagagaagaaacccaaaagccgcaaacagtgatacacctgcaaagaacatcttcgacaagatgatcataactcgaactggtttccaccatagaaccatccataatattatctgaattgcatagatcacagcattgatccaatagaaagttggcctaagcccatcagtggacattgcacgcgcctgataataaatctcggcccagaagagcaccaaaagtgcatacgtcgtgaagaatgcgagcccgggcatatctagaagcacatgttgaagtatctctggatgtatgagctgcacatttcgtcgcagcacaaacactatggatcgcacgccgttcacgaggaagttgaggaaatggaacaccttttgtgttgtccacccgtattcgggcaccctacattcgattctgatcaattggaccagcgcgatggcggagacgaagccgtagagcgccgcgaggacgtggaagatgcggtcctgccacaccggcgactcgttcacgtcgcgccaccagtccaccgcgccgtttgccgccgccgccgccgcagacgagccggcgtccgccgccacctccagcatccgcctcatcgagaacccccgcccgcgaccacgctgtttgtggattcgggcgcgggcgcgcgcgcgcgcgcgagctacgccaacgtgggggagaggaggaaggcgaggcctctcgctggtcgagaggattggaatcgaattcggatttcagtttctttctttcgcccacgcgcgtggaggttcgagccttttcgtgttcg

SEQ ID NO: 92225 - DNA, 511 bp, Oryza sativa
  Clone ID: PAT_MRT4530_90727C.1
cgtcgcggcaatgggggtggtctcggcggcggcggacgcggcggtggtgctcttctcgctcacggtggcggtggcggcgccgctgatcgacgcgcagtccgtgctcccgcgccacctcttcccggcgccgctcgtctccctcaagcggtggtacgcccgcgagttcggcgactacctcgtggcccgccccccgggcttcctccgggggctcgtctggctcgagctcgccttcctctggccgctcgccctcgccaccctctacggcatcctcgcccgccgccgctgggccgccaccacctccctcatcgccggcgtctccaccctcacctccatgtcagcaatacttggagagattgtgggctcgaagaaagcgacactaaaattgcttcagatgtatgttccttttgccgttttcgctgtcatcgcaattttgcgtggactttgctcgtctgctccgcgtggtactgctggttcatcactcggaccttctgctcggaagaagagagcctaa

SEQ ID NO: 92226 - DNA, 247 bp, Oryza sativa
  Clone ID: PAT_MRT4530_90728C.1
tggctgctggaagtgcttgagaaaaagcaccacgggctggtaaaccctggcgtgcttggttgcgatccgcaagatgcgtttgagtggattgcatgattgaccgtgcccgtttgtgttgattgagaaatgttgtgtgttgtggccacttggacactgacacaaatgtgggattgaaaataaaaggtgaaaagaactgggtgccctgcaaaactgccccctcctgcagtaataatcccctggaatctgt

SEQ ID NO: 92227 - DNA, 372 bp, Oryza sativa
  Clone ID: PAT_MRT4530_90729C.1
atggggagtcccaagacgtaccaaacgtacaggatgggtcaggaacagatggacaccatcctgtcctgggcgttgccggagaaggattacgagccggtcttcactgtgatctcctcccacaccgacgagcagaaggagaaggaccgcctcctggccatcggaaccgccgccatcaagaacaagttgctccaccacaagagggggctgcaggccttcgtcaaggacaacctcgatcgcttcggttacgtcgacatcaacgacagcatgaacggagtgaggaagcgccgtttgagcaccgtcaagctgtcggtgcagctgtcggtgaggcagccgaacggctgctgctctgcttcacgtgctgtgcagctataa

SEQ ID NO: 92228 - DNA, 259 bp, Oryza sativa
  unsure (1)..(259): unsure at all n locations
  Clone ID: PAT_MRT4530_9072C.1
cccggtcgaccacgcgtccggaggcgaggtggccgttggcagcagcggccgtggtggtggtgggaggtctctangggctgcctgcttaagtgctccagcatgcgacgcgatagcttttntatagagacacctaaattaaattcaccgaccgtcatttcacagcgcggagactgacaaaaccctgactggaccaaccttaatggcctcgaactaaatccccttttagccaattggcgttataccaaataggcccataccg

SEQ ID NO: 92229 - DNA, 1008 bp, Oryza sativa
  Clone ID: PAT_MRT4530_90730C.1
atggggcgccatgacctgaggaaggtgatggatgggttaggcgagcgcggggtggccgggaaccacgaggaagggcagccggagggaacaagcacggcgacggagctcacctcacgcggggcagatggcgttccagcagtcaagggactcctcgtccttgcagtgccgaaggaggcaacgacgcatcgcgaggtggtctgggatggtaggaggaggcggccggaggcggcaaatgcggcggcctcaggaataggagcggctgccggggtggagctcggcatggcgatgttgacggcgacagcggcgcagcgcagcgaccacaagggcggtagtggtggccgactggagtgtggaatggtggcagcacaagaggattcgcggagtggagcggctgctggtgtgcggcgtggcgcggcacagcttttggtggcggtggcgcagcgcggcgatgacgaaagcggcggtggcgcgcggctggaagtcgacggcgagcggcggcgcgtgggagcggcgtggggagggcgagagagagcgcggcaggctcgagtgaggaggggaaaagagagaggatgctccggggatcgtttatatggccttggaatggcgggaccgagcccgggagagacggaatcggggcagcaaccggcgggaagtggagcgccgacgtgggggaaagggtggccgggtttcgcgaggaaagtggggcaactgggggaggacaaggtggggatcgagtccacgctctcgcagggcggggtggagcgcgggaggcgcgacgtcgtggggtggaaccggcgcccatggcggttgcaggaggggaggctggaggttagggatggccctgacatgtggggtcgccgggcccacctgtcggcgagggagggagaggggaggccgggagagggagatattgagctccgaaaattcacggaaaatttcagagagttcattagagcactgttgacggtcgttatcgatcagtttcgaccgtcaatattaccaaaatag

SEQ ID NO: 92230 - DNA, 144 bp, Oryza sativa
  Clone ID: PAT_MRT4530_90731C.1
atggagaactggaggagaagacgttcggcaactacttctgaggacgagggactagtagctcaacacaggaacaatttggtgcactcaccaaataacacagaatggcagatgtacgcattgaacaacccagggaaggtgatgtag

SEQ ID NO: 92231 - DNA, 5817 bp, Oryza sativa
  Clone ID: PAT_MRT4530_90732C.1
atggctgaaccagcaaaggcgcataacctctctccgagtgttagcggtgacgacggggagccgaacccacgccgtcgagctcgtactccaccgccccctccacgccaaagtcctaggcgggaggaagcgctcgagagggtcgaaagatccgcgacttcgacatccacgggtgatggagaagggcgccgagatggggagcgtcgcctcctcgtctacggcgacggcaacacgccccagggtgcgctccaagctgcgggcgcgctcctacgccacccgcccgtcgtccctgacccggagtctccggcccaacgttggctggacgacgtggccaacttggtcatgacggcgcggcagcgcctagatgctggtgggcggtcctccgccaccaagacctctggtactgctgctaccggctccgcgtcgtcaagacggagggcgcggcgagcggcggccgctgttcgccattcggccgccactccttcgtcagcgcctccgacccgggaagatttgcgtggggggccggatgcccgcatcagtatcgagcgccggcgtaatggccgacgtgctgcccacgcaacggaaggcgcctcctcgtccggagtgtcacatcaacacggacgcggggatcagccctccgtgcccccggttggtggtgtcggctgtagagcctttgtggcgagccttcggaacgtccgttggcccccaaggttccggcccaccatcgccgaaaaatatgacgggagcgtcaaccccgccgagtttctccaggtctacatgaccgggatcgaggccgccgggggtgacgacagggtcatggcgaatttctttcccatggccctgaagggacaggcacggggtgaagaagcggacttacatgcagtccagcgaagggatgatgagtcacttcgctcatacatccagcggttctgtcaagtccgcaacaccataccatgcatccctgcacacgcggtgatttacgtgttcagggggggtgtgcggcacaaccgcatgctcgaaaagatcgcctccaaagagccccagactaccgcggagctttttcagctcgcggaccgagtggctcgtaaggaggaggcatggacctggaacccctccgattccggtgtggcagcttcggccgcccccggatccgctgctcagacagggcggcgtgacaggaggaggaagaagaggtcagcccattccgacgacgagggtcatgtcctcgccgtcgagggcgcttcgcgggccacccgaaaggggaggcctgcgagcgacaaaaagagggaggccagcgctcccagcagggagcgcccaaccggcaagtggtgcaccgtccacaatacctcccttcacgacctcgcggactgccgcgcagtcaaaagtttggatgagcggacgaggaagtgggaggaggagaggaggcaggagcgccgagagggcaagtccccggcggttccttccggcaatcggcgaagtgaggccaagcagaaggcccccgccgaggacatcgatgacggcgatgatgacctaggttttcaagagcctggggccaccattgccactgtcgatggaggagcgtgtgctcacgtttctcgccggagcctcaaggccatgaagcgagagcttctggccgcggcccctactcatgaggcgacgcgccgggcgtggtggtcggaggttgccctcaccttcgaccagaccgaccacccaccgtgtgttgcccggggaggacagattgcaatggtggtttcccccactgtttgcaacgtgaagctggggcgtgtcctcattgatgggggagcagccctcaacatcctttcccccgcagcctttgacgctatcaaggtcccggggatggtgctccggccgtcccagccgattatcggtgtgacgccggggcacacttggccgctaggtcatattgacctcccggtcaccttcggtggatccgccaacttccgcacggagcgggtgaactttgatgtggcggacctcagtctgccctacaacgcggtcctagggaggcccgcgttggtgaagttcatggcggcggtccactacgcctacctccagatgaagatgccgggccccggtggccccatctctgtccatggcgacctcaaagtcgcgcttgcttgtatggagcagcgcgcggaccacctcgccgccgcgtccaagcccgagggtggcgacgagaggcttggcacctccgcccccgccgccccgaggcagcagatagtcatatgcgacgaggtcccggaagacgcgctcgtctccttcctgcgggcaaacgctgacgtcttcgcatggagaccggcggatatgcccggggtccccagggaggtgattgagcaccgtctcgccgtgcggccgggcgcaaggcctgttcggcagaaagtgcggcgccaggccccggaacgtcaagccttcatccgcgaggaggtggcgcgacttctggaggccggattcatacgcgaggtcatccatccggagtggctggcgaacccggtggtcgttcccaaggcgaacggcaagcttcggatgtgcatcgactacaccaacctcaacaaggcatgtcctaaggacccttaccccctgcctcgcatagatcagattgtcgactccaccgcggggtgcgaccttttgtgttttctagatgcatactctggttaccatcagattcgcatggctagggaggatgaggaaaaaactgcattcattacccccataggaacttattgttatacgacaatgcccttcgggttaaagaatgtaggtcctacttttcaacgtactactcgaatttctttgggtagccaaataggacgtaatgttgaggcttatgtcgatgacttggttgtaaagacgcgcaaccaagagaccttactctcggatctagcggaaacttttgagagtctccgctccgcccgcataaaactgaaccccgataagtgcgtgttcggtgtacctgcgggcaagcttcttgggttcttggtctctgcccgaggcatcgaggccaaccccgagaagatacgagctatagagcggatgcgccccccagcaaacttagggatgtgcaatgcgtcaccggaagctgaacgtgccctcactcagttgaaggcgtatctcagctctcccccagttctggtcgccccggagccaaatgaacccttactactctacttagcggcgaccccgcaagtggttagtgcggcgttgcttgtggagcgcgatgaggacaatcctcattccgcgcatccccaccctgtgttggcttggcccgggagagagcagggaagagaggcccccgagccgaacggtggcccaaggcccccgacgaccggagctggccctctgcccgcttgtcagacggtgccaggtgcccccgacccccaggatggcccgggggccactgtgggaaggctgcacctatcgccctctgaccccgaggctaaccctgtgccgactcgacccgggagagagcagggagaagaggcccccgagccgaatggtggcctaaggcccctgacgaccggagttggccctttgcccgcttgtccgacgacgccaggagcccccgacccccaggacggctccgaggccactgtgggaaggccgcccctgtcgtcctccgaccccgaagtcgtcggcacagaagacgagtgcgccccgcgaggccgcttggacaaagagcgccccagggatgtggcccctagtgaagaggatcggccccaccgaaaggtgcagcggcccgtctactttgttagtgaggccctccgggacgccaagacccgataccctcaggcccagaagatgctttacgctattctgatggcttcgaggaaactgcgccattacttccaagcgcatcgggtcacggtggttacgtcttaccccctcggccaaatcttgcataatcgagagggtacaggacgggtggccctcgccgactttgtggcagagtggaccccagctcccgagcccgtctccattcccgaggccagctcgggcccctcgcagctgcctcacaccgcctacagggtgatgcagttcgacggctccctgtctcttcagggcgccggtgcgggggtcacgttgacctcgccgagcggagacgtcctcagatatttggttcgccttgactttcgggcgaccaataatatggcagagtacgagggactccttgcgggactcagggtggcagctggactggggatccgccgcctcctggtgttaggcgactcccagctggtcgttaaccaagtctgtaaggagtaccggtgctctgacccgcagatggacgcttacgtgcgccaagtacggcgtatggagcgccatttcgacgagattgagcttcggcacgtgcccagacgggataacacgattgccgacgaactctcacggctcgcttcctcgcgagcccagaccccaccgggcgcctttgaagaaaggcttgcccagccgtcggcgcgacccgaccccttaggggagacggacgcgcctgaccggcccccgaggcccgtcggagtccaggcctcgggacccgaggggagcgctcccagctcccttagattgattgcttggatcgctgagatccaagcatacctcacagataagactctatccgaggactgcgaagggagtgaacgcgtccagcgcatttccaaacgctacgtgctggtagaagggaccctctatcggcgcgcggctaacggaatcctcctgaagtgcattcctcgggaacaaggcgtcgagcttcttgccgatatccatgaaggcgaatgcggagcccactccgcctcgcgcaccttggttggaaaagcctttcgtcaaggtttctattggcagatagctctcaatgatgcagtcgacctggtccggcgatgcagagcgtgtcaattccacgccaagcaaatccatcagccggcccaggccctgcagatcataccactttcatggccatttgctgtctgggggctcgatatcttgggaccgtttaggcgggccccgggcgggtttgagtatctgtatgtcgcgatcgacaagttcactaagtggcccgaggcttatccggtcatcaagatcgataagcactccgcacttaaattcattaagggcatcacagcccggtttggagtgcctaaccgtattattacggataacggcacccaattcactagtgaactcttcggtgactactgcgaagacatgggcatcaagctctgcttcgcctcacccgcccaccccagaagcaatggccaagtggggcgcgccaatgcggaaatcctcagaggtcttaaaaccaagaccttcaacatcctcaagaagcacagcgattcgtggatcgaggagttgccagcggtgctctgggcgaaccgaaccacaccaagccgagcaaccggggaaacgcctttcttcctcgtctacggcgcggaagcggttctcccatccgagctcaccctgaggtcccctcgggccaccatgtactgcgaagctgatcaagatcagcttcgcagagatgacctcgactatctggaggagcgaaggcggcgcgcggccctccgagccgcgcgctaccagcagagcctgcggcgctaccatcagcgccacgtccgggcccgatcactctgcgtcgacgacctcgtcctacgccgcgtccaaacgcgtgctggattgagcaagctctcaccaatgtgggagggtccgtatcgagtgatcggcgtcccccggccgggctccgttcggctggccacgggcgacggcacagagctgcctaacccgtggaacatcgaacaccttcgtcgcttctacccttaa

SEQ ID NO: 92232 - DNA, 282 bp, Oryza sativa
  Clone ID: PAT_MRT4530_90733C.1
atggatatcggcaagaagctcgacgccttgttcccgaggaatgcacttcaggaggattccgttagccgcgcgccgatagaggcgatccaagcaatcaatctaagggagctgggagcgctcccctcgggtcccgaggcctggactccgacgggcctcgggggccggtcaggcgcgtccgtctcccctaaggggtcgggtcgcgccgacggctgggcaagcctttcttcaaagggccacgccccggggcacggctcggttctgggccccttttggcgattttag

SEQ ID NO: 92233 - DNA, 435 bp, Oryza sativa
  Clone ID: PAT_MRT4530_90734C.1
atggccatcggcagaaccaccctaaactcggccggcggagctggagcgccgacgacgacgacgacgcccaggctgccgccgagccaccgacaagcgagcgagcgagacacggcggaagagcgcgagggggagacggcggtccgtgggaggaggacatggcggcgcggcgatgcgggagcaggaggcgtcggcgccgtgcagggttcatacttcgtcagcccagctgatagaacctacgatgcgctaggattggtgaagcagataaatgtgcagactgctgctgctttggcagaagcccgtgaggtgctggcagtggcaagtggcgggcaatctgagaacataaattatgacaaggaaaacctggagagtccaaatgctaagaaggaaccaagaacaaccaccaaattgcaagcaaaaatcaagcgacggtcatga

SEQ ID NO: 92234 - DNA, 4284 bp, Oryza sativa
  unsure (1)..(4284): unsure at all n locations
  Clone ID: PAT_MRT4530_90735C.1
atggccgaacaagcaaaggcgcacaacctctctccgagtgtgagcggtgacgacggggagccgaacccacgccgtcgagctcgtactccaccgccccctccacgccaaagtcctaggcgggaggaggcgctcgagagggtcgaaggatccgcgacttcgacatccacgggtgatggagaagggcgccgagatggggagcgtcgcctcctcgtctacggcgacggcagcacgccccagggcgcgctccaagctgcgggcgcgctcctgcgtcacccgcccgtcgtccctgacccggagtctccagcccaacgttggctggacgacgtggccattttggtcatgacggcgcggcagcgcctagatgctggtgggcggtcctccgccaccaaggcctctggtactgctaccaccggctccgcgtcgtcaagacggagggcgcggcgagcggcggccgctgttcgccattcgaccgccactccttcgtcagcgcctccgacccgggaagatctgcgtggggggccggatgcccgcatcagtatcgagcgccggcgtaatggccgacgtgctgcccacgcaacggagggcgcctcctcgtccggagtgtcacctcaacacggacgcggggatcagccctccgtgcccccggttggtggtgtcggctgtagagcctttgtggcgagccttcggaacgtccgttggcccccaaggttccggcccaccatcgccgaaaaatatgacggaagcgtcaaccccgccgagtttctccaggtctacgcgaccgggatcgaggccgccgggggtgacgacagggttatggcgaatttctttcccatggccctgaagggacaggcgcggggttggctaatgaacttgccacccgcgtccgtccactcttgggaggatttgtgccaacagttcaccatgaactttcaaggcacatatccgcgcccaggtgaggaagcggacttgcacgcagtacagcgaagggatgatgagtcacttcgctcatacattcagcggttctgtcaagtccgcaacaccataccatgcatccctgcacacgcggtgatctacgcgttcagggggggtgtgcggcacaaccgcatgctcgaaaagatcgcctccaaagagccccagactaccgcgggagctttttcagctcgcggaccgagtgcttcgtaaggaggaggcatggacctgaaacccctccgtttccggtgtggcagcttcggccgcccccggattcgctgctcagacagggcggcgtgacaggaggaggaagaagaggtcagcccattccgacgacgagggtcatgtcctcgccgtcgagggcgcttcgcgggccacccgaaaaggggaggcctgtgagcgacaaaaagaaggaggccggcgctcncagcagggagcgccccaaccggcaagtggtgcaccgtccacaacacctcccttcacgacctcgcggactgccgcgcagtcaaaagtttggctgagcggacgaggaagtgggaggaggagaggaggcaggagcgccgagtgggcaagtccccggcggttccttccggcaatcggcgaagtgaggccaagcaaaaggcccctgccgaggacatcgatgacggcgatgatgacctaggtttccaagagcctggggtcaccattgccactgtcgatgggggagcgtgtgctcacgtttctcgccggagcctcaaggccatgaagcgagagcttctggccgcggcccctactcatgaggcgacgcgccgggcgcggtggtcggaggttgccctcaccttcgaccagaccgaccacccaccgtgcgttgcccggggaggacagatcgcaatggtggtttcccccactgtttgcaacgtgaagctggggcgtgtcctcattgatgggggagcggccctcgacatcctttcccctgcagcctttgacgccatcaaggccccggggatggtgctccggccgtcccagctgattattggtgtgacgccggggcacacatggccgttaggtcatatcgacctaccggtccaccttcggtggatccgccaactttccgcacgggagcgggtaaacttcgatgtggcggacctaagtctgccctacaacgcggtcctagggaggcccgcgttggtgaagttcatggcggcggtccattacgcctacctccagatgaagatgccgggccccggtggccccatctctgtccatggcgacctcaaagtcgcgcttgcttgtatggagcagcgcgcggaccacctcgccgccgcgtccaagcccgagggtggcgacgagaggcttggcacctccgtccccgccgccccgaggcagcggatgatcacatgcgacgaggtcccggtcaaggaggttgccctgggcgacggccccgtctccttcctgcgggcaaacgctgacgtcttcgcatggagaccggcggatatgcccggggtccccagggaggtgattgagcaccgtctcgccgtgcggccgggcgcaaggccggtccggcagaaagtgcggcggcaggccccggaacgtcaagccttcatccgcgaggaggtggcgcgacttctggaggccggattcatcctcgaggtcatccatccggagtggctggcgaacccggtggtcgttcctaaggcgaacggcaagcttcggatgtgcatcgactacaccgaccttaacaaggcatgtcctaaggacccttaccccctgcctcgcatagatcagattgtcgactccaccgcggggtgcgaccttttgtgttttctagatgcatactctggttaccatcagattcgcatggctagggaggatgaggaaaaaactgcattcattacccccataggaacctattgttatacgacaatgcccttcgggttaaagaatgcaggtcctacttttcaacgtactactcgaatttctttggatagccaaataggacgtaatgttgaggcttatgtcgatgacttggttgtaaagacgcgcaaccaagagaccttactctcggatctagcggaaacttttgagagtctccgctccgcccgcataaaactgaaccccgataagcatcgaggccaaccccgagaagatacgagctatagagcggatgcgccccccagcaagcttagggatgtgcaatgcgtcacccgttgcatggccgccctaagtcggttcatatcgaggctgggagagaaggcgctacccttatttaagctcctcaaacgctccgggccgtttacttggacggaggaagctgaacgtgccctcactcagttgaaggcgtatctcagttctcccccagttctggtcgccccggagccaaatgaacccttgctactctacttagcggcgaccccgcaagtggttagtgcggcgttggttgtggagcgcgatgaggacaatcctcattccgcgcacccccaccctgtgctggcttggcccgggagagagcagggaggagaggcccccgagccgaacggtggcccaaggcccccgacgaccggagcaggccctctgcccgcttgtcagacggtgccaggtgcccccgacccccaggatggcccgagggccactgcgggaaggccgcacctatcgccctctgaccccgaggctaaccctgtgccgactcgacccgggagagagcagggagaagaggcccccgagccgaacggtggcctaaggcccctgacgaccggagttggccctttgcccgcttgtccgacgacgccaggagcccccgacccccaggacggccccgaggccactgtgggaaggccgcccctgtcgtcctccgaccccgaggtcgtcggcacagaagacgagtgcaccccgcgaggccgcttggacaaagagcgccccagggatgtggcccctagcgaagaggatcggccccaccgaaaggtgcagcggcccatctactttgttagtgaggccctccgggacgctgagacccgataccttcaggcccagaagatgctttacgctatcctgataacttcgaggaagttgcgccattatttccaggcgcatcaggtcacggtggttacgtcttatcccctcggccaaatcttgtataaccgagagggtactggacgggtggtgaaatgggcaatcgaactctctgaattcgatttgcgctttgaaccaagccacgcgatcaagagccaggccctcgccgactttgtggtggagtggaccccagctcccgagctcgtctccgcccccgaggccagctcgagcccatcgcagctgtctcacaccgccctctgggtgatgtag

SEQ ID NO: 92235 - DNA, 989 bp, Oryza sativa
  unsure (1)..(989): unsure at all n locations
  Clone ID: PAT_MRT4530_90736C.1
tcagcaccaccaactctttcttaaccgaaggttggtcgaatagcacttgcttttctgcgttttatgcgatttgcgaacggatcagagagttttctacggtccgttaatgttcaatcacttggaattgtctgacaccctctacaatgctttgagcgaaaactcgatttacaattattttaattgtgtcgataaatctgctttgcctgatttattgaccaataaggctgcctctgagcctcaactcgacttcagcagtgtcgagttgcttcgacagcccatcgatgtcgaacagcagatccgagagaagatctcacaacaaaccgaagataatgccttcttcattgttaatctctcggacattattcgtaagaagaagcaatggaacaattgtcttcctcgtgtagagcccttctacgctgtcaaatgcaaccctgatattgaaattatcaagtgtttggccgtaatgggtgtcaacttcgactgcgcaagcagaggagaaattgacctggtgatgagcattggcgtgactgcggatcgcatcatttacgccaacccctgcanacctaaagctcatttgaactacgctcgtgaagtcggcgtcaacatgtctgttttcgacggtgaagccgagctttacaagatcaaggagtgccatccgaatttgaaagttgtgatgagaatcgcaactgacgatcgcaactctatgtgcgctttctttgtcaagtttggtgctagaggaaacccaatggcaccgcctttttgatggttgccaagtccttgaacccttcaagttnattggtgtagcttttcaacgtcggttccggcttgtttagactgggatacctacaagtcctcttttcgaagggtttcacggtttttccaaaatggtgaggaactcggtttaaccatgaaccttttgggacatttgggtgggtttcccccgatattgttttgtttttggaaattatggctccgcattaattttttca

SEQ ID NO: 92236 - DNA, 6097 bp, Oryza sativa
  Clone ID: PAT_MRT4530_90737C.1
atggctgaaccagcaaaggcgcataacctctctccgagtgttagcggtgacgacggggagccgaacccacgccgtcgagctcgtactccaccgccccctccacgccaaagtcctaggcgggaggaagcgctcgagagggtcgaaagatccgcgacttcgacatccacgggtgatggagaagggcgccgagatggggagcgtcgcctcctcgtctacggcgacggcaacacgccccagggtgcgctccaagctgcgggcgcgctcctacgccacccgcccgtcgtccctgacccggagtctccggcccaacgttggctggacgacgtggccaacttggtcatgacggcgcggcagcgcctagatgctggtgggcggtcctccgccaccaagacctctggtactgctgctaccggctccgcgtcgtcaagacggagggcgcggcgagcggcggccgctgttcgccattcggccgccactccttcgtcagcgcctccgacccgggaagatttgcgtggggggccggatgcccgcatcagtatcgagcgccggcgtaatggccgacgtgctgcccacgcaacggaaggcgcctcctcgtccggagtgtcacatcaacacggacgcggggatcagccctccgtgcccccggttggtggtgtcggctgtagagcctttgtggcgagccttcggaacgtccgttggcccccaaggttccggcccaccatcgccgaaaaatatgacgggagcgtcaaccccgccgagtttctccaggtctacatgaccgggatcgaggccgccgggggtgacgacagggtcatggcgaatttctttcccatggccctgaagggacaggcacggggttggctaatgaacttgccacccgcgtccgtccactcttgggaggatctgtgacaacagttcaccatgaactttcaaggcacatatccgcgcccaggtgaagaagcggacttacatgcagtccagcgaagggatgatgagtcacttcgctcatacatccagcggttctgtcaagtccgcaacaccataccatgcatccctgcacacgcggtgatttacgtgttcagggggggtgtgcggcacaaccgcatgctcgaaaagatcgcctccaaagagccccagactaccgcggagctttttcagctcgcggaccgagtggctcgtaaggaggaggcatggacctggaacccctccgattccggtgtggcagcttcggccgcccccggatccgctgctcagacagggcggcgtgacaggaggaggaagaagaggtcagcccattccgacgacgagggtcatgtcctcgccgtcgagggcgcttcgcgggccacccgaaaggggaggcctgcgagcgacaaaaagagggaggccagcgctcccagcagggagcgcccaaccggcaagtggtgcaccgtccacaatacctcccttcacgacctcgcggactgccgcgcagtcaaaagtttggatgagcggacgaggaagtgggaggaggagaggaggcaggagcgccgagagggcaagtccccggcggttccttccggcaatcggcgaagtgaggccaagcagaaggcccccgccgaggacatcgatgacggcgatgatgacctaggttttcaagagcctggggccaccattgccactgtcgatggaggagcgtgtgctcacgtttctcgccggagcctcaaggccatgaagcgagagcttctggccgcggcccctactcatgaggcgacgcgccgggcgtggtggtcggaggttgccctcaccttcgaccagaccgaccacccaccgtgtgttgcccggggaggacagattgcaatggtggtttcccccactgtttgcaacgtgaagctggggcgtgtcctcattgatgggggagcagccctcaacatcctttcccccgcagcctttgacgctatcaaggtcccggggatggtgctccggccgtcccagccgattatcggtgtgacgccggggcacacttggccgctaggtcatattgacctcccggtcaccttcggtggatccgccaacttccgcacggagcgggtgaactttgatgtggcggacctcagtctgccctacaacgcggtcctagggaggcccgcgttggtgaagttcatggcggcggtccactacgcctacctccagatgaagatgccgggccccggtggccccatctctgtccatggcgacctcaaagtcgcgcttgcttgtatggagcagcgcgcggaccacctcgccgccgcgtccaagcccgagggtggcgacgagaggcttggcacctccgcccccgccgccccgaggcagcagatagtcatatgcgacgaggtcccggtcaaggaggttgccctgagcgacggccccgtctccttcctgcgggcaaacgctgacgtcttcgcatggagaccggcggatatgcccggggtccccagggaggtgattgagcaccgtctcgccgtgcggccgggcgcaaggcctgttcggcagaaagtgcggcgccaggccccggaacgtcaagccttcatccgcgaggaggtggcgcgacttctggaggccggattcatacgcgaggtcatccatccggagtggctggcgaacccggtggtcgttcccaaggcgaacggcaagcttcggatgtgcatcgactacaccaacctcaacaaggcatgtcctaaggacccttaccccctgcctcgcatagatcagattgtcgactccaccgcggggtgcgaccttttgtgttttctagatgcatactctggttaccatcagattcgcatggctagggaggatgaggaaaaaactgcattcattacccccataggaacttattgttatacgacaatgcccttcgggttaaagaatgtaggtcctacttttcaacgtactactcgaatttctttgggtagccaaataggacgtaatgttgaggcttatgtcgatgacttggttgtaaagacgcgcaaccaagagaccttactctcggatctagcggaaacttttgagagtctccgctccgcccgcataaaactgaaccccgataagtgcgtgttcggtgtacctgcgggcaagcttcttgggttcttggtctctgcccgaggcatcgaggccaaccccgagaagatacgagctatagagcggatgcgccccccagcaaacttagggatgtgcaatgcgtcaccggttgcatggccgccctaagtcggttcatatcgaggctgggagagaaggcgctacccttatttaagctcctcaaacgctccgggccgtttacttggatggaggaagctgaacgtgccctcactcagttgaaggcgtatctcagctctcccccagttctggtcgccccggagccaaatgaacccttactactctacttagcggcgaccccgcaagtggttagtgcggcgttgcttgtggagcgcgatgaggacaatcctcattccgcgcatccccaccctgtgttggcttggcccgggagagagcagggaagagaggcccccgagccgaacggtggcccaaggcccccgacgaccggagctggccctctgcccgcttgtcagacggtgccaggtgcccccgacccccaggatggcccgggggccactgtgggaaggctgcacctatcgccctctgaccccgaggctaaccctgtgccgactcgacccgggagagagcagggagaagaggcccccgagccgaatggtggcctaaggcccctgacgaccggagttggccctttgcccgcttgtccgacgacgccaggagcccccgacccccaggacggctccgaggccactgtgggaaggccgcccctgtcgtcctccgaccccgaagtcgtcggcacagaagacgagtgcgccccgcgaggccgcttggacaaagagcgccccagggatgtggcccctagtgaagaggatcggccccaccgaaaggtgcagcggcccgtctactttgttagtgaggccctccgggacgccaagacccgataccctcaggcccagaagatgctttacgctattctgatggcttcgaggaaactgcgccattacttccaagcgcatcgggtcacggtggttacgtcttaccccctcggccaaatcttgcataatcgagagggtacaggacgggtggtgaaatgggcaatcgaactttctgagttcgatttgcactttgaaccacgccacgctatcaaagccaggccctcgccgactttgtggcagagtggaccccagctcccgagcccgtctccattcccgaggccagctcgggcccctcgcagctgcctcacaccgcctacagggtgatgcagttcgacggctccctgtctcttcagggcgccggtgcgggggtcacgttgacctcgccgagcggagacgtcctcagatatttggttcgccttgactttcgggcgaccaataatatggcagagtacgagggactccttgcgggactcagggtggcagctggactggggatccgccgcctcctggtgttaggcgactcccagctggtcgttaaccaagtctgtaaggagtaccggtgctctgacccgcagatggacgcttacgtgcgccaagtacggcgtatggagcgccatttcgacgagattgagcttcggcacgtgcccagacgggataacacgattgccgacgaactctcacggctcgcttcctcgcgagcccagaccccaccgggcgcctttgaagaaaggcttgcccagccgtcggcgcgacccgaccccttaggggagacggacgcgcctgaccggcccccgaggcccgtcggagtccaggcctcgggacccgaggggagcgctcccagctcccttagattgattgcttggatcgctgagatccaagcatacctcacagataagactctatccgaggactgcgaagggagtgaacgcgtccagcgcatttccaaacgctacgtgctggtagaagggaccctctatcggcgcgcggctaacggaatcctcctgaagtgcattcctcgggaacaaggcgtcgagcttcttgccgatatccatgaaggcgaatgcggagcccactccgcctcgcgcaccttggttggaaaagcctttcgtcaaggtttctattggcagatagctctcaatgatgcagtcgacctggtccggcgatgcagagcgtgtcaattccacgccaagcaaatccatcagccggcccaggccctgcagatcataccactttcatggccatttgctgtctgggggctcgatatcttgggaccgtttaggcgggccccgggcgggtttgagtatctgtatgtcgcgatcgacaagttcactaagtggcccgaggcttatccggtcatcaagatcgataagcactccgcacttaaattcattaagggcatcacagcccggtttggagtgcctaaccgtattattacggataacggcacccaattcactagtgaactcttcggtgactactgcgaagacatgggcatcaagctctgcttcgcctcacccgcccaccccagaagcaatggccaagtggggcgcgccaatgcggaaatcctcagaggtcttaaaaccaagaccttcaacatcctcaagaagcacagcgattcgtggatcgaggagttgccagcggtgctctgggcgaaccgaaccacaccaagccgagcaaccggggaaacgcctttcttcctcgtctacggcgcggaagcggttctcccatccgagctcaccctgaggtcccctcgggccaccatgtactgcgaagctgatcaagatcagcttcgcagagatgacctcgactatctggaggagcgaaggcggcgcgcggccctccgagccgcgcgctaccagcagagcctgcggcgctaccatcagcgccacgtccgggcccgatcactctgcgtcgacgacctcgtcctacgccgcgtccaaacgcgtgctggattgagcaagctctcaccaatgtgggagggtccgtatcgagtgatcggcgtcccccggccgggctccgttcggctggccacgggcgacggcacagagctgcctaacccgtggaacatcgaacaccttcgtcgcttctaccct

SEQ ID NO: 92237 - DNA, 6262 bp, Oryza sativa
  Clone ID: PAT_MRT4530_90738C.1
atggccgagcaagcaaaggcgcacgacctctctccgagtgttagcggtgacgacggggaaccaaacccacgccgtcgagctcgtactccaccgccccctccacgtcaaagtcctaggcgggaggaggcgctcgagagggtcgaaggatccgcgacttcgacatccacgggtgatggaaaggagcgccgagatggggagcgtcgcctcctcgtctacggcgatggtagcacgccccagggcgcgctccaagctgcgggcgcgctcctacgtcacccgcccgttgtccctgacccggagtctccagcccaacgttggctggacgacgtggccaaattggttatgacggcgcggcagcgcctagatgctggtgggcggtcctccgccaccaagacctctggtgctgctaccaccggttccacgtcgtcaagacggagggcacggcgagcggcggccgctgttcgccattcggccgccactccttcgtcagcgcctccgacccgggaagatctgcgtggggggccggacgcccgcaccagtatcgagcgccggcgtaatggccgacgtgctgcccccgcaacggagggcgcctcctcgtccggagtgtcacctcaacacggacgcggggatcagccctccgtgcccccggttggtggtgtcggctgtagagcctttgaggcgagtcttcggaacgtccgttggcccccaaggttccggcccaccatcgccgaaaagtatgacgggagcgtcaaccccgccgagtttctccaggtctacacgaccgggattgaggccgccgggggaaacgacagggtcatggcgaatttctttcccatggccctgaagggacaggcgcggggttggctaatgaacttgccacctgcgtctgtccactcttgggaggatttgtgccaacagttcactatgaactttcaaggcacatatccgcgcccaggtgaggaagcggacttgcacgcagtacagcgaagggatgatgagtcacttcgctcgtacattcagcggttctgtcaagtccgcaacactataccatgcatccctgcacacgcggtgatttacgcgttcagggggggtgtgcggcacaaccgcatgctcgaaaagatcgcctccaaagagccccagactaccgcggagctttttcagctcgtggaccgagtggctcgtaaggaggaggcatggacctggaacccctccggttccggtgtggcagcttcgaccgcccccggatccgctgctcagacagggcggcgtgacaggaggaggaagaagaggtcagcccattccgatgacgagggtcatgtcctcgccgtcgagggcgcttcgcgggccacccgaaaggggaggcctgcgagcgacagaaagaaggaggccagcgctcctagcagggagcgcccaaccggcaagtggtgcaccgtccacaacacctcccttcacgacctcgcggactgccacgcagtcaaaagtttggctgagcggacgaggaagtgggaggaggagaggaggcaggagcgccgagagggcaagtccccggcggttccttccggcaatcggcgaagtgaggccaagcagaaggcccccgccgaggacatcgatgacggcgatgatgacctaggtttccaagagcctggggccgccattgccactgttgatgggggagcgtgtgctcacgtttctcgccggagcctcaaggccatgaagcgagagcttctggccgcggcccctactcatgaggcgacgcgccgggcgcggtggtcggaggttaccctcaccttcgaccagaccgaccacccaccgtgtgttgcccggggaggacagatcgcaatggtggtttcccccactgtttgcaacgtgaagctggggcgtgtcctcattgatgggggagcagccctcaacatcctttcccccacggcctttgacgccatcaaggccccggggatggtgctccggccgtcccagccgattatcggtgtgacaccggggcacacttggccgctaggtcatatcgaccttccggtcaccttcggtggatccgccaacttccgcacagagcgggtgaactttgatgtggcggatctcagtctgccctacaacgcggtcctagggaggcccgcgttggtgaagttcatggcggcggtccactatgcctacctccagatgaagatgccgggccccggtggccccatctctgtccatggcgacctcaaagtcgcgcttgcttgtatggagcagcgcgcggaccacctcgccgccgcgtccaagcccgagggtggcgacgagaggcttggcacctccgtccccgccgccccgaggcagcggatgatcacgtgcgacgaggtcccggtcaaggaggttgccctgggcgacggccccgtctccttcctgcgggcaaacgctgacgtcttcgcatggagaccggcggatatgcccggggtccccagggaggtgattgagcaccgtctcgccgtgcggccgggcgcaaggccggtccggcagaaagtgcggtggcaggccccggaacgtcaagccttcatccgcgaggaggtggcgcgacttctggaggccggattcatccgcgaggtcatccatccggagtggctggcgaacccggtggtcgttcccaaggcgaacggcaagcttcggatgtgcatcgactacaccgaccttaacaaggcatgtcctaaggacccttaccccctgcctcgcatagatcagattgtcgactccacagcggggtgcgaccttttgtgttttctagatgcatactctagttaccatcagattcgcatggctagggaggatgaggaaaaaactgcgttcattacccccataggaacctattgttatacgacaatgcccttcgggttaaagaatgcaggtcctacttttcaacgtactactcgaatttctttgggtagccaaataggacgtaatgttgaggcttatgtcgatgacttggttgtaaagacgcgcaaccaagagacgttactctcggatctagcggaaacttttgagagtctccgctccgcccgcataaaactgaaccccgataagtgcgtgttcggtgtacctgcgggcaagcttctcgggttcttggtctctgcccgaggcattgaggccaaccccgagaagatacgagctatagagcggatgcgcccccccagcaaacttagggatgtgcaatgcgtcactggttgcattgccgccctaagtcggttcatatcgaggctgggagagaaggcgctacccttattcaagctcctcaaacgctccgggccgtttacttggacggaggaagctgaacgtgccttcactcagttgaaggcgtatctcagctctcccccagttctggtcgccccggggccaaatgagcctttgctactctacttagcggcgaccccgcaagtagttagtgcagcattggttgtggagcgcgatgaggacaatcctcattccacgcatccccaccctgtgctggcttggctcgggagagagcagggaggagaggcccccgagccgaacggtggcccaaggcccccgacgaccggagctggccctctgcccgcttgtcagacggtgccaggtgcccccgacccccaggatggcccggtggccactgcgggaaggccgcacctatcgccctctgaccccgaggctaatcctgtgccgactcgacccgggagagagcagggagaagaggcccctgagccgaacggtggcctaaggcccctgacgaccggagttggccctttgcccgcttgtccgacgacgctaggagcccccgacccccaggacggccccgaggccactgtgggaaggccgcccctatcgtcctccgaccccgaggtcatcggcacagaagacgagtgcgccccacgtggccgcttggacgaagagcgccccaagaacgcagcccctagcggagagggtcggccccaccgaaaggtgcagcggccggtctactttgttagtgaggccctccgggacgccaagacccgataccctcaggcccagaagatgctttacgctattctgatggcttcgaggaaactgcgccattatttctaggcgcattgggtcacagtggttacgtcttaccccctcggccaaatcttgcataatcgagagggtactggacgggtggtgaaatgggcaatcgaactttctgagttcgatttgcactttgaaccacgccacgctatcaagagccaggccctcgccgattttgtggcagagtggaccccagctcccgagcccgtctcagtccccgaggccagctcgggcccctcgcagctgcctcacaccgcccactgggtgatgcagttcgacggctccctgtctcttcagggcgccggtgcgggggtcacgttgacctcgccgagcggagacgtcctcagatacctggttcgccttgactttcgggcgaccaataatatggcagagtacgagggactccttgcgggactcagggtggcagctggactggggatccgccgcctcctggtgttaggcgactcccagctggtcgttaaccaggtctgtaaggagtaccggtgctctgacccgcagatggatgcttacgtgcgccaagtacggcgtatggagcgccatttcgacgggatagagcttcggcacgtgcccagacgggataacacgattgccgacgaactctcacggctcgcttcctcgcgagcccagaccccaccgggcgcctttgaagaaaggcttgcccagccgtcggcgcgacccgaccccttaggggagacggacgcgcctgaccggcccccgaggcccgtcggagtccaggcctcgggacccgaggggagcgctcccagctcccttagattgattgcttggatcgctgagatccaagcatacctcacagataagactctacccgaggaccgcgaagggagtgaacgcgtccagcgcatctccaaacgctacgtgctgatagaagggaccctctatcggcgcgcggctaacggaatcctcctgaagtgcattcctcgggaacaaggcgtcgagcttctcgccgatatccatgaaggcgaatgcggagcccactccgcctcgcgcaccttggttggcaaagcctttcgccagggtttctattggccgacagctctcaatgatgcggtcgacctggtccggcgatgcagagcgtgtcaattccacgccaagcaaatccatcagccggcccaggccctgcagatcataccactttcatggccatttgctgtctgggggctcgatatcctgggaccgtttaggcgggccccgggcgggtttgagtatctgtatgtcgcgatcgacaagttcactaagtggcccgaggcttatccggtcgtcaagatcgataagcactccgcacttaaattcattaagggcatcacagcccggtttggagtgcctaaccgtattattacggataacggcacccaattcactagtgagcttttcggtgactactgcgaagacatgggcatcaagctctgcttcgcctcacccgcccaccccagaagcaatggccaagtggagcgcgccaatgcggaaatcctcagaggccttaaaaccaagaccttcaacatcctcaagaagcacggcgattcgtggatcgaggagttgccagcggtgctctgggcgaaccgaaccacaccaagccgagcaaccggggaaacgcctttcttcctcgtctacggcgcggaagcggttctcccatccgagctcaccctgaggtcccctcgggccaccatgtactgcgaggctgatcaagatcagcttcgcagagatgacctcgactacttggaggagcgaaggcggcgcgcggccctccgagccgcgcgctaccagcagagcctgcggcgctaccatcagcgccacgtccgggcccgatcactctgcgtcgacgacctcgtcctacgccgcgtccaaacgcgtgctggattgagcaagctctcaccaatgtgggagggtccgtatcgagtgatcggcgtcccccggccgggctccgttcggctggccacgggcgacggcacagagctgcctaacccgtggaacatcgaacaccttcgtcgcttctacccctctgccctcaggggctcgggtcggcttaaatcgccaaaaggggcccagaaccgagccgtgccccggggcgtggtgaactccggtgtcacgaccggaaatcacccaacaggccgaccctgggtcccagctcgtcctaagccaacccaggccaaccattccacat

SEQ ID NO: 92238 - DNA, 190 bp, Oryza sativa
  Clone ID: PAT_MRT4530_90739C.1
aaatcgccattccgatcgctgaaaatgttacagcaattaatagcatcaagcgacaacctattttgtctgccaaagggccgcttgttgatctaagtaccactcggttatcccgttttttgcgcggatatgcgccgcaggataagctaattgtgttgccgcaaaatctgtttgataggggaatagcgaagcg

SEQ ID NO: 92239 - DNA, 2136 bp, Oryza sativa
  Clone ID: PAT_MRT4530_9073C.1
atggccggcgcgtggaggaaggcgtggctgtcgatgctggaccgaggcggcggatcaggcgcgggcggcggaggcggcgggagcagcgggtcgctgcacgtgcacctccacggcctcctctccccgtcctcgtcgtcgtcgtcgctcaacggttacaagcgcggcggcggtaagcacggcggcggtggtggttgcggcggcggccatgtgatgacgagtagcaaggccgtgctggcatgcttctccgtcgcgctcgtggtggccttcttctacgtctccgtcgccagcggccccaccgcggacgccgcctcgttcccttccccgacgggggcgtcgtcgtcgtcactcctgtcgtggctgtcgtcgaactcgacgtcggcggcggcgctgccgaggaggtctctcccgcctcacccgcccattcctcctgccggcggcggcgctgatctgcgtaacaccgcgcgtagaacgcagagcggcgccgagggctcggggttgccggcgccggcggcggagcaaacggccaaaccgcgggtttctgatctccggtcgggcgccgggaacgccaccgtcggtgacgtcgacggggatcaacgcgtcgggaatggcacgcgatcacgacagcagcgagaggaaaccgcaacaccaatgccgcgatggcagagaagggacgaggagaagaactccacccaccacgccatcgtcgccgctcccggcaactccaccgacgccccggccccaccactgaactcgacggcgacgccgcgagccgcagcagcagccgcagccacgccatcgacgccgccggagaggaaggctgacacccaccacagccatcggagaggcatcaggcacaagcagcagcagcatcaccagcacccgaggcggcgaaaggacaccgtcctcctcgcggcggcggcggcgcgccaagaagctcccgatcgccgcgacgacggcgccgccatgccattgcccgccgcgacgatcatcaacaccagcaccgtcggcgacaaccgcgtcgtctggacgtccggcgtgcagagtggcctggtctccttcgccaagtgcgacgtgttcagtggccgctgggtgcgcgatgacgacgagggcggcggcgcctacccgttctacccgccgggctcgtgcccccacatcgacgacgacttcaactgccacaagaacggccgcgccgacaccggcttcctcaggtggaggtggcagccgcacggctgcgacatccccaggctgaacccgattgattttctggagaggctgagagggcagaggatcatattcgtcggcgactcactgaaccgcaacatgtgggagtctctggtgtgcattctgcggcatggtgtcagggacaagaggaggatgtatgaagcgtcagggaggaaccagttcaagaccaggggatactactccttcagattcagggattacaattgctccgtggatttcataagatcaatatttctagtcaaggagatgatcaacgagaccaaaggcggcgccgtggtggacgctaagttgagattggatgaactcgatgaaacgactccggcgtaccggactgccgacatcgtcgtcttcaacaccggccactggtggacgcactggaaaacatcaagagggctgaattactaccaagaaggtaactacgtgcaccccagcctcgaggtgatggacgcatacaagagagctctgaccacctgggctagatgggtcgacaagaacatcgactccacaagaactcaggtggtgttcagaggatactccctcacacatttcaggggagggcagtggaactcaggagggagatgccacagggagacggagccgatcttcaaccggacgcacctcgccgagtacccggagaagatgaggatcctggagcaggtgctggggcggatgacgacgccggtgatctacctcaacatcagcgccatgacggactaccgcaaggacgcccacccgtcggtgtaccgggtgcggtacgagacggaggaggagcggatggcggcggtggcgaagcaggactgcagccactggtgcctgcccggcgtgccggattcctggaacgagctgctgtacgcctcgctgctccaggcagggagaggatcgtggagactatga

SEQ ID NO: 92240 - DNA, 471 bp, Oryza sativa
  Clone ID: PAT_MRT4530_90740C.1
cccacgcgtccgcccacgcgtccgcaaaaaaaagcctataaaaaagtataaaaccattgcaccatcgagcaaggcagtagcagtgatcgaggagaataaaagcagaagtagtagcagaagcaagaaaacactttgagcatttttgttttgttctccttgcagttacagctgaagcagcaagcagaagattaaccctcttggctaagattcaggttaacctgcagcgagaggttagctcagctcagcttagcttagcttaagctttgctcgagcttgccgtgcactccactgtctcttttccggtggtataatttggtgcggcggtgagctgccggccatgtcgaccgtctcctccgcgctgtcggcgatcctctactgctgcttctcccccaccggagggcaccggcacggtcaccgcgccggcgcgtactactacagcagccacccgacgagcaccaacacctactacta

SEQ ID NO: 92241 - DNA, 296 bp, Oryza sativa
  Clone ID: PAT_MRT4530_90741C.1
attattagggaaaaaaaattgataaaaaagggaacaaaaccgggcaccacagtcacccaagggaccaccaagggccaaaaaaagctaaaaaaagggcacggcgggggggaaaaaaatgacgaaaacaaggggaaaaaaaaagactggccagggacggagaacgcccgaaaaaagaccggggccggaaaaaacctaaactggggccgcagcgccccaataaaaaacctctaaaaaacccaggggaactcccaggaaacgcccgggcatactccagggtctaccccaggaactgaaag

SEQ ID NO: 92242 - DNA, 912 bp, Oryza sativa
  Clone ID: PAT_MRT4530_90742C.1
gctgactggcgatggggaggaggtcgccgggacgatgaggaccgacggccggccggtgacgcggcggcggcgacatgggagaaggggagggaggcggcggcaggagcacaggggagatcgagcacggcggcgggcagagtggggcgatggcgaggcggagcagcaccacaccccctttgcgcccggcgtcgtcatctggatcgcgtcgtccctcctcctcgcccccttcgtgccctcctccgccaacggcggtgacatctccattggtcgcgaggatcccctccccgagcaggaacccgtcccggatcccgcccccacctcttgcgcggtaggcaccacagctcaagctcgaactcgccgcccccgaagccctcagatggtgaagcacccagcggccaacaccgctgagggcgtcaagccgctcgtcgcctccatgcacctgccgctccaagacatccgcaccgatactggtgtagtcgagcgacctgtgtgcgatggcggccgcagcgtcgcgctagcttgcggcgtgaggctgattcgcgggctggggatgcgcatgtacatccctatgccttcttccttcgtggcctgctccgtatcacttgacgaggacctagctattgcatacgtcttcaccttcaaatccctcatggcgctcaagacccacgaggctgttgtccccacgcgccttgtgcgaggccgtggcggcactatccattggtcgtcaccccttccagttcgtggtgtgatgtgaagaggcgtgcctccgccatcgccatcgagcatggcagacatcatttccttgtcctcgattgtttgcgcacctccaccacatttgctaccgcagagatcgaagatatgaggagagagataaggtagaatatttgtttcaatgatacgggggtcccgcat

SEQ ID NO: 92243 - DNA, 427 bp, Oryza sativa
  unsure (1)..(427): unsure at all n locations
  Clone ID: PAT_MRT4530_90743C.1
ttgagcggcgctcggccctgtacgtgctgctgcatggtgcggcgcgtcagcctgcctggctcggcatgccactcagcctggctcgacatttcgtcgagcaggtggtgggcatgtgcatccggctggggaaaaggatggggaaacagacttgggccacaagggtagagggggagtagaaatagacttctgatgtgctgggctgagagggaaaagaaaagcccagttgcaataggaatattctgtagaacngcaaatggaatttgtgaaggggatttgtaatttggaaactgtagatggactgtatattcggacatttgactttgggctgaaatttgtaactgggagttggaactataaatggactgtttaatttgggtgattggattggattcaattcggccgctcagtcgcccaagtaaaaaaaaaa

SEQ ID NO: 92244 - DNA, 609 bp, Oryza sativa
  Clone ID: PAT_MRT4530_90744C.1
tggggtggatcaagtagacctgacttcacttgtaaaagtactgaagaaactgaggcatggttcatagattcctttgaggaatggcgcaaagcaaagaatctcagtaattttatattgctcggtcactcttttggaggatatgttgcggcaaagtacgctttacagcatcctgagcacgtccaacacttgatcttggtcggccctgctggcttttcatcagaaacagagcatagctctgagtggttaaccaagttccgagctacatggaaaggcatgctagtgaatcatctatgggagtccaattttactcctcaaagaatagtgagaggattgggtccttggggaccaggcttagttcagagatataccagtgccagatttggctcacattcaacaggtgaattactaacagaacaggaatccacattactgacagattacatttaccatactttggctgccaaagctagtggagagttgtgcttaaaacatatattttcctttggggcattcgcgaggaaacctcttctgcaaaggtcagttttcttcgtattaactaaatgtaggagttatgagcaccctggtgatcttgagagcatatgcacaata

SEQ ID NO: 92245 - DNA, 820 bp, Oryza sativa
  Clone ID: PAT_MRT4530_90746C.1
aatgaagctctcattattctaaaacacagggagaacttataaacaataatcatcctcaagaatacacccctaccaacaacaacaacaacaaaaatcatagctagcgtttttttacagggaaaaaaaaagcatatgacaccacacccagcttatatattctagtaatcaactggtcaacacacagcaaaaaccggcagtaaaatgaactgatcaacacgatcatcatcttcaatatcatcgtctcaagtaatgagaatgaatgaatgaattaatcttaatcgaggcggagatggatgttgtactcgacggtggcgtcgccggtggtggcgttgaaccaccacgtcgtcgcctggcagtagccgcgcgcgaaccggaacacgccggtgccgcccaccaccggcatctcccgcacggcgcgctccgccgggttggcgccgaggatcgcgaggctgctgccgttgtacgggccgtcgccggcgaacacgaagttcatcgccatcatcagcgacagcgcgtccttgccggcggcgacgtacatcccctgcgcgcggccgaccagccgcgaggccgtcaggttgggcccgtcggtgagcgggtcgtcgatcaccaccaccgcgccgaaccccgtcgccgaggcgttcgtcgtcggcgcctccgccacctgcgccaccgtggagttgggcccgccgctcaccacgtcgtgccagaacacccgcagcttcgtctccctctgcgcctgcgccgccgtcgccgccgccaggacgaggagcgccgccgcgaacacgaaggaggaggaggaggcagccattgcttggttcgg

SEQ ID NO: 92246 - DNA, 1185 bp, Oryza sativa
  Clone ID: PAT_MRT4530_90747C.1
atggcgaacccaaatgcgagtgcggtcttcctggccttcatcgtgattctcatcatagtcatcttcatcctacttggtatctgctggaagttcctcaggccagatatcatgaggagattgatgaggccaaagagggctccgtcagaggtacccgagtatttcagcggcaacatgagcggcaatctgcgcacaataacatactttgattatgcaacactgaagaaggccacgagggatttccaccagaagaatcagctcgggagaggaggctttggacctgtttatctggggaaactagacgatggcaggaaggttgctgtgaagcagctgagcgtcggcaagtcaggtcagggcgagtccgagttcttcgtcgaggtgaacatgataaccagcatccagcacaagaaccttgttcgccttgtgggctgctgctcggagggccagcaacggctgctcgtctacgagtacatgaagaacaagagcttggacaagatactgtttggtgttgatggtgcaccatttctgaactggaagacgcggcaccagatcatcatcggcatcgcgagaggcctgcagtacctgcacgaggagtccaacctgaggattgttcatcgcgacatcaaggcgagcaacatcctcctggacgataagtttcagcccaagatcagtgactttggcttggcaagattcttccccgaggaccagacatacctcagcacggcatttgccggcacactaggctacacggcgcctgaatacgccatcagaggggagctcacagtgaaagccgacacctacagcttcggagttctcgtgctcgagatcgcatggaggctgtacgagcaatccaagatactggagctggtcgacgcgaagctgcaggccgacgggttcgacgagaaggaggtgatgcaggtgtgccagatcgcgctgctctgcgtgcagccattcccgaacctgaggccggcgatgtcggaggtggtgctaatgctcaccatgaagacgacggagcagtccgtcatccccgcgccggtgaggccggcgttcctggacaggaagagcctcaaggacaagaacaacggcggcggctcggacacggcggcggagatgaggtcgacggcgtactggctcggcacgccgtcgccgatggtcgacaggccgtacgacatgagctgtggcatataa

SEQ ID NO: 92247 - DNA, 369 bp, Oryza sativa
  Clone ID: PAT_MRT4530_90748C.1
agggcatgaacggcaaggttgctttcggccgcaacatcaccgtcaatgaggcccagtcccgccgctccggcggcggaggcagaggctactgaggcggcggtggcggctacgcgagcagccgtggaggcggcggctacggaggaggtggctgtagcaggctaccgtcgctctgagggcggctacggcggcggcggaggctacggatggtgacgtgaccaccaccagaggcggctacggtggcagacgtggcggcggataccgccgccactcctgcgggaactggaggaactgattggaggggcccatcgcggacagctatccttagctatccgcgtcagaatcatcttatcatggagtcgagtcgatatc

SEQ ID NO: 92248 - DNA, 581 bp, Oryza sativa
  Clone ID: PAT_MRT4530_90749C.1
cccacgctttcgatggactacagcaagcaagggggatgggactcgtattcatcacaagtgcacaacttgtatccataccctcagccaagggtgtatccaccaccaccggtttcagagggctatggctaccagacctactttggtgaagataaccaagaagcttcttgtggctggtcacgggaacaaccatctgcaccatcagatgggccttacaactatggctacaatgaagatccagactgcctcactttcttaagaggatgcttggcagggctctgctgctgctgcttgctggagcgatgctgctacttctgataccatcgtcagccaagaatggatgtgcttcagctggatatatagttgtcttggattatatttgtaaggttaggttgttgtgcctatatggatgtagtactcccctctagtcacaaataaatgtcgttttttattttgttttaaagtaaataattagacagaactttgatggtttgaccgcataattgttttgcaaaaaaaaaagttgataatattatgaaagcttttgtcataccaaaaaaaaaaaaaaaaaaaaaaaccaaaaa

SEQ ID NO: 92249 - DNA, 269 bp, Oryza sativa
  Clone ID: PAT_MRT4530_9074C.1
ggaggcggggggccctcccaaaaaaataaaaaaagccccggaaggggtttccaaagcaaggaataaaggggtgccaggggggaaaaaaaaaagggggccctttggaggggaaaaaataaaggggctgggggaccggaaatatttgggaaaagactttggggaaaaatttctctagagggttacggccggttataaaatggcccccgcgcctttccaaccaaaggggggggaaagagggccgccaagggggagaaaacgcctttggccca

SEQ ID NO: 92250 - DNA, 380 bp, Oryza sativa
  unsure (1)..(380): unsure at all n locations
  Clone ID: PAT_MRT4530_90750C.1
cacacagaaaatcgaaactagttcagatgggtgtgcttccagtttaattcaccgggggattcctcaattcgcacagagacttgatcataagtcggttcttttctcgtggattaattaattaaagggggggggggggnaacccggnggtngtccattnttccaccacanatggggggcccgggtccgatcgngagggtnagggtggcccagttttgctggcttgcgggggtgtngttttgtngcctccgcctttgccgncgncgccgangctttgctggctgctgcttcgtttgttcggttcaggcgccgttgtgcggggggcccttgntgccggggggcgggtgcttgcccgcggtgttgggctgctcgtgcgcgtcggg

SEQ ID NO: 92251 - DNA, 885 bp, Oryza sativa
  Clone ID: PAT_MRT4530_90751C.1
ccggccgggactcttcccatttccagctccgtcgagcacccagccccttcctcctcctcctcctcctcctcgtcgttccgcctccggccatggccgccgcgctgtccgccgtcgtctccgccaagctcggctgcccgccggcggcggcgctcggtagctggaagggaagcagaatttcaagcagaaacctggtctccatgaagacgatgacagcaaggagaggcctcgtctccctcagatcccctcgcttccgcgtcttctgcgcggcgaaggcggagacggtggggaaggtgatgcagatagtgaagcagcagctggcgctgggggaggaggcgaagctggcgcctgagtcgcagttcacggagctgggagcggactcgctggacacggtggagatcgtgatggcgctggaggaggagttcgggatcaccgtggaggaggacaacgcccagagcatcaccaccatccaggacgccgccgacctcatcgacaagctcgtcgccggcggcggcggcaagccccccgccgccgcctgaatctgatcttcttcttcttcttcttcttgctctgaaaccatcgccacttctgtttgatgaagaagagacgtcagtctagctagctcgagtagcacatttgtcatcagagagaagttgattctttgcgcttctagtcatcgatcggtgtgtatttgcgtgtaatttcgaacaattttgtcacttaggttgctcgattgattgctactactagtactagtttacttatgtacttttgctgccgttttttttttgttcggtacaattttaaattttagatgatggggttttcataaagcaaagtaatgtctgcctggccaaattataatttggttattgtctggcttccgct

SEQ ID NO: 92252 - DNA, 1815 bp, Oryza sativa
  Clone ID: PAT_MRT4530_90752C.1
atggagagggcggtgccggtgaggaagccgcacacctcgacggcggacctgctcacgtggtcggcgacggggcccgacgccgccgccgccgcggcctcgccggtcgcctcctcccgccccagcctcaagtgcaaacatgagatgtttgctaatgtccaaatttttagtgctagaatccaagttttagcagtacaggcaatgatgcttgaaaaaatttatcttcctctgcggttgaagctttggcttgaaactgtctatcttgcatgtaaagctcctgttgaatttttacagcattttcttattgtagtgcagttaatgatatggtatattgaacttataactttgttggcctgttatagtgaacgaaaattttgctcgggctcaaagttaaaagaaatgactggaagtgggatattcgctgagaatagtgaaaatgatgattcagaggcttcaaatcctgcaaacaaaacttctgtaaggatgtatcagcaaactgtaactggaataagccaaatctcattcagtgctgatggaagtgtttctccaaagaagccatcgtcattacctgaggtggctaagcagcgagagcttagtggtacactggagactgatgctgaggctaaaatgaataagcagcattctgaagccaagagcaaggagctcagtgggagtgatatttttggtcctcctccagagatccctgcaaggccattggctgctcgcaatatggagctgcaaggaaatctagattttgcacttccacaaccgagaagcgtccacacatcagtgaaagtatccaatgcttttgttattgagtaccgcaccacggcaccaatcttttgtagactgaataatttactggttagatacgccaaaaaggaattcataccacctttctttaggaaaccacaactacagaagggaccttttcttttgttcctcttggtgatacaggatatccatacaccttacagggaatggatgctcaaattaggttgcattgatataggtcctgctggaggtccaagcaacatcacgttcagtgaggagcctgtagtcaagacgtcaaagaaaatccataaccagaagttccaagagttgacaggcaacaacatcttcaaagaggacgctacccctgcatcagctgagaaatctctgagctcagcaaagctgaaggagatgagcggcagtgacatctttgctgatggagcggcagctccccgagactatctcggcggtgtccgcaagccccctggtggcgagagcagcattgcactgatctaatcgccgccatcaggtttagtcaggagcctctactcttgacgtcaaagaagaaccataaccagaagtttcatgagttgacaggcaacaacatcttcaaagaggacgctacccctgcatcagctgagaaatctctgagctcagcaaagctgaaggagatgagcggcagtgacatctttgctgatggagcggcagctccccgagactatctcggcggtgtccgcaagccccctggtggcgagagcagcattgcactgatctaatcgccgcaggctgccctaatctggactggctacttttaccctcatcgctgaagtccgtggcatgtgctcttcctggaccctggttcttgatcatggttgagagctgatatcttggccctgatatcatctagagtcagcagaatctgactcagcttatgtgttgtaaacttgacttaatctcatctgtcttatggtacttatgtattaatctccttggactgagactgaaataagttttattggttcatttttgtgagctcatggtatcatc

SEQ ID NO: 92253 - DNA, 135 bp, Oryza sativa
  Clone ID: PAT_MRT4530_90753C.1
tatactgtcactaaataaactcaatcaccacctgcggaagctcctcaccaagcactcacttatgggagtggggtttgcacgtgcagacatagccagagccagagctggacctaatgtcgacgaccttatcttccg

SEQ ID NO: 92254 - DNA, 272 bp, Oryza sativa
  Clone ID: PAT_MRT4530_90754C.1
tgtcgcagtgtgattgatgtgaaaatgccgagtgagggatgcgatgatgtggtgtgtgtgccgtgtggggtggggattgaaataatgggagcatggtgtgttgatgcgcaccccgtggggtggtgatgcccacacctctggtgtgtgtgcagaccggatgactgatgcggatggtgtgtggatgcagaatgcacagcccgagggtggcttggaaactagggcaccataaaacccgggaagaaaaggaaaggtaaaaaaaaaaaaaaaaaaaa

SEQ ID NO: 92255 - DNA, 1937 bp, Oryza sativa
  Clone ID: PAT_MRT4530_90755C.1
tcacatagggaagtaaagcaactgtgggtcgatgcccttgggaacgtgtctagcaggagtgttatccagacatccgcccaaggagtcggctaggctccgtgcaaatgccatgtagctccggtactcgtcctctgctttgacccgtccactagaagcagcagcggcagcattgctgatggcgttgttgtttgccaggacacgaccgaagctgtggttgtactcccagtccccggtttcccagtcgaaagcgtagagcggcagaaaccggtggccgaaactggcgacgaagtcgatggcgtccagcacgaactccgcctcccgcgtcgacgtgtagtaggccaggctgacgcgcgtccacccggggcgcacgccgtggtagcccttctcgacggcggatttgatggccttggctcgcgccggcgtgatgccgaggaggcggtggccgtagggccccgcgcaggagcatcccccgcgcgcctgcacgccgaacaggtcgttgagcagcttcgtcacgaaccggcagtgcagctgcggccgctcatcctgctcggagccgtcgcgcggtgagtacaccacgaaggagagaacggggagacagcgccctccgctgggccggtcgccgccgagcagcagccgcaggtttggagacgcttgcatccggcggagagcaagggcgagcatgtggtcctcgcgcgcctcgatgcacgcctcgccgacccactccttcacccggaacgccagcgcggcccggaccttctgtatgatcgccggcgtgccggcgtcctcgcgctcctccgtgtcctcgcagtacaccgtgtcgccgtatgcgctgacgtagacgacggtgcccccgccgctggtggacggcgcggtgcggcggaggcgatagagccgcttcgccatcgccaggacgccggggcttcccggtccccccaggaacttgtgcgggctcaggtagacggcgtcgtacccgtcctcctcgccggaccgcatgtcgatgccgacgtagggcgcgctgcacgcgaagtcgaagcaggcgtacgcgccgtagccgtgcagcaggcgcgccacggcgcgcgtgtcggtgcggatgccggtgacgttgctgcacgccgagaaggatcccagcatgggccgaccggcgcgctccggcgccgccagcgccgcctccagggcgtcgaggtcaaggtggccgtcgtccgggcgcagcccgatctccaccacctccgcgaggctctcccgccacgtgagcaggttggagtggtgctcgtacggccccacgaagacgacccaccgctccgacggcggcaggacgtccagcgccacggagcgcagcgtcggtggcacggccatgcccgtcacctcctggagccgcttgatggccgcggtgcagcccgtgccgcagaagagcagcacgtcctccgccccggctcccaggctgcgcttcacgtacttcgccgcctccgacgccagcttgctcgtgtgcaagcccacgtagctgtccaccgtatgcgtgttcccgtagtagggaagaacgttgcgctgcacgaagtcctcgacgaaacgcaggcagcggccggacgcggtgtgatcggcgtacgtgacgcggcgggtcccgaacggcgacgcgaactccgcgtccgcgccgatgacctgcgacctgagccactcgagcttcctcgctggatcgtcggcgtcggcgctcgtcttgtcgtcgccgccgtagccgagcacgagatcgtcgaaaaggtggccgtcgtcatcgtgcgccgctgctgcaggacgcgcggtgctagcgcaggcaataggacctgtcgaaatgggtacgggctgcacgataagaagaggcatgcctgcgcccttcctgttttggtacaggatttggtttggaattctgtacttttgtgtgctagcggtagctgttcggaccaatgggg

SEQ ID NO: 92256 - DNA, 277 bp, Oryza sativa
  Clone ID: PAT_MRT4530_90756C.1
agacaaggggggtcctttttaaagggccaagggaactaaataagggacgcgtccgccggcccaaaacgggacggttgcaaaaaacacacacccaaacagtttaagggcccaaaaacccataaaggcctacacaaggcccataacccaataaagacctacccagagtttggggcaaaacctgatggcttcagtaagcctaattacctaacaatcccccctatttaagaaacggtttggtccccaagccggagcttctggaaaaacaaacttaaattga

SEQ ID NO: 92257 - DNA, 1065 bp, Oryza sativa
  Clone ID: PAT_MRT4530_90757C.1
atggccaccccgagcaacccagctaacgtgagccccgtgatgccgggcctcatagtactcctcaaaggctggatcgtgtgggccaataatgtgagctcctccgacgccggacaagctcaggtattggacaccgggaacctcatcgtgaagggcaaaggagggtctgggattaagagaagactaacacttgattttgatggtaacctcaggctgtatagtctaatgaatgatggaacatggtcagtgacatggatagcatttcctcagctctgcaatgatgaaattggaaggggggcatcaggcatcgtgtacaaggggatcttgacagacaggagagaagttgctgtgaaaatgctgggatcacaggcattacttgaatggaagcaaagatttaacattgctctagaggtcgctaaggggttggcgtatcttcatcatgagtgcttggagtgggtcatccattgtgatgtaaaaccagaaaatatactgctggatgagaatttggagccaaagattgctgactttggccttgcaaagctgctaaatagaggtggatctaatttaaatgtgtcgaggatccaaggaactagaggctatttagcgtctgaatgggtttctagtcttccgataacagcaaaggttgatgtgtacagctttggagtggtgcttctagaactactaaaaggagctcgtgttgctgaccttgaaacaaacaaagatgaggaggtggaaatgattaaatggccaatcaacaacttgcaagcaagagcgatgatggagcttgttgtttcatgtctggaggaagacagagggaaaagacctaccatggaaagtgtggtggagttgcttgtttcagttgatgaaaaccggttgaacaatttaggagtcttctatctggaccggtcagaccgggtagtggttgccggtcagaccggcgtgtatcgcgcggcggcatctgctgatctagacggttcgaccgaagtttctacctcggtcagaccaaaggcatctgggcagtcagaccggcgtaacatcttcggtcagaccgtgatccgtcgaatttga

SEQ ID NO: 92258 - DNA, 458 bp, Oryza sativa
  unsure (1)..(458): unsure at all n locations
  Clone ID: PAT_MRT4530_90758C.1
aacgtgtgcaacgcggtttattagcaataaagaacgtgagcgtacgtgcaagcacggttgcacaacaaagaagcgtctacaaaaactcttttagcgcagtggtgggtcttgtgtagatgagttggcggtggctgtgagcgatggacttgatgagtcccttttcagacagctctctgatggctcttctggccaaggaaccattgacacgaagtctttcagagacaatagaaggagtgataactttagcagagggaatttccttcaacaatttgtcgtaggtggccttgtcgaagataaccatgttttggaccttctctcttgtctttcccttagaccacttcttcttctttcccttaccaccaccgctgcttcctttcgactgttgtttggcagcctggatttgcttgctctttcctccagcttctttcttaggtggcatttngtacgctagcttgcac

SEQ ID NO: 92259 - DNA, 162 bp, Oryza sativa
  Clone ID: PAT_MRT4530_90759C.1
atgaggataactgcccgtatcgcccttctccacgtccaactcgggatagaaactaaaggaaacacgaaacatgccttcccgagcaaggaaacccgagatccgacgaaaacagactcggactcggaccctgccagtctgaccgcccaaatacctgcggtctga

SEQ ID NO: 92260 - DNA, 561 bp, Oryza sativa
  Clone ID: PAT_MRT4530_9075C.1
atgaagcttgtgcgatcgttctctcctctcatcgtcttctccttgctcctcctgctcacctcctccacgacgtccagagcctccctcgtggacgacgcctgcacgtcgttcgcggctagccacgcggacatcggctacgcctactgcgtcaggttcttccagtccgacgagggcagcgccaccgcggacaggtacggcctcgccgccatcgccgtgaagatcagcgcggcgacggccaggggcaccgccaagcgcatcgcggacctgcaggacctggagcgcgacaagaggaggaaagattgcctgagcgcgtgcggggaggtgtacgactccgccgtggacagcctcgacgaggcggccaagggcatcgcgtcgcgcagcgccgacggcctgcgggacgcggtgaccgtgctcagcgccgcgctggacacccccgacacgtgcgaggacgggttccgcgagctcggcctggcctcgccgctggtcgccgaggacgaggagttcagcaaagagtcggccatcgctctcggtgtcacatcggccttatcgccgccgagctag

SEQ ID NO: 92261 - DNA, 375 bp, Oryza sativa
  Clone ID: PAT_MRT4530_90760C.1
atgcgacggatgcgccggtcgagcgacgcacaaaaacgggcggacctgaaacggcggggccccgagccgaggcggcaaatggaagcccacccggcgaccgggacggcgacaaccacccgcgccgcaaaagggtggacagcagcaccgaagcagcgaaaagaaagggctccccagggaaacagcggatacaaggggatggttaaagtgagcggagaggacggccattggggaggcaccgggcccgcaacccacaaaagaaaatgggtggagtggaggggccgaccaaagtacggcaatatacgcccgcgtagcctctggagatacgggaccgcaaggccccagttggggcccgtgcaggcccaagccggactttag

SEQ ID NO: 92262 - DNA, 183 bp, Oryza sativa
  Clone ID: PAT_MRT4530_90761C.1
cacgaggggttctctaccaacaggaacacatgtgtacgcgccacagtggcccgcgtccagcgccgctctcctcggccaccaactccccagtcgtctcccgccccaacgaccgagagctgcctctacggcggcagcggcggcgccggcgacgatcagctcagctcaccaaccccggaagcttcc

SEQ ID NO: 92263 - DNA, 1092 bp, Oryza sativa
  Clone ID: PAT_MRT4530_90762C.1
atgcctggagcagctaccgccgctgttgttgacagccgccggtgcacacggcatgccgaaggccctgccacggtcctcgctattggcactgcaaacccggcaaacatatgtcctcaggatgagtttaccgactattacttcggcctgaccaagagcgagcaccttattgagcttaaggacaagatgaagataatatctcgtgtagacattgcctctatcgaggtccctaagctcgctgagtccgctgcacggaaggccattaccgagtggggccgtccggccactgacatcacctacctcatcttcagcacctactctggctggcgcgcccccagcgccgaccttcagctagcgacgctcctcggcctccgccctaccgtctcccgcaccatcctcagcctccacggctgctccggcggcagtcgggcactccagctcgccaaggagatcgccgagaacaaccatggcgcgcgagtcctcgtagccctctctgagctgacactggtatgcttctcaacccctgacgaaagcaaaattgtaggccatggactgttcagagatggcgctggtgcgatcatcgttggcgctaaccccttggccgatggcgagcgcccgctgtttgagatggtggccgcttcacagaccatgattccaggaaccgagcacgcactgggcttgcaggccaccgacaaaggcatagatttccatctctctatccaagtgctgacagtgataaaggacaacatccatcagtgcttgctcgatgcgttccagtcagtcggaaacaaggatcctaactggaatgacctcttctgggcggtgcaccctggtggccgtgcgatccttgacaatatagagggcaagctccagctagagccagggaagcttgcggcgagccgccacgtgctgagcgagtacgggaatatgagtggtgcgatgatcgcgttcgttcttgatgagctgcgccgccgtcgggagaaggaagaaggcgtgcaacaacagcctgagtggggagtgatgctggcctttggacccggaatcacagtagaggcaatggtgctacgtaacccattctcaactggtataaactaa

SEQ ID NO: 92264 - DNA, 396 bp, Oryza sativa
  Clone ID: PAT_MRT4530_90763C.1
atggagagcagtaccgctcagttgatctatggcagcgtggatcactggcgattgcatgatggaggagtggctgtggtggagcggtggacgagcaacatcaaggtggaggagcagcgggatatgcccctgggatctatggcgatagcgtggtggatgatagatggcagttgcctggacaagcagtgtcggggcgagtggtgcctcctagtctatctgtttacacatgcacaacacatgatgggcatcgacaacgagctagaagatcaaagtgacgatgggttacgtgaagacgacgactgtttatgtcatgctgattttggagtgcactgtctccaaacatttgctccaacttccaaggaatgtgcgacccaaccagtcaactttctccatgcttaa

SEQ ID NO: 92265 - DNA, 442 bp, Oryza sativa
  Clone ID: PAT_MRT4530_90764C.1
cggacgcgtgcgctccagaagcgaaacggagagcatgactcgggactgaccgtacatgtgatagtaattgcccatccgtagcacaccgtttcggtgtatccactaacattgggcacgaactgactattgaaagtgtggtcacatggcatgctgacaacaacctggtcatgtaaagggcacatactggctccggaggggtgtgggcttcgcatatcgacagtataatcatggctgttttggaatcaccaagagagattgagctgaagcctcagtgagagggtgggggatacatcttagatgggggcagtgtgcgtgaatcactgcaaatgtctggagacggatgtgtgcactggacttgcagcctacatcgtaatgctgaggatctttgcaccagcatgactctgctatgtattacgagatggcacatgcatccgggaaaatg

SEQ ID NO: 92266 - DNA, 2121 bp, Oryza sativa
  Clone ID: PAT_MRT4530_90765C.1
gggagatcatcgccgacgacaaccagagcagaggagaggggaggggaacccaagcaagcaatcagcgtggaatcggatcgggtacgaggaggaggaggaggagggggatggatttcgagctgcgcaaggcgcgggagaagctggagcgggagcagcgggagcgcgtgcagcgcgccaaggacaaggccgaccgcgagcgccgcgccaaggccgaggccgcgcgccgccgcgacgcgctcgaggcgtcccaccgcgagcgccgcctcgacgccgcccgcgcgcaggaagaggctcagcagaagatggaagaggtgatgcaacttggaaaggggatttctttcttgcacatgtttgaagctcttcgatatgatggtcctggggataagatcaagttgccaccatcgtcttttaaggaattgtctgatgaaggagcactggacaaaggtcccatgtacttcaggttgtcaaaggttagagacagtgttccgggtgcccctcaggataatgatgccgatgaggcaacatgttgtggtgttcttgagttcactgcaagggaaggctccgcagaactcactccacatgtgtggaacaatctgttccggggtgatagcccagatgttcctctgattgaggttaggtatgtcagtttacccaaagggacatatgcgaagctgaagccagaaggagtggggttctcagaccttcctaaccatagggctgtccttgaaacggcactccgcaatcatgcaacactatctgaaaatgattttgttgtggtgaattatgggcagctgcaatacaagttgaaggttcttgaattaaaacctgcatcaagtgtttctgtcctggagacagatgtggaagttgacattgaaggaccagattcagttttggacaacgtagagaatcaacatgtgcttgtgccacttgagactggaaaggttgaatctggagttgtggaagaaggaaagtttaggtactacaaatttcttgttgatgaaggtatgggtgagaaagtagcttctaggcatgcaaatattgaggttaagatagagacatatacaagtggtggtgacactgatatttatgtatcaaggcatcctttagttttcccaactcagcaccgtcacgaatggtcttctcatgaaatgggatctaaggtcctcatactgaaaccaagggatgccagtctctccagtggtacctacagtattggagtttatggtttcaagggaaccactaaataccaactttctgtagctattaaagatgttcttaatggccaaaggattggtgagcaggctagtgcctcatctagtgttgatgttgattcagtggtgtgcaagaactgcaaacgctatatatccaaccgaacttcactacttcatgaagcatactgtgtgagacacaatgttgtttgcatgcatgatgggtgtggtgttgttcttcgaaaggaggaagcaacagatcacgtgcattgcaacaagtgtgggcaagctttccagcagagagaaatggagaagcacatgaaagttttccatgagccactacaatgcccttgtggggtggtccttgaaaaggaagatatggttcaacaccaatcctcaacctgccctttgcgcttgattgtgtgccgattttgtggtgacactgttcaagctggtggagaaccacttgatgctcgggatcggcttcgcaacatgtgtgagcacgagagtatctgtggatccaggactgcaccatgtgattcttgtggacggtcagtcatgctgaaggacatggacattcatgtgattgctgtgcatcagaagagctaactattgtaaagcattggctctgagaaagatggcctgtcctttatcctgctgggctttaaccaccaaggccatgaagtttcagcactgctggaccaaatgttatttccttttgtgttacatatatcttgtgtcattggttaaattgtaacactgcgtatgggagcatggaacactggggcggtgtatgggagtatggaacacagtggcggtgtctccttatgtatacacaaaccatctataatatttgatttgagctttctcataaaaaaaaaaaaaaatacaaactttcaaaaaaaaaaaaaaa

SEQ ID NO: 92267 - DNA, 571 bp, Oryza sativa
  Clone ID: PAT_MRT4530_90766C.1
gcctctgatggcgtggcgacacgacgacggcggtgacacgggagccccgacgaagcgcgtatccggtgaagagggatttgaggtccgacttgacgtcgggtggacatggccatggcgtccgcgagccgatgagctgcaggatgcatccccttgggatgtcggcgaaacactcatggccgagcttgttttgttcatgtggatgtgtatgttcatagatcggcagacatcagtgtcctgtatgcagaatcatagacggcagcaacgaggcaatgatggtgccggtgggtgacgagatcgggctcgatgccatcatcctttatccgcgcggagtcggcaaggacgggaaggagctgcgcgatctctgacagcgtcggagagcgcgagcagcgtggcggcggctgggcagaggggcctgcccgcccgatgagggatgacaaatatctggttttgttgttggaggacaattttgtaatccgatgacaagatgagggaccttcgatgtactttttccaaaacaaaatagccgtccggcccataaagcctgcaaaatgtagaacatataatggccatg

SEQ ID NO: 92268 - DNA, 570 bp, Oryza sativa
  Clone ID: PAT_MRT4530_90767C.1
atggcggatggtgttgcccagctgagccacgacgtcgcgtgcgtatccggtgaagagggatttgaggtccgacttgacgtcgggtggacatggccatgacgtccgcaaagccgatgagctgcaggatgcatccccttgggatgtcggcgaaacactcatggccgagcttgttttgttcatgtggatgtgtatgttcatagatcagcagacatcagtgtcctgcatgcagaatcagacacggcagcgacgaggcggtgatggtgccggtgggtgacgagatcgggctcgatgccatcatcctttatccggcggagtcggcaaggacgggaaggagctgcgcgatctccgacatcgagagagtaagagagggggagaggagaggggaagaagaggctgacgtgtggggcccacgctgagtcagttgccacatcagataaaaccggagtcaaaaccgtccgaggatctaaagtgacccggttttatgagatgagggatgacaaatatctggttttgtggttggaggacgattttgtaatccgataacaagatgagggaccttcgatgtacttt

SEQ ID NO: 92269 - DNA, 570 bp, Oryza sativa
  Clone ID: PAT_MRT4530_90768C.1
atggtgcctcgtctatctagatttgcagtagtagctaggaactttctggccgtcggcaccaagcatgatggaagacaacttgtatttaaagaagtctatcatgaggaatgtgcaaagcaaattaatggcaagtatcacacaaacttcacaagtcgacaagtttatcacaagttgaaggctcagtggaaggtgattatggaggcaaagaatttgagcggggccaactttgatgatgccaaagataaaagggctaaattcattaacgtccccatacgttggtatgatgaaatggagtttatttttcaagacaagcatgcaacaggggaatttaatattgtcttccagatcaagagaataatactggaagtagctcatcttctaggcgtgcaaaaggtagaaaatctgataaagataattgatgagatgacggaataccctgtcatggttcgacttgagctgcaaacttatctcgcgacccatgagaatatagctgccatgttgaaggtcaagcaaaggagaggcttcaggaagcttcccccatctccccgtcactcccgtccttgccgctag

SEQ ID NO: 92270 - DNA, 544 bp, Oryza sativa
  Clone ID: PAT_MRT4530_90769C.1
gagagagagactagtctcgagtttttttttttttttttttttttttttttttttttttaactaaacagagaccaatggcttctcattatcattaaaccatcatacaaccattttgccacagtgcttcttatcaaacaccaacatagagcagctgattaacatttagcacatgctcaccacaattaaatcataaaaacacaacaccacactacaaagggtataaacccatgcaaatttaaaatttaaccataaaaaaaagaagaacaccatccatatgctgcatcatgaccatgtaaccaatgcaatccatcttttcttgatcatatctcgtccatgagctcttggaaggcgtccatggcggacaccgggaggccgaggaggacgttgatgctcttcctctcctcgccgtgcgcgaggaagaggatgacctccttctccggcagcgtgacggggccggacatcgccggcgcgccccagccgaagtcggcgccgtggaaagcgagcctggaccacgtcgggatcagcagcgtcgacgccagcgacg

SEQ ID NO: 92271 - DNA, 254 bp, Oryza sativa
  Clone ID: PAT_MRT4530_9076C.1
agcccatatcttgatttcatatggtgattaacaaaaacggggcatgcccacctatggcttggcctcgatcttttacacagtacaaagagtaaccatttaatggagaaatatttaataccatgccacaagcccacctgattaaaaggtgtaaacgtagattgtaaagcctggttcttcctaattagtcaacttactcactttaattgcttttctctctctttcttattttgcattgttgtacacttttttttgca

SEQ ID NO: 92272 - DNA, 753 bp, Oryza sativa
  Clone ID: PAT_MRT4530_90770C.1
atggcgcctcgtctatctagatttgcagtagtagctaggaactttctggccgtcggcaccaagcatgatggaagacaacttgtatttaaagaagtccatcatgaggaatgtgcaaagcaaattaatggcaagtatcacacaaacttcacaagtcgacaagtttatcacaagttgaaggctcagtggaaggccaaagataaaagggctaaattcattaacgtccccatacgttggtatgatgaaatggagtttatttttcaagacaagcatgcaacaggggaatttaatgttctgcaaacaccatatgaccatccaatgactgaagatgatgattttattggtgataaaaatggcagtcctggtgatgttgacccttcatcaaattatgactcagattgtcttccagatcaagagaacaatactggaagtagctcatcttctaggcgtgcaaaaggtagaaaatctgataaaggtaaaagagttagaactgatgataatgtggtttatgagataacaggggctacagataatatgtctgaaaccatgtgtttcacacatataacacatccaaatgaatccctattcaagataattgatgagatgacggaataccctgtcatggttcgacttgagctgcagacttatctcgcgacccatgagaatatagctgccatgttgaagggtaggccactggattctattaaggaatatgtgacccaatggataatacaaaactatccagctgctatgtaa

SEQ ID NO: 92273 - DNA, 698 bp, Oryza sativa
  Clone ID: PAT_MRT4530_90771C.1
gcttatagatccggtcaatttgcaatcatcctcctccccttgctgaactctcaggcatcctcatcatctgcagtaatcccgtgcccttatataaatgtagtagagcctccagtctccacgtagtaaatcggagagcaaggccaactcgatttgaggagagcttgttcttgcagaagattgctgctggacacaagattgctcgtgtgggcgtgacacgatactacaaggagaggatactggctgatggaagacaacttgtatttcaagaagtctatcatgaggaatgtgcaaagcaaattaatggcaagtatcacacaaacttcacaagtcgacaagtttatcacatgtttcacaagttgaaggctcagtggaaggccaaagataaaatggctaaattcattaacgtccccatacgttggtatgatgaaatggagtttattttttaagacaagcatgcaacgggggaatttaatgttctgtaaacaccatatgaccattcaatgactgaagatgatgattttattggtgataaaaatggcagtcctggtgatgttgactcttcatgaaattatgactcagattatcttccagatcaagagaacaatactggaagtagctcatcttctaggcttgtaaaaggtagaaaaactgataaaggtaaaagagtcagagctgatgataatgtggtttatgagata

SEQ ID NO: 92274 - DNA, 2449 bp, Oryza sativa
  Clone ID: PAT_MRT4530_90772C.1
atggggagggaagacgacgccggcgatcaccagcgaccggagccacaggcgaaggaagagaactcgtcgacgtcggcatctccttcccacgatccaaagatcacgcaggaggagaagagatgggaggatgaagatgatgagtacgaggaagaggaagaggaattgctgtatgatgtcgacgacggcgaggacgcaccggccgaagcctgcgttctcaccggcgtgaagcacagcgacggatccatctacaagccgaaacccccctactcgctcctcggcctctaccacctcgacgacgccagcgagacccgcttggagcccatgaggctgacggctcccaccgatcgctgccggccatgcttgctcgattgcacggtccactacggctgcgccatgattcagatcttctccgtcaggatagctgctctgtccgccaccgccgccaccgctccggttcagatctacggattcatggctgcccgggacctctacgaacccctgcgcaactatgtcttccgctgcagccgggacgaccccttcgtcttgccggggcactactccgatcccgattcgctcataagtttgtcgggtcccaagcgaggcgtctcgctgcagaaccccgccatgatcgagtacgacctcaagatcaagagaggggaggaggaacaagacgacctgcagctcatcgacggggtggccgtcttcagcgacctcacaccgttccacggggtgtacacccagcggatccatggcgtccatggcgccgtggacatcagcttggcgctcctccgcgaagggatggaatgcaccattgaaatcagggtccccgagatggatggcagtgcactaattaatagaagaattgcattcttcagtgcattcttagtggcatactggacatggatcatatataagcgcaagaatagtgaccctattagatactcgttgttagagaaaaatagagagaggatagtctatttacaaaaactctattgtggtgaggagagacattgtatctgtgaactacgtatgggtaaaaccgtgttctttaaactatgtcataagctgcgtagtatgggagcattgagagatacttggcactgtactgtagaggaacagattgccatgtttctcactacggtaggacatcacaaaaaaaatggtgatattggcttccacttcacaaggtctggtgaaactgtgagttggtacttcaataaagtattatatgcaatcgggcatcttggaacagaaatgcttaggcatcgcacgcatgatacgccatcaaagattttgggcaaccaaaggtttgatccttattttaaggactgcattggtgccattgatgggacccatgttccatgcaatgttccatctcgaatatcggatagattccggggtagaaagccatttcctacacaaaatgttcttgctgttgttgactttgatttgatgtttacatatattaatgctggttgggagggttcagcacatgattcaacagtactgagacactctcttgagcatcctaatggcctacgagtccctgaagggaagtactatcttgcggatgctggcaatatggcagggaacaatgtggtttggcagccccaggttgttgaggaaatgttgcgatactacaaggagaagatactggctgatggaagacaacttgtatttaaagaagtccatcatgaggaatgtgcaaagcaaattaatggcaagtatcacacaaacttcacaagtcgacaagtttatcacaagtattcacaagttgaaggctcagtggaaggtgattatggaggcaaagaatttgagcggggccaattttgatgacgttgagaaaaaaatcctatatgatgagactgaagttgttcgaatgactaatgccaaagataaaagggctaaattcattaacgtccccatacgttggtatgatgaaatggagtttatttttcaagacaagcatgcaacaggggaatttaatgttatgcaaacaccatatgaccgtccaatggaagatgatgattttattggtgataaaaatggcagtcctggtgatgttgacccttcatcaaattatggctcagattgtcttccagatcaagagaacaatactggaagtagctcatcttctaggcgtgcaaaaggtagaaaaactgataaaggtaaaagagttagagctgatgataatgtggtttatgagataacaggggctatggataatatgtctgaaaccatgcgtttcacacatatgacacatccaaatgaatccctattcaagataattgatgagatgacggaataccctgtcatggttcgacttgagctacagacttacctcgcgacccatgagaatatagctgccatgttgaagagtagaccactggattctattaagaaatatgtggcacaatggataatacaaaactatccagctgctatgtaa

SEQ ID NO: 92275 - DNA, 382 bp, Oryza sativa
  unsure (1)..(382): unsure at all n locations
  Clone ID: PAT_MRT4530_90773C.1
ggggggggggggggttttttttttttttttttgggtgttttttttatagagaggaacatgggggttcatcatttattgaccacacatatgcttccaaacaaaaggaaaacactaattattttaggaaccacaccacatacatgcacagggggggggggggggctattttgtanccagatctcgccagccagtagcagacaccacctccgccgggggggatgtccacggtgcagaacgccgggagggtcgccgccgggcgctccaaggcccctctccgggagccggggaacaccggggacatggggggcccgacatggggggcgccgagctccctggagatgcctcccagcatggggggtggatcgcctgggacctggaacca

SEQ ID NO: 92276 - DNA, 330 bp, Oryza sativa
  Clone ID: PAT_MRT4530_90774C.1
aaggggtattttgtttttggtgggggttaatattaagatggttttaaatttttaagcgggcgggaaaacattgcaccatccatacaacaaaaggggaaccaccgccgggagatttaaggcaaaaacatttttttttccgggcgggggaccatggcaccattcaacaaacaaacaggggaacaccgcccggagattggaaaacccccaaacgcccgaggcggacctttatcaaataccccccccggaccaaaaccgaaggagttaaagcccagggaccgccccgcgggcacccccaaaaaaaaccaaaatacaaaaaaagagggggggacc

SEQ ID NO: 92277 - DNA, 216 bp, Oryza sativa
  Clone ID: PAT_MRT4530_90775C.1
gtgtatgattggatgacagagcgcagagatagattttcactctcatctagtgatatggcaatccagttggatctgattgcaaaagtacgtggtgtttcacatgctgaagaatacttcgaggagcttcctgatccattgaaagacaagcggacatatgaggctgagaaagtgtccatacttattgatgagatgatggaaagaaacgttgcttttgat

SEQ ID NO: 92278 - DNA, 525 bp, Oryza sativa
  Clone ID: PAT_MRT4530_90776C.1
atggcgcggaacgtgccggcgctgccccctacagcggtggtgacgggggagatcaccggcgtcgacatcattgggggcaggcccgggtcttggctagcgctcgcgcaatctgtggcggcgcgtgggtcgtggcctaagtcggcgtcgtctgactcccaggaagtgatagaggcgggggtggagcacccaagcaagagttctcatcggcgacgaagctcggcatctctctcgtcggtgaagccaaggggagggggatttggatccgacgacaacagagacaaggaggtgcaagggcggaggggcggcgagctcgatggcgggaagaagcaagggcatggatccggtgctgctcgtcactccgcccttgttcgtcttatactctctagtgttgcccgttgctccggcgcaaagagggacctaacaggggatggtcggcggggaggcacaagggcacaatggggagacgcatttggctgtgcccctgcagttgtcggcaagagggatgctgagctccgccgggtgtag

SEQ ID NO: 92279 - DNA, 227 bp, Oryza sativa
  Clone ID: PAT_MRT4530_90777C.1
attatacacagcaggcttactagttcagcaccctcgtgacagaatcatccaaatccatactttccacaagctactttattatactcccgaatgataacaaaagaactccgaatcgaatccacctgatcttgcaggacccccaagcccacctgccgataacgaagactctcgctaatacccactacgacacccactgctaggccgaatttgatcactaggacccgcga

SEQ ID NO: 92280 - DNA, 732 bp, Oryza sativa
  Clone ID: PAT_MRT4530_90778C.1
cccacgcgtccgcattttcaaaaaaaccttgttctttaatgggtctatctgtaaatgcagagagcacataccttattcaaataatcaagatagatcagattattttccttttgataaaatttatcgagttaaattcaagccagatagacccacgggaagtttatatatgatgtgtgtagtatgcatgaaacttaggatgtaggttttcttagtaaagttacatcctacaaaataatgttcggatacactacactttccacattcgcatacaattactaattaaaaaaagatgttatcaccacaacagcccactgtattgtttgcaaacaaacacttcatagccacaattactacaggtggaaaaaaaaaactacctcatcttttaacccccaccttcttgcacatactctgcatccactacttatcaaaactacaacttttagatttgttaactatgtctataaaatactatatccgtctaggaatgcgccttggattctatgtattatcaatgcaatatttaaaacttataattacatttttacaactattcatatacgagttctatacactcagtgctaggtcctaacagaatgctgaggccctcaagttcaaaagattatcacagagccggcaacaactcattgattggtcagtaaaaataaaggtaaataaagaagcgtattcagtattggaaaacgtgcaaacaaatacttattatacatatttctc

SEQ ID NO: 92281 - DNA, 291 bp, Oryza sativa
  unsure (1)..(291): unsure at all n locations
  Clone ID: PAT_MRT4530_90779C.1
taacacgaaggccaactcgaggctgctgctggaggagagagagaggatctggctagtgcgggcgacacaagcgagggcggccgctgttctggaacaggaggaggggctgccgctggcacgcgcttatctgtcgggctgatgcgagcattagggggatcgtgcggatgcacgagctcccagagatcgatgagcaggagagcagaggctgagacgattgaacctttnactattagaccaactgcttcacgaaaattcaatcaactgagaacaataatgatgatatgaccaact

SEQ ID NO: 92282 - DNA, 251 bp, Oryza sativa
  Clone ID: PAT_MRT4530_9077C.1
gtataggagaggagatcagggggaggatgggtttccttctcaccagatcttgtctggtcttatttagtgctgcagctggatatccgttattctcgctgatcgatgtggagtgctacgtcatctcactgtgctcatctctcaaggactgcatcatctgcgttctactgtccgtttatgacctcaaggaccttcacatggtcaggatctattactatatacgagtctctgcataccttaatatcactaagctc

SEQ ID NO: 92283 - DNA, 618 bp, Oryza sativa
  Clone ID: PAT_MRT4530_90780C.1
ctgcaggaaccaccctaccaaaagccaaaataccacgaagtgaagtgcccattcattcaccggtctgtcgtcggcattacgggactggcgctgatctgctccttattatacttacgaacacgacggacgatgctggtccggcagcagaagcatacaattgttgcgctgaagatttcccttccagaaccaaatgcgggcaagcagcctgcagcatacgcagcagcatgaggcacaatcatgatactattgaaaatttccaaactcaatgaattagggcgaggaaataaaaattagtccacgtctaacggcacgtctcaatgtgctctggctggcaggcgacgtacttgtgcggagggaggactgaggaaagggattgattctgtaatccgttggtaagtcttgccgaaattttgtcttcctcaactatagctagagtttgatttcggaaatgctcttcgccgctcgcccgatgcgggagagccggatcaggcgctccccccgcgccccttcccccacgtgcctatttgggcccacccacttctgctcccctttttttctacaaaagatgtttcacctagtgtatttacaatgtttcactatttatagatctaatgttgc

SEQ ID NO: 92284 - DNA, 620 bp, Oryza sativa
  unsure (1)..(620): unsure at all n locations
  Clone ID: PAT_MRT4530_90781C.1
ctgtcatccactcccccacaccccacgacgcgccaccccccgcccccccgcgccgcgccatgcctcccactcccacccccaccgccaccaccggcgccgtctcggccgctgcggcggcgggggagaacgcggggttccgcctcgtcgggcaccgccgcttcgtccgcgccaacccgcggagcgaccggttccaggcgctcgcgttccaccacgtcgagctctggtgcgccgacgccgcgtccgccgcgggccggttcgccttcgccctgggcgcgccgctcgccgccaggtccgacctctccacggggaactccgcgcacgcctccctcctcctccgctccgcctccgtcgcgttcctcttcaccgccccctacggcggcgaccacggcgtcggcgcggacgcggccaccaccgcctccatcccttccttctccccaggcgccgcgcggaggttcgccgcggaccacggcctcgcggtgcacgccgtggcgctgcgcgtcgccgacgcggccgacgccttccgcgccagcgtcgtggccgagtatgtgttccacaagcctataaggngttggaacaaagtgacagaatgttgccgaccaaagagggcgcatctgggctaa

SEQ ID NO: 92285 - DNA, 224 bp, Oryza sativa
  Clone ID: PAT_MRT4530_90782C.1
tttgtataatcgactccactcctgcggttgcaggggttactacacttgctgttgcgttcagagcccgtcccgtgtctctactcgttcctccgtgctgccgtttattacgtcctcggcgacaagcgagcgacgcatgccaccgcgcgcggttcgtatttcgagagggaggttcgacgctgaccagctcgtcatggtatttgaacggacactcatccgcacggcca

SEQ ID NO: 92286 - DNA, 708 bp, Oryza sativa
  Clone ID: PAT_MRT4530_90783C.1
cccacgcgtccgcccacgcgtgcgcgcaggccgcgtctcccctttccctcccttctccccacggcagccccactacctctcccacggcggcaccactgcctcttcccaccggcgacgctgctccttctcccctctccccaccagcatcaccgttccccctccctcttcccccactggcgctgtcccttcccccaccagtgggcggtggcccctttcctcctcgtcggggtgcatccaccgctccgctcgttgccatatccggcaggtcggcggcatggtggctcaggatctggctcctctctctccctctcaacatctccctagcgcagcgatgggtcgacgacttcccggcacggcggtgacgcggtggatcccggtgcagtgacaggtcggcagcgacctctcgctcgcccttcccactcctgtgtgatttatttgtgatctgatttgattatctcctgtcatgtgatctattttggatgattttgtgatgattcctatttggattgggattttgtttatgggttggatggtaatgatttgggatttggagaggggctgcgcgtgatgcggtgatggaccaagccagatgaaaatctctaccggaagccttacggttttattaattcggtataggtatatatgagttagattagattcgattagagatagagaacatataaacaatgaaatcagatagaaatcgga

SEQ ID NO: 92287 - DNA, 1187 bp, Oryza sativa
  Clone ID: PAT_MRT4530_90784C.1
ccctcgcggccgctcccctctccacgccacagatctctcccctctccatctcccacttacccgcagccatggcggaggacgcccccagcgccgccgccgccgaggggagccagcacgcgtcggccgcggagggaggctccgccgccgccgcagcttccgcggcaccagccgccaaggccgcggaggcgctgctcccgtcgctcagcatctggcccccgtcgcagcgcacgcgggacgccgtggtgcgccgcctcgtgcagacgctggtcgcgcccagcatcctctcccagcgctacggggccgtcccggaggccgaggccgggcgcgccgccgccgcggtcgaggccgaggcctacgccgccgtcaccgagtcgtcgtccgccgccgccgccccggcctccgtcgaggacgggatcgaggtgctgcaggcgtactccaaggaggtcagccgccgcctcctcgagctcgccaagtcccgcgccgctccgtctccggcagcggcggcgcccgcggagggggccgcgtccgagtcggaggctgctgctgctcctgctccagcggaggattgttatgttgtgttgaatggcattccggtcatttctgccatgtttttccacaagtgtgagctcatgataaaacaagacaattgcatatttgcattagctattccacttactgcagtggttacctccgtgacggtgacggcgcgggttgaagttgaactcagcggcgggtgggatgagattgggctgggcttatctgggttcggagttctgttctcgtttcttgggatcatcatgctgtttgacaaggggttccttgcaataggaaacattctgtttgtgtctggtgtttcactgaccattggaccgaagtcaaccgtgcagttcttcaccaagcctaagaatcacaagggctcgattgcttttggaattggcttcttcctggtccttattggttggccgttctttggcatgctggcagaggcatacggcttcgtcaagctcttcagaggcttctggccaactgctgctgtttacctgcaaaagagccccaccttcggttggatattccaccaccctcttgtgacttcggttcaggggaagacgagtcccggtgtgatcgtcgctttgctgctggagctggatcactccaagggatgccgggtcacctccaaagaaacttag

SEQ ID NO: 92288 - DNA, 972 bp, Oryza sativa
  Clone ID: PAT_MRT4530_90785C.1
atggacggcgacttgaagaagctaagggttcgatttcctggattaggaaagggaaacaaaggtggcagacaggctccaacaatactgcaagaagaagacacatctcttcaaagagcaccgatgaatagcagcgatggatatgatgctgcatttgcggccacaattgctgcagcagcatatgcaattgcttcgcaagaagagaagctagcagctcagaagaagcctgtccccattcaggggcaatctactactcctcctgtccagtctccagtaaagagaggtgaaagcatgaaaaaacccacaggaggcagcaagatctcaagatggtttagtggcaaagagcctgctgaagacaatgacgatggaccagccaatgtatctgtaaggaggccacttaaaccagcacaaagaaagcaagaggacatagcttcagatcagaaggtgccacccaagatggttgattcttctctgagcgcgaagaaaggttcgggttcctctagcaaattgcaagacaagaaagggagcaagaagtttgagcaagagcaggtgattcagaagaccccatccaccacaaggccagcaacatcgtatcattctagacggaatggagatggtactgttggattaactgctgttggcccagcagacaccaaaactaatgaatgggagaaggcgaagctcgctagcattacggaagagtataagaacatgatggataccatagctgaatgggagaatgagaagaaggtgaaggctaagcgccaaaaagagcaaaaagagaaagtgttggaccaaaagagagcaaaggcactagaagaatacagccaggaaataacaaggatcaacaaaattgctggaggagcaaggacaatggcagaggaaaggaaatataacgatgagaaaaagatcaaagaaaaggcaaataaaagacggttatcggaaaaggctccccgcgcatgcgcttgcttttaa

SEQ ID NO: 92289 - DNA, 496 bp, Oryza sativa
  unsure (1)..(496): unsure at all n locations
  Clone ID: PAT_MRT4530_90786C.1
tcctcaactttcttaagctttctccctttttttatcggataaatgaagaaagttaaaaataaaataaaggggttatttgataggactagatatagcctgcaaagaagcaaagcagctacagtaacaaacgtagcatcaccacgacagtcactgcagtcagtcaaccgaacaacccccaagtctctgtggaacggaggtttcaatgaaatccctgagcttattgtactttcctgtagtgttcacttgctgaccatgacaaacttgttcaattatagttagatatgtatcagaaatacggtgaaagaaacagcgggagaagacgatcatattcnaaataggaattaatctactgcttcatatttcatgataatgctcaattgtacacctaggcggcttgttaagtggtgattaagggcaactattgtgtaactttgtagcttctacatcagtagaatggttactgcttgttgggccagaaaaaaaaaaaaaaaaaaaa

SEQ ID NO: 92290 - DNA, 390 bp, Oryza sativa
  Clone ID: PAT_MRT4530_90787C.1
atggctggaggcaagaagaagaagaagacgactgcagggaggaaggtgaggatgacacaggaggagatcgacagctacatcaattatcagacaatcaggatgccagatgaaatattcccaatagtaagcaaggagaggttagcatgcacggacttgtctgatcacaaaggcgacctccctgtacccatggaccagatcgacgattacgtcgccaagatttttagggagataaaccagattgacgatcagttcatgaagcatagagacgggatcctgaatcagtactaccgcaaaggttacgcgatgcgaaaggccaccgatgacgatgatgatgagcaagaagaagaaaaaaaagaagaaacatcgtggacgcggtttttctgcacctag

SEQ ID NO: 92291 - DNA, 439 bp, Oryza sativa
  Clone ID: PAT_MRT4530_90788C.1
accgccgcagccgtcagtcgcctgctcctcgatcgagtatggatcccaacgggccggtggtcggtgtcccgacgccgagcaggcgcacccagggccaacctcacaggacgccccccccccccgccccccccacaccccgctctcccagcagcggaggcaggcgccaaactcgagatactcggccgggccagccgagcgccgagccctccccaacccacccccccccacgccccatggcaaggaggacagccacccccgcaagaaacacgcgaccgagccatttctcaccagcacaccgcggaccgccccaatcccctgggatgagaaccaaagagccaagagcagcgcccgagagcacccgggtgacaaggccggtcccgtccgcccagcgccggcacgcaaccaatgggcgcgcccatgcacagcacccgggggctaa

SEQ ID NO: 92292 - DNA, 1534 bp, Oryza sativa
  Clone ID: PAT_MRT4530_90789C.1
aaacactaaaagctcacacattcacacatgcaagcagtgttcctcggccaatttttgcacaggctgggagtaattcctgacgatatgatgttagtgtttgatgtacacgctggaggagggtgaaagaagaagcgcttcgaaatcaaatatctccaggagacggcggtcaattgcaccgaactgtaagttcaatggactctggtggtcaattgcaatgagatgaagtggtaaagaatttgctgatacatgattagcatgtcttctcagagatactgatcatgtatccttgcccggttctcttcccaccatagcctggcgtgcatctcgctgaatttctcccggctgaatcggacccgtcggagctctctaataccaccaggcaaggcccgaatggtgatgtatacaccaggttcatcctcttctacccattccctctcttggtcacttgcattgctaacagagactgaaagttcacgagatcgatccacctcttcaggagatgagcttgacctcatcgatgcatccattgacgaagtttctgtctttgctccactaatgcttgataacttaggtgttgatgccagcccaactgaaccatagcactggtgtccagtgtagcagtgatggtgctgttggcgatgaccattaccaaggttgtgctgatgcccaagagaatctggttgtccatacccagttgttctgccaccagttagtgatctgtgcaaagtgtggggtagacgttcactgttgagtggtggtgttgctgggatatcctccttcaagctctcatcttcagactttggagtagtaggaaggggagtttgctggttgaacctctgaacattgtaaagctccatgactttctcataattttcggcccaccatctttgcgcttgccatttgttgaatatctcacggctgaatcggatccgtttgaggtcgttgccgccctccggcagcgagaggaaggtgatgagcacgccgggctccacctgggcgacccactccttcgcctcgtcgtcctcgctgccgtccgccgtcgtcccctcctcctcctcctcctcctcctcctcctcctcgtccccggcgaggaagtcggtgcgcgcgctcaccgacggggtggcgtcgccaccgctgccggctcgcctgtacgcgtagtggaagcggtcggacccggagtccgcgtacgcgtggtacgggtggtgccgccgcgcccccgccgccggtgacgacgacgacgagccggcgcacggcttgcagtgccggtacgcgcccgacgccttcagcgccatgtccttgatctgggcggtgagcgccttgatggcctgcctcgtgctgggcgtggcgcactcgccggcgcctctggcaacggcggcgtcgtcggcgtcgtcggactgctcacgcagcggcggcgcgccgccggcgagctgcttggagcacgcgatgcacgtgagcattgccgcggccgccgctgcctactcaccggcccctcgatcctcaggcggagaggagatggaagctgcagtgttgccct

SEQ ID NO: 92293 - DNA, 336 bp, Oryza sativa
  unsure (1)..(336): unsure at all n locations
  Clone ID: PAT_MRT4530_9078C.1
ttgtacggccaaaaaatgtgtgcttgcttggctggttgccgtgtctgtctgtctctacatgaataaaaggcggcaacgttctgtcctcatggactaagcgtgtgcattgtctgtttcaattcattcgatggttgttgaacactaggggtgggaggggggaaatcgaaactcgcagctcggatcggctggtagcaagttcggcttggatcagcttggactcgtaatcttaatgagtcgagctgagctagccttttaactcatgagctgctcgtttaactcgttagtacaagatataaccaaaccttcgtnnaaaaaaaaaaaaaaaaaaaaaanaaa

SEQ ID NO: 92294 - DNA, 582 bp, Oryza sativa
  Clone ID: PAT_MRT4530_90790C.1
atggcttggtctcacatgttgttgccaggtggacaaggattttatggatcaatgtttcacgtcccaagattttgttacattttgagttaccattgtaatttagcaaagagacgtcagttaggcaaaatcgcaaatttagcaccggtacctatcgaacaaccacagttcgatagggtacctgccgacaggaaatcattttcgtcaagctgttgcactgatcatatgggatgccatcatcccggtattgacgatgaaaataatgaacatgtgatcgggattgaaaggcatcctgtgaatgggtacattttgacgctccgtcacggtgctcttgctgatgtgatattcgaccatatccagacgttggatcttgaaggccggctcctgatcgcaattcacagatacaatcatgggataattcgaggcacgatgtgcccatgctctcgtatcattgcccttggattcctgtacttctccctggattgcaagatttgtatgataaatttcttattattcaaaggacatgaacaaaatgaaagtcaaatatcattgttgtgtttccagggtaatcatttctggaaatga

SEQ ID NO: 92295 - DNA, 254 bp, Oryza sativa
  Clone ID: PAT_MRT4530_90791C.1
tctttccgttcccggcggaggcacggccggaaaacttccgccgcctcgcctcgctccggcgcacgtcgccggcgactgaggggccgggggcaaaccggtggtcggtcggcctgctcctctcctccccgcccgtgcgccttctcccctgctgtccgcgagcaggtgcgaatcgaatcgaatcgaagggggaatttaagattgattaagattgccttccactttctgagagcagatttaaggatgccatcagagag

SEQ ID NO: 92296 - DNA, 130 bp, Oryza sativa
  Clone ID: PAT_MRT4530_90792C.1
atggctggcacgggcatggacattttggcatacagcgcgtgcgttcccttcaacaaaagggttcctggcggcgacaagtcattgttgacacccttggcttctgttgacccccgaggtggtgtctcttccg

SEQ ID NO: 92297 - DNA, 354 bp, Oryza sativa
  Clone ID: PAT_MRT4530_90793C.1
gttccaagaaacaatgaaacggcccatggagtgaaatgtttttagactatggcctcaacctgacaaggaaaaggaatgtgatatagtacaaaggcttaatccctctggacgaaaaaccacaaacggggtgtgccctccacatctttaaaagagagggggagtgaaatacccagaaagtttgggatggaatttaaaaccgtgcttcattcaaaaacaatgtgaccgggcatgaaggtaaatatagtgacccgtccgacaatatgctgaaccttaggacccgcatgcggaacctaacgttttggggttcaacgggccctggccaaacacgacaatcttttttcttgacaacttgtt

SEQ ID NO: 92298 - DNA, 2481 bp, Oryza sativa
  Clone ID: PAT_MRT4530_90794C.1
atggcgaagatgattgaagcactcggctttggagtgctccttaaggtcctagcatgttcttgcgctactacttctggttcctacagtccgagcaggtgcctcctgtttctgttcttgcgctactacttatggttcctacggtcagaacagttattctctgtgcctcactgctcctgttcctgttcttgcgctatttctggttcttatctgttcttgcagtccctgcggtctgagcaggtgtctccggaactccgtccgcttgcatacatgactattctttttcttgttcttgttcttgcgctacttcggcttcacctgcgtgcacgggacggcggtggcgctactggaggaggtggctccgagaacaataacatcaacagaggcaatacaattgcctcatcatctactggagcgttctccagcagcctgttagcaattcttcgaagcccgttgtcagatttatatccccggagcggtcatcccactgcatctgccgatctgcaacgactgaagcgactgctgtcacgcatccaggccacacttgaagatgctgaggagcaagggctccaggacaactatgttaaattgtggcttaaggagctcaaggacttggctcttgatgccgaggatgtccttgatgattaccggtatgagctgctgcagagccaagtccaagagcttcaaggtgattatccacgcaagcggaagcacatggataatgatgaagaggacaatgatagtattgatgagagaattaatgagatgataaaccgtttcgaggagatatccagagatcgagatgctctcaagctcagatttgaagatggccataaaattgttgacaggggaaactggatgaagtcacggcctactagccaccttattgatgagtcccttgtttttggtaggattgatgagaaggaggatattatcaagtcagtattatctcatcaagacatggaaccatctggaattgttgttttgccaattgttggaatgggtggtattggcaaaactaccatagcgcagatggtatataatgacagtcgtgtcagaaaacattttgagcatagtggttggattcatgtatccccaacatttgatgtccataagttgacgattgccattactgagtcattaaccatgaaaaactatggcttcacacagctaagcttagttcatggggttctcttggaagaggtacaaggaaagaaattgtttttcgtgcttgatgatttgtggaatgaatgtgaaagtagctggcaggattttctatctccgctcaggcatgcacaaacagtgacaattttggtcaccaccaggagtaaagaggttgcacgtcttgttcaaacagtgcagctatatcatcttggctgcattcctgacaaggattgctggttgttgtttcagcattatgcttttggaaaccaacatgagagtgaacagtccatattagttcagattggcaggaaaattttgcagaaatgtggtggcttaccgttagcagtgaagtcactaggttgccttttacgatcaacaatggatgaacatgcctggatggaaatattggaaagtgagctttgggaattggatgaagaggataacatctttccagctcttagattgagttattactggttgccaacaagattgaaaccttgttttcttctctgttcattgtaccctagaaatttaggatttacaaaggatgacattattcagctgtgggtcgctcaaggttatatctactctacaaacgggaaaacttgccgggagataggaaatgagtattttaatgaactgcacgcaagatcattgattgaaacttataggaaaccagtatgttgggatattaacaaacggaagctttgtctctccaggtttacttataatgagagacaaggattttcgtcaaaaaaaagagagagacaaggattttcgtcaagaaacgaagggagacaaggactttcgtcaaaggaaaaagcaagagaagcaatgttctatttgaaaaacaagttacagtgtgaaacttatttgaagaaaccatcaacgtcaattggacgctttaagttgcatgatgttatttttgatcttgcaaaatcatttactagaggagaacagtgtacagcaatgtttggcacgacatgtatgccaccagtagctgatctgaaacttcaatttcccaacccgagtttcatgtatctaaggtctttaatactgaattcaaaccacgatgttagtggtatggtatattcaatcggcaatttaagacacttgcgctatctttctctgaactgcaaaatgagagagttgcctgaatcgaattcagattgctcgaaattgcagtctcttactctcctgattcttccttcagaaaatatgccgtgcaagccttgccatgcatttgtcgctgattgtcctaaactgaaacagtggtgcgagaaacatgagttcaactactttcagatgtgtttactatga

SEQ ID NO: 92299 - DNA, 4386 bp, Oryza sativa
  Clone ID: PAT_MRT4530_90795C.1
atgtcgtccgcctcctccacccctccctcccccacctctgccgccctggacacagcggctgatgccgtcgcgaaggctgtccgcgccgcgttccaggtgctgcctggcatggagatcgaccccacgatggcgaacaccgtcgtcgactctgctgccacccgggcctccgacgccgctcgcaacgccctctcccccgtgctgagcaccctcctgtccggcactcccgcgacgaccggcgctcccgcgactactagcgcccccgccggcgcaggcatcgccgcgacctccgtggccgccacccacggcgtggcgcctgcgaccacggcgcctcttcccggcaccatgccggctgacctcgccgccctcttcgcctctgcgcgcctcgcgcatggcgtccacacgccggagccgaccgtccccgacttctcgcgcccacccgccactcctctcgacgacgccgccttggcagcactccacgctcaagccgtcagcgtcctcaacatcaaggcactcgttcccgtgactctcgacgtcgctgccaccaactacacacgatggcatggcctcttcctcgtggcactcggcaagtacgccctcacggatcacgtcctctccgacgcgtaccacttcgaccgcgccgattgggtgcaaatggattgtgtcgtcctcgcttggctcttcggcaccatctcctcgaccttctccaagaccgagcaacgtgccctcaacctcacgacggaattccacacgttccgacaaggcgacctctccgtcgacgagtactgccgcaagatgaagaccttcgctgacagcctcggcgacgtcggcgagcccgtccgcgaccgcaccctcgtcctcaacactttgagcggtttgtccgagaagttcaataacctccggtctctagttcccatgcagcggccattcccgaccttcgccgagcttcgctccatgcttcgcctggaagaactctccaagccgaaccacgccgcgtctgcttcttccgccgtcttcctcgccacgggcagcacgaccaacggcggcaagggcgccaatccagcgcacggcaccggctatggtgccggcaaccaaggcggtggcggcaagggcaacagcaaccggcgtcgccgcggtggcaacggcggcggcggtggcggtggtggtggcggcggtaacagcaaccaaggaggcggcagcaccgttccagcacaggcgcaaggtgcccagtggagggctggcttccagtggccttccccacataatccatgggccggcaccatccacatgtggccgggcccgttgggtcgtggtgtgcttggcccaaggccggcaccctccccctttgctggtgctgctttggctgggccgagcggcggcccgctgcctggccaagtctacccggcgcccgtcccctaccagacagcagctggcctggggcagcaggcccagctcggtggcgtgggccagttcggcccatcacagccacccactccagtggctcttcaacaccctttgggctggtttggtggtgctccttcgcagtgggaccaagcgtcccttgccggctccttcaacaccacgacgctacaccaacccgccacaaatgactggtatatggacactggtgccactgcacacatgacctccgacaccggtatcctctccctttcacacccacctaatcccaactccccctctcatattgtcgttggtaatggctctactattcctgttacttccattgggcactctaaaatttgtcaccctaaccgttcctttacacttcgtgacattctttgttcccccgctattattaaaaatcttatctccgttcgccgatttgttattgataattggtgttctgtcgagtttgacccctttggcttctctgtgaaggatcttcgcaccaggaccggatcgccagcattcagtgcgacaacggccgtgagtttgacaactccgccgctcgcaccttctttctcaccaatggtgttcaccttcggatgtcttgcccccacacctcgcctcagaatggccaagctccccggatccttctgggttgaagcgcttcacaccgccacacacctcatcaaccgacaccccaccaaaacactcgatcgccacacccctcactttgccctatatggtacccatccctcatattcgcaccttcgtgtcttcggttgcaagtgttatccaaacctctccgccaccacaccgcacaagcttgccccccgttccaccatgtgcgttttcctaggctaccccctctaccataaaggatatcggtgttttgatcccctgtccaacagggttattatttcacggcatgttgtgtttgatgagcactcgtttccatttactgagctcactaatggtgtctccaatgctactgatctcgattttttgaaggatttcactgctccagcacaggcaccaattggagcgactcgtcgaccagctgtggcgccgacaacacagacggccagctcgcccatggtgcatgggcttgagcggccgccaccctgttctcccaccaggccggcctcaacacctggtgggccgtcctccccagacagccggctcgggccgccttcccccacccctgcactgattgggccggcgtcgacttcacctggaccgccttcagctgggccggctccatcagcctccacctgcccggctcctcccggccttcctcgactggacggcccgcatctcccgccagctccacatgtcccgcgccgccttcgatcagttcgtgctaccggcgcaccaactccactgtccggcctgggaatctcaccggttgtcaacgaccacgtcatgacaacccgcgccaagtccggtcaccacaagcctgttcatcggcttaatcttcatgccgccccgctgtctccggtgcccaagacataccgggcggcccttgccgatccgctctggcgcgccgccatggaagaagagtacaatgctctcctcgccaaccgcacctgggatcttgttccgcgtcctgccggcgtgaacgtcgtcaccggcaagtggatcttcaagcacaagtttcatgctgacggctccctcgaccggtacaaggctcgttgggttcttcgcggcttcacccaacgccccggcgtcgacttcgatgagactttcagcccggtcgtcaagccggccactgtccgcactgtcctcagcctcgccgtttctcgcgactggccggtgcaccaactcgacgtcaagaacgccttcctccacggcacgcttcaggagactgtctactgcacccagccgcccggcttcgtcgactccgccaagcccgacatggtgtgctgcctcaacaagtccctctacggcctcaagcaggccccgcgcgcatggtacagccgcttcgccacctttctacagtccatcgggtttgttgaggccaagtccgacacgtccttgttcatccttcaccgagggaacgacaccgtctaccttctgctctacgtcgacgacatcgtgctgacggcttcctcacgcacgctccttcattggaccatctccgcccttcagggcgagttttccatgaaggacctcggcgccctccaccacttcctcggcgtcagcgtcaccaggaatttagctggcctcgtgctcagccagcggcagtactgcattgacatcctcgagcgtgcaggcatggcagattgcaagccctgtaacactcctgtcgacaccactgccaagctttcctcctccgacggccctcctgtagcggatcccacagacttcaggagcctcgccggtgcgctacagtacctcaccttcacccggcccgacatctcctatgctgtacagcaagtctgccttcacatgcatgaccctcgcgagcctcacctggcagccctcaagcggatcctccgctacatccgtggctctgtggacctgggactccacattcagcggtcctccgcctgcgacctcgccgtctactccgacgccgactgggccggctgccctgacactcgtcgctccacatctggctacgccgtcttccttggagacaacttggtgtcatgtgcagaggccgagtaccgcgccgttgccaatgcagtcgccgaggtcacatggctgcgccagctactccaggagctacattctccgccgtcgcgggctacactggtctactgcgacaatgtcagtgccgtctacctctcctccaacccggtgcagcatcagcgtaccaagcatgttgagatcgaccttcacttcgttcgggaacgtgtcgcggtcggcgccgtccgtgttcttcatgttcccacaacatcgcagtacgccgacatcttcaccaaggggcttcctacaccggtcttcaccgagtttcgctccagtctcaacgtctgctag

SEQ ID NO: 92300 - DNA, 3582 bp, Oryza sativa
  Clone ID: PAT_MRT4530_90796C.1
cgagggagaactagtctcgatttttttttttttttttttaattaaccaatcaatcaattaagccacccaagacgacaacggatggagaatgctgcccggtcacacgtttttccttgcgtttaacaaaaacctatatgaatttcttttgcctattccaacattattggtacagtagtacaaatcgtagtaatgcaatgcgcatacatggcaactttacaatcggtttggtggaaaaacctagcaacttatataaacacacaaaaactactcaatgttcaccaccacacctagggcaacgcgggtatacaagatggcagggtggtggaaatgacggagcaaaacgaaccttacacactatggcgatgaaggggccttacaagggcccaaaaaatctagtgctttcccggagaagaatctgagctgaggggactactccgccagccctctcttcattgaccttcatccacacgtcgtcttggcagcagcaagatgcttgtggtgatgttagatcctcacattaaacaactgtcatgtacaccaagatgctatttgtttcaactttttatagcaacccagctagcattgcaccagggtcattgtatgcggcaggtactggcgcggaggcaactgtgggtgcaccggaacgggaggtgaagctgtttgtacccttgggatatcaattaaatgttccttgatgtactctttcaactcgaatgtcaaatactgatctcctgatgccactgtgagccggggttgcgttctatcttgtggatcagtttagacattaaccagacaaagcatggcacgggttgtttcagaaaagaatgtagtgcatgcaaccagattgttcgggttattatcaagtccaggagcaaccgccaagtgaaggctcatgaaaagactagctatctcaggaagaggtaatggtttcacacctttaaccacttcttgaacttttagattttgaacattcaatgctttccactgagggaaaaactcttcaggggaaagagttataggttgcaaaaatttattcaatacaacagggagccggagtttgacattcaccagtgaagttccaaatgtatatgaaaaatcaagaacagcgacatctctacttgcacgaagattcacaacctcaagtggaatttggacctgtgctcttggaggaatagtatcaggaactgatgagagttccgtttttaaatggctaggaggcaaaatcagagcctgaactgataaaagtggtgccgtatttttgtttcccaggaaaagtacgagacgaccatgatgagcacgccactctgcttttaaaccaatctgaatgtgaggatcctcataaagtaccccactatcttttgagcataatatatgaaacttctcctcaacatttacaataggctgaactgagtttgactgatcttcaagggttgctagtgccaaatcaccaactggactttgattagtctccagtccttgaacagggttttgttctacagcagcaggaggaccctctattgcaagaggacccaaaagatctgcaaggaggtctgcttgagaagcaggatgcgctgcaggaggctcaaccttgctctcaatgttggtctctgggatattttcgactttactctcaacttcaacaggagcaccattttctttcggaatttctactggaggttcttcgtaagcaacattgctctcttcagtgatattttgacttggcatcttcacaagagtgagatgattagatgctggtactgatccatttacaggtggctgatcagctatgacaatagcactcgatgtttgttgctgacttcgtaattttatagcactttgctctgctgtgtcaacctcagcatcttcagccttcttcaacagagcagactcacgttcaggaaatttcggcatttctgctaacacgtctgccaaagcagcacctttcctgcttagttcaaaatattcgactgctctctgctgtatttcaacatcaatataactctcgtacgatactgttggaagcttgtcatttattatagcaaacaactccttaggactgcaaccaggtcttcgggccaataggtggccatactccccaagaaggtatgcactcaccttaaccattgtttcatgcaaagcaggcttgtcgaggtattctctagcctttgctgcagcatatggctgcagatcttcattgttggtgacaaattgtaccactcgataccatatatcatcacttacaaaatctcctgctttgtctatcagctgcagaataacatcgacataccatgaaagatctggagcgaatttctcagcaaggatagctgccttcagggacagctcttcgcgcattgcaaattcagctgtgttaagatactgcaataactcctcgacaatttcctttgcattcgtaacatcacacataccatataacagatcaagagcccgccttctaatactgatatctggatctttcaaagaggtaataatctgggcctggtgccttttaatgatatcctgtacatctgttactaacagcatcctagacatgttttccagaccaagatacctaatatttggttcccgaactgcaataaacttcccaagaagagccacgcactgggacatcatctccttttcagcatcaagatgcataacaagagcaagagcttcaaagagaacagcatgtgaggcattattcttgttgacgtttttaacaacatcagtacccattaaaatgcgctgtaaaacctcaaataaagctcgtcttgcgccaggatcttcaattgtagggaagtactgaagagccctcattgtcttaacctgaagccatggagatggaattccataataagtgtattcttgtgggatatcttggtttcttgccatcctctccaatatccttacacattttggaaggcaattccaatatgcttcagcattattagataccagtgaaacaaaaaggctcatgacagatgtcagtacgcccagatcccgctcatctagaagctgtgccatccgatcagaccagccatcgatattcacaacatcagggttcttcctataaagccgcagaaggcatagtgctgccttctttctgaccacgggacggcagctactagaaataagaagtttctggacatctggggccagtgactcggaaaattctttcccaccaatattacctaccattgtcaatgctaagcactgataagtctcattccgtcctattatgtcattgcgtactgtatttataaccatccgtaggaaatcattattttcattcaataagcaagatgtcacaatgtacccaacctgtttctcaggatacttcggagcagatatcaaagaaacagtttccatgtgcccaaagtcaacatcataacccagcatatatatgtaaagcattttccatacgtactttttcttctcataaggcgatagtcccttctcgtttttgaagcgcgtgcggatgttgccgagctccttgtcgacgcggaggcgctcctgctccttgttgtggcagttgcggatgtcgctgatgaagacggagagcccccgcatcccggagagcgccat

SEQ ID NO: 92301 - DNA, 5040 bp, Oryza sativa
  Clone ID: PAT_MRT4530_90797C.1
atgtcgtccgcctcctccacccctccctcccccacctctgccgccctggacacagcggccgatgccgtcgcgaaggctgtccgcgccgcgttccaggtgctgcctggcatggagatcgaccccacgacggcgaacaccgtcgtcgactctgctgccacccgggcgtccgacgccgctcgcaacgccctctcccccgtgctgagcaccctcctgtccggcactcccgcgacgaccggcgctcccgcgactactggcgcccccgccggcgcaggcatcgccgcgacctccgtggccgccacccacggcgtggcgcctgcgaccacggcgcctcttcccggcaccatgccggctgacctcgccgccctcttcgcctctgcgcgcctcgcgcatggcgtccacacgccggagccgaccgtccccgacttctcgcgcccacccgccactcctctcgacgacgccgccttggcagcactccacgctcaagccgtcagcgtcctcaacatcaaggcactcgttcccgtgactctcgacgtcgctgccaccaactacacacgatggcgtggcctcttcctcgtggcactcggcaagtacgccctcacggatcacgtcctctccgacgcgtaccacttcgaccgcgccgattgggtgcaaatggattgtgtcgtcctcgcttggctcttcggcaccatctccttcgaccttctccaagacgtccttgcgactgacactacagctcgtctcgtttggcgcggcctcgagtatcaattccttggcaacagcgagcaacgtgccctcaacctcacgacggaattccacacgttccaacaaggcgacctctccgtcgacgagtactgccgcaagatgaagaccttcgctgacagcctcggcgacgtcggcgagcccgtccgcgaccgcaccctcgtcctcaacactttgaatggtttgtccgagaagttcaataacctccggtctctagttcccatgcagcggccattcccgaccttcgccgagcttcgctccttgcttcgcctggaagaactctccaagccgaaccacgccgcgtctgcttcttccgccgtcttcctcgccacgggcagcacgaccaacggcggcaagggcgccaatccagcgcacggcaccggctatggtgccggcaaccaaggcggtggcggcaagggcaacagcaaccggcgtcgccgcggcggcaacggcggcggcggtggcggtggtggtggcggcggtaacagcaaccaaggaggcggcagcaccgttccagcacaggcgcaaggtgcccagtggagggctggctcccagtggccttccccacaaaatccatgggccggcaccatccacatgtggccgggcccgttgggtcgtggtgtgcttggcccaaggccggcaccctccccctttgctggtgctgctttggctgggccgagcggcggcccgctgcctggccaagtctacccggcgcccgtcccctaccagacagcagctggcctggggcagcaggcccagctcggtggcgtgggccagttcggcccatcacagccacccacttcagtggctcttcaacaacctttgggctggtttggtggtgctccttcgcagtgggaccaagcgtcccttgccggctccttcaacaccacgacgctacaccaacccgccacaaatgactggtatatggacactggtgccactgcacacatgacctccgacaccggtatcctctccctttcacacccacccaatcccaactccccttctcatattgtcgttggtaatggctctactattcctgttacttccattgggcactctaaaatttgtcaccctaactgttcctttacacttcgtgacattctttgttcccccgctattattaaaaatcttatctccgttcgccgatttgttattgataattggtgttctgtcgagtttgacccctttggcttctctgtgaaggatcttcgcaccaggaccgtgatcgccaggttcaatagctccggtcctctctactccctactccatgcactgcctcctccaccagcagccaccgccctcctcgccaactccagcaccgaccttctctggcatcgtcgtctcggccaccttggtcacgacgccctcaaccgcctcgctgccgtcgtccctatgacacgcggcgacctcaccggagtgtgtcacgcttgccagcttggccgccatgttcgccttccctttgctagttctacttctcgggcatcgacaaactttgagttattccattgtgatttatggacatctcctgtcgttagtgcttccgggtttaaatactatcttgtcattcttgacgattgctcacattatgtgtggactttccctttacgttttaaatccgacactttcaccaccttgtcccacttttttgcttatgttaagactcagtttgccactaacatccgcagcattcagtgcgacaacggccgtgagtttgacaactccgccgctcgcaccttctttctcaccaatggtgttcaccttcggatgtcttgcccccacacctcgcctcagaatggtaaagccgaacgcatccttcgttccctcaataacattgttcgctccatgctgtttcaggccaagctccccggatccttctgggttgaagcgcttcacaccgccacacacctcatcaaccgacaccccaccaaaacactcgatcgccacacccctcactttgccctatatggtacccatccctcatattcgcaccttcgtgtcttcggttgcaagtgttatccaaacctctccgccaccacaccgcacaagcttgccccccgttccaccatgtgcgttttcctaggctaccccctctaccataaaggatatcggtgttttgatcccctgtccaacagggttattatttcacggcatgttgtgtttgatgagcactcgtttccatttactgagctcactaatggtgtctccaatgctactgatctcgattttttggaggatttcactgctccagcacaggcaccaattggagcgactcgtcgaccagctgtggcgccgacaacacagacggccagctcgcccatggtgcatgggcttgagcggccgccaccctgttctcccaccaggccggtctcaacacctggtgggccgtcctccccagacagccggctcgggccgccttcccccacccctgcactgattgggccggcgtcgacttcacctggaccgccttcagctgggccggctccatcagcctccacctgcccggcctcttcgacctgggagaccgtggctcggccgcccactcctcccggccttcctcgactggacggcccgcatctcccgccagctccacatgtcccgcgccgccttcgatcagttcgtgctaccggcgcaccaactccactgtccggcctggaaatctcaccggttgtcaacgaccacgtcatgacaacccgcgccaagtccggtcaccacaagcctgttcatcggcttaatcttcatgccgccccgctgtctctggtgcccaagacataccgggcggcccttgccgatccgctctggcgcgccgccatggaagaagagtacaatgctctcctcgccaaccgcacctgggatcttgttccgcgtcctgccggcgtgaacgtcgtcaccggcaagtggatcttcaagcacaagtttcatgctgacggctccctcgaccggtacaaggctcgttgggttcttcgcggcttcacccaacgccccggcgtcgacttcgatgagactttcagcccggtcgtcaagccggccactgtccgcactgtcctcagcctcgccgtttctcgcgactggccggtgcaccaactcgacgtcaagaacgccttcctccacggcacgcttcaggagactgtctactgcacccagccgcccggcttcgtcgactccgccaagcccgacatggtgtgctgcctcaacaagtccctctacggcctcaagcaggccccgcgcgcatggtacagccgcttcaccacctttctacagtccatcgggtttgttgaggccaagtccgacacgtccttgttcatccttcaccgagggaacgacaccgtctaccttctgctctacgtcgacgacatcgtgctgacggcttcctcacgcacgctccttcattggaccatctccgcccttcagggcgagttttccatgaaggacctcggcgccctccaccacttcctcggcgtcagcgtcaccaggaattcagctggcctcgtgctcagccagcggcagtactgcattgacatcctcgagcgtgcaggcatggcagattgcaagccctgtaacactcctgtcgacaccactcccaagctttcctcctccgacggccctcctgtagcggatcccacagacttcaggagcctcgccggtgcgctacagtacctcaccttcacccggcccgacatctcctacgctgtacagcaagtctgccttcacatgcatgaccctcgcgagcctcacctggcagccctcaagcggatcctccactacatccgtggctctgtggacctaggactccacattcagcggtcctccgcctgcgacctcgccgtctactccgacgccgactgggccggctgccctgacactcgtcgctccacatctggctacgccgtcttccttggagacaacttggtgtcatggtcctccaagcgccagcacacggtctcccgctccagtgcagaggccgagtaccgcgccgttgccaatgcggtcgccgaggtcacatggctgcgccagctactccaggagctacattctccgccgtcgcgggctacactggtctactgcgacaatgtcagtgccgtctacctctcctccaacccggtgcagcatcagcgtaccaagcatgttgagatcgaccttcacttcgttcgggaacgtgtcgcggtcggcgccgtccgtgttcttcatgttcccacaacatcgcagtacgccgacatcttcaccaaggggcttcctacaccggtcttcaccgagtttcgctccagtctcaacgtctgctag

SEQ ID NO: 92302 - DNA, 327 bp, Oryza sativa
  Clone ID: PAT_MRT4530_90798C.1
gtgcccgtggcagcccgtctgcccgccgccgccgtgcggcggcggcggctacgtcgtctatgagcagccggagggatgctctgtcatgtgatcgaacagctgccgtacgtgcctcggaaatcggaataattaaacgcgttaattacttatgtctggtgtggtatttttttcttaattaaatcatgtaattttattaattgtctatattactacacatgtaatttgttgtgtgtatacagtatatacatgtatgtaatttgttgtctatatatttgacatgtatatatattttgctcaaccagttccagctaaaaaaaaaaaaaaaaa

SEQ ID NO: 92303 - DNA, 383 bp, Oryza sativa
  Clone ID: PAT_MRT4530_90799C.1
attggatgtgaagatttcggggaaagggacaccaaaaaaggggttcaaataaatacaacaaaaattttaagaaaaacaaaatggggcccttataaatgagaaaacaagttaaaaaacaacctgaaaatggttgaatgggttgccacctcccccaagggaaaaaaaaatttgtgctccttgagaaaaagggctttgaggggcgccctatcaaggaaaaggatacccttttgtggcaccggggatgcgcgtggaggggccctaaccccaaaagggaaaggcccccgggcatttaaaaaattttgaaattgtagaaaaaagctttaaataggttttttaggggggcaccccttaaagaaaaaaaaaaccaccccggttttttgggg

SEQ ID NO: 92304 - DNA, 231 bp, Oryza sativa
  unsure (1)..(231): unsure at all n locations
  Clone ID: PAT_MRT4530_9079C.1
aagganaaaaactgcagggganagggggggtattttggtncattgaagtaggaaaaatggtgaaaatnttgtgaaatggccaatatggcaaagcancggtttggcatcggttggaagtggcattttaacaacnccattttgcggaatggcattgtggcgaaacccccnctttagaatgtccaatttntcctaaaaaaaaaaaaaaaaaaaaaaaaaaaaaaaaaaaaaaaa

SEQ ID NO: 92305 - DNA, 369 bp, Oryza sativa
  Clone ID: PAT_MRT4530_907C.1
atgcggctgacgggaggacgacagccgacgacgggtcatgaggaggacggcggcggtccggagcagaggtcggaggagggcccccagccgctaggatggcgctcaatccgtcgcctcctcatgctcgtcggccacgccgcgccgtccgccgtggccgccagagccgcgcatgttgctgtcagacgagcaggaaccattgtagctccgcccctggccgtcgctcggccgagctcctccacatcggcaccgctgctcggccgcatcggcacccatccctccttctcctcctccgcctcctccctcctccacaccgcccggccgctgccggtcaccgtcgtctgcagtgcctcccgcgccgccgatatttga

SEQ ID NO: 92306 - DNA, 273 bp, Oryza sativa
  Clone ID: PAT_MRT4530_90800C.1
atgcgcgcactggcgagggcggcagcgggagcggatgagcgccaaacgcggccggcggcggatgtcccctccctctctcttgcctgggcacaactgtcatggtggccggtggtggctgcagtcggcgaccggcaaggaggaggctccaacgtcgacgaccgctacttcgaggaggaggcgcgaggaacggagaggaaggagatggggaggccggtgagcagggcggggatgccaacgagcgcgagcgaagagggaggcagcgaggaggtctga

SEQ ID NO: 92307 - DNA, 431 bp, Oryza sativa
  Clone ID: PAT_MRT4530_90801C.1
ttgcttacgcgtgggctttggcttggacaggacatgtagttcatgtcgctattccagcatccaggggagagtacgttcgatggaataatttcttagatgtattaccctatccacaggggttgggaccccttctgacgggtcagtggaatctttatgcccaaaaccccgattcgagtaatcatttatttggtaccactcaaggagcgggaactgctattctaactcttcttgggggattccatccacaaacacaaagtttgtggctgaccgatattgctcatcatcatttagctattgcatttatttttctcattgccgggcatatgtatcgaactaacttctgaattgggcacaggatcaaagatcttttataagcacatacttctcccggggggtcgattagggcgtgggccttagggccttttctacca

SEQ ID NO: 92308 - DNA, 393 bp, Oryza sativa
  Clone ID: PAT_MRT4530_90802C.1
gtcctttttttttttttttttttttttttttttttttttttttttttttcaaaagaggcaaagtttttttattaagataagttgtaaaaaaaccccaattccattaccaaacataaaaccatccatcaaaatcacatgggaaacggaatacagcccaccatgtcctaactttctcacgtagcaaacgataaagaggaacactctactaaaactacttgtcacaactaactcaacttaagcttcgattttttgacccacgcagggacccaaatgcaaagagatgcggaaattaataacgcaaccttgacctggaggggcttgggctttttgggctccgggggggggagcttctcgacggggacggggagcccgccggccgggcacacggggaaa

SEQ ID NO: 92309 - DNA, 171 bp, Oryza sativa
  Clone ID: PAT_MRT4530_90803C.1
atggcagcctccttcccatctgggatgaggacgtcgaggcacaaggaggtagaccgtggtgtcctgtccggtctgcggagtgaggcagaggcccgtggcagctccaccccggtgactcaagatgccgagagagtatttgcggtgatggaccgggagtcggcttggggataa

SEQ ID NO: 92310 - DNA, 779 bp, Oryza sativa
  unsure (1)..(779): unsure at all n locations
  Clone ID: PAT_MRT4530_90804C.1
cttcncctcctcctcctcctccgccgccgccgccgccgcatcatcgccgtcgaagcgtagagggagtaaggggaggatggggagaggaagaggggtgagcagcgggggagggcagagctcgctgggctacctcttcggcggcggcgagacggctcccgcggcgaaggcgaagccggctgcagcggcggagaaggagactacgccggcgccagtgaagaaggcggcggtggcggcggcggcgtcgccgtcggcagcggagaagatgaaggagatccccgcggggatacaaagcacccaggccaacaactacttccgggcgcagggccagaattgcggcaacttcctcacggatcggccgtcaaccaaggtgcacgctgctccgggcggcggctcgtcgctcggctacctcttcggcggcaagtgatgcgaaaaaaaaagaagaaagaatcctctgctcgagaaatttctctctagcagataacgtgattatttttaaacctgcttttgtgtagattgcctgtgtattgtgtgttgtgatgtgttcttgtgtgatttgcagctacttaaaaaaaaaacttaactagttctgcaggctctgatggctgtatcagccactggcataaaatgctcagatggtgttaattcttcgagttagtatgcttggaatgcagttgtaacttgtaaacatttacatgaccatgtctctgtttccttcaagttgtctactccactttatattagtcatgctgaagtagtaggtggcaaaaaaaaaaaaaaaa

SEQ ID NO: 92311 - DNA, 1436 bp, Oryza sativa
  Clone ID: PAT_MRT4530_90805C.1
atggctcatcaccacgccatcggtgtttcctcggagagacataatttagccttactaaactcctgccattccgctgcacagttgcagagaaacgccccagaacagcagattgccagacactgaagtacacaatggcgctgagaaatggtgatgccaatgcaggtagcaatgtctgccacaaacctacagcatttgattaggacgacattctcgaatccattctccttgatcagatcagtgaattggttcaggtagctcacaagcccacctagcgatttgatcagctcatcacctttttggcgagtggtttccatagaatccgatgagatagcaaggttatggttctcattttcgcctgcctcctctttgagtagcatatggatgtgctgcgcgttctcttgtaacttgttggccagttcacatgcatcggtttggcttttcttgccctcgttgtttgctcccgtttcgcagactttgcattttaacaaatccaaaggtgcactgaatctggattgtgggtcatcaccatcgaggatgcatataatctcaactgtcaaccaagcccaaggaacaataatcgtgcggaatgtccaggcagatgaacatgaaaagctaaaggagacaagaaacatacccaaatcatcagaagcagcagcatttccaccatctggttgcgcgtctttgtcgtcggcgttgccatcgtcttccacctccaccatttcattgccatcctcctcctcaccatcttctccaacctcaccttcatcctcttctccaacctcgccgcgatctccatttccatcctcttccccagcctcaacttcgtcgccttctccgacctcagcggcggcggcgctcttttcaccaatctcagcaccaccagcaccggcggtggcatcggcgagaagcgcctcctcgacgagggtgagagcctccatggcgccgtagacctcggcgtcgaagtcggcggggaggccggccttcctcctggcccgcacctcccatcggcgaaccaccccgtactccgcggcgagcgcctcccaccgccgcctgcactcgctcgccgccctccccctccccctcccccgcgccgccctcccccgcgacgcggcgaggttctcggcgacgatggcccacttctggaaggcggagacggagcgggaccacccgtcgtcgacggccgcgacctcggccacgagcgcgagcgtctccgcgggggtccactccggcgcgccgccggagcgcgtgcggcgcgggctgggcggctcggcgccgcgcctgagcctggcggcggcgggcggcgggtccgtggcggccgggagcgcctgcaccatggtcggcagcctcgggaccccggtggacgacggcgacggcggcaacgccgggagcgcctggatgatgcacggccactccgcggcgtccggatccatggccat

SEQ ID NO: 92312 - DNA, 226 bp, Oryza sativa
  Clone ID: PAT_MRT4530_90806C.1
ccgggctgaggaattcggcacgagggagagagagaactagtctcgagtttttttttttttttttatttataggacccacctgaaaattaaactgtaccgcaaacaataaagatgcctaacatatatgtacgtagaagaccaagcaataaattcgcacacatggcatatttcagatcgaacgacatctaatggacgttgaccctacttacttctttgatttccatgc

SEQ ID NO: 92313 - DNA, 1057 bp, Oryza sativa
  Clone ID: PAT_MRT4530_90807C.1
ggccgcttttttttttttttttttcaggcaggcacgaaagatgaaatagacccacccaatcaaacacatttctgatagccacaaatgatttggtagggtgaaatggaacacggatacagaaacctacgtctagtgctaacatcgctatgccaaacaagctcaacaaagagaaacaaggcaccccagcacttctgttacttgctgacgagtgtttctactacaggaaatgaattagcaacagagtgattttcactggtaatattcgtcgcataggccaagcgtgaaatgtagtgaagatcacaccacataacggtacgtcacatatcttccagcggtctcactagcacggatgatctttacaacttgcccacgcttcatgccgtaatatcttgctattgggtccgtaatttgaatccgggggagctgagtctctttcacggtataccgctccagcagcgtcttcttctgctcaggcgtcaggagctcgtgctctggcacaagggtatgatccttaatgttcacaagcagttccgcttcctggaagacctcgaggtggaacttctgggagacctcctgcacggcgctgcgggcgaacgcgctgagcgcctgctgcacgacgaggatgccgttgaacacgctctcctgcttcatcctctccacgtagctcctgatcgtcttcaccccgggcttcgcgtccttggggaagaagacgtagatctggtcggcgccgttgtccttcttgtggcggctgaagacgagatggtcgcggtcgacgggatccccgaagcgtgcgacgaagtcgcccctcgggaggtcgatgtccaactccgtcacgaggtagcccctgtcccgcagcatctgcatcaccgtgcggcggatgcggaaaagccggctcgtctcctcctccgacgccatctatctcctctcccttccgccgccgccgcggggtttcgctagggttttgtggggggagcgtccgcgccgacaagggggaaggcgggagcgggaggaggatggcggcaggtagggtttcgattgttttgggggagaaaaggct

SEQ ID NO: 92314 - DNA, 654 bp, Oryza sativa
  Clone ID: PAT_MRT4530_90808C.1
atggcgtcggaggaggagacgagccggcttttccgcatccgccgcacggtgatgcagatgctgcgggacaggggctacctcgtgacggagttggacatcgacctcccgaggggcgacttcgtcgcacgcttcggggatcccgtcgaccgcgaccatctcgtcttcagccgccacaagaaggacaacggcgccgaccagatctacgtcttcttccccaaggacgcgaagcccggggtgaagacgatcaggagctacgtggagaggatgaagcaggagagcgtgttcaacggcatcctcgtcgtgcagcaggcgctcagcgcgttcgcccgcagcgccgtgcaggaggtctcccagaagttccacctcgaggtcttccaggaagcggaactgcttgtgaacattaaggatcatacccttgtgccagagcacgagctcctgacgcctgagcagaagaagacgctgctggagcggtataccgtgaaagagactcagatactgagcctaactcagttggtcaagtgtgtgaatctcccccggattcaaattacggacccaatagcaagatattacggcatgaagcgtgggcaagttgtaaagatcatccgtgctagtgagaccgctggaagatatgtgacgtaccgttatgtggtgtga

SEQ ID NO: 92315 - DNA, 887 bp, Oryza sativa
  Clone ID: PAT_MRT4530_90809C.1
cccacgcgacgaggcttctatccacccacaccagcaagccgctcaggcgcgctctccgctccaccgccatggcgtccatcaccctcctctccctcgctcccgcggccacattgctccacctcccggcctccacttcgctctccacctccttcgtcgccgctccaggccccatctccggccgccggtccgtcgtcctccgcgcccgcccgcgccgctgcgtcacggtcgtgtgcagcgccgcggcggccgaggccgcggaggcggagcccgcggagaagttccggctcgacaacctgggcccgcagaaggggtcgcggcggcggccgaagcggaaggggcgcggtatcgcggcggggcagggcgcgagctgcgggttcggcatgcgtggacagaagtcgcgctcggggccaggcgtccggcgcgggttcgagggagggcagatgccgctctaccgccgcatccccaagctgcgcggcattgctggaggaatgcatattggcttgccgaagtatgtgccgttcaatttgagagacttggcgcgtggcgggttcaaggatggtgacgagatatcattggaatccttgaaatcgaggggtttgattaatccgtctggcagggagagaaagcttcctctgaagattttaggagatggtgatgtatcagtcaagttgaatatcaaggctggggcattctctgcttcagccaaggagaagctcgaggcagctggttgtactttaagtctggtaccaaagcggaagaaatggctaccacaatcttatctgaagaaccaagctcgtgcagaagaatactttagcaagaaaaatggtggtgctggtgaatctggtgaagcatctgcctagaattatatacgctgtactactgcttaa

SEQ ID NO: 92316 - DNA, 438 bp, Oryza sativa
  Clone ID: PAT_MRT4530_9080C.1
accacactctctactccggcgacatcatgttcatcaacacggccagcttctccgttgggacccccgaaccttctcttctctaaaccctttggccagctccttgtcccaccacttggctgcctgcgttgtgcggggattgaacagatgcagcatccctgggattcagaacttactgcataaaaacatgcccccctcccccccccagaaggaacaaaaggatgtcatacctgcctccccttccggcgacgagattctccccatgaataaagatcatcctggaccaaagaaggggcccttgactgcgacatccctcagcaccaagagatctgcctggagacaccgccgaatcgttgcccatagaacgagtctcaagtagcacgctaaataaaaacatcttgcaatgaagggttgatcagaagatgacccagggcctccttg

SEQ ID NO: 92317 - DNA, 999 bp, Oryza sativa
  Clone ID: PAT_MRT4530_90810C.1
gcgaggcctcccccgcgcgcggcgatggccgccggcctcctcctcggcgacgccaccgccctgcggggcgacctcaccgtccgcgggccccagctccgcctctgcaactgggcccccaggccccggtggcggccgcccggcgccggcgcggcggactcctgttgtctcctcttccgtgcgcgcgcgcgccgccgtggccacggccatgtggccaggtttgcggcgtccgcttcgggggccggcggcgaggaggccggggagccgtcggaggacgaggcgcagagggagtgggaggcggagatggcgcggcggctgaaggaggccgaggagatggaggagctcgagcgcaccgccgaggagctgcagagccaggccgccgccgaggcccccgacgagtccgaggaggagaagcgcgagcgcgtccgccgcgagctccagaaggtggcaaaggagcaagcagagaggcgggcgacggcgaagcaaatgtttgatttggggcaaagggcctacggaagaggaatgtatggccgctctattgaattcttggaggctgcactcacaattattcgcccttcatcgctccttggtggggagatccaaatttggcttgcaatggcgtatgaggccaataggaggcacaaggattgcattgcactgtacaaagagttggagagtacacatccaatgatcagcattaggcggcaggcagcggaactccggtacatttctgaggcacccaagctgaagatctccaatgacgaggtggtcacaataccacaaattggatctagttgggattggtacgctggaacatggagtgacaaaatcaaggagcaggaggacaagaaaaggaaaatgttgaatggagaccatgcctgcattgctgcaactgcatcgctcttcaacatcatggccacaatcagctccatgatctctgatgtgatatcctcctctatgcaagctatagtttttctcctgatggtgattgattcactttga

SEQ ID NO: 92318 - DNA, 492 bp, Oryza sativa
  Clone ID: PAT_MRT4530_90811C.1
aacactgaatagaagactagaaagacaatgtttaaaatcatggactggtacacttgaatcatcatcattttcaacagccatgctacctattatgacttctaaaccgctaaccataatctatctactaacaaagctcatccttcattcctcttcttcttaagatttgacatttaaattactacatctttccacccccatttataatataatattaagttacaaaacggtggtatcattcatcatatctcatcgttcttccatccatccaacaaaatctacggcttctcaccagcgctactccacttaaagcttcagacctttcacccttctacgcatactggataatccagaacttccattgtctacaaaatcgcttcacaggttgccttattgtgtcctgcttgcttgcacctgctacagagccgtacaacagtaggtatcttgttggggttaaaacgcttccttctgggtttatctgatgtccgtggctta

SEQ ID NO: 92319 - DNA, 446 bp, Oryza sativa
  Clone ID: PAT_MRT4530_90812C.1
aaaaacaatttaatctaacaaacccaaacgggttttatcacaatggtagcccaggacaagggaaaaagtaatctagggccaagggggtcattggcgggggaaacaaaaaattggggggcccacaaccccccccaggggggccaacaaggggcgctttccctttttgggcgagaaaaaaaggaaaacctcccgaggggaagggaaaccgaaaaattctaggaaaccaagaagaagaaggaaaggccccttaagaccccccccccccttaagggtttgggggccccattttggccacgggaagggccactcggaaagggtttaatccccttggggggcccgggggggatccccaatattgaccccggacttggacttggaaaaatcccccccggggcccccctcttcccccttggggggggcccttttgggagggctctcccccttgg

SEQ ID NO: 92320 - DNA, 282 bp, Oryza sativa
  Clone ID: PAT_MRT4530_90813C.1
ctcacgagtcacgtcatgacactggacgaggaactggtgtacgatgtcccatccagaggaacgctaggaagtgagcttgccctgcatgtcgccattcctcacctgacatctgacctagcatttgacagcgtcatcgactgctaccatggctaatacaatttcaaatgcatcacccacaggaaggcccacctgatccccggcttgatacgggagttaactggtgaggtccctgcttactccactgcttacccgattatcctgcaaagaatgctgaacggactg

SEQ ID NO: 92321 - DNA, 146 bp, Oryza sativa
  Clone ID: PAT_MRT4530_90814C.1
acgagatacaactttaggcgttcatactttcctttgcaagattccaaaaaacatttgtatttttgttcttcaatgggcaaccaaacaccagtgtaatacatggtattcccacccacgcgttcgcccacgcgttcgcggacgcttgg

SEQ ID NO: 92322 - DNA, 362 bp, Oryza sativa
  Clone ID: PAT_MRT4530_90815C.1
gggcaaatacgccccaaaaatttcactccttcttaaaaatccccaaagccaaaattggtgccaacaaaacaaagctgctgcccgctggttggcgggggccccaatatcaccccctttgggcccggggaaaaagaaccccccaggggtatcaacctcccaaaaggggccgccccgtttggaaaaaaatttttttctgaactttcttggttgggccaaattttttttgaaaaaaccaaatttgggggcctttggtacttcgacccccacaaattcacggccttttggtcctgggggctttgaaaaaacacggggagaaatttaaccccccttttgtttcctggttcccttttggggccggaaaa

SEQ ID NO: 92323 - DNA, 731 bp, Oryza sativa
  Clone ID: PAT_MRT4530_90816C.1
gtattttattcgcaacgtgcggttcttccagtttctcggcgcctcggcggtgcccgcgcagcgatcgaggggaaattcctgagagttaaattcgttgaatcttaccatcttgtttgttatgattggatccatttgcccttgcatgcttgattttgcaggtgtgggcgaaggggaagcctcgaagtgcaaagccgcccctgcttgcacgcgatgtgttcggtgaaatgcctctgggacgcacaggtgtcatttcccgaggaagctctgttctcgtaacattttgagggagatgcacattgccagtggtgctactacagattactgaaccataggcgctctatgctgtgaaaagggcagctaaaatttcaatcaaatggatcaggagcaccttctgacattgaatgcttgcacgtcatggaatgtggttaatgtgatcaactgatcatccatgtgctgatgggatctttaagtagctgctttgtgtccatcaccctatctgtcaacatcgtagagttcttcaccatatcaactttgaggtgtttcagattctttttatttggttgctgtcatagttagtggagacaatggggatatccaggcaaggaatctgaagagtatgtaacttctactcacgcgcatcaaaatttcagtatctcatcttttactgcctgcttatctggtgagatattaatagagggaggactcagtaaactcctctaaaaaatgggtcg

SEQ ID NO: 92324 - DNA, 1387 bp, Oryza sativa
  unsure (1)..(1387): unsure at all n locations
  Clone ID: PAT_MRT4530_90817C.1
cttctcttctcttgggctcctctctcctgtgatccccctccgctagggttttagctatctcccatttcccccatccatcgccatttcgattggatcactcctctcccccctccaccgcctctcggatcccgccgccgcccgccgtcgccgcctccgccgccgcagactctatctctctgtgtatccatcccttctcgacctcgcgcaaatcccatccttttcgccccttctttccctgcgaaagatcgggtttttttttctgcccgtctctttctcgcgtttggttccaatcttttgctgcctggagatttcaccgccttgttcagagtcgagatctcccgtcgctgctcgatctgatctcgcctcgtttctcgaggagagaaaaaaaacaaaacaaacaaactgcggtttttgtgttcgggagtcggtggagaagagatctctctccgagattgatattcttgcgtccatttgcttcgcctccgatagctttcggaggaatctaatctcgaatagtgaaggaaagttgccaccttggttgtgcttgtggttgtgggtggccgcgtgagttcctcctccttcctcctctgtggcgcagcttcccattccatgaatggatgggagggagtccacagtggcgtcaggctccaacttctcctccttctatgtgcagcaccggggcattggcgtgccgggaggctccgggcacccggccgggctccacggcccgccgcccggtggatatcggcagcatcttgatgcagtctctgcggggtaccctttccagccccctcacattgggggttcccacattgggcagggttaccaccatgttgatgcctcagcccctgtcgcgcagcacggcagtggtggcggtggtggtggtatggacattggcatgggtgtcgaaatgagcgcggatgctaaaggggatcaggggagtggtgctggccaggatgagccggtgaagaagaagcgggggaggccgaggaagtataagcctgatggggcggtcacgctggggctctcgccgtcttcgtcgacgcctcactcgtcgacctcggcgatgggtacaatggtgaccacaccaggctcagggtttgggtcgggggcaggatcggggggttcggggtctggtgcccttacagagaagcgtggccgagggcggccacctgggtctggaaagatgcagcagttggcttctcttggaaaatggtttcttggtttctgttggaacaggttttactcctcatgtgattattatttcaccaggagaaggatgntgctgccaggataatgtccttctcacaacagggcccaagggcagtgtgcatcatctcagcgacaggagctgtatccacagcaacccttcatcaggattcaactt

SEQ ID NO: 92325 - DNA, 4575 bp, Oryza sativa
  Clone ID: PAT_MRT4530_90818C.1
atggatggggtcgatgatggccttatctgtagtacttcttgctataagatgtgtggccatgctgataaatcttcaataattgatggtgagattggttggccgagcatggaaataagcccttgcagcactccttatggcactcctctttttagccgagaaagttcttgttcaagctttgccagttgcttttcaagcctcgatgactacctagttgaaactgactctgaagaggaaattgaggtcttagatactggccaacttcatcccgggatcttattctctgatgaatcgatggagcaaagaaaagcggattctgtacaggtggaagaatatcaagtcagtcattctgctgttgttaacgatgattctagtatttccattccgacaaaccagaataattcatctggtcaactgcagttggagatacatcttgatgccaccaatgaaaaatctgttccatccaatgctattttggatgcaaatgtaacagatcctcatcaagaggtcatttccaatggtggacttatagaagcatgttatggtgtaccagtggatgatattgatctcaaacaatccaatatcttagatggtgaagagattactagccttcctatggccgacaatgaaatgactccactggatgatcaaattatggaccaaattgatgatatgaaggaaattagtagtatagtttacaacagtacaataagcgctgagcagcatgtgaattcgggttcagagtttgagaaaggaaatgaatccagtgataacctttacccgctagtaatgcccagttttgatacagaccctcacatttggttaccaccagacccagtcaataaggacgatgacactgatattgttgctaataatgatgataatagtgacaacaatgctgctgaagggctctctttgtctgatggagaagctgacaagaactggcttgatatcgttgcttcattatcatggcgtactgcattacttgtcaagcctgatgccaatgttggaaatgcaatggatccttgtatgtatgttaaggtgaaatgcatagcttcaggatctatcgagcaaagtgaagtcatcaacggtcttgtttttaagaagagcgctgctcataagcagatgcgtgccaacatgaagaatcctagactgttacttctgcagggtgttgttggtcattcttctgcagggctattgtcaatggattcaatgaaacaggaaaacgatcacttggagaaaattctcagtgatgtaattatcaaatgcaaacctgatgctatattggtggagaaagcagtctcacgaaataatgttcttgcaacacccaaccttattaaacagtgcgagtctctccattttgaaaagtttattgaggagcataatataactggaggaggaaagaggtcagccaaaactttgttatttctagaaggttttcgaaagcctttgggatgcacgattttactgaaaggatcaacaagtgaagaactgaagaaagttaagcgtgttcttcatttcactgtttttgcagcttatcatttgatccttgaaacttcattctttgctgatcaaaggttatttgcaacgggaaaaaatgccatggagaaaggcaactgtttgaaaactgatccgcagctgcttgttccttgtactgctgctccatcctccaaaatctgttctgatattgcacaaaatagtgaccccacacaacaggctttgaacagtcttgcttcggatggagagtatgttaatcaggatgattttgttgatccagagaaatccgtgtgcatgcacgattccaaaattgaaacatctagagagtatgcggacagaaaacttgatgacagcaacaacattcagtcatattcatcattgccagttcctgacccctcgagaaatcttattggcgatatatcattagattttgccaaattgacatcatgtgatgactttgctggttccacctctggagctccttcaaacaatggggttttgcagatgaatggggcggatggcaaagattgtctagaagctattagtgatggaatatctacagagactaggacttctttagattctcagaacatattgatttcgatgtctagccaacatatcagaaaccaagcaatctgtgagcagagtcatctttcccgcataacttactacgggtattttgatacatcacttggtcgttatttgcaagatagtttacttaatgagaaacacagctgcttatcttgtggtgaacccccagaagctcacatgtactcttacacccaccacaatggcactctaactgttcttgtgaaaagcctccccttggatgtaactctttctggtaaggatcaaggaagaatttggatgtggactaggtgtttgagatgcaatggtaagcccacccagagggttataatctcttcctctgcacgcaatctgtcatttgggaagttcttggaactcagtttctcaacacattctgctgctaagaagttatcaacatgtgggcgtttgctgcatagggactgcctacgcttctttggaatgggacccaaagttgctatgttcagatactcatctgttgaaatatattctgcctttaagccgccattgactttggagtttcataacccaaacaaaagagaatgcctggaagttgaatttaataatgtttatccgaagacatttgaccttcttgtaaaatctgggactagtgctcacgggatccttgggttgaactggctacaccagctacttcttcttggaatttacatttgggatgtccggttgcaacatattcttcaatactgtaaagctaacgctgcatcttcagacagtactatccacataaaaacaccagagaacaagccaaagaattatgaaataacttctgttcatggggatacactatgtcttaccaatgttggaatggaaaggcgggaagaacgtatcgatacttgtcattcttttgatagttcatttggcggtatgattttggagaatgagcagctaactgagaaatcagtaatccaagagcctgggtcacatgttagtccagatcatggtgaagatggtggatcacatgaagtcgacaaatatgcacatatctctgacagtttttgtttagaaaaatcaattgacttaccagttaagaatgaactaccagaactagtcagaggtaatgaaatgtatcctgttgccaagccaagcaagtgttttcatgtattcctgaacctattagatttcagtaatgatgccagaaaatggatctggggtaattttagtcacttggaaaaggagtacaagaaagagcttcagggtggctttttggacaagtttcatctcatcaacaaatacatccccaccttttcatcactggctcagcttaaatcccaaatggacatggtacagtttattgttggccctggtggtagtatcttgtccattgttgaggaagaggcatctagtatgattgcttatgcactattgatatctgagcaacaaggaatgtattcggaagctgcaattgtaaaggatgaagttattgctggtagaaaaattgataaagtaacaccaatcaactcgatcggagatactcctgtgccatctgcaattttatctccaaatgattctttagaacaagatcataacctatcaagaaatgtgtcctcgttatcatccgaggaatcaacatctgggttttatgattcttttctttctgccttaaaagatctgcatcctgaattttgtttgaataatgaaaagctaactttgaagagcaaatacactgttctgtgtatatatgcgaaacaattctacgatcttcggaagatttgttgcccatcagagattgcctatatttcatctataagccgttgtaaagaatggaatgcacaaggtggaaagagcaaggcttttttttcgaaatcaatggatgacagatttatcatcaaacaaattaagaagactgaatttgactcattcttgaagtttggccttgagtacttcaagcattttggtgtatctcaggcctcagttaaccctacatgctttgccaaaattctgggaatatatcaggttaaggaaatcaggaatggcaaggagacaaggaccaatttcatggttatggaaaattttttgtttggacgtaatataatacgaagatatgatctgaagggtgctcttttctcacgatatgttctcgactcaaaaaatcctgagaatgtgctgttggatcaaaatttcattgaagatatgcgtgctatgcctatctacattgaaggcaaaaccaagaacctcttggagcgtgctatttggaacgacacggcgtttctaagtcgcatgactgtcatggattactccttgtttgttggagtggacaaacagaagaaggaacttgtgtttggaattatagattatttgaggcaatacacctgggacaaacaattggagtcttgggtgaaaacatcactttttgttcccaagaacctatctccaactgtaatttccccgaaggagtacaagataagattcagggcatttatgtctcagtatttcctatcagttccagatgcttga

SEQ ID NO: 92326 - DNA, 1122 bp, Oryza sativa
  unsure (1)..(1122): unsure at all n locations
  Clone ID: PAT_MRT4530_90819C.1
accttgtgaaaactcattgcaccaatctatattgaaaccaagcacagctaacttcaagttaccataaagaatccgccctgcaggaaccggcgcgtggcggttcctgccccctgttccgttcctggctaatgccctgaccatgcaggcggtctctctgctgcttccttcaggttaacaggtcagcagcatacatgttttcacacccagatacagcgatgcaaatccacaaatgtccatgaaaggtgttgatgggagatctgcaagcaataaccagttttttcaccaaggtcaaaatggttcaattggatggtttgcaagaagtcctctggaagcccctgccatcaataattttcctaggcttgatcggtcacataattcaagtcttggtgcacttgctcctccgatgtctattcctcgcatagaccatccttcaggtgcttccccgataggttcctgtacggtagatccaaggagcagtgctgtcaataacgctacattccaaccgattccaagcttcaaaggttcttcaactgtgaaccaaagcattggaacttcgattcttaaggtgaagaagaatgaggacttagatggcaactgtccaggttttgcacttgatccgttttgtgcatcaaggccacagcatcaggtggcaatttcaagtgacgaggagcaaaccgagtgcttgatgtttgaacattcagcacggcatcgtgagaatcctcattttgcaaatgacaagggcccaaagaactttaacttgaatgaagcattatcggatggacaggaagattatcttgtagaacaagatgggggaagcgttagtagcttaccacagagtaaagccagtgggttcccgtggctcataaaaacaacagatacatgtactcgcccatcagatttgcaaaatccaaggaaggtttttgcccattcaaataggattgtaatcgatctgaacagcaatactgataggaaagaagcagctttgactattcatagcctgtcagattctgcttcaacatccctagactgtggggttaagaaggaatcccaggattgcgggattaaaaaggatgaggcgttcggggacattaccactaagactgangtggcatgtaatacgac

SEQ ID NO: 92327 - DNA, 1078 bp, Oryza sativa
  Clone ID: PAT_MRT4530_9081C.1
ccccgggctgcaggaattcggcacaacgagcttttgcagatcgagcgaaccttcaacacaaaccggccagcttgttcctctcctctctctctctctctctctctctctcggtcgcagccagctaacttcgagtgtgaagaacactcacgctagctagctttctcaaggccacatacgctagctccgcctccacgcgcggcgtacgtctagtttgattgaggctgaagagagtgcgtgtttggtagaagaggctagctgttgacgatgtcgagcagaaggtcgtcgcgtggctccatctcggaggaggaaatcaacgagctcatctccaagctccagtcgctgctccccaactcacgccgacgcggctccagccaggcgtcgacgacgaagctgctgaaggagacgtgcaactacatcaagagccttcaccgggaggtggatgacctcagcgaccggctgtccgacctcatggccaccatggatcacaacagccccggcgcggagatcatccgcagcatcctccgctcctgatcggcaagcagcagcagcaagcggcaccggccggccggccggcctatgtcgacgacgagataggcccgggccggccgggcaacgcccgcggcgccaattaatcaagcgtacgtcctgccggcgccattctccggccaccagagagcatttagctagggtatatatatctacatatataaaatatttatgtcgtatgtccctccccaaatgtacgagccacgcttacacgcgcgtgtatcgatctctcgatctctctctctaagctccactcgaagtagggcattagcactaggggcctaagcagaggcttatcctcgctttagctcatattttcatcgcttgatgtgtcctctctgaacccccacatcttgtcttgtttggtttttccctctcccttccaatctatgtaaatttagctggtgtggtttggatcgagttgtgtcctctacagacaaccgaccgaccactactacctagaggaaattaatatcatcatgggtgtactgctccagctttaacttcaattcagttggctacgtactacgag

SEQ ID NO: 92328 - DNA, 5350 bp, Oryza sativa
  unsure (1)..(5350): unsure at all n locations
  Clone ID: PAT_MRT4530_90820C.1
atggatggggtcgatgatggccttatctgtagtacttcttgctataatatgtgtggccatgctgacaaatcttcaataattgatggtgagattggttgtccaagcatggaaataagcccttgcaacactccttatggcactcctctttttagccgagaaagttcttgttcaagctttgccagttgcttttcaagcctcgatgactacctagttgaaactgactctgaagaggaaattgaggtcttagatactggccaacttcatcccggcatcttattctctgatgaatcgatggagcaaagaacagtgggttctgtacaagtggaagaatgtcaagtcagtcatgctgctgttgttgacgatgattctagtatttccattccgacaaaccagaacatttcatctggtcaacagcagttggagatacatcttgatgctaccaatgaaaattctgttccatccaatgttattatagatgcaaatgtaacggatcctcatcaagatgtcatttccaatggtggacttatagaagcatgttatggtgtaccattggatgatattgatctcaaacaatccaatatcttagatggtgaagagattactagccttcctatggctgacaatgaaatgactccactgaatgatcaaattatggaccaaattgatgatatgaaggaaattagtactatagtttacaacaatacaataagcgctgagcagcatgcaaattcaggttcagagtttgagaaaggaaatgaatccagtgaaaacctttatccgctagtaatgcccagttttgatacagaccctcacatttggttaccaccagacccagtcaataaggacgatgacactgatattgttgctaataacgatgataatagtgacaacaatgatagttgggtacagtcaagtttcaatattagctttgatgcaaagagaaacaagactagttgtgaagaccaattgcagaaagcaatgtcggaagttatgaatgggcaattcaagattcttgttagtcgttttttagctgctgaagggctctctttgtctgatggagaagctgacaagaactggcttgatatcgttgcttcactatcatggcatgctgcattacttgtcaagcctgatgccaatgttggaaatgcaatggatccttgtatgtatgttaaggtgaaatgcatagcttcaggatctattgagcaaagtgaagtcatcaacggccttgtttttaagaagagcgctgctcataagcagatgcgtgccaacatgaagaatcctagactgttacttctgcagggtgttgttggccattcttctgcagggctattgtcaatggattcaatgaaacaggaaaacgatcacttggagaaaattctcagtgatgtaattaccaaatgcaaacctgatgctatattggtggagaaagcagtctcacgaaataatgttcttgcaacacccaaccttattaaacagtgcgagtctctacattttgaaaagtttattgaggagcataatataactggaggaggaaagagatcagccaaaactttgttatttctagaaggttttcgaaagcctttgggatgcacgattttgctaaaaggatcaacaagtgaagaactgaagaaagttaagcgtgttcttcatttcactgtttttgcagcttatcatttgatccttgaaacttcattctttgctgatcaaaggttatttgcaacgggaaaaaatgccatggagaaaggcaactgtttgaaaactgatccacagctgcttgttccttgtactgctgctccgtcctccaaattctgttctgatattgcacaaaatagcgaccccacacaacatgctttgaacattcttgcttctgatggacagtatgttaatcaggatgattttgttaatccagagaaatccgtatgcatgcatgattccaaaattgaaacatctagagagcacgcggacagaaaacttgatgacagcaacaacattcagtcatattcatcattgccagttcctgacccctcgagaaatcttattggcgatatgtcgttagattttgccaaattggcatcatgtgatgactttgccggttccacctctggagctccttcaaacaatggggttctgcagacgtatggggcggatggcaaagattgtctagaaactattagtgatggaatatctacagggactaggacttctttagattctcagaacatattgatttcgatgtctagccaacatatcagaaaccaagcaatctgtgagcagagtcatctttcccgcataacttactacgggtattttgatacatcacttggtcgttatttgcaagatagtttacttaatgagaaacacaactgcttatcttgtggtgaacctccagaagctcacatgtactcttacactcaccacaatggcactctaactgttcttgtgaaaagccttcccttggatgtaactctttctggtaaggatcaaggaagaatttggatgtggactaggtgtttgagatgcaatggtaagcccacccagagggttataatctcttcctctgcgcgtaatctgtcatttgggaagttcttggaactcagtttctcaacacattctgctgctaagaagctatcaacatgtgggcatttgctgcatagggactgcctacgcttctttggaatgggacccaaagttgctatgttcagatactcatctgttgaaatatattctgcctttaagccaccattgactttggagtttcataacccaaacaaaaaagaatgccgggaagttgaatttaataatgtacttcgaaaatggaggctactcttatctgaagccgaaaataaaatacaaatcttgaaatcaggaggctctggtcaagccttgggggaaaacaccaaagtttcagtacatgaggaattatttttggaagtcaataggatacttgcacaagaaaaatatgaatttggggtttatccgaagacatttgacttccttgtaaaatctgggacttgtgctcacgagatccttgggttgaactggctacaccagctacttcttcttggaatttacatttgggatgtccggttgcaacatattcttcaatactgtaaagctaacgctgcatctccagatagtactatccagataaaaacaccagagaacaagccaaagaattctgaaataacttctgttcatggggacacactatctcttaccaacgttggaatggaaaggcaggaagcacgtatcgatacttgtcattcttttgatagttcatttggcggtatgattttggagaatgagcagctaactgagaaatcagtaatccaagagcctgggtcacatgttagtccagatcatcgtgaagatggtggatcatatgaagtcgacaaatatgcacatatctctgacagtttttgtttagaaaagttaattgacttaccagttaagaataatgaattgccagaactagccagaggtaatgaaatgtatcctgttgccaagccaagcaagtgttttgatatattccttaacctatttgatttcttaagtaatgatgccagaaaatgggtctggggtagttttagtcacctggaaaaggagtacaagaaagagcttcagggtggttctttggacaagtttcatctcatcaacaaatacatccccaccttttcatcactggttcagcttaaatcccaaatggacatggtacagtttattgttggccctggtggtagtatcttgtccattgttgaggaagaggcatctagtatgattgcttatgcactattgatatctgagcaacaaggaatatattcggaagctgcaattgtaaaggatgaagttattgctggtagaaaaattgataaagtaacaccaatcaactcgatcggagatactcctgtgccatctgcaattttatctccaaatgattctttagaacaagatcataacctatcaagaaatgtgtcatcgttatcatccgaggaatcaacatctggattttatgattcttttctatctgccttaaaagatctgcatcctgaattttgtttgaataatgaaaagctaactttgaagagcaaatacactgttctgtgtatatatgcaaaacaattctacgatcttcggaagatttgttgtccatcagagattgcctatatttcatctataagccgttgtaaagaatggaatgcacaaggtggaaagagcaaggcttttttttcgaaatcaatggatgacagatttatcatcaaacaaattaagaagactgaatttgactcattcttgaagtttggccttgagtacttcaagcattttggtgtatctcaggcctcagttaaccccacttgccttgccaaaattctgggaatatatcaggttaaggaaatcaggaatggcaaggaggcaaggaccaatttcatggttatggaaaatcttttgtttggacgtaatataatacggagatatgatctgaagggtgctcttttctcacgatatgttcttgactcaaaaaatcctgagaatgtgctattggatcaaaatttcattgaagatatgcgtgctatgcctatctacattgaaggcaaaaccaaaaacctcttggagcgtgctatttggaatgacacggcgtttctaagtcgcatgaatgtcatggattactccttgtttgttggagtggacaaacagaagaaggaacttgtgtttggaattatagattatttgaggcaatacacctgggacaaacaattggagtcttgggtgaagacatcactttttgttcccaagaacctatctccgactgtctcctccccaaagaccaccacgggacttgagctgccttctggtggtcatgtaagctgtcgatactgcacaccaagtggtaagctgtctagcgcttctgtattcattgagatggagatgtcgtatatggtgaatccacaaactgggtatcatattcaaactgagtttgaacttagtttatcaaagatcattctgattttcagaataacaaaggaatgccgtagtctctttaaccactgcgatgtggttacatcaactaacaagaatctaacaggtcctagaggtggtacaatatttttcaggagaggaaaaaattaagcggtgactggacctacatataaccaacatgttccttttttgatgagcattaaggtggagttcaccttttggacaactagcttnggagtgttatagagaatatggcattcatgtattcatttgtgttattaggagtaggtttctggaatcaaatacatatctaaatatgtgtcaattatagcttgttggttaagcatccatagtggtatgaaaaaaaaaaaaaaaa

SEQ ID NO: 92329 - DNA, 346 bp, Oryza sativa
  unsure (1)..(346): unsure at all n locations
  Clone ID: PAT_MRT4530_90821C.1
gttggggggttttttttttattttttttttttttttttcagaagaacattgaagttcatcatttattcaccatttgtttatatgcttcctggcaaatgaaagccctagttttttagcacccccccatagtcttacacacacctacctttggtttccgtntngccagttctctgggtccttagataacctancctgtttcggacaccacctgtcccattggggatgtccactttgcagaacgccggttgggttgccgccgcgcgcttcaatttcttttttcgtcagctggtgaacaccttttccctgtggtgcctaactttggtggtgcggggcttccttttgatgc

SEQ ID NO: 92330 - DNA, 678 bp, Oryza sativa
  Clone ID: PAT_MRT4530_90822C.1
atgcggcaggtgttacaggagcagacaacgtcaacaagcatcataccatccggcctcgtccatggatcgatctgcatcggctacttcacaagaagcaagggcctgatgctgttcgtcgccaacatgtgcacacgcctgtgctgcacacctgcatcaagacaccggccgatcatctgtgacgtcttcgcggagtccaagtcaagccgccgagctctccaggacgatcgtcttcgccgattctacatcatcagtgggaggaaggggatggtgccggcaggaagcgcgcggaggggatccgcaccggtgcccgcttgtggacgcaggggtggcggcggcgggaagcgtgtggaggcgatccaggccggcgcacgctacgccgagcctcttcgacggcggtggcagcgccggcgcgtggtgaagctgcgcgcacagtcgggtgaggcggcgtcggcgtcggagaaggcatgtggaaagagggaaaagacggcggtggcgataggcatgcggaaggagggaggaggccgcggcgccagcaggaagaggaggcaccgccggcatgcacgaaggaaggaaggcggcaagcccgccgatggagctgtgacggctagatccggggagggaggggcgacgacagggcggttttccacagctgctggccggtgccggctcaccctctag

SEQ ID NO: 92331 - DNA, 1485 bp, Oryza sativa
  Clone ID: PAT_MRT4530_90823C.1
atgaggatgaagggcgtcggttccgtcatggtcggcgtcgtcttcctcgcgttgctcatcctcgtacacagatgggtcggcctcgacgcttcgtttctacgtgacagcagcatggtgaggaccagcacgcgacaatggcatccccaccacaacatctccacgccgccgctgatgacactgccgcccttctcctgcggcaacggcacggcggcgccggcgacgtgccccgcgacgccgccatcgccgccgccgacgtcgaagcccgccaccggcggcgagccagcggcgtcgtgcccggactacttccggtacatccacgacgacctccggccgtggcgcggcgccgggatcacgcgcgaggcggtggagcgcggccggcgccacgcctacttccggctggtggtggtgtccggccgcgcctacgtggagacgtaccggcgctcgtaccagacgcgcgacgcgttcacacagtggggcgtcgcgcagctgctgcgccgctacgccggccgcgtccccgacgtggacatcatgttcgcctgcgacgaccggggccgggtgcgcgccgccgacttcgccgcggcgccggcggacgcgccgccggtgttccggtactgcagggacgcgacgacgctggacgtcgtgttcccggactggtcgttctgggggtggccggaggtgaacatcggcgcgtggccggcgacgctggaggcggtgcgccgcgagagcgcgcgcgtgcggtggccggagcgcgagccgttcgcgttctggaagggcaaccccggcgtcgcgcgcatccgcggcgagctcatgaagtgcaacccggcgtccgatggcaaagactggaacgctcgtctctttagccaggattggaatcatgccatacataacggcttcaaagattctagcataccgaagcaatgcttacacaggtacaagatatacatagagggggaagcatggtcggtgagcgagaagtacatcatggcatgcgactcgccggtgctgttcgtcaacaccccgtaccaggacatcctctcccggggactcgtcgccggcgagcactactggccgatcaaccggacccggatgtgcgagtccatcagggccgccgtcgactggggcaacgcccacccggcggcggcgcgccgcatcggcgagcaggggagccggttcgtgcgggagcagatggccatggactacgtctacgactacatgttccacctcattaccgagtacgccaagctgctccggtacaagcctaccgtgccggcgaacgcagttgagatctgtgccgagagcatggcgtgcgccgccgcggcggggagggagagggagtgcatggatgagtccgtggaggggttcgtcgccgggtttgatccgtgctcgctgccgccgccgttcacggaggaggagaagagggagatcgccgctaaggaggaggaggtgctgaggaaggtggcgaagttggaggaggagaacatgtag

SEQ ID NO: 92332 - DNA, 579 bp, Oryza sativa
  Clone ID: PAT_MRT4530_90824C.1
tggtgttacgttagtgactgggggattttggggaaggcctatgtggggtaccttttgggtgtgggatgctcgtgttgaactgtctgtattcatcttgtcttgtttatttaccctcgggtgcacttgtcgttttgcaaaagctgttctggtgcgaactggcttctgattgttaatcctgtgttgggactgatcgatataccacataataaagtgtgtgtcagtcaactggtggaatacattgcatcaacctgggaagtattgagccgatgttgggtacatgccatacatggtttgctatgctgcatgtctgaattttggtgctaacctttgcgctgaacttgtcctgttgtgctgtgtacctgtgatgtttgtctgcgtgtctcggaaacacgtgcttgcttgatgtctatgctttgtgctgcgaatgcttgccttgaacggaagaaatagaagctcgagaaggcaataccactcaaaaacctagtttgctctcaaatcaaaaacctagttcactcgctaaagcatccatggctgaatggtgaaagcgccccccacctagaaaggaaaaaaaaaaaaaaa

SEQ ID NO: 92333 - DNA, 522 bp, Oryza sativa
  Clone ID: PAT_MRT4530_90825C.1
gggctgctggtttttttgtctcgcaaaagtctccaattttgtgtgtattttctgaatatacgtcagcaccgccacgtacggtctacacaagtacacatcagcgcgcgcgaaggtaaaatttctagcccccctctcaatcattttaatcctttaccaagacattggcacaagggggtgaccaaactaatcctctcaaaagaaacaccaaagcaattgttggtggatttccaacacaaccatgaatgcacagtgtatgatgttgttgcttgtaagggagctatccagaccaatttcgatcacatctactgcttttttgttttgcatcatactctattttgtacaccgcctgaattcttgtaccgactcaggaatgcagagttgaagcctcacatcaaattgatttggcgtcatgctcagcactagaacccactagagctcttgaaaagagtccccagtccttttaggccaaactcaactgttgcaataacacgcacttgagcaaaatgaacttagatacgtaaa

SEQ ID NO: 92334 - DNA, 207 bp, Oryza sativa
  Clone ID: PAT_MRT4530_90826C.1
atggtggtgaacaacttcacgggccccgggattgggctggggttcggcatcgggtgcgggttcggcgtcggatgggggttcggagcatcatttgatgtgggagagctcgccgtctctgcgtcgccgctcctgagccagtacagctgcctgaatgaagccgcgctgctggggacatcctccatgacccactcaaagcccttgggatag

SEQ ID NO: 92335 - DNA, 716 bp, Oryza sativa
  Clone ID: PAT_MRT4530_90827C.1
cccacgcgtccgctctttccttagttcgtcttgatctgcccatctctttcgttctctcggctctgtttccttctctcatctttctctccaatttcgttgtgggcgcacgcagagggaggagtgcagatgatgggggatggcagatccctagaccccccccccccccccccaatctggtcgggctccccttcaagcaattgaggcaattctgccgcaagtagggtggggctggtgctgtcaacagcgcaacagcggttagattcagctgctgcgggagtcgtggcctggaaaacggagaggaaccgccagatcgtagggccacaccgctacaccgccagatcctggagagtttggccaccggctggaatcaattggttgatgccgaagctgtcaagatgggtgatgtatgtgttttccgtttcaatgactctgatgatgagcttactcttgaagtacatgttcttagttagtgtgatggatgaacatcaccattttgcctggcactgtgtaccgccactcctaagttagtatatatgatgtaatcgtgaagactatatgacgatgtgcttagtcttaatgttcctgcacttatgtactgtgatggatgaacatcactattttatcaagcaatatgtactgccttcctatgatgtaattaagttagtggatgaactatctacacatctgtttaatcgtaaatggatgaaaaaaagttt

SEQ ID NO: 92336 - DNA, 227 bp, Oryza sativa
  unsure (1)..(227): unsure at all n locations
  Clone ID: PAT_MRT4530_90828C.1
gcgcggaagctcccggtcgtcaggctaggcggcggtggtggcggtggcggtggtggtgggcgacggcggcgcgggttcctgcggcggctgcggctgaggtggctggcggcgaggtggctccggcgcgccgtgcgaaggcttggcggcgatctacgtggcggcgtcgcgggccgccgccgccgtcgtcgcgtcgcgtcgtgccggcctngatcggcgcgagccctctt

SEQ ID NO: 92337 - DNA, 264 bp, Oryza sativa
  unsure (1)..(264): unsure at all n locations
  Clone ID: PAT_MRT4530_90829C.1
tttgggcttttaacccccttgggtttaaactttttttttttttttttttttttttttttttcttttttttttttaaacccaaaccccctttaaaatccccccattagaatatgcctccatatccttaaatcccantttcacaaataaaccccttaacaattccccnncaaatcccccctatccaatttttaatttcccacaattacccccccccctttcttttttccctcttaaaaacctttnttcttaaataaatccnttaat

SEQ ID NO: 92338 - DNA, 468 bp, Oryza sativa
  Clone ID: PAT_MRT4530_9082C.1
atgggccgtcaaagacggggattcgagctaataacatggctagaggaagattcaagcaaggagcacgttgggatgccaccgccatcgctctgctgcgccgagaagaagatcctcgagggcgtcgttgcgccgttgccagccgtcgtcggcgcctcgccaaccgtcgtctccgaggtggtcgttggctggcgtcgccatcgtcatcgccagatccgtcgccagccgaggttgccgtccactaccgtcgtctccgaggtcagcccaagcagtggcggcggcggatggcgagcggcgaatggggatggggcggcggtggcggatggcgagcagctgatggggatggggtggcagcagtggcggtggcggatggcgagcggcggatggggatggggtggcggcgctggcggatggggatggggatggggcggcggcggcggagaggaccagctctcacctactgcgagctga

SEQ ID NO: 92339 - DNA, 604 bp, Oryza sativa
  unsure (1)..(604): unsure at all n locations
  Clone ID: PAT_MRT4530_90830C.1
gaaacaaacgagacccgatgaagtgaaggttttgctagccttctcatctcatggacgctgcttgcttatgtttgtcggctgcctcctttccccaaccgccgcattgacgaccgctgctgctaactgcttcactgtcgccgccgccgcctctccactgccgcctccgcgccatgccctccccggatccctcgcactcctcgccggtcgccgagttcccgcgcaccggcttcgccttctacttccgccgacggggatgccctggccgccgcgccccacctgttcgacgcaatgcccgaccggaccccgtccacctggtacaccgccgtgtctggctgcgtccgctgcggtcacgacgccacagccgtggagcttcctcgcggcatgccagaacgaacgaccgtcggacgtatcttttcaggtaaccttcctggctcgaagagcatcctcctttgcttctaacattatcaacactgtcaatgtacagcacgcctcgttcaggtgctattttgccatacatcccaatgtgcctaatcaaacaactggaaatgcaaagaaactaactggttgatacaaagaatactgaaaggaggagaattanaactcc

SEQ ID NO: 92340 - DNA, 352 bp, Oryza sativa
  Clone ID: PAT_MRT4530_90831C.1
tcgctgccgcacgctgccgaccaccggcagcttccacatccgtgcggtggcgtccccggtcgccttggcctcatcaacggcaccagtgacagggcggcaacttagcagcagggacgaacaccggcgtggatctggattccacgctatcttcccaatctctcactccggagcggcagtaggccacgggtggagcggcggccacggcgaaggttgcggtggcggcaggccgcgggctgtagttttctcttcagtggtggttggtctagaagggaacgcccagatccgtaggataagcatgttggtgcggaaaacggtggagaagctcctcggcatcgacggcgagatgcagtag

SEQ ID NO: 92341 - DNA, 493 bp, Oryza sativa
  unsure (1)..(493): unsure at all n locations
  Clone ID: PAT_MRT4530_90832C.1
gttnaagncnccaatgantnnanagnccaaggntaaaaaanntncccccncagtaaagggagcaaaaagattggngctcccaccgnggtgncggccgctnnaaaannagtggttccnnccgggntgcaggaattnggcacgagggggaagcccagcttcttgttctcccaccaagctttcatccnccttccttctcctttggctaattgttaccgaaagacgctgtttgacttttacgcacctcacacttatcgcaacctcacacgggaaaccggttggcctcggtttcttttcacgctccttatgatgatgatttacactggttttctttccttatccgccggggtgctggggatatatttcttttgttacaaggtgcaaaatgggggaaactgcgcagttggatttcttatcatggggagctagttaggtccctttcttacagaaatacaaagaacccgtttaacgaaaaaaaaaaaaaaaaaaaaaaaaa

SEQ ID NO: 92342 - DNA, 209 bp, Oryza sativa
  Clone ID: PAT_MRT4530_90833C.1
gacctagttggtcctgtgaacttctccctgttctgcaacaatggcctcactcagtaatgccctgctgctgctcttcacggccttgtgcttgctagcccggcgagccgtcgccgactacaggtcctggaatagcgcccacgccacgttatacggaggcgggagatgcgtccggcacgatggccggggcgtgcggctaagggaacctgtac

SEQ ID NO: 92343 - DNA, 564 bp, Oryza sativa
  unsure (1)..(564): unsure at all n locations
  Clone ID: PAT_MRT4530_90834C.1
cagggtttgcccgactgggaaacgcgggcccaagtggagcccaaacgcacaattaaagtgtgaagttagctcacctcaatgtagccaaccccaggctttaacaccgtttatgccttccggcgtcgttatgtttgtggtggaatgtgntgagccggaataacaagtgtgtcaacacaccaaggaaaacaagctatgcacccaatgagttacgcccaaagccgtcttaagtacgacgtcaacctatagggaaagcntggtacngcctccaaggntaccggtccggaattccacgggtcgacaccaacgcgtccgggtaaagtagtaagtgaaagtatgtagttcccgttgcttccaataaagctttcaagattgtggagtgagctttgctntgccttcttccaagcttgacagtnccagtgtgtgtgtaaagtggtagagtgtgctggaattaatcaaagaaccagatttatatacantcacacaccctntttttttatcctgttgctcatttaaaaaaatngngaagtttgtccngtctatncaattaaaaaaaaaaaaaaaaaa

SEQ ID NO: 92344 - DNA, 353 bp, Oryza sativa
  Clone ID: PAT_MRT4530_90835C.1
gttcgtcgggagagagaccagtgccggggggctagggttcggccgttcagagaggcggcggctgaggaggaggaggaggaggaggagggggtgaggagagatgtcaactccttccaataatctgcttattcagaactttatgcgctttctttatgacctcttcgtcgttatcagcgtctctccattctacatcaacattttcctttttaacgccgtcttattctgaccgctttacacgcctaatgatggatgcacttttaatcttacactacaatttacagaatattatcccaacatatcaccttttgtttcattttgactcattgttgttttactctaatttttattcattt

SEQ ID NO: 92345 - DNA, 5013 bp, Oryza sativa
  Clone ID: PAT_MRT4530_90836C.1
atgggagtgctgcctcagctaccgcctctccgtcgcccacccttcccccgatccctccaagtccctggcgcgcgactcgtggcaccgcttctcctccaagaagcggtcgcacggctgggcgacttcgcgccgtccgccgccgccgcctacctcttcccgccgcacgactccctcgtcatcgccgccgacatatcggtgctcgccgaggccgcctcgttcgccgaggccgacagccgcttcacctggaaggtgctcaacttcggcaccttccgggagatggtccgcacgcagaagatcatgagccctgccttcttcccggcggccaatgccggtgggagcgactgcgggctccggattagtgtctatcagagtaatgtatctggcgcggaccatttgtcggtgtgtctggagagcaaggagcccctggtgcaggcaacatcagggtcctcggcatcagcattgccgtcgagtgccgggggcagcggcgtgcccgatggtgaccgtgggtgctggtgtctttttcgtgtttcgatcctcaatcagaagccaggtgggagtcacatccacaaagactcgtatggccggtttggggctgacaatgccagccttgggtggggagattacataaaaatggatgattttttggctgcggatgggggttacctgcttgatggtgctgtggtgtttagtgcttcagtgcatgtgatcaaggagtcaaactcgttcactcgcagcttaccgatgatagcaggcatgagtggtgctggcagtggacgagctggggctagaaagtcggatggacactttggaaagtttgtgtggaggattgagaacttcacaagattgaaggagctgctcaagaagcgaaagatcacgggtctgtgcatcaaaagcagaaagtttcaggtcgggaatcgagactgccgccttattgtgtatccacgggggcagtctcaaccgccatgcaacctgtcagtgtttttagaagtgacagatccccggaatagcagtgaatggagctgctttgtgagccatagattgtctgtcatcaatcagaaattagaggagaggacaatagtgaaagaatctcagaaccgttactctaagtcagcaaaggattggggatggcgtgaatttgtgacattaactgtcctattcgatcaggatgccggttttcttgtacaggacactgttgtttttgctgcagaggttctcattctgaaggaaactgctactattcaagagcttagtgacgaagattctgaagcatgcagttcaggttctggatgtcagattgattctttgccaaaacgtccatcattcacgtggaaggtggaaaatttcttatccttcaaggatattatggagacaagaaagatttttagtaaatatttccaggctggtggttgtgagttgcgtataggtgtatatgagtcgtttgatacgatctgcatatacctggaaagtgaccagccatctgggtttgatcctgataagaacttttgggtacactataagatggctataattaaccagaagaattctgcaaaaacggtgtgtaaggaatcatcaatctgcacaaaaacatggaacaattcagttcttcagttcatgaaggtctcagacctgttggacactgatgctggttttcttgtccgggacactgttgtttttgtttgtgaaatcatagactgctgtccatggtttgatttctctgatcttgaggttttggcgtcagatgacgaccaggatgatttgtcaacagatcctgatgactttattgagtctgaagacagcgaggatatgagtggtgatgaggaagatatgttccgaaacctcctctcgagagctgggttttctcttacatatggtgaaaactatactcagccgcaggttactttaagagagaaaattctaacagatgctagagcaattgcactagcatctgttagatttcttactggtctgcgtgtttacctcgataacccagcaaaagtaaagcgcatgctacttcctaccaaagtatccaccagggctggtggaaagaaagatgtttcaaagtgcgactcgagttccacaagcctcatcagtttgctgatgggagttagtgtcttgaagcaggctatcatagacttgcttcttgatataatggttgagtgctgccaaccttcagaagaaagaccagcatatgtctcatcctcagcaagttccaaaacttctcctgactcgaatggggctagctctccaccagagctcaatgttgaaggtgaactgacagaatgtgctttcagtaataagtatgaaaggctgaaacctggcaatgatgatatccatcataggctttctgtacaaaacacagataagtgtacaaatgatattcctgccagagttttagaacagtcctgttctccccctgaagtatctggtgctgatttgctagaagatgaaggctctgaccaggcttccaggacaaaatggccagagcaatcagaggagctgttaggactaatagttagttcattgagggcactggacagtgctgtcccacatgggtgccctgaaccaagaagacgacctcagtctgtccagaaaattgcacttgtactagagaaatctccaaagaagcttcagccagatttggttgcccttgtcccaaagttggttgatagttcagaacactctcttgccgcttgtgcactgttagatcatcttcaaaagccagatactgagccttcgttgaggttaccggtttttaatgctctatctgagctagaatttgattgtgatatctggaaacaagcatcttttcatgcactcgaattgttggctgattcaaatgatgagccacttgtagaggccattacatatgttctcaaggcagcatcacaatgccagcatattgctcaagctgctagagctgtccgatggagactaaaagatctgggtactgaagttcccctgtgtgtgcttgatttcttgtctaaaacagtgcatagctggtcagatgtagctgatgctttgttgaaggatattgattctgactgtgagcctgatagcagttgcctctctatgtcctgtagtactagtagtacagacgagttttcagctgaagggatgcattctttgcaaggtcaagctgtacatggaaaagatcatctatcagatgtttttatactgatagaaatgctgtcgatacccagattatttgttgaagtttctcaggttttgcagagggctttattgcgaggagcctttgggctgcaattagtagccatggtgttggaaagaaggcattctcacaggttaagtcttaagtctgggactgggactatggtgaatgattcacagaacaagcaagttctgttagacgggcagtttgaacatttgcctgtccaagaagatgatttcacttcagtccttgcacttggtgaggtattatctctatctacagaaaccagggtgcaagattttgtgcggatgctttatgctatcatttttaagatatataccgaggatcattatagatatagaattctgaagggtcttgttgaacgagcaacaaatacttcagatagctgccgagcagttgacatagatatggatgtcttggtatttcttgttaaggaggaatttggaattgctagacctgttttgaacatgttgcgtgaggttgctgaagttgctcaagctgatcgtgcaaatctttggcaccaaatatgtgctactgaagatgagaatatgcgtttgcgagaagacatggatatggaacaaacaaaattcactaaggaaaaagatgtgttaatgcaacaactaactgagtcagaggcagctaatgcgcatctaaggtctgagctaaaagctgagaaggatcgttttgtccgggagaagaaggaactttctgagcagatgctggagatggagaatcagttggaatgggtacgatcagaaaaagatgagcaaattgtaaagctaactgctgataagaaaaatcttcatgatcgtctacatgaagcagagacacaactatcccagttcaaagcatggaaacgcgaggaactaaagaaaataaccaaggagaagaatgctttggcagagaggcttaagggtgttgaagcttcaaggaaaagggttgatgatgaattcaaacggtttgttgctgaagcacagactcgtgaagagattcggaaatcacttgaaggtgaacaatatattcacaccctggagacctcaattcaggaagagatggcacggcatgctcccgtgtatggtgtcggcgtggaagctttatcactggatgagcttgagacactcacaaacatccacgagcggggtttaagacagatacatgcaattcggcaaaggaaaggtagcagtcatcgcttgagtgccccttcgctcccgcacgtcccaggtttatactcctcgcctccttcaatggcagttggtctgccgtcctcgctgatccccacatcgtccgtagcacctaatggtgcaggcatccatggaaatggccacatgaatggttccatgggtagctggttcaatccaacctaattcagagaatgcagcaccgcaacaccggtgtccattttgtgcatcaattcgacgtatcacattttgcctgcccgtatttaccagctgctgagcaatccaacgtgataccctttttgtcctcgccattcggttttggcttttcttgcttgtattttgaactggtagcgccgtcggcttgatagatcaaagagcgttaagggggtttccgcatggaataaattgtaataatcaagataatccgatggaactaccaggtattcaggtgcaagtgggaaagctgtcgaaatggttgatatcaccaattgcttggttatttctaaaagcattgggattttttttgttcaaacttctggaaaggtgcaacatgagaaaagtattccagtttccataggcatgtctgcctgttcttttaaaaaaaaaaaaaaaaaaggacggccgccaacaaggagccaagccaga

SEQ ID NO: 92346 - DNA, 463 bp, Oryza sativa
  Clone ID: PAT_MRT4530_90837C.1
ctttccgcaactatcgacggcggcgaagtacgggacgatgatgatggtggaggtgcggtctcacccatatattggtatgatagcggaacaactcattgctgagtttgaggtatcatctgacgaacatgcatattggaattggcaatcaaagccagccattatcaaacttatgaagctatctctgcccatagaggttctctccaagaagaatcttgaacatgaataccttgaccatggagttctcactcttctaaaaaactggtttgagccattacctgatggaagcatgccaaacatgaatactcgatctgctgcacgtgaaatcattagctgattttccaattgacttggaacaatatgaccgaagagagctccttaagaaaagtggcctgggaaaggtcattttttttttgtccacatctgatgaggagaccactgcctaataggaaattggcttaagagc

SEQ ID NO: 92347 - DNA, 1907 bp, Oryza sativa
  Clone ID: PAT_MRT4530_90838C.1
cggcacaacaacgtacgtaacctcctctctctctctctctctctctccccttccagccgcgcgcgcgcacgcacgccgccgtcgtgacgtcgccgtcgcggtcgccgccatggatccgacgccgcagtcgcacccgatcctggcgtacgtgctgtcgcggctcccgtcgctgctgccggtgtcgccgtcgctgtccaccccgcgcgcgcgggacatcgagcagccgtccccgcgggcgccgtcgggcgccgcggagttcgacctcgtcagccgcatgccggggctccgccacccgtccgtcctctccgccatgacgcgcgccgtcgccgacgtctcctcggcgcgcgacgcgctccgcctcctcggcccccgccccgaccacgagctcgtcgactccgcccgcgccttcctccgctcccacgccgccgaagaggccgaagaggaggaggaggacgagaaggtggcgaagagccgggaggtggtgcggctggacgaggcgcacgagtcgtacggtggcttgctgcgggaggggcaggagaggctggatcgcgtgtaccggacggcgatgagagggagggacatgcaggtggtggccgcggcgcacggcggtggcggggaggaggaggccggggtggtggacgacgaggtggtgcgggtgctccgggacgcggaggaagggaaggcggtggagcgcctcctcctcgccgaccggcagctccgccacctgcccgagcagctcggccggatccgcggcctcctcgtcctcgacgtctcgcgaaatcagctcaagaatgtcccagatgccataggcgggctcgaacacctggaagagcttcgcctcgcttccaacgcgttggtctccctcccggactccataggcctcctcaccagcctcaagatcctcgacgtctcgggcaacaagctgaggtctctccccgacagcatctcaaaatgcaggtcgctggtggagctggacgtgagctacaacgtgctgtcgtacctcccgacggggatcgggcaggagatggcgaggctggagaagctgtgggtgcacctgaacaagctgcggtcgctgccgtcgtcggtgtgcgagatgcggtcgctgcgcctcctggacgcgcacttcaaccagctccgggggctccccgcggggatcgggaggctggcggcgctggagtcgctcaacctcagcagcaacttcagcgacatgcgcgacctcccggcgtcgttcggggacctgctcggcctgcgcgagctcgacctcagcaacaaccagatacacgcgctcccggactgcttcggccgcctccagcgcctcgagcggctccgcctcgaccagaacccgctcgccgtgccccccaaggaggtggtggccggcggcgtcggcgccgtcaaggagtacatggccaggcggtggcgcgacgcccgcgccgaggaggagcgccggggcagcgccgtcgccgagagccccagggtgtcgacgcccaaggagtggctggtgcgcagcgtctcgtcgctgggcagctgggtgtccgacgtcacgaggtacggcgccggccaggacaaggcagcggcggaggaggaggaggacgcctacctccagcagaatctgtgatcggagattacagcatttgcttgctccggtgctttcatccgtatgtacagaagaactactgcagaccgtcgccgcgtcgttcgtttcgcatcagccgtgtgtttgtgtgtgtttaccttcgctgattccttaccatttaccatttttgttgttgttgttttaaccgttttgctgtttaaaacttttaaacccaggttactggaccacagtgcctgtgtgtttgttatatttaccttgctgattcctaacatttttttggaggttttcgtttaaccaaaaaaaaaaaaaaaaa

SEQ ID NO: 92348 - DNA, 449 bp, Oryza sativa
  Clone ID: PAT_MRT4530_90839C.1
cttacagatctcctgactgcctgccctcggccgtcggggtccggatgagcggtattacttcactcataggcggaaatggctgttagtacaccagactcaagcgatctcgcaccgactgaacatgcgagcaaactgcctccaacctgccaaaataccgactaaggccccactatttgcgctaccccatacgtgtaccctcccacctgaacggaacgctccctaaaagatgctcgcctaaggtagagtaggtggacgacaccccaccaggactctaaagatcccaatggacctccccctgaaagctccctccctctctctactctaccaaccctgccactcaccgtatacatgctctcctttctcccttatggaaccggggaactatgatatatctcaccctgaagaacatgtcagcctctgccgtctgtaccatcaggtacccttctcgt

SEQ ID NO: 92349 - DNA, 2652 bp, Oryza sativa
  Clone ID: PAT_MRT4530_9083C.1
attcgcatatggagcatgaaatcagtggccaaagacaatgacagtgatgattccagccaaaggttgctggctacaattcgagaccattttggaacagtaaactgtgtgagatgggcccatcatggccgctatcttgcttcaggatcggacgatcaagttatccaaattcatgaaagaaaagctggcactggaacatctgaatttggaagtggagaacctccagatgtagaaaactggaaggttgttatgaccttaagagggcatactgccgatgtggttgaccttaattggtcccctgatgactcgacattggctagcggcagtttggataatactgttcacatatggagcatggccaatggcatatgcactgctgtcttgcgagggcattccagtttagttaaaggcgttacatgggatcctatcggttctttcatcgcaagccaatcagatgacaagactgttatcatatggcgtacgagtgactggagtcttgctcacaggacagaaggccattggtcaaaatcgcttggttcgacattttttaggcgacttgcttggtctccctgtggccacttcataaccacaactcatggttttcagaaacctaggcactcagcccctgtgcttgaacggggtgaatggtcagcaacctttgattttctggggcataacgcacctgttgtagtggttaagtttaaccactcaatgttccgtaagcatttatcttctggccaagacgcaaaggctgcaccagctggatgggccaatggagcatcaaaagcatcatctaaagaacatcaaccatataatgttattgctattgggagtcaggaccgaactattactgtctggacgacagcgagtgcccggccattgtttgttgccaagcatttcttcactcaaagtgtggttgatttatcttggagtcctgatggctattcactttttgcctgctctttggatggttcagttgctacctttcactttgaagcaaaggagcttggatacaggttaagggatgctgaactggatgaattgaagaagaatagatatggcgatgttagagggaggcaatcaaatatagctgaaagccctgctcagttactgctagaagaagcatcggccaaacaatctgcaagcaaaagtccagtgaaacaaagagaataccggcgtcctgatggccggaaaaggattattccagaggcagttggatttccttccaaccaggacatgtccaaccgttctcagaatcaaggtgtggatttttcatccctggatcagcgaatgatccttggagagaatggaacaagaccatcttatagtgctagcggtaactgtaataattgtggagttaggggacgctctggcattactgcaagaactaacattagtgagagtcttgtaatccaaaaagcttcagctggtgctggcagtgatggaaggttgagcatagaacagtctggatctgtagttccaggctcattggcctcttgctcttcactttctatccatgtattcaataagaaagacaatgaggattctttaccggtccgccttgaagcaaagcctgtagaacgttctgcaggagacatgattgggcttggtggtgctttttcaacaaaagaaactgagattacatgtacaagaggaacagaaactctttggtcagatcgcatctctgccaaggtgactgtcttggctggtaatgcgaatttctgggcagttggctgtgaagatggttgcctgcaggtttacacaaaatgtggaaggcgagcaatgccagcgatgatgatgggatcagcagctgtttttatagactgtgatgagtgttggaaattgcttcttgtaacaaggaggggtttgatgtacatatgggacctctataccaggacttgcgttttgcatgattctttggcttctttggtaacatctccagatgaggcagctggaaaagataccggtacagtaaaggttatatctgctaaattttcaagatgtggctcgcccttagttgtgcttgccagtcgccatgcttttctttatgacaccagcctgaaatgctggctaaggatagctgatgattgctttccagcatcaaattttgctagctcatttagttctactcaaggtggagagctaggcaagttgcagatcgatataggaaaattcatggctagaaagcctatttggagcagggttaccgatgatggggtgcagacacgctcccatttagagacccagctggcagcttcattggctttgaagtctccacaggaatatcgccaatgcctcttatcctacataagatttctggcaagagaggcagatgaatctcgtctacgtgaagtttgtgagagctttcttggtcctccgatgggcatggttgacgctgcatcatctgctgatttgaaaaatccatcatgggatcctgatgttcttggaatgaagaaacacaaactcctaagggaagatatactaccttccatggctacgaaccgcaaggtccaacggctgttaaacgaattcatggacctcctttcggagtacgaggctgctgagacaaacgtcgagcaaatggacgtgacaccaacaccaccaccaccaccaccagcagcagcaacagaaggcaacaataatggtgcctcatag

SEQ ID NO: 92350 - DNA, 393 bp, Oryza sativa
  Clone ID: PAT_MRT4530_90840C.1
ccaatgcctgaaccctgccacccactgtacaatgcctgcagcccaatgccaaaccctgcacccactgtacaatgcctggtgcctgccaacctacaagcctgcagcctaatgcctgaaccctgccacccactgtacaagcctgcatgcctaagcctgactcccactccctacactccacccacgtacaatgccacaacctgaatgcctgactcccactcccactccctacactcccatgcccaagcctgaaccctgcctgacaacctacaatgccacatgcccaatgcctgactcccacgcctgatgcctgtacaagcctgcatgcccaatgcctgactccttctccctacacccccaatgccaactcctgactgcctgcctgacctacacacc

SEQ ID NO: 92351 - DNA, 270 bp, Oryza sativa
  Clone ID: PAT_MRT4530_90841C.1
ggaccaaaacacggaataaaaacctatagccaagaggttacagactttacaatcagttatcgggcatatgcaaaggggaaagccgtacttttttgctcagggcaaaaacagataaaccccactttaacttgggaaaaaagaaggggttgctaaattgggggcccacagaggtttattaacaggagaccaaaaggtttttgggggaaatcaagccaaaataattccacttaaaaaggattgggggttcccaacttaaaacccctgaaatat

SEQ ID NO: 92352 - DNA, 778 bp, Oryza sativa
  unsure (1)..(778): unsure at all n locations
  Clone ID: PAT_MRT4530_90842C.1
aaaaagcaaaaaagccccccgcgtcgctttcgcgtcgggtggctcgggggcgaaaaaccctagccgcccgcgccttctctccctccctccccccacctcgctgtcgctggagcccgccggcggcgaagccggcagcgggcagggaaggcggtagcgaggccttcttctcttcgtagcgtctccctcctcggcgcgaaggacgaagacgacgaagctctccaccggcgtggtccgtggcagctacggcggcgaggtggggaggagacagcggattcggagcccccatggccggatccggccctcccttgcctggatctgcgcggcggcggcgcgaggaggcctggggcggcgcgacggcatgcggtcgtgatggcggccagcggcaaggcggcgaggtggcggccggctacggctaggccggcccagcacgggcgcggaggcggtggacggctgaggctcggcgtggaggcgcgcggaggcggctcgtcagcggcgggcgcgcgcggcggatggctgcggctcgtcgtggccggcccggtcgcggtggcggcggtcagcgcatcccgcccggagcggaaggggtccccccgctcatcgctcggcctggccgttcgggcccggccatggggcggggggtcgttccggccttggggggggtcagcctgggggccgggccgcccgggatgcccccggcggggcccggggggccccggcggcggaccttggggggcgcccgccggtggtnnnnnnnnnnnnnnnnnnnnnnnnnnnnnnnnnn

SEQ ID NO: 92353 - DNA, 375 bp, Oryza sativa
  Clone ID: PAT_MRT4530_90843C.1
atgcaacgcaagatcaaggccgggacaagctcctccctctttggccgccaccgccatctctcccttcttaggctgacgccatcaaggctcgtggcgaggagcgacggtaaaaggcccttcttctcctcccagcatctatgtcattccccaatcccgttcacggcattgtcgtctttcctcaagtctagtagatctgggttccactgctttgagctccgtgcgaggagtggctcaggaaataggggaccacacgcatcatgtgggtacggcttgcccaacggggcttgtaggccatgcccccacaggcgccctcaccttgataaggccccgtgccctctgtacgacctgagtggctttgcgaagaacacatcttaa

SEQ ID NO: 92354 - DNA, 1266 bp, Oryza sativa
  Clone ID: PAT_MRT4530_90844C.1
atggcaatggagcctcctcccctgttcctgtgccccatctcgatggagctaatggaggaccccgtcacggtggccaccggcgtcacctacgaccgccggagcatcgagcggtggttcttcaagtacggcaagacgacgtgcccggccaccatgcagcggcttgcttccttcgacttcactcccaaccacaccctcaagcgcgtcatctcgtcgtggctggaccgcgcctcctcgtcgtcgtcgccgagcacggccggctcgccggcgacgacgtcgtcgtcgtcgtcgtcaaacgcgatggagagggagaggttgccgtcggtgctcgctggcattgaggagacgccgttcaaggcgaccgcgctcaagaacctcaagtcctgcatggccggcgacgaggcggcgcgggaggatttcgtggcgtgcggcggcatccaggtgctcggccgggtcatgacgcaggcgctggaggagagctccgccgggggggacttctcggcgttccggacgtgcgaggaggccgccgccgtcctcgccacgctgccgctctcggacgacgcgtcggtggagctcctgctcaagccggagtgcataaggcccgtgtccgtgctggtccagcgcggcagcgccgaggcgaggctgcacgcaatgtccatgatctccaagatctccagggccagcgtccgcgactggaccgcggaggtcgacgtcgacgacatggtcaaggccctcctcgagctcctctccgacggcgcctccgcgaagctgagctcccgcgcgctcgacgtgctcctcgacgtcacggcgcggtactcccgcggcgcgcggcgcgccaaggccgtggagctgggcgccgtgcgcgtcctcgccgagctcctcctcgacgccgaccgccacgtcgccgagcggtcgctcctcctcctgaagcgcatgtgcaagtgccccgaggggcggctggccttcgccgagcacgggctggcggtggccgccgtggcgcgcgccgtgctccgggtgtccgggctcgccacgaggctcgccgtcaacgtgctgtggctggtggcgtgcgccccggcccccgccgagagggtgctggaggacatggtggtgggcggcgccgtggcgaagctgctggcgctgatgcaagtggagagctcgccgtcgaccaaggacaaggcggtgaagatgctgcgagcgcacggcgcgttctggaggcagtacccttgcttccccacggacctcaaggactacctcaaatctctcaactga

SEQ ID NO: 92355 - DNA, 324 bp, Oryza sativa
  Clone ID: PAT_MRT4530_90845C.1
cttctccccatctctctctctctcctctctccccccattccccacctcgcttcgcctcctcctccgcctccgccgccgccagggcctcgccctcccaccccagcagcgccgccgccgccgccgccgccgccgcggccggatcccacgcgcggctcgccgcgccgccccgttcgaccccccgaatcgccggatcccgtcgccggcgccgccgccgcgcctgggggggagcttcaaccacctctctgcccgctatactccgaagtccttccgcggagtgatgaagaacctgttcacatgcagacccccggaaggcagctgagccta

SEQ ID NO: 92356 - DNA, 531 bp, Oryza sativa
  Clone ID: PAT_MRT4530_90846C.1
gaacaatcagcacaaagtcagtctacgcgtatcaagatggtacagtatgtttccaagaagacaaactacactgggtcatacatttctcaccaaatttacaaagacacatctctgaacaaccgattcaattcaaatattttcctaaggccgcctttggaatatgcagaatcccattccatccatgagtttgggccaggattttagttcagaatcctggcctatacacatggatggactgggattgaggcccatccaaacgaggtctatatactggcatgtacaccagatggggaacaaagctaggagatactcactcctatacaagacctaaggagagaatacaacagggaaatggagaaactatttcacactcactcctatacaagacctggttactaaggctactatgtacactaggagctgccatgggatctgaccgacgatatagattgcgctgaaacggaggctgtcgggctgttcacctccctatccccattggcagttcgagggttgcacctgatcctactgata

SEQ ID NO: 92357 - DNA, 1397 bp, Oryza sativa
  Clone ID: PAT_MRT4530_90847C.1
ggctgcaggaattcggcacgagggtattggtgaggccggtactaggggagggggtagtagtagtggtacaagtggtggttgtcggcggcgtagtcttgtgggttgcgtgcgtgcgttcgtgcgcgccagcgaagtttcttgcgacgatcgtgtggggtgggttcgtgtgctctctcgctcctgccattggttgatgagcatggggcattactccgagcagaggccggggttcgaggtgaccaaggactggaacggcgccgaccaggtcatgatccggtcgccgcggggggcgtccgtcctggtcagcctgcacggcgggcaggtcgtctcctggaggaacgaccgcggcgaggagctcctcttcaccagcagcaaggctatcttcaagccaccaaaagcgatgcgaggtggaattcccatatgctttccacagtttggaaattgtggaacattggagcagcatggatttgcaaggaacaggctatgggccatagatgatgaggctccaccactaaatcataatgataacaacggcaaagtttctgttgaccttctgttaaagccatctgaagatgatctcaaatgttggccacactgctttgaattccgtctcagagtttctctttcgacggatggagatctctcgttagtatcacgagtcaggaatgttaatgggaagccattcagtttttcgtttgcttaccatacatatctttcagtctctgacatcagtgaggtgagaatagaaggtctggagacacttgattatcttgacaaccttagccaaagagaacgttttacagaacaaggagatgctataacatttgagtctgaggttgacagagtctacgttggttccccaagcgtaattgctgtgcttgaccatgagaagaaacgcaccttcattgtaaggaaagaagggcttcctgacgtcgttgtttggaacccatgggacaagaagtcgaaaacgatggcggattttggcgacgaggagtacaagcagatgctgtgtgtggacgctgccgcagtcgagcgagccatcacgctgaagccaggcgaggagtggacggggaagctggagctgtccgccgtcgcttccaccaactgcagcgaccatctggactacccttgtagctagctccagtgttcctataatgcgttccagtagctatattcagatgcttagttttgccccccctaaatcgaaaatcatgtactacgtttttccttgtacatgggagtgtgtactacgtttttcattgtacaacatgggggcgctagctaggtccgtcgtcttgatcagcctgttgctgatcagtctacccgtgtcatttgtcagatactactatatattcagatgcaaagttgttgtgacaaaaaaaaaaaaaaaaaaaaaa

SEQ ID NO: 92358 - DNA, 1974 bp, Oryza sativa
  Clone ID: PAT_MRT4530_90848C.1
atgctcttcttccatcatctccattgctcactgcctcactctcgtcagctctctctctctctctctgctagtgcttctaggatccatcatccatggctgcttgcaaagtctacttcttgtgcagcatattgtaggattctattgtttgagaacattttagggagttgcatgttacagatatatgctttccttgtctacatgggagggaatctgagggagcaaaaagtttatcacatggagggagcagatgaggagaggccactaattcatcacctgcctccacaggaacaatgttcgcaatacacctgcgatggaacggttgatatcgacagaaggcccgcactgaagcatagcacagggaattggagagcatgcttcttcattttaggtgctgaattcactcaatgcctgtgcttctctgcggtcgtgaagaacttagtcaggtatctgacgagtgtgctccaggaaagcaatgtcaatgctgcccgaagtgtgtcgacttggattggaacttgcttcttcacaccactcattggagccttcttggcggacacattttggggaagatacaggacaattgtaatatgcctctctgtttacagcataggaatgctcattctgacgacttcagcgtcgcttccatttctccttcatgattcctacaacaatggcgacgacattcgtcgtgttgtcgcctacctagggctctacctcattgcacttggagctggaggtatcaagccctgcatgtcggccctcggggctgaccaattcgacggtgccgacccggtagaacgggtgacaaagggctcattcttcaactattactacttctcaaacaacatgggcacgctgctgtccactaccgtgcttgtctgggtgcaggacaacatagggtggggcatcggtttcgcgactccgatgctgctcatgggttttggcctctccatgttcgtcgccggtaggagggtgtacaggtacaggaagctgggaaggagtccattgacaagggtgtcccaggttgtggttgcagctgcgaggaatcacaggctcaagttgcctgatgatagctcactcctgcatgagctgccttcactgaccgaaggtggctataggattcaacataccactcgattcaggttcttggacaaagctgccatcccgtccgactccgacgacaactcgccggtgcaaccggacccatggaggctgtgcacggtgtcgcaggtggaggagctcaagatgctgctccgggtgttcccggtgtgggcttcgctgctcgtcttcttcgtggtgaccgcacagatgtcgtcgacgctgatcgagcagagcgcggccatggacggccgcgtcggccccttcaccgtgccgccggcctcgctcgccaccttcaacgtcgtcgccgtcctcatctgggtccccgtctacgacgccgtgctggtgccactggcacggcgcgccaccggcaacgaccggggcctctcgcacctgcagcgcatcggcgtcggcctcgcgctgtccgcggtggccatggcgtactcggcgcaggtggagaggcggcgacggcgaccggcggcggaggaggaggcgatgagcataatgtggcaggcgccgtgctacctggtgctgggcatggcggaggtgttcaccagcatcggcatgctggagttcttctacgagaggtcgccggggtccatgaagagcctcggcacgtcgctcgcgcacctggccgtcgcgacggctaactacctcaactccggcgtgctcggcgtggtggtggcggccacgacgcgtggcggcggcgctgggtggatcccggacaacctcgatgaggggcaccttgactacttctgcgcggcggtggctctggtccggtcagactgggcaagtgctgccggtcagaccggaggtgacttgatgcctcaggagagtattgccggtgatggatcgggagtcaacttggagataaggtga

SEQ ID NO: 92359 - DNA, 240 bp, Oryza sativa
  Clone ID: PAT_MRT4530_90849C.1
tatataagagcatgacgtcgcctgcacccgtacgtaaggcttcgatcctgctagagcggctcgccctttttttttttttttttaggttcaaatccaacttattcataaagcatactgctgttccacaggaaactgcttcatcaaactgacatatcatatcggtgcttgatggatccattataacctgacacaagctagacatcagtcaccacaggatgcgttgacgaacaagaggctttg

SEQ ID NO: 92360 - DNA, 3702 bp, Oryza sativa
  Clone ID: PAT_MRT4530_9084C.1
atcgaccaagagcaatcttaattaataataagagaaatgtttaacaagatgacttgatttgtttcaacaataaataaaatacctcaccaccactagcagcagaagcttataaatcgattctgtgatgaattataagcataacttaacacgtacgtacggtacggtgatcaatcaataatgttggatggatggatggatcgagtatacaatcagctagctagctagcttcttcattgtaagcagcagcagccaggtagaagaagaacaataatcttacgtatgatggatggatggaatggatcacttgttgaggacgtacttcatgacccggggatgtggatccttttttttttttttttttggaacccataagcaaaaaggacattaagttaatcgtctgaccttctacagatttactgttacacaatcgatcaccaggaggcctccctcgctcgctttctttctactgttacactctgctcgcgttacaactaacgggttgtttggctgaggtctcaccctttgctattaagaagaagatgaacacaaaggctctagcagctacataaatttaatcaaccatgggcaattctcaaaacacatgatagttctatgttgtatgcacttgattgtcctatgcttacccaagggggtgtcagtaataattctccagcaatcccaactgctatgaggcaccattattgttgccttctgttgctgctgctggtggtggtggtggtggtgttggtgtcacgtccatttgctcgacgtttgtctcagcagcctcgtactccgaaaggaggtccatgaattcgtttaacagccgttggaccttgcggttcgtagccatggaaggtagtatatcttcccttaggagtttgtgtttcttcattccaagaacatcaggatcccatgatggatttttcaaatcagcagatgatgcagcgtcaaccatgcccatcggaggaccaagaaagctctcacaaacttcacgtagacgagattcatctgcctctcttgccagaaatcttatgtaggataagaggcattggcgatattcctgtggagacttcaaagccaatgaagctgccagctgggtctctaaatgggagcgtgtctgcaccccatcatcggtaaccctgctccaaataggctttctagccatgaattttcctatatcgatctgcaacttgcctagctctccaccttgagtagaactaaatgagctagcaaaatttgatgctggaaagcaatcatcagctatccttagccagcatttcaggctggtgtcataaagaaaagcatggcgactggcaagcacaactaagggcgagccacatcttgaaaatttagcagatataacctttactgtaccggtatcttttccagctgcctcatctggagatgttaccaaagaagccaaagaatcatgcaaaacgcaagtcctggtatagaggtcccatatgtacatcaaacccctccttgttacaagaagcaatttccaacactcatcacagtctataaaaacagctgctgatcccatcatcatcgctggcattgctcgccttccacattttgtgtaaacctgcaggcaaccatcttcacagccaactgcccagaaattcgcattaccagccaagacagtcaccttggcagagatgcgatctgaccaaagagtttctgttcctcttgtacatgtaatctcagtttcttttgttgaaaaagcaccaccaagcccaatcatgtctcctgcagaacgttctacaggctttgcttcaaggcggaccggtaaagaatcctcattgtctttcttattgaatacatggatagaaagtgaagagcaagaggccaatgagcctggaactacagatccagactgttctatgctcaaccttccatcactgccagcaccagctgaagctttttggattacaagactctcactaatgttagttcttgcagtaatgccagagcgttccctaactccacaattattacagttaccgctagcactataagatggtcttgttccattctctccaaggatcattcgctgatccagggatgaaaaatccacaccttgattctgagaacggttggacatgtcctggttggaaggaaatccaactgcctctggaataatccttttccggccatcaggacgccggtattctctttgtttcactggactagataaacgaggtgctttatttatgtcatcagcagtggaacctgcagttttcttctcatcttcaggtaaagcttcaggagctttctgatttggaacgcttgtagacgggttaggtgcatctgtagaaactttggggggtgattgaaattgctggacactggaaacctttttgcttgcagattgtttggccgatgcttcttctagcagtaactgagcagggctttcagctatatttgattgcctccctctaacatcgccatatctattcttcttcaattcatccagttcagcatcccttaacctgtatccaagctcctttgcttcaaagtgaaaggtagcaactgaaccatccaaagagcaggcaaaaagtgaatagccatcaggactccaagataaatcaaccacactttgagtgaagaaatgcttggcaacaaacaatggccgggcactcgctgtcgtccagacagtaatagttcggtcctgactcccaatagcaataacattatatggttgatgttctttagatgatgcttttgatgctccattggcccatccagctggtgcagcctttgcgtcttggccagaagataaatgcttacggaacattgagtggttaaacttaaccactacaacaggtgcgttatgccccagaaaatcaaaggttgctgaccattcaccccgttcaagcacaggggctgagtgcctaggtttctgaaaaccatgagttgtggttatgaagtggccacagggagaccaagcaagtcgcctaaaaaatgtcgaaccaagcgattttgaccaatggccttctgtcctgtgagcaagactccagtcactcgtacgccatatgataacagtcttgtcatctgattggcttgcgatgaaagaaccgataggatcccatgtaacgcctttaactaaactggaatgccctcgcaagacagcagtgcatatgccattggccatgctccatatgtgaacagtattatccaaactgccgctagccaatgtcgagtcatcaggggaccaattaaggtcaaccacatcggcagtatgccctcttaaggtcataacaaccttccagttttctacatctggaggttctccacttccaaattcagatgttccagtgccagcttttctttcatgaatttggataacttgatcgtccgatcctgaagcaagatagcggccatgatgggcccatctcacacagtttactgttccaaaatggtctcgaattgtagccagcaacctttggctggaatcatcactgtcattgtctttggccactgatttcatgctccatatgcgaatcttctggtcgccgccgccggtggcgaagcggatgccgcccggctggatgtcgatagagaagatctgcaggccctcgtggcgaatccagctcggcttctccgtaatcatctcctcctctaggtggcttgccgctcgtcactgccgccgaaccgcagggcccatgccccgagcaaaggacccaaaaccctagaaatcgc

SEQ ID NO: 92361 - DNA, 417 bp, Oryza sativa
  Clone ID: PAT_MRT4530_90850C.1
gcactggaaggttgtatcagtgtacatcaatcgaatgggcctggtaaatgttcaaactgctttcgaatgtagtaaaccggcatggtggttgtgcgcttttgcttagctatgatggcatgtttacaggtcatgctcaaaatgaaaagccggcatgttgctgggacaatcaccaagaagaagaaaagtaagtggcaaactagcatgcttgtgaaaacagtttactaccccctccatggcattgaggttgatccatccgtcactgtgcaggtgtggtgatagatgtctgcaaggatgtcgcggcgtggccaggccggcacctgctggaggacggcgagcaccgccgctactttggcctcaggacagcggagcaccgggtaatcgaattcgagtgcaccagccagagggagtatgagatgt

SEQ ID NO: 92362 - DNA, 387 bp, Oryza sativa
  Clone ID: PAT_MRT4530_90851C.1
atgccttcaaggagcatgatgctcaagacgccaccgtcatccgtccaggaggcggcggcggtggcggctccgttagctgtgcacggcggcgacggaaggtggtcgtcagggggcgtggcgacagcgactgcaacaggatgtgggggcgcggcgacagcgacgggaggagctatcgtgggggcacaacgacgacaggggcgcggcaagctcctcctcctccccctccccctccccctcccacagtcttgctggtggctgggcttcctagatcggggcttggtacggcagaaggagctcggtggcggtgatgctcggcgacggggctcacacatccggtgttgcgtggtcggcgacggcgacgacgtcctccttcctctctactgttaa

SEQ ID NO: 92363 - DNA, 2043 bp, Oryza sativa
  Clone ID: PAT_MRT4530_90852C.1
gaccgcccgcccgccggcacgggccgttgcatcctctccattccatccaccacccacccacccatccaacctccgcccccggtatccttgagctggaggaggtggtggtggtggatcacctgttcttgggattctgctgctgcgagtgcgtgcattgtggtggggggtgtttggttcttggttggtgagcggtgtttgaagcggtttcgcgcgtggtcgttgggtgatgcgagagctgggaagctgtgaaagcctcgcgcttaaggtgctcgatcaattgccgctgagagcgcacgcctctgatttcgctgctgaattacggctgttggcgagaggagacagatggtcgggagcgtgcacgtgaatggatcggtgaacggcggcaatggcaccgaggagaggctcgacgagctgcgccgcctgctcggcaagtccgacggcgacttgctgaagatcgtcggcattggcgccggcgcgtggggcagcgtcttcgccgccctgctgcaggacgcctacggccgtttccgggagaaggttcagatacggatatggcgccgggcggggcggtcggtggaccggaccaccgcggagcatctgttcgaggtgatcaactcgagggaggacgtgctgaggcggctcatccgccgctgcgcctacctcaagtacgtcgaggcgcgcctcggcgacaggacattgtacgccgatgagatactgagggacggcttctgcctgaacatgatcgacacgccactctgccctctcaaggtggtcaccaacctgcaggaagctgtctgggatgctgacattgtggtgaacggccttccatccaccgagacgagggaggtgttcgaggagatcagcaagtactggaaggagcggatcagcgttccggtgataatctcgctcgcaaaggggatagaagcatccttggacccaattcctcgtatcattacgcccacgcagatgattagttctgcaaagcacatgacattccgaagtaccagttcagtatttttatcagctggagttccaactgagaatatactatatcttggaggcccaaacattgcctcagagatttataacaaagaatatgcaaatgctcgaatctgtgggtccaacaagtggaggaaacctctcgctaagtttctgagacaaccacatttcattgtctgggataacagtgatcttgttacacatgaggtgatgggtggtttgaagaatgtctacgccatcggtgctggaatggttgcagctttaactaatgagagtgcaacaagcaagtcggtgtattttgctcattgcacgtcagagatgatattcattactcatttgctcacagaacaacctgagaaacttgctggccctctgctggctgatacttatgttactctcctgaaaggtcgcaatgcgtggtatgggcaaatgctagcgaagggagaactgagccctgacatgggcgacagcatcaaggggaaggggatgattcagggtatctctgctgttggtgcattttttgagcttctcagtcaacccagcttaagtgtgcaacacccagaggaaaataagcaagttgcacctgctgaactgtgcccgatcttgaagaggctctatagaatactaataaaaagggagctctcgacaagagatattctgcaagccctgagagatgaaaccatgaatgatcctcgtgaaaggattgagatggcgcaaagccatgcattctaccgcccatctctcctaggaaaaccatgacctgttcgtcctgtatatgattagaacataaacaaggttggatgagacctctagtttgacatgcttagcatcattcgttattaagcctgaagaaggtgattgtcgctggcctatgtgtgaactgtgaatcccaatggggcttatttttctggaattgttagtactttgattatcatgccgtacaacagtacaagagagagtgcacagagtcaataaagaatttcctacacaaaaaaaaaaaaaaaaaaccggggcctgttctccctcgctccaaaaaaaaaaaaaaaa

SEQ ID NO: 92364 - DNA, 360 bp, Oryza sativa
  Clone ID: PAT_MRT4530_90853C.1
atggccgccgacgctccgatgcctcttggaatgaccgtgacggttgaggagaccccgtatgatctggatgaccctactactagcaaattagatgcagatcatcaaggcttcacgactactcgcccttgtagaaccctaaaagatgtcttgtttagcatatttactgttgccatggtgatcacctatgtttgcctggtaatccacgacgacctctccttgatccagacattgttctttctagtggtgtgggttatccaatggctagttatttttgtgatgacatacagcgcatttgatgatgcgaatcaagagtatcgcaaaagatacaacttggtcgtagtcaacgcttggttttgctag

SEQ ID NO: 92365 - DNA, 2426 bp, Oryza sativa
  Clone ID: PAT_MRT4530_90854C.1
gagagagatgggggaagagaccctcgtggccatgccgctcgcgccgccgcatcaccaccaccaccacgcccacctccccgcgctcccgcacctcgccgcgccgcccccgccgccaccgccgcccgcagagaccgaactcacggaacagcgagaagaggaggtcccggtggacgacgtcgtcgaggcggcggcggacgtgccaaggagggaggagggccttgtcgtccatgggggtgaggacgtgtactacgcgaggaggatgctgcagggggtggtgctccggccgccgccgcacctgccgcagccggaggcgccgccggggctgaccagggcgctctccgcgccggcgcctgacgggtacgtcgaggaggaggaagagcagaggcccgtcgagaggtccgcctccgtgaactccgcggcgtccgccgtcgtcgtggacgtggcctccatcgggcggttcttccgcgaccgccgcgacgtgctctcgtcggccatcacccggcgaatctcctcgctgaaggaggcctcctcctcccctcctcctccggtggggatggacacctacggcgtgcaggagatccaccttcccaacgtgaaggtcaccgtccgcctcaaggacgccatcgaagccgacgcggaggaggacgatgctgtgggcggcggcggcgacgacggctactcgttctcgggcagccacatcaagggccgtgtcagcttcttctcccgctcgggctgccgcgactgcgccgccgtgcgcgccttcttccgccagtccgccctcccctacgtcgagatcaacctcgacgtcttcccggagcgcgagggcgggcgcctccgcgcgcgtgccccagatcttcctcaacgagaagctcctcggcggcctcgtcgtcctcaactccctgcgcaacagcggcgagttcgagcggcgcgtgcgtgacctcgccgggagacggtgccccgacaccgcgccgcgggtgcccgtgtacgggttcgacaacgatcccggcaaggagggcggcgacagggaggacgccatggtgggcatcgtgagggtgctccggcacaggctcccgatacaggaccggatcgtgaggctcaagctcgtcaagaactgcttctccggcgccgacatggtcgacggcatcgtgaaccgcgtccgttaactctgtctgtaggctgtggagatcggaagagaactggcaaggaagcacttcatccaccatgtcttcagagagaacgacttcgaggatggcagccagaacctgtaccggttcttggagcacgaccctgccatcccaaagtactacaacttcatcaggggagccaccaacgacggcgagccgaagctggccgccgccatcgggcagaggatgaccaagatcatggttgccatcctggaggcctacgcctccgacgatcgccgccacctcgactacagccgcatcgccgccagcgaggagttcagaagatacgcgaacatggtgcaggaactccagagggtggacatgtcggcgctcccggccgaggagaggctgccgttcttcctgaacctgcacaacgcgatggccatccacgccgtcgtcagggtcggccagccgggggccatcgaccggcggtcctcctccaacttccagtacgtcgtcggcgggcacccgtactcgctggcgacgatcaggaacggcatcctccggtccaaccgccggcagccgtacaccatcgccaagccgttcggctcgtccgacaagaggctcgagttggtgcaggggaaggtgaacccgctggtccatttcggcctctgtgacgccacgaggtcgagcccgatcgtgcgcttcttctccacgcagggggtggagccggagctccggcacgcggcgaggaagttcttcctcaacggcggcgtggaaatcgacctcgagagccggacggttcacctcaccagtatcatcaaatggtacagtgttgatttcgggcaggacagggaaaccctcaagtggatcctgaactatttggacccgaccaaagctgggctcttgacacacctcctcaacgacgagccgctgtcatgtgctttctgtttaattggcaaaatggtcaatggaaagaagagcattgagcatagaggcaatcagcatgtggagcttgttgcaagatttgagtctgaggatgtatatagtattgtaagcatgtcaaagtgggttcacagcatagatgaaaaagggaatatgtttgtgaggataaaatgcattagtcatttactattccttctttctgtctaccaaattataccgaaatctcatacgactgatcttgtattcaaatcaaacggccaatctagtctttccaacctgccaccaccagtgcagcttggacgtgaatgcaccttcctcaccccgctcctggcatctctcttcctccgctgtacataa

SEQ ID NO: 92366 - DNA, 364 bp, Oryza sativa
  Clone ID: PAT_MRT4530_90855C.1
acgcgatggccatccacgccgtcgtcagggtcggccagccgggggccatcgaccggcggtgctcctccaacttccagtacgtcgtcggcgggcacccgtactcgctggcgacgatcaggaacggcatcctccggtccaaccgccggcagccgtacaccatcgccaagccgttcggctcgtccgacaagaggctcgaggtaattaagcacacgcatgcatgagagacgcctgtgatcaatcaccgattgccatggcgagaggagctgaaaatttttttcgcttgtgcagttggtgcaggggaaggtgaacccgctggtccatttcggcctctgtgacgccacgaggtcgagcccgatcgtgcgct

SEQ ID NO: 92367 - DNA, 360 bp, Oryza sativa
  Clone ID: PAT_MRT4530_90856C.1
gtgttatttagagatgagaaccatatagtgaacggaacgaatgaacatcattcgcgatcttgctctccttgctattgctgcatgcagcgcctctgggcactcggatggctaggccaaatgtataagaagtatcagctgcacgtgctctgtcctgttacacaaacatagtgcttagaccatatactgagtggggagggcagaagcatggcataaccgcacgccccttgttgccataaggttcaatgcacctgacaaacaaccaagcctgagaacacctcgagctggctgcgcaacaatataactatcccgaccttaacatagatcaggccatatgcgcaagatctacaacagctatagttt

SEQ ID NO: 92368 - DNA, 361 bp, Oryza sativa
  Clone ID: PAT_MRT4530_90857C.1
ggcggcgacagggaggacgccatggtgggcatcgtgagggtgctccggcacaggctcccgatacaggaccggatcgtgaggctcaagctcgtcaagaactgcttctccggcgccgacatggtcgacggcatcgtgaaccatttggaatgcagcaggaagaaggctgtggagatcggaagagaactggcaaggaagcacttcatccaccatgtcttcagagagaacgacttcgaggatggcagccagaacctgtaccggttcttggagcacgaccctgccatcccaaagtactacaacttcatcaggggagccaccaacgacggcgagccgaagctggccgccgccatcgggcagaggatga

SEQ ID NO: 92369 - DNA, 454 bp, Oryza sativa
  Clone ID: PAT_MRT4530_90858C.1
atcctcacaaacatattccctttttgagctatgctgtgaacccactttgacatgcttacaatactatatacatcctcagactcaaatcttgcaacaagctccacatgctgattgcctctatgctcaatgctcttctttccattgaccattttgccaattaaacagaaagcacatgacagcggctctgaatgtattatgccattacaactacaactacaagttctcctcaaacattcaaggaccaatcgtagttcagatatgagatgttgatcgccccaccgtcgttgaggaggtgtgtcaagagcccagctttggtcgggtccaaatagttcaggatccacttgagggtttccctgtcctgcccgaaatcaacactgtacctgcacaaggggatggttattcaggaattcttcatgttgcaaatacattgactgaactcatgatcaaactagct

SEQ ID NO: 92370 - DNA, 1204 bp, Oryza sativa
  Clone ID: PAT_MRT4530_90859C.1
acaccaaacataaacatatcattagcataagacgtatatcatcagtcatcaccatctgcgctacagtttctctataaacggagatactatggctttcccgtacaacattgctgtaataaactatcaccggtaatctttcaaactctagcatctattcatcagctgaagaatgttgtgaagtcacagaatcagtatgagcagctgaaagatcgtttgagtcagctgcatctttgttatctccaggacagtcagaagtgtccaaatttgttgtgtccacatatgattcggtttcagcttcgctttcatgctcaccaaacacactctttcttttgacaacattaattagaattccgttagtactcctttctggttgcagcagttctccttcagaaacagcaatgcttgtagaggtagagggttgactagctatattgttgccagtattgcatgaaccagtttcagatgtgtctgtgcttctatctgtaccttgtgcagtaactccagaattattgtttgggcatgaatctttagaaacggtagatcctgatgaattacctgtattgaactcagactctatctcaagattctgaatgaaattgatgaacatgtcagctgatgaagtcctcattagaggtccaccactccgggtccaagaatttaagtcaatggtttctgattcactctcacttccatcattatgaataacgttcggtgtggcaacaacttgaattccttggtgagtagatgaactagtggttgcaaaacaatcttctgagagagatcctgtagaattctctcgactgatgcagctccacgatggtaccctccttggtgttctgattacagaactgcatgtatatccctgggaagcagaagctaccctttccatgcttctctttagtcttcttttatggtttagaacggcaatggactcatccaacgcaagttcaatagcacagtttgttctgatcgcagagatcttctcccatgtgcacctgcgcccctggttggcagccatttgcagctccgcatatgtagggttttgtataatcttcaagtactgggctgctgttgccggcataaccatggtgacatcaccctcccaatcctgagcaaacaatttcgctagtcctcccagtgggaggccaatttctaggatttggttacatctgtacttaacctccatttcagccagacgagcaag

SEQ ID NO: 92371 - DNA, 4404 bp, Oryza sativa
  Clone ID: PAT_MRT4530_9085C.1
ctatgaggcaccattattgttgccttctgttgctgctgctggtggtggtggtggtggtgttggtgtcacgtccatttgctcgacgtttgtctcagcagcctcgtactccgaaaggaggtccatgaattcgtttaacagccgttggaccttgcggttcgtagccatggaaggtagtatatcttcccttaggagtttgtgtttcttcattccaagaacatcaggatcccatgatggatttttcaaatcagcagatgatgcagcgtcaaccatgcccatcggaggaccaagaaagctctcacaaacttcacgtagacgagattcatctgcctctcttgccagaaatcttatgtaggataagaggcattggcgatattcctgtggagacttcaaagccaatgaagctgccagctgggtctctaaatgggagcgtgtctgcaccccatcatcggtaaccctgctccaaataggctttctagccatgaattttcctatatcgatctgcaacttgcctagctctccaccttgagtagaactaaatgagctagcaaaatttgatgctggaaagcaatcatcagctatccttagccagcatttcaggctggtgtcataaagaaaagcatggcgactggcaagcacaactaagggcgagccacatcttgaaaatttagcagatataacctttactgtaccggtatcttttccagctgcctcatctggagatgttaccaaagaagccaaagaatcatgcaaaacgcaagtcctggtatagaggtcccatatgtacatcaaacccctccttgttacaagaagcaatttccaacactcatcacagtctataaaaacagctgctgatcccatcatcatcgctggcattgctcgccttccacattttgtgtaaacctgcaggcaaccatcttcacagccaactgcccagaaattcgcattaccagccaagacagtcaccttggcagagatgcgatctgaccaaagagtttctgttcctcttgtacatgtaatctcagtttcttttgttgaaaaagcaccaccaagcccaatcatgtctcctgcagaacgttctacaggctttgcttcaaggcggaccggtaaagaatcctcattgtctttcttattgaatacatggatagaaagtgaagagcaagaggccaatgagcctggaactacagatccagactgttctatgctcaaccttccatcactgccagcaccagctgaagctttttggattacaagactctcactaatgttagttcttgcagtaatgccagagcgttccctaactccacaattattacagttaccgctagcactataagatggtcttgttccattctctccaaggatcattcgctgatccagggatgaaaaatccacaccttgattctgagaacggttggacatgtcctggttggaaggaaatccaactgcctctggaataatccttttccggccatcaggacgccggtattctctttgtttcactggactagataaacgaggtgctttatttatgtcatcagcagtggaacctgcagttttcttctcatcttcaggtaaagcttcaggagctttctgatttggaacgcttgtagacgggttaggtgcatctgtagaaactttggggggtgattgaaattgctggacactggaaacctttttgcttgcagattgtttggccgatgcttcttctagcagtaactgagcagggctttcagctatatttgattgcctccctctaacatcgccatatctattcttcttcaattcatccagttcagcatcccttaacctgtatccaagctcctttgcttcaaagtgaaaggtagcaactgaaccatccaaagagcaggcaaaaagtgaatagccatcaggactccaagataaatcaaccacactttgagtgaagaaatgcttggcaacaaacaatggccgggcactcgctgtcgtccagacagtaatagttcggtcctgactcccaatagcaataacattatatggttgatgttctttagatgatgcttttgatgctccattggcccatccagctggtgcagcctttgcgtcttggccagaagataaatgcttacggaacattgagtggttaaacttaaccactacaacaggtgcgttatgccccagaaaatcaaaggttgctgaccattcaccccgttcaagcacaggggctgagtgcctaggtttctgaaaaccatgagttgtggttatgaagtggccacagggagaccaagcaagtcgcctaaaaaatgtcgaaccaagcgattttgaccaatggccttctgtcctgtgagcaagactccagtcactcgtacgccatatgataacagtcttgtcatctgattggcttgcgatgaaagaaccgataggatcccatgtaacgcctttaactaaactggaatgccctcgcaagacagcagtgcatatgccattggccatgctccatatgtgaacagtattatccaaactgccgctagccaatgtcgagtcatcaggggaccaattaaggtcaaccacatcggcagtatgccctcttaaggtcataacaaccttccagttttctacatctggaggttctccacttccaaattcagatgttccagtgccagcttttctttcatgaatttggataacttgatcgtccgatccagcttccacactgacgagcccagacactaaaaccactaaagcattcatgacgccggggatgtggatcctgtagaagtagtcgtcccagtcgatgttcttggggtcgaggttgaagagggcggcggcggcggacgacggcggcgtggccatggacagccgaagcttctccatgttgaggtcgtcgaagcaggccttgaagagggcgaaggggccgtagaggtcgacgagctgcatgacgaaggagtacttgcgggagaggtcggcgtagcggcgggcgaagaggaggccgaagcagaggagggagaggaggcggaggagctggagggggagcgcgtaggccaccgccatgaacgccctgaaggaggcgatggtgcggaagaagtagacgggccgcgtgcgcaccgccaccccgtccttccccaccctagggttctccaggaagtagcgccaccccgtccggtacagcaccgcgtacgccgccgggtgccgcatcgacgacgtcacgtggtacaccgccatctccgacgatgaccccctcgagtgcgccaccatcgccgccatcatcgcgttcaccaccaggtcaccaggcactacgtccatgatgaggtcgaggtcggcgaggaagcaggagaggctctgcttggcgtagccgatgatgatggcgtcgatggtgcgggtgccctcgatccagccggggagagggtccctgtggacgctggtgatgatgctggggcgggcgatcaccacggggatcccgtggcggcggccggcgccggcgaccagctgctcctgaagcatcatctcccccatggccttggtgaacacgtaggtgttgggccacccgaagtggcgcgccctggctaaacccagatccttcatcgccttcctctccgccttggcgtcgccggcgtcctccagctgctgcctctgctcgcccaccagccgcagctccgtctcgatgtccaggtacgtcccctcccgcagcgtctccccctccctcaacgccctctcctgcaccaccccggacctctcgccacacacgtacgctgtggagacatggaggaacacctcgagattggcacacttcttggcaagctggcacaggtacttcacccccatcacgttcacatccagagccacgtcgtacctttcgtagaagttggtggtggcagctccattgacgatgatgttaaggtccttggcgagctcttgcaaggtggattcctcgaggcccaggttctgatgcatcatgtctgcagccaatggaactaccttttcatcgatgaaagactgaaaccccttgccatgctgctccttcagaagcccaaacagctccttccctatcacctccgtccgcttcccctgcttagctgtagctgcatccaccgctctcacagggagatagatcttcctgacatcaggctgaaccctcagtatcttctccaccagtatctttccaagaaagcctgttgatccagtgatgaggatgctcttgttcttgaaatattcaatgatcctcgcttcatccattgtgccacccattttgctcacaaatttctcggtgtatatatgtgtttgtgtgacaactgacaagaaactaggtagtatagagagatagatatatgaagatggatggcaagaaaggggaagagagctagctagctatcgaagtagctaggaaaggagaggaagcaatggtgcctgcggtgttagcccacgagtccg

SEQ ID NO: 92372 - DNA, 585 bp, Oryza sativa
  Clone ID: PAT_MRT4530_90860C.1
atggcccggactgttgcctgttggcgccatgtgcgcgctacagcctttgcgaatttagtagatcgaatcatcgaacgggattcgattactgcatgctggtctgggtcgatctctgggagaggctctgggctaaccaccgaaaggaggaagcctttgcagcgagacatatggctcaatcagctcctccattaccctgcagtgcatggatgtccccgcagcaacaatgccacggatcatcaggcccgcacgcatactcatttcagtgcaaaaagggcttcagccttcagctggcttttcacgaaatatttcgtggctaactggcagctgctgccgctgcagccatttttagctcttgcagccacggttgctgcagcagcaagcagtatcgatcacacccttaattccagcaatgctgtgccgtacgacggtacgaggtacgagcagacaacctatgggccaaccctgaccaagcgaaagcccggcaaggaacgatcctctacagccgcgggatcaattcacacggaaatgatccgggccgtcaatcacgctctggcccacaggtcatgcgtcatcaaccaagcttga

SEQ ID NO: 92373 - DNA, 685 bp, Oryza sativa
  Clone ID: PAT_MRT4530_90861C.1
tggatcccgggctgaggaatcggcacgaggactagtctcgagttttttttttttttttttttttaccatggccaagtgcaccaattaaattaatgatcatgaaacaaatacatcttttttacacaattaatttactggtgatgactttatccttcacaaaatgcatctgattacaatctaataaatacaggtcagatgcccgcaccacaaacacccaatctagtctaaagtggcacctgcaaacacaaaatagctacttttgatggctttgcatgtacaaaagacgatttaccatccttccagtagatttctccatccaaagcaagctattctacatgcagttcttcaacaaaatgtgaaacattgccagaattggttcagctatcagccacatcccacctgtacaagttactatatatggcactgacaagttcaaggggctttatggcactggcctgaaaatctgccaatgccagattaatgatgttcagcgcagtttatagctagcttgcatgctggaaaattaaatatcccagatgcatgttttcgtgattgaacctggaaattatggcttcaatatgcttcgtgaattagttggccatctcaagaaaattgctggaaacaatccattgtatcaagacatgacctatcttctactgaaacacattgtgttataccattaacg

SEQ ID NO: 92374 - DNA, 945 bp, Oryza sativa
  Clone ID: PAT_MRT4530_90862C.1
atggcgacgcccaccgacgccgccgcgcacgttctcgtcgtcccgtacccggcgctgggccacctcatccgcatcctcgacctcgtccgcctcctcgcctcccgtggcctccgcctcaccgtcgtcgtgacgcccgccacggccccgctcctcgccgccgcgcacccgggcggggtcgtctccgcgctcaccctgccgtgcccttcccaccatgctgtccccgccggcctcgaggtcccgaaggggcccccgggcgccgcgcccaggctcttgcccacgcgcgtcgtcgcgttcgcggggctgcgtggcccgctcgggtcgtgggcgcgcgccagggcgggcacgcccgaccgcgtcgtcgccgtgctgtccgacttcctctgcgggtggacacagctgctcgccgccgagctcggcgtcccgcatgtggtgttctcgccgtccggcgtgtacggcaccgccatgctccactccctgttccgcgtgatgcctcggcctgcagacgagaacgacgacgagagtccgcttgaggggcggtacctagagagccctctcgccgacctgggcttcaggcgcgtgcgcgccatagggccgctggcgccggaggccgacgacgacgcttcgggcaaccgcggcggcgagaccgccgtggccgacggccgcgtcggacctctgcgcgtggctggaccagttcgccgaccgctccgtcgtgtacgtcagcttcgggagcatgtcgcagctgcagccgcttcacgcggcggcgctggcggccgcgctggagcgtaccggcgcggcgttcgtctgggccgccgggtcgtcgcacgcagcggcggcgctcctgctaccggaggggttcgaggagcgcgtgtggagataactcctgcggtgggagctttcgtgttgattggattcgcacaaaccggcgacaggagtacagagatgtga

SEQ ID NO: 92375 - DNA, 165 bp, Oryza sativa
  Clone ID: PAT_MRT4530_90863C.1
atggccagatctagcaggtgtggctggagggtgacgacagtggagaggacgatcgagaatgttgttgatgttgagcctggcgtgttcagaatctcgttgctggatggtgaggagccctcttccatatgcttgagggcagcggcgattgcatctgccatcccctaa

SEQ ID NO: 92376 - DNA, 1466 bp, Oryza sativa
  Clone ID: PAT_MRT4530_90864C.1
atggcgacgcccaccgacgccgccgccgccgccgcgcacgtcctcgtcgtcccgtacccggtgcagggccacctcatccccatcctcgacctcgtccgcctcctcgcctcccgtggcctccgcctcaccgtcgtcgtgacgcccgccacggccccgctcctcgcgccactcctcgccgccgggcacccgggcggcggcggcggcgtctccgagctcaccctgtcgttcccttcgcatcatgctgtccccactggcctcgaggtcgcgaaggggccaccgggcgctgcgcccaggctctttcccatgcacgtcgtcgcgttcgcggggctgcggcggggcacgccccaccgcgtcgtcgccgtgctgtccgacttcctttgcggatggacgcacccgctcgccaaagagctcggcgtcccgcacgtcgtgttctccccgtccggggtttacggcacccccatgctccactccctgttccgcgcgatgccccggcccgcggacgataacgacgacgagagtccggtcagattcgtcgatatcccgggatctccggcgtatccatggcggcagctcactagggcgtaccgcacgcacaagaaaggcgacgagatcgacgagggtttcaagagcaacttcctctggaacctcgagagctcgtcgttcgtgtcgaacacgttccagcggctcgaggggcggtacctcgagaggcctgtcgccgacctgggcttcaggcgcgtgcgcgccatagggccactggcgccggaggctgacgcgtcgggcaaccgcggcggcgagaccgccgtggccgcgtcggatctctgcgcgtggctggaccagttcgccgaccgctccgtcgtgtacgtcagcttcggcagcatgtcgcagctacagccgcctcacgcggcggcgctgacggccgcgttggagcgtaccagcgcggcgttcgtctgggccgtcgggtcatcgcacgcgacgctcctgctcccggaggggttcgaggagcgctcgacggcgagcggcaggggcacggtgatccgcgggtgggcgccgcagctggcggcgctgcggcaccgggcggtggggtggttcgtcacccactgcgggtggatctccgtggtggaggccgtggcggccggggtggccatgctgacgtggccgatggtcgccgaccagttcgtgaacgcccggctggtcgtcgacgagctccgcgccgccgtgccggtgtcctggggaggcgtcgcggcgccgccgaccgccgacgacgtggctcgcgtgctcgaggcgaccgtgctggcggcggacggtggagagggtgggcgcgcgggtggaggagctcgccgtggaggcggcggcggcgacgcgggaaggcggcagctcgtgggttgaggtggacgaactggtgcgggagcttcgcgggcacatgcaacgctaagcttatccgtttacgtctctacgatggccgttga

SEQ ID NO: 92377 - DNA, 322 bp, Oryza sativa
  Clone ID: PAT_MRT4530_90865C.1
gagcaacccagaagcctaggtcatgaccccgcgtcaaaaaaaaggggaaggcccccacacatatagggggaccgaagggaaccaaattagggccctgcaagagctgtggcacgcaggagcatgcacgaaaaagcaacatcatgagacaccgggagagaaacaaaaggaatgtcagtcccatagcataggaccgcgcccgggccagggggaccacctgacgggggattggacgctgaaggagactatatcatagtttgagcccctccccaaactttgtcgaaatcgccttttagtggagggatggatcccacccaggctcctg

SEQ ID NO: 92378 - DNA, 690 bp, Oryza sativa
  Clone ID: PAT_MRT4530_90866C.1
ggtgagttttctgtaataattaccttttgttgggtgcctgttgcaggttttaatcgctaacgttatggtttaaattttaaagaatattttggttactaatcaactgaatttgcatcatttcatgtttctgatgccgtatgtgaccggttgcatatcacagtgttcgccctacagtaacttcacagtcacagcccgagatggattgtgcactggtgccggctgttgccaatcctctctcactggcaacatgtcttaccaccgagtgtacttcaacgaagcgttcaacacttcagaattctacactaacacaagtgccacagatcatgcagagtactgtggatatgccgtgatgatggaggccgcttcattcacgtttcgcacggtgtatttgaacacaacagctttcttggatgagaacaagggacgtgtccctgtgatcctgaactgggttgtgggtaatgagacgtgcgatgttgctaagaagaaggcatcatatgcttgccgtagcaataatagcaggtgcattgattcaaccagtggccctggtaacctctgcaactgcactgaaggctatcatggcaatccttatcttcccggtggatgcaaagatattgatgaatgtaccgttaatgatccgcctccttgccctggacactgcaagaacacacctggcaatttctcttgcccgag

SEQ ID NO: 92379 - DNA, 456 bp, Oryza sativa
  Clone ID: PAT_MRT4530_90867C.1
atggtgcgcatggctggtgtagaccgggagtggttacacagcatggcacatgcgccatgcgctggcactggacacatggacgaggccaagagaggacgttcctggcctagggttgactcgcggtttcacgggcgcgtgtgtcgcagttgcgtaggcatggtgcgcatggctggtgtagaccgggagtggttacacagcatggcacatgcgccatgcgctggcactggacacatggacgtggccaagagaggacgttcctggcctagggttgatcgacgggggcgtcgatctctcttaaggggaagccaatctccaaagaactccggggttaagcgtgcttggcctggagcaatttgggttggcctggagcaatttgggatgggtgaagtgtgcagaaaagacatgtgttggtctgtgagggcagtctatgacctttaaaagctatcagatataagt

SEQ ID NO: 92380 - DNA, 702 bp, Oryza sativa
  Clone ID: PAT_MRT4530_90868C.1
aaaaccaatcctttcggatggctacgaaatcagtcctggctttatagccatgtagccatggttcgagagcaaaccttctctagtggtattagtgaaacccatacctccatcttcgggactttgagctagtgtgttcatgcctatccatcgtaggcatgacacatgaaactctatagtggaagttgtttcctttttcagcgtcgtaggggtccgattttcgcaggcgggcatataatttggagccaaaaccccgccggcaaaaaatgtacccggggtggatggggcggtccgcctgcgaagatcgatatttgcaggcggaccatataagcgacgcttgcgaagatcaatcttcgcaggcagcaggcatcgtgccgcctgcgaagatcgatcttcgcaggcgccgcttatatggcccgcctgcaaagattgatcttcgcaggcggaccgccccctccaccctgggtatcgtcttcgccggtgggattttccatcgccgcgacgcgagcctgccgcctcgcgccccgcgccgctgctgtgagccgtcgccgtcgcgtcgcccgtcgccaccgcgtcgctgtcccatcgcgccgcgcaccgtcacgtcgccactgccgagccgtcgccgtcgccgtcgcccgtgccgttgccgtcgccgccacgagccctacaccgccgtcgccatcgccgtcgcgccgcgccgtc

SEQ ID NO: 92381 - DNA, 179 bp, Oryza sativa
  Clone ID: PAT_MRT4530_90869C.1
atgctgggtttgtttacccatgttgaatttaaacccctcaaggaagaaaagggccgccggctgactagggggggacacaaatcgcatccaaaccacacccagctaaacttacaccacaccggacagggcgtagggacaaaaccaaacacacacaacgatgtcgcggggcccaaaaagga

SEQ ID NO: 92382 - DNA, 1271 bp, Oryza sativa
  unsure (1)..(1271): unsure at all n locations
  Clone ID: PAT_MRT4530_9086C.1
aacctgaaacggaggtaatattatcgatgaacaatgttctgatagctttagggtacatttcttagatacggttggagtaaaagggccggaacaaatacagacattaggacaagaaattatactgcttggcacgctcaaagtaatcccagcctcttggcacattccacgctgctgtccaacgtctcctccaccgtaaacttgtacttgaaccccaaatccccaagcttgtttgtatccgctttcaccctcacatccttcccaatcaccattgtgaaacggaggaagtacggtacatacatgacacattcatatatcccttgaagctttatcgcgatctccgggtacttgacagcgaaacggtcgacatagtcctgcatgttggggtacccaacggcgcagagaaatcggccggcgatggatggttgctgctccatgcagaagatgtgtgcctcgcatatgtcgtctatgtgcgccagtggcacagaacccagcagcgcttgcagggacttgaggccgccgtggtagagctcctggccggtgagcggcgacacgatcagcgggatgcttagcgagtgatagagctgcgtggtgtcggtgtcgccgccgatgagcgcgcatgtcagggtgaccacctcgaacgccctgctctcggactcgttgtacctcagcagtagcttctctgtgagtgtcttggatgaaacataagcatccatcatgacgttgctatagcggttggagagatcaagaggagtccagcatgactcgttgatgaagtccttgtacccctcgccgtcctccctgagcggtgacgcggcggtgacggaggccgtgtggatgacgcgccgcaccgtctttgaccgctcgcattgctgcaggatgatgtgcatcgcgtccacagccgcctcggtggtgttcttgtacttggtgctaagcggatcatgaattagcggggtggcgaggaggaagacgaactcgcagccggcgatggcgggctcgaaggtggcggcgtcgtacatgtccgcctcgaacagcaccagccgctccgccgcgccgggcatcctcctcagcagcgccgtcttcttctcatctccgagatttctcaaggtcgcatgcacgccgcagcctcgctgcagcagcttcttgatgaggcacgtcgcgatgtagccgctgccaccggtgacgcacaccggcctgctgctgctcatcatcgtctcgcgatcgatcagcaattcgcaaattgctgttcgatctcttcttcctccagtccngac

SEQ ID NO: 92383 - DNA, 232 bp, Oryza sativa
  unsure (1)..(232): unsure at all n locations
  Clone ID: PAT_MRT4530_90870C.1
ccttttttctttttatggcctgtgacctgccagngcataattgaaccgatntaaggnaatncncgtatatgaagtatattgcnctntaggctttttacctctcgaatntgaagtactgtctggatgtcnatatccntgaaaagnaaaaaaaaaaaaaaaaaaanaaanaaaaaaanaaaaaaaaannnannaaannannnnnnaaaaannnnnnnnnnnaaaaaaaaaaaaa

SEQ ID NO: 92384 - DNA, 922 bp, Oryza sativa
  Clone ID: PAT_MRT4530_90871C.1
tggatccccgggctgcaggaatcggcacgaggagtctggtgccaataattttacttgtcatatctgcgcacaatcattggatagtagtggaggttgacaatgatggctctactgcaaaattggtcaaatgtcttgaagtaaaagtttatcttgttagtagtttctaaaaagtacatacatctgacatgggtgatgcttagagcaatttcgcctcatgtttagaatgatatgaacatctgatgaagatgttcattttacgcgtttcttaacccaagaaacctgtttaacattttacagtttagttactccccaaggcattttaatttgtaggccacaatgactcacaaccatagtttgtcaggttttcccttataaacttattattgttaagcaatccatgcatatttggtgtcatttctccttttgttggcatatgacgaaaacatttgataggagcttagtgactttttcttttagaaaatggattaaaaccgagcctctacatccaaacaggatgaggatgtatgcagccaattcccagtgacttgcagtaggaactaaagcttttcagattatcctattaagtttttaaggttttgtaatcagactgttctatataaaaatccaaacaatgctttcatcattgcgatagcaatttctgtgcatcttattcgattgttttgtaccagaaataaaaggagtggtccaagccggtttgcaagtcatagtggaactatacatttgttctaccggtggaggcagtatttggatgggtcatttcacctgagcaaatgtggttgtgtgtgttactgtgcatgtgtgtgttgttttcctttttttttcctcttgccctttgttttgctgtttttacctgatgaagtataatgaaatggtagggcagcaacaggtagccctttgtttt

SEQ ID NO: 92385 - DNA, 597 bp, Oryza sativa
  unsure (1)..(597): unsure at all n locations
  Clone ID: PAT_MRT4530_90872C.1
acctcgtccgcgcttgtctgaccggggatcttcgagcgcatcccacatcncgggatcttancgacgtcngacaactgcgaggcctactgcacctggcgtgggacaagtggacgcggcgtacccggcgacacggttctacgtggggatgacggcatcggagatgacgcacgggtgggtgcaccccaagaacgtctactacgacgtcgccccgtccacgcagaaggcggacaactacggcggcttcatgatctgggaccgatactacgacaagctgagcaactacaccagcatggtcaaggcctatgcttgagcctcatctgatcgtgatcgacttctcccatccgtgccagtaggccaagcagcatcactggctactacaaactctgtctgtcgaatactctgtctgtcatcgcctatcctccacctcgtctatgtccgtgtatgcatttgtgcttgcaagaaagaataaagtgaagaataaacgttattagggctacataataaaagtggagaataaactttatatgtatgacccagttgacaataaagtactcaatctcgagcattttcctggctaaaaaaaaaaaaaaaaaaaaa

SEQ ID NO: 92386 - DNA, 130 bp, Oryza sativa
  Clone ID: PAT_MRT4530_90873C.1
aatataattaacgttcgattcattatacagtgagctatataaacacatggtgcgacctagcattaaatccatacaaataactatttgtattatatattcagccattctactataaaaccttgctaaacga

SEQ ID NO: 92387 - DNA, 573 bp, Oryza sativa
  Clone ID: PAT_MRT4530_90874C.1
atgaacactgcagctcgaagccaggagatcaagcagggattgtggaagtatagcgacgaacgttgtcgttggcacactttcagttcagtccaagcaaatgtgcactctgcgtacatgcgatcagatgaactcaaggagacagacgcagataaactcactgatgtcaagattagagtggatcctcccaagttgctcgttcaggctcatggggatcaatctgaagatcagggatctagcactgtctctgatttcgtcgggcgcgagctcgaggagcaaggttaccctgttgtcgactacgagtcagaccttcaaaccgccatgtcgacaacagatttcgacgagatgggttcaagagatggattctccgacaacatactactcgacaacttcggctataggagatctaacccgaccggagaaatcgtcgccgtggagagtcaacccaatgatgacggcatgtgggatcggtttgagctactgatcaggccctccgcccgcgacatcggctggaaaatcctattcgacattgacgaaggctccatgtctctatggttctacaccaagatcgactaa

SEQ ID NO: 92388 - DNA, 431 bp, Oryza sativa
  Clone ID: PAT_MRT4530_90875C.1
aaaaaggaaccaaaaaaaaccccccttaacccccccaaaaaaaccctttttttttcccccaaacattggggggctggaaaaacctgaggggccccaaaaacaagggccaaaaaaaaaccccctaaaacccctccccccaagggggaaaagcgggacccccccccaaattttcacggccccattttcccctctggggtaaaaaacaaagttttcctaaaattgggcccaccccccccccccggggcccttggctaaaaggggttttttttttaactggacaaaaaaaaaagaggggggggcaaaacacccttttctttaaaaagggggggggttggtttttaggggggggcccaaatttgaaacctgggggacccccacaagattttgtttctttccaaaccccaaaaaattgctctttggaggggcccccc

SEQ ID NO: 92389 - DNA, 213 bp, Oryza sativa
  Clone ID: PAT_MRT4530_90876C.1
atggactcatggcactcacagctgtttttgtggcgcagatcttctggtgcggggcgatcaccagtgaaagaggtcgacgtatatgtagtcattgtttcgtcgcgcgtgcagaaccactggctaatggcaagggatggggcgctgggggcgatggcggcgcttggcggcagggcgacgccgaagatgcgcatggcggcggtggtggcgctatga

SEQ ID NO: 92390 - DNA, 882 bp, Oryza sativa
  Clone ID: PAT_MRT4530_90877C.1
atgccgcggaccgaatgccggcggtggtactcgccatcgcagccgacgatgcagcgggacctccaggtgtggaacccgtcatcctcctcatccgtcgcacggggaaggcccgaggaggaggtggcaatggcatggcctgagtacgaggcgaggctgcgggtggcgggctccgccaactgccgcgactcgggcaccgctcgtgttgccatgaacaggacgtgcagccactgtgacgagctcccgccgtggagggccggcaccactagctgctgctccgagcggcgcgccagagaaggcaacgatggcgaggcggtcggatcgtatcctgctctgagctccgtccgagatggaagggggaagccgtgccgagctccgtccgcccacacgcctccgagagggagggggaagccgcgccgagctcctcatccccacccctccccccccccggtcgccgccaccacgtcacgcgccgccgctccgtgtcctccaccgccgctgacccgtgagacggtggggcccacctgtcactctgtcagcccgcgcgaggctggcaagggggcagagaggccggcggcagcaacgacgtcgtcgataggaaggaggaggaggggaaggggaaggcccctgctccggccggccgcgggcacgcgcggcaagcagatgcggcagctgctcaagttcgacgagctcgcctcctctctcacgaagctcatcgtcgggttctgccactgtcgccgtcgagctcgcgccgctgaccttgagctcgccctgccaccctgctgctgctgtcgagctcgcacccaccccgctgacgctgagctcgcagacgcctaccccgcacgcgcggcggcggtcggctacccactgccaccgtcaagctag

SEQ ID NO: 92391 - DNA, 594 bp, Oryza sativa
  Clone ID: PAT_MRT4530_90878C.1
atgaggagctcggcgcggcttccccctccctctcggaggcgtgtgggcggacggagctcggcacggcttcccccttccatctcggacggagctcagagcaggatacgatccgaccgcctcgccatcgttgccttctctggcgcgccgctcggagcagcagctagtggtgccggccctccacggcgggagctcgtcacagtggctgcacgtcctgttcatggcaacacgagcggtgcccgagtcgcggcagttggcggagctgaacgactacgcaacggcgcgggcacacagagctacgcgactactgatgacgacgcactcgagccggtcaaccccgccacccgcagcctcgcctcgtactcaggccatgccattgccacctcctcctcgggccttccccgtgcgacggatgaggaggatgacgggttccacacctggaggtcccgctgcatcgtcggctgcgatggcgagtaccaccgccggcattcgattgaggaggccatgattggtgggggcaagccaatgacgatggtcttgccagttgacagcaaaggtttatttcttcttcttcttgcggggttggaaacggggtga

SEQ ID NO: 92392 - DNA, 1026 bp, Oryza sativa
  Clone ID: PAT_MRT4530_90879C.1
atggcgttcggacgccgttcactcttcttgccggtggtgggcgtcgcggccatcctgctgctcgccgccggccacgcgaccgccgtcaacaccggcgagaccgtcgtgttctggggccggaacaaggacgagggctctctccgtgaggcctgcgacaccggcctctacacctccgtcatcatctccttcctcgccgtcttcggccacggccgctactccctcgacctctccggccacgacgtctccgccgtcggcgccgacatcaagcactgccagtccaagtacatccccgtgctcctctccatcggcggccagggcggcgcctactccctccccaccaacgcctccgccgccgacgtcgccgaccacctctgggactccttcctcggcggcggccgagccggcgtgccccgccccttcggcgacgcggtggtggacggcgtcgacctcttcatcgaccagggcggcgccgagcactacgacgagcttgcccggcggctgttcagccactacaagttcgagatgctgctgacggcgacgacgaggtgctcgtacccggaccaccgcctcgacatggcgctggcgacggggctgttcacgcacatccacgtccgggtgttcggcggcggcggcgacgccggctgcacgacgcgccacagggcgtcgtgggagaggtgggcggcggcgtaccccggcagcctggtgtacctcggcgtggtggcctcgccggagcaggacgccaacgcctacctgccgcgtaaggtaaaagcgaattttgcatgtggccaaagcaaccgcatgcaccaaaagactgccgccgtcgtcgcccagatccgtgctggacccacgccgctcgcgcagtcatcatccgctgcccccatcgcccgccatcatcgccaacaacggatccatgcgagggaggcccccggtgccggcggctcagaggaggagaggagagaaagagagaggggaaaggaaatgagaggagagaaagagaagatagagaggataaatcggcaggagtaa

SEQ ID NO: 92393 - DNA, 594 bp, Oryza sativa
  Clone ID: PAT_MRT4530_9087C.1
atgcatgctggcacggaccgcttcaagtttagttgcgatgtactactagcagctaacagtcaggacacactgtgtactgttatgttagcgtggagacgagccagccatgcatatgtagtgctgtcatctgttcatttgttgcttcagcgtacgtacgaggccacaaaagagctgaaaaataagctagctagctacctcttcctaatcgatcgcttcttcttcttcttcttcttcttcttcttcttcttcttctttttagtatctctaactagctgtgtgtatagagatattcctgggctgccgcagcgatggatgcatgcaaaaaaggctagtaggattgatgcggtggggggaatcaatcaaatccagtcgcgcattctacgggcttcaattcgatacgacatgtatgctgatcgatcaatgctgccagctagctgcgtacgtacatactactctatatactgtacgtactacgcggtagagcactgtagcatacagtacgtacgtgtaggagttgttgtaatttgcagccatataggagtatcgatctctatcaaccatatggttcacaactccactccaaattataagtac

SEQ ID NO: 92394 - DNA, 537 bp, Oryza sativa
  Clone ID: PAT_MRT4530_90880C.1
atgggggtgctcatctcgtgtccggtggatgatgagaccgcggtggaggatgggcagctcgccgctccggcggcgtggacgaatgcggtgcagcagacggtgctcaaggcgtcgctggctccggcggcaagctgcagactgagcttcaagatgaggggggagcagcagcagagcctccaggtggagaccaagatcttcgtcacctcgctgcgcgccgcgccggcgcccatgccgatgatgccgagggatctttgtggtgtccaagtgggcgagggtaagaacacgagcagccaaggtgcaccggaaaggcgcaagggtatttcagtcactccgcatcaaaaatcgggacccttagcactttatcagcacaaatacattattttagtcggcgcagtgtctgttggcaaattaccacgattatggagtgtcttttcccaaacggtgaatgcagtatcagcagcccccaacgcagttggtccaggaccaagccttggcaccagaagggggatcaacagggttgatttagtcaagacataa

SEQ ID NO: 92395 - DNA, 1163 bp, Oryza sativa
  Clone ID: PAT_MRT4530_90881C.1
aaaaacagctagctaattaactcaccatcatggcgttcggacgccgttcactcttcttgccggtggtgggcgtcgcggccatcctgctgctcgccgccggccacgcgaccgccgtcaacaccggcgagaccgtcgtgttctggggccggaacaaggacgagggctctctccgtgaggcctgcgacaccggcctctacacctccgtcatcatctccttcctcgccgtcttcggccacggccgctactccctcgacctctccggccacgacgtctccgccgtcggcgccgacatcaagcactgccagtccaagtacatccccgtgctcctctccatcggcggccagggcggcgcctactccctccccaccaacgcctccgccgccgacgtcgccgaccacctctgggactccttcctcggcggcggccgagccggcgtgccccgccccttcggcgacgcggtggtggacggcgtcgacctcttcatcgaccagggcggcgccgagcactacgacgagcttgcccggcggctgttcagccactacaagttcgagatgctgctgacggcgacgacgaggtgctcgtacccggaccaccgcctcgacatggcgctggcgacggggctgttcacgcacatccacgtccgggtgttcggcggcggcggcgacgccggctgcacgacgcgccacagggcgtcgtgggagaggtgggcggcggcgtaccccggcagcctggtgtacctcggcgtggtggcctcgccggagcaggacgccaacgcctacctgccgcgtaaggttctcttctccgacgtgctcagccacatcgtcgagaagcccaactatggtggattgatgatctgggataggtactacgacaagaagaccggctactccgctggaaaagtaaaagcgaattttgcatgtggccaaagcaaccgcatgcaccaaaagactgccgccgtcgtcgcccagatccgtgctggacccacgccgctcgcgcagtcatcatccgctgcccccatcgcccgccatcatcgccaacaacggatccatgcgagggaggcccccggtgccggcggctcagaggaggagaggagagaaagagagaggggaaaggaaatgagaggagagaaagagaagatagagaggataaatcggcaggagtaa

SEQ ID NO: 92396 - DNA, 376 bp, Oryza sativa
  Clone ID: PAT_MRT4530_90882C.1
tcgtgacacaaatctttgatcccattcatcggctcctcctcaaattccacatacaacctcgacggagagccgacaccggcgaatcaattgatcccggtggagcactacaccatggaaggggtaaatgcactgtgggcgtagccccttgcaacagtgccaggctccccagcaaatttggagcccatcagcgagctccctggttcggccaaaccaggggttcggccaaacccctctcggccccgttcggccccccgtaggacagcgcgatccctctcccctcgacatgtcgcaagaccaaaaatccggagggattcgcttgcaagacggccgactacgggagagcttggcttgttaaaggcacgatgccttttccaag

SEQ ID NO: 92397 - DNA, 315 bp, Oryza sativa
  Clone ID: PAT_MRT4530_90883C.1
atgattcaaaaatcccctgtaaaagatgaaaggtcaccaataattactggagatgaaggagggggtgctgcgttactatccttattgagatcacctctgctgtcaaaaaaggattatgaggtagattacaagaaggaggcggaatctacctcagatacacctactgacaatgagaaggcaaagaattccatcagggatatatttgtatttgtggtattgtctatctgtttattgcttcggagcacccatccctcaaaatatcccaaatcactgttcaccctttggcactgtggcaggacaacgttaacagtgtaa

SEQ ID NO: 92398 - DNA, 1893 bp, Oryza sativa
  Clone ID: PAT_MRT4530_90884C.1
atgagctccgcgccgcagcagttgctcgattcgtcgtctccggggccggggccggggccggaggtggaggacgacgggggaaggagggtgaggaagccctacaccatcaccaagtcgcgggagagctggaccgaccccgagcacgacaagttcctcgaggcgctgcagctgtttgatcgtgattggaaaaagattgaagcatatgttggctctaagactgtaatacagttggttgcctttgttactgaatatttcagagttttacaatttttaaatctaccgggcggagatcttattataaaccttggagttcttgcagcccctcaagttgtcctaccacaacaagcttctcatctaatggagcaaggctgtcttatacctatggacatatctcctgttgctagaaactttaatgcaaatgatgtattttcttcctgggatagtgctcttgcccaaagtttcagtccaaggcatacacatggtgcagcaaataattgttctagtagcgtagagagccaatctggaacttgtccaacttctgaggcaattgagcaagagatcatgcttccaacgctgcgtgccatgccagactttgctcaagtatacaacttcctgggaagcatatttgatccagagacaagtgggcatcttcagaggttgagagagatggatccaatcgatgttgaaacatggtggataccagttactacatgtggcttagataatcttgacatagtgctgttactgatgaaaaatttgtcaataaacctgacaaacccaaactttgaagcacataggaagcatatggcgtgtaaaaagttgtcaaagataaaatcttcacgaaacagtgtggtgtgtactctttccttttgcttggaagcaagtacgagcgtatatatttcttccaagaagaagaagaagaagaagaagaagagattgggtgcaatggtgcaaggtgcgagcggcggaggatggtcatcgaaagtggaggagggggtgatcgtgggtgggttgctggtggtgcagtgcatcctcgccggatacgtggtgttcgtggaccatgtcctcagccttggagccaacccgctgtccctcatcgtcctcggcgccgtcgcctcctccctcttcttccttcccttcgccgtcgtcctcgagaggaagaaatggccttccaagatttctcgcactctcatggcgcaattcgtgttcatagctcttggaggaacaacggtgtttcaagaactgatgcttctgggaataaagaagacaacaccagctatcgcatcagccatgccaaacttgagccctggactcatcttcatcattgcggcttgtttcaggttggagaagtttgacaagggatgcaagtacacaagagccaagatactgggaacgttggtgtgcttggtgggagctatggccatgagcttcttgcagagtcccgtttcgtcttctccacaactcacaacaactagttactatgactggatccttggttgcttctaccttttcctggcagtagttgttctctctatctacacggtgctccaggcagcgacgttggtgagcttccctgcgccattgacgatgtgcagcgtaacatcgatgatgggcgccgtcttcaccgcgatcctgcagttcatcgtggacggcaagatcgacatgggctcgccgagaatcgatgaaaccatcatctcaacgatcgtcctgatgaccgtctgttctgccctcctctctgctcttctcttctcccagttgctctgcctcggaagcttggcagggatggtgctcatgttctgtgggctctacatcgtcttgtgggcgaagagcaaggaaggtcatagtattattcatttggaaggtggcgatgttgagaaggctcttttatcctaa

SEQ ID NO: 92399 - DNA, 182 bp, Oryza sativa
  Clone ID: PAT_MRT4530_90885C.1
tttggttttttaagagtggatgtattacaagtttgtttaatttaccaaagggatagatcgatcgattacaatatctttgtttgtcaacgtttgaattcaattcaaaaatcatggggtgggttcaaataaacagaagggggcctatttccaaactagcaaacaaaatgattttgattgataga

SEQ ID NO: 92400 - DNA, 368 bp, Oryza sativa
  unsure (1)..(368): unsure at all n locations
  Clone ID: PAT_MRT4530_90886C.1
atatcaagcttatcgataccgtcnancncgagnnnggggnagcaacggcggtggtgcgnacgnggcgncggtggcgcggncattgatggctgtgcggnggcggctcccctctcctccctccccgagntccggcccaacaaggagnggggnnggcggtggtggcggcaaacacctccctccctcccaaatccggacagaggggggaggggggcggcggcancaccgcatgcaaaggagtttgccggcgacnactacttttcgttttaaagcttacatgttgattgatgttaacttgtaaattgatgttgtggatttgaatccaatgctttgtgttgatgtatggatttttggattggattttgttttaa

SEQ ID NO: 92401 - DNA, 356 bp, Oryza sativa
  Clone ID: PAT_MRT4530_90887C.1
tccagtgtaggtccaaggctagcctcgagccgggcctgcttacatctggcagcttttataggtcgtagattgccatcacagaccaacacaagtcttttctgcacactttgttctcactcgtgaagaatttcctgatcggtcacccatccctaaattactctaggctaagcacgtttaatctcagagttttttagagaccggcttccggaaaagaagttgcaacttgttgatatgagtattctattaatcctattaagccctgggccgggatgtcacaccctcaccccctttaagaattatgtctccaccatacctaaatagaaaggaaatagtgcaatctcttgcatcgagaatca

SEQ ID NO: 92402 - DNA, 591 bp, Oryza sativa
  Clone ID: PAT_MRT4530_90888C.1
gcaggcagcgctggcttcggctcggctgtaccggtcggtagtgacgcggggcgacgatgcaggagtcggcgccggtcaacagcggccgcggaggacatcggcgaggcgggagtcggtgccggtcggcagtggccgcggaggagatcggcgaggcgtcgttggtattgtcctcgacgacttcaagcgcgaccgtgagggcgaggcgacgacgatttggcgagagatggaacgcgatgcgaggggacggggttgcggccttgcggggggtttggcgcagatcgcatcgtgggtggacaggaagctcgtggctccggccgacgccaccggtctccgactctcccccagcgcccgccgccaccagtctccacctctcccccagcgtcctccgccgctgggaaatccagctcccgccgccgctggtctccgcctctcccccagcgcccgccgccgtcggccacctcaagcgcccgacgccgctggcaagctcaagctcgtttcctcatggtccaacagtgaaccgttcaagtgccagcggagctacggaggtgagttctccccctccaccgtcgagctcctccccgtggttaacgg

SEQ ID NO: 92403 - DNA, 428 bp, Oryza sativa
  unsure (1)..(428): unsure at all n locations
  Clone ID: PAT_MRT4530_90889C.1
gcagttcgttcgttcgtccgctccggttgacggtaggaatttaccgtggtcgttgaccattacaccggcggnctcttgaccgaagccggttggcaagntcaacggcgttgactggttcaaccgggatcctcgaactcctcctagctgcgaggctgcaaggaattgaggatcgacgatgacgacgaacttcagagttgtgatgtgattctttattttgctataggagctctatcaagtgtagattgtgaaacgcatttgtgatgtgattctttatttctttcccatatatagctaagaaacaactgcataatacattccccgcaaaagaaaaaaaagcaaaagtaaagtgcttctgtggtaattgttacgagttttgttccattgaatatagtcaagacgattgcatagcaaaaaaaaaaaaaaaaaaa

SEQ ID NO: 92404 - DNA, 1219 bp, Oryza sativa
  Clone ID: PAT_MRT4530_9088C.1
tgttttgttttttttttttttttttttttttttttaacctgaaacgggggtaatattatcgatgaacaatgttctgatagctttagggtacatttcttagatacggttggagtaaaagggccggaacaaatacagacattaggacaagaaattatactgcttggcacgctcaaagtaatcccagcctcttggcacattccacgctgctgtccaacgtctcctccaccgtaaacttgtacttgaaccccaaatccccaagcttgtttgtatccgctttcaccctcacatccttcccaatcacccctttaagctttatcgtgatctccgggtacttgacagcgaaacggtcgacatagtcctgcatgttggggtacccagcggcgcagaggaatcggccggcgatggacggctgctccatgcagaagatgtgcgcctcgcagatgtcgtcgatgtgcgccagtggcaccgaaccgagcagcgcctgcaggtacttgaggccgccgtggtatgactcctcgccggtgagcggcgccacgatcgccggcacgctgagcgggtggtagagccgggtggtgtcggcgtcgccgccgacgagcgcgcacgccagggtgaccacctcgaacgccctgctctcggactcgttgtacctcagcagcgccttctcggtgagcgtcttggatgatgcgtaatcactgtgaaacggagatagtacatccaccatggtgttgttgtagctgtgggagtgatcgagaggagtccagcatgactcgttgatgaagtccttgtacccctcgccgccgtcctcccggagcggcgacgcggcggtgacggaggccgtgtggatgacgcgccgcaccgtctttgaccgctcgcattgctgcaggatgatgcgcatcgcgtccaccgcggcttcagtggtgttcttgtacttggtactgcgagggtcgtgctgcagcggggtggcgaggaggaagacgaactcgcagccggcgatggccggctcgaaggtgtcggcgtcgtacatgtccgcctcgaacagcaccagccgctccgccgcgccagggagctctctcaacggcgccgtcttcttctcatctccgagatttctcaaggtcgcatgcacgacgcagcctcgctgcagcagcttcttgatgaggcacgtcgcgatgtagccgctggctcctgtgacgcacaccctgctgctgctgctgctcgtcat

SEQ ID NO: 92405 - DNA, 1119 bp, Oryza sativa
  Clone ID: PAT_MRT4530_90890C.1
atggatgatccaatgctgaatgcggtgaaggaggaggagagccacggggacggaggagggttggaggtggtggcgggagaggatggggcggcggcggtggcggcgggggtggcgccgaggccgatggaggggctgcacgacgccgggccgccgccgttcctgaccaagacgtacgacatggtggacgacgccggcaccgacgccgccgtgtcgtggagcgcgacgagcaacagcttcgtggtgtgggatccccacgccttcgccaccgtcttgctccccaggttcttcaagcacaacaacttctccagcttcgtcaggcagctcaacacctatggtttcagaaaggtggatcctgatcggtgggaatttgcaaatgagaattttctgcggggacagagacatcttctcaagaacatcaagcgtagaaaaccaccttcccatactgcttcaaaccagcaatcccttgggccataccttgaggtgggccactttggatatgatgctgagatagaccggctgaagagagacaagcaattattgatggctgaggtggtgaagctaaggcaggagcagcagaatacaaaggcaaatctgaaagccatggaggataggctgcaaggaaccgagcagaggcaacagcagatgatggcattcttggcgcgtgtcatgaaaaatcctgagttcttaaaacaacttatgtcccagaatgagatgagaaaggagctccaagatgccatttcaaagaaaagaaggcgtcgcatagatcagggacctgaagttgacgacgtcggcactagcagtagcatagagcaagagtcaccggccttgtttgatccccaggagtcggtggaattcctcatcgatgggattccctccgatcttgaaaactcagctatggatgctggaggtctggtggagccacaggatttcgatgtcggcgcctccgaacagcagcagatcgggccccagggggagttgaacgacaatttctgggaggagctgctgaacgaagggcttgttggtgaggagaacgacaacccggtcgtcgaggacgacatgaatgtgttgtcggagaagatgggttacctcaactcaaatggcccaacggctggggaatag

SEQ ID NO: 92406 - DNA, 234 bp, Oryza sativa
  Clone ID: PAT_MRT4530_90891C.1
tttgattcctaagacaacaattaacaacatggtagcctgtgagttcatcagattcactactacattgatcttcattcataattcactctcattgacacctttctgaaattcagtttccctgtcggtcgaatttattttaccagatcctacaagcactaactcttgatgttattcctgccagattgttccagtcctgatgggcgcgactttactccttcaggatcaggtgactct

SEQ ID NO: 92407 - DNA, 551 bp, Oryza sativa
  Clone ID: PAT_MRT4530_90892C.1
attctcagaggaagcgacgggtgatggcttcaagctggacggcgacatctcatcctgtaccctagatccacacgagaggatggactggcctctcggcggctcgatctgcggggctcccatggcgatagagggcctctgggcctgcatccgccgctgcttttctaccattggttgctgtccatgctagagcagcaagatgggatggatctgatggggaggaatgagtttgtttctttcgatctattgcgggcatccaaagtcagccatgtggagagcatcgtcggcgaccatgatgtgaggaggcagcaagggtaccggttttaggtgcccgtagtggataccgtcaccccgcatctggtggaggaggcggctggaggcaggatccggtttctggcaacttgatctagttttgtggtcatgtcgttgtgttgagggcggcagctcgatctgccctccggagcgaggacggcgttgctgcgcaaaggtgacgtcctgttccccgtgccggtggccgtgtgttagggagggcccgctgctgaggcccccaggcg

SEQ ID NO: 92408 - DNA, 302 bp, Oryza sativa
  Clone ID: PAT_MRT4530_90893C.1
cccgcgtccggtgttctggggtggctcctatatcgttccggctcgccggagggacatggggcccccaaacagtgggcacctgggagctgcaccgatggctccgagtctcctgccctgcgcgggtaaccaggctggcacgggcaccgggggccgtgacgagcactccgcaggactgctgccggcagctcgccgcggtcgacgacagctggtgcagggtgctcgcgctcaaccacatggttggaggcatctacagggagctcggcgccacgatgttggcacccatggcgagtgttcccgctgcc

SEQ ID NO: 92409 - DNA, 2610 bp, Oryza sativa
  Clone ID: PAT_MRT4530_90894C.1
gcggctgcggcggcaaggcggcgagacgtgggagagggatttacaggtagagggagagggtggaggaggagaggctgaggctaggaagcggtttcgccatggcgagcgtcgacccgtcccggagcttcgtgagggacgtgaagcgcgtcatcatcaaggtgggcactgcagttgtctccagacaagatggaagattggctttgggcagggttggagctctgtgcgagcaggttaaggaactgaactctttaggatacgaagtgattttggtcacctcaggtgctgttggagtggggcgacagcgacttaggtaccggaagcttgtcaatagcagctttgctgatctgcaaaagccacagatggagttagatggaaaggcttgtgccgctgttggtcagagtggactgatggctctttacgatatgttgtttaaccaactggatgtctcgtcatctcaacttcttgtcaccgacagtgattttgagaacccaaagttccgggagcaactcactgaaactgttgagtcattattagatcttaaagttataccaatatttaatgaaaatgatgccatcagcactagaaaggctccatatgaggattcatctggtatattctgggataatgacagtttagcaggactgttggcactggaactgaaagctgatctccttattctgctcagtgatgtggatgggttgtatagtggtccaccaagtgaaccatcatcaaaaatcatacacacttatattaaagaaaagcatcagcaagaaatcacttttggagacaaatctcgtgtaggtagaggaggcatgacagcaaaagtgaaggctgctgtcttggcttcaaatagcggcacacctgtggttattacaagtgggtttgaaaatcggagcattcttaaagttcttcatggggaaaaaattggtactctctttcacaagaatgcgaatttgtgggaatcatctaaggatgttagtactcgtgagatggctgttgccgcaagagattgttcaaggcatctacagaatttgtcatcagaggaacgaaaaaagatattgctagatgttgcagatgctttggaggcaaatgaggatttaataaggtctgagaatgaagctgatgtagctgcggcccaagttgctggatatgagaagcctttggttgctagattgactataaaaccaggaaagatagcaagccttgcaaaatctattcgtacccttgcaaatatggaagaccctataaaccagatacttaaaaagacagaggttgctgatgatttagttcttgagaaaacatcttgcccattaggtgttctcttaattgtttttgagtcccgacctgatgccttggttcagattgcatctttggcaattcgaagtggtaatggtcttctcctaaaaggtggaaaagaagctatcagatcaaacacgatattgcataaggttataactgatgctattcctcgtaatgttggtgaaaaacttattggccttgttacaactagagatgagatcgcagatttgctaaagcttgatgatgtcattgatcttgtcactccaagaggaagtaataagcttgtctctcaaatcaaggcgtcaactaagattcctgttcttgggcatgctgatggtatatgccacgtatatattgacaaatcagctgacatggatatggcaaaacttattgtaatggatgcaaaaactgattacccagcagcctgcaatgcaatggagaccttactagttcataaggatcttatgaagagtccaggccttgacgacatattagtagcactaaaaacagaaggagttaatatttatggtggacctattgcgcacaaagctctgggatttccaaaagctgtttcatttcatcatgagtatagttctatggcctgcactgttgagtttgttgatgatgttcaatcagcaattgaccatattcatcgttatggaagtgctcatacagattgtatcgtcactacagatgataaggtagcagagacttttctacgcagagttgatagtgctgctgtatttcataatgcaagtacgagattctctgatggggctcgttttggattgggtgctgaggttggcataagcacagggcgtatccatgcccgtggaccagtgggtgttgaaggtctcttaactacacgatggatcttgcgagggcgtgggcaagtggtgaatggtgacaaggatgtcgtgtacacccataagagtcttcctttgcaatgaggtcaaatgctccttttagcctgttcaggagtaggtgaatatccttttaagaatggattgactactttattttgtcatcttgtacaagcatcttattgcggcattccgatggattattgattttgggggtcccactttcaaatgtgacaccaaaaataaattcatcagttctgagagcaagattttggaggttcagcttctccatgtaataagtaaattcagttctgagaacttgtgtaccaacgcgctatgttgcttgtaatgagcgatactaacatctgtgattgcacatatactaattgctatctccactttttcaaaaataaaacaaaaaaaagccgtggatgcatatatttggtag

SEQ ID NO: 92410 - DNA, 2268 bp, Oryza sativa
  Clone ID: PAT_MRT4530_90895C.1
atggcgagcgtcgacccgtcccggagcttcgtgagggacgtgaagcgcgtcatcatcaagattatcaggagtggggctttgcttgggcttttctgtggtttacttgatgtgacggcctatgtcgaagttgccaatctttcgactctggtgggcactgcagttgtctccagacaagatggaagattggctttgggcagggttggagctctgtgcgagcaggtgcctaaccaaagaaaagtggcaatgcaggttaaggaactgaactctttaggatacgaagtgattttggtcacctcaggtgctgttggagtggggcgacagcgacttaggtaccggaagcttgtcaatagcagctttgctgatctgcaaaagccacagatggagttagatggaaaggcttgtgccgctgttggtcagagtggactgatggctctttacgatatgttgtttaaccaactggatgtctcgtcatctcaacttcttgtcaccgacagtgattttgagaacccaaagttccgggagcaactcactgaaactgttgagtcattattagatcttaaagttataccaatatttaatgaaaatgatgccatcagcactagaaaggctccatatgaggattcatctggtatattctgggataatgacagtttagcaggactgttggcactggaactgaaagctgatctccttattctgctcagtgatgtggatgggttgtatagtggtccaccaagtgaaccatcatcaaaaatcatacacacttatattaaagaaaagcatcagcaagaaatcacttttggagacaaatctcgtgtaggtagaggaggcatgacagcaaaagtgaaggctgctgtcttggcttcaaatagcggcacacctgtggttattacaagtgggtttgaaaatcggagcattcttaaagttcttcatggggaaaaaattggtactctctttcacaagaatgcgaatttgtgggaatcatctaaggatgttagtactcgtgagatggctgttgccgcaagagattgttcaaggcatctacagaatttgtcatcagaggaacgaaaaaagatattgctagatgttgcagatgctttggaggcaaatgaggatttaataaggtctgagaatgaagctgatgtagctgcggcccaagttgctggatatgagaagcctttggttgctagattgactataaaaccaggaaagatagcaagccttgcaaaatctattcgtacccttgcaaatatggaagaccctataaaccagatacttaaaaagacagaggttgctgatgatttagttcttgagaaaacatcttgcccattaggtgttctcttaattgtttttgagtcccgacctgatgccttggttcagattgcatctttggcaattcgaagtggtaatggtcttctcctaaaaggtggaaaagaagctatcagatcaaacacgatattgcataaggttataactgatgctattcctcgtaatgttggtgaaaaacttattggccttgttacaactagagatgagatcgcagatttgctaaagcttgatgatgtcattgatcttgtcattccaagaggaagtaataagcttgtctctcaaatcaaggcgtcaactaagattcctgttcttgggcatgctgatggtatatgccacgtatatattgacaaatcagctgacatggatatggcaaaacatattgtaatggatgcaaaaattgattacccagcagcctgcaatgcaatggagaccttactagttcataaggatcttatgaagagtccaggccttgacgacatattagtagcactaaaaacagaaggagttaatatttatggtggacctattgcgcacaaagctctgggatttccaaaagctgtttcatttcatcatgagtatagttctatggcctgcactgttgagtttgttgatgatgttcaatcagcaattgaccatattcatcgttatggaagtgctcatacagattgtatcgtcactacagatgataaggtagcagagacttttctacgcagagttgatagtgctgctgtatttcataatgcaagtacgagattctctgatggggctcgttttggattgggtgctgaggttggcataagcacagggcgtatccatgcccgtggaccagtgggtgttgaaggtctcttaactacacgatggatcttgcgagggcgtgggcaagtggtgaatggtgacaaggatgtcgtgtacacccataagagtcttcctttgcaatga

SEQ ID NO: 92411 - DNA, 966 bp, Oryza sativa
  Clone ID: PAT_MRT4530_90896C.1
atgacgatctatgatgctccggagataaaagagaaacaggagaaagcgcaagcagcccagccaaagcagcagcaggtgtggacaaattgtgttggaagcacaactcttcaggaaatgaatcatgttcaaagtgctattcccactcttcatctcaatcttttaaagaaaacctggtcagacaaattgatccctcctaaagttaaaacttttatgtggagacttattcgtaatgctttgccaactgcaaataacttgcattttagaattccagacattcttgattcctgtcacaggtgcaactcggcaaaaacttcagttcatctgttctttcattgctcatttgcccgtctttcctggatgatctctgatttcaagttgaatttccaaatcattgatagtatgaattcagttccagagattatttctttcattctagcagcttcttctaaaactgaaagctttcaaaaattttgtatttttctctggtttatctggaaagctagaaatggttcctacttcaaaagaaaaaactgggagccttctcaagtttgcattgcagctgatgttatggcttcaaactataacaccttaacacaagctcaaaatcaggatgataattctctcttttttaattctcctgattcaaatatctccattccttctggaacaagatgttttgttgatgcttcatggaaggatgataagtcaggttttggtctgtttcttcatgacccaacatctcacaaggctttatttgtaaaggccagttctgacacttatacttcagctttgcaagcagaacatgctagtatttatgttgcgctctgcatttgtcaaaaacttaagatcacagatgtggtctttctttcggacaatcaggtacttgtgaaacagcttcgtcaacgaaattttgctgctcatcctcagcattggagtctgcttcccctgctccagagatctgaataa

SEQ ID NO: 92412 - DNA, 2133 bp, Oryza sativa
  Clone ID: PAT_MRT4530_90897C.1
atgcaggatcactgcgttggtgttttactccgcatggcccccgtcgtccaccctttcttcctcctccccctcctcgtggcgatcgcttccatcccaggatcagtcaatgccgcagcatcgtcccagcagaccgacgcgctactggcatggaagtcgagcctcgctgacccggtcgcgctgtccggctggacgcgggcttcgccggtctgcacctggcgcggcgtgggctgcgacgccgccggcggcggccgcgtcacgaagctgcgcctccggggactgggactcggcggcggcctccacacgctcgagctcgacttcgccgcgttcccggcgctcaccgagctcgacctcaacgggaacagcttcgccggcgacatcccggccggcatctcgcaactgcgctcccttgcctcgctcgacctcggcgacaacgggttcaacggctccatcccgccgcagatcggccacctctccggcctcgtcgacctctgcctctacaacaacaacctcgttggcgccatcccgcaccagctcagccgactccccaagattgcccacttcgacctgggagcaaactacctgaccgaccaggacttcgccaagttctcgccgatgcccaccgtgacattcatgtcgctctacgacaactccatcaatggtagcttcccggacttcatcctcaagagcggcaacatcacctacctcgacttgtcgcagaatactctgttcgggctgatgccggacacactgccggagaagctcccgaatctgatgtacctgaacttgtccaacaatgaattctctggccggattccggcgtcgctcaggaggttaacgaagctccaggacctgctgattgccgccaacaatctcaccggcggcgtcccagagttccttgggtcgatgtcacagttgaggattctcgaacttggtgacaaccagctcggcggggcgatcccgccggttcttggccagctccagatgctgcagcggctcaagataaagaacgctgggcttgtttcaactctgccgccggagctgggaaatcttaagaatctcacttttctagagatatccgtgaaccacctctccggtggcttgcccccggcattcgccgggatgtgcgcaatgcgggagttcggacttgaaatgaacgggctcaccggtgagatcccttcggtgttgttcacgagctggcccgagctcatatcgttccaagtacagtacaacttcttcactggcaggattccaaaagaggtcggcatggcgaggaaactgaaaatcctttacctgttcagcaacaacctttgcggatccatcccggcagaactcggcgatttggagaatctggaagagctggatttgtcaaacaacttgctgaccggaccgatccctagatcaatcggcaacctcaagcagcttacggctttggcgttgttcttcaacgatctcaccggtgtaatcccacctgagattggcaacatgacagcgttgcaaaggttggacgtcaacaccaaccgtctgcaaggcgagctccctgccaccatctcgtccctcaggaaccttcagtacctctccgtgttcaacaactacatgagtggcaccatcccgccggacctcggcaagggcatagccttgcagcacgtgagcttcaccaacaacagcttctccggtgagctgccgcgccacatctgcgacggcttcgcgctggagcgcttcacggcgaaccacaacaacttcagcggcacgctaccgccatgtctgaagaactgcacaagcctataccgggtgcggctggacgggaaccacttcaccggcgacatctcagatgccttcggcatacaccccagcttggaatacttggacatatccgggagcaagctcaccggtcggctatcgtctgactggggacagtgcaccaacctcacatatctgtcaatcaacggtaacagcatatccggcaaccttgattcgaccttttgtacattgtcatctcttcagtttttggatctatcaaataaccgattcaatggtgagctcccaaggagagacgaaagcgctatctctgttctcgccgggcacggattcgaggtggaaggctaccctgttgtcgactacgagtcagatcgttag

SEQ ID NO: 92413 - DNA, 999 bp, Oryza sativa
  Clone ID: PAT_MRT4530_90898C.1
atggcgtcgcatcgccgcctccgcctccttttgctcgcggcgacgctcgccgccgccgccgctgccgtagccggtgtggaagaagaagaggcgttctgcggagtggagtccatgccggacgcggccacgctgaggccggaccggctcacggtgctcctgagcggctactcggagcggcggctcccgctgctccgcgccatcgccggagcgtacgccgcccacccgctcgtcctcgccgtcgtcgtgctctggtccaacccctccacaccggacagcctcctgtcaagcttcccgccggccgtcaccctccaccgcaccgcctccgcctccctcaactcccgcttcctcccgcacccgtccatccgcaccgcccccgtggccgtcgccgacgacgacgtgctcccggacgccgccgcgctctccttcgcgttcgccgcctggcagcagcgcgcccccccgggcaccctcgtcgggttcttcccgaggtcccaccacctcgacctggcccgcgggaggtgggcgtacggcgcggcggcgcggcagcaggcgcgctactccatggtgctcaccaagctcctcgtcctcggcgcgggcctcctccgcgagtactcctgctcgccggagctcgccgcggcgcgcgccgtggtggaccgggagcgcaactgcgaggacatcctgatgaacttcgtcgccgccgaggagtccggcgaggggccggtgctggtggaggccggcagcatcagagactggggcgacccgaggaacgacgatgccgacgccggcgccggcgccggtggcgaggagatgaaggccgtcggcctgagctcgacggggggcgcggcgcactgggagaagagaggggattgcatcacggagttccaccggctgctgggaaggatgccgctccggtacagctacgggaaggtggtggcggcggccggcggcgagcaggcgctgtgcagcaaacgcggccgcctcgtccggtgtgaccaggagtag

SEQ ID NO: 92414 - DNA, 228 bp, Oryza sativa
  unsure (1)..(228): unsure at all n locations
  Clone ID: PAT_MRT4530_90899C.1
nntctttttttttttttttgcactttactttactagcttatagagccagcttacaagaggccccaccataatacaactaatttattaccggccaccttacctctatccatctatggctactaaaacaatttctaaacaatacaggccacctatataaaggtgttcacatgcttcacctcgcaaacctgaatcacagtcaaaccgaagataatgcttcgactacaccca

SEQ ID NO: 92415 - DNA, 571 bp, Oryza sativa
  Clone ID: PAT_MRT4530_9089C.1
ctatgtgggtgatagttttgggaatgtgtccctgttgaagcttgacttgggtcagacatgtctagttgacatgccatattggattcctttctctgaatcttatggttctggagcaaatgttggtaatgaggttgaagttgcatttgtatcgccacagcctttggctgaaaataacagagtgctcattatcttcagagatgggattatgtctttgtgggatattaagacgagcaaagtggtatctttatccggcaaatctatgcaacaacagtcacatcaggaggctaaagctgtaacatcggcatgctgggcttgtgccaagggaagcaaaattgctattggatttgatagtggtgatatatatctttggtctattcctgatattttaaatgcacaaaatctctcatcgatgggcaatcaaaacctacctcttcagaggcttaaccttggatacaagctagacagggtgtctatagtctctttgcgatgggtcaatagtgacggaaaggcagggcgtttgtatgttaatggattcagtgatcatgcatacctatttcaggtgaaacactaa

SEQ ID NO: 92416 - DNA, 215 bp, Oryza sativa
  Clone ID: PAT_MRT4530_908C.1
gtgcagtcgacccgaaccataatagcatatgggtaatctcaccgggcctgggatggcgatctttgggctgcctgctgtttatgtgaaagacaatggctgtgcaaattgtgggcagaggacaaagtcaagccattcctattaccggacagagtacagatacgacctggccttgtaaccccacgttggggaatgggggaggagacatatgtgagtaa

SEQ ID NO: 92417 - DNA, 630 bp, Oryza sativa
  Clone ID: PAT_MRT4530_90900C.1
atggatagatcacccaggttcgggtccataagcagtgacaatcgccctatgaagactcgctttcgctacggctccggtgggttccgttcccttaaccaagccactgcctatgagtcgccagctcattcttcaacaggcacgcggtcagagatcactttcccctcccactgcttgggagctcagcacggagtatttagccttgcaaggtggtccttgctgattcacacgggattccacgtgccccatgctactcgggtcagagcgttgtctcttgcctgctcatggattcagcaggcagttcaaaagtatccgctaagttcacgggctggagataagcggactcgaaccgctgacatccgccacagggtaaaccaccgcctctcaggcctccccgacggctacaggagaaccaggaacggggagctctcccctttttccgcccgactctttgatcttaaacttaagaatgctggttttaagaacgaggtctatggtcggtccgtgacccctggacgccgaaggcgtccttggggtgatctcgtagttcctacgggggagatagtgcatcaagctattcgcaagggccaacttgatcctcttccccagggatcccagatgagggaagcctag

SEQ ID NO: 92418 - DNA, 993 bp, Oryza sativa
  Clone ID: PAT_MRT4530_90901C.1
atggatagatcacccaggttcgggtccataagcagtgacaatcgccctatgaagactcgctttcgctacggctccggtgggttccgttcccttaaccaagccactgcctatgagtcgccggctcattcttcaacaggcacgcggtcagagatcactttcccctcccactgcttgggagctcagcacggagtatttagccttgcaaggtggtccttgctgattcacacgggattccacgtgccccatgctactcgggtcagagcgttgtctcttgcctgctcatggattcagcaggcagttcaaaagtatccgctaagttcacgggctggagataagcggactcgaaccgctgacatccgccacagggtaaaccaccgcctctcaggcctccccgacggctacaggagaaccaggaacggggagctctcccctttttccgcccgactctttgatcttaaacttaagaatgctggttttaagaacgagtgattgcccttctccgacccttactgcccaaccggagagcggacggctaatgtgttccacttattgaacagggtctatggtcggtccgtgacccctggacgccgaaggcgtccttggggtgatctcgtagttcctacggggtggagataatggggtcggtccatggattttccttccttttgccacatttcgctcaaagggttgaagggagatagtgcatcaagctattcgcaagggccaacttgatcctcttccccagggatcccagatgagggaagcctaggagagccgccgactccaactatcgtccatgtacgatccatactagatctgaccaactgcccatcctacctcctctacctttttgacagcccatctttttgtctcagtagagtctttcagtggcatgtttcagtcctcttccccattacttagaaaaagtgagccaccggttcaggtacaagatactaccattaccgcctggacaattagacagccaaccaacaa

SEQ ID NO: 92419 - DNA, 474 bp, Oryza sativa
  Clone ID: PAT_MRT4530_90902C.1
accccttaaactttgtaaaaccgttcaaaagatttgcctcctatgaagcacaaaagatacttaggcttgtgaagttttatcccaatgacttttcaagctcggacttgagaagacttgaattccaaattgacacttctattgatgatgtgaggaaagattacagatttgaaggtatacaaacacttggtgagctctctattaggcttttttttttagacaaacaaccatattctttatgagtttttgtatttgcttcttaaattggaattgatcttactggtggcatctataagtattgacggggtattttctatactgagtctagtgaagacaaagttgagaaacaatatatgtgatgatttattgaaccactgcttagtcatatatactgagcgagatatcttctccaaagttagtgaagaagacataattaaaattttcatggctaagagcaagcatagagtatggtaacag

SEQ ID NO: 92420 - DNA, 331 bp, Oryza sativa
  Clone ID: PAT_MRT4530_90903C.1
cacaattcggttgtatttttttttgttgtcatttcaacttttggttggggggaaccacacaataaagggttgggggggaacaaatccacttgtagggggcacaaaacaccggccccgggggaaaccaacaaggggggcccctgagaagaccccctgaaaaacccgaagaaaaaaatcgtaccaaaccccgaaggggtaaaaaaaaagggggacgagggaaaattttaccacccccgggggggggacaaaaaaaaggaaaccccaaacccgggtttacaaaggggcgccaaggggccgcaccgggggagggaaagcacccccctttggaggc

SEQ ID NO: 92421 - DNA, 2364 bp, Oryza sativa
  Clone ID: PAT_MRT4530_90904C.1
atggcgcttcctcctcctcctcccttctcgctctcgcgctcttctcgcgtctgcgtaggcgtggcacacgccgtcccccacagatccgcggaaactgtaccagatgccgccccgcagctcttgctcatgcgcgcgcacgcgcgcgccggccgcatgcagcccgcgcgtcaggcgttcgacgcaatgctgccgcgggacaggtcgctcgtcgcctggaccgtgctcatgtcagggtatgccacgcacgggccggcctccgaggcgctggacctgctgctccgcatggtggagtggccgctgaggcccgacgcgttcgtcttctccgtcgcgctgcgcgcctgcgcagccgccgggagcctcggcgtcggaaggcaggtccacgccgccgcagccaagatggggtacgtcggggccgacctcttcgtggcgaacggcctcgtcacgatgtacgcgagctgccggtcgttgggttgcgccgagaaggtgttcagtggtattgccgcgccggattcggtttcttggacttcaatgctcagcgcctacactgaaaacggctgcgacactcaggcgctaatgctgttcctggaaatgatccatggtggcgtttcatgtgatgcgtacactctctctgttgcactccgagcagcttccagcttgggccatgtccgtttgggatatcagctgcattgctacatgatcaagtcaggattcgttcccagtgaattcttggagaactgcctgatcgagttctatggtaggtgcagggaattgcagctgatgcagaaagtgtttgatgagatgaatgcgaaggacttggtttcttggaatattgtcatccaatgctatgcggacaacctgtgtgatgaggaggctttggttcatttccgggatctgatgtacaaatgcgcagaatgcgatgagtatacactgggcagtattttgcatgttattactagaagatgtgcttttgattatggcagggaaattcatggttacctcattagggctggtttggactcggataagtatgtcatgagtgctctcatggatatgtatgtcaattgggccactctgcgcaagagccggtctatgttacctttgagaatgcttaagtactatttatcggtacagggaaagctggatcagttcattgtggccagcagtttgaagtcatgtgcttctgatcttgatttggctgcaggacggatgctacatgcctgcgtattaaagtttgatgtgaatccggatccttttgtgatcagttcattggttgacatgtatgctaaatgcggttctttggaggaagcacatattctattctcgagaactaaggatccttgcacagttgcatggtccgctataatatcaggcagctgtttgaacggtcagtttgaaagagcgatccatttgtttcggacaatgcagttggagcatgtacaacctaatgaatttacatacacatctgtacttacagcatgcatggctcttggggatgttgtaagtggaatggaaatccatagcaactcgatcagaaatggttatggaaccagtgattctgttctgagaagcctgattagcttttacttaagagaaggacagttcaaccaggcccttcgcttgtgcttgtcactctcaaatagtgaaatttcttggggtacgctgtttcaagagtttgctgaacttggtgatcatcttggaatacttaatctttttcatgtaatccaacgttctggtggggtgcttgactacccaactgcatgtcttatcttgagttcttgtggaaagaaagcacatcttcctgaagggttgcaagcacatgcctaccttatgaagcgtggactttcttctacaggctgtatgtgcgattaccttatcgacatgtattcaggttgtggtagcctcacacatgcatttgaggccttcagaaatacttcaggcaggaattcttcttcttggacctcaataatcatggctagtgtagaaaatggttgtccagagacagccattcgcctgtttgtgcagatgttaaggaaggagaaatcaccaaattccctagcattcttatcggtgctgaaggcctgtgcggaaatcggccttgtaaatgaagctttccagttctttgtatccatgaccgaggtttacaaaatacaaccttcagaggagcattactcccacatgattgaggttttgggccgtgctggcatgttcaaggaagcagagcatttcattgatagtgtagtcccttcagaatctggtgcttcagcctggagtttactctgttctgctgccaaacagaatggaaatgccaaaaccatgaggcttgcagcagacaggctatcaaaacttactccggatggttgttga

SEQ ID NO: 92422 - DNA, 915 bp, Oryza sativa
  Clone ID: PAT_MRT4530_90905C.1
tcaaaacaatctgccgccatggctcgagtcgagttctcgtctcccaaatgcagcagcagcagcagcctcccttctcttcggcttccctccatctccgtagcctctccccttcggcctcgaggaccacctccttccgcagctggaggatccttcacccgtcgtcccactgcggcctccccgccgccgccggccggccgcgctagccggttccggcaacggcatggtcgaggaagaagacggcggcggatgatgtccacgacaaagcacttcgaggcccaatcaacactaatgggcctaatctgcaagcccactagagagctgcacacctgcgagtgcgacatcgcctcctggaccaggccggatctagttgaaataggcccgttcgctactgccattgccaaccttaaatgcgagaaggatctcttctcatcagcagataccatcttcatagaagcaacgataacacaggaagaagaatgcactcaagtttcaaataagacaacttcaagtagtcctgagaatatgttactgtcttctcaaggtctgcctgacaatttcacggatgaagcaacaaaggatcaatacctctgcaattcaggcctccaagctgcaaatcgagaatcgaagaagaagaactcgacgttcttgacaaagtttcagaacagaataattgcctccttggcatctgaatcctccccatgcagaaatgcattccgcagaccgctcctctctagggagatagtagtcagagaatacttcaaattggctcggattatcagacgaacagctgcagcctgcttctcgccatcgtcagatgctgatgaggactatgactatctgcctcacatgcagcttgacaaggtgacccatgcaataagcagagaggcatttggccctctttacttggtcacatga

SEQ ID NO: 92423 - DNA, 441 bp, Oryza sativa
  Clone ID: PAT_MRT4530_90906C.1
agagattccggccgctctcgatctggttggggcccccgggctgcggggcctccgcacccctgaggcttcgaaatttggtggcttggctattacacaaacctgcacctctttcagatccccggcgtatttaagttttggaaaatactgttgaaattattgatagtttattttgtggcggcattggggcaaaacccatccaaagccaaaagggtaaagggtagtgttaggatctaaactacgcctgctggcattttggtaaatcattgtctgatcttccttgagagaatgtaattggtgttggatactttcttgaatggaagtagcatcctgctgaaagcggttcatactatgttgttaggtctctgtatctcgtggctcgccctcgctctctcccgcgccccgtggattccattttgctctcactgaagcagcaaccttttt

SEQ ID NO: 92424 - DNA, 510 bp, Oryza sativa
  unsure (1)..(510): unsure at all n locations
  Clone ID: PAT_MRT4530_90907C.1
atggcgctcatgctcggcggcgatgggcggcgagtgcatgggggcagcctgcgacgggcggaccgtggtgatgggaggacggcggcggcgatgagggaaaagggcaacccttataggagggaggaggcggcgacgacgacgtggaggggttccccacgggcaagggttgccttcggcggcggccgcgggtattttgttctggcgggcgtcgcggtgcccgtgcggcggggccgcgcgggcgcggggcccgccgagacctccgcgcgccncgcccggggcgggcgccggccaagcttcgacgcgcgcggttggctcaggcccgccggtgcatggccctttccgcaggccgcgggcggcgcgcggttccggagcgaccgccgcgtccctctggccagctggcggcgtggggacgcggcggcccggcgtgccgccccgagaccggatcagagggggactcgggtggacgggtacccgggagaggtgtccgccaccttgcggccggttaagtag

SEQ ID NO: 92425 - DNA, 364 bp, Oryza sativa
  Clone ID: PAT_MRT4530_90908C.1
cccacgcgtgcgcaaacgcaagcggctatgcgtaggtacaggcatacgggctcacgaacagtgaacacgtagctcacgattctgataagttaggcatagatggtttcaccgatgagcttcatacatggtaattatcaaatcgagcttcgcaactggtgattatggacattgccgattccaaagggagtaatgtatgtcatgactatgacgacagcggactcagtattagcaagattacattgtgagggaaggctagctgattgtacaaacgccgattatgacatgagcactaacattatctgaagagatgaaagctgatacatgatcaatctgcaaaggagcgcagcctatcgccaggtattat

SEQ ID NO: 92426 - DNA, 111 bp, Oryza sativa
  Clone ID: PAT_MRT4530_90909C.1
atggcgggtgttccacagaggcatgttgtggctaaccggcagggggtgaaaaacctgtcttggttctccttgagacctcgacaaatggcgttggcggtgctcatcgtctag

SEQ ID NO: 92427 - DNA, 360 bp, Oryza sativa
  Clone ID: PAT_MRT4530_9090C.1
ggatccccgggctgcaggaattctggcacgaggcactagcttgcttgtgtcaatctgatctgatcagcttcctgctctgctagctagcttagcttagcttgatcggatcaatggcttccagtgccgaggtgagagtcgtcgccgccacccgcgtcccgctcctgcgccgcccgcagccgcacctggagcagattccgctctccctcttcgacgcccccttcgtggcgtttccggcgatcaaccgcgtcttcttctacgacgacgacggtgtgcgccgactactcatccctcgtggagtcgctcaagtcgtcgctcgcggacaccatcgcggtctacttccccctcgccggcaagctcacc

SEQ ID NO: 92428 - DNA, 465 bp, Oryza sativa
  Clone ID: PAT_MRT4530_90910C.1
ttcgcattaatcccagagatagagtgagtgatcatcgtgagtgaggttgcataaacatggctgcctctgtgctggcttctctaagcgtctgaaaccatctgcatgcccattactaaaacgcccgaagctttcccggaaacggacaatgccgacgcctgctctgatcatatcggccaagactacagataagatccagacatcccagccctatcggcctagtacatgagtggtgaccaaagtaggtgtacctgcacctggaacggaaccccacggaaaagatctttaccacctctgcaacagacctggaacgtatgttgctgggtacagcaccccttctaccccataagaatgctccacaactggcgatagctctatctgatgaaaggcaggtggactattctgggcaatcactgttgctggaattctaagtggctgacctatgcttgcttacaacactactgcact

SEQ ID NO: 92429 - DNA, 510 bp, Oryza sativa
  Clone ID: PAT_MRT4530_90911C.1
atgacgtcagcgacaacgttagcgatgacgtcagcactggcggcgactcaggcggctcgggcgcgcatgctcgccggcgaacgacggtgcgacggcacgaacggagggcaccaggacgtagagggcgacgcgaagaactcaccggtgaccaaagaagcggcggaggagcaacggacggcggcggcgacaaggtcgaagcggcagagaagatcgggtcgacggcggcgacggtgctccggcggtctccggcggcggcgaaggagcggacgaggacggcgacgacttggcgatcccgacggtggccttcccgagcgacgacgacgaccggaacggcggcggcgcacggctggagcgacggcggctcgaggttacaaggcgctagggcgctacggacgacgagaggcgaaggcgagggtggcggcgggtacaggagagctcgggggtccttttaaaggggctaggaggcggcggcgaaggcccacggctgccggcgacaagaaggaaagctag

SEQ ID NO: 92430 - DNA, 1449 bp, Oryza sativa
  Clone ID: PAT_MRT4530_90912C.1
atggtgaggaggaagtcgaagtcgccggccgtgtcgccgacgacgctgggtgacctccccgacaagctcctcgagcacatcctcgtccgcgtcgcgtcgccggtctggctcacccgcgccgcagcgacgtgcaagcgatggcgccgcatagtcgccaacgacaactttccgtttcatatggatcgccggctcccgaatccggttgccggccactaccattattctcgccgccgggccgacggccgcggccgcagcagccggctgatcaccttcgtcccctcctcgtccgctgtcgcgctcggcgtcgacgcgcgccgccacttctccctcgacttcctccccggcggccgctcctcctgggacctcgtggacagccacagcagcatcctcctcctcgccgcaaccagctcgacacggcgccgcggccaccgccgcggcctcttccccgacctcgtcgtctgcgagccggtgacgcggcggtacaaactgatccctcgcatggaggagatgaagcaccagcgctgcctcggcgtgttcctgcaaagctaccccacgagcagcaccagcaacaggagcagcatcatgtcaagcttacgggtgatttgcgtggtgtacatcgagtacagcggcgtgtccgatggcatgggcaccgtcagggcctgtgtgttcgacccgaacggaagcaacagctggaaaccgaggccacgcagcgcctgctggtacatgttcaaaccgtcctggaacatggccaagcacggcatacatctccggggctctgaacacgcgcgccttctcggccacgcggcgggcgccgtgttctgggccgttggaggtgatgacaccttgctagtcctcgacaagtggaggactgagttcgaggtcctccgcttaccgggcagtgtccgagcttcggggctccgagcgatcgttgatggtggcaatggtgacaacgatggcaagttgcgtgttgtatgtttggatgaggaaaatgtcgtaagggtgttcgcgacatggcggggtcagcatagcaacggcgagtgggtgcttcagaagagtctcaggttagaggagtccaccatgggattggctgggtacaaggctggacgcggcggcgccgccatggttgtcgcggcggcgaccgccggatcggttgtgttagctccggtggaagggatgacttggatgttctccgtcgaccttgagaccatggagatagctgaatgcaaggaggattgggctgccacaacaatgcctgggccagttggaagcccacaaagcctgggtgaggctgggcccttacccagttttctcttagcagagagccacgaagcctacgtgctacatccaattgtcacagattctactcatctgaaagccgtgaccacagtaccacagatggccgccatccatgaggccttctcccttacccctgaaaatttggtaaattga

SEQ ID NO: 92431 - DNA, 399 bp, Oryza sativa
  Clone ID: PAT_MRT4530_90913C.1
atggacatgaggctggatccatttgaatgtagacttgacaagctttccatgaagtacttgcacgcccaaatcatagttctcatggagtcgtggcggctgtcagaagacttccaggaatcccaaactgcgaacgcgacaggaaaggaacctatcggaggtgatgaagatctagaagagcaaggaatgagccgtagaccggtattctacctcggaagtggaataagagggtcgcttcagcaagcgagggtatgcggctgccgatacttcgccagttttcgccgccacaatcgtccatcccagcagggcaaggggaggaggacaatggaggggaggggaggggaggaaaggagacgagttgatgtgggagaggagaagaacgacgccatgggggagagatag

SEQ ID NO: 92432 - DNA, 462 bp, Oryza sativa
  Clone ID: PAT_MRT4530_90914C.1
atggagacagagatttttatacaggttcgggcccctgaattgtcagggaggagccgagctgctgcgtcggcgccgtcgtcgtcgtcgtcgctcgtcgtggacgtgggagaggagggagctgccggcgcgcggacatggggagagggaggggagctggcggcgcgcggtcgtcgtcgtcgccgaggagggagccggccggtggcggaggtagggagccggcggcgcgtgaacattggagaggagggagccagccggcggcgcgcggacgtggggagaggaggggagccggcgtcgcggttgtcatcgtcgccggcgcacggaggcggcgtcgcggtcgtcgtcgtcgccggcagcggaggtggggagccgaggagggagtcagccgcggcggacgtggggagaggaggggagccggcggcgcgaaggtcgtcgtcgtggccgaggggagccatcagcgcgtag

SEQ ID NO: 92433 - DNA, 2421 bp, Oryza sativa
  unsure (1)..(2421): unsure at all n locations
  Clone ID: PAT_MRT4530_90915C.1
atatctgtggctctgtaccaaacactttcaaaatcatggataacataaagtattagagtggagctgccaaacagctgccaaaccggaaattatacttcatccgtttcacaatataagtcattctagtatttcccacattcatattgatgttaatgaatctagacatatatatctatatagattcattaacatcaatttaaatgtgagaaatgttacaattacttacattgtgaaacggaggaagtacgtgaaatggcattttctcagctccgctccacccacagagtaggagctggaccaaatgggacagcaccaagtttcagactccactgctctacacacacttgtcaccaccatcaatttcaattacatgtatagttgatgctgctactactactactgatggttaggaacttaggatggatgatcatttggtcatttctgctgcaaattgtgagcaggcaacctcgggaaggagaagctgtcatggcgctccggtggtgtcggcgtcggcgtcgagtcgacgtccacgcgcacctccgccctcccggcgtcgaggctccgctgctttgtcggcggtatcaggagcctcgtcggcgacgcgaacggcgtgtccgtgtcggagcagtccgagtcggacagcgtccccgtcgcgccgacgtgggcgatggtcttgtagcggtggaggtggcgcaccggcatggccgcggcgtcgcgttctcgctggctctcctccgttgccgtcgccgtcgtcgtcgtcgtctccgtgcccggtgtctctgaacctggctcatgggatgaccccttctgctgcttcttcttcaccactgctgccttgtgccatttcttcagggccttcgccgtctgctcgtcgaaaatcgttctcttcatctgtgaacccatctgagatacgagagcatagagtggaagtgtgatatagctgcacatgaattgaacgacaaccccaaggcagactctggcgatgataagctcaaagttgtcatggaagcaggatctcaacccgaattcgtactgaaatgacgcgaaatggataagatgaagaaccagacgtggcttcccgaaccaaaaatgttcatcactgagtttcaccaccggcattccttgaattactgtatgcctctctttaatttcaacagccatcattgcaattatagcctgcagctttgttccaactgctaaagttactacaagggggattgtagagaaccagaacaagttatgccatccatgaacattgaagagcataatggccaacgcagaagcccataagggtgcactaatgccaacaactgtcttaaaatcgtcctccagtgaccttttgatgtatttccgaaaattgaacctagtccctagagataaatgagcagcaatgaatccgtgcctcaaagtcaggtagtctgtccttctaacagatctgaagaactgcctaaagaagctcacaaaatagagcagaatagtacttttgctccaacagcttgcatgttgcctcacaaaagacgtttgatgagtaagcctgaactttgaggggtcatatgaaaactcgtaggtaagggagcaagtctccttctcccactccttccatatacgtgtctttgctctacccagagacattgtaatagcactgaatgcgacatgaaagactgccaggaagaacacgaagatatgcagctggtgaagcccatcagctgaaacaagcgacaccatacctttggcgcatttaaaattggttggatctccagataggtgtcgccggccatggccaccaccaccgggcacctcctgctctgaagaactcctccggaggctgcagggaagcatggtgtccgcggctcccaccgggatgcagatgcgcgatatgtacctccccgtgacactgagcagcaacgagatgaaccccagcgtcatcagctcggatttgaccttctccagcgcgtcgaacagcgccttcttcctcctcttgctgaaccactggccaaggtggtggaggaggccctcgaggaggatggaggcggcgacgatgacggcgcagacggccgccacggcccacgtcggcgtctggtccagcgccctcgcgccgtccccgccggctcctcctcctccgcctccgccgctcccgctcattctatctcagcttctctttaatccctagcgaatcaaaatcaaatcaatcgagttcgttgctcagagagatgcagtgcacgcatgtgtgtgtgcgtgtgtgtttctttgattgtacatgagaattaagancaagttaaggagagaggtcgatccatcgatttcccctgcatgcaaggattgattttctgtgatccgtgtgttaagtaatcctagtaattaatcatgtttcatttttgtatctatgttaatttaatccatgcttgacatgaccctcttatt

SEQ ID NO: 92434 - DNA, 2341 bp, Oryza sativa
  Clone ID: PAT_MRT4530_90916C.1
ggaccaaacatccaaacccaactaaagggttattaatttttgcctgtcaaaataaccctccaaattaccctgtggtacaaacaaataatcagtgcagagcttgtccggccataactgtaaatggcaccgttgcaagcacgatgcacaaatgcgtgcagaaggaagctacattggcacttttcccaactttggcctgcgtcaggagcctccaagcgaagcccgaaacaatggccgacgctgcaaagatgaggaaccactgggtggacgtgctgagcgggccacggctggtcgtcctggcagatatcgccacggtcaggaacccggtgaacgcgaccttgctcagctccagcgacgccggcttcacgacatcgtcctctcctcctccgccgccgccgccgcctccggggaagaccagatcgaatgcatgtaccagcaagatcaggaagagcggcgagagcagcatcagcgccagtagcttcacgagcacgaccatgatcgagaacatgaccacggcgatggcacaagccatgaacatgccacatatggcagggagatttctcacgatgttggcacggaggcttgtgtcggtcgcggacggtggtggtgaaggcggaatggtctgaacgagcacgaagcacgcgccaaacaagcaggcgaagaagcatagccccatgggcgcggcgagacgaccctgtccgccattgatctggccctccaacgctagcccttccagccccaggaacagcagcgccgtgacccccgccaagaactccagcgactcgtccagcttgccttccatcgccttctgcaaagcctctctcctttttctgtcagttaactcatcggtagtatgcaacacatcaccaggatgtaccaggttagccaggtcaccccctgcacggcagtagcggacggagtggatcacgatgcagaggccgaacacggtgcccatggccgggaacgcgtaagcccagcgcgcggagaggatgaggtgtatgatccagcacgcgaggccgacgaggcaggcgcacgacgagggagccagccaggtggtcgccttggcggggagtctccacctgtggtcgctgaacctcttggagagggacagagccaggaaggggacggtgccgaatgccagggtgagggccgccatgacaagcatgaagatcggcacggcgcggctgcgctcctggctcttcaggtcgaccttcttgagggccacggcgaggagcaccgggcacaccatgatcaccaccgcctccgcgaaggcgcgggaccggttcatcagagcatccatctcaaaacctcggcgattaatccaagcgctccctcggaggaatgcccaatatgaactctttgtttgattaatacataaggtaaccatggttatatctgagctacttgtgtcctcatcaaggatgttgtctgggtcaaagaacttgcctaagacatgacaacacatgcggtggatgaagtggcagaggtcctgttgcacatttttaatgctcatatcgtcgaatccttctcgacgctcaatactaggcaaatcctctgcgttaaccctatacctcccagtaacccggaggtattcgcatgcgtagtacccacagaggatagtgcccttgaagttgtacgtggccttgatgactctcttattttggaagtgcaagaaggctcgtccgatgcactgtgcgacaataatcatcttctgcttgtgcaagctcttcttgtattccgctatctctgcaggagtcttgcccttgagctggtcagaatttggtgataatgtcatggtatgctgagtttgacagatctttattggatccagaaatccaataggttcaccgatcttcttagcatctatggattgcatcaagcaccatgcaggaacgtagtttatgtccgtcttttcccgacgatagatggcgtgcagatcattgaaatcaagccagaagaatccttcaccggcaaaagcatttgccggtgattgaatagttaaattaggtaggcctttcttgctggcttccatgtaccatgtatgaaaccttctcatctcccatcgaaccatgtacttctccttgtgttcatcctttttcttggagtcgtggcttctgagtactctaggcacttcagacttatctttggccgtgtcattcacgagggtctcctcaacagggtcctttgcaggatttgggtccttatagatgtccggttcctcgccttcgtctctcgccgtcagaagagccctagcgccgtggacctcgcgccgctgtcgtcgccgtcgctccagccatgcttcgccgttgttccagtcgtcgtcgtcgctcggggaggtcgccat

SEQ ID NO: 92435 - DNA, 420 bp, Oryza sativa
  Clone ID: PAT_MRT4530_90917C.1
ttcttccgtttctgcgttggccattatgctcttcaatgttcatggatggcataacttgttctggttctctacaatcccccttgtagtaactttagcagttggaacaaagctgcaggctataattgcaatgatggctgttgaaattaaagagaggcatacagtaattcaaggaatgccggtggtgaaactcagtgatgaacatttttggttcgggaagccacgtctggttcttcatcttatccatttcgcgtcatttcagaatgcatttgaaattacatacttcttttggatttggtacaaattcgggttgagatcctgcttccatgacaactttgagcttatcatcgccagaatctgccttggggtttgcgttcaattcatgtgcagctatatcacaactgcactctatgctctcgtatc

SEQ ID NO: 92436 - DNA, 2626 bp, Oryza sativa
  unsure (1)..(2626): unsure at all n locations
  Clone ID: PAT_MRT4530_90918C.1
taccttttgtttttttttgctgcaagccagtgcgctctcctcttcattatcccgtcgccacctcgccccatcaccctctccctccaccacactacaccccgctccactctcaggcaggcaatcagcggcgaggcaccagcccaccggccggcaatggcgtccacctcctgcttcctccaccagtccacggcccgcgtcgccgcgcgcgtcgcctccccgtccccggcgacacggacccacctcctcgtctgccgcgcccagaagcaggacgacgccgacgtctcccgccgcgcggcgctcgcgctgctggccggagcgacggcggcggtgggggtgaaggtggcgcccgccgccgcggcctacggcgaggcggcgaacgtgttcgggaagcccaagacgaacacggagttcatcgcctacagcggcgaggggttcaagctgctgatcccgtccaagtggaaccccagcaaggagcgcgagttccccggacaggtcctccgctacgaggacaacttcgacgccaacagcaacgtctccgtcataatcaaccccaccaccaagaagaccatcaccgagttcggctcccccgaggagtttctcgcccaggtcgacttcttgcttggcaagcaggcctactccggcaagacagattccgagggtgggtttgagtcggacgcggtggcgacggcgaacatcctggagagctcggcgccggtggtgggagggaagcagtactacagcgtaacggtgctgacgaggacggcggacggcgacgagggcggcaagcaccagctgatcacggccaccgtcaacgacggcaagctgtacatctgcaaggcgcaggccggcgacaagaggtggttcaagggcgccaggaagttcgtcgagagcgcagccagctccttcagcgtcgcatgatcgtcgaaatctctatctcagcttctctttaatccctagcgaatcaaaatcaaatcaatcgagttcgttgctcagagagatgcagtgcacgcatgtgtgtgtgcgtgtgtgtttctttgattgtacatgagaattaagaacaagttaaggagagaggtcgatccatcgatttcccctgcatgcaaggattgattttctgtgatccgtgtgttaagtaatcctagtaattaatcatgtttcattttagtatataagaaaaaataaaacagtgaagatgggcgagaacgccagggaggggtagtccaccacggtaccgatcgatgagtcatccggataagctcctatacaaatccttccaagctccggctgatctgtctacagaccaaatgctaatagagaaaataatatataaaagagaagctatcagataatgaaaaggaatcaaataggagaaggtcgataactgtttcttcatatgctgttggttgattagaagtaaactaataaccaacgccgattcagcttataatcatggcacaagtagtaagtggtgggcatgaattttggtcttgattgcaggtcggatacggagacggaagcatgtccaatgtaaagcagcaccttcgcggcgtaggccatcgccggcgcctccagcagcgccgcctccaagactaacagcatcatgacgagcaccgccgccagccgccggccgtccggtggcccctgagcgccgccgccatcggcgatcatccaatgattgattgctgtcctgattatgttgtgatagcattcgatagaaagttgtatatatcgcataacattacaagcatttgtttacctttttattttgaaaatttacaagcatttgtttcagacgaactgttcagtatagagcagatgtaatacagaatgtggatcatacattgatggatgtatagtgcaaaagaaatattgcaatacagttaactgaaacaaaaaaaaaaaaaaaaaatatcataagaaggttcagttcgaccttaaaaaggttgaaatcaaatgtgatgaagttgatgaaagagtttgccaagttctcaggatcttgagtgcttatgtaaccccgctcccaattgatatgagagatatatgtgagttaaatatttaatgccactcctttccactttatccaaatatctataaattataaccatcgtgaggaaaatatttggctaattagagggaccattgttcaggacaggtagaaactcttcccatatttcatgaaacgaaagtgaaaaccattgccagcatcatcatacatgacctatcggtggaggtgaagcttgaaaaaaaaataacggtgctgacgaggacggcggacggcgaggagggcggcaagcaccagctgatcacggccacagtcaacgacggcaagctgtacatctgcaaggcgcaggccggcgacaagaggtggttcaagggcgccaggaagtttgtcgagagcgcagccagctccttcagggtagcatgatcgtcgaaatctctatctcagcttctctttaatccctagcgaatcaaaatcaaatcaatcgagttcgttgctcagagagatccagtgcacgcatgtgtgtgtgcgtgtgtgtttctttgattgtacatgagaattaagaacaagttaaggagagaggtcgatccatcgatttcccctccatgnaaggattgattttctgtg

SEQ ID NO: 92437 - DNA, 531 bp, Oryza sativa
  Clone ID: PAT_MRT4530_90919C.1
gtgggacccacaaacaattgtttaatttattagcaaggcaaaatttttggaaaaaaaaccatcgactcacttgggtttacaagcctggggttatacttttgggaacacaaacaacactacagatcccatacattcattttaccgggttcactcgcttttaggacgttttataacctcacattgggggctaccatggggaccggaccaaaaccttgttttccattggggggaagggaaagaaaccctctttttcttttttttctaaagccaaatagcgggggacggccaaaaacgggggaggctccatatgcagcaacatacattttagggggcgggacgggggaggcataaccgtatccaccggaaaagggggccccaaagaacaaattggtttttcgggggccaaaatcacccctaaactgtttatgggagggggtggggccccatgaaaggggaactgcctgctttccaaggacgggtccattcaatccttggggggttttttccgaataaattttgcccgacccgggg

SEQ ID NO: 92438 - DNA, 973 bp, Oryza sativa
  Clone ID: PAT_MRT4530_9091C.1
aactagtggatcccccgggctgcaggagaactagtctcgagtttttttttttttttttttttttttgcctgcttatttccaaataatatatttccacttgtacttggagaataacatgttgcaggaatttatcaaataaaataaagagagagtggagaaaacctcactcctaagcaagtaaatggataagatgggcacacatgtcaggtgcaaccatgaacccacctatcacaaagcacacagaaagcgtttacccagcttgccaacatccacaagaagtccacacaacttggcaggatcaggatgcctgtaccaggtcgcatccaggcaattcttttgctctgccgtgcgtgcgaggataactgttcttcacaactgtcactgtttgctttttacagtttacagaaaaggtatgatttgcaattcagaagggccgggataatctacagggtcaccccgtaccaaatgaatcatcaatcatatggtacaaatctactacaatgttgttgcaaccaagcaactaacgcagcaatttaacaacaattaatatataactgatggccaataaagtggccatgtagctggagactgccaaccaccacagagcatcaggagatctgtcaaaccgctgacatatatccacaaagcaaactaatgagacacaatagttaaccaatgaccagagtacagcaaaggcttgttactgcaaggttcttccggtatatttgtgagcttttagttagtagagtcagcctggttgaagtatgaacatcgctgcttgctaggagaaatacagttacagatggagctgaccagcaccagttccttttgatatgccatttctgtgatcaagtaaagcaccggagaacaagaatgggaattttaacttgtataagaaggtttgacaagcaagatggtgccacagtttggactggtgttcatcacaaatcaatccatcaacacgccactcaga

SEQ ID NO: 92439 - DNA, 509 bp, Oryza sativa
  Clone ID: PAT_MRT4530_90920C.1
tttgcccatactccagagtccagccgacccgacccaaacctcaccgccgccgacgccgttgccgccgccgccgctgcgtgcgcccctgcggaaatctagggtcctcggcggcgtccccctcgctccgaccccagttctctgcggcggcctgcgcgacgcgccgaccggccgaaggctgcgcgttgagctggccatgcaggtggtggggacggccgccgccttctgagcgggggggacgccgtctacagcgaggaggcggtcctgggattcagggaggaggttttctcgaagcatgaccgacgggagaggttcagtctcagcagctgggtactcccaattggaggtcagaagagttagctatcgacctgcaggaaccgaacaaaacttgttgaatgacattagcctcaatcgtaaggagacaagtttttgattactttctggacgaagcgggagctgacaaactactcttttgcagcttttggcaggtctatcggtacctacccatggga

SEQ ID NO: 92440 - DNA, 579 bp, Oryza sativa
  Clone ID: PAT_MRT4530_90921C.1
ggaatcggcacgaggatgactcgccctatcatgaagaagtgatcgatcgccctccccgatgcttccagttcctagatgtgttacatccacgggtgagtttggggagatatgattagagaacaatgcttctgctttgtctaattatttgagcaacaagcagatagctttgtattaccctttgttactgttactagttatacgtagttacctgttgcaattcattacatagtaacatagctacataattcagcccttctatatatattttgctagcctatctttttctactaccttttatgacaagctagagcgctacataatgtatggtgtcttgtgtgccataatacaacaacaactatttattaatggttacggctaacttgaaggaaaacatgaatgaagtaagcaacaaaacattgcgaaggctagaataacttacattattaaaaaaaagagcaacaacatataatttaaacataaaacatatgcttttacttatagcggtccaaaagccaagtctaagaaatagaagaaaaacaaaaaggtccctaaattaaatatcaaattaaatggtgaaat

SEQ ID NO: 92441 - DNA, 2509 bp, Oryza sativa
  Clone ID: PAT_MRT4530_90922C.1
atggcgtcggaggcggaggcggaggtggcggcggggccggaggtggtgctgccgatcggcgcgcagaagcacgacccggcgtggaagcactgccagatggtgaggtcggcggggcgcgtgaggctcaagtgcgtctactgccacaagcacttcctcggcggcggcatccaccgcttcaaggagcacctcgcgaaccgccccggcaacgcgtgctgctgccccaaggtgccccgcgaggtgcaggagacgatgctccacagcctcgacgccgtcgcggcgaagaagaaacggaagcaatcgctggccgagggcatcaggcgaatcacccactcggctcccgccgccgccgcctccgcctctccgccggctccggccgatgccgccgagatggagagccccatccacatgatcccgctcaacgaggtgctcgacttgggctccgttccactcgaggagacaccaccggagaccagggagatgaaggggagtattagcaagaagagaaagaaattggctgcgaggcaagcctccacggcgccccttgctcatcagaatcagcagcctcttcagtctactcctgctggtctgacccagccttttcatcagatggtcgtggcgtttgattcggctgcatcgcaactgatgcattttgaccagcccggctcgaacaaggagcaggtttatatggcaattgggaggttcttgtatgacgctggtgtgtcactggaggcagtaaattccgtttactttcagcctatgcttgaagctgttgcctcagcaggagggaagcctgaggcgttctcgtatcacgacttccgtggttccatattgaagaagtcgctggatgaagtgactgctcagttggagttctacaagggatcatggacccggacagggtgcacattgttggccgatgagtggactactgacagaggcagaacattaataaacttctctgtgtattgcccggaagatccgctgtatgagttgctgaagaatgtggttgaggaagttggtgagaaaaatgttgtccaagtaatcacaaacaattctgagattcatgcggtggcaggaaagaggctatgcgaaacttttcctacattgttctggtctcaatgctctttccagtgcatcgatgggatgcttgaagatttcagtaaggtgggggcaatcaatgagatcatatgtaatgcaaaggtcattacgggatttatctataacagcgcatttgcatttaacttgatgaaaaggcatcttcatgggaaagatctgctagttcctgcagaaactcgtgctgctatgaactttgtcacactgaagaacatgtacaatctaaaggattctttggaagccatgattagctcagatgaatggattcactacttgctgccaaagaaacctggtggggttgaagtgaccaatcttattggcaatttgcagttttggtcttcgtgtgctgcagtggttcgcatcaccgaaccacttgtgcatcttcttaagttagtcggtagcaataagaggccatctatggggtatgtttacgctggattgtatcaggccaaagcagcaatcaagaaagagctggtgaggaagaacgactacatggcttactgggatattattgactggagatggaacaaggatgcaccacgaccacttcatttagctggttttttcctgaacccattatttttcgatggtgttcgaggtggaacatcaagtgagatattctcaggtatgctagactgcgtagaaaggttggtttctgatgtgaaaatccaagataaaatccaaaaggagctcaatgtataccggagtgaggcagctggggattttcgtaggcaaatggctatccgagccaggcacactttacctcctgctgaatggtggtatacgtatggaggagcttgcccaaatttgacgcgtttagcagttcgcattctcagtcaaacctgcagtgctaaaggatgtgaccggagacacatttctttcgaacaaattcatgaccaaagaatgaatctttttgaacgccagcgaatgcatcatctcacatttgttcagtacaatctaaggctacaacacaggcaacaacacaagaccaaagcatttgatcctgtctcagtcgacaacattgacatagtcgacgattgggttgtggatagatctgcacttatatctggccaggcagagcagtcaaactggacggagattaaccaaccagtcaacaatatcacatcaatgggtccaagtgatgatgatgaattcgagtccttcattgaaggagttgatgacaaaatgatccaaggtgcttctcggggaactcaggaggatgatgaataactctgaggaagagagccgtcacctgtgcttataggtggagtcattacgattgggtagtagggatgctagttttagcttggataggatgtaaactaatgttgcatggagccatggacacaatctggcattgcttgtcagttgtcaacattttgcaagtagttcttttttc

SEQ ID NO: 92442 - DNA, 402 bp, Oryza sativa
  Clone ID: PAT_MRT4530_90923C.1
gggtgtaaaaaaaccaatcatgacattcctttttttttttggtgcaaaacggggtccatccatcagtaattcaatttgttccaaaagaatgcaccattaaataacagacctccaaaattgttgtctcatgaccctgaagtactgctggggcatatcggtgttaacagcccccaaaccccttgtagctttaccctaaatccctgtgtccatgacagaacggtttggtaagacaaaagataatggtacagcacccacaaaaaagccccacaccaacctgtttctaaaactgtgaggtgctggggaatgtaaccatgcatcgtgcacttctaaaacactttgtttattttgtgccaaattaagtttttaacatttagaaactttttaactttttcctgaagcatt

SEQ ID NO: 92443 - DNA, 419 bp, Oryza sativa
  Clone ID: PAT_MRT4530_90924C.1
gcgggcgccctcttttttttttgggtttttttatttttttggtttttttttttttttttttttttttttttttttttttttttttttttaaccatggggtggggaaaaatggcaaaccaaattttggcttgtttccgaaggccaacgcacaaaaataatttgggtgggggatttttaaaaaccttggaaggggggggggggattttttttaaacacccggaaggggggaaacccaaaaggcttaaatgggggaccccccccaaggggaaaggccctttccgggcaagaagggggcccagggcggggaaaaatgggccttgttcaaaagggacaaccccctgtcgctcctccttttggggggcacagggaaatgggtaaaaaaaacttggtagccgcccggggagagggtggctttgggg

SEQ ID NO: 92444 - DNA, 513 bp, Oryza sativa
  Clone ID: PAT_MRT4530_90925C.1
atggagttctgctgtgcttgtagaggaaacaatttcgtctctgttcttcggctcgggagccgcgaagccacagcttggggccacacactgggagagaaccgtagcctcgtgaagcgcttggggaaaagaagaggtcagggagaacttgccgtggtggtctccaccgccaccgagggcacgttgccgctccacgtcaccgatgaggtcgtgtcgccacatcccaagtcgctgtcgttcaccgccatcgcagattcagcgagaccattaaatctgtgccaagattcgtgcatcgacttcttctcctccatctctggcggactcccctttttctctgacaccggtgacacccctaacttcggcagggagcacgcgggcggcgccggcgttggcggtaggggaaaacgggccgggaccttggggaagagaagagggatgggtagaaggctggctgggaggtcctcgccggcgccgttgactccttccggccacccaacgaggccgggcgacgggtag

SEQ ID NO: 92445 - DNA, 364 bp, Oryza sativa
  Clone ID: PAT_MRT4530_90926C.1
agaaaatgaacagatgctagtttatgaattcatgccgaatggcactttacgtgatcatctttctggaaagtccaaaccacctctcggttttggtttgaggctgcacattgcattgggtgcttcaaagggaattctgtatctccacaccgatgcagatcctcctatatttcaccgtgatgttaaggccagcaatattttgttggattctaaatatgtcgccaaggtagctgacttcggtctttcgaggcttgctccagtaccagatgttgaaggggctttaccagctcatgtctccaccgttgttaagggcacccctctatactatactaactatatccttgttactttggcaggggtatcttga

SEQ ID NO: 92446 - DNA, 1008 bp, Oryza sativa
  Clone ID: PAT_MRT4530_90927C.1
actcacccggcacggcatggctgcgtcgctccggtcgccgccccccttccccgccgcggcgttccgccgccgccgcgccgtcgtgcgcgcctattcctcctcgtcgtcctcctcctcggccgtgtcgtccgcacccaaggcgcgcttcgtagcccgccgctgcgagtccaccttcgtccagcagctcgcccgcccgctcgcggagtacatgagcttgccggcgagtcagtactcggtgctcgacgcggagcgcatcgagcgcgtcgacgagtccaccttccgctgctacgtctaccgcttccgcttcttcgcgctcgaggtctgccccgtgctacttgttcgcgtcgacgaggagcccaacggctgctgtattagcctcctctcctgcaagctcgagggatcaccgcttgtggaggctcaaaatgacaagttttcagcttccatggtgaataaggtgttctgcaacagtagtatgagtgattcaacatctcaacagcttacatcggatactacaatcgaggttacaattgatataccatttccatttcgagcattacctgttgaagccattgaatcaagtggcaggcagttcttgagcaactactccgagtcatgcttccacgatttttgaagcagcttgttaaagactaccaagcatgggcttcgggtgattcttcaaggaaaccacttggcactggtgaaatatgaagcttcgcagtgtctccattaggcattatagtcttttcttgttgcattagttattgcttgatgggctatagaaaagctgtttatacgtcgttttgctcaccaaatccactttgcttctttgtggtctttgcctgcagatgctctgtagtgtgtatggatttgtgccatgcgaccagtcacatacatttgtaggttgttcattcacatgtgttgttgtaagattaacatatccgacccaaaactcttctgcctccatacacactacaattatggtcctgtgaaaaaaaaaaaaaaaaaaaa

SEQ ID NO: 92447 - DNA, 2666 bp, Oryza sativa
  Clone ID: PAT_MRT4530_90928C.1
agtgctggaattaactttccactcgtttgattggaaataattgtaccatcttcttggttggaagttgaaaaagggcacgggatgacaagatcattatttgtctgtaattaaaacagaaaatctataatctaaagtacagggttgcggcagtcatgccatttgcaaccgaataaaaaactaattgctcattggaacaatgcatggcccagccataggcgtcgttccttttattccaaagcccacccaattttacacacatccaagaccggaaattctaagcagcaagcatatcctcatctacattgcattctccaaggtaaaccttgatgcttcgaggagaaccgcagctgccttctgctatgagcgctctatcatttgctgccatgtgctggattattttgtatatcatctcaatatcttcagggcaatgacagcgctctgctatttgatccagcgtcaacggctcggcaggatccttgcagctggcctcattcagaacagtcagcaccctcttctgaagtgccaacacttctcctgctgcctttttcccagcctcaacaccaggctgatgataggcattgatatttactaaataagcataaatcccgacagcacgctcatagagtgcaacaagtgctccaacagctctagggtttacttcttggacagtgactgtaatagattcgcggtcatttgcataaagagctgaacgagttccatgtagcatcccaaacaaatagtccccacatgtaactccaggttcaagctcccaatcatgaccaggaggcctatcgcgcaaaacttcaataaaagtaacaaagaagtcttctggttggaagttgaaaaagggcacgggatgacaagatcattatttggttgaacaaagcaatatgcggggtaaacattgctcccgctgcaatttgtctgtaattaaaacagaaaatctataatctaaagtacagggttgcggcagtcatgccatttgcaaccgaataaaaaactaattgctcattggaacaatgcatggcccagccataggcgtcgttccttttattccaaagcccacccaattttacacacatccaagaccggaaattctaagcagcaagcatatcctcatctacattgcattctccaaggtaaaccttgatgcttcgaggagaaccgcagctgccttctgctatgagcgctctatcatttgctgccatgtggtggacaccttctctcagctgctgaatatcttcagtgctaatcagagcttcctttgtattcgatccaacttcgaccgtgtcggaacggttccccgtcaaggttgaactctttccgaagagattccatgacaagctgttgcaaatatctactcaaaagtagcaaactatccttgtaaggaagtacatgcatatccttatttcctattccttccgatgcccaataccagcacaaagcaagtaaggctgctggattttccttaaccacagtattcctggtttcctcatccattagtgctgcgccaactagcatttctttgatatcgataccctgtaatgcagctggaagcaatccgacagctgacatttctgatgttcttccaccaacccagtcaaacatgggaaatctagctaaccatccctctattctggcagtgttgtctaacagagaattttcttgagtaactgcaactccctgtttcgagaaatccagcccagcatctcggaaggctttttgcacttcaagtagaccattccgggtttcaggtgtgcctccactctttgaaataacaatcacaagagtagatgcaagttctggtcctagctgtgcaatttgatggtcaattccagctggatcagtgttgtcgataaatcttatcttcagaggagggttatcaggagcaagtgcctccgcaacaaattgtggccccaaagatgaaccaccaattcctatagaaagtatttgagtaaatcggccagcaggggaggatggaggtcttatcttggcggagatgacgtcgctggcgaacgcgaggatgcgttcgagcgtggtctcgattttgtcgcggaggaaggagttgggggcgagggccgggttgcgcagccagtagtggccgaccatccggccctcgtcggggttggcgatggcgcccttctcgagctcccgcatcgccgcgaacgcccgccccatgggcgcctccatccgccgcaggaactcctcggtgaacccgatccggctcacgtcgacgaacagccccagctgcttgtgctggtacagccactccacgtagcggttccacagcctgatggggtccttgtccaccgcgccatgggcgaggacgtcggcgtggcccgactgcttggagctgagcgagcggggaggagaggatgacgacgacgagcaggagcgggagacgtcggtgatggagctgggacgggcgaggcggaagtgggaggagcgcgggaggtggtctcgccggaggcggaggccgcacgacgccccggaggaggagggcgccgccgccgccgcgccggagatggaagccatcgcggccaccgccgccgccggagtctcacccggtagtgctcgctcccgctctcctacacgagctcacgcgcatctaactccggcgagagcgagagaggaggggaagcgatcctcgcgccttggcctcgtgc

SEQ ID NO: 92448 - DNA, 1937 bp, Oryza sativa
  Clone ID: PAT_MRT4530_90929C.1
ctaagcagcaagcatatcctcatctacattgcattctccaaggtaaaccttgatgcttcgaggagaaccgcagctgccttctgctatgagcgctctatcatttgctgccatgtgctggattattttgtatatcatctcaatatgcctggcctcattcagaacagtcagcaccctcttctgaagtgccaacacttcacctgctgcctttttcccagcctcaacaccaggctgatgataggcattgatatttactaaagaagcataaatccccacagcacgttcatatagagcaaccagcgctccaacagccctaggagtaacttcttgcacagtaacggagatggattctcggtcattagaataaagagcagaacgggttccctgcaacatcccgaacaaatagtcaccacatgtaactccaggttcaagctcccaatcatgaccaggaggcctatcacgcaaaacctcaataaaagtaacgaagaagttgtgtacaccttctctcagctgctgaatgtaggcatgctgatcggtgcttcctttgttgccatacacagttagaccttgattaacccgattgccatcaaggtcaaattctttcccaagagattccatgacaagctgttgcaaatatctactcaaaagtagcaaactatccttgtacggaagtacaaccatatccttatttcctattccttccgatgcccaataccagcacaaagcaagtaaggctgctggattttccttaaccacagtattcctggtttcctcatccattagtgctgcgccaactaacatttctttgatatcgataccctgtaatgcagctggaagcaatccgacagctgacatttctgatgttcttccaccaacccagtcaaacatgggaaatctagctaaccatccctctattctggcagtgttgtctaacagagaattttcttgagtaactgcaactccctgtttcgagaaatccagcccagcatctcggaaggctttttgcacttcaagcagaccattccgggtttcaggtgtgcctccactcttagaaataacaattacaagagtagatgcaagctctggtcctagttgagcaatttgatggtcgattccagcaggatcagtgttgtcaataaatcgtatcttcaatggagggttatcaggtgcaagtgcctctgaaacaaattgaggccccaaagctgatcctccaattcctattgagagtatttgagtaaatcggccagctggagatgacggaggtttaatcttgccggagacgacgtcttgggagaaggcgaggatgcggtcgagggtggtctcgatcttggtgcggaggaaggagttgggggcgaggcctgggtcgcggagccagtaatggccaaccatgcggccctcgtcggggttggcgatggcccccttctcgagctcccgcatcgccgcgaaggcgcgctgcatccgcggctccatccggcggaggaactcctccgtgaaccccatccggctcacgtccacgaacaggccgagctccttgtgctggtacagccactccacgtacctctcccacagcttgatcgggtccttctccaccgcgccgcgggtgctgccgttctgccccggcctggaggcgagcggcgccgccggggtagaggagggctgctgctccgacgaggacgaggaggagcgggagaggtccgcgatggagtggggggcgcggaggcggaggtgggaggggcggaggaggagctgccgccgcagccgcagcctgcacgccgccgacgaggacggaggcgccgccgcgccggagatggacgccatcgcggccgccgccgccgccggagtctcacccggtagtgctcgctcccgctctcctacacgagctcacgcgcatctaactccggcgagagcgagagaggaggggaagcgatggtttcgaccga

SEQ ID NO: 92449 - DNA, 302 bp, Oryza sativa
  Clone ID: PAT_MRT4530_9092C.1
gatctctgtaaatatgaataaccgcgactggtatcgtcaagttgcttttgggttgcagtagttctaatcttgatgttctgctgggaatcggaagatgttatgcagtatgcgtattgttggggtgtaaccgtgtaagcgcatctgaaatgaagttacgggcgatggtaactgggaagcaacttacgtgtgatttgctacaggagttcttttttccctaatttcatggatataccggatgcctttggcatgggggtgagactgttaatgtcttcttcaatggtggcttatttccgccttgtttt

SEQ ID NO: 92450 - DNA, 489 bp, Oryza sativa
  Clone ID: PAT_MRT4530_90930C.1
aaacaaaaaaaaggacccccccccccccatttttttttttttttttaccattaccccaaccaaaaaaaagcggcccccaaccaggaaccgggtggctggaccaaccaaacctggaaaattaataaaccaggggcccaattaataaataaacccccaaggaaaaaataaattaaaccccgcccccccccaaacagggggcgggcaaaggacccccccggggcctgaaggttcccccggccgaaacccgtaagggccccccccatcccgggaaaaatcggggggcccccccccggggccggggggggggaaaacacccgggaaaccggggccccctcctcggggacccccccgggccccaaaaccttaagggggggaacccggccctgttttggcccggggggaaccccccggaaaaccggttccaaaaacccccgggggggtggtttgggggaacccatgcggcccccggggggggccccccccccgccg

SEQ ID NO: 92451 - DNA, 443 bp, Oryza sativa
  Clone ID: PAT_MRT4530_90931C.1
cggacgcgtgggtggcaatcgggttaatcaaggtctaactgtgtatggcaacaaaggaagcaccgatcagcatgcctacattcagcagctgagagaaggtgtacacaacttcttcgttacttttattgaggttttgcgtgataggcctcctggtcatgattgggagcttgaacctggagttacatgtggtgactatttgttcgggatgttgcagggaacccgttctgctctttattctaatgaccgagaatccatctccgttactgtgcaagaagttactcctagggctgttggagcgctggttgctctatatgaacgtgctgtggggatttatgcttctttagtaaatatcaatgcctatcatcagcctggtgttgaggctgggaaaaaggcagcaggtgaagtgttggcacttcaaaagagggtgcttgctgttctgaatg

SEQ ID NO: 92452 - DNA, 955 bp, Oryza sativa
  Clone ID: PAT_MRT4530_90932C.1
ttttttttttttttttatgtaacaagggtactaatcttgcattcttatactgatctgttcgtgccagacaatgtgtgaagccctatttactaatctaatatttgcttgttcatgcctgacaatgtgtgaaggcttatatgcttatcatgcctgacaaagaagtctttgtactaaagatgtatttcatttctccatgcctgataacattggtactattcttgcattcatatactgatctgttcgtgccagacaatgtgtgaagccctatttactaatctaatatttgcctgttcatgcctgacaatgtgtgaaggcttatatgcttatcatgcctgacaaagaagtctttatactgatcatatatttggccgctcatgcctgacaatgtgtgcagtcttattgatgaaaaaccagaagggagagggggaaataacaggacaggcacgaagggaagccaacaagatgggatctttccatctccagccgactaagccataaagatctcacctttcctcctccagccgatgaacgaaaccaccagatgccagccgatgaacgagatctggagccatctccggtgcaagaagaatcagatccaccgtatcacctatcatcatccagccgacgaaggaagccatcagactcggcctgatctgcatctcgtggaggcagcagcgccgaaggggacatagtagggaagaaaaaatattacacaggactttgaagcaaactctcctcgccaccggtacagatccgggcagagcgaccatggatcacgcgtgtaggttggccagaccacgcacggcccaaacccatcatgctccgccgccggcgagctcactccccggcttcgtcgtccatggcgacgccgctcggcgttgcggttgggaatcgagagagggagagagggagagacggcgaaggaagggggaaaggcggagagagagagagagag

SEQ ID NO: 92453 - DNA, 659 bp, Oryza sativa
  Clone ID: PAT_MRT4530_90933C.1
gtaacaatggtactaatcttgcattcatatactgatctgttcgtgccagacaatgtgtgaagccctatttactaatctaatatttgcctgttcatgcctgacaatgtgtgaaggcttatatgcttatcatgcctgacaaagaagtctttatactgatcatatatttggccgctcatgcctgacaatgtgtgcagtcttattgatgaaaaaccagaagggagagggggaaataacaggacaggcacgaagggaagccaacaagatgggatctttccatctccagccgactaagccataaagatctcacctttcctcctccagccgatgaacgaaaccaccagatgccagccgatgaacgagatctggagccatctccggtgcaagaagaatcagatccaccgtatcacctatcatcatccagccgacgaaggaagccatcagactcggcctgatacaggactttgaagcaaactctcctcgccaccggtacagatccgggcagagcgaccatggatcacgcgtgtaggttggccagaccacgcacggcccaaacccatcatgctccgccgccggcgagctcactccccggcttcgtcgtccatggcgacgccgctcggcgttgcggttgggaatcgagagagggaaagagggagagacgg

SEQ ID NO: 92454 - DNA, 601 bp, Oryza sativa
  Clone ID: PAT_MRT4530_90934C.1
tcgatttagaaacagaaaaccggattgctttgcgtctctctctctctctctctctccgcctttcccccttccttcgccgtctctccctctttccctctctcgattcccaaccgcaacgccgagcggcgtcgccatggacgacgaagccggggagtgagctcgccggcggcggagcatgatgggtttgggccgtgcgtggtctggccaacctacacgcgtgatccatggtcgctctgcccggatctgtaccggtggcgaggagagtttgcttcaaagtcctgtgtgatacggtggatctgattcttcttgcaccggagatggctccagatctcgttcatcggctggcatctggtggtttcgttcatcggctggaggaggaaaggtgagatctttatggcttagtcggctggagatggaaagatcccatcttgttggcttcccttcgtgcctgtcctgtcatttccccttctcccttctggtttctcatcaataagactgcacacattgtcaggcatgagcggcaaatatatgatcagtataaagacttctttgtcaggcatgataagcatataagccttcacacattgtcaggcatgaacag

SEQ ID NO: 92455 - DNA, 834 bp, Oryza sativa
  Clone ID: PAT_MRT4530_90935C.1
atgtaacaatggtactaatcttgcattcatatactgatctgttcgtgccagacaatgtgtgaagccctatttactaatctaatatttgcctgttcatgcctgacaatgtgtgaaggcttatatgcttatcatgcctgacaaagaagtctttatactgatcatatatttggccgctcatgcctgacaatgtgtgcagtcttattgatgaaaaaccagaagggagagggggaaataacaggacaggcacgaagggaagccaacaagatgggatctttccatctccagccgactaagccataaagatctcacctttcctcctccagccgatgaacgaaaccaccagatgccagccgatgaacgagatctggagccatctccggtgcaagaagaatcagatccaccgtatcacctatcatcatccagccgacgaaggaagccatcagactcggcctgatctgcatctctggcgccaagaatcagatccaccgtagaatcgtcgcctaaactgaatttactgaacacgcgcagacctgtggaggcagcagcgccgaaggggacatagtagggaagaaaaaatattacacaggactttgaagcaaactctcctcgccaccggtacagatccgggcagagcgaccatggatcacgcgtgtaggttggccagaccacgcacggcccaaacccatcatgctccgccgccggcgagctcactccccggcttcgtcgtccatggcgacgccgctcggcgttgcggttgggaatcgagagagggaaagagggagagacggcgaaggaagggggaaaggcggagagagagagcgagagggaaaccga

SEQ ID NO: 92456 - DNA, 579 bp, Oryza sativa
  Clone ID: PAT_MRT4530_90936C.1
atggtggcgaagttgctgataacaaaggttagctggggtaccgtggtcggcggcgaggtgctgggtgaagcaggcttgaggaagccggctttgtttgcggtgaagtcgaaggagccgcagtggaatgccacacctgcggggaagcggagtgcctgggtgcaacccatcatgctggggctcgcctggactagttcgctaacgtcgttggtgacaaacatggaggagccgaagatgatgagagtggtggaggggaatgtggtggtcgtcatgaaggcactcggcccatcccatgtcatgcagcccaaaggcctctcctcagaagaggaggttgatgatgaggttatggatgattacttgttcaagtccataaccaaggaatcattgccacacctgtgtgagttgtttgagaaaattgaacaacaatatgcaactcttgagaggcaagagttcttgctcattcgtgagaatgagcaaactaatgaactcaagggtgaacttgataaacagagagaaatgagtttttggagattcaaacaccacttagatttggaataccttaaacaattttcatcagggtag

SEQ ID NO: 92457 - DNA, 257 bp, Oryza sativa
  Clone ID: PAT_MRT4530_90937C.1
tttttttttgggtttttttttttttttttttttttttttttttttttttttttttttttttttttttttttaaacaaaaaaaaaacttggggaaacccaagttgtgaaagaaagtaaattacgcgggaaataacataacccgggtagaaggggacagtttacaaaacttatatatgggccaaaaaaaccactgcctaaagaaaactccctttctatccgaaaattgatatataggggaaactccattaagtttatct

SEQ ID NO: 92458 - DNA, 330 bp, Oryza sativa
  Clone ID: PAT_MRT4530_90938C.1
atggcccagcccgccttcctctccgccctccgctcccgcctccgctccccgcagccgcaggcgccggcgctcccccacctccagcccccccgccgcggcttccacgtcgagctcggcgcacgcgagaaagcggtgcctattgtggtgatcgggattacctactatactactagaggtttccgtggtgggcttttggaggaggatactgctctgaagaggtttaaatcatataagaacagtgtgaaacaggtctcaaaggttgggaatattcttaccggcgttgtcctttttgcctgcgcctatgagatcgttgcactggcaaatagttaa

SEQ ID NO: 92459 - DNA, 445 bp, Oryza sativa
  Clone ID: PAT_MRT4530_90939C.1
gaagtacgagagaacgccatggcttgaaaggaggaggcggacagggaaacaggataggacgaccctgaagcttcaaatgcgccatactggtacacaacaacgtctcaggtcatttacacgcacgtattaccgaagagctcattgaaccatgatctcatatgatgtgacatggcaacactgatttaactatacgaaagcatggtcgcatgaaactgatccatgaacaagagacactgcttacacgcttgtacctgggaacaatacctacctatctggcaacaaagtctgtgtcatcatatacagcttaggctactgctgatgagatgggcatcccattcacagaaacaacggccaagaactccactctattgttgcagcgctagatggctatcgctcgcatccatcaaggacaggatggcgaaccaactgggcgctataaatgcaa

SEQ ID NO: 92460 - DNA, 375 bp, Oryza sativa
  Clone ID: PAT_MRT4530_9093C.1
atgagctctacaaggactcctcccagctcatgggcaaccgatgaggtccctgcctccatgtacgcatcattcctcattcggtactatgttgccgacattacccacatgccactccgccgcccccccccccccctggggccgccgttgtcgtccctcaagcccatgcattggattgccattgccacctttggatccaatgacaagccactggattggatgcttcgggtggagagttcgtccatcgctggtgtcgaggatgcatgcgtttctcctaaagactaccttcccgccgctgggccgcagcactgcgctcccccccttgttagatggaaggcagtaggtggcacaatatgggaaaaaagacggtggtgctag

SEQ ID NO: 92461 - DNA, 1689 bp, Oryza sativa
  Clone ID: PAT_MRT4530_90940C.1
atggcggaggaggcgaagaatctggagacggcccgggccgaccgctccgtgtggctcatgaagtgcccgaccgtcgtctcccgcgcctggcaggaggccgccaccgccgccgcctcctcctcctcctcctcggacgccgccgctggcgccaactccaactccaacgcgaaccctaaccccgtcgtcgccaagttcaagatggagatggctcaaacaggcaatggcaatacaccaaagagttactccttgaacatgttcaaggattttgtgccaatgtgtgtcttttctgaatccaaccaagcaacgcccggcgccgtcggcgagttggccgagctggtcttgccgtggctgccgccgcaagacctcgccgctgcggcctccgccagccgcgccctgcgtgcggccgcttccagcgtcagcgccggccgcgccgccgacgcggcgcacgggctggagcctcaccccatccccttcgacaacctcgtcgacggcaagccctacgcctacttcctctacacccccttctccctcaccccgtcctccgcctccgcctcaccccgccgcgcccagccgtgggggcgcacgtgggcacgaccgccaggccccacatggcctcgctccgacctaggcgggttcccctcgtccgggtgcgcgtgcgctcagggggcgtgcggcggcgcgcgggggtgcccgtgcgctgacccggaggctgaggcggtcggcttggggtcggaggcggggatggggagcctcagggagtgcggcgacgggtgcgcgtgcgggccctcgtgcgggaaccggcggacccagctcggcgtcacggtgcggctgcgcgtcgtgcgccaccgggagaaagggtgggggctgcacgccgccgaggtccttcgccgcgggcagttcgtttgcgagtatgctggtgagcttttgacaactgaagaagcaaggaggcggcaggggctatatgatgagcttgcctctgtcgcgcagccacccggcagcagcaagcgccggggcgccgtggagcggccagctagcggcgcgggcctgcaggcggaggaggcgtcgtcggcggggcccggggcgccgtgcggggcgtgcaagttcctgcggcgccggtgcgtcccggggtgcgtgttcgcgccgcacttcagcggatgcggcggcagcggggtgggggcgggcgtaggagggagagggagggagcgcggcgcggcggagttcgccgccgtgcacagggtgttcggcgccagcaacgtggcgaagctgctgtcccgggtgcccgccgcgctgcgccgggaagcggcgcgcacggtctgctacgaggcccaggcccgcatcgccgaccccgtctacggcagcgtcggcaccatcctcgcgctccagcaccagctctccgtcctggagtctcagctcttcaacctgcgggtggccttggcgagcgcgcaccccgacacgccgccgcagcacttcgtcgtgctgcagccggcgcactccgcggcgtccacgctgaaccaggtggtggtgaactacgacgacctcccgcacgccgtggatttcatggacgcggagcccgccgcgctgaggggactagagtctctccagctctcgcagccactgcagcgggaggaagacgagggccaccgagacatgaacctcttctcggacagtgtaggacaacggcagctgtaa

SEQ ID NO: 92462 - DNA, 2146 bp, Oryza sativa
  Clone ID: PAT_MRT4530_90941C.1
agaagtcaagaacccatttttgtgctttgtttctgctgttatgtggagtttattagagtaaaagccttttcttttccgttggtcgtgtagacgctgcagcttcggaagatccgctcttcgtggaagttgaagccgacgtttgggaaagcgagcaaggcaagtcacatcatcacctctcttcctctttcaaaacccctaaaacctgttttcggtggggtttgggtgcatgccagttgtgggaagtagcaccccggccactataaggattaagctcgggcctctgttgcaaagcactaccgtacttccacatgtctagtgggtaaggcttagtttgtggctcagtctggttataaacaaaagtacacggatggaggtggatgaagtcgggggtcgatggacattctccagggcaaatgaaggctacacgagctgtggcccggtagtcgagatgtcatggcacagggttggtgccctgctgctaggggctcagtcctgcctgcctgtcccggaggttccggccgtaggtgggattgggtcggtactcttgtctatggctaggatgggttggaaactatgtcacgtcttccgtccgtataccgtggtgcgttcgggaaaaggcaattttcccggtcgcgacattgccgacgctctaagtcgaaagagccattgcaacaatcttaacgtccgtggcattccgcccgagcttaaccaacagatggaagccctgaacctaagcatagttggtcgtggattcttggctgcgttggaagccaagcctaccttgctcgatcaaatccgcgaggctcagaagaatgatccgaacatgcatggactcctcaagaatatgaaacagggtaaagccgctggtttcacggaggatgaacacggaaccctatggaacggaaagcgggtatgcgttccagataacagagaacttaaacagctgatacttcaggaagctcatgaaagtccttattccattcacccgggcagtacaaagatgtacttagacttgaaggagaaatactggtgggttagcatgaagcgggaaattgcagagtatgtggccctatgtgatgtgtgccagcgtgtcaaggcagagcaccaacgaccggccggacttctccaacctctccaagtaccagaatggaaatgggatgaaattgggatggatttcatcaccgggcttccaaaaacccaaggcggatatgattctatatgggtagttgtggatcgattaaccaagaaaatcgtatctgataggggaagccaattcacctctcacttttggaagaagctccaagaagagcttggtacccgactaaatttcagcaccgcctatcacccgcagacagatggacagaccgagcgtctaaaccagatcctagaagatatgcttcgcgcatgtgtactagatttcgggaagacttgggataagagtctcccctatgccgagttctcctacaataacagctatcaagccagcatacaaatggcaccttatgaagcgttgtacgggcgcaaatgccggacaccgctattgtgggatcaagtcggagaaagccaagtgttcgggactgatatcctgagagaagctgaagctaaagtcagaatcattcgggataatttaaaggtggcacagtctcggcagaaaagttatgcagataaccgtcgccgtgatctggagttcgcagtggatgactttgtgtatctgcgggtcacgccattgcgaggtgtgcacaggtttcagacaaaagggaagcttgcacctcggtatgtgggtcctttccgtatcaatgctcggcgcggagaagtcgcttaccagttggagctgcccgcctccttgggcaacgtgcatgatgtgttccatgtgtcgcaactcaagaaatgtcttcgagtgccatccgaacaggccgactcagagcagattgaagttcgcgaagacttgacttatgtggagaggccagtgaaaatcctggacaccatggagcgcaggaccaggaaccgggtaatccgtttttgcaaggtccagtggagcaaccatgccgaagaagaagctacttgggagcgcgaagacgagctgaaggcagcccatcccgatctcttcgccagttcttccgaatctcggggtcgagattccgtttaa

SEQ ID NO: 92463 - DNA, 532 bp, Oryza sativa
  Clone ID: PAT_MRT4530_90942C.1
ttctttgaaccggagggatttcactcacttgagtttcctgcctccatccccacggcgatggcggaggaggcgaagaatctggagacggcccgggccgaccgctccgtgtggctcatgaagtgcccgaccgtcgtctcccgcgcctggcaggaggccgtcaccgccgccgcctcctcctcctcctcctcggacgccgccgctggcgccaactccaaccccaacgcgaaccctaaccccgtcgtcgccaaggtcatcgtctccctcgacccgctccgctccgaagaccagcagctccagttcaagatggagatggctcaaacaggcaatggcaatacaccaaagagttactccttgaacatgttcaaggattttgtgccaatgtgtgtcttttctgaatccaaccaagggaagctttcatgcgaagggaaagtcgggcacaaatttgacatggaaccgcacagcgattatcttgtgaactatgggaagttatgtcgtgagaggactcaaaaatctatgattaaaaatagaaaat

SEQ ID NO: 92464 - DNA, 2122 bp, Oryza sativa
  Clone ID: PAT_MRT4530_90943C.1
ttctgcatttgtgggtgtgtcttgttgagtacggtggttgtactcagtcttgctcaatttttcccaagcccagaagaggagctccatgaagatgaaggctttggtgtctagctcgtgcctgccgtcaagcgcctgtggtcgtcgccctagtcttccgctgtttttcgtttgtctttgtgtgtgctgggccttgcctcctaggacaaggattaatgcacgcacgtaaggaatgcccgttgggttatttccggtcgtgacaagttggcctcgtcgcggaggagcccgcgactacgccaccttccgggatgctagctcggaggatgacgataagtttgttgtggttttcattgatgacattctgatatactcacaatcagaggaagaccatcaacaccatctccgtctggtgttgggaaagttgcgggaacatcaattgtatgccaagcttagcaagtgtgagttctggttgtccgaagtcaaattcttagggcacgtgatatctgcaaaaggagttgctgtggatcccgaaacagtgaccgccgtcaccgattggaagcaacccaagacagttacccaagtccgcagtttcttaggtttggcaggatactatcggagattcatcgagaacttctccaaaatcgctcgacccatgacacagttgttgaagaaagaagagaaatttgtgtggagcccgcaatgcgagaaggcgtttcaaactctcaaggaaaagctggtttcctcgccagtgttaatcttgccggatacccgcaaggacttcatggtgtattgtgatgcttcgcgccaaggattggggtgcgtgctcatgcaggatggtcatgtggtagcctatgcctcacgtcagctacgacctcatgaaggcaactaccctacacatgacttggaattagccgcagtagttcatgctctaaaaatctggcggcactatctcattgggaatcgctgtgaaatctataccgaccataagagtctgaaatacatcttcactcagtcggacctgaatcttcggcaaaggagatggttagaactcatcaaggattatgatgtgggaattcactatcatcctggtaaggccaacgtggttgccgacgctctaagtcgaaagagccattgcaacactcttaacgtccgtggcattccacccgaacttaaccaacagatggaagccctgaacctaaacatagttggtcgtggatttttggccgcgttggaagccaagcccaccttgctcgatcaaatccgcgaggctcagaagaatgatccggacatgcatggactcctcaagaatatgaaacagggtaaagccgctggtttcacagaggatgaacacggaaccctatggaatggaaatcgggtatgcgtcccagataacagagaacttaaacagctgatacttcaggaagctcacgaaagtccttattccatccacccgggcagtacaaagatgtacttagacttgaaggagaaatactggtgggtcagcatgaagcgggaaattgcagagtttgtggctctatgtgatgtgtgccagcgtgtcaaggcagagcaccagcgaccggccggacttctccaacctctccaagtgccggaatggaaatgggatgaaattgggatggatttcatcaccggccttccaaaaacccaaggtggatatgattctatatgggtaattgtggaccgattaaccaaggtagctcgattcattcctgtgaagaccacctatggagggaataaactagcggagctctacttcgctaggatcgtgagtctccatggcattcccaagaaaatcgtatctgataggggaagccaattcacctctcacttttggaagaagctccaagaagagctgggtactcgattgaatttcagcaccgcctatcacccgcagacagatggacagaccgagcgtctaaatcagatcctagaagatatgctccgcgcatgtctagatttcgggaagacttgggataagagtctcccctatgccgagttctcctacaataacagctaccaagccagcatacaaatggcaccctatgaagcgttgtacgggcgcaaatgccggacaccgctactctgggaccaagtcggagaaagtcaa

SEQ ID NO: 92465 - DNA, 5208 bp, Oryza sativa
  Clone ID: PAT_MRT4530_90944C.1
atgactggcttcgtcttggagctgcgaggcatgtgcgtggtcttggggtatccacatggagtggattaccaggccaggccgctcccggagcaggagggtgaggatgcagagcctcacgctggttgggaggtcactgcagtgattctctccggctctcccgagcggacttcgctggcagtcaccgcgggtggggattccttccccgccgcttgccagaacgccgctctcctcgccatcggcacccttcaccagcgctacccggacgagttgcagcactcgccctaccgctaccacccccgtcgcggaggagccagcgaccacgccaccttccgagacgctagctcggaggatgacgctaccgtcgtgcatctggcacgcatggtggaggcgtacgacgcggctcgtatcgacttccaccagatggtgcgtcgtggcatggtggagaacaacatgaagatcctggagctgcgtcaggagaacctgcagctcaagaaggacctcgacgcgttggaggcgcagccgcaccagctcaaggtcgcccagggagagatcagccgtcccaagcgtcgccgcgtctgccgcagccagaagatcaccgcccgcaagagcacctccaggcccgagcttgtccgtcagtccctggcgtggacttgcttcgtcgagacccctcgtgccgagcctgcgcccgtggttccccaggagggggaagcctccggcgttggtagctcggagggtgcgctgttgctcaccttccgtcctggcccgtcgcagcggagaaatgttaacaccggtgaaggcaaccaacccgagggcagcaaccccaacccccaaggcaatccacctccaccaccaccaccagacaccaacgccattctcacccagatcctcgcccagcaagccaacatgatgaatgctttcctccaccacctccaaaatccaccacaacagaatgctccaccacctcctccccaacactccaaactcgccgaattcctccgcatccgcccacccaccttctctagctccaacaatcctgtagatgcgttggattggttgcatgccgtggggaagaagctagacacggtgcagtgcagcgacgaagagaaagtcatcttcgccgcccatcagctgcaaggacccgcatctctctggtgggaccatttccaggctgcgcagccagaagggcaaccgatcacttggactcgcttcaccgccgctttccggagaacccatgtgcccgctggagtcgtggctcttaagaaaaaggaattccgggagttgaagcaaggcaaccgctccgtgatggagtacttgcatgagttcaacaatctggcccgttacgcccctgaggatgtgcgggaagatgaggagaagcaagagaagttcctggcaggaatggaccccgagctgtccgttcgtctagtctctggggactacccggacttccaacgactggtggacaagagcatccgcttggaagccaagcacaaggagctggagtcgcacaagcgccgcttggcgaacatccgcaatcaacagggtgctaaccagagggtccgctacaccaatccctacccagggggatcctcctcgcagcagcagcagcagcagcagcagcaacctcgctccgcgcctcgacctcaattcgtggtgcgcgtcccacagcagcaaccgcagcagaatcagcaagggactcgtgcaccccgtcctcctacgccagctgggcagcccgttcaaggccgcagggacgcttcaggtccgcagcggctgtgcttcaactgcttcgagcccgggcactttgcggataaatgcccaaagccaaggcgtcagcaaggccaagcgcctccccgccccaacaacggtggcaaggatgtcatccgtggtcgcgtgaaccacgtgacggccgaggacgtgctgacaactccggacgtcatcgttggtacgttcctcgtccattccatccccgctacaattttgttcgactctggagcttcccactcgtttatatctgtgccattcgtggggaaaaatcagttgggggtagaaaggcttagaaaccctctgctcatcaccacccctggaggggttatgacagcaaagtattatagccccgccgttcctatagaaattcagggaattccttttccctcggatctgattctgttagacacaaagaacttggatgtgattcttgggatgaattggttggctcaattccaaggagtagtggattgcgcgagacgcactgtcactctgtaccgaggaccggaacagccggtctgtcagaaatccccatcgtcagagagttcggagatatttccggaagaactacctggtatgccgcctaagcgagagattgagttccggatagatcttgctccaggaaccactcctctgtacaagcgaccctaccgtatggcagcaaatgaactggccgaagtaaagaaacagttggaagagttgaaagaaaaggggtacatacgtccgagtacttccccatggggtgctcctgtgatttttgtggagaagaaagacaaaacgaagaggatgtgcgttgactacagagctctcaatgaagttaccatcaaaaacaagtaccctcttcctcgaatcgatgatctgttcgaccagcttaaaggtgccactgtattctccaagattgatcttcgttccggatatcaccaattacgtattcgtgaagaagatattccgaagaccgcattcaccacgcgatatgggctgtatgaattcacggtgatgtcgttcggtttgaccaatgctcctgccttcttcatgaacttgatgaacaaagtgttcatggaatacttggataagttcgttgtggttttcatcgacgacattctgatatactcacaaacagaagaagaccatcagcaccatctccgtctggtattgggaaagctgcgggaacatcaattgtatgccaagcttagcaagtgtgagttctggttgtccgaagtcaaattcttggggcacgtgatatctgctaaaggagttgctgtggatcccgaaacagtgaccgccgtcaccgaatggaagcaacccaagacagtcactcaaattcgcagtttcttgggtttggcaggatactaccggagattcatcgagaacttctccaagatcgctcgacccatgacacagttgttgaagaaagaagagaaatttgtgtggagcccgcagtgcgagaaggcgttccaaactctcaaggaaaagctggtttcctcgccagtgttaatcttgccggatactcgcaaggatttcatggtgtattgtgatgcttcgcgccaaggattggggtgcgtgctcatgcaggacggtcatgtggtagcctatgcctcacgtcagctacgtcctcatgaaggcaactaccctacgcatgacttggagctagcagcggtggttcatgctctaaaaatttggcggcactatctcattgggaaccgctgtgaaatatatactgaccataagagtttgaaatacatcttcacccagtcggatctgaatcttcggcaaaggagatggttagaactcatcaaggattatgatgtgggaatacactatcatcctggtaaggccaacgtggttgccgacgctctaagtcgaaagagccactgcaacactctcaacgtccgaggcattccacccgagcttaatcaacagatggaagccctgaacctaagcatagttggtcgcggattcttggctgcgttggaagccaagcctaccttgctcgatcaaatccgcgaggctcagaagaatgatccggacatgcatggactcctcaagaatatgaaacagggtaaagccgcaggtttcacagaggatgaacacggaactctatggaacggaaagcgggtgtgcgttcccgataacagagaacttaaacagctgatacttcaggaagctcacgaaagtccttattccattcacccgggcagtaccaagatgtacttagacttgaaggagaaatactggtgggtcagcatgaagcgggaaattgcagagtttgtggctctatgtgatgtgtgccagcgtgtcaaggcagaacaccaacgaccggccggacttctccaacctctccaagtgccggaatggaaatgggatgaaattgggatggatttcatcaccggacttccaaaaacccaaggaggatatgattccatatgggtagttgtggatcgattaaccaaggtagctcgattcattcctgtgaagaccacctatggagggaacaaactagcggagctctacttcgctaggatcgtgagtctccatggtattcccaagaaaatcgtatctgataggggaagccaattcacctctcacttttggaagaagctccaagaagagctgggtactcgattgaatttcagcaccgcgtatcacccgcagacagatggacagaccgagcgtctgaatcagattctagaagatatgctccgcgcatgtgtcctagatttcgggaagacttgggataagagtctcccctatgccgagttctcctacaataacagctatcaagccagcatacaaatggcaccctatgaagcgttgtacgggcgcaaatgccggacaccgctattgtgggaccaagtcggagaaagccaagtgttcgggactgatatcctgagagaagctgaagctaaagtcagaatcattcgggataatctaaaggtggcacaatctcggcagaaaagttatgcagataaccgtcgtcgtgacttggaattcgcagtggatgattttgtgtaccttcgggtcacgccattgcgaggcgtgcacaggtttcagacgaaagggaagctcgcacctcggtatgtgggtcccttccgtatcatcgctcgacgcggagaagttgcttaccagctggagttgcccgcctccttgggcaacgtgcatgatgtgttccatgtgtcgcaactcaagaaatgtctccgagtgccatccgagcaggccaactcagagcaaattgaagtccgcgaagacctgacctatgtggagaggccagtgaaaatcctggacaccatggagcgcaggaccaggaaccgagtaatccgtttttgcaaggtccagtggagcaaccacgccgaagaagaagctacttgggagcgcgaagacgagctgaaggcagcccatcctgatctcttcgccagttcttccgaatctcggggtcgagattccgtttaa

SEQ ID NO: 92466 - DNA, 1779 bp, Oryza sativa
  Clone ID: PAT_MRT4530_90945C.1
atgcaggacggtcatgtggtagcctatgcttcacgtcagctacgacctcatgagggcaactaccctacgcatgacttggagttagcagcggtggttcatgctctaaaaatctggcggcactatctcattgggaaccgctgtgaaatatatactgatcacaagagcttgaaatacatattcacccagtcggatctgaatcttcggcaaaggagatggttagaactcatcaaggattatgacgtgggaatacactatcaccctggtaaggctaacgtggttgccgacgctctaagtcggaagagccattgcaatactctcaacgttcgaggcattccacccgagcttaatcaacagatggaagccctgaacctaaacatagttggtcgtggattcttggctgcgttagaagccaagcccaccttgctcgatcaaatccgcgaggctcagaagaatgatccggacatgcatggactcctcaagaatatgaaacagggtaaagccgctggtttcacagaggatgaacacggaaccttatggaacggaaagcgggtatgcgttccagatagcagagaacttaaacagctgatacttcaggaagctcacgaaagtccttattccattcacccgggcagtaccaagatgtacttagacttgaaggagaaatactgcgtgtcaaggcagagcactagcgaccggctggacttctccaacctctccaagtaccagaatggaaatgggatgaaattgggatggatttcatcaccggacttccaaaaacccaaggtagctcgattcattcctgtgaagaccacctatggaggacacaagctagccgagctctacttcgctaggatcgtgagtctccatggcgttcccaagaaaatcgtatctgataggggaagccaattcacctctcacttttggaagaagctccaagaagagcttggtacccgactaaatttcagcaccgcgtatcacccgcagacagatggacagaccgagcgtctaaatcagatcttagaagatatgcttcgcgcatgtgtcctggacttcgggaagacttgggataagagtctcccctatgccgagttctcctacaataacagctatcaagccagcatacaaatggcaccttatgaagcgttgtatgggcgcaaatgccgaacaccgctattgtgggaccaagttggagaaagccaagtgttcgggactgatatcctgagagaagctgaagctaaagtcagaatcattcgggataatctaaaggtggcacagtctcggcagaaaagttatgcagataaccgtcgccgtgatctggaattcccagtggatgactttgtgtatcttcgggtcacgccattgcgaggtgtgcacaggtttcagacaaaagggaagctcgcacctcggtatgtgggtcccttccgtatcatcgctcgacgtggagaagttgcttaccaactggagttgcccgcctccttgggtaacgtgcatgatgtgttccatgtgtcgcaactcaagaaatgtcttcgaatgccatccgagcaggccgattcagagcaaattgaagttcgcgaagacttgacctatgtggagaggccagtgaaaatcctggacaccatggagcgcaggaccaggaaccgagtaacccgtttttgcaaggttcagtggagcaaccacgccgaagaagaagctacttgggagcgcgaagacgagctgaaggcagcccatcccggtctcttcgccagttcttccgaatctcggggtcgagattccgtttaa

SEQ ID NO: 92467 - DNA, 711 bp, Oryza sativa
  Clone ID: PAT_MRT4530_90946C.1
atgggggccactgccgccgacgacgacaaggaggcagtggctgggagcggcggcggctcgatgttctccccctcctcccgacactcgcgcgaggcagctgggagcagcgacgccctccccacacccggatccagcggcggcggctgccccccgcccagatccggcgatgatggcggccggcgcggtggtggtgacaggatccggccgcgcggccacgtcgccccgaaatcagccgcgtccgatctcctgtccagccatgtgtttgcatcgtatcgggccaggtcaattgagcccaccacccaggctcacgacaggcagaagagaaaaaaaggggcacccgtgaaccagccgattccccattctctccaccgcgtcgtcgcctccgacggcgccgccgttcccctttcatctcgacctcgggcaagtagctggcatcgctcgccgtcgtcgcttccaggcgaggccatcggcggccgccgtcgcttcttcctagagaccgccgccgtctccccacacccgcgcggcaccccgtcttgccctctccctctagggttttcttgggcgtcgaatcgctgtaagcccctcgataacttctctggttgttttgcttggagctccagctcagggagcacggctttgatttggggatcgtgcctctcctgcctctctggtgtggagctatcggtgtcgcgttgttttctcttaagctag

SEQ ID NO: 92468 - DNA, 149 bp, Oryza sativa
  Clone ID: PAT_MRT4530_90947C.1
tttgtgttttaccaacatggggctttttttaaaaatacggaagggtgcaaacctcttgttcatttctaacaattaaaaaataaaccccactaaatgaccaatgaaagatccaggtacgctacttacacaggcaaaccatacctcacgac

SEQ ID NO: 92469 - DNA, 1965 bp, Oryza sativa
  Clone ID: PAT_MRT4530_90948C.1
atgacacagttgttgaagaaggaagagaaatttgtgtggagcccgcaatgcgagaaggcattccaaactctcaaagaaaagctggtctcctcgccagtgttaatcttgcccgatactcgcaaggatttcatggtttattgtgatgcttcgcgccaaggattggggtgcgtgctcatgcaggacggtcatgtggtagcctatgcctcacgtcagctacgacctcatgaaggcaactaccctacccatgatttggagttagcagcggtggttcatgctctaaaaatctggcggcactatcttattgggatacatcttcacccagtcagatctgaatcttcggcaaaggagatggccaacgtggttgccgacgctctaagtcggaagagccattgcaacactcttaacgtccgtggcattccacccgagcttaatcagcagatggaagccctgaacctaagcatagttggtcgtggattcttggctgcgttggaagccaagcccaccttgcttgatcaaatccgcgaggctcagaggaatgatccggacatgcatggactcctcaagaatatgaaacagggtaaagccgctggtttcactgaggatgaacacggaaccctatggaacggaaagcgggtatgcgttcccgataacggagaacttaaacagctgatacttcaggaagctcacgaaagcccttattccattcacccgggcagtacaaagatgtacctagacttgaaggagagatactggtgggttagcatgaagcgggaaattgcagagtttgtggccctatgtgatgtgtgccagcgtgtcaaggcagagcaccaacgaccggccggactcctccaacctctccaagtaccagaatggaaatgggatgaaattgggatggatttcatcaccggacttccaaaaacccaaggcggatatgattctatatgggtagttgtggatcggttaaccaaggtggctcgattcattcctgtgaagaccacctatggagggaacaaactagcggagctctacttcgctaggatcgtgagtctccatggtgttcccaagaaaatcgtatctgataggggaagccaattcacctctcacttttggaagaagctccaagaagagcttggtacccgattaaatttcagcaccgcgtatcacccgcagacagatggacagaccgagcgtctaaatcagatcctagaggatatgcttcgcgcatgtgtcctagatttcggaaagacctgggataagagtctcccctatgccgagttctcctacaataacagctatcaagccagcatacaaatggcaccttatgaagcgttgtacgggcgtaaatgccggacaccgctattgtgggaccaagttggagaaagccaagtgttcgggactgatatcctgagagaagctgaagctaaagtcagaatcattcgggataatctaaaggtggcacagtcccggcagaaaagttatgcagataaccgtcgccgtgacctggaattcgcagtgggtgattttgtatatcttcgggtcacgccattgcgaggtgtgcacaggtttcaggcgaaagggaagcttgcacctcggtatgtgggtcctttccgtatccttgctcgtcgcggagaagtcgcttaccagctggagctgcccgcctccttgggcaacgtgcatgatgtgttccatgtgtcgcaactcaagaaatgtcttcgagtgccatccgagcaggccgactcagagcaaattgaagttcgcgaagatttgacctacgtggagaggccagtgaaaatcctggacaccatggagcgcaggaccaggaaccgggtaatccgtttttgcaaggtccagtggagcaaccacgccgaagaagaagctacttgggagcgtgaagacgagctgaaggcagcccatcccgatctcttcgccagttcttccgaatctcggggtcgagattccgtttaa

SEQ ID NO: 92470 - DNA, 2415 bp, Oryza sativa
  Clone ID: PAT_MRT4530_90949C.1
atgtgcgtcgactacagagctctcaatgaggtcaccatcaaaaacaagtaccctcttccccggatcgatgatctgttcgatcagcttaaaggtgccactgtattctccaagattgatcttcgttccggatatcaccaattacgtattcgtgaagaagatattccgaagaccgcattcactacgcgatatggactgtatgaattcacggtgatgtcgttcggcttaaccaatgctcctgccttcttcatgaacttgatgaacaaagtgttcatggaatacttggataagttcgttgtggttttcattgatgacattctgatatactcacaaacagaggaagaccatcagcaccatctccgtctggtgttgggaaagttgcgggaacatcaattgtatgccaagcttagcaagtgtgagttctggttgtccgaagtcaaattcttggggcacgtgatatctgctaaaggagttgctgtggaccccgaaacagtgaccgccgtcaccgattggaagcaacccaagacagtcactcagattcgcagtttcttgggtttggcaggatactatcggagattcatcgagaacttctccaaaatcgctcgacccatgacacagttgttgaagaaagaagagaagtttgtgtggagcccgcaatgcgagaaggcgttccaaactctcaaagaaaagctggtttcctcgcccgtgttaatcttgccggatactcgcaaggatttcatggtgtactgtgatgcttcgcgccaaggattggggtgcgtgctcatgcaggacggtcatgtggtagcctatgcctcacgccagctacgtcctcatgaaggcaactaccctacacatgacttggagttagcagcggtggttcatgctctaaaaatctggcggcactatctcattgggaaccgctgtgaaatatatactgatcataagagtttgaaatacatcttcacccagtcggatctgaatcttcggcaaaggagatggttagaactcatcaaggattatgatgtgggaattcactatcaccctggtaaggccaatgtggttgccgacgctctaagtcgaaagagccactgcaacactctcaatgtccgaggcattccacccgagcttaatcaacagatggaagccctgaacctaagcatagttggtcgcggatttttggccgcgttggaagccaagcccaccttgctcgatcaaatccgcgaggctcagaagaatgatccggacatgcatggactcctcaagaatatgaaacagggtaaagccgctggtttcacagaggatgaacacggaaccttatggaacggaaagcgggagaaatactggtgggtcagcatgaagcgggaaattgcagagtttgtggccctatgtgatgtgtgccagcgtgtcaaggcagaacaccaacgaccggccggacttctccaacctctccaagtgccggaatggaaatgggatgaaattgggatggatttcatcaccggccttccaaaaacccaaggtgggtatgattctatatgggtaatagtggatcgattaaccaaggtagctcgatttattcctgtgaagaccacctatggagggaacaaactagcggagctctacttcgctaggatcgtgagtctccatggcattcccaagaaaatcgtatctgataggggaagccaattcacctctcacttttggaagaagctccaagaagagctgggtactcgattgaattttagcaccgcctatcacccgcagacagatggacagaccgagcgtctaaatcagatcctagaagatatgctccgcgcatgtgtactagatttcgggaagacttgggataagagtctcccctatgccgagttctcctacaataacagctaccaagccagcatacaaatggcaccctatgaagcgttgtacgggcgcaaatgccggacaccgctattgtgggaccaagttggagaaagccaagtgttcgggactgatatcctgagagaagctgaagctaaagtcagaatcattcgggataatctaaaggtggcacagtctcggcagaaaagttatgcagataaccgtcgccgtgatctggaattcgcagtggatgactttgtgtaccttcgggtcacgccattgcgaggtgtgcacaggtttcagacaaaagggaagctcgcacctcggtatgtgggtcccttccgtatcatcgctcgacgcggagaagttgcttaccagctggagttgcccgcctccttgggtaacgtgcatgatgtgttccatgtgtcgcaactcaagaaatgtcttcgagtgccatccgagcaggccgactcagagcaaattgaagttcgcgaagacctgacgtatgtggagaagccagtgaaaatcctggacaccatggagcgcaggaccaggaaccgg

SEQ ID NO: 92471 - DNA, 906 bp, Oryza sativa
  Clone ID: PAT_MRT4530_9094C.1
atgatccgggcgggaggatccaattccacccccgggttggggggcgatcgggccgctgttccggacggcaatccagttcgatcgggcggggggggagagcagcgaggcgagcacgcacctgcggcggcggagttgggttggccggattccatggccacggcggcgcgggagggggagcgatcgatcgatcggggggagggcagcgacgacggcgaggggagcagcgctggagtggtagtgggagaggagaggagaggagaggatgatgaggcggaggcgagagagagagagagagagagagggagaggcggtttctgtgcgtggcccaagtcccgagaccccctcaccagtcaccacctcgcctcgcgcgcgggggccgcaccggtgaaaggcgaggcgaaggcgatcgagttggggaccccgaccccggaccccgaccccgacccgggcggccggtcgtcgcacgcacgccgcaggatcaaggtgatcaacctggcgcgcgcgcgcgtgttgtgcggccgtgtggtcgttgcctcgttgcaccgtggcatcgtggcaacgagggaaatgttaataggagaaaagaaatcgcggaggcgcggacgtgttcgcctctccagaaaactcatttcgtccgtgtggaagacaagggattacaagggttcgggcgctggaaagcgtggggcccagcgccgtcccccgcctgacacgggggacatccccgtcattcctcattcattgtatggagactttggcggctcaccatgcgcagggagcgctcctggcagtgtaccaatgggacggggcatacctgcccccactccacctgacacaggacggaacgtgggggcactgccacccatccaatcgcctgtgaccagtcacagaccggtcaagctcgattga

SEQ ID NO: 92472 - DNA, 837 bp, Oryza sativa
  Clone ID: PAT_MRT4530_90950C.1
atggcggcgccattgccggatgctgtgaaagaggaagacgaaggcaacatggacagcttccagtcaggccagacgatcatcgggcaagacgacttcatggccatcttcaggaacgacaagcccctctgcgagcttctgatgaagatcggccagcgaacttccggcagcagcggtgccaagccggctgctcctcctccgattgttcatttgcacggcctaatccccgatgagctgtgcaaaatagaccatcgtcctgcattatcagattttctgtcggcgcagcagcagcagcagcagccacctccaccggcgcagcatggcgcatgcgtgaagaggccggcgatcgggccgcctccggggttcgccggcgtccgccagccaccgcagaagcagcagcagctgccaccaccaccacggcggagggcgcagcagcagccggcgagcgccgccgcccatcaccgcaacccgaaccgccaccacctgtccggcgtcgccgcgccgcccgcggcggcggcaaacgccctgtcgatcatgaggaaggcggcggccgccggcggtggcggcgccgccctgtactgcggcgtgtgcaacgtgaagtgcatgacgcggttcaacctgagggagcacgaggccgggaggaagcaccgggacaaggtggccagcaacgccggcgagaagaacgtccggtgccagctctgcgacgtgctgctcgccagcgagctcaacgtcgcgcagcactacgccggcaagcagcacctccaccggctccgcctcagccgcggccgcggcggcggcggcggcggcggcaatggcgccacgggcgccggagcagcctaa

SEQ ID NO: 92473 - DNA, 445 bp, Oryza sativa
  Clone ID: PAT_MRT4530_90951C.1
aagtgtgggaatttggatgcgaagcaaccatgtttattgtgcgatcagcgttcggcaggtcagtctgataatgcagcgtatctgtaccaccgctgtgtgcatgtggatggccgctctgaggcgtgacatgtcgtagtcacctatgcaggtggatcctgctgcagtttacatcggcatgtagcaatttggttcgatgatactgctctgatgtccttgacgaggagggaaataaggaacaagttaagaaagcaagcagttgtgccaaacaagggagtacaaagcagttgggtcataaaaattcaggacaggatctgttcctctgtgcgtgcactctgaaacatatgccatcatagtgttcataaccactggcccattcaagggatgagcttatttaagagagccacagaagaacttctgaaatgaccagggaaaagatgcaaaagcc

SEQ ID NO: 92474 - DNA, 5334 bp, Oryza sativa
  Clone ID: PAT_MRT4530_90952C.1
atggatgaagtcgggggtcgatggacattctccagggcaaatgaaggctacacgagctgcggcccgatggccggcagcgttacccgtcgtggtttggacatgactggcttcgtcttggagctgcgaggcatgtgcgtggtcttggggtatccacatggagtggattaccaggccaggccgctcccggagcaggagggtgaggatgcagagcctcacgctggttgggaggtcactgcagtgatcctctccggctctcccgagcggacttcgctggcagtcaccgcgggtggagactccttccccgccgcttgccagaacgccgctctcctcgccatcggcactcttcaccagcgctacccggacgagttgcagcactcgccctaccgctaccaccctcgtcgcggaggagcccgcgactacgccaccttccgagacgccagctcggaggatgacgctaccgtcgtgcatctggcacgcatggtggaggcgtacgacgcggctcgtatcgacttccatcagatggtgcgccgtggcatggtggagaacaacctgaagatcctggagctgcgtcaggagaacctgcagctcaagaaggacctcgacgcgttggaggcgcagctgcaccagctcaagatcgcccagggagagatcagccgtcccaagcgtcgccgcgtctgccgcagccagaagatcaccgcccgcaagagcacctccaggcccgagcttgttcgtcagtccctggcgtggacttgcttcgtcgagacccctcgtgccgagcctgcgcccgtggttccccaggagggggaagcctccggcgttggtagctcggaggctccttctctgtttgctggttccgtgtggggttttcagatggtgacgaccaggagaaatgttaacaccggtgaaggcaaccaacccgaaggcagcaaccccaaccaccaaggcaatccacctccgccaccaccgccagacaccaacgccattctcacccaaatcctcgcccagcaagccaacatgatgaccgctttcctccaccacctccaaaacccgccacaacagaatgctccaccaccacccccacaacactctaaactcgccgagttcctccgcatccgcccacctaccttctccagctccaacaaccccgtggatgctttggattggttgcatgccgtggggaagaagttagacacggtgcagtgcagcgatgaggagaaagtcgtcttcgccgcccatcagctgcagggacccgcatctctatggtgggaccatttccaggctacgcagccagaggggcaaccgattacttgggctcgcttcaccgccgctttccggagaacccatgtgcccgccggagtcgtggctctcaagaagagggaattccgggagttgaagcaaggcaaccgctccgtgatggagtatttgcatgagttcaacaatctagcccgttatgccccggaggatgtgcgggaagacgaggagaagcaggagaagttcttggcaggaatggaccctgagctgtccgttcgtctagtctctggggactatcctgattttcaacgactggtggacaagagcatccgcttggaagccaagcacaaggagctggaatcgcacaagcgccgcttggcgaatttccgcaatcaacagggtgctaaccagagggtccgctacaccaatccctacccagggggatcctcctcgcagcagcagcagcagcagcaacctcgcccagcgccccgacctcaattcgtggtgcgcgtcccacagccacagcagcagcagaatcagcaagggactcgtgcaccccgtcctcctacgccagctgtgcagcccgttcaaggccgcagggacgctcaaggtcagcagcgtctgtgcttcaactgcttcgagcccgggcactttgcggataaatgcccgaagccaaggcgtcagcaaggccaagcacctccccgctccaacaacggcgggaaggatgtcattcggggtcgtgtgaatcacgtgacggccgaggacgtgctgacaactccagacgtcatcgttggtacgttcctcgttcattccatccctgctacaattttgttcgactctggagcttcccactcgtttatatctgtgccattcgtggggagaaatcagttgggggtagaaaggcttagaaaccctctgctcatcaccacccctggaggggttatgacagcaaagtattatagccctgccgttcctatagaaattcaggggattccttttccctcggatctgattcttctagacacaaagaacttggatgtgatccttgggatgaattggttggcccaattccaaggggtagtggattgcgcgaggcgcactgtcactctgtaccgaggaccggaacaaccggttgttttctttgcaccctcaacctctgtcagaagttcggaacttcatcagatagaactgtcagaaatccccatagtcagagagttcggagacgtgtttccggaagaactacctggtatgccgcccaagcgagagattgagttccgaatagatcttgctccaggaaccactcctctgtacaagcgaccctaccgtatggcagcaaatgagctggccgaagttaagaaacagttggaagagttgaaagaaaaggggtacatacgtccgaagaagaaagacaagacgaagaggatgtgcgtcgactacagagctctcaatgaagtcaccataaaaaacaagtaccctcttccccggatagatgatctgttcgatcagcttaaaggtgccactgtattctccaagattgatcttcgttccggatatcaccagttacgtattcgtgaagaagatattccgaagaccgcattcaccacgcgatacgggttatatgaattcacggtgatgtcgttcggcttaaccaatgctcctgccttcttcatgaacttgatgaacaaagtgttcatggaatacttggataagttcgttgtggttttcatcgatgacattctgatatactcacaatcagaggaagaccatcagcaccatctccgtctggtgttgggaaagttgcgggaacatcaattgtatgccaagcttagcaagtgtgagttctggttgtccgaagtcaaattcttggggcacgtgatatctgctaaaggagttgctgtggaccccgaaacagtgaccgccgtcaccgattggaagcaacccaagacagtcactcagattcgcagtttcttgggtttggcaggatattaccggagattcatcgagaacttctccaaaatcgctcgacccatgacacagttgttgaagaaagaagagaaatttgtgtggagcccgcagtgcgagaaggcgttccaaactctcaaggaaaagctggtttcctcgccagtgttaatcttgccggatactcgcaaggatttcatggtgtattgtgatgcttcgcgccaaggattggggtgcgtactcatgcaggacggtcatgtggtagcctatgcttcacgtcagctacgtcctcatgaaggcaactaccctacacatgacttggagttagcagcggtggttcatgctctaaaaatctggcggcactatctcattgggaaccgctgtgaaatatatactgatcataagagtttgaaatacatcttcactcagtcagatctgaaccttcggcaaaggagatggttagaactcatcaaggattatgatgtgggaattcactatcatcctggtaaggctaacgtggttgccgacgctctaagtcggaagagccattgcaatactcttaacgtccgtagcattccgcccgagcttaatcaacagatggaagccctgaacctaagcatagttggtcgcggattcttggctgcgttggaagccaagcctaccttgctcgatcaaatccgcgaggctcagaagaatgatccggacatgcatggactcctcaagaatatgaaacagggtaaagccgctggtttcacagaggatgaacacggaaccctatggaacggaaagcgggtatgcgttccagataaccgagaacttaaacagctgatacttcaggaagctcacgaaagtccttattccattcacccgggcagtaccaagatgtacttagacttgaaggagaaatactggtgggttagcatgaagcgggaaattgcagaatttgtggctctatgtgatgtgtgccagcgtgtcaaggcagaacaccaacgaccggccggacttctccaacctctccaagtgccggaatggaaatgggatgaaattgggatggatttcatcaccggtcttccaaaaacccaaggtggatatgactctatatgggtaatagtggatcgattaaccaaggtagctcgattcattcctgtgaagaccacctatggagggaataaactagcggaactctacttcgctaggatcgtgagtctccatggtattcccaagaaaatcgtatctgataggggaagccaattcacctctcgcttttggaagaagctccaagaagagctgggtacccgattgaatttcagcaccgcctatcacccgcagacagatggacagaccgagcgtctaaatcagatcctagaagatatgctccgcgcatgtgtcctagatttcgggaagacttgggataagagtctcccctatgccgagttctcctacaataacagctatcaagccagcatacaaatggcaccatatgaagcgttgtacgggcgcaaatgccggacaccgctattgtgggaccaagttggagaaagtcaagtgttcgggactgatatcctgagagaagctgaagctaaagtcagaatcattcgggataatctaaaggtggcacagtcccggcagaaaagttatgcggataaccgtcgccgtgacctggaattcgcagtggatgactttgtgtatcttcgggtcacgccattgcgaggtgtacacaggtttcagacgaaagggaagctcgcacctcggtatgtgggtccctttcgtatcactgctcgacgcggagaagtcgcctaccagctggagttgcccgcctccttgggtaacgtgcatgatgtgttccatgtgtcgcaactcaagaaaagtctccgagtgccatccgagcaggccaactcagagcaaattgaagttcgcgaagacctgacctatgtggagaggccagtgaaaatcctggacaccatggagcgcaggaccaggaaccgagtaatccgtttttgcaaggtccagtggagcaaccacgccgaagaagaagctacttgggagcgcgaagacgaactgaaggcagcccatcccgatctcttcgccagttcttccgaatctcggggtcgagattccgtttaa

SEQ ID NO: 92475 - DNA, 500 bp, Oryza sativa
  Clone ID: PAT_MRT4530_90953C.1
ccacgcgtccggttttcctgatgaccatgtgacatgtcacacaaatgtacagaattcaatagaagtcagtttttgagtactcatatccgtggtctgtcagtgaattgtgaaaagacaaagtgtgggaatttggatgcgaagcaaccatgtttattgtgcgatcagcgttcggcaggtcagtctgataatgcagcgtatctgtaccaccgctgtgtgcttgtttttggccgctctgaggcgtgacatgtcgtagtcacctatgcaggaatgcatggtatgattgtataacttgttactcaacttccgaagtcctaacggcatttcaaatgagcttccaaattgttgaatttgctcttcaaggaaaatccactagaaaaaaaatgttgctgacaatacccaatgacaggtggatcctgctgcagtttacatcggcatgtagcaatttggttcgatgatactgctctgatgtccttgacgaggagggaaataagggtattctt

SEQ ID NO: 92476 - DNA, 1983 bp, Oryza sativa
  Clone ID: PAT_MRT4530_90954C.1
atgcaggacggccatgtggtagcctatgcctcacgccagctacgacctcatgaaggcaactaccctacacatgacttggagttagcagcggtggttcatgctctaaaaatctggcggcactatctcattgggaaccgctgtgaaatatatactgatcataagagtttgaaatacatcttcactcagtcagatctgaaccttcggcaaaggagatggttagaactcatcaaggattatgatgtgggaatacactatcatcctggtaaggccaacgtggttgccgacgctctaagtcggaagagccactgcaacactctcaacgtccgtagcattccgcccgagcttagtcaacagatggaagccctgaacctaaacatagttggtcgcggattcttggctgcgttagaagcaaagcccaccttgctcgatcaaatccgcgaggctcagaagaatgatccggacatgcatggactcctcaagaatatgaaacagggtaaagccgctggtttcacagaggatgaacacggaaccttatggaacggaaagcgggtatgcgttccagatagcagagaacttaaacagctgatacttcaggaagctcacgaaagtccttattccattcacccgggcagtaccaagatgtacttagacttgaaggagaaatactggtgggttagcatgaagcgggaaattgcagagtttgtggctctatgtgatgtgtgccagcgtgtcaaggcagaacaccaacgaccggccggacttctccaacctctccaagtaccggaatggaaatgggatgaaattgggatggatttcatcaccggacttccaaaaacccaaggtggatatgattctatatgggtaatagtggatcgattaaccaaggtagctcgattcattcctgtgaagaccacctatggagggaacaaactagcggagctctacttcgctaggatcgtgagtctccatggtattcccaagaaaatcgtatctgataggggaagccaattcacctctcacttttggaagaagctccaagaagagctgggtactcgattgaatttcagcaccgcatatcacccgcagacagatggacagaccgagcgtctaaatcagatcctagaagatatgcttcgcgtatgtgtcctagatttcgggaagacttgggataagagtctcccctatgccgagttttcctacaataacagctaccaagccagcatacaaatggcaccctatgaagcgttgtacgggcgcaaatgccggacaccgctattgtgggaccaagttggagaaagccaagtgttcgggactgatatcctgagagaagccgaagctaaagtcagaatcattcgggataatctaaaggtggcacagtctcggcagaaaagttatgcagataaccgtcgtcgtgatctggaattcgcagtggatgattttgtgtaccttcgggtcacgccattgcgaggtgtacacaggtttcagacaaaagggaagctcgcacctcggtatgtgggtcccttccgtatcatcgctcgacgcggagaagttgcttaccagctggagttgcccgcctccttgggcaacgtgcatgatgtgttccatgtgtcgcaactcaagaaatgtcttcgagtgccatccgagcaggccgactcagagcaaattgaagttcgcgaagacttgacctatgtggagaggccagtgaaaatcctggacaccatggagcgcaggaccaggaaccgagtaatccgtttttgcaaggtccagtggagcaaccacgccgaagaagaagctacttgggagcgcgaagacgagcgtcgtcatcgtcatcccgacccgcgccgccgtcttcctccgctccggccgccgttctcgtcgtcgtcgttgttccggggtgagccgaagaccgccgttcgccttcccccttccctcctctctctcgggcgccgctccgccgcgccggtggtcgccggcggtgaccat

SEQ ID NO: 92477 - DNA, 2583 bp, Oryza sativa
  Clone ID: PAT_MRT4530_90955C.1
aagttcagaactgcatcagataggtctgtcagaaatccccatagtcagagagttcggagacgtgtttccggaagaactacctggtatgccgcccaagcgagagattgagttccggatagatcttgctccaggaaccactcctctgtacaagcgaccctaccgtatggcagcaaatgaactggccgaagttaagaaacagttggaagagttgaaagaaaaggggtatatacgtccgagtacttccccttggggtgctcctgtgatttttgtggagaagaaagacaaaacgaagaggatgtgcgttgactacagagctctcaatgaagtcaccatcaaaaacaagtaccctcttccccggatcgatgatctgttcgaccagcttaaagatgccactgtattctccaagattgatcttcgttccggatatcaccaattacgtattcgtgaagaagatatcccgaagaccgcattcaccacgcgatacggactgtatgaattcacggtgatgtcgttcggtttaaccaatgctcctgccttcttcatgaacttaatgaacaaagtgttcatggaatacttggataagttcgttgtggttttcatcgacgacattctgatatactcacaaacagaggaagaccatcagcaccatctccgtctggtgttgggaaagttgcgggaacatcaattgtatgccaagcttagcaagtgtgagttctggttgtccgaagtcaaattcttggggcacgtgatatctgctaaaggagttgctgtggaccccgaaacagtgaccgccgtcaccgattggaagcaacccaagacagtcactcagattcgcagtttcttgggtttggcaggatactaccggaggttcatcgagaacttctccaaaatcgctcgacccatgacacagttgttgaagaaagaagagaagtttgtgtggagcccgcaatgcgagaaggcgttccaaactctcaaagaaaagctggtttcctcgccagtgttaatcttgccggatactcgcaaggatttcatggtgtattgtgatgcttcgcgccaaggattggggtgcgtgctcatgcaggacggtcatgtggtagcctatgcttcacgtcagctacgacctcatgaaggcaactaccctacgcatgacttggagttagccgcagtggttcatgctctaaagatctggcggcactatctcattgggaatcgctgcgaaatatataccgatcacaagagcttgaaatacatcttcacccagtcggatctgaatcttcggcaaaggagatggttagaactcatcaaggattatgatgtgggaattcactatcaccctggtaaggctaacgtggttgccgacgctctaagtcgaaagagccattgcaacactcttaacgtccgtggcattccacccgagcttaatcaacagatggaagccctgaacctaaacatagttggtcgtggatttttggccgcgttggaagccaagcccaccttgctcgatcaaatccgcgaggctcagaagaatgatccggacatgcatggactcctcaagaatatgaaacagggtaaagccgctggtttcacagaggatgaacacggaaccttatggaacggaaagcgggtatgcgttccagatagccgagaacttaaacagctgatacttcaggaagctcataaaagtccttattccattcacccgggcagtacaaagatgtacttagacttgaaggagaaatactggtgggtcagcatgaagcgggaaattgcagagttcgtggccctgtgtgatgtgtgccagcgtgtcaaggcagaacaccaacgaccggccggacttctccaacccctccaagtgccagaatggaagtgggatgaaattgggatggatttcatcaccggacttccaaaaacccaaggtggatatgattctatatgggtaattgtggatcgactaacaaaggtagctcgattcattcctgtgaagaccacctatggagggaacaaactagccgagctctactttgctaggatcgtgagtctccacggtgttcccaagaaaatcgtatctgataggggaagccaattcacctctcacttttggaagaagctccaagaagagctgggtactcgattgaatttcagcaccgcctatcacccgcagacagatggacagaccgagcgtctaaatcaaatcctagaagatatgctccgcgcatgtgtcctagatttcgggaagacctgggataagagtctcccctatgccgagttctcctacaacaacagctatcaagccagcatacaaatggcaccatatgaagcgctgtatgggcgcaaatgccggacaccactcttgtgggaccaagttggagaaagccaagtgttcgggactgatatcctgagagaagctgaagctaaagtcagaatcattcgagataatctaaaggtggcacagtcccggcagaaaagttacgcagataaccgtcgccgtgacttggaattcgcagtggatgattttgtgtatcttcgggtcacgccattgcgaggtgtgcacaggtttcagacaaaagggaagctcgcacctcg

SEQ ID NO: 92478 - DNA, 447 bp, Oryza sativa
  Clone ID: PAT_MRT4530_90956C.1
atggaggactctagtaccggcgaagatggaggaagatgtggaggctacaaggctcttgctgtatgccagaatccaagagccctgtcagagggccccatcggcctggccggtcagattgacgttgagtggccggtcagaccggcctcggctcggtcagaccgccctcagctcggtctgaccgaatacagctccgtcggctctgcatcggccaaccccgagcactccatcccggccatatggccggccggtcagaccaccccgaagccgtcggtcagaccaacctttagcaccggccaaactgccactgttaggccggccagaccggccagggaccggtggtctgactggcggcagacgcacggtcagacctgctctggtgttgctcgcggcctcgggagaattgccgatgatggatcgggactaggcttgggtgaagttgtggtttag

SEQ ID NO: 92479 - DNA, 115 bp, Oryza sativa
  Clone ID: PAT_MRT4530_90957C.1
aaaaaagaaactaacagagctgcttccgagctccgtgcgagagcagttagcagtgtatttatttggacaaaaaacactagttgagtaaacatttataatgctataagtgcctcaa

SEQ ID NO: 92480 - DNA, 275 bp, Oryza sativa
  Clone ID: PAT_MRT4530_90958C.1
agtaacaggattgcatgctcgacccacacatgcggacaaaatgaatgtatacacacgagagagtataggccgcgatctatctgcacacatgacggactatctgagacgggctgcccttacttttggaaaagcgcgtgaaaggggcacccctgactatggaagaggcagggcgagaggcaccccggactttagcaggggtcgtgaccgaagggggcctgcttatgagatgagagcaagtgcccacggaaccaccacaagcgatgacaggggcgaac

SEQ ID NO: 92481 - DNA, 225 bp, Oryza sativa
  Clone ID: PAT_MRT4530_90959C.1
atgggggaggcgccgaggcccaagtcgccgccgaggtacccggacctgtgcggccggcggcggctgcagctggagatgcagatcctcaaccgggaggtcggcttcctcgaggtgacctcacttcacttccccgtcatgactgtgtataggtctgtggaagccatgtgcatgtgcctcggcctgactgggggctccctttttgcagcaagagctacagggacttga

SEQ ID NO: 92482 - DNA, 195 bp, Oryza sativa
  Clone ID: PAT_MRT4530_9095C.1
acttatgtggagaagccaatccatatcttggagacagataagagaagaaccaggaatcgagttatccgtttctgcaaggtccaatagagtaatcactcggaagaagaagctacttgggaacgagaagatgaattaaagtcagcccatccgcatcttttcgccagctcttctgaatctcgaggacgagattccgtt

SEQ ID NO: 92483 - DNA, 498 bp, Oryza sativa
  Clone ID: PAT_MRT4530_90960C.1
aatggaatcttttattgtcattttaaaaattttttttttttaggaaaaaaaaaaagggccatgtgaatttttaaaaaatgaaaaaaaaaaaatttgaaaggggacatttttttattaaaaaggcaccttaaggatcggggccggattccaaaaacaaagggggggtcccaaagatgattcggggggcactaaaatggtttggaccaaggctgaaaaaaaaaaaattgagggacgcctcatgggtgaaggaagaaaaatttttaaaggggggcccaaaaaaaaaaaaaaggggggggttgaaaaatggcttgaactttccgagcaatgtgtgaaaatacaagagatgtcaatgaatttccaaaaaaatcaatttttcaaaaaaaaaaattaaatttttcaccggacgaaaataggccaccccattcccaaaaaggaaaaaggggccctaaaaaacggggggccaaaacgccaaaaaaaaatgtttatagaattccaaaa

SEQ ID NO: 92484 - DNA, 244 bp, Oryza sativa
  Clone ID: PAT_MRT4530_90961C.1
ccgacgcgttcgctgatgttttaggaaatgcatgtgaaatttctagaacactggctcataggctaagacatgagatcggagcataatttggtgtataaactaaggatctaatacgagagcttccaagaggccgataccgggaagatggcactgcggatgccaacgcgcttaatgaataactgaataaatggctagataacgtgctagtgatagcgactgtgatatgtactgataaagttactta

SEQ ID NO: 92485 - DNA, 1470 bp, Oryza sativa
  Clone ID: PAT_MRT4530_90962C.1
atggcgacccgcgtcctgtcacagaacctgagaaagttggcttcgttctcactcctcaatctgtcccagagggcaccaatctcgccttcccctgaacctctcaggcctgctattgcttcatttgggaaatgcttaaatcccttttatcagtttagtcctccatggatggttagatgggctagccatagctcagtcaatctagttctatctgatgatgggaaacccaagtttgagattgaggaggtggaaccttccaagaagcgggggtatttgacaaagaagcgattgaagcttcagaggaagagggaaaagaagaagaggaaagaggccaataaaaatgatccacggcgtatcagacccaagggaaagaagataaaacagaaatttcctacacctgaagctcgactcaaatacaagattgagaaggccaaattgaaagaagctatgttggttgagaagttaaagaagtatgagattgctaaagcacaaggccctatggctaaacaagatgatcttgatggcgaggaaagattttatttgaagaaggtttctcaaaaaaagtcaaattatgtccctgttggaaggagaggagtctttggtggtgttattctaaacatgcatttgcactggaagaaacatgagactgtaaaagtcatctgcaaaccctgcaagccagggcaaatccaggagtacgcaagtgagatagccagactgagtggtggtatccctattaatactattggaaatgacaccatagtcttctatcggggaaagaactatgttcagccagatgtcatgtcaccagtcgatacactatcaaagaaaaaggcacttgaaaaatcaaaatatgaacaatcactggagacagtgaggcgttttattgccgtgtctgaaaaagagcttgaactttattatcggcatattgcactttatggaaacccacaatcccagaatgttgatcctgtttattgtgatgatagaagagctgcttctctgaaaatggaagaaccgagtcaagggaaggacctatcgcatatggataacgatggtttctctgatatcactgatgcttcggagtctgacgaagaagctaatcctagtgaatatgatgataatgatgatgagactggagataatataggcactgttctttatgatcatggaggcttcaagaggaactggttgggagtgccaaacagagcacacttcttcataacagtgaatatggctgcatcactttggagtccttacagactggcccacccccatggtcaaaaagcaaagtttggtgcctgcaagacagttgtcaaaaggataaagtcaggattcgatgtgatcataatgagtagttcacacgacactcacacctcgttgatagatcacaatattgtcttgaatttggctgcggttgcatcatttctgttgggttttctactcaagaacaatgattttgcagcatctgatttatga

SEQ ID NO: 92486 - DNA, 273 bp, Oryza sativa
  Clone ID: PAT_MRT4530_90963C.1
ccaaaacaatggcgcaaagcattactggcgaagggctatagcagcaaagacagatacattataccctgacataatcaggaacaacgattcaccgaactgatgaaaagatgaagcacagaatcgtcagaaccaatgggccacataactattaattatgctccacaagactgacggttaatgggatggaaagactcctgtcctgacacgagattatatcctgcagacaattttcaaagcaaacggcttgccccagagttagctcccttgatcctg

SEQ ID NO: 92487 - DNA, 2355 bp, Oryza sativa
  Clone ID: PAT_MRT4530_90964C.1
atgaagtcattctcgttcgtcccgctgcttctgatcgcactgctgctgcatcaatcatcctgtctgcttcaagttgaagcagaaaacctgacggcaggatcgactctgaggcctcctcactacatcaccagcccgtccggcgacttcgccttcggcttccgcgccctcggctccggccgcccggatggctggtttctcctcgccgtttggttcaacgacgccgtacaggagaaggcggtggtatggtacgcgagggacccgggctccgggtcggcggtgacggccacggcgcagtctgtgttcagcgtcaccctcgccggccagctgtcgctcgccgacaccgccggcagcaacgtctggacgaacgcgaacccgggccagcagtacggctccgtgctcgtgctgctcgactctggcaacctccagttcctcgccgccggtggccgcgccgtggtgtgggagagcttcagggacccggccgacacgctcctccctggccagtccatggccaccggagccggagctacgcttgtgtccaagcgctccgatgccgacttctcggctggccgcttcagcctgtacgtgcaggccgacggcaacgtcgtcctgtacctcaacctcgccgccggcaacgtcgacccgtacaacgcgtactgggcgaccggcaccaaccagcccggcaacacccaggacggcaacaccactctcttcttcgcctcgccggggcgcgtctattaccaggtcaaggacgggacggtgcacgacctgacaactcccatggcgaaggcgaactactaccagcgcgcgacgctcgacccggacggcgtcgtccgcgtgtacgtccggcgaaggagcccgacgagctccacttccaccaccaccgccaacgcgtcgtgggccgtcgccggcatgttccccggcgacggctgtagcatggggacccgtggcctggacggtttctgcggccccaactcgtactgcgtcgtgtccgacgacggccggctcgactgtgcgtgcccgagcggatactccttcgtcgacgcgcagctacggtaccgcgggctgctcgccggcgttcgcgccgccgagctgcccaacaccacctggacggcctcgccgtacaaggtatactcctacacggcggaggagcagtgcggcggcttgtgcctgaacgactgcttctgcgtggcggcgctgttcgacggaacccgctgcaccaagatggcgtccctcacgggcgccggacggcaggggagtaacgtcacggggaaggcgctgatcaagggttcggacgcgcagtacccctccggcggcggcggtggcgcggaggagggcgccaccgctgccaggttgctaggaagaggtggcttcggcgaggtctaccatggcgtggcgaattcgctgcatctgctgcactcacctgacactgacatcgcggtgaagaagctcatcgtctccaacgagtacaccgagagggagttcgcgaacgaggtgcagtccatcgggaggatccaccaccggagccttgtccgcatgatcggctactgcaaggagcgggagcagcggatgctcgtcttcgagttcatgccggggggctcgctccggagcttcctcttccaccagcagcctcgacgacggccgccgccgccgccatggacctggcgcgccgaggcggcgctcgccatagctaagggcatcgagtacctgcacgaagggtgcgcttcgccgatcatccactgcgacatcaagccggacaacatactgctggatgacaagaacaacccaaagatagccgacttcgggatctccaggctcctcggcgatgagcagctgcacaccacggtgaccaacgtgaggggaaccagagggtacatcgcgcccgagtggctgcacggcgacaggcgcatcgacaccaaggtggacgtgtacagcttcggcgtcgtgctgctggagatgatttgctgcaggagatgccaggacccgatcaccagccagcttcatcaggatgacaatggcgattgcgatgatgacaccgtcactctgttcgggtgggcagccgggctggtcagccatggtagggtggaggtcctcctgcgcagcgacgatgatgcggcggaggatctggagagagtggagcggttcgctcgtgtggctttctggtgtatcgtgcacaatccgtcgctccggccgacgatccatcaagtggtgcagatgctggagggtgtggtcgaggtccacgcgccgcctcatcttccgagctatacggattcatcgtcgtcctcgttcatccatacggattcacctgctctcaggccaagaggctcttcttgtccagtcgaactcgatttgatttga

SEQ ID NO: 92488 - DNA, 5235 bp, Oryza sativa
  Clone ID: PAT_MRT4530_90965C.1
atggccgagcaaggaaaaacgcacgacctctcgccgagtgtgagcggcgacgacggggagccgaatccacgccgtcgagctcgtactcctccacctcctccgcgccaaagccctaagcagggggaggcgcttgagagggtcgacaagtccgcagcgtcaccggccgcaggtgatgcaggagaacggcgagacggggagcgtcgcctcctcgtctacggcgacggcagcacgcctcagggtgcgcttcaagctgctggcgcgctcctacgacacccgcctgtcgtccatgacccggagtctccagcccaacgatggctggaagacgtggccaacttggtcatgacggcacagcagcgcctgggtgctggtggacggtccgccaccaccaccaagacctccggcgccgctaccaccggctccgtgtcatcaaggcggagggcgcggcgagcggcggcggctgcacgtcattcggctgccactccctcgtctacaccgtcgactcgggaggatcagcatggggagccggatgcccgcctcaacatcgggcgccggtgtaatagccggcgtactccccgtgcaacggagggagcctcctcgtccagagtgtcactccgacatggacgtgaagatcagccctccgtgcccccggccggtggtgttggctgtagagcctttgtggcgagtcttcggaacgtccgttggcccccaaggttccggcccaccatcaccgagaagtacgatgggagcgtcaaccccaccgagtttctccaggtctatacgaccgggattgaggccgctgggggtgacgacagggtcatggcaaacttctttcccatggccctaaaaggacaggcgcggggttggctaatgaacctgccacccgcgtcggtccactcctgggaagatttgtgccaacagttcaccatgaacttccaaggtacatatccgcgcccaggcgaagaagcggacttgcatgcagtacagcgaggcgatgatgagtcgcttcgctcgtacattcagcggttttgccaagtccgcaatactataccatgcatccctgcacacgcggtgatctacgcgttcagggggggcgtgcggcacaaccgcatgctcgaaaagatcgcttccaaagagccccagactaccgcggagctttttcagctcgcggaccgagtggctcgtaaggaggaagcgtggacctggaactcctccggttccggagtggcagcttcggccgcccccggatccgccgctcagacagggcggcgtgataggaggaggaagaagaggtcggaccgttccggcgacgagggtcatgtcctcgccgtcgagggcgctccgcgggccacccgaaaggggaggcctgcgagcgacaaaaagaaagaggccggaactcccggcagggagcgccccgccggcaggtggtgctccgtccacaacacctccctccacgatctcgcggactgtcgtgcagtcaaaaacctggctgagcgaacgaggaagtgggaggaggacaggaggcaggaacgccgtgagggcaagtccccggtggttccatccggcaaacggcgaggtgaggccaagcagaaggcccccgctgttgacatcgatgatggtgatgatgacctaggtttccaagaacctggggccaccattgccaccgtcgatggaggagcgtgtgctcacgtctctcgccggagcttcaaggctatgaaacgagagcttctggccatggcccctacccatgaggcgatgcgtcgggcgcggtggtcggaggtcgctctcactttcgaccagactgaccacccaccgtgcattgcccggggagggcaggttgcgatggtggtttcccccaccatctgcaacgtgaagttgggacgtgtcctcatagatggaggagcggctctcaacatcctttcccccgcggcctttgatgctatcaaggccccggggatggtgctccagccgtctcaaccgatcatcggtgtgacgccggggcacacgtggccattaggtcacattgacctaccggtcaccttcggtggacccgccaacttccgcacggagcgggtgagcttcgatgtggcggacctcagtctgccctacaacgcggtcctggggagacccgcgttggtgaagttcatggcggcggtccactacgcctacctccagatgaagatgccgggccccggtggccccatctctgtccgtggcgaccttaaagtcgcgcttgcttgcattgagcagcgcgcggaccgcctcgctgctgcgtccaagcccgagggtggtgacgagaggcttggcccttctgcccccaccgccccgaggcagcggatggccacttgcgacgaggtcccggaagacgcgctcgtctccttcctgcgggcaaacgctgacgtcttcgcatggagaccagcggacatgcccggggtccccagggaggtgattgagcaccgtctcgccgtgcggccgggcgcaaggccggtccggcagaaagtgcggcggcaagccccggaacgtcaagctttcatccgcgaggaggtggctagacttttggaggccgggttcattcgtgaggtcatccacccggagtggctggcgaacccggtggtcgttcccaaggcgaacggcaagcttcggatgtgcatcgactacaccgaccttaacaaggcatgtcctaaggatccttaccccctgcctcgcatagatcagatcgtcgactccactgcggggtgcgaccttttgtgttttctagatgcatactctggttaccatcagattcgcatggctagggaggatgaggaaaaaactgcgttcattacccccgtaggaacctattgttatacatcaatgcccttcgggttaaagaatgcaggtcctacttttcagcgtactactcgaatttctttgggtagtcaaataggacgtaatgttgaggcgtatgtcgatgacttggttgtaaaaacgcgcaaccaagagaccttactttcagatctagcggaaacttttgagaatctccgctccgcccgcataaaactgaaccccgataagtgtgtgtttggtgtacctgcgggtaagcttctcgggttcttggtctctgcccgaggcattgaggccaatcccgagaagattcgagctatcgagcggatgcgcccccccagcaaacttagggacgtgcaatgcgtcaccggttgcatggccgccctaagtcgtttcatatcaaggctgggagagaaggcgctacccttgtttaagctcctcaagcgctcggggccgttcacttggacggaggaagctgaaaatgccctcgcccagttgaaggcgtatcttagctctcctccggttctagtcgccccggagccaaatgagtccctgctactttacttagcggcgaccccccaagtagttagtgcagcgttggttgtggagcgcgatgaggacaatcctcattctgcgcacccccgctctgtgccgacttggcccgggagcaggcagggaggagaggcccccgagtcgaacggtggcctaaggcccccgacgaccggagtcggccctccacccgcttgtcaaacggtgctgggtgcccccgaccctcaggaaggccccgaggccactgagggaaggctgcacttaaagccctttggccccgaggctaaccctgtgctgactcgacccgggaaagagcagggagaaggggcccccgagccgaacggaggccagaggcccctgacgaccggagttggccctttgcccgcttgtccgacgatgccaggagtccccgacccccaggacggccccgaggccactgtgggagggccgctcctgtcatcctccgaccccgaggtcatcagcgcagaagacgagtgcgccccgaggggccacttggacgaagaacgccccgggggtacggcccctaacgaggaggatcggccccgccgaaaggtgcagcggcctgtctactttgttagtgaggccctccgggacgccaagacccgatacccacaggcccagaagatgctttacgctattctgatggcctcaaggaaactgcgccattatttccaggcgcatcgggtcactgtggttacgtcttaccccctcggtcaaatcttgcataatcgagagggtacaggacgagtggtaaaatgggcaatcgagctttctgagttcgatctgcactttgaaccacgccacgctatcaagagccaggccctcgccgattttgtggcagagtggaccccggctccagagaccgtctcaatgcccgaggccagcacgaacccctcacagctgcctcacgccgcccactgggtgatgcaattcgacggttctctgtctcttcagggcgccggtgcaggggtcacgttgacctctccgaacggagacgtcctcagatatttggtccgtctcgactttcgagcgactaacaatatggcagagtacgagggactccttgccggactcagagtggcggctggactggggatccgccgcctcttggtattaggcgactcccagctagtcgttaaccagggcatcacggcccgttttggagtgcccaaccgtattattacggataatggcacccaattcactagtgagctcttcggcgactactgcgaagacatgggcatcaagctctgcttcgcctcacctgcccaccccagaagcaatggccaagtggagcgcgccaatgcagaaatcctcaaaggccttaaaaccaagaccttcaatattctcaagaagcacggcgattcatggatcgaggagttgccagcggtgctctgggcgaaccgaaccacaccaagccgagcgaccggggaaacgcctttcttcctcgtctacggcgcagaagcggttctcccatctgagctcaccctgaggtctcctcgggccaccatgtactgcgaggctgatcaagatcagcttcgtagagatgacctcgactacttggaagagcgaaggcggcgcgcggccctccgagctgcgcgctaccagcagagcctgcggcgctaccatcagcgccacgtccgggcccgatcactctgcgtcgacgacctcgtcctacgccgcgtccaaacgcgtgctggattgagcaaactctcaccaatgtgggagggtccgtatcgagtgatcggtgtcccccggccgggctcggtacggctggccacgggcgacggcacggagctgccaaacccatggaacatcgaacaccttcgtcgcttctacccctga

SEQ ID NO: 92489 - DNA, 5979 bp, Oryza sativa
  Clone ID: PAT_MRT4530_90966C.1
atggccgagcaaggaaaaacgcacgacctctcgccgagtgtgagcggcgacgacggggagccgaatccacgccgtcgagctcgtactcctccacctcctccgcgccaaagccctaagcagggggaggcgcttgagagggtcgacaagtccgcggcgtcaccggccgcaggtgatgcaggagaacggcgagacggggagcgtcgcctcctcgtctacggcgacggcagcacgcctcagggtgcgcttcaagctgctggcgcgctcctacgacacccgcctgtcgtccatgacccggagtctccagcccaacgatggctggaagacgtggccaacttggtcatgacggcacagcagcgcctgggtgctggtggacggtccgccaccaccaccaagacctccggcgccgctaccaccggctccgtgtcatcaaggcggagggcgcggcgagcggcggcggctgcacgtcattcggctgccactccctcgtctacaccgtcgactcgggaggatcagcatggggagccggatgcccgcctcaacatcgggcgccggtgtaatagccggcgtactccccgtgcaacggagggagcctcctcgtccagagtgtcacctcgacatggacgtgaagatcagccctccgtgcccccggccggtggtgttggctgtagagcctttgtggcgagtcttcggaatgtccgttggcccccaaggttccggcccaccatcaccgagaagtacgatgggagcgtcaaccccaccgagtttctccaggtctatacgaccgggattgaggccgctgggggtgacgacagggtcatggcgaacttctttcccatggccctaaaaggacaggcgcggggttggctaatgaacctgccacccgcgtcggtccactcctgggaagatttgtgccaacagttcaccatgaacttccaaggcacatatccgcgcccaggcgaagaagcggacttgcatgcagtacagcgaggcgatgatgagtcgcttcgctcgtacattcagcggttttgccaagtccgcaacactataccatgcatccctgcacacgcggtgatctacgcgttcagggggggcgtgcggcacaaccgcatgctcgaaaagatcgcttccaaagagccccagactaccgcggagctttttcagctcgcggaccgagtggctcgtaaggaggaagcgtggacctggaactcctccggttccggagtggcagcttcggccgcccccggatccgccgctcagacagggcggcgtgataggaggaggaagaagaggtcggaccgttccggcgacgagggtcatgtcctcgccgtcgagggcgctccgcgggccacccgaaaggggaggcctgcgagcgacaaaaagaaagaggctggtactcccggcagggagcgccccgccggcaggtggtgctccgtccacaacacctccctccacgatctcgcggactgtcgtgcagtcaaaaacttggctgagcgaacgaggaagtgggaggaggacaggaggcaggaacgccgtgacggcaagtccccggcggttccttccgacaaacggcgaagtgaggccaagaagaaggcccccgctgttgacattgatgatggtgatgatgatctaggtttccaagaacctggagccaccattgccaccgtcgatggaggagcatgtgctcacgtctctcgccggagcttcaaggctatgaagcgagagcttctgaccatggcccctacccatgaggcgatgcgtcgggcgcggtggtcggaggttgctctcactttcgaccagaccgaccacccaccgtgcattgcccggggagggcaggttgcgatggtggtttcccccaccatctgcaacgtgaagttgggacgtgtcctcatagatggaggagcggctctcaacatcctttcccccgcggcctttgatgctatcaaggccccggggatggtgctccagccgtcacaaccgatcatcggtgtgacgccggggcacacgtggccgttaggtcacatcgacctaccggtcaccttcggtggacccgccaacttccgcacggagcgggtgagcttcgatgtggtggacctcagtctgccctacaacgcggtcctggggagacccgcgttggtgaagttcatggcggcggtccactacgcctacctccagatgaagatgccgggccccggtggccccatctctgtccgtggcgaccttaaagtcgcgcttgcttgcatggagcagcgcgcggaccgcctcgctgctgcgtccaagcccgagggtggtgacgagaggcttggcccctctgcccccaccgccccgaggcagcggatggccacttgcgacgaggtcccggaagacgcgctcgtctccttcctgcgggcaaacgctgacgtcttcgcatggagaccagcggacatgcccggggtccccagggaggtgattgagcaccgtctcgccgtgcggccgggcgcaaggccggtccggcagaaagtgcggcggcaagccccggaacgtcaagccttcatccgcgaggaggtggctagacttttggaggccgggttcattcgtgaggtcatccacccggagtggctggcgaacccggtggtcgttcccaaggcgaacggcaagcttcggatgtgcatcgactacaccgaccttaacaaggcatgtcctaaggatccttaccccctgcctcgcatagatcagatcgtcgactccactgcggagtgcgaccttttgtgttttctagatgcatactctggtcctacttttcagcgtactactcgaatttctttgggtagtcaaataggacgtaatgttgaggcgtatgtcgatgacttggttgtaaaaacgcgcaaccaagagaccttactttcagatctagcggaaacttttgagaatctccgctccgcccgcataaaactgaaccccgataagtgtgtgtttggtgtacctgcgggtaagcttctcgggttcttggtctctgcccgaggcattgaggccaaccccgagaagattcgagctatcgagcggatgcgcccccccagcaaacttagggacgtgcaatgcgtcaccggttgcatggccgccctaagtcgtttcatatcaaggctgggagagaaggcgctacccttgtttaagctcctcaagcgctcagggccgttcacttggacggaggaagctgaaaatgccctcgcccagttgaaggcgtatctcagctctcctccggttctagtcgccccggagccaaatgagtccctgctactttacttagcggcgaccccccaagtagttagtgcagcgttggttgtggagcgcgatgaggacaatcctcattctgcgcacccccgctctgtgccgacttggcccgggagcaggcagggaggagaggcccccgagtcgaacggtggcctaaggcccccgacgaccggagtcggccctccacccgcttgtcaaacggtgctgggtgcccccgaccctcaggaaggccccaaggccactgagggaaggctgcacttaaagccctttggccccgaggctaaccctgtgctgactcgacccaggaaagagcagggagaagaggcccccgagccgaacggaggccagaggcccctgacgaccggagttggccctttgcccgcttgtccgacgatgccaggagtccccgacccccaggacggccccgaggccactgtgggagggccgctcctgtcatcctccgaccccgaggtcatcagcgcagaagacgagttcgccccgaggggccacttggacgaagaacgccccgggggtacggcccctaacgaggaggatcggccccgccgaaaggtgcagcggcctgtctactttgttagtgaggccctccgggacgccaagacccgatacccacaggcccagaagatgctttacgctattctgatggcctcaaggaaactgcgccattatttccaggcgcatcgggtcactgtggttacgtcttaccccctcggtcaaatcttgcataatcgagagggtacaggacgagtggtaaaatgggcaatcgagctttctgagttcgatctgcactttgaaccacgccacgctatcaagagccaggccctcgccgattttgtggcagagtggaccccggctccagagaccgtctcaatgcccgaggccagcacgaacccctcacagctgcctcacgccgcccactgggtgatgcaattcgacggttctctgtctcttcagggcgccggtgcaggggtcacgttgacctctccgaacggagacgtcctcagatatttggtccgtctcgactttcgagcgactaacaatatggcagagtacgagggactccttgccggactcagagtggcggctggactggggatccgccgcctcttggtattaggcgactcccagctagtcgttaaccaggtctgtaaggagtaccggtgctctgacccacagatggacgcctacgtacgccaagtacggcgtatggagcgccattttgacgggatagagcttcggcatgtgcccagacgggataatatgattgccgatgaactctcaaggctcgcgtcctcgcgagcccagaccccaccgggcgcctttgaagaaaggcttacccagccgtcggcgcgacccgaccccttaggggagacggatgcgcctgaccggcccccgaggcccgtcggagtccaggcctcgggacccgaagagagtgttccaagctcccttagattgattgcttggatctctgagatccaaacatacctcacagataagactctacctgaggaccgcgaagggagtgaacgcgtacaacgcatttccaaacgctatgtgctggtagaagggaccctctatcggcgcgcggctaacggaatcctcctgaagtgcattcctcaggaacaaggcgttgagcttcttgctgacatccatgagggcgagtgcggagcccattccgcctcgcgcaccctggttggcaaggcctttcgtcaaggattttattggccgacagctctcaatgacgcagtcgatctggtccggcgatgcagagcgtgtcagttccacgccaagcaaattcatcagccggcccaggccctgcagatcataccactgtcatggccatttgctgtctgggggcttgatatcctgggaccgttcaaacgggccccgggcgggtttgagtatctgtatgttgcgatcgacaagttcactaagtggcccgaggcttatccggttgtcaagatcgataagcactctgctcttaaatttattaagggcatcacggcccgttttggagtgcctaaccgtattattacggataatggcacccaattcactagtgagctcttcggcgactactgcgaagacatgggcatcaagctctgcttcgcctcacctgcccaccccagaagcaatggccaagtggagcgcgccaatgcagaaatcctcaaaggccttaaaaccaagaccttcaatattctcaagaagcacggcgattcatggatcgaggagttgccagcggtgctctgggcgaaccgaaccacaccaagccgagcgaccggggaaacgcctttcttcctcgtctacggcgcagaagcggttctcccatctgagctcaccctgaggtctcctcgggccaccatgtactgcgaggctgatcaagatcagcttcgtagagatgacctcgactacttggaagagcgaaggcggcgcgcggccctccgagctgcgcgctaccagcagagcctgcggcgctaccatcagcgccacgtccgggcccgatcactctgcgtcgacgacctcgtcctacgccgcgtccaaacgcgtgctggattgagcaaactctcaccaatgtgggagggtccgtatcgagtgatcggtgtcccccggccgggctcggtacggctggccacgggcgacggcacggagctgccaaacccgtggaacattgaacaccttcgtcgcttctacccctga

SEQ ID NO: 92490 - DNA, 339 bp, Oryza sativa
  unsure (1)..(339): unsure at all n locations
  Clone ID: PAT_MRT4530_90967C.1
gtacgcctgcggatcggtccggatcccggtcgaccacgcgtccgcgtcgtcgtcggaggaggagaaggaggtgtccaaggacgtcgcggtagagaccagcgtcgtcgtcccgtcggtggtcgccgcctcgccggacgatgaggccgccgccgtcgcttccggtgacggcggggacgttatcaaacacgacgatgaggccgtggtcagaccggacgattgggcatcgtgggcgcagcagccggcttattatttttacgacgtagcggcggcggcgacgacgacgccgcaagcggcgccggagatccacacgangtcgctgcagccggcggcgggggcggg

SEQ ID NO: 92491 - DNA, 6483 bp, Oryza sativa
  Clone ID: PAT_MRT4530_90968C.1
atgggtttggagacaaggaattttatacagggtggagcggaggatggggcgagcggggtcgaatgcaaaggtgagcaccacgaggttaggctccgtacggctgtgtgcctcctactcctgctcctactcatcgccatcctcatcgtcgaggacggagacagcaccggcgagtgctcatgggtgaaggcgaggagacggcttccgacgcacagaaaggagaacgaaggagatgacggccggccatcgaagcagagggaggagttggagcttggccgtcccagatctttacctccgcgcgacgacctcaagttaggcggcttacgacgcatggagaggagggtggagaacacgacaaccgagcctcgaagctgcttcacctccgacggcgacctcagcgacgagagcttcgactccgatggtggggacgagagcttcgacttcggtgttgggaggcaacgctctgctcgaccggtcaatcgcgcccacactagggtttaccagactacacaatcgcccacgtggcctggcaccttcggggacgtcgggcccgagggtgaggcaagatgttgtgtggaagaagggccaaaccatgccaccgcttgccacagattaccaccgccgggggacacagaatgggacccgatttgtggacccggtcctgacacttaccctatccgtcgcgcacagccatgttcccacgacgcgctcacccccggcggaagtggagagctctcagactcttccgtgtgccccaagtttttcttgttcagcctaatggccgagcaaggaaaaacgcacgacctctcgccgagtgtgagcggcgacgacggggagccgaatccacgccgtcgagctcgtactcctccaccccctccgcgccaaagccctaagcagggggaggcgcttgagagggtcgacaagtccgcagcgtcaccggccgcaggtgatgcaggagaacggcgagacggggagcgtcgcctcctcgtctacggcgacggcagcacgcctcagggtgcgcttcaagctgctggcgcgctcctacgacacccgcctgtcgtccatgacccggagtctccagcccaacgatggctggaagacgtggccaacttggtcatgacggcacagcagcgcctgggtgctggtggacggtccgccaccaccaccaagacctccggcgccgctaccaccggctccgtgtcatcaaggcggagggcgcggcgagcggcggcggctgcacgtcattcggctgccactccctcgtctacaccgtcgactcgggaggatcagcatggggagccggatgcccgcctcaacatcgggcgccggtgtaatagccggcgtactccccgtgcaacggagggagcctcctcgtccagagtgtcaccccgacatggacgtgaagatcagccctccgtgcccccggccggtggtgttggctgtagagcctttgtggcgagtcttcggaacgtccgttggcccccaaggttccggcccaccatcaccgagaagtacgatgggagcgtcaaccccaccgagtttctccaggtctatacgaccgggattgaggccgctgggggtgacgacagggtcatggcgaacttctttcccatggccctaaaaggacaggcgcggggttggctaatgaacctgccacccgcgtcgcggttttgccaagtccgcaatactataccatgcatccctgcacacgcggtgatctacgcgttcagggggggcgtgcggcacaaccgcatgctcgaaaagatcgcttccaaagagccccagactaccgcggagctttttcagctcgcggaccgagtggctcgtaaggaggaagcgtggacctggaactcctccggttccggagtggcagcttcggccgcccccggatccgccgctcagacagggcggcgtgataggaggaggaagaagaggtcgaaccgttccggcgacgagggtcatgtcctcgccgtcgagggcgctccgcgggccacccgaaaggggaggcctgcgagcgacaaaaagaaagaggccggaactcccggcagggagcgccccgccggcaggtggtgctccgtccacaacacctccctccacgatctcgcggactgtcgtgcagtcaaaaacctggctgagcgaacgaggaagtgggaggaggacaggaggcaggaacgccgtgagggcaagtccccggtggttccatccggcaaacggcgaggtgaggccaagcagaaggcccccgctgttgacatcgatgatggtgatgatgacctaggtttccaagaacctggggccaccattgccaccgtcgatggaggagcgtgtgctcacgtctctcgccggagcttcaaggctatgaaaagagagcttctggccatggcccctacccatgaggcgatgcgtcgggcgcggtggtcggaggtcgctctcactttcgaccagactgaccacccaccgtgcattgcccggggagggcaggttgcgatggtggtttcccccaccatctgcaacgtgaagttgggacgtgtcctcatagatggaggagcggctctcaacatcctttcccccgcggcctttgatgctatcaaggccccggggatggtgctccagccgtctcaaccgatcatcggtgtgacgccggggcacacgtggccattaggtcacattgacctaccggtcaccttcggtggacccgccaacttccgcacggagcgggtgagcttcgatgtggcggacctcagtctgccctacaacgcggtcctagggagacccgcgttggtgaagttcatggcggcggtccactacgcctacctccagatgaagatgtcgggccccggtggccccatctctgtccgtggcgaccttaaagtcgcgcttgcttgcattgagcagcgcgcggaccgcctcgctgctgcgtccaagcccgagggtggtgacgagaggcttggcccttctgcccccaccgccccgaggcagcggatggccacttgcgacgaggtcccggaagacgcgctcgtctccttcctgcgggcaaacgctgacgtcttcgcatggagaccagcggacatgcccggggtccccagggaggtgattgagcaccgtctcgccgtgcggccgggcgcaaggccggtccggcagaaagtgcggcggcaagccccggaacgtcaagctttcatccgcgaggaggtggctagacttttggaggccgggttcattcgtgaggtcatccacccggagtggctggcgaacccggtggtcgttcccaaggcgaacggcaagcttcggatgtgcatcgactacaccgaccttaacaaggcatgtcctaaggatccttaccccctgcctcgcatagatcagatcgtcgactccactgcggggtgcgaccttttgtgttttctagatgcatactctggttaccatcagattcgcatggctagggaggatgaggaaaaaactgcgttcattacccccgtaggaacctattgttatacatcaatgcccttcgggttaaagaatgcaggtcctacttttcagcgtactactcgaatttctttgggtagtcaaataggacgtaatgttgaggcgtatgtcgatgacttggttgtaaaaacgcgcaaccaagagatcttactttcagatctagcggaaacttttgagaatctccgctccgcccgcataaaactgaaccccgataagtgtgtgtttggtgtacctgcgggtaagcttctcgggttcttggtctctgcccgaggcattgaggccaaccccgagaagattcgagctatcgagcggatgcgcccccccagcaaacttagggacgtgcaatgcgtcaccggttgcatggccgccctaagtcgtttcatatcaaggctgggagagaaggcgctacccttgtttaagctcctcaagcgctcggggccgttcacttggacggaggaagctgaaaatgccctcgcccagttgaaggcgtatcttagctctcctccggttctagtcgccccggagccaaatgagtccctgctactttacttagcggcgaccccccaagtagttagtgcagcgttggttgtggagcgcgatgaggacaatcctcattctgcgcacccccgctctgtgccgacttggcccgagagcaggcagggaggagaggcccccgagtcgaacggtggcctaaggcccccgacgaccggagtcggccctccacccgcttgtcaaacggtgctgggtgcccccgaccctcaggaaggccccgaggccactgagggaaggctgcacttaaagccctttggccccgaggctaaccctgtgctgactcaacccgggaaagagcagggagaagaggcccccgagccgaacggaggccagaggcccctgacgaccggagttggccctttgcccgcttgtccgacgatgccaggagtccccgacccccaggacggccccgaggccactgtgggagggccgctcctgtcatcctccgaccccgaggtcatcagcgcagaagacgagtgcgccccgaggggccacttggacgaagaacgccccgggggtacggcccctaacgaggaggatcggccccgccgaaaggtgcagcggcctgtctactttgttagtgaggccctccgggacgccaagacccgatacccacaggcccagaagatgctttacgctattctgatggcctcaaggaaactgcgccattatttccaggcgcatcgggtcactgtggttacgtcttaccccctcggtcaaatcttgcataatcgagagggtacaggacgagtggtaaaatgggcaatcgagctttctgagttcgatctgcactttgaaccacgccacgctatcaagagccaggccctcgccgattttgtggcagagtggaccccggctccagagaccgtctcaatgcccgaggccagcgcgaacccctcacagctgcctcacgccgcccactgggtgatgcaattcgacggttctctgtctcttcagggcgccggcgactcccagctagtcgttaaccaggtctgtaaggagtaccggtgctctgacccacagatggacgcctacgtacgccaagtgcggcgtatggagcgccattttgacgggatagagcttcggcatgtgcccagacgggataatatgattgccgatgaactctcaaggctcgcgtcctcgcgagcccagaccccaccaggcgcctttgaagaaaggcttacccagccgtcggcgcgacccgaccccttaggggagacggatgcgcctgaccggcacccgaggcccgtcggagtccaggcctcgggacccgaagagagcgttccaagctcccttagattgattgcttggatctctgagatccaaacatacctcacagataagactctacctgaggaccgcgaagggagtgaacgcgaacaaggcgttgagcttcttgctgacatccatgagggcgagtgcggagcccattctgcctcgcgcaccctggttggcaaggcctttcgtcaaggattttattggccgacagctctcaatgacgcagtcgatctggtccggcgatgcagagcgtgtcagttccacgccaagcaaattcatcagccggcccaggccctgcagatcataccactgtcatggccatttgctgtctgggggcttgatatcctgggaccgttcaaacgggccccgggcgggtttgagtatctgtatgttgcgatcgacaagttcactaagtggcccgaggcttatccggttgtcaagatcgataagcactctgctcttaaatttattaagggcatcacggcccgttttggagtgcctaaccgtattattacggataatggcacccaattcactagtgagctcttcggcgactactgcgaagacatgggcatcaagctctgcttcgcctcacctgcccaccccagaagcaatggccaagtggagcgcgccaatgcagaaatcctcaaaggccttaaaaccaagaccttcaatattctcaagaagcacggcgattcatggatcgaggagttgccagcggtgctctgggcgaaccgaaccacaccgagccgagcgaccggggaaacgcctttcttcctcgtctacggcgcagaagcggttctcccatctgagctcaccctgaggtctcctcgggccaccatgtactgcgaggctgatcaagatcagcttcgtagagatgacctcgactacttggaagagcgaaggcggcgcgcggccctccgagctgcgcgctaccagcagagcctgcggcgctaccatcagcgccacgtccgggcccgatcactctgcgtcgacgacctcgtcctacgccgcgtccaaacgcgtgctggattgagcaaactctcaccaatgtgggagggtccgtatcgagtgatcggtgtcccccggccgggctcggtacggctggccacgggcgacggcacggagctgccaaacccatggaacatcgaacaccttcgtcgcttctacccctga

SEQ ID NO: 92492 - DNA, 556 bp, Oryza sativa
  Clone ID: PAT_MRT4530_90969C.1
ggagagaactagtctcgagtttttttttttttttttttggcaatgcgctagtatagcttctccgttggaaccacgagcaaagatgatacatctgcgaatttctccttcctcgctacaccatatgcatgatacatctgcctgtcgattgtcgaacaaaagatgggcactgtccaggtttacacggaacaaaaatgaacaccacaaaaatggaatctgaactatgcaacacaaacattacagattttcgatgagcctgtatagacaacactagcagctcagcaacccccgtgtatgaatggatttggaaacccaatttatagtctatagacagatcattgtgcccatttctccactgtaggcagcaaaatccttcccacgtacaaatagcgttatttggcttcgagatcgtgctgtaggagcttctacgtcaaaaatcggatacaaatgagcaacaatacacttgatccagtgacctcacactctgcgcagaggttgagaccccagaccccaattcaccaagacagtaattgcaccatttgacactctgatattgact

SEQ ID NO: 92493 - DNA, 516 bp, Oryza sativa
  Clone ID: PAT_MRT4530_9096C.1
atgatctggaagagtggtcggagcttcaagagatgctttacttcgacacagctgactgcagaaaatgacactatgttttggaaactaaatcagtcagggacgttcactacaaaatctctatacagggctattatctttggagggattaagggcaccaagctccaggagctttggaaaaccccggttcctttgaagataaaagtgtttatgtggttaatgctgaaggggaggattcaagtggcaaagcaacttaagaagatgaattggtcaggcagcccgttttgtgcttggtcgatatggctagtgaggaatgactgggtttttaacgacaaacttctgaccaacgtgacgtttttacctcacaaagctatgtcgtttatgatacagtggaaaaacctggcgccggtgcagctgaaggaggagttggagaagcacttctacttagactctttcgctgttaattgtgaagctggcatccccggcactactgtatcagactcttatgctttcttataa

SEQ ID NO: 92494 - DNA, 5673 bp, Oryza sativa
  Clone ID: PAT_MRT4530_90970C.1
atgaccagaggcttgaggcagacgcaaccgcccacgtggcctggcaccttcggggacgtcgggcccgagggtgaggtgtccgccctcctcctgatttcccccgagggggggtcgggttgcgcttgccctggccccgagggccggggcaccccgaccccctttaggaagtctgcgccaccgcagtatggcgcgttcctttatccggtctgtgaccagtcacagaccggtcagatcacggactcttccgtgtgccccaagtttttcttgttcaacctaatggccgagcaaggaaaaacgcacgacctctcgccgagtgtgagcggcgacgacggggagccgaatccacgccgtcgagctcgtactcctccacctcctccgcgccaaagccctaagcagggggaggcgcttgagagggtcgacaagtccgcagcgtcaccggccgcaggtgatgcaggagaacggcgagacggggagcgtcgcctcctcgtctacggcgacggcagcacgcctcaggcgcctgggtgctggtggacggtccgccaccaccaccaagacctccggcgccgctaccaccggctccgtgtcatcaaggcggagggcgcggcgagcggcggcggctgcacgtcattcggctgccactccctcgtctacaccgtcgactcgggaggatcagcatggggagccggatgcccgcctcaacatcgggcgtcggtagcctttgtggcgagtcttcggaatgtccgttggcccccaaggttccggcccaccatcaccgagaagtatgatgggagtgtcaaccccaccgagtttctccaggtctatacgaccgggattgaggccgctgggggtgacgacagagtcatggcgaacttctttcccatggccctaaaaggacaggcgcggggttggctaatgaatctgccacccgcgtcggtccactcctgggaagatttgtgccaacagttcaccatgaacttccaaggcacatatccgcgcccaggcgaagaagcggacttgcatgcagtacagcgaggcgatgatgagtcgcttcgctcgtacattcagcggttttgccaagtccgcaacactataccatgcatccctgcacacgcggtgatctacgcgttcagggggggcgtgcggcacaaccgcatgctcgaaaagatcgcttccaaagagccccagactaccgcggagctttttcagctcgcggaccgagtggctcgtaaggaggaagcgtggacctggaactcctccggttccggagtggcagcttcggccgcccccggatccgccgctcagacagggcggcgtgacaggaggaggaagaagaggccggaccgttccggcgacgagggtcatgtcctcgccgtcgagggcgctccgcgggccactcgaaaggggaggcctgcgagcgacaaaaagaacggggctggtacacccagcagggagcgccccgccggcaggtggtgctccgtccacaacacctccctccaccatctcgcggactgtcgcgcagtcaaaaatttggctgagcgaacgaggaagtgggaggaggacaggaggcaggaacgccgcgagggcaagtccccggcggtcccatccggcaaacggcgaagtgaggccaagcagaaggcccccgctgttgacattgatgatggtgatgatgacctaggtttccaagaacctggggccaccattgccaccgtcgatggaggggcgtgtgctcacgtctctcgccggagcttcaaggccatgaagcgagagcttctggccatggcccctacccatgaggcgatgcgtcgggcgcggtggtcggaggtcgctctcactttcgaccagactgaccacccaccgtgcattgcccggggagggcaggttgcgatggtggtttcccccaccatctgcaacgtgaagttgggacgtgtcctcatagatggaggagcggctctcaacatcctttcccccgcggcctttgatgctatcaaggccccggggatggtgctccagccgtctcaaccgatcatcggtgtgacgccggggcacacgtggccattaggtcacattgacctaccggtcaccttcggtggacccgccaacttccgcacggagcgggtgagcttcgatgtggcggacctcagtctgccctacaacgcggtcctggggagacccgcgttggtgaagttcatggcggcggtccactacgcctacctccagatgaagatgccgggccccggtggccccatctctgtccgtggcgaccttaaagtcgcgcttgcttgcattgagcagcgcgcggaccgcctcgctgctgcgtccaagcccgagggtggtgacgagaggcttggcccttctgcccccaccgccccgaggcagcggatggccacttgcgacgaggtcccggtcaaggaggaagacgcgctcgtctccttcctgcgggcaaacgctgacgtcttcgcatggagaccagcggacatgcccggggtccccagggaggtgattgagcaccgtctcgctgtgcggccgggcgcaaggccggtccggcagaaagtgcggcggcaagccccggaacgtcaagctttcatccgcgaggaggtggctagacttttggaggccgggttcattcgtgaggtcatccacccggagtggctggcgaacccggtggtcgttcccaaggcgaacggcaagcttcggatgtgcatcgactacaccgaccttaacaaggcatgtcctaaggatccttaccccctgcctcgcatagatcagatcgtcgactccactgcggggtgcgaccttttgtgttttctagatgcatactctggttaccatcagattcgcatggctagggaggatgaggaaaaaactgcgttcattacccccgtaggaacctattgttatacatcaatgcccttcgggttaaagaatgcaggtcctacttttcagcgtactactcgaatttctttgggtagtcaaataggacgtaatgttgaggcgtatgtcgatgacttggttgtaaaaacgcgcaaccaagagaccttactttcagatctagcggaaacttttgagaatctccgctccgcccgcataaaactgaaccccgataagtgtgtgtttggtgtacctgcgggtaagcttctcgggttcttggtctctgcccgaggcattgaggccaatcccgagaagattcgagctatcgagcggatgcgcccccccagcaaacttagggacgtgcaatgcgtcaccggttgcatggccgccctaagtcgtttcatatcaaggctgggagagaaggcgctacccctgtttaagctcctcaagcgctcggggccgttcacttggacggaggaagctgaaaatgccctcgcccagttgaaggcgtatcttagctctcctccggttctagtcgccccggagccaaatgagtccctgctactttacttagcggcgaccccccaagtagttagtgcagcgttggttgtggagcgcgatgaggacaatcctcattctgcgcacccccactctgtgccgacttggcccgggagcaggcagggaggagaggcccccgagtcgaacggtggcctaaggcccccgacgaccggagtcggccctccgcccgcttgtcagacggtgtcgggtgcccccgaccctcaggaaggccccgaggccactgcggggaggccgcacctatcactctctgaccccgaggctaaccctgtaccgattcgacccgggagagagcagggagaagaggcccccgagccgaacggtggcctaaggcccctgacgaccggagttggccctttgcccgcttgtccgatgacaccaggagcccccaacccccaggacggtcccgaggccactgtgggaaggccgctcctgtcgtcttccgaccccgaggtcatcggcacagaagacgggtgcgccccgaggggccactcggacgaagaacgccccgggggtgcggcccctagcgaagaagatcggcctcgccgaaaggtgcagcggcctgtctactttgttagtgaggccctccgggacgccaagacccgatacccacaggcccagaagatgctttacgctattctgatggcctcgaggaaactgcgccattatttccaggcgcatcgggtcgctgtgaaccccctctttgcgttctaccgttttggtctcctcccaagctctcccgtggtctctagccacctccccaccgtcgccctctctctcccacgttgccggccggcctccagccgcctctccctcctcaccggagcatcgtccggccgcgccgtcgcctcctccagcatcgcagctgccccctctccctcggcctaccctccgtttcgcgcggtgaccgccggaggcgcgttcccgccgtcgtcctcctctttccttcgcgccggccgcctccagccgcctctatctccctgcctgagcgccggtcgacgtcgccaccacctccctcggctccgcgacgccgccctcatccccggtatcacctcctcctcgcccgaacatcgccggaacaccgtcgcccgcgccggcctcaccttcctcctcgtcgacatctcctccggctgcccggtcgccgcgccagagcgtcggccgacgtcgccgtctcctccctcggcgacgccgcatcgccctccaccccggcctgccctcggtttcgccggaacgtcgccgcgaacctctacatccgcctcgccggagttgttcggccgcccgtccctcctcgccgtgtaccggtcggccacctccaccaccatcttcggcatcgcagccgcgacgtcgtcctcggcctcgcagctgctccctctccctcgtggcgtcgccaccacttctccgcctccggccgcctctgccacgtccccggagcgccggccgacgtcgccaccaccttcctcggctccacgacgccgctctcatccccggcaccacctcctcctcgcccgaacttcgccggaacgccgtcgtctccgcgccggcctctccttcctcctcgtcggctcgtcgccccgctgcaccaccaccatcaccaacgtcgtagcggcgtgttccacgctgtcccctcctcctctcagccgctgctgcctgccatcatcgtcgtctccgatcgttctcgtcatcgacgtcccgtcggtcgcccggctcgtcgtctcgcggcgccgcctccgtcatcgtcatcgcagcggcgtgtcccacgtcgtcctcgtctccgtgcagccgctgccggctgtcctcgtcgcctcctcgccggtcccggtcgtcgccgtcgtcgtcgtcctctcgtcgttcccggtcgtcgtggcgttcgtccctccgtcgagccgttctcgtccgtcgtccgcgttcgtcaagcgagccgctgcagccccgtcctcgtctccgccctcggctccgcgtcgtcaagccccgtgccggccgcgtctcgccttcgtccaaggatcgccgccgaagccgtcccctcgccgttcgtctccgttgtgcccgtctgtctccgccgcgcccgttcgtcgttgtcgttcccacgcctcgtcgcgtggtggtaaggatccgtcctctcgcttccccgccctcgtcctttcggcgtcgccccgtacccgttgtgcggtcgtcgaccccgtccgtgtggtgtccagtggagtccgtttgtcggccactcgcctcggttga

SEQ ID NO: 92495 - DNA, 7296 bp, Oryza sativa
  Clone ID: PAT_MRT4530_90971C.1
atggcatcagcttcagacaagctcgtcctctcggccatcgtgctcgccgtcctcgccgccgtggtggcagcggcgtcgggctacggcgacgtcggcgagtactgccgcgtggggaaggcggtgtcccggaacccggtcccgtcgtgccggaactacatcgcgcggtggtgcgccgccgccgggggccgcatggactcccgcaagcagccgccgcgggagttcctggagccgtgctgccgggagctcgccgccgtgccgatgcagtgccggtgcgacgcgctgagcgtgctggtgcgcggcgtggtcacggaggagggcgaccgcgtctccgggatgatctcccagcacgcggcaccggggtgcgacgccgcgacgatcgccgggatggcgagcgcgctgacggactacggccgcaaggggatcgtaacacctctttcttccatgcggcttgttcggagaggcgcagaactcttctcatcaaatggagtacgtgatccccggcaaattctggaggctgttccccagcgaatcaatgctgagatgaatgaagagttaacaagggatttctctgaagaagaagtgaagaaggcactggataatatcggggatctgaaagcaccggggccagacggaatgccatcactgttctataagagattttgggacgtggtcggtgatcaagtagtgaaagagaccctggcagtactgaggggagctcctatgccgactgagtggaatgaaacaactatagtgctgatacccaaggtgaataagccagagaacatcaaggacctaaggccgatcagtttgtgcaatgtgttatacaagattgtgtcgaaggttttggcaaatagattgaaaggtattctgcccgatgcgatttctccatctcagagcgcttttgtcccgggaaggcttatatcggataatattttagtggcttatgagatgacacacttcatgaggaaaaagagaaaggggaagttgggatatgcagcaatcaaacttgacatgagtaaagcctacgatcgggtcgaatggcatttcttaagggagatgatgttgcggctgggttttgacgagggatggacaaatttgatcatgcaatgtgtcacttcggtgtcgtatagaatcaaggttaatgagggtttctcagccttactgaagcaagcagagaatgaaggaagaatgaaaggtgatgcacagtgcctacaagagatcctatctctatatgaggagttatccgggcaaatgataaataaggacaagtcggtggtgatgttcagtccaaacacgtcgaacagcatcaccgagaccgggaatgtcctacacttggcgaagggcacaaacctggttactcgagtaaatgagctgattgatccttacacgtgggagtgggatgagccactagtgagacaaaccttctgggaggaagatgttgaacacatcctgtcaataccggttcatacagatatgaaggatgttgttgggtggcactttgacaggggcaataggaggatggggctatgttaccaggggagcggatgcacaagtggtcctagcgggagcgggcaaatcgactcgaatgcaagatgctctctgtcggtgatatgggaccgggggtatcgtgaccagaggcttgaggcagacacaatcgcccacgcggcctggcaccttcgaggacgtcgggcccgaggtctggtcaagcgtgtcacgctgcatgcagcgcagtgcagcgcgttcctttatccggtctgtgaccggtcacagaccggtcagatcacgggagaacggcgagatggggagcgtcgcctcctcgtctacggcgacggcagcacgcctcagggcgcgcttcaggctgctggcgcgctcctacgtcacccgcccgtcgtccatgacccggagtctccagctcagcgatggctggacgacgtggccaacttggtcatgacggcccagcagcgcctgggtgctggtggacggtccgccaccaccaagacctccggcgccaccaccaccggttccgtgtcatcaaggcggagggcgcggcgagcggcggcggctgcacgtcattcggctgccactccctcatcgacaccttcgactcgggaggatcagcatggggagccggatgcccgcctcaacatcgagcgccggcgtaatagccggcgtactccccgtgaaacggagggtgcctcctcgtccagagtgtcacctcgacatggacgtgaggaccagccctccgtgcccccggctggtggtgtcggctgtagagcctttgtggcgagtcttcggaatgtccgttggcccccaaggttccggcccaccatcaccgagaagtatgatgggagcgtcaaccccaccgagtttctccaggtctatacgaccgggattgaggccgctgggggtgacgacagggttatggctaatttctttcccatggccctgaagggacaggcgcggggttggctaatgaacctgccacccgcgtcggtccactcctgggaagatttgtgccaacagttcaccatgaactttcaaggcacatatccgcgcccaggcgaagaagcggacttgcacgccgtacagcgaggggatgatgagtcgcttcgctcgtacattcagcggttctgccaagtccgcaataccataccatgcatccctgcacacgcggtgatctacgcgttcaggggggggcggcatgacaggaggaggaagaagaggtcggtccattccggcgacgagggtcatgtcctcgccgtcgagggcgctccgcgggccacccgaaaggggaggcctgcaagcgacaaaaagaaagaggctggtactcccagcagggagcgcccagccggtaggtggtgctccgtccacaacacctccctccatgatctcgcggactgccgcgccgtcaaaaatttggcggagcgaacgaggaagtgggaggaggacaggaggcaggagcgccgggaaggtaagtccccggcggttccttccggcaaacggcgaagtgaggccaaacagaaggcccccgctgttgacatcgatgacggtgatgatgacctaggtttccaagaacctggggccaccattgccactgtcgatgggggagcgtgtgctcacatctctcgccggagcttcaaggctatgaagcgagagcttctggccgcggcccctactcatgaggcgacgcgtcgggcacggtggtcggaggttgtcctcacctttgaccagaccgaccacccaccgtgcgttgcccggggagggcagattgcgatggtggtttcccccaccatctgcaacgtgaagttggggcgtgtcctcatagatggaggagcggccctcaacatcctttcccccgcggcctatgatgccatcaaggccccggggatggtgctccagccgtcccaaccgattatcggtgtgacgctggggcacacatggccgttaggtcacatcgacctaccggtcacctttggtggatcagccaacttccgcacggagcgggtgaacttcgatgtggcggacctcagtctgccctacaacgcggtcctggggaggcccgcgttggtgaagttcatggcggcggttcactacgcctatcttcagatgaagatgccgggccccggcggccccatctctgtccatggcgacctcaaagttgcgctcgcttgcatggagcagcgcgcggaccacctcgctgctgcgtccaagcacgagggtggtgacgagaggcttggcacctccgcccccaccgccccgaggcggcggattgtcacatgcgacgaggtcccggtcaaggaggaagacgcgctcgtctccttcctgcgggcaaacgctgacgtcttcgcatggagaccggcggatatgcccggggtccccagggaggccccggaacgtcaagccttcatccgcgaggaggtggcgagacttctggaggccggattcatccgtgaggtcatccatccggagtggctggcgaacccggtggtcgttcccaaggcgaacggcaagcttcggatgtgcatcgactacaccgaccttaacaaggcatgtcctaaggacccttaccccctgcctcgcatagatcagattgtcgactccactgcggggtgcgaccttttgtgttttctagatgcatactctggttaccatcagattcgcatggctagggaggatgaggaaaaaactgcgttcattacccccgtaggaacctattgttatacatcaatgcccttcgggttaaagaatgcaggtcctacttttcagcgtactactcgaatttctttgggtagtcaaataggacgtaatgttgaggcttatgttgatgacttggttgtaaagacgcgcaaccaagagactttactctcagatctagcggaaacttttgaaaatctccgcgccgcccgcataaaactgaaccccgataagtgcgtgtttggtgtacctgcgggcaagcttctcgggttcttggtctctgcccgaggcatcgaggccaaccccgagaagatacgagctatagagcggatgcgcccccccagcaaacttagggatgtgcagtgcgtcaccggttgcatggccgccctaagtcgtttcatatcgaggctgggagagaaggcgctacccttatttaagctcctcaagcgctcggggccgtttacttggacggaggaagctgaaaatgccctcgcccagttgaaggcgtatctcagctctcctccggttctagttgccccggagccaaatgagcccctgctactttacttagcggcgaccccccaagtagttagtgcagcgttggttgtggagcgcgatgaggacaatcctcattccgcgcacccccaccctgtgccgacttggcccgggagcaagcagggaggagaggcccccgagtcgaacggtggcctaaggcccctgacgaccggagtcggccctctgcccgcttgtcagacggtgctgggtgcccccgaccctcaggaaggccccgaggccactgagggaaggccgcacctatcgccctttggccccgaggctaaccctgtgctgactcgacccgggagagagcagggagaagaggcccccgagccgaacggaggcctgaggcccctgacgcccggagttggccctttgcccgcttgtccgacgacgccaggagcccccgacccccaggacggccccgaggccactgtgggaaggccgctcctgtcatcctccgaccccgaggtcatcggcacagaagacgagtgcgccccgaggggccacttggacgaagaacgccccgggggtacggcccctagcgaagaggatcggccccgccgaaaggtgcagcggcctgtctactttgttagtgaggccctccgggacgccaagaccagataccctcaggcccagaagatgctttacgctattctgatggcctcgaggaaactgcgccattatttccaggcgcatcgggtcactgtggttacgtcttaccccctcggtcaaatcttgcgtaatcgcgagggtaccggacgggtggtaaaatgggcaatcgagctttttgagttcgatctgcactttgaaccacgccacgctatcaagaaccaagccctcgccgattttgtggcaaagtggaccccggctccagagaccgtctcaattcccgaggccagcacggacccctcacagctgcctcacacctcccactgggtgatgcagttcgacggttctctgtctctccagggcgccggagcgggggtcacgttgacctctccgaaaggagacgtccttagatacttggtccgtctcgactttcgagcaaccaacaatatggcagagtacgagggactccttgccggactcagagtggcagttggactggggatccgccgcctcttggtgttaggcgactcccagctggtcgttaaccagaccccaccgggcgcctttgaagaaaggcttacccagccgtcggcgcgacccgaccccttaggggagacggatgcgcctgatcggcccccgaggcccgtcggagtccaggcctcgggacccgaagggagcgctccaagctcccttagattgattgcatggatctctgagatccaagcatacctcacagataagactctacctgaggaccgcgaagggagtgaacgcgtccaacgcatttccaaacgctatgtgctggtagaagggaccctctatcggcgcgcggctaacggaatcctcctgaaatgcattcctcaggaacaaggcgttgagcttcttgccgatatccatgaaggcgagtgcggagcccattccgcctcgcgcaccttggttggcaaggcctttcgtcaaggattctattggccgacagctctcaatgatgcagttgatctggtccggcgatgcagagcgtgtcagtttcacgccaagcagatccatcagccggcccaggccctgcagatcataccactttcgtggccatttgctgtctgggggctcgatatcctgggaccgtttaagcgggccccgggcgggtttgagtatctgtatgtcgcgatcgacaagttcactaagtggcccgaggcttatccggtcgtcaagatcgataagcactctgcacttaaattcattaaaggcatcacggcccgttttggagtgcctaaccgtattattacggataatggcacccaattcactagtgaactcttcggcgattactgcgaagacatgggcatcaagctctgcttcgcctcacctgcccaccccagaagcaatggccaagtggagcgcgccaatgcagaaatcctcaaaggccttaaaaccaagaccttcaatattctcaagaagcacggcgattcatggatcgaggagttgccagcggtgctctgggcaaaccgaaccacaccaagccgagcaaccggggaaacgcctttcttcctcgtctacggcgcagaagcggttctcccatccgagctcaccctgaggtctcctcgggccaccatgtactgcgaagccgatcaagatcagcttcgcagagatgacctcgactacttggaagagcgaaggaggcgcgcggccctccgagccgcgtgctaccagcagagcctgcggcgctaccatcagcgccacgtccgggcccgatcactctgcgtcgacgacctcgtcttacgccgcgtccaaacgcgtgctggattgagcaagctctcaccaatgtgggagggtccgtatcgagtgatcggtgtcccccggccgggctccatacggttggccacgggcgacggcactgagctgcctaacccgtggaacatcgaacaccttcgtcgcttctag

SEQ ID NO: 92496 - DNA, 1142 bp, Oryza sativa
  Clone ID: PAT_MRT4530_90972C.1
gcgcgtcgctccgctctcccgccggccgccgcggccccgccccgatctcctcctcctcctccacgcgcgggcggcgaggaaaccctaccgccgaacgacggggatcgcgctgctcccgcggacggcgcggctggcatggcgctcctcccccgcgcggcgcggctggcggccctccgggggcgggcgcagccccggcgaggctacgcgggggcgccgccgccggcgggctccgcgtcgcccgcgccatacggcggggcgccgccgccggccgcgaactcgaaggcggcggagtgcgtgatctccaaggtggacgacctgatgaactgggcgcgccggggctcgatctggcccatgacgttcgggctcgcctgctgcgccgtggagatgatgcacacgggcgcctcccgctacgacttcgaccggttcggcgtcatcttccgcccctccccgcgccagtccgactgcatgatcgtcgccggcacgctcaccaacaagatggcccccgcgctccgcaaggtttacgatcagatgccagaacctcgatgggttatttcaatgggcagctgtgccaacggtggtggatactaccactactcctactccgttgtgcgcggatgcgacaggattgttcccgtggacatctacgtccctggatgccctccaactgctgaagctctactgtatggcgtcctgcagttgcagaagaagatcaacaggcgcagggatttccttcactggtggaacaagtgaaccagcacttctctgctttcctatctgctacgaatacgatcctgtcaaaatgttatcgagcttctgtgttaaataaaggaaagcgtgtgctttccgatcatcaaactctctgtagtagatgcagtgatagtgagctcctggctaccttgatcaccgttcatggacaaaaaaacaattggtgatgctgttgcggtgttgctgctttaatactatgtataatattttgtaatttgtgttgtcttctactagtgatgtaacattgggtatgacgctcaatggcgttgtgatgctgtatactttaccaacttgtgtaaatagaagtgatgataatataaaaaaaattaatagaagtgatgataaattgttaaaaaaaaataaaaaaaaaaaaaaaa

SEQ ID NO: 92497 - DNA, 4773 bp, Oryza sativa
  Clone ID: PAT_MRT4530_90973C.1
atggccgagcaaggaaaaacgcacgacctctcgccgagtgtgagcggcgacgacggggagccgaatccacgccgtcgagctcgtactcctccacctcctccgcgccaaagccctaagcagggggaggcgcttgagagggtcgacaagtccgcggcgtcaccggccgcaggtgatgcaggagaacggcgagatggggagcgtcgcctcctcgtctacggcgacggcagcacgcctcagggtgcgcttcaggctgctggcgcgcttctacgacacccgcctgtcgtccatgacccggagtctccagcccaacgatggctggaagacgtggccaacttggtcatgacggcacagcagcgcctgggtgctggtggacgatccgccaccaccaagacctccggcgccgctaccaccggctccgtgtcatcaaggcggagggcgcggcgagcggcggcggctgcacgtcattcggctgccactccctcgtcgacaccgtcgactagggaggatcagcatggggagccggatgcccgcctcaacatcgggcgccggcgtaatagccggcgtactccccgtgcaacggagggtgcctcctcgtccagagtgtcacctcgacacggacgtgaagatcagccttccgtgcccccggctggtggtgttggctgtagagcctttgtggcgagtcttcggaacgtccgttggcccccaaggttccggcccaccatcaccgagaagtacgatgggagcgtcaaccccaccgagtttctccaggtctatacgaccgggatcgaggccgctgggggtgacgacagggtcatggcgaacttctttcccatggccctaaaaggacaggcgcggggttggctaatgaacctgccacccgcgtcggtccactcctgggaagatttgtgccaacagttcaccatgaacttccaaggcacatatccacgcccaggcgaagaagcggacttgcatgcagtacagcgaggcgatgatgagtcgcttcgctcgtacattcagcggttttgccaagtccgcaatactataccatgcatccctgcacacgcggtgatctacgcgttcagggggggcgtgcggcacaaccgcatgctcgaaaagatcgcttccaaagagccccagactaccgcggagctttttcagctcgcggaccgagtggctcgtaaggaggaagcgtggacatggaactcctccggttccggagtggcagcttcggccgcccccggatccgccgctcagacagggcggtgtgacaggaggaggaagaagaggtcggaccgttctggcgacgagggtcatgtcctcgccgtcgagggcgctccgcgggccacccgaaaggggaggcctgcgagcgacaagaagaaagaggctggtactcccagcagggagcgccccgccggcaggtggtgctccgtccacaacacctccctccacgatctcgcggactgtcgcgcagtcaaaaacctggctgagcgaacgaggaagtgggaggaggacaggaggcaggaacgccgtgagggcaagtccccggcggttccctccggcaaacggcgaagtgaggccaagcagaaggcccccgctgttgacattgatgatggtgatgatgacctaggtttccaagaacctggggccaccattgccaccgtggatggaggagcatgtgctcaagtctctcgccggagcttcaaggctatgaagcgagagcttctggccatggcccctacccatgaggcgatgcgtcgggcgcggtggtcggaggttgctctcactttcgaccagaccgaccacccaccgtgcattgcccggggagggcaggttgcgatggtggtttcccccaccatctgcaacgtgaagttgggacgtgtcctcatagatggaggagcggctctcaacatcctttcccccgcggcctttgatgctatcaaggccccggggatggtgctccagccgtctcaaccgatcatcggtgtgacgccggggcacacgtggccattaggtcacatcgacctaccggtcaccttcggtggacctgccaacttccgcacggagcgggtgagcttcgatgtggcggacctcagtctgccctacaacgcggtcctggggagacccgcgttggtgaagttcatggcggcggtccactacgcctacctccagatgaagatgccgggccccggtggccccatctctgtccgtggcgaccttaaagtcgcgcttgcttgcatggagcagcgcgcggaccgcctcgctgctgcgtccaagcccgagggcggtgacgagaggcttggcccctctgcccccaccgccccgaggcagcggatggccacaggcgacgaggtcccggaagacgcgctcgtctccttcctgcgggcaaacgctgacgtcttcgcatggagaccagcggacatgcccggggtccccagggaggtgattgagcatcgtctcgccgtgcggccgggcgcaaggccggtccggcagaaagtgcggcggcaagccccggaacgtcaagccttcatccgcgaggaggtggctagacttttggaggccgggttcatccgtgaggtcatccatccggagtggctggcgaacccggtggtcgttcccaaggcgaacggcaagcttcggatgtgcatcgactacaccgaccttaacaaggcatgtcctaaggatccttaccccctgcctcgcatagatcagatcgtcgactccactgcggggcccgggagcaggcagggaggagagacccccgagtcgaacggtggcctaaggcccccgacgaccggagtcggccctccccccgcttgtcagaaggtgccgggtgcccccgaccctcaggaaggccccgaggccactgtgggaaggccgcacttaacgccctttgaccccgaggctaaccctgtgctgactcgacccgggaaagagcagggagaagaggcccccgagtcgaacggaggccagaggcccctgacgaccggagttggccctttgcccgcttgtccgacgatgccaggagcccccgacccccaggacggccccgaggccactgagggaaggccgcccctttcatcctccgaccccgaggtcatcggtacagaagacaagtgcgccccgaaaggccacttgaacgaagaacgccccggggatacggcccctagcagagaggatcggccccaccgaagggtgcagaggcctgtctactttgttagtgaggccctccgggacgccaagacccgatacccacaggcccagaagatgctttacgctattctgatggcctcgaggaaactgcgccattatttccaggcgcatcgggtcactgtggttacgtcttaccccctcggtcaaatcttgcataatcgagagggtacaggacgagtggtaaaatgggcaatcgagctttctgagttcgatctgcactttgaaccacgccacgctatcaagagccaggccctcgccgattttgtggcagagtggaccccggctccagagaccgtctcaatacccgaggccaacacggaccccacacagctgcctcacgccgcccactgggtgatgcagttcgacggctctctgtctcttcagggcgccggtgcaggggtcacgttgacctctccgaacggagatgtcctcagatatttggtccgtctcgactttcgagcgactaacaatatggcagagtacgagggactccttgccggactcagagtggcagttggactggggatccgccgcctcttggtattaggcgactcccagctagtcgttaatcagataagactctacctgaggaccgcgaagggagtgaacgcgtacaacgcatttccaaacgctatagcgtgtcagttccacgccaagcaaatccatcagccggcccaggccctgcagatcataccgctgtcatggccatttgctgtctgggggcttgatatcctgggaccgttcaaacgggccccgggcgggtttgagtatctgtatgttgcgatcgacaagttcactaagtggcccgaggcttatccggttgttaagatcgataagcactctgctcttaaattcattaagggcatcacggcccgttttggagtgcctaaccgtattataacggataatggcacccaattcactagtgaactcttcggcgactactgcgaagacatgggcatcaagctctgcttcgcctcacctgcccaccccagaagcaatggccaagtggagcgcgccaatgcagaaatcctcaaaggccttaaaaccaagaccttcaacattctcaagaagcacggcgattcatggatcgaggagttgccagcggtgctctgggcaaaccgaaccgcaccaagccgagcaaccggggaaacgcctttcttcctcgtctacggcgcagaagcggttctcccatccgagctcaccctgaggtctccccgggccaccatgtactgcgaggctgaccaagatcagcttcgcagagatgacctcgactacttagaagagcgaaggcggcgcgcggctctccgagctgcgcgctaccagcagagcctgcggcgctaccatcagcgccacgtccgggcccgatcactctgcgtcgacgacctcgtcctacgccgcgtccaaacgcgtgctggattgagcaagctctcaccaatgtgggagggtccgtatcgagtgatcggtgtcccccggccgggctcggtacggctggccacgggcgacggcacggagctgccaaacccgtggaacatcgaacaccttcgtcgcttctacccctga

SEQ ID NO: 92498 - DNA, 5184 bp, Oryza sativa
  Clone ID: PAT_MRT4530_90974C.1
atggccgagcaaggaaaaacgcacgacctctcgccgagtgtgagcggcgacgacggggagccgaatccacgccgtcgagctcgtactcctccacctcctccgcgccaaagccctaagcagggggaggcgcttgagagggtcgacaagtccgcggcgtcaccggccgcaggtgatgcaggagaacggcgagacggggagcgtcgcctcctcgtctacggcgacggcagcacgcctcagggtgcgcttcaagctgctggcgcgctcctacgacacccgcctgtcgtccatgacccggagtctccagcccaacgatggctggaagacgtggccaacttggtcatgacggcacagcagcgcctgggtgctggtggacggtccgccaccaccaccaagacctccggcgccgctaccaccggctccgtgtcatcaaggcggagggcgcggcgagcggcggcggctgcacgtcattcggctgccactccctcgtctacaccgtcgactcgggaggatcagcatggggagccggatgcccgcctcaacatcgggcgccggtgtaatagccggcgtactccccgtgcaacggagggagcctcctcgtccagagtgtcacctcgacatggacgtgaagatcagccctccgtgcccccggccggtggtgttggctgtagagcctttgtggcgagtcttcggaatgtccgttggcccccaaggttccggcccaccatcaccgagaagtacgatgggagcgtcaaccccaccgagtttctccaggtctatacgaccgggattgaggccgctgggggtgacgacagggtcatggcgaacttctttcccatggccctaaaaggacaggcgcggggttggctaatgaacctgccacccgcgtcggtccactcctgggaagatttgtgccaacagttcaccatgaacttccaaggcacatatccgcgcccaggcgaagaagcggacttgcatgcagtacagcgaggcgatgatgagtcgcttcgctcgtacattcagcggttttgccaagtccgcaacactataccatgcatccctgcacacgcggtgatctacgcgttcagggggggcgtgcggcacaaccgcatgctcgaaaagatcgcttccaaagagccccagactaccgcggagctttttcagctcgcggaccgagtggctcgtaaggaggaagcgtggacctggaactcctccggttccggagtggcagcttcggccgcccccggatccgccgctcagacagggcggcgtgataggaggaggaagaagaggtcggaccgttccggcgacgagggtcatgtcctcgccgtcgagggcgctccgcgggccacccgaaaggggaggcctgcgagcgacaaaaagaaagaggctggtactcccggcagggagcgccccgccggcaggtggtgctccgtccacaacacctccctccacgatctcgcggactgtcgtgcagtcaaaaacttggctgagcgaacgaggaagtgggaggaggacaggaggcaggaacgccgtgacggcaagtccccggcggttccttccgacaaacggcgaagtgaggccaagaagaaggcccccgctgttgacattgatgatggtgatgatgatctaggtttccaagaacctggagccaccattgccaccgtcgatggaggagcatgtgctcacgtctctcgccggagcttcaaggctatgaagcgagagcttctgaccatggcccctacccatgaggcgatgcgtcgggcgcggtggtcggaggttgctctcactttcgaccagaccgaccacccaccgtgcattgcccggggagggcaggttgcgatggtggtttcccccaccatctgcaacgtgaagttgggacgtgtcctcatagatggaggagcggctctcaacatcctttcccccgcggcctttgatgctatcaaggccccggggatggtgctccagccgtcacaaccgatcatcggtgtgacgccggggcacacgtggccgttaggtcacatcgacctaccggtcaccttcggtggacccgccaacttccgcacggagcgggtgagcttcgatgtggtggacctcagtctgccctacaacgcggtcctggggagacccgcgttggtgaagttcatggcggcggtccactacgcctacctccagatgaagatgccgggccccggtggccccatctctgtccgtggcgaccttaaagtcgcgcttgcttgcatggagcagcgcgcggaccgcctcgctgctgcgtccaagcccgagggtggtgacgagaggcttggcccctctgcccccaccgccccgaggcagcggatggccacttgcgacgaggtcccggaagacgcgctcgtctccttcctgcgggcaaacgctgacgtcttcgcatggagaccagcggacatgcccggggtccccagggaggtgattgagcaccgtctcgccgtgcggccgggcgcaaggccggtccggcagaaagtgcggcggcaagccccggaacgtcaagccttcatccgcgaggaggtggctagacttttggaggccgggttcattcgtgaggtcatccacccggagtggctggcgaacccggtggtcgttcccaaggcgaacggcaagcttcggatgtgcatcgactacaccgaccttaacaaggcatgtcctaaggatccttaccccctgcctcgcatagatcagatcgtcgactccactgcggagtgcgaccttttgtgttttctagatgcatactctggcattgaggccaaccccgagaagattcgagctatcgagcggatgcgcccccccagcaaacttagggacgtgcaatgcgtcaccggttgcatggccgccctaagtcgtttcatatcaaggctgggagagaaggcgctacccttgtttaagctcctcaagcgctcagggccgttcacttggacggaggaagctgaaaatgccctcgcccagttgaaggcgtatctcagctctcctccggttctagtcgccccggagccaaatgagtccctgctactttacttagcggcgaccccccaagtagttagtgcagcgttggttgtggagcgcgatgaggacaatcctcattctgcgcacccccgctctgtgccgacttggcccgggagcaggcagggaggagaggcccccgagtcgaacggtggcctaaggcccccgacgaccggagtcggccctccacccgcttgtcaaacggtgctgggtgcccccgaccctcaggaaggccccaaggccactgagggaaggctgcacttaaagccctttggccccgaggctaaccctgtgctgactcgacccaggaaagagcagggagaagaggcccccgagccgaacggaggccagaggcccctgacgaccggagttggccctttgcccgcttgtccgacgatgccaggagtccccgacccccaggacggccccgaggccactgtgggagggccgctcctgtcatcctccgaccccgaggtcatcagcgcagaagacgagttcgccccgaggggccacttggacgaagaacgccccgggggtacggcccctaacgaggaggatcggccccgccgaaaggtgcagcggcctgtctactttgttagtgaggccctccgggacgccaagacccgatacccacaggcccagaagatgctttacgctattctgatggcctcaaggaaactgcgccattatttccaggcgcatcgggtcactgtggttacgtcttaccccctcggtcaaatcttgcataatcgagagggtacaggacgagtggtaaaatgggcaatcgagctttctgagttcgatctgcactttgaaccacgccacgctatcaagagccaggccctcgccgattttgtggcagagtggaccccggctccagagaccgtctcaatgcccgaggccagcacgaacccctcacagctgcctcacgccgcccactgggtgatgcaattcgacggttctctgtctcttcagggcgccggtgcaggggtcacgttgacctctccgaacggagacgtcctcagatatttggtccgtctcgactttcgagcgactaacaatatggcagagtacgagggactccttgccggactcagagtggcggctggactggggatccgccgcctcttggtattaggcgactcccagctagtcgttaaccagataagactctacctgaggaccgcgaagggagtgaacgcgtacaacgcatttccaaacgctatagcgtgtcagttccacgccaagcaaattcatcagccggcccaggccctgcagatcataccactgtcatggccatttgctgtctgggggcttgatatcctgggaccgttcaaacgggccccgggcgggtttgagtatctgtatgttgcgatcgacaagttcactaagtggcccgaggcttatccggttgtcaagatcgataagcactctgctcttaaatttattaagggcatcacggcccgttttggagtgcctaaccgtattattacggataatggcacccaattcactagtgagctcttcggcgactactgcgaagacatgggcatcaagctctgcttcgcctcacctgcccaccccagaagcaatggccaagtggagcgcgccaatgcagaaatcctcaaaggccttaaaaccaagaccttcaatattctcaagaagcacggcgattcatggatcgaggagttgccagcggtgctctgggcgaaccgaaccacaccaagccgagcgaccggggaaacgcctttcttcctcgtctacggcgcagaagcggttctcccatctgagctcaccctgaggtctcctcgggccaccatgtactgcgaggctgatcaagatcagcttcgtagagatgacctcgactacttggaagagcgaaggcggcgcgcggccctccgagctgcgcgctaccagcagagcctgcggcgctaccatcagcgccacgtccgggcccgatcactctgcgtcgacgacctcgtcctacgccgcgtccaaacgcgtgctggattgagcaaactctcaccaatgtgggagggtccgtatcgagtgatcggtgtcccccggccgggctcggtacggctggccacgggcgacggcacggagctgccaaacccgtggaacattgaacaccttcgtcgcttctacccctga

SEQ ID NO: 92499 - DNA, 458 bp, Oryza sativa
  unsure (1)..(458): unsure at all n locations
  Clone ID: PAT_MRT4530_90975C.1
agttctcgctcctgncattaactttnctttttttcattaggtgtagccttgcaanttccctaacgaanggagtcaaggaggctgctcggttacaagggacattttctacaccctgtctgactggccagaaggggatacggcaaatgttcaaatgaaaanaaaatcagatgatggctgcagatntcatatcactcttctctatctctctttgtaaaatggcctgtgtctctggctttcttttttcncttcttttttaacttatataggagtatatgctttaggagttcagggaaaaaagaaggcatccttttgccactaaaccagacagagtactgattttggggacagatgttttattgttgcagattactaccatttctctatcgaacttctcccatagttgcatcgaaaaaaaaaaaaaaaaaaaaaaaaaaaaaaaaaaaaaaaaaaaaaaaaaa

SEQ ID NO: 92500 - DNA, 5532 bp, Oryza sativa
  Clone ID: PAT_MRT4530_90976C.1
atggccgagcaaggaaaaacacacgacctctcgccgagtgtgagcggcgacgacggggagccgaatccgcgccgtcgagctcgtactcctccacctcctccgcgccaaagccctaagcagggggaggcgcttgagagggtcgacaaatccgcggcgtcaccagccgcaggtgatgcaggagaacggcgagatggggagcgtcgcctcctcgtctacggcgacggcagcacacctcagggtgcgcttcaggctgctggcgcgctcctacgacacccgcctgtcgtccatgacccggagtctccagcccaacgatggctggaagacgtggccaacttggtcatgacggcacagcagcgcctgggtgctggtggacggtccgccaccaccaccaagacctccggcgccgctaccaccggctccgtgtcatcaaggcggagggcgcggcgagcggcggcggctgcacgtcattcggctgccactccctcgtctacaccgtcgactcgggaggatcagcatggggagccggatgcccgcctcaacatcgggcgccggcgtaatagccggcgtactccccgtgcaacggagggagcctcctcgtccagagtgtcacctcgacatggacgtgaagatcagccctccgtgcccccggccggtggtgttggctgtagagcctttgtggcgagtcttcggaatgtccgttggcccccaaggttccggcccaccatcaccgagaagtatgatgggagtgtcaaccccaccgagtttctccaggtctatacgaccgggattgaggccgctgggggtgacgacagagtcatggcgaacttctttcccatggccctaaaaggacaggcgcggggttggctaatgaatctgccacccgcgtcggtccactcctgggaagatttgtgccaacagttcaccatgaacttccaaggcacatatccgcgcccaggcgaagaagcggacttgcatgcagtacagcgaggcgatgatgagtcgcttcgctcgtacattcagcggttttgccaagtccgcaacactataccatgcatccctgcacacgcggtgatctacgcgttcagggggggcgtgcggcacaaccgcatgctcgaaaagatcgcttccaaagagccccagactaccgcggagctttttcagctcgcggaccgagtggctcgtaaggaggaagcgtggacctggaactcctccggttccggagtggcagcttcggccgcccccggatccgccgctcagacagggcggcgtgacaggaggaggaagaagaggccggaccgttccggcgacgagggtcatgtcctcgccgtcgagggcgctccgcgggccactcgaaaggggaggcctgcgagcgacaaaaagaacggggctggtacacccagcagggagcgccccgccggcaggtggtgctccgtccacaacacctccctccacgatctcgcggactgtcgcgcagtcaaaaatttggctgagcgaacgaggaagtgggaggaggacaggaggcaggaacgccgcgagggcaagtccccggcggtcccatccggcaaacggcgaagtgaggccaagcagaaggcccccgctgttgacattgatgatggtgatgatgacctaggtttccaagaacctggggccaccattgccaccgtcgatggaggggcgtgtgctcacgtctctcgccggagcttcaaggctatgaagcgagagcttctggccatggcccctacccatgaggtgatgcgtcgggcgcggtggtcggaggttgctctcacttttgaccagaccgaccacccaccgtgcattgcccggggagggcaggttgcgatggtggtctcccccaccatctgcaacgtgaagttgggacgtgtcctcatagatggaggagcggctctcaacatcctttcccccgcggcctttgatgctatcaaggccccggggatggtgctccagccgtctcaaccgatcatcggtgtgacgccggggcacacgtggccattaggtcacatcgacctaccggtcaccttcggtggacccgccaacttccgcacggagcgggtgagctttgatgtggcggacctcagtctgccctacaacgcggtcctggggagacccgcgttggtgaagttcatggcggcggtccactacgcctacctccggatgaagatgccgggccccggtggccccatctctgtccgtggcgaccttaaagtcgcgcttgcttgcatggagcagcgcgcggaccgcctcgctgctgcgtccaagcccgagggtggtgacgagaggcttggcccctctgcccccaccgccccgaggcagcggatggccacatgcgatgaggttccggtcaaggaggaagacgcgctcgtctccttcctgcgggcaaacgctgacgtcttcgcatggagaccagcggacatgcccggggtccccagggaggtgattgagcaccgtctcgccgtgcggccgggcgcaaggccggtccggcagaaagtgcggcggcaagccccggaacgtcaagccttcatccgcgaggaggtggctagacttttggaggccgggttcatccgtgaggtcatccatccggagtggctggcgaacccggtggtcgttcccaaggcgaacggcaagcttcggatgtgcatcgactacaccgaccttaacaaggcatgtcctaaggatccttaccccctgcctcgcatagatcagatcgtcgactccactgcggggtgcgaccttttgtgttttctagatgcatactctggttaccatcagattcgcatggctagggaggatgaggaaaaaactgcgttcattacccccgtaggaacctattgttatacatcaatgcccttcgggttaaagaatgcaggtcctacttttcagcgtactactcgaatttctttgggtagccaaataggacgtaatgttgaggcgtatgtcgatgacttggttgtaaaaacgtgcaaccaagaaactttactttcagatctagcggaaacttttgagaatctccgctccgcccgcataaaactgaaccccgataagtgtgtgtttggtgtacctgcgggcaagcttctcgggttcttggtctctgcccgaggcattgaggccaaccccgagaagattcgagctatcgagcggatgcgcccccccagcaaacttagggacgtgcaatgcgtcaccggttgcatggccgccctaagtcgtttcatatcaaggctgggagagaaggcgctacccttgtttaagctcctcaagcgctcggggccgttcacttggacggaggaagctgaacatgcccttactcagttaaaggcatatctcagctctcctccggttctagtcgccccggagccaaatgagcccctgctactttatttagcagcgaccccccaagtagttagtgcagcgttggttgtggagcgcgatgaggacaatcctcattctgcgcacccccactctgtgccgacttggcccgggagcaggcagggaggagaggcccccgagtcgaacggtggcctaaggcccccgacgaccggagtcggccctccgcccgcttgtcagacggtgtcgggtgcccccgaccctcaggaaggccccgaggccactgcggggaggccgcacctatcaccctctgaccccgaggctaaccctgtaccgattcgacccgggagagagcagggagaagaggcccccgagccgaacggtggcctaaggcccctgacgaccggagttggccctttgcccgcttgtccgatgacaccaggagcccccaacccccaggacggtcccgaggccactgtgggaaggccgctcctgtcgtcttccgaccccgaggtcatcggcacagaagacgggtgcgccccgaggggccactcggacgaagaacgccccgggggtgcggcccctagcgaagaagatcggcctcgccgaaaggtgcagcggcctgtctactttgttagtgaggccctccgggacgccaagacccgatacccacaggcccagaagatgctttacgctattctgatggcctcgaggaaactgcgccattatttccaggcgcatcgggtcgctgtggttacgtcttaccccctcggtcaaatcttgcataatcgagagggtacaggacgagtggtaaaatgggcaatcgagctttccgagttcgatctgcactttgaaccacgccacgctatcaagagccaggccctcgccgattttgtggcagagtggaccccggctccagagaccgtctcaatacccgaggccagcacgaacccctcacagctgcctcaaaccgcccactgggtgatgcagtttgacggttctctgtctcttcagggcgccggtgcaggggtcacgttgacctctccgaacggagacgtcctcagatatttggtccgtctcaacttccgagcgactaacaatatggcagagtacgagggactccttgccggactcagagtggcggctggactggggatccgccgcctcttggtattaggcgactcccagctagtcgttaaccagataagactctacctgaggaccgcgaagggagtgaacgcgtacaacgcatttccaaacgctatagcgtgtcagttccacgccaagcaaatccatcagccggcccaggccctgcagatcataccgctgtcgtggccatttgctgtctgggggcttgatatcctgggaccgttcaaacgggccccaggcgggtttgagtatctgtatgttgcgatcgacaagttcactaagtggcccgaggcttatccggttgtcaagatcgataagcactctgctcttaaattcattaagggtatcacggcccgttttggagtacctaaccgtattattacggataatggcacccaattcactagtgaactcttcggcgactactgtgaagacatgggcatcaagctctgcttcgcctcacctgcccaccccagaagcaatggccaagtggagcgcgccaatgcagaaatcctcaaaggccttaaaaccaagaccttcaatattctcaagaagcacggcgattcatggatcgaggagttgccagcggtgctctgggcgaaccgaaccacaccaagccgagcgaccggggaaacgcctttcttcctcgtctacggcgcagaagcggttctcccatctgagctcaccctgaggtctcctcgggccaccatgtactgcgaggctgatcaagatcagcttcgtagagatgacctcgactacttggaagagcgaaggcggcgcgcggccctccgagctgcgcgctaccagcagagcctgcggcgctaccatcagcgccacgtccgggcccgatcactctgcgtcgacgacctcgtcctacgccgcgtccaaacgcgtgctggattgagcaaactctcaccaatgtgggagggtccgtatcgagtgatcggtgtcccccggccgggctcggtacggctggccacgggcgacggcacggagctgccaaacccgtggaacatcgaacaccttcgtcgcttctacccctga

SEQ ID NO: 92501 - DNA, 2685 bp, Oryza sativa
  Clone ID: PAT_MRT4530_90977C.1
atgcagaagctgggtttatcggggcttaggggtctcgaggggttccgatctctcgctggatccacctcgacggccgcgaaggccccgaaccccaagccgtcgtccgatattggagggagcacgtacgggagcttcgccaatcttaagatcacagcagaaaagctggttaaggagcaggcttcagtgaagactgatctagaaatgacgcataccaagttgagaagagcaacagaacagataaatctgttagaagcaaagctccaacaagctgtcaatgaaaatgcaaagcttaaggtgaaacagactgaagattcaaagctctggcagggattagattcaaaagtttcctcaacaaagactttgtgcaatcaactgacagaaactctgcagcagttagctagtcagacagaaagagctgaggaagataagaagttttttgaggagattcttggcaagaattcaaaagcttttgaagaattcaactgcctgttgcacgattcatcaataaaactggaatgtgcagaacaaatgatcatttcagggaaacaggagatgttgcggatcaaacaagagaaagaagagatggatcagagttacaaggaacagctatatgcaagtgatactaccataagagaaaaaaattctctcatcaaacagttggaagattccattgaacaaaataaagcccgactgttgtatgttgactcccgtttggaatgcatggagcaagagttgaagctaaaagaagatgtttgcatttgtctgaaagaaaacctggcaagcactgaaagtgaaaagaatgacttgaagcttaggaacgagggctacactttggaagttcagaaactatccaaggacaacaaggagcttaatgaattgcttagtggttttacggttaaggtaactgagctagataaagagcacacatcaatttcaagtcatgtcactcagttgatttcttcatttgagagatatgatggaaaggttcacgaggaaaaaatgttgatgataaaatctgccaaggacaaatttgaacatctccaaaatcagtatgtaaatttgatatcagaaaacaatgctctccaaactgaaatcgaggagctgaagtccagaatcatagagctgcagaaaactcaagagattgtcatggttcaacatgtagaagaatgccaagttgctgaagataagatcagaagattggagtctgaagcagaaatttctgcctccaacattagtcagctagaaaaggtagcttctgacctagaagggagggttcaaaaacttctggaggattctagatctgctgaaaatcacaagcaagagttgcttcagaagattctgaagctagaatcagataatcaggagcttctaggtcgagtgcaatctgttttgaatgagaagtctaatgatacggaatctctgcaaggagagatagctaagcgtgaccaacaggttgagacacttgagaaccaggtcaatcagctttgcagtattattgatgagaaagaacaactacacacttgtgctgtagaaagagagaagaatttagaggaacagaagttacaggtccaagcatcacttgctgcaacagaaagccaacttactgaggcaaaaaaacagtatgatatcatgcttgaaggtaaaaagatagagctgtccaagcatctgaaagaattatcactgaaaaatgaccaggccatcaatgaaatccgtaggaaatatgaactagaaaaggtagaaatcattaatattgaaaaagaaaaggccgagaagctcataaaggaaatggaaaacaaatgcaatgaaaagatttcagaaaacaggcaagattctgagagcagttttgagatggttgcaagaattcagcaggataatgagcataaggaatcaactcttcgagcttatcataaagaagaactccagcgcatccaatctcaggctgagaatgaattgagggagagattgtcatcgctcagaaaggatcatgaaattcaaatgaaatcattgactaaaaagcatgaggaaaattgtcagaagcttcaggatgaactggagcttcagaagtcaaaggaggagaagcaaagagcattgttacagttacaatggaaagtaatgggcgaaacccaacaggttgatcaagaagtaaactctaagaaggtcaagacaattggttttttttccagatgttcatacatctcattcttgctagattttcccaaagagctccttaaacatatcttacaaattcaggaatactctgtttcatcaataaagaggagagatccatatatcagaaaagaacatcagcttcagttggttagtcctgagaccaaacggaaggatgttaatctatctggcattatacaatcaccaattacaaacatgctgagaaaggtagagaaaggaacccaggatattcctaagcatagaaaggtaacacatcatgaatatgaagttgagacagcaaatggaagaatcacaaagcgcaggaaaactaagagcaccgtcatgtttggggtacaggaacccaacactcagaagtcattgcatgatactgctgacaaggatcctacaaaaatgaagaaggttgttgctggatcccatccccaccctgcaaacattggtgaattgttttctgagggctcgttgaatccatatgccgaagatccttatgcatttggctag

SEQ ID NO: 92502 - DNA, 1102 bp, Oryza sativa
  Clone ID: PAT_MRT4530_90978C.1
gatgatggttatcaagacatcgtcaacatagatatatcatcagtggtgattgatcaaatgaagaagaaatatcgtgacaagcctcaccttaaatacatgaagatggatgtaaggaacatggctgaattcgagtcaggttcattcgatgctgttattgacaaaggaacgctagattctataatgtgtggccaaaattcacaagagaatgcgtctcagatgctagaggaggtcaatagaattctcaaggacaagggagtttatattctgatcacttatggcgacccaagttatcgattgcgtctccttaaagacctgcagctttggacagtaaagcttcatgtcatagatagatgggaaaggagtcgggagccttcatgggaactgacgaagccactgcctttagatggtgatagcacatcaattgttagtcttcttggcccaaaacctgatgttcactatatttatgtctgtataaagggcagcgacgacgggaagtcgcatttggattcgagggctgaagtcaatggagaagcatagtgatttcacctcataacccttttggatcatcttgtataaccagtgtaggaataatgtagtgcagatactgtataattatgctgttgcttgatgaatcacttggttttattggcagtagttaatttgatttttcacatatgccttatcatgtttcatgtgctccctagtagaaaatgcgacatattgagtccatacagctgatcccatcaaaattatggtctgaaaaaaaaaaaaaaaaaagcggccaaataaagtcttcaaaagaaaagtgagattgcaaatgctggcaatttccactctcctgcaactgttttgtgacccgataaaaagtattttaagcttcatgtaatgtagcaataagtgatgtttatcagtttaataatgacttacttgagaattaacatcctgtggttagaattctaggtgtttgcaagaatgtgtatgctctcatgctgctagagcagcaatggccttgaggcttttttgtggaagctagatgctttgtatcggtggacctaatggttgatgccctcatattgggatgcaattttgaccgttaagcatc

SEQ ID NO: 92503 - DNA, 6285 bp, Oryza sativa
  Clone ID: PAT_MRT4530_90979C.1
atggccgagcaaggaaaaacacacgacctctcgccgagtgtgagcggcgacgacggggagccgaatccgcgccgtcgagctcgtactcctccacctcctccgcgccaaagccctaagcagggggaggcgcttgagagggtcgacaaatccgcggcgtcaccagccgcaggtgatgcaggagaacggcgagatggggagcgtcgcctcctcgtctacggcgacggcagcacacctcagggtgcgcttcaggctgctggcgcgctcctacgacacccgcctgtcgtccatgacccggagtctccagcccaacgatggctggaagacgtggccaacttggtcatgacggcacagcagcgcctgggtgctggtggacggtccgccaccaccaccaagacctccggcgccgctaccaccggctccgtgtcatcaaggcggagggcgcggcgagcggcggcggctgcacgtcattcggctgccactccctcgtctacaccgtcgactcgggaggatcagcatggggagccggatgcccgcctcaacatcgggcgccggcgtaatagccggcgtactccccgtgcaacggagggagcctcctcgtccagagtgtcacctcgacatggacgtgaagatcagccctccgtgcccccggccggtggtgttggctgtagagcctttgtggcgagtcttcggaatgtccgttggcccccaaggttccggcccaccatcaccgagaagtatgatgggagtgtcaaccccaccgagtttctccaggtctatacgaccgggattgaggccgctgggggtgacgacagagtcatggcgaacttctttcccatggccctaaaaggacaggcgcggggttggctaatgaatctgccacccgcgtcggtccactcctgggaagatttgtgccaacagttcaccatgaacttccaaggcacatatccgcgcccaggcgaagaagcggacttgcatgcagtacagcgaggcgatgatgagtcgcttcgctcgtacattcagcggttttgccaagtccgcaacactataccatgcatccctgcacacgcggtgatctacgcgttcagggggggcgtgcggcacaaccgcatgctcgaaaagatcgcttccaaagagccccagactaccgcggagctttttcagctcgcggaccgagtggctcgtaaggaggaagcgtggacctggaactcctccggttccggagtggcagcttcggccgcccccggatccgccgctcagacagggcggcgtgacaggaggaggaagaagaggccggaccgttccggcgacgagggtcatgtcctcgccgtcgagggcgctccgcgggccactcgaaaggggaggcctgcgagcgacaaaaagaacggggctggtacacccagcagggagcgccccgccggcaggtggtgctccgtccacaacacctccctccacgatctcgcggactgtcgcgcagtcaaaaatttggctgagcgaacgaggaagtgggaggaggacaggaggcaggaacgccgcgaggacaagtccccggcggtcccatccggcaaacggcgaagtgaggccaagcagaaggcccccgctgttgacattgatgatggtgatgatgacctaggtttccaagaacctggggccaccattgccaccgtcgatggaggggcgtgtgctcacgtctctcgccggagcttcaaggctatgaagcgagagcttctggccatggcccctacccatgaggcgatgcgtcgggcgtggtggtcggaggttgctctcacttttgaccagaccgaccacccaccgtgcattgcccggggagggcaggttgcgatggtggtctcccccaccatctgcaacgtgaagttgggacgtgtcctcatagatggaggagcggctctcaacatcctttcccccgcggcctttgatgctatcaaggccccggggatggtgctccagccgtctcaaccgatcatcggtgtgacgccggggcacacgtggccattaggtcacatcgacctaccggtcaccttcggtggacccgccaacttccgcacggagcgggtgagcttcgatgtggcggacctcagtctgccctacaacgcggtcctggggagacccgcgttggtgaagttcatggcggcggtccactacgcctacctccggatgaagatgccgggccccggtggccccatctctgtccgtggcgaccttaaagtcgcgcttgcttgcatggagcagcgcgcggaccgcctcgctgctgcgtccaagcccgagggtggtgacgagaggcttggcccctctgcccccaccgccccgaggcagcggatggccacatgcgacgaggttccggaagacgcgctcgtctccttcctgcgggcaaacgctgacgtcttcgcatggagaccagcggacatgcccggggtccccagggaggtgattgagcaccgtctcgccgtgcggccgggcgcaaggccggtctggcagaaagtgcggcggcaagccccggaacgtcaagccttcatccgcgaggaggtggctagacttttggaggccgggttcatccgtgaggtcatccatccggagtggctggcgaacccggtggtcgttcccaaggcgaacggcaagcttcggatgtgcatcgactacaccgaccttaacaaggcatgtcctaaggatccttaccccctgcctcgcatagatcagatcgtcgactccactgcggggtgcgaccttttgtgttttctagatgcatactctggttaccatcagattcgcatggctagggaggatgaggaaaaaactgcgttcattacccccgtaggaacctattgttatacatcaatgcccttcgggttaaagaatgcaggtcctacttttcagcgtactactcgaatttctttgggtagccaaataggacgtaatgttgaggcgtatgtcgatgacttggttgtaaaaacgtgcaaccaagaaactttactttcagatctagcggaaacttttgagaatctccgctccgcccgcataaaactgaaccccgataagtgtgtgtttggtgtacctgcgggcaagcttctcgggttcttggtctctgcccgaggcattgaggccaaccccgagaagattcgagctatcgagcggatgcgcccccccagcaaacttagggacgtgcaatgcgtcaccgatctagcggaaacttttgagaatctccgctccgcccgcataaaactgaaccccgataagtgtgtgtttggtgtacctgcgggcaagcttctcgggttcttggtctctgcccgaggcattgaggccaaccccgagaagattcgagctatcgagcggatgcgcccccccagcaaacttagggacgtgcaatgcgtcaccggttgcatggccgccctaagtcgtttcatatcaaggctgggagagaaggcgctacccttgtttaagctcctcaagcgctcggggccgttcacttggacggaggaagctgaacatgcccttactcagttaaaggcatatctcagctctcccccggttctagtcgccccggagccaaatgagcccctgctactttatttagcagcgaccccccaagtagttagtgcagcgttggttgtggagcgcgatgaggacaatcctcattctgcgcacccccactctgtgccgacttggcccgggagcaggcagggaggagaggcccccgagtcgaacggtggcctaaggcccccgacgaccggagtcggccctccgcccgcttgtcagacggtgtcgggtgcccccgaccctcaggaaggccccgaggccactgcggggaggccgcacctatcaccctctgaccccgaggctaaccctgtaccgattcgacccgggagagagcagggagaagaggcccccgagccgaacggtggcctaaggcccctgacgaccggagttggccctttgcccgcttgtccgatgacaccaggagcccccaacccccaggacggtcccgaggccactgtgggaaggccgctcctgtcgtcttccgaccccgaggtcatcggcacagaagacgggtgcgccccgaggggccactcggacgaagaacgccccgggggtgcggcccctagcgaagaagatcggcctcgccgaaaggtgcagcggcctgtctactttgttagtgaggccctccgggacgccaagacccgatacccacaggcccagaagatgctttacgctattctgatggcctcgaggaaactgcgccattatttccaggcgcatcgggtcgctgtggttacgtcttaccccctcggtcaaatcttgcataatcgagagggtacaggacgagtggtaaaatgggcaatcgagctttccgagttcgatctgcactttgaaccacgccacgctatcaagagccaggccctcgccgattttgtggcagagtggaccccggctccagagaccgtctcaatacccgaggccagcacgaacccctcacagctgcctcaaaccgcccactgggtgatgcagtttgacggttctctgtctcttcagggcgccggtgcaggggtcacgttgacctctccgaacggagacgtcctcagatatttggtccgtctcgacttccgagcgactaacaatatggcagagtacgagggactccttgccggactcagagtggcggctggactggggatccgccgcctcttggtattaggcgactcccagctagtcgttaaccaggtctgtaaggagtaccggtgctctgacccacagatggacgcctacgtacgccaagtgcggcgtatggagcgccatttcgacgggatagagcttcggcatgtacccagaagggacaacatgatagccgacgaactctcaaggctcgcgtcctcgcgagcccagaccccaccgggcgcctttgaagaaaggcttacccagccgtcggcgcgacccgacccctcaggggagacggatgcgcctgaccggcacccgaggcccgtcggagtccaggcctcgggacccgaagagagcgttccaagctcccttagattgattgcttggatctctgagatccaaacatacctcacagataagactctacctgaggaccgcgaagggagtgaacgcgtacaacgcatttccaaacgctatgtgctgatagaagggaccctctatcggcgcgcggctaacggaatcctcctgaagtgcattcctcaggaacaaggcgttgagcttcttgttgacatccatgagggcgagtgcggagcccattccgcctcgcgcaccctggttggcaaggcctttcgtcaaggattttattggccgacagctctcaatgacgcagtcgatctggtccggcgatgcagagcgtgtcagttccacgccaagcaaatccatcagccggcccaggccctgcagatcataccactgtcgtggccatttgctgtctgggggcttgatatcctgggaccgttcaaacgggccccaggcgggtttgagtatctgtatgttgcgatcgacaagttcactaagtggcccgaggcttatccggttgtcaagatcgataagcactctgctcttaaattcattaagggtatcacggcccgttttggagtacctaaccgtattattacggataatggcacccaattcactagtgaactcttcggcgactactgtgaagacatgggcatcaagctctgcttcgcctcacctgcccaccccagaagcaatggccaagtggagcgcgccaatgcagaaatcctcaaaggccttaaaaccaagaccttcaatattctcaagaagcacggcgattcatggatcgaggagttgccagcggtgctctgggcgaaccgaaccacaccaagccgagcgaccggggaaacgcctttcttcctcgtctacggcgcagaagcggttctcccatctgagctcaccctgaggtctcctcgggccaccatgtactgcgaggctgatcaagatcagcttcgtagagatgacctcgactacttggaagagcgaaggcggcgcgcggccctccgagctgcgcgctaccagcagagcctgcggcgctaccatcagcgccacgtccgggcccgatcactctgcgtcgacgacctcgtcctacgccgcgtccaaacgcgtgctggattgagcaaactctcaccaatgtgggagggtccgtatcgagtgatcggtgtcccccggccgggctcggtacggctggccacgggcgacggcacggagctgccaaacccgtggaacatcgaacaccttcgtcgcttctacccctga

SEQ ID NO: 92504 - DNA, 2814 bp, Oryza sativa
  Clone ID: PAT_MRT4530_9097C.1
tcaatatttttccctggtccaaaagatttcatttccgaaaaatagtcccaaaccaaatgctattgaactagctgatgcttgaggaacacgtgcataagcatgaggcaccacttgctgatttacatcttcttgatcttcagacaatccatagcctctttggttccaggcagcaccatgtgagggttggcttggggaagccccatattcaggcggtgccccttgatttccaaaccctacttgtcctcgacgagcgttaaaactgttctgaccttgcagagcatgatttccaggagcctgagcatcaaatccctgctgtcgaggctgtgtgtgaaatcttggctcaccctggggagacccaaaacgattatgctgatctactgcttgaccatactctggtctgttctgatagtgaaaaccaggtaatggtggtggtgcttgaggagcaccaaactgtgcctgcggtggctgagtggagccaacagcatgctgcgatgactgaggtccaccataactaggctgttgcacttgtggagcattgaaccctgtatgccatggatgagatgtgccatacccaggctgctgagtctgaggagcactatgcattggttgtggtggttgagggtgaccaaaaccaggctgcatcggtggacccgagctataatcagtttgttgcacttgaccaatgccaactgattgttgccatggacgaggagaacccatcccatggtgtgttccttgagttgcatgaactccagaatgctgccatgtattgggagtactgacatttggaggttgagtcatggagacaaccccaggttgtcgtggatcaggggcgctaggtccatgctgcaacgggcggccaccaaactctgatttatcaacttgagggcctccaaacacaggttgctgaggtctcaaaggcatcccctgaggctgtatcgcttgggatccaccaacgccaggatgaagtggttgagaaccatatgtcggttggccttggtgaggcatgtagctaccccgtgtctgattggatgcaaatcctggcagcccctgaggtgaattgcgagggcgatactctggccttggctgaggaggcaatggcactggtttctcttcaaaagctttctcaatctcttcctgccggccagcgttcttaaaaatgtcaataacagaatcccggaactcaggaggaggagtgacaccgccttttgccatgtcactcaccaactcccgtgctttatccaagtccccttccttacacaatgcattaaccagggtctcaaaggtggttgtgtttggcttgatctccttgtcaggcatccttccatataccttcaaggcatcatccatccggccagcttctgtaagcccttcaaacatccgattgaagaaaccaatattgaacttcgggccatgctcccttccgtctgccatcttatagaaatactgaattgtatcatccacgcggcccaccttgaagcatgaatcaaccaggtaagtgtaggtgtacacgtctggaagcaccgacttggtttccatttcctcaaaaagcttctctgcctcttcaagcattccattctcacaaagcttcccgatgatgttgttgaagcagccaacgtccatctggacgttcttcctgggctgccggtggaacacctcaattgcctcatggaatttgcacttcttgaagcactgattgaccatgacattgtaggactcgctgttgatgccaatgaagctcggcggggtgtggttgtcgatcatggtctcccagaggtcattcgcctccttgtccttatcatgcttgaagagcgtctcaagcagcacattgcaggtggcgggggtcatcctgaacttcttgtccaatagcgactggtaattctccatggcctccttgtccattcctttcttccagtacccctccatgaaggaggtgtgcacgacaccatcgtagaccaagcacctcccctggagctcctcaaagagctcgaatgccttgtcccagttatcttcctcgatgtaaccggcgatgagattattgtacacgagggagtcggcgccctggccgcggttgagcatctcgcgcaggagatcgagggcgtcctggatgcggccggcggcgacgaggcccttggtgaggtggcggtaggtgacggcggagggcgagaagggggccttgtcgagcatctcgcggtacacctgcagcgcggagtcgacgcgggcggcctcgcagtgggcgaggatgagggtgttgtaggagacgacgttggggacgatgttggatcggcggaagaagaagtcgaagagggagacggcgtcgtcgtggcgccccgcgcggaccatggacgccgccacggcgttgcaggtgaagacggtggggcggacgcgggaggtgaccgcggcgcgtgcagcgacggaggcgccgtcgaggtcgccggatcggatgagggactggacgcggttatggaggctgaggcgcgggccgacgagcgcggaggtggtgtccgggaggcgcggtgcgttggggtcgcgcggcgggggcggggcggaagggtcgcggcggagcgcgtggagcggcggctcgatgcggagcctccgcttgcgcctccgccgctcggccgcggcctcctcggcggaggagaaggcgaagccacgggcgtggggtgcgagcggcgcgtggggagggaggaggtggtgcgtggcggaagcggcggcggcgggggaggcggtggaggaggaggaggaggagagggaggggtgcgggtggagggtggagaggcggcggaggaggaggagacggcggtagagcgccat

SEQ ID NO: 92505 - DNA, 2256 bp, Oryza sativa
  Clone ID: PAT_MRT4530_90980C.1
ctgtttatttcttttttctttcttcatattaatcttcattttttttttttttttttttaatgacaatgcaacaattcttctggaccatgatgactgtacatcaacagcagcaggtacacaaactgaaactctaatggcacaaagtcagaaatctatctcaagttcacaaacagcacctcttaacaaagtttcagttcaccaagaagagcaaacaagatgaaaaagatcaagctacaataataattcacatcaatgctacaacaaaaaaaaaagaaaaaaaaagaagaggacaggatcggtgtaaccaacgaacaatcagaaggcacggtgatctacatgatgatgacaggcacgaagagtatggacatggagattcttctgcagcacagcatcggccatatgcatcaagcgtccgggccagtcggatgcggcttgtcagcgtagttgtgctgtttgctgtacgcacggtggcgccgctccctggcgtagatcacccagaagacgagggagagcataacggccgacgaaaccatcaccaggccgacgtaaacccatttgctgtacctctccaggccagggcagtggttctggttgatgttggtgaaggtgtcgcggacgaaagtgcagtcctccagctggatcaggaagggcccatactgatacagcccctggctcacattcacgcccgctgccatctgaccgagaatcgttggggtaacacggcccacggtagtgcatatctcagttcctgagacagtggtagtctggcactcaaaattcttccaaacccgggttgcattgtccaaggtaacctctcctctggtgcaagtacggttattcagatcggctgtgaacgggttgcagagtgtaggcatcagtggccccgactgattgaagtagaagaaaggagtttgcggagggaagtttccattggacacgttggtgattacttggtttaccagattcaccagttggtaagtgacttgcctacttctatacagggattcattcgcggtggcaggttcaacacagggaataatgtcatccagagctgtgtgctctgttggatgagcaacccactcctccatcgagacacaagtatctgcgacgacattatgcagaagaaggaagacaccacacaggataaacgtcccggtgactagtatccacccgataatcaccaaaatagagacaatgaattccaggccaaagatagatagtaagaagccaataaatgccagaagaagcattactgccgcaatgataatcaaagcaatccgcacttgatttagcaatttttgtatcttctcggaattgtcagtagttctagtagcaagctcagtagctgatgagttcaactttccttgaatttcattgatctgattttgcacatcgttaggcaaaaaggatcgccctatgtcaaccttttttgcagcagataaactatcggataagttattaaggttttcgacagtaaaattggcctggctaacgacaaaattcaaggtagtcgttgtgcttttatggaactttccttgaccatcatacagcatgacacatccaacaattgcagcacaagtgaacaatattagaagtatcagagatagggcatatgctacccgagagtatgtgtaactgcgatgtggacaacagcaatgcttgcagcaaattccaagcataaccagaaaaaacagcacaaaccacaccaaggcaatgatgaacagtggaaaagctgtgtatccaactgaagccatatagtgcacttcgctaatattccaaccgccagtatatttcctgaatccattcaaggggtcttttctatatgttcgctcttgcgccaagacaaaggaactgtttgtagtgacatttacgtcaacaggagcttcagcaattgatcttcttgccacaaatccatatctatctgggacgagtgccttgtgaaactcgcgaggagcatggaacccggggcttggatgcgtggcgcagaatggcaagatggcgagcagaaccgccgcgatgcggaggagggaaacaggcaatgccatggctgacctctccccttctcccttctgacctgaaaccccaacaagatcgcaccacaaaacctcctccttcctgcctcttcccgcaacaacaaggaggaggataagaccaagagagaaaaagcttcaagtggaagaagaagaagggtaggagaggagaaagacagggatgtgggatgcaaagacggattcttttttccctttttccgagttc

SEQ ID NO: 92506 - DNA, 597 bp, Oryza sativa
  Clone ID: PAT_MRT4530_90981C.1
gggagcacgaatagagttccaagtcctgtttttttttctaagagcagacataccgaaatatcttatggttcaagtagctctcagtacaagcataactacatggtataacagcataaactaaactaataaactatcaccatcgcacgttacaacaacgattgtaaactcacccagccaacaatttttacaagcatcacaagatgcacttcgattgatacaaacctgaaaaaaattaatgaacattcaacaattgaaaaaagctttttacagtttaggaggacagtatcatgttgggtacacgctctgaagaattgatttgtgggtggatgattgcagctaaacacttccacatgttaaatcccaacagtacaatcatccgattgacacagttgcgatgacatcctcatatgaagcttcagatcactcacacttcctcaggaccatctggatccggtaagaagtcccaatcttcctctctcaaatcaaattcttcaatagttgcatcggtaaacaataatgtatgtattccattgcgctcattgaagtcatatatacttgctgcgagatacatgctgtgacgtcgatgccacaaacgga

SEQ ID NO: 92507 - DNA, 1077 bp, Oryza sativa
  Clone ID: PAT_MRT4530_90982C.1
ttttttttttttttttttttttttttttttttttttttttttttttttttttttagctgaaagaaagcagcaaaggcatggctttccattttttttcttacttccatagtgcttaattacagaggaggatacagagcgaacactctcattacatcctcataccatttcagacatctctctagctagatcgcctatgactccactaacactatcactactagtatttgatatttcagtgatctatcggcgtaggcgcatagttacataggaaaaaaaaaacactgcacgcatcgccagcgaccacctcacacacagacacacggattcaagacacagacacagattcatgagacacaacggatgcgtcaagcctcaggcacgtcagctagctagcttcctttgtcatagatattcctctgctcgattggttattttgttttttcagatttttcagaactttttcaccacgctggatcgcgctatagttcatcggtccaacgaactgatgaccacccagtcgtagacggtggggcttctcggcccgacggcggcggcggcctccggcgcggcgtcggtggccgtcttgggtttccggcgaagcctcctccagctgtcccccttgggcgtagtagctgacgcgaacggggagtccggcgcgctggctggggaggacggcacggacgagctgtactcgccgccgccgccgcgcggcgacgggacggacagcgacggcggccggacgatggtgatgctgcgcgtcaccgtcgcggccggcgcatccggcggcgccgtcccgggggcggcggcggcggcggagggggaggagggcgagaaggaggagtacttgcggagcttgccgaggccggagtccgggcgcgggccggccaccgtctcgtcccagagctggtcaaggagccccatgggcgttcgtgcgcgcgtgcgtaagatttggttcccgcgtagtacgtattaccaggcgtatgtgcgcggccggagtcgtcgccggcgacgagtcgacgtcgttggatggtggcgagggcgagggcgaggcaaggtgagcggccccgtggggcgtgc

SEQ ID NO: 92508 - DNA, 154 bp, Oryza sativa
  Clone ID: PAT_MRT4530_90983C.1
ctcctcgccgggaggattagctaaacggccgcgccagagaatccaaattgacccggtacttggatccggaagtgtcctgggacaaggatcaaacggtggaactcgcgtgctggtactcctccgtgctcggcatccgcaagaacctgttcttcag

SEQ ID NO: 92509 - DNA, 1284 bp, Oryza sativa
  Clone ID: PAT_MRT4530_90984C.1
accccgaaaaaccacggggaaaacctcacacgtcttcgtccctccagcctgtccccggtccccctcctcttaactccgcatcatcgcatcctctctctctccccacccgtgtccatagaaattcctctatccttgattgattctttcttttattgtttttttttctcttcttcctcttggagggggaggagatttggggaataatcaacgtacattacccagtctcacactcccacgatcccgtcaagggccgccgcaatgcgcgtcctcgccgtggccctgctcgccgcggcggtgttggcggcggaggcggcggcggagctgccggagtttcgggaggcgccggcgttccgcaacggcgcggggtgcgcgggcgcgccgacgatccacatcgccatgacgctggacaccacctacctccggggctccctcgccggcgtcctctccgtgctccgccacgccgcctgcccggagtccatcgccttccacttcgtcgcctcctcggcgtcccccgcgcgccgcctcgcggcgctccggcgggccctcgcggcggcgttccccacgctcccggcgaccgtccaccgcttcgacgcgcgccttgtccgcggcaagatctccacctccgtccgccgcgccctcgaccagcccctcaattacgcgcgcatctacctcgccgacctcctcccgcgctcggtgtcccgcgtcctctacctcgactccgacctcctcgtcgtcgacgacgtcgcccgcctctgggccaccgacctcggccccgacgccgccctcgccgcccccgagtattgccacgccaacttcacctcctacttcaccgacgcgttctggagtcaccccgagtactcctccatcttcaccaaccgggggcgcgcgccgtgctacttcaacaccggcgtcatggtcatcgacctggacaggtggcgagccggcgggtacaccgtgaagctggagtactggatggaggtccagaagcaggaggccaggatatacgagctggggtcgctcccgccgttcctcctggtgttcgccggcgaggtgaaggccgtggagcaccggtggaaccagcacgggctcggcggcgacaacgtcgcggggcagtgccgggagcttcaccctgggccggtgagcctgctgcactggagcggcaaggggaagccgtggcttcggctcgacgccggccggccgtgcccgctcgacgcgctctgggcgccgtacgacctgctccgccgccgcggcgctcgcgacgacctcctcgccgccgtcgcctga

SEQ ID NO: 92510 - DNA, 722 bp, Oryza sativa
  unsure (1)..(722): unsure at all n locations
  Clone ID: PAT_MRT4530_90985C.1
ctacatggtatggtacatttttcatagttcatgagacaatatgatacatcctgaattaaatccaaacaattcagattgcattcattttgacctataatcatatcaaagataccatatagtcatcatgcctccttagtttcaccttggcttttaaaattttgtaggcttttcttgtttttgatggcttgaaaagttttgagaagattgtggtaggtattctgcatgccccagttggtatttatttcatgtttttctcatgattagagtgattatttgtttagtgaagaataagtgccagtctcatcatatcagatcaaagggttcatattatcaacttgatttgtcactgttgctgttgaccttgattacccaactgaggtgctgaggtaggtctctctatagcaaacttactctgtagctcaaacatttgtgctatactctttggaagtgaagaattctgattctcttctctgagcacaagactgctatacacatttttggggaacactcttacactggagatttgcttcttcttttccttaattatttggtcacgtaattgtactaatattgagccaaggatatttatcatatacttngggttatcataaaatgctactttatattttgcctcaattcattccagctttcatcattgggagctgttccagttgatagaccccatcattgattctattttttctttttaatcacttttttat

SEQ ID NO: 92511 - DNA, 1612 bp, Oryza sativa
  Clone ID: PAT_MRT4530_90986C.1
cgcgcggatagctcgctcgctagccgggagacatggcgcccgcgacacaaatggcagctccaccacctcgcggcggcagcttccgcgtcctgcgcaccgctcgcgtcgcaccgtcgtcgcccgacggtgtcccctcgctgcgccagcgtgccgtcccgctcaccttcctggacgcgatgtggctcccgaccccgcccgtcgaccgggtcttcctctaccgcctcggcgccgccgacgacgacgtcgacgccgtcctgtcccggctggctgactcgctgtcccgggtgctccacgtcttctacccgctcgccggccgcctccgcctcactcccggcaagaccaaccggtacgagctcttctaccagccaggcgacgccgtcgccttcaccgtcgccgagcacgacgacggcgtcggtgtcgacgagctggccgcggacgacccgagggaggtcgccaagatcgccccgctcgcgccggagctcccggatggcggcgcggtgctggccgtgcaggctaccgtgctgccccccgcgcgccgcggcctcgccctcggcgtcaccgtgcaccacgccgcctgcgacggctcgagctccacgcacttcctccatacctgggccgccgcctgcgccggcgctgtggtgctgccgaagccgcccgtcatcgaccgcacgttcatccgcgaacgtgaggacctctacgacatcatggtcaatcgaacgaaggaggagtctgacaagttcagctcgcccgacgtcgccgacaacaagctcctcgccactttcacgctgtcaggagagatccttcagaacatcaaggatatagtcgccgccccctcggtgcactgccacatccacgccgcactagcaagcgacgtcgaagcagagaacaaccctcgaaaccatggccgtgcccacttcgtcttccccaccgatcaccgggcgcggatggaaccccgcgtccccgacaagtacctcggcaactgcgtcgggccatgcttcgcctcggcgcccaagaaagagatcgccgccgccgacgcggaggacggcctcttcacgacctgcgccgcgatcgccgccgccatcgacgaaggaacgagatacgatcccggctactgggagaggtgcagggagcacgtcagagggatgagcacgagcgacggcccgccgctagcggtggccgggtcgccgaggttccgcgtgtacgacgtggactttgggttcgggaggccgacgaaggtggacgtcgtgtccgtggcgaagaccggggcgatctcggtggcggagggccgcggcggcggcattgagcagcaccaaggaaagctcggcgtcgaccaggggaagaggccggcaccggagaagccgcggcagcactggccgcacgtcgaccagcttgctcctctcgctgatggctcccgatcgactcccgagtcccgagtggccgatcctgtcccgatcacggagacttcgccgcggcattctcggcgtgcgtcgttgtcgttgaagtggacaactccgtggtgacggtgggacacgtcgccgacagccgcctccggcgacggcgaccatctaactaggctgtgcttgggccataggtggaggccgtgggcgggcat

SEQ ID NO: 92512 - DNA, 1697 bp, Oryza sativa
  Clone ID: PAT_MRT4530_90987C.1
atggcgcccgcgacacaaatggcagctccaccaccacgcgctcgcggcggcagcttccgcgtcctgcgcaccgcccgcgtcgcgccgtcgtcgcccgacggtgtccccatgttggtcgagcgcgccgtcccgcttaccttcctggacgcgatctggctcccgaccccgcccgtcgaccgggtcttcttctatcgcctcggcgccgacgacgacggcgtcgacgccgtcctgtcccggctggctgactcgctgtcccgggcgctccacgtcgtctacccgctcgccggccgcctccgcctcacgccgggcaagaccaaccggtacgagctcttctaccagccaggcgacgccgtcgccttcaccttcgccgagcacgacgacggcgtcggtgtcgacgagctggccgcggacgacccgagggaggtcgccaagatcgccccgctcgtgccggagctcccggatggcggcgcggtgctggccgtgcaggctaccgtgctgccccccgcgcgccgcggcctcgccctcggcgtcaccgtgcaccacgccgcctgcgacggctcgagctccacgcacttcctccacacctgggccgccgcctgcgccggcgccgcggtgctgccgaagccgcccgtcatcgaccgcacgttcatccgcgaacgtgaagacctctatgactacatggtcagtcgaacggaggagtctgacaagttcaggtcgcccgacgtcgccgacagcaagctcctcgccactttcacgctgtcaggagagatccttcagagcatcaaggacagagtcgccggcgtggcggcgcggcgcggcaagtcgccgcctcctcggtgcacgtccgtcgttgcgacgttcgccatcgtatggcaatgccacatccgagccgcactaggcgacgtcgaagcagataataagcaccatggccgtgcccacttcatcttccccaccgatcaccgggcgcggatggaaccccgcgtccccgacaagtacctcggcaactgcgtcgggccatgcttcgcctcggcgcccaaggaggagatcgccgccgccgacgcggaggacggcctctacacgacctgcgccgcgatcgccgccgccgtggacgaaggaacgagatacgatccggactactggaagaggtgcatggaacacgttggagggatgagcgcgagcgacggtccgccgttagcggtggccgggtcgccgaggttccgcgtgtacgacgtggacttcgggttcgggaggccggcgaaggtggacgtcgtgtccgtggcgaagaccggggcgatctcggtggcggagggccgccgcggcggcattgaggtgggcgtcggtttgccgccggagcggatggagaggttccggaggtgcttcgctgatgccgtcgcgtggctatcgtcgccgtctcgtccagtgacacgtgacatggatcgatcagctccgggccactccccggcgtaggcggcggcggcaggcaggcaggcaggcaggcacgtgtcgcttggcttccactcgctgggcttccgtgggattcgatgggctggttccccgtacccttattttttttcttggaaaataccgtagcattgtaccgacagggtgtgttcgctaagttgccagcgtggaacagtctgcatggtatgcatggtaaacagaggtattagcgtgtgaaaaaaaaaaaaaaaaaaaaa

SEQ ID NO: 92513 - DNA, 614 bp, Oryza sativa
  Clone ID: PAT_MRT4530_90988C.1
atcgacgaaggaacgagatacgatcccggctactgggagaggtgcagggagcacgtcagagggatgagcacgagcgacggcccgccgctagcggtggccgggtcgccgaggttccgcgtgtacgacgtggactttgggttcgggaggccgacgaaggtggacgtcgtgtccgtggcgaagaccggggcgatctcggtggcggagggccgcggcggcggcattgaggtgggcgtcggtttgccgccggagcggatggagaggttccggaggtgcttcactgatgccgtcacgtggctatcgtcgccatcgtccagtgacacgtgacacgtggcgcgcggcaggcaggcaggcaggcacgtgtcgcttggctttcgtgggcttcgatgggctgcttccgtcagctatcacgtgcgtgccctatgtgagccgtcggatggcttggacgattgataagtgctgaaggcacgctatatgcacatgcaccccggacgctttgctctttttttttttaagagaataccgtagtattgtatcgacgtatccgtatcccaatatccatccctatttaaaacaaaaaaaaaaaaaaaaaaaaaaaaaaaaaaaaaaaaaaaaaa

SEQ ID NO: 92514 - DNA, 1270 bp, Oryza sativa
  Clone ID: PAT_MRT4530_90989C.1
agaaagggtatcctatttttttttgaatttttaagcttataatctggtacttgatcaataaactataccattcatacaaagtggtattgtgttccatactgtcaaaggtaagtcacacaagctatgttgcacattagattctacatacatacatacataatacatacatcatgagcacaccaataatgttatagtagatctgtaaatattgagacccatagtaacacaaatataaccacataagtactgcaaatctggaaagcacatatgtagcttagaaacctggcctatatcttgatgtatggctttatccttcaatagcatggccctcattttccataaccagattgtgtagccaacatccttgtttcttcattgtcaatcttccagaatacctcagggcagctgtagtctgacatggtagatgtcagaagtggacatgggagattgctgcatgctttgtctttcccttcatctatacccagcaaggaaggtgcccctggcgcctcaatttctttccatatctgatccatggtatatccatccatgacactctgagtgcttttgaggactcttgccatgcagctgcgatcatcatgaatgtctcctccatccatactgatgattggcacagtatctaggaggcaggattggtataccagtgacgacgaggaggacgagggtgacatgtcaccccttctctcctgggctttcttcctcatgtgtgtcctccagtagttcttgatctcattgtctgtgcgccctggcagcctccgtgctatcctagaccacctgttaccccaacgagcatggagctcaataataagatgttcctcttttggtgacatgcgcccatgcttgaggccagggtggaggtagttcacccaacggaggcggcagctcttgcctgtcctattgagccctaatttgcgggtccccacccctcaaacctgatactttggcaacgaaatcccaacggcggtcaccgaacaggcggacagtgcataccagttgcaggtcctcctgctctgtccatggtcccttgcgcatctcctctctcactgtcaccatattggtgaccctagtatatgatgacagtgttgcaccaacgctgctcgcgcctaccttggatcggctcggagccggtcttcttgctcttcttccactcgtgtcgagctttgcgcgccgcctcttgagcatgtccccccctgatggacggccgcctctgcagcagcggaggactaccagctatctagagagagcactgcag

SEQ ID NO: 92515 - DNA, 699 bp, Oryza sativa
  Clone ID: PAT_MRT4530_9098C.1
gactaactcaatatttttccctggtccaaaagatttcatttccgaaaaatagtcccaaaccaaatgctattgaactagctgatgcttgaggaacctgagttgctcttattgagtatgcatcatggagatatccttcatcttacacgtgcataagcatgaggcaccacttgctgatttacatcttcttgatcttcagacaatccatagcctctttggttccaggcagcaccatgtgagggttggcttggggaagccccatattcaggcggtgccccttgatttccaaaccctacttgtcctcgacgagcgttaaaactgttctgaccttgcagagcatgatttccaggagcctgagcatcaaatccctgctgtcgaggctgtgtgtgaaatcttggctcaccctggggagacccaaaacgattatgctgatctactgcttgaccatactctggtctgttctgatagtgaaaaccaggtaatggtggtggtgcttgaggagcaccaaactgtgcctgcggtggctgagtggagccaacagcatgctgcgatgactgaggtccaccataactaggctgttgcacttgtggagcattgaaccctgtatgccatggatgagatgtgccatacccaggctgctgagtctgaggagcactatgcattggttgtggtgggtgagggtgaccaaaaccaggctgcatc

SEQ ID NO: 92516 - DNA, 824 bp, Oryza sativa
  Clone ID: PAT_MRT4530_90990C.1
ggaccagataggttattggatgcactatcctttgcttcatcaaaacaatggccctgggagcacatttggtgcctcaatttccatccatatctgatccatgggataaccatccatgtcaacaggggtgcttttcatgatgcttgtgatgcagccactgccgccatgaagttcctgctcctcaattccaatgatcattgacggggtctctgggtggcaagattggtatgtcagtgaagacgaggatgatgagggtgacatgttactcttcctctcctgtgctttcttcctcatatgtgtcctccagtagttcttgatctcattgtcagtacgtcctggcagacgccttgctatcctggaccacctgtttccccgccgagcatggagctcaaggataagatgttcctcatgcggagacatgcgcccatgcttgaggccagggtggaggtagttgacccaccggaggcggcagctcttgcctgtcctattgagccctaatttgcaggtccccacccctcaaacctgatactttggcaacgaaatcccaacggcggtcaccgaacaggcggacagtgcataccagttgcaggtcctcctgctctgtccatggtcccttgcgcatctcctctctcactgtcaccatattggggcttgggatgttgcaatgctaacgttgttcacttctaccttggataggatgggagccactctccgtgttcttcttcctctttgagtttgttggctccagcttcacgtttagagccttgatcaactccagaccaactggaaggttgctattagggagagaggaagcccggacgagtggg

SEQ ID NO: 92517 - DNA, 432 bp, Oryza sativa
  Clone ID: PAT_MRT4530_90991C.1
atggtggctggagtggcggcgatacggcgaaaaatcctagcatttctctcacaccaaagttctcaggctattaggattattagggattttagagatcttatggggttacgcggcgtgtgtagcatccaagatgatcctgagccaggtaaggatatctcgggaaaagacttagagtcggacgaagccatatgggccttgtacgagcgctggtgcgaggcttacgagaaagagcgtgaccatgctgagatgactcgctggttcgagatgttcaagaacaatgcagagtatatttatagtctcaacagtgagattacttcggaagcagagcaactaattttgggtccgtactgcgatgggttcaacgagaaagacaaggctgaatttctgaatgattttggccattttaacggggttcacgaatttgtagagtag

SEQ ID NO: 92518 - DNA, 1767 bp, Oryza sativa
  Clone ID: PAT_MRT4530_90992C.1
gcccccctgaatgtgtgtgttcttgtatgatatatcaacatcaaagcatatagtacatacacatttgcaaagtgcaccacccacttctgatctcaccaccctaattttttacacatcgtactccaatcaaaacacctatgtacatcatcgtcaccatgatgaatcaaattcaacggtagaaaatttttcaaggaacccaaaacaagaggaagaaagaaaaagagatcggcacatgcatccacatatgtactactctgtaaaaaaaagtcaatcctagttataaacctagatacatatgtatttagattcgtaattaggattagtttttctacgagacggagcgccttccttccattgatcctcttggcatgtatttcttcaccacttccagtcctaattaatcttatttgtgccgttttgcatgacgtcacaactttttttttttttgccccttttgtgttttgcacgtatggacacatgcatgcatgcatgcacgcacgcacgtgcgtacgtacgtgtacacacctcctctccctctccctctctcctcttctctcgtatgtctgccctcgaatgcatgcaatgcaatcacgccgccgcctcggctcgccggcggcgagctagctagctagctcactcctcgagcgcgggtacggcggccttgtagaggtcgtacggcgcccagaggtagtcgacggcgcagggcttccgcgagtcgaggcgcagccatggcttccccttgccactccaatggaggaggctgaccgggcccgggtgcaggctccggcatttcccctccgcgttgtcgccgccgagcccgtgctggttccaccggtgatccaccgccttgatgtcgccggcgagcaccagcaggaacggcggcagcgagccgaggtggtagatccgcctccgcttctgcaccgccatccactcctccacccgccgcgtgtacccgccgtcgcgccaccgccccatgtccatcaccatcacgccggtgttgaagtagcacggcggccggcggcggccgcgtcggaacgcggcgccgctgagctcgccgtccgaccagaacgcgtcggtgaagtacttggtgaagttggcgtggcagtactccggcgccgccaccacgtgcccggcgaggtccaccgaccagagcttccgcacgtcgtcgacgacgacgacgtcggagtcgaggtagaggacgcggcgcacgccggcggggagcgtgtcggcgaggtagacgcgcgcgtagttgagcggctggtcgagcgcgcggcgcaccgagcgggagatgcggccgcggacgcgcgacgggtcgaagcggtagacgctgacggcggcgccgaggtaggggaaggtggcgcggatggcggcggcgaggtcgccggcgtccgggtcggagcgcgcggcgaggaagtggaacgcgacgctctccgggcacgccgtgtgctgcaggatggagaacacggcggccatggtgcccctcaggtagttggcgtcgagcgtcatggccacgtccacccgccccccctccgccgccgccgaccccctcgccggcgggcacccgtcgccattcctgaacgccggcgcctcccggaacgccgggaacggcgacgccgacgggagccggatgacgttgacgcggatcccggacacaccgccgagcacgagcagaagcgccaccgaggtggtgacgacgagcgagagcgagggcgacaaggaccagatcaggccggcggtggaggcggagacggcggtggggggagccat

SEQ ID NO: 92519 - DNA, 222 bp, Oryza sativa
  Clone ID: PAT_MRT4530_90993C.1
atgtcgtgcactggcgcaggattcgctgcaggacggccgcgcggcacacggctgacacgagcgcacgctgcgcgagcggcgaacgtgcagaaaacaccgttcaatcgatgcgcccggccacgcgatggccaggcgtatgacacgcacacgctcgtgacagcgcgagatatcatcatatcaagcggccgaactgccaaaataccgtactccaacacgagatga

SEQ ID NO: 92520 - DNA, 309 bp, Oryza sativa
  Clone ID: PAT_MRT4530_90994C.1
atgtcggccacgtcccggctggtcaagccggctgttgattggatgaggggcacagagctcctcatcatcatgacgagacagggcatacctgccctcatgccgcctgacatgagctcggggcgtggggggcttgccgctatcccatccattcatcacccggtcgcagaccggtcacaggcttttgaaattggcttagctcacttattaatagatactaatgcaaatggatataatattgggctgaaaactatgagtaaagtgctacatcttaaatggaccatgcctaaatctaattgggttaacccataa

SEQ ID NO: 92521 - DNA, 586 bp, Oryza sativa
  Clone ID: PAT_MRT4530_90995C.1
gcagtaaatcaatggaataagttatgccttgaaaggaaaaaatgctgggacaggaacagcaggggctccagactgactttttttttcagacaaaatctctttcgtttaattcaatatatccagataaaatacaagtgacaaaattcagttgtattgagtctacacaaaatacagcttagcaacagcaagattgggaagcaccatgtgcaccaaaaaacctatgatatggcaaattggcaatacaaagccgtaagtgtaatctcctccgcggtatttaccttccgtatactgattgcagttgctctgatgttccagccttctcagatggcatgctctggctgctggaaaattgattagcagctgccagacttctcacatggttttcgtatttgcaatatctgatgatcttcatgcagcaaacttttgtgggatgaacctgaaaattggtgtctcgtctctgaactctcatcagcacgaattcactggtcaagtgatcatgactaaataattgtgcatattgctgctgacccactgtcaaggagcagaggggcactatatatcctgaactcctgaccggacgcgtggg

SEQ ID NO: 92522 - DNA, 409 bp, Oryza sativa
  unsure (1)..(409): unsure at all n locations
  Clone ID: PAT_MRT4530_90996C.1
gttgatttgcaattctncctgggatngcgtgattttgttcttncgatttcttcncttttgtcatttgaatttggtgaaattctngtngaaatttttntgcncgtgttcttgttgtgttcagtgtcgttgctgcanccggcaaagctgtgttcttttgctttgaagtgtgctgtagtaatttntagctgntgggaaaanaaaancagnatacatacagtttncngtntgaacagaaaataagncaaaattctccgaattagcgtcaaatgaagtctgtatgcatgcacaggtaatnacaaagcttgcaaatacatcaaaagacagccatgatgtatgctactttatttggaaaaaaaaaaaaaaaaaaaaaaaaaaaaaaaaaaaaaaaaaaaaaaaaaaaaaaaaaaaa

SEQ ID NO: 92523 - DNA, 192 bp, Oryza sativa
  Clone ID: PAT_MRT4530_90997C.1
atgtaggccttggctgaactccgttatcaaatatcgtgcctcggtgtcgtcatcgtgtttggatcttctatgacgtttcttccgcatgtcatagtgcccttctactccaccgaggcgggtagctgctgctgcccaagccctcgtcaccccatcgtcgccgacaaacaggaggcacgctacttccagattctt

SEQ ID NO: 92524 - DNA, 1281 bp, Oryza sativa
  Clone ID: PAT_MRT4530_90998C.1
cccacgcgtccgcccaccggacggcccacgcgtccgccggggtgtccgcttgtgtagtgcaatcttatctctttccctccaagaaacacttcagcagaggagcaacaatggcggcggcagggtcgctgggacttctccaggcgccatcgtccttcacggcggcagcggcgagccggccggcttctcggcgagcaccgcgagctctgttcgccgtgagagcctcggctgccgccgatgccaccaaggacgccgtcctcaaggccttccgcgagaagagagctctcaagatcatttcagggcttcagaatttcgacaggagtagtgttgcctctgttgtctcggctgcagataagggaggtgccacccatgttgatatagcgtgtgaccaagacttagtaaagcttgctctggagcttacttcccttccgatttgtgtctcctccgtagatccttcagcattccgttctgcggtagaagctggagcaaagatgattgagattggaaactatgattctttttatgacacaggcatcgaattctcttctgagaagatcttaaagctgaccaaggagacaagggaaatgcttccagatataacactgtccgtaacagttccacatacactgagcctcctagatcaggtaagacttgcagagctactcgaagaggaaggcgctgatatcatccaaactgaaggagggaagtgttctagtccaacaaagcctggagtgcttggattaattgaaaaggcaacaccaactttggccgctgcatactccatctctcgggctgtcacaattccagtgatgtgtgcatctgggctaagctcagtgactgcaccaatggcagtaactgcaggagctgccggtgtgggagttggttctgctgtcaacaaacttaacgacatcgtcgcaatggtcgctgaggtgaaaagtattgctgaagcattgggtttgccttcacggaacgtgtctagcaacttgagaacagttcaccattaggggctagttacctcctcttctagacaaactctagcgatcaataatattatcaaaagatgcagtagcttgacatttcacagtctactgcctttcgtaacatatatgcaaagcaatgcagaggtgccaattggcgttttcgacggttgtaatgtagctttggccagtggcgttgttgaactgagatcaagtttcagctgcaatcaattgtcagattgtcacatctttcccatgcaaaaaaaaaaaaaaaaaaaaaaaaaaaaacaaaaatattccccttgcc

SEQ ID NO: 92525 - DNA, 1581 bp, Oryza sativa
  Clone ID: PAT_MRT4530_90999C.1
atgagctctgtgcgctactgcttgggcagggacttccagcctgctgccgcggcagctgcctacttcggcgagctggaggaggccctcatccatggcgccaacgccggcggcgtcgtcgatcccggcatgatcagagccgacgtgcacagcaagtcggcggcagcggcagcgacggcaggatatctcgcggccaggccccccacgctggagatcttcccttcatggccaatgaggcagcaacagcagctacacagtgggaattcgcagtcagtcgggagcaccactgactcgagctcagcccagaacacaatgccgcagatggagttggtgtccccagcgagtatcagggcctcctccgagcaccagcaccagcagcagcagccggggcaggaggtcatgatggtgaccactgatgattacagctacaagccaggcctcgctgctgcctccccaagctttcagcagcagcatcagctccagcaccaccagcagcagcagctgcacggaggaggagaccatgacaagaggaagcatggatccacaagaaaagatggcaagtcagtggatgccaaggcttatgtgcaaaacctagagaccagcagggtcaggcttcagcagatcgagcaagaactccaaagagcacggtcacagcagcagctgcagcctgcaagcctgcagcttgcagacgagggtgtgcctcggagttctcaccacggcgcagtaaaatcgtttgcaggcgcggccatgttcgacatggagtacgcgcgctggctggacgacgacagcaagcggctgaccgacctccgtggcggcctgcaggcgcacctgctggacaccaaccttggcctcatcgtggaggagtgcatgcagcactacgacgagctgttccagctcaaggcggcgctcgcgcgctccgacgtcttccacctcctcaccggcacgtgggctacccccgccgagcgctgcttcctctggatgggcggcttccgcccctccgaccttctcaagatactgatacagcagctggacccgctgacggagcagcagatgctggggatctacagcctgcagcagtcgtcggagcaggcggaggaggcgctcgcgcaggggctgcagcagctgcaccagtcgctcgccgacaccgtcgccgccggcacgctcaacgacggccccggcgtgcccaactacatgagcctcatggccatcgccctggacaagctcgccagcctcgaaagcttctaccagcaggttcaggattgtagtgatcattctgcaaaaacaagtcctctacgatgcatggtgaatagatcaggttgtgttagatatacttgcatgagaaaaaaggctgacaatctgaggcaacaaacgttgcatcagctgcggcggattctaacaacccggcaggcggctcggtgtttcctctccattggggagtattaccgccgcctccgtgctctcagcaacctctggtcttcacgtcctcgcgagaacttcattggcaccgagagcgtcagtcccacaggaaccgagctgcaaccgatgcataatcagcctcagcagaatcagtactcaggattttga

SEQ ID NO: 92526 - DNA, 180 bp, Oryza sativa
  Clone ID: PAT_MRT4530_9099C.1
atggaggtggtcgttagggaggagaagcgcggagtggtggggcatgataataaggttgaacggggagcggtcggcgatgacagcagaagcgcgacgaacattgcgaggttgaaggctgatggatgcgacataggaatggaggaggtgatcgacatcgactttatgccttggcaccgatga

SEQ ID NO: 92527 - DNA, 1254 bp, Oryza sativa
  Clone ID: PAT_MRT4530_909C.1
atgggcgaaaccaacgcccttcgcggaagaatttcaagtttccagcagacgagagatcagtctatttctgaggcatgggaacgactacaggagtacatggctgcctgtcctcatcatgggatggacgactggctgatcctgcagaacttctacaatggactcactcccatgtcccgtgatcatctggacacggcaagtggaggagccttcttttccaagacggtcagaggagcaatcaatctcatagaaaagatagtctccaacatgagctggagcgaggaaggagtccagacccgtcagcgtggcatgcacaccgtaaaggaaacggaaatgctcgttgcgaagctggacctcctcatgaagcgattggacgaccacgagaagaggcctcaaggcatcgtcaaggccatggactcacactttatgtgtgaaatctgcggcaaaatgggtcattctgggaatgactgcccagaaacccgtgaagaggcgatgtacatgggcaacaacaacaacaatgggttccgtccacaaggagatggctttgcttccgttttccgaaaccagcttagttttaataaaatgattgaaacccagctggcacaattagttgttctagtacctgctaatgaatctgggaggattctggggcaacccgaaccctctgttgagaatgttaaggcgatcacgacgaggggtggtaatccagaagatccacatcaacgtgccattattggacgcaatgcaagtgcccacctacgcacgttatctaaaggacatccttgcaacaagaggccactaccgacaaccaagttggtcaaactgacagaggaatgcagcaatgttatactccacaaactcctagaaaagaagaaggatccggggtgtcccacgatcacctgctcaatcgggacacaaaaattcaaccaagcactctccgaccttggtgcaagtgtgagcgtcatgcccaaggacgtcttcgataaactcaacatcacggtgttgacaccaacaccgatgcgcatgcaactggctaattcttcggtctgttacctagctaggatagcggaaggcgtaccggataagatacgggatttcttcatctcggtcgacttcgtggtgttggatatggattcggagaagaaaacgtcactcattttggggcgaccattccttagcaccagggacgccaacattgatgtggggacggataaaagttcgagtttcagccaaggatggaacaatgctccatggtga

SEQ ID NO: 92528 - DNA, 330 bp, Oryza sativa
  Clone ID: PAT_MRT4530_90C.1
gtcacgcgtcctgtccctgtctaccctctgcatgctactttcctttcctctgccttcttagcaggtctacacgataattgtcgccagactgcctccaatggtccagcccgaagggtgcccaaggctggggcgccttctggcccccctctaatttaagagtgacctgttgggtgcggacaatcccgtccctagggccggggggggaaggccagccatgaccccaacgagcccatgaaggctttctccggtttattatcaaaaaaggggaggggcctccggaagcctacgttttgaagcccacaaacaatttggtgctgctggggaaaagct

SEQ ID NO: 92529 - DNA, 397 bp, Oryza sativa
  Clone ID: PAT_MRT4530_91000C.1
gtgaacagcaaaccactacatgttcaaagtctcaagaactcaacaaattgtacatggaggagaagaaaagagcggaagagctcaagacctcaaaaagagaaaaattcatgtcggacggacgccaccttgcccgggccagccttttccaccagcaacgccaccgccatcgccggatccggcggttgtccgccggccgtcacctagaccgcgccagactccaccaccactgctgacaccgccaccaccgccaccagcgggcaccgttgtcgggtcaccgacttccctaccactggatctggcggaggggagggtgcagctcacgctgccgccttcaccggaggctgctcggcctccacatccagccggcacccttccgccgttgccgactttacctgag

SEQ ID NO: 92530 - DNA, 2073 bp, Oryza sativa
  Clone ID: PAT_MRT4530_91001C.1
tccttctccatctccctctacacatctctctctttctctgtctctccctctcttcatctaggctgtgaagaaaggaggacaaggctcgtaggacgtgttcaaaaggacaagatcttctttgcagtacacagtggatgaaactccaaggctgattcaatttgccagtgtgtgagaaacgagaaacaaccaagaggctcatcaggatcaagtggctgatcatcatcatctctctctaggatgtagagctagtggtgatcatggtgcaaggtgaggagagttcttggaggatggcagcaagcacccaccatgagagagcaatacctctcaaccaagcacttgcttatggagtccaagcccatgcttctccttctgttgctgctgcaccacctgccagcttcttggacttccagcctgctgccgcggcagctgcctacttcggcgagctggaggaggccctcatccatggcgccaacgccggcggcgtcgtcgatcccggcatgatcagagccgacgtgcacagcaagtcggcggcagcggcagcgacggcaggatatctcgcggccaggccccccacgctggagatcttcccttcatggccaatgaggcagcaacagcagctacacagtgggaattcgcagtcagtcgggagcaccactgactcgagctcagcccagaacacaatgccgcagatggagttggtgtccccagcgagtatcagggcctcctccgagcaccagcaccagcagcagcagccggggcaggaggtcatgatggtgaccactgatgattacagctacaagccaggcctcgctgctgcctccccaagctttcagcagcagcatcagctccagcaccaccagcagcagcagctgcacggaggaggagaccatgacaagaggaagcatggatccacaagaaaagatggcaagtcagtggatgccaagacagaacggagattagcgcaaaacagagaggctgcgaggaagagcaggctgagaaaaaaggcttatgtgcaaaacctagagaccagcagggtcaggcttcagcagatcgagcaagaactccaaagagcacggtcacagggcctgtttcttggggggtgcagagcagcaggcgacatgagttctgtaaaatcgtttgcaggcgcggccatgttcgacatggagtacgcgcgctggctggacgacgacagcaagcggctgaccgacctccgtggcggcctgcaggcgcacctgctggacaccaaccttggcctcatcgtggaggagtgcatgcagcactacgacgagctgttccagctcaaggcggcgctcgcgcgctccgacgtcttccacctcctcaccggcacgtgggctacccccgccgagcgctgcttcctctggatgggcggcttccgcccctccgaccttctcaagatactgatacagcagctggacccgctgacggagcagcagatgctggggatctacagcctgcagcagtcgtcggagcaggcggaggaggcgctcgcgcaggggctgcagcagctgcaccagtcgctcgccgacaccgtcgccgccggcacgctcaacgacggccccggcgtgcccaactacatgagcctcatggccatcgccctggacaagctcgccagcctcgaaagcttctaccagcaggctgacaatctgaggcaacaaacgttgcatcagctgcggcggattctaacaacccggcaggcggctcggtgtttcctctccattggggagtattaccgccgcctccgtgctctcagcaacctctggtcttcacgtcctcgcgagaacttcattggcaccgagagcgtcagtcccacaggaaccgagctgcaaccgatgcataatcagcctcagcagaatcagtactcaggattttgagagcttctcctggaggatgtaaactccggccaaaagtgatgttagaaagagagggtgggagagggagaggggttgtaatgttctattattaaagtattgagaaagcaacatcactaggaaaaggaagaggcaaaaatttgttgaggtgcaatgcaatgctggtcactggctcacttgttcc

SEQ ID NO: 92531 - DNA, 363 bp, Oryza sativa
  Clone ID: PAT_MRT4530_91002C.1
atgacttcgaacgtgtctatacaggatggtcccacagctaccaaccgtgggctcgggccgttcgtcggtcgcaccagaatgcaaaacctggtcgaacccaaccgccttcgtccggtccggacggatccgaacccaaagtcggcgggcgggatgcctcaaacccatccccgcctcgttggcgggaacggagccccgcccacttccctcttgctaaatacgcttcgtacgcgtggtcttcgcctccgatcggctatgaaggcacttccacttttgccgctggtagtatttctttttgagacagacatatcttttgctgctgtcctcgaggattttgtagccaagcccgaaaacttttgggaaaat

SEQ ID NO: 92532 - DNA, 401 bp, Oryza sativa
  unsure (1)..(401): unsure at all n locations
  Clone ID: PAT_MRT4530_91003C.1
cggacgcgtgggcggacgcgtgggcggacgcgtgggcggacgcgtgggctagagaccagcagggtcaggcttcagcagatcgagcaagaactccaaagagcacggtcacagggcctgtttcttggggggtgcagagcagcaggcgacatgagttctgtaaaatcgtttgcaggcgcggccatgttcgacatggagtacgcgcgctggctggacgacgacagcaagcggctgaccgacctccgtggcggcctgcaggcgcacctgctggacaccaaccttggcctcatcgtggaggagtgcatgcagcactacgacgagctgttccagcttcaaggcggcgctcgcgcgcctncgcgtcttccacctncttaccgggacgtgggctacccccgccgagcgct

SEQ ID NO: 92533 - DNA, 241 bp, Oryza sativa
  Clone ID: PAT_MRT4530_91004C.1
atgaaggaaaacgtgtttgatgatgaccactgaaattgtgtctgacctgttgtatgtgccgtgtgtgccaccacaattatgattggtgcctctgtggtgacccactgtgtgtgtgccaccactgtgcatgtgaaacatccacatgatggaaattggtgggggaaaaatgatctgaccacattgggacctgtgaccacttgattggaaactcgagggggagtgattaattgagaaaatgtgc

SEQ ID NO: 92534 - DNA, 153 bp, Oryza sativa
  Clone ID: PAT_MRT4530_91005C.1
cgccgacgtggcactcgctcccggacgaggtctgggagcacgccttatccttcctccccgccgacgcggacaggggcgccgcggcgggggcgtgcacctcgtggctccgggccgagcgcctgtcgcgcacacactaggcgatccaactgtacc

SEQ ID NO: 92535 - DNA, 502 bp, Oryza sativa
  Clone ID: PAT_MRT4530_91006C.1
attgatagggaaaaatggtgcaaaacgacgtacagtgtgattcttcataacacatgtcagagttaaacgtgcgagtgtggtttgagttatgctacatctgggcgtgcgtactattcctcaatgccatattaatgatgcgatggaccaagaaagctcgtgactctatcccagcacaccttgggacctttccagatgatgttgggatggcccaggcaagagtattcaggcataatgttttgcaaagcactgcgaatgagatagttaggctcggtgatcaggataaccaatcttttgagattcttcttcgttatcttggggaagcaaaggaggagattgccaaagccgcttccaagatgtctggtgctgcgggccagttttcatttcatttcatttcagatgttttcatttcagatgtttcagtctcttaatggaatccatgcaactgtacctttcgagcttttctaatctaattaatgtgaatttgcaaattcataattctgag

SEQ ID NO: 92536 - DNA, 1198 bp, Oryza sativa
  Clone ID: PAT_MRT4530_91007C.1
gtataactgttggctcatacgaattcaatgcttataacattcaacaatatacatgctcaagctcctagcaactccagattttttgcacaatgtcagctggttgagcaaacccttccataataagggacaaagccatagccttgtacgcctgttgagtgaggtggatgccatcccagctaatgtgctgcgctgggtctgcacaaacgttcgttcccactgcgccacacattaggttcatgtcaaagttgtactttccgcctgcgccgcaacatgccttgaacaatgagtcctcctcgaaccctaagaggtcagccttttggaggagatgcatgaaggcgccatagtagtctgcgtagacgatggcgacatccgagttgaccttccggaggtcatctatggcggcccggagctgatcattgtggtacatggcgaaggagttgtaactcttgaggcagccccggtcgtcgtagtcgccggagatcgccgtggagaagagggagaggtaactcggcgagcacccgatcgggaagttgcccgggatgacgatcttggtcgctcctagctcgatcacctccacttgtggcacgtaggtcttcatggattcgatggatctcccctggaagaaggcgtagttgtagtcgttccctcctatctccccaaccaagaacagagctccggacagctttttcgcgcagtcttggtgtgaagaacaggttgagttgaggtgtgacctgaaccagtcgagctgcgagctgagcggcacgctcgccggcggcatcaccacgccgctctgcagcaggtagctccggtccagcgccgtcgccccggccaccgcgaagttcaccccgctctcgaacctcgcccccttctccaggtacgggctcaccagcgacaggttcagcgccatggcgaagtagtcgatgatgaggaggccgtcggagcagcggccggtggggcggcggagggtctggccgtaggggtaggtgccgatggaggcgaaggcgccgacggcggggccctcccggaggaggttgccggtgtcggcgatggagtcgccgaagctgtagatcgcgctcaccgagcacgccgcctccgccgtcgtcgccagcaccagcagcagtatcacggcggccaacgccgttgctgccgccgccgccatggccgtcacgcaccggccactgctagcaactagcttagc

SEQ ID NO: 92537 - DNA, 219 bp, Oryza sativa
  Clone ID: PAT_MRT4530_91008C.1
atggccatgataacgataaccgagactgacaggatcgtcgtagtcacccggatgacaacgtccaggactgacgagatcaaggcgacaacagacaaggttaacgacatcacgacatcacatggtgacgatgaaactcgagatccccagacttccagagggcctgaggatgaggtcgtaggtccaggagacaaacccccgactacgatagtccctcattga

SEQ ID NO: 92538 - DNA, 975 bp, Oryza sativa
  Clone ID: PAT_MRT4530_91009C.1
atgtcatcatcatccacccccaccggagcagcagccgacgatctcgcagccgccaacgccaacgccaaggagtgcgtgttctgcgagatgacgcggcagcaccacccgcaatgcgcgcggcggctcccgaagcggatcatcctggtgcgccacggcgagagccaggggaacctcgacatgtccgcctacaccaccacgcccgactaccgcatcccgctcaccccgctcggcgtcgaccaggcccgcgccgccgggaagggcatcctcgacgtcgtctcctccgccgccaactggaaggtctacttctacgtctccccctacgagcgcacccgcgccacgctccgcgagatcggcgccgccttcccccgccaccgcgtcatcggcgcccgcgaggagtgccgcgtccgcgagcaggacttcggcaacttccaggtcgaggagcgcatgcgcgccgtcaaggagacccgcgaccgcttcggccgcttcttcttccgcttccccgagggcgagtccgccgccgacgtcttcgaccgcgtcgccagtttcttggagtcgctgtggagggacatagacatggggaggctggagcaggacgcgagctgcgagaccaacctggtgatcgtctcccatggcctcacctcgcgggtcttcctcatgaagtggttcaagtggacggtggaccagttcgagcgcctcaacaacttcgacaactgcgagttcagggtcatgcagctcggccccgccggcgagtacagcctcctcatccaccacaccaaggaggagctccagcgctggggcctctccccggagatgatcgccgaccagcagtggcgcgcctccgccaaccgccgcagctgggccgacgagtgctcctccttcctcgccaccttcttcgaccactggaacgaagacgacaatgacgacgacgacgatggcaaggaggaaaatggcaagaccaacaagttgctcgagtaa

SEQ ID NO: 92539 - DNA, 1350 bp, Oryza sativa
  Clone ID: PAT_MRT4530_9100C.1
atggcggcgtcatcgtccctggctttcacggcgcgccgaggcgacccggagctcgtcgcgccggccgggccgacgccgcgcgggctccggcggctctccgacatcgacgaccagcgcagcttccggttctaccgctccatcatctacttctaccggtccggcggcggcgacccggccagggtcatccgcggcgcgcttgcggcggcgctcgtgcactactacccgatcgccgggaggatccgggagcttcccggcgggaagctcgtggtggactgcaccggcgagggggtctcgttcgtcgaggccgacgccgacgtctcgctggaggagttcggtgactcgctgtgcccgccgatcccttgcgccggcgagctcctgaccctgccggagagcaactccgccgtcgtcaccgaccgaccactactctatgtgcaggtgacgaggctgaggtgtggcggattcgtgttcggcacccagatctgccacaacctcgtcgacgcggcggggatcacgcagttctggcaggccgtcggcgagctcgcgcagggcgcggcggcgcccagcgtccggccggtgtgggcgagggagctcctcgacgcgcgccacccgccgcgcccggcgtacgaccaccccgagtacgagccggcgtccgacgaggccagcgacaagctccgtccgggcgacgagctcgtgcaccgcaggttcctcttcggccccgacgacgtcgccgcgctgcgcggccagctccccgcgcgcctcgggccccggtgctcgcgcttccttctcctctccgcgttcacctggcgctgccgcaccgccgcgctcgggtacgcgcccggcgacgaggtgcggttcatgttcgtcgtgaacggccgcggccgcggccacggcgggaggccgctgcccgaggggttctacgggaacgcgctcacgttcggcgtggcgcgtacgacggccggcgagctctgctcgggcccgctgtcccgcgccgtggagctgatcgctgccgcgagggcgcggaccatggccgacggctacgcgcagtctgcggccgacgcggtggtgctccgcgggcggcggcggttcacgacggcgcggacgtacctggtgaccgacctgacgaagtcgccgctgcacgaggtggacctcgggtgggggcggccgctgttcggcgggccggccacgacgacgctggccacgttccacatgcccgcccgcggcggcgggatcgccgtgccgatgtgcctgccgccgcgcgccatggagaggttcgcgggcgccgtgcgtgcggggctcgcggcgggcgttccccgtgcggcggaggaggccgccgctctgtcgaagatgtag

SEQ ID NO: 92540 - DNA, 524 bp, Oryza sativa
  Clone ID: PAT_MRT4530_91010C.1
acggcgtggcacactggggcggtggcgcggaggcacgaaagcggcggcacgacagcacgagggcggcggcgcggcggcacggcggcggtggtgcgtggagaaggggagagggagaggaggagggaatggagtgggtgaaacgatggaggcgcggggcgcgaggcggtgaggagacgggcgcgcggcgacgggacgggcgacgcgatggcgcgtggctcggggcggcgacgcgatgggcgggcgacgcgacgggcggcgacgcgacgggcagtgacggggcgtgtgggcgcgcggtgcgactggatggcggcccggcactggcagtggccaagtgtaggcgcgcagcggatcggggctcgaggcacgcggccacgacgcgacggtgatgacgatggcgcgcggggctcaaggcggcgacggtgacggcggtggcgcgcggcgctgggcgacggcgcgtggcggcaggcggcgctggcgcgtcggcgcaggctcgggcggctaggggcagaggtgggagaggaggg

SEQ ID NO: 92541 - DNA, 147 bp, Oryza sativa
  Clone ID: PAT_MRT4530_91011C.1
atggcgagatacatgctcccttgcagatggaagacagacgggaatggacacaagacgggcgagaatggtgagcctgttccccgctacggctctcatcgctcggactcacttgatgttggctcgctcaccgtctacctcatgccatga

SEQ ID NO: 92542 - DNA, 1370 bp, Oryza sativa
  Clone ID: PAT_MRT4530_91012C.1
ccgcccccggccccgcccccccccacccccgctgcgcctccgtctccccgcgcgcgcgcccgccccccgccccatgacgaccgccaccgccatcgtcgccggccacggcctcgcgctgcgccggagcctgcacctctccaagcccagctgcgccaccttctccgcgcgcgcgcttccgcccgccgcccattgctgccgcaccgtcgtcgccgcggccgcgccgtcgtcgcggacatgccggtgccggtccgtctcctccgagagctccaccgccgccgcggccgacaccgccgacgacgaggaggaggtgaccaagagcgactcggaggaggaggagagggacacgctgggggaggtgtgctacctggacccggaggcggacgcggaggggatccgggagtgggagctggacttctgctcgcgcccaatcctggacgcgcgcgggaagaaggtgtgggagctggtggtgtgcgacgcgacgctgtccctccagttcacccgcttcttccccaacacctccatcaacagcgtcaccctccgcgacgcgctcgcctccgtcgccacctccctcggcgtgcccctccccgaccgcgcccgcttcttccgctcccagatgcagaccatcatctcccgcgcctgcaacgagctcggcgtcaaggccgtccccagccgccgctgcgtctccctcctcctctggctggaggagcgctacgagacggtgtacagccgccacccgggcttccagtccggcaccaagccgctgctcaccctcgacaaccccttccccaccagcttgccggagaatctcttcggcgacaagtgggcgttcgtgcagctccccttctccgctgtgagggaggaggtggagtcgctggagaggaggtatgcgtttggggcggggctcgacttggacctcctggggttcgagctcgatgagaacaccttgatacctggggttgccgtggaatcttcgcgagccaagcctctagctgcttggatgaacggtctagagatctgctcaatggaggttgacacgggcagggcgaacctgatcctatcggcgggggtctcgaccaggtacgtctacgccgggtaccagaagagcgccgcgacgacgcaggaagccgaggcctgggaggcggcgaagaaggcctgtggcggcctgcacttcctggccatccaggagaacctcaactccgacgggtgcgttggtttctggctcctgctggaccttcccccgccgcctgtatgattgatcctgcagtccggacagtagcatctagcagcgtgtgtttccatcaaagatcactgtgtagtatgtgtagctccagtaacaaaattttcaatacaagatcccttccatctgtact

SEQ ID NO: 92543 - DNA, 1438 bp, Oryza sativa
  Clone ID: PAT_MRT4530_91013C.1
ggtcgtcgtcttggtcacttggtctccatctcctcttcttcttccacctcctcatgcccatggcggcttcccattgatcccttcaacaccgctctattttaccatccaattagcaattagcgctagttgagtatcatctccactatttattctaatccagtgtaatcatcctcctttcttctcccaaaaacaataccaaagaaatccaagcaccgccgcctctctctgctctacccccatctcgccaccaagctcccccctccattttgatactaaaaattcagcaactcgccagggagagcagggtcgatccaagaatcgattgctgttcggttcttggattggagagacgggacgggagaagaagaagaagaagaaagaaaagattgcagtcttttgtgttgttgaggtagaaggagaagaggaggaggtgggggaaagatgtcgcgaggaggagggagctacggggaggtggggcagaagatcgactacgtgttcaaggtggtgctgatcggcgactccgcggtggggaagtcgcagctgctggcggggttcgcccgcaacgagttcaacctcgactccaaggccaccatcggcgtcgagttccagacgcgaaccctccacatcgacgcccgcaccgtcaaggcccagactcgggacaccgccggccaggaaaggtaccgagcagtaacaagtgcatactaccgtggtgcagtgggagctatgttagtatatgacataacaaagcgtcagtcatttgatcatgtagctaggtggctcgaggagttaagaggccatgctgacaagaacattgttattatgcttatcggtaacaaatctgatctaggcacgcttcgggttgtaccgactgaggatgcaaaggaatttgctgagcgtgagaatctcttcttcatggagacctctgctcttgagtctaccaatgttgaaaatgctttcatgaccgtacttacggagatttaccgtattgtcagcaagaaaaaccttgttgcaaatgaggaggttgattctagcggaaactcgagcttactgaaaggtacaaaaattgttgtcccaggtcaggagccagcccctccaaccaaagcatcatgttgtatgtcctaggcatagcattgtactgtgttgtttcggagtttactcctgccatatcaacactgaatagctgggattcctgtgagtaaagatgaaaaggtctacatgtggacagttaactcacatatgttgtaattttatgaatcactcttttttgtatctgattgtgtgatggtgtgtgtagtcatttagagcattctcagatataattggcccaatcttatctgtttgctatatcattcttatccaagcacaaaacatatatgcatttgtttaccttacttacctgtgtaataaaaaaaatgggagatactaacctttaattatc

SEQ ID NO: 92544 - DNA, 213 bp, Oryza sativa
  Clone ID: PAT_MRT4530_91014C.1
atggggatgggggaggagcaaaaagcctaccgtgtctgcaccttcaactccggcttttcatccctctccggaccggagcctttccgataccgtcgagatgaagccatgcgaaccggcgcaatcatcgcccggttgggcgacgaccaaggcaaggagcacgaagaagaagatgacgacgacgacaacgaccgtgctcatgataatctcacatga

SEQ ID NO: 92545 - DNA, 2422 bp, Oryza sativa
  Clone ID: PAT_MRT4530_91015C.1
atggcggcgaggccgtgccgggcggcgacggcgctagggaatggtttggggagggggacgagcgagcaaccgaacggctcggggcttatccgagatgatgcaaatggcaagaatttgggcgaggagctcaccggcgagagaggagcaacgttggcgacgcggagggagtcgtggcgaggcgaggaggagaggtcggtttggaggagggaaaccgacattggcggtcaagggagctcggctggtgttcacgggcggcagcggctgtttcgtgggcagtgcgaaagcggcgacggcgtggatgcgttgggcggcgaaggcgcgcatggcgtcggcggcgaccggccggtcggccacctcgcgaggcgcgcgcgggaatgggcgaaggcggtggaggttttgggcggcgacggcgggaagcgggggcatgacctgcggctgctccatcccgtcaccattaatgagaggttcttcaccccttacttggacttggatcaacgcttttctccacgctgcgacaaattagtcgctggcttgatctcctctgtttttcccaccggcgacggaaccggggttcgcctgcgcccaccggagctcgcccgcgccgaacaaagcggacaacggcgctgccgagctcgtctccctcttgcccttcttccaccatggcgggttgaccggacggtgaggcggtgcgacctcgagctcgtatccctgtccgtcgcctccctctccctcctccttccaccgcgccaccgcggcgacgtggccgggcggagaggcggcgtgactggcgcgaccttgggctcctctccctctctgtcgcctgatattccccccttcttctaccgcggcggggtggcccagcggagaggtggcgcgacctcgagcttcgcgagcggcaatggtggcgcggcccgcgagctcaatcggggggcggcgcggccggcgcagattggggggcggcgtggccggagcagccgctcctctctccccgtcggcagcgccctcctctctcccgccaagctcgcgtcctctgtcctgccaagctcccaagccacgcccgcgaggtaccgctctccacaacgcggcatcgctcctttctccctgcgtcaatccgaagaaagtagggcccgcgccgacctcgccttatccccagaacagggcaacgcagcaaaggtgaggagctgcatctcatctgcattccttcctcgtggcgatgacgatggtacgcatcatcggcccaagtccagctcaatcctcctcaccaacaccaagacgaccacgacctcctcgccctcgccgccgcccaccgaccatggcctccgccgccgcttcttcctccaaacctcccgtcgtgatgcttctgaggcagaggaaatagatgtagagagtcttctggaatcactagagaagaaagaagttttgagttcaagcatgccaaaatgcatcgcctccaaggtttatgctctggcatgccgcctgagaagatgctgccttttgcagctcaagtggaactactgcaacctcctgcagcagagccctgatgtcgtccaccagttctacaacgacgccagcagcatggtcggcgtcgacgacctcgccgaaaccaacaccaccgccagcaccatgatgggtataggtggtgtatttgtgcccagaaactcctcatctcttgcgaggaggacatcatcatccgtgtccctccccggggcgagggctctcccgacgtggtccagctccgtgtccggcgactcgcactcgttggcgctgagctcgtgggcggcgcggcctcggtcggcgcggccactgcgggcgccggcgaggatgggcaacgtgaacgagggcaaggggatcttcgcaccggtggtggtggtggtgcgcaacatcgttggccgcaagcgcttcaaccagctcaggggaaaggccatcgcgctgcactcgcaggtgatcaccgagttctgcaagaccatcggcgccgacgccaagcagaggcagggcttgatccgccttgccaagaagaacggcgagaagctcggtttccttgcctgatcgacatgcccttcctaattcctactagctcatttgattggtgtggatttcctctctgaatgaatgaatttcctgtagctagctagccagccgcgccttcctccctgcgtataaatgtgtcttgtgcgtacgtatacctcctcttctgaccttcaattccatccatccatgccatggcggcatgaacgaatgaattagtagtaagtaatacgcgcatgcatgaacgaatgaataatatactatataatgcgtgtatacagacactagcgctggctagcatgtatgatgatcatgatgtatatgtatgagactgagactgtatgtagccagttaagcgacatcacttgtcgtcaagctccaaaaaaaaaaaaaaaaa

SEQ ID NO: 92546 - DNA, 159 bp, Oryza sativa
  Clone ID: PAT_MRT4530_91016C.1
atggtgctctatgccaatgcgctgaaagaaggtgttaagccgctggtactcacccccccaatcggtctgaacaaccttgatcttgcgttcaagcagccgttctaccagcaaaagaagggtggccaaggcggtgatgccacctcgccgttgaaggcttga

SEQ ID NO: 92547 - DNA, 446 bp, Oryza sativa
  Clone ID: PAT_MRT4530_91017C.1
ggtactcgtggggcaaaacttagcaaaaattgtcagatcctgttattgaaacatctggctttaagctcggttgtcatttgtagacctataaaacaccaggaacagatgagcttcaacaaggattttttgcaaaaaacagcgattgcttgaacatgaaacaccgtggtcaccacagtgagatgtcagcggcgtacattaggagtggcagacaatggctgagtgggttgagagaaggtgttgaaggtggccccgtcatgccagtggtggaactgaagtcgttcagaacagatgcctggacgcaatccaagtcggtgccagccttttacgacaggcaccacgctgatgacgtcaccttaactgactactcaatgacgttacgaggtggaggtcacctgaccggcgacggagtggtggcctatcggtcagaagagttttatgatgttgag

SEQ ID NO: 92548 - DNA, 310 bp, Oryza sativa
  Clone ID: PAT_MRT4530_91018C.1
ttgcttcactgcgagggaggtggagagtttcgggacctgcattctcgaggtagttttgaaggcggtgtaacgtgcttttccccccaaactgatggttgagaaggaattgctgaaaaggagaacccatagacctggagattggcgtgcccaggcttactgtcggccatcccagattcaactggaccagatggtccattcacgccattgcccggagtggaagataccatgagtgggaccagttagctgaattttaactagcgctctgtgtggcggccataccgtagattatttcaccgaccctggagaaaaa

SEQ ID NO: 92549 - DNA, 327 bp, Oryza sativa
  Clone ID: PAT_MRT4530_91019C.1
atggatcgggtgctcccgaggcaatgcagtgacagatgtgtgcccgaggcccaaaaatggtggatctgcacgcccaagacccaacaaacagtggtcccatctgctcgaggcccgacggcgacagatcaagtgctcccgaggcaacgcagtgacagatctgcgtgcccgagacccaaaaatggtggatccgcatgcccaaggcccgacggcagaatcccgctcacatcgccgtcgtctcggccatcatcattgttgctgttgtcattgtcgttgcggtcgatgtcgttgtggccgtcgccgaccactgccagtcgacaggcctattaa

SEQ ID NO: 92550 - DNA, 420 bp, Oryza sativa
  Clone ID: PAT_MRT4530_9101C.1
agtcaaaatggcaatagtttcctttacttccctacagaagatacaagtctttttgtagtagcatgcaccggcaccgcagctcaaaaataaaaacgaaagagacattgatacgacgacgatactcatcatccatcatgttaacacaagatatatagagagagatgccatgccatgccttcattcattcattcccgcgatgtccatcgcccaatggcttctcctaccctgatcctatcgccagccttgatacagaaatcgaaatctgacgttaccgtgccactgccatcctctctccatcttgccttggacactacaggtgccttaaataccatcaccaccgtcgatcccatcttaaaccctgctatctcttccccctttttaaccatcacaccggtgcctacaggttcaaaaactcgatca

SEQ ID NO: 92551 - DNA, 738 bp, Oryza sativa
  unsure (1)..(738): unsure at all n locations
  Clone ID: PAT_MRT4530_91020C.1
gttgaaagatgtgcgagtttttaactgttgattgacacaacgccggtagatattttcctagaataagcgtgaaaccaaatgtggcatatgtagttctttacttcctgccattcggtagaacatgtcagactttggtccattctttaggtgaataattgttgactatttaaacaatcatgcttgcaaatggggcacaattggttccggtactgagagccacagcaaacctagaactttaatttcgcaaatctgccaactcgagctggtgacctggtgtattcgcatccctacaacttcttatatagttttaagtgttggtgacagattttggcaagttaatgccctaaagttattttcaagaagcagtaaggctgactttaatcagttcaaaattctggttttagtaaattgcataaaaatatcacatgtaaagacatttactgttcagttttacatgagttttctgttgcagcagcaacagaaaactatattatcntgtgtgtgccacatatataaagattatgccataaatgaggaggtcaaaatataagtagtaaggcatgcttagtagtgctatctaggttgtctcttatgattgccatgttatatatattaaaaaaaaagtaggtggcagagaaagggggttgaagtgagaagacgtgtcatctcttatacaagagacgatatgagagaggacaccgacacacaagaactgagagttctgaaggtgagtatgcg

SEQ ID NO: 92552 - DNA, 1270 bp, Oryza sativa
  Clone ID: PAT_MRT4530_91021C.1
atcccggtcgaccccgcgtccgcccacgcgtccgcccacgcgtcctccgcacgcgtccgcccacgcgtccgcggacgcgtgggctgctagcttgggaagaggaggaggagcttgagcttggagagagacaacaatggcggctcaggctcttctctctgggaggcagctgctggggaggccattgcaatcttcagtctccaggtcttcttcctccaggaaggcacccttcatggtcagggcagaggccactccccctgccaagcaaggtgctgacaggcagctgtggttcgcatccaagcagtccctgagctacctggatggcacgcttccgggagacttcgggttcgacccgctggggctatcagacccggaggggaccggtgggttcatcgagccacggtggctggcctacggcgaggtgttcaacggccggacggcgatgatgggcgtcgtcggcatggtcgccccggagctcctcggcaagctgggcctcgtccccgccgagacggcgatcccgtggttccagaccggcgtgatcccccccgcgggcacctacacctactgggccgacccttacactctcttcgtcttcgagctcgccctcgtcggcttcgccgagcaccgccgcttccaggactggtacacgccgggctccatggggaagcagtacttcctcggcctcgagaagtacctcgccggctccggcgagccggcctaccccggcggcccgctcttcaacccgctcggcttcgggaccaagagcgaggcggagatgaaggagctcaagctcaaggagatcaagaatggcaggctcgccatgctcgccttcctcggcttctccgtccaggcgctcttcaccggggttggccccgtgcagaacctgcttgatcacctcgctgatcccgtccacaacaacatcctcaccagcctcaagttccattagagatgccatcaactacgtatttaattaattacgagtttttaattatgtatgtatgtacgtgcgtatgcgtatatgtgtgtacgtatgtatgtacgcaactttgtacgatcgatggtgcgtgtgatcgagaggggtatgtatgtacgtacgtatatacgatgtattattatgcatgggtgtagggtgtgggtgtaacatgtaaatttgtgctccaactgatttgcacgcatggtcgcatggatcgatttgctagctaaaaaaaaaaaaaggcgaacgcagccacaatacaggctcccagcgaggcagcggcggggacgcgaaactctt

SEQ ID NO: 92553 - DNA, 139 bp, Oryza sativa
  Clone ID: PAT_MRT4530_91022C.1
acgacaggttcgacgaaagcatggactacccaaggaatcaactaattactcacttatctaaccatgtctgacaccatctgcgacaggtgctgcgcctgcaactgcgctgacatgagccaaggcaccaagtatggcacca

SEQ ID NO: 92554 - DNA, 1796 bp, Oryza sativa
  Clone ID: PAT_MRT4530_91023C.1
tcagagtccatgaatgggaatttcaatcccgtggaccacctggcggccggcccccctatgctagcactcaccaagtttaatttggagcacacatttcagctcaccactgctagcttgggaagaggaggaggagcttgagcttggagagagacaacaatggcggctcaggctcttctctctgggaggcagctgctggggaggccattgcaatcttcagtctccaggtcttcttcctccaggaaggcacccttcatggtcagggcagaggccactccccctgccaagcaaggtgctgacaggcagctgtggttcgcatccaagcagtccctgagctacctggatggcacgcttccgggagacttcgggttcgacccgctggggctatcggacccggaggggacccggtgggttcatcgagccacggtggctggcctacggcgaggtgttcaacggccggacggcgatgatgggcgtcgtcggcatggtcgccccggagctcctcggcaagctgggcctcgtccccgccgagacggcgatcccgtggttccagaccggcgtgatcccccccgcgggcacctacacctactgggccgacccttacactctcttcgtcttcgtgctcgccctcgtcgggcttctccgtccaggcgctcttcaccggggttggccccgtgcagaacctgcttgatcacctcgctgatcccgtccacaacaacatcctcaccagcctcaagttccattagagatgccatcaactacgtatttaattaattacgagtttttaattatgtatgtatgtacgtgcgtatgcgtatatgtgtgtacgtatgtatgtacgcaactttgtacgatcgatggtgcgtgtgatcgagaggggtatgtatgtacgtacgtatatacgatgtattattatgcatgggtgtagggtgtgggtgtaacatgtaaatttgtgctccaactgatttgcacgcatggtcgcatggatcgatttgctaaaaaaaaaaaaaaaaaaaaaaaaaacaacaacgatcaaggtcagctcggccgcgggcaccacgccccgaggaatacttggagcaagcctgaaaaagtgagaggattggaaaatgttcaagtccgagctgtatctgcttgtggggttgtttcagcagcaattgggtgtgatggctctttatgggtttgggggagatcaaagcgtggccaacttgggcttggaaaggacattgtagaggctgcagtaccttctagagtggaagcacttgctaattatgatattgtcaaggcttcttctgccaaagaattacttggaaaaacagttgacaagtactctagctcaatgctagaggccgttgaaaagatggttgaggaaaaaataaggagtgaagacaatatgcccatcatctgggaaccttcgcttgttcatgaagtgtgtcatgttgaggtgtctgatgtgtcatctgatggcatcgtactgagcggtggagacaacacttacggacagcttggcaggaaatcagcatggtccaaatttcttcctgtcgacattagccacagtccattctctgtgtcagcaagtgttggccactctcttgcaacatgcatcatatcaactgaaggcgatgaccatgccgagaccggcgtcctctcatggggatggaactgcagctcccagcttggacgacctggcaaagaagacgtgcctgcactagtcgacggtctgaatggagagaggccagtgtcggcctcggctggtcgagttcattcggttgctctcacatcaaagggagaggtttggg

SEQ ID NO: 92555 - DNA, 318 bp, Oryza sativa
  Clone ID: PAT_MRT4530_91024C.1
taagtatattaattttgggacggaggcagtatatgcatgttagagtgcgcacaagtaaagacaaagtgtgcagaaaagacttgtgttggtctgtgagggcagtctatgacttataaaaactgccagatgtaagcgggcctggcttctcgcagtttcatgggcgcgtgtgtcgcagttgcgcaggcatggtgcgcatggctggtgtggacccggagtggtcacacagcacagcatggcacatgcgctgacactggacacatggacgtggccaagaggggacgttcctggcctagggttgatcaatggggccgtcgatct

SEQ ID NO: 92556 - DNA, 244 bp, Oryza sativa
  unsure (1)..(244): unsure at all n locations
  Clone ID: PAT_MRT4530_91025C.1
cttagcgaatccagcagcagaagcagcagcagcagctcagccgccgccgatgggtccacgatcatggccccaacctcccgcgtcctcgccgccaagacccccttcctcggccatccccgaccctccaatgcccacgtccgcnacatcgtcgcngnngtcaccnntcggatcacnatnagcatggagctgtngtatgnggcnaatagngtagagtatnttggggctttatgntcaaagggctatg

SEQ ID NO: 92557 - DNA, 204 bp, Oryza sativa
  Clone ID: PAT_MRT4530_91026C.1
atgagccagaagtcgtcgtggccggagctggtgggcgtactggcgacgctggcggcgacgcagatcggcaaggacaggccggacgtcgccgtcgaggtgctcccgccgggcgcgcccctcacgccggatttcaacgacaagcgcgtccgtgtcttcatggacgacaacggcatcgtcttcaaaattcccgtcatcgcgaaataa

SEQ ID NO: 92558 - DNA, 730 bp, Oryza sativa
  Clone ID: PAT_MRT4530_91027C.1
gtggttaggagaatccgccgctgcgccgtcttctccattgaagccaagctcccccaggccttctcgttctccccctcctcctcgagctctcgctggtgcggggagcgaagtggagaggagaggccgagagggacgagagatcgagagggagagggagcaccgaagcagcgggcggcagcatgcggccttcgctccgtactatctattttcttcttttgctacttccacatgcggtggtttctagaccactctttccactaccaagcaagagtaatggaatagagaagagacccttacaaacttttcgaccatataacattgctcaccgtggctcaaatggggaaattcctgaggaaacagctgctgcttacctgagggctattgaagaaggtgcggattttatagaaacggacatccttgctagcaaagatggggccttgatctgctttcatgatgtaacactggatgctacaactgacgttgccagccgcaaggagttttccaatagaagaagaacctacgaggtggaatggttcaacgctactggctggtttgtagtggacttcacacttgaggaacttaaaacactgaaagtcaatcagcgatacccattcagagaccaacaatacaatggcaaggtttcaattatcacatttgaaggaatcatttctattggcttggatgcaagcagaactgtcggaatatacccagagatggaaggaccagtttt

SEQ ID NO: 92559 - DNA, 240 bp, Oryza sativa
  Clone ID: PAT_MRT4530_91028C.1
atgggggagatcttctcagttcatcgagggcgcatcccggtgctcgtcggcgagggggaggagatgaagagggtagtgatccacatggaggagcttcaccacccttacttctttgtgttgctggagctggcagcaatggagtttgggcatgaacaggagggcgttttaaggatcccttgcagcatcgagcaattccaggcaatcgttgagctcatcagaagcagcatgttgaagggatga

SEQ ID NO: 92560 - DNA, 2295 bp, Oryza sativa
  Clone ID: PAT_MRT4530_91029C.1
atgcctggatggaatctgttgtcgaccagggtagtggtaatcatcagctccgtggcacatctcggcctcgtcttgtgtgccgaagtccgccgaaatagtgcgacaggctttcggattgtcatcctgtgggtggcgaaccagatgtcacgttgggccccgaccaccgcgctggccatgctggccgccggacgcacgccgcaggaggagcagctggtgacgctctgggtggcgttcatgctgctacacgctggtatgccggacaacatcaccgcctacgccttggaagacggcgttctctcgtttcgccagagtgtaaacgtgtttcttcagcttgttggacctgtgtcacctgcctatatcctgcaccagaatatgttcgccatgcctggcgactccatgctgtgggtctcctcgatcatctgctgtatggccatctgcaaatatttggagggggcgtttttcgcgctgcagcgtggcaacctggaaaacatgcgaagcgaaagcaagaaggaggttccaagtcgaagagtaacaagcctccaaagtctaaggcgtggcggcaaaccagataatgaccaaatcatgctggttgctcatggcaatctccatatcaccaagggtgccttcatcgataatttgcaatacgagcatgatgcccagcaacaagaaatactcccgaaaacatgggatgaaaacaagacactgtacaaggtggttgagatggagctctccctcatgtatgacatcctgtacaccaaggcagcaatggtgcacacttggggtggctacgccatccgtgtcgcctttccattcgctggagccaccgcgttcctgttgttctggttccacagcaaggaaggtcagccgacggctgacgtcttcatcacctatatattgctcgctggcaccgtcattctggatatcatatggctactcaaagcagtggcttcgacatggacctattctttcctgaatgataggccacgaatctggcttcatcacgcacttctgtgctcagggaaatggcgactgctccgtcgtctcatcgtctcattgaatctatttcggttccttctcagtaaggagccaaccagctataggatgtggtccggaaccatggggcagtacaacatattgcacgagtgcactagtaatgatcaagatcagaccaagaccttcttgctgacgaggatattcatctcaatattggtgaagattgttccagaggataattgtatggagttccaataccactacttgaagggctttcgtatgtcatcagatttctgcaagcatttgttcgaaagtatatgggaatatcttaagtcagcgtacccgcctactgttcctatcgagaaagccgacgaagccaaaccagctgcaccaccggagccgtatccagataaaaaaaaagaggcgccggcaccgacgccgccgctgccgccgaaggaagcacatctacatcagcgggaattagaagatgctctgaacttctcacctgcattccaagagagcatcctgatctggcacattgccacggacgtcttcctcttatgcagccatcaatactcatcctcgtccaaagaagtgcaggcgatcaaggtgttgtcagattacatggtgttcctggtcgccgtgcgcccaaatatgctaccgggccttaagctacgcagcctgtacgaagcagttggttacgctctaactaatgacgatgaaatattgcccaaggaagaatatcacgagcatgggtgcgtcttctggtgtatgcatccgtgcgatgcacaagggattcccatgccaagcagctcgcctgtggtggtgagctcacaacaatcgtctggattcttaatgaacacgctggccacggggaacgacgacgatgacgtcagcggagatgtcactaccggcggcggctcgggcgtgcatgcttgccggcgaacgacggcgcggcggcacgaacagaggacaccaacacgtagagggcgacgcggcgaactcaccggtgaccaaaacaacggcggaagatcaacggacggcgacggcggtgaggaaaaggcggcggagatgatcggcttgacgacggcgacggtgttccggtggcctacggcgacgacggaggggcggacgaggtcggcgatggcttggcgatcacgacggcggccttcccgagcgacgacgacgaccggagcggcggcggcgcacggctggacgaacggcggcgacggcggcgcacggctgcacggtgctagggcgctaccgacagcggcgggcaaaggcaagggtggcggcaggtag

SEQ ID NO: 92561 - DNA, 1304 bp, Oryza sativa
  Clone ID: PAT_MRT4530_9102C.1
gtcgcagtcgtctccggcgagaaatcggctgcgccccgtctctctctctctcgaacgcttccatggcgcgcttcctcctcctcctcgtcgccgtcgccgctgccgccgccgtgctttcgcagctgggcgacgcggcgccgtcgacggccgaggtgttctggcgcgccgtgctgccggaatccccgttgccggacgccttcctccgcctcctccgccctgacaccagcttcgtcgtcggcaaagcggaggcggccggtggcgcggcgcggaccggattccccttcgattacactgactacaggggatctgattctccgacgacggcgagtggtttggacctcgccggtgacttcggcgagccggcgcctttcggctacgactacagtgcacagggcgaaggcggcggcggcggcgccgccgccgccgcgggagagcaggttcttgccgtcgacgcgggcttcaactacgacaaatacgtcggcgcgaggaagctccgcggcggcagcagcaccgccggcggagagaatgatgacgagcctttcgggtacgactacaaggcgccgagcagcggcagcggcaccgcggcgtcgacgacggcgcgaggcgtcggcacgggcgccacgacgacggtgttcttccacgaggaggcggtgcgcgtcggcgagaggctcccgttctacttcccggcggcgacgacgtcggcgctgggcttcctgccgcgccgcgtcgcggactccatcccgttcacggcggccgcgctgccggccgtcctcgcgctgttcggcgtcgcgccggacaccgccgaggcggccggcatgagggagacgctgcgcacgtgcgagtggccgaccctcgccggcgagtccaagttctgcgccacgtcgctggaggccctggtggagggcgccatggcggcgctcgggacacgcgacatcgccgcgctggcgtcgacgctgccccgcggcggcgcgccgctgcaggcgtacgccgtccgcgccgtgctccccgtcgagggcgccggcttcgtggcgtgccacgaccaggcgtacccgtacaccgtgtaccgctgccacaccaccggcccggccagagcttacatggtggagatggaaggcgacggcggcggcgatggcggcgaggcggtgaccgtggccaccgtgtgccacaccaacacgtcgcggtggaacccggagcacgtctcgttcaagctcctcggcaccaagcccggcggctcgccggtgtgccacctcatgccgtacgggcacatcgtctgggccaagaacgtgaagagctcgacggcgtag

SEQ ID NO: 92562 - DNA, 1143 bp, Oryza sativa
  Clone ID: PAT_MRT4530_91030C.1
atgccttggaagacggcgctctcgtttcgccagagggtaaacgtgcttcttcttcagccgattggcaagccggataatgaccaaatcctgctggttgctcatggcaatctccatgtcaccaagggtgccttcatagataatttgcagtacgagcatgatgccgaggaacaagaaatactgcctaaaacatgggatgaaaacaggacactgtacaaggtggttgagatggagctctccctcatgtatgacatcctctacaccaaggcagcgatggtgcacacctggggtggctacgccatccgtgtcgcctttccgttcaccggagccaccgcgttcctgttgttctggttccacagcgaggatgatgtaagcaagcatttgttcgaaagtatatggaaatctcttaagttagcgtaccctcctactgttcctatcgacaaagccaaagcaactttgcctccggcgccatttccaccacagcatccaggtcgagcagatccggcagaaatgatgccgccgacaaaacaaattgtacgccagcgggaattagaagatgctgatctgaacttctcacctgcatgccaagagagcatcctgatctggcacattgccacggacgtcttcctcttatgcagccatcaatactcatccttatccaaagaagtgcaggcgatcaagctgttgtcagattacatggtgttcctggtcgcggtgcgccccaatatggtaccgggccttaagctacgcagtctgtacgtagcagttggttacgctctaactaatgacgatgaaatattgcccaaggaaggatatcactgtaacttgacagagaaaaaggagaagctggccaatcgcctagtagaaatggaacagaagccaagctcaaagaatgcgccgcgcagcaaatggagacccggtgtcagcggacacgtactggttcaggccagaaaaggcaaggcatgggttcgttttctggtgtatacatccgtgcgatgcactagggattcccatgccaagcagctcgcctgtggtggtgagctcacaacaatcatctggatccttaatgaatacgctggtatatttcgcatcgacggtgaccagggggatgacgacaaggacaaactgacgagttcatatttatag

SEQ ID NO: 92563 - DNA, 467 bp, Oryza sativa
  Clone ID: PAT_MRT4530_91031C.1
atggtgggttgtgagcacatggttttgagagtcgtgctcatggcaattaaggaccggttcgcgagctactgttgtgaaacattaaccgtgccaaccacaagccagcgtaggcaacggctttaccttttgtataacatgattcattgcgaagcaccagactgagaagtggcggagataagcccacgggggtcgctggggagtccatgccttgttttataagggggtgattatgatccaggaatggtgcactgtggtgagttgtgttgtgcagagggtattgtcacagcctctattcgggtactttccagtatcgcgacgcaatttcttccaaatcatcggccgacgtaaaaccctgtccttgcttgtcattgagatcatctattgtgccgcccctcgccggcgccgctcctccgcgccgcccctccaccggcgctgctcctcctcgctgcctcttccccggcgccgct

SEQ ID NO: 92564 - DNA, 326 bp, Oryza sativa
  Clone ID: PAT_MRT4530_91032C.1
tttttgttttttaacactaccacaacaggaacgttaccgaaaggaaggataaaagagggatgttttggactcatcaaggaatcaaacgaatttaattcagagaagcagagtatcagttacatattatctctaacacccatgtaacaaagactgacgggtccagagatcctagcataaccgttatatagtgcgggacctaaggaaggaaccagctgacaggcttgcttcagatagcttccacacgtaccatgacggtcgcaaagagggggaccaacagaacgaacaagatgcaaggaggcgaagggaccactggtcgaatctgcact

SEQ ID NO: 92565 - DNA, 637 bp, Oryza sativa
  Clone ID: PAT_MRT4530_91033C.1
ggtcgttgtgttgcaattgtggcatctgcttccttgagggaaatgataaggccgggggctttagccattatatcacccatggctgttggtattatcttccgtatgttgggtcacgctactggccggcctctttttggagccaaagttgtagccgctatgcttatgtttgcaactgtttctggtattctcatggcactcttcttgaacactgctggtggtgcctgggataatgctaagaagtacatcgagactggcgctcttggtggcaaaggcagtgagtctcacaaggctgcagttactggtgatacggttggagatccatttaaagacacggcggggccttccatccatgttcttattaagatgctcgctacaatcacattagtgatggctccaatattcttgtgattaaccatgaatgtatcacaactaatcctgcggcgaagttatcaaagggtcctgtaggtgagctgtttacgtgagtgggatgtattgattcgctagctttgtgtttattttgcccgattaaagagaatcactactgcccattttgatagtgtccatattatactgtcactttctttgacaaatgatactaatgttggtaatatactggacagagattagaagggccttt

SEQ ID NO: 92566 - DNA, 404 bp, Oryza sativa
  Clone ID: PAT_MRT4530_91034C.1
aaggtgggttgtgagcatatggttttgatggttgtgctcatgacaattaaggaccggttcacaagtttcggttgtgaaacatttatcatgcctaccacaagccagcgtgggcaacggctttatcttttgtatagcgtgattcattatagtgcgccagactgagaagtggcgagaagtccacgggggtcgctggggagtccatgccttgtttataagggggtgattatgatccaggaacggtgcgctgcagtggattgtgttatgcgaggggtattgtcacaactcctttccgagataccgtggtggtattgaggcacatgtggtacacctctggccagagtaaaactattcgaatagccgtgcccgcggttatgggcgggtctaacaatgtctttcgtgattag

SEQ ID NO: 92567 - DNA, 560 bp, Oryza sativa
  Clone ID: PAT_MRT4530_91035C.1
gcacgagggcatggcgagtcgtcgccgccgtccgaccgtagcccacgcgttcggcggcgttcctgctgctcgccgacgcggcgctcgtcgccctcatcgtcgtcttcgtcccgtataccaagatcgactgggacgcgtacatggctcaggtggacgcgtttgtggaaggggagagggattacaccaagatcgagggcgacacggggccgctcgtctacccggccggcttcctctacgtttactccgccatcaagcttctcaccgccggccaagtcttccccgcgcagattttgtttggtgtcctgtacattgtgaaccttagccttgttctgctgatgtacgtcaagactgaagtgcttccatggtgggctttaggtttgctttgcttgtcaaagagggttcactccatctttgtgctccgccttttcaacgatagtttcgctatgacgtttctccatgctgccatggttttgattatgtatcacaagtggtaccttggtctagtaattttcagtgcagctgtctccattaagatgaatgtgcttctttttgctccatcg

SEQ ID NO: 92568 - DNA, 2421 bp, Oryza sativa
  unsure (1)..(2421): unsure at all n locations
  Clone ID: PAT_MRT4530_91036C.1
atggagaacgggaggttgtatccggagagacccagaactttctctaccgtacgaactaaatcatctctgccaccgatcttccgtgtgttgatgaggataaatccccgtgctttcattgttcttcttcttttggtattcagtggtgtgctctatgtaggagccagtacatcaccaattgtgctctttgtgttctgcatatgtactctaagtttattcttctctctctacctcacaaagtgggttcttgccaaagatgaaggtcctccagaaatgtctgagatttatgctgtattttttattgggtgccttcttgatgttcagatatctgatgccataagagatggtgctgaaggattttttaggacacaatatgggactatttctaaaatggcttgtatcctggcacttgtcattcttggcatctatctctttcgttccaccaccccacagcaggaggcatccggtgttggaaggacaacatcggcatatattactgttgcttcctttctccttggagctttatgttctgggattgctggttttgttgggatgtgggtatccgtacgtgcaaatgttagagtttcaagtgctgctcggcggtctgcaagagaagcactgcagattgctgtccgcgctggtggtttctcagccattgtggttgttggcatggctgtttttggtgtggcaatactgtatgcaacattctatgtttggcttgaagtagattcacctggttcaatgaaggttactgatctgcctcttctccttgtgggatatggttttggtgcgtcttttgtcgccctttttgctcagttgggtggtggaatatacaccaaagctgctgatgtcggagctgatcttgtgggaaaggttgagcagggaataccagaagatgatcctcgtaatcctgctgtcattgctgacttggcaagtctcttttgcttgtcatgcaacatcattgataagaatgcgaaattgtccagtgacaattcctatccctcaggctttatactgtttcctcttgttgttcattcatttgatctggtgatctcatcagttggaatactctcaattcggggaacacgtgactctgggttaatatcccctattgaagatccgatggcaatcatgcagaaaggatattctatcactatactgctcgctgttgttacctttggagtgtctacccggtggctcctgtacactgaacaagcaccttctgcatggctcaattttgccttgtgtggcttggtgggcatcatcacagcatatgcttttgtttggatttctaagtattacacagattacaaacatgagcctgtccgccttttggctctttcaagttccacagggcatggaactaatattattgctggagtaagcttgggactggaatcaacagcgttaccagttctagtgataagtgtagccatcatatcagcattttggttggggcatacatctggattagtagatgaatctgggaacccaactggtggtctttttgggacagctgtagctacaatggggatgcttagcacagcagcatatgttctcaccatggacatgtttggtccaatagctgacaatgctggtggtattgtggagatgagtcagcagcctgaaagtgtaagagaaatcacagacattctagatgctgtgggcaatacaacaaaagctactacaaagggatttgctattgggtcagcagcactggcttcctttctcctgttcagtgcatatatggatgaagtagctgctttcgcacaattgccattcaaagaggttgacatagcaatcccagaggtttttgttggtggtttacttggttcaatgcttatattcctgtttagtgcatgggcttgttctgctgttggcagaactgcacaagaagttgttaacgaggtcaggagacagtttattgagaggcctggcattatggactacaacgagaagcctgattacggtcgttgtgttgcaattgtggcatctgcttccttgagggaaatgataaggccgggggctttagccattatatcacccatggctgttggtattatcttccgtatgttgggtcacgctactggccggcctcttcttggagccaaagttgtagccgctatgcttatgtttgcaactgtttctggtattctcatggcactcttcttgaacactgctggtggtgcctgggataatgctaagaagtacatcgagactggcgctcttggtggcaaaggcagtgagtctcacaaggctgcagttactggtgatacgggcaaacaagtaaggaaatatggatttaggaaatagatttaaagacacggcggngccttccatccatgttcttattaagatgctcgctacaatcacattagtgatggctccaatattctggtgataaccatgaatgatcacaactaa

SEQ ID NO: 92569 - DNA, 644 bp, Oryza sativa
  Clone ID: PAT_MRT4530_91037C.1
atggactccccagcgacccccgtgggcttatctctgccacttcacagtctggtgctctactatgaaccatgctatacaaaaggaaaaaggggattattgcgtcagcgggtcggctcacggtggaccgggtgcatggcggcggttcacggaaacaaacggccgtgatcgatctatccaaaacggatggccaagatctaacggtctacgaccgatctacgacggacggcgtcgatgacgtcagcgatgacgtcatcaccgacggcggctcggcctcgcatgctcgccggcgaacgacggcgcggcggcgcgaacgaaggacacctacgggttgcgggcgacgtggaaaactcaccggtgaccaaaacagcggcggaaggtcaacggacggcgacggcgacgaggaagaagcggcggcgaccttcagcttgacgacgacggcggggctccggcgatctacagcgacgacggaggggtggacgaggtcggcgacgacttgacgatcacgacggcggctttcccgagcgacgacgacgaccagagcgacggtggcacacggctggacgaacggcggtgacggcggcactaggctacacggcgctagagcagagctattgatttggggttccgaagaacaagcagacgga

SEQ ID NO: 92570 - DNA, 507 bp, Oryza sativa
  Clone ID: PAT_MRT4530_91038C.1
atggtgggttgtgagcacatggttttgatggtcgtgctcatgacaattaagcaccgtttcacgagtttcggttgtaaaacattaatcgtgccaaccactagccagcatgggcaacggctttaccttttgtatagcatggttcactgcagggcaccagattgagaagtagcggagataagcccacgggggtcgctgggagcccatgccttattttataagggggtgattatgatcaaggaacggtgcgctgtggtggattgtgttatgcgaggggtagtgtcacaactcctttccgaggtaccaccaatccctaaaccgagcaagctatatgctgcttcaggctgcagagacacccacatagttttaattaattaagggattgatctgtcgccggagtttcatcagttggcgacgacccggatgaggaggaacgacgcggtccccgtcgccgccgccaccgagtccgccgagctgcccaccttgcagctcctgtacgtcgccgcgtcc

SEQ ID NO: 92571 - DNA, 342 bp, Oryza sativa
  Clone ID: PAT_MRT4530_91039C.1
aaggtgggttgtgagcatatggttttgatggctgtgctcatgataattaaggaccggttcgcgagctactgttgtgaaacatttatcatgccaaccacaagccagcgtgggcaacggctttatcttttgtatagcatgattcattatagtacgccagactttgaagtggcgagaagtccacgggggtcgctggggattccatgccttgtttataagggggtgattatgatccaggaaaggtgcgctgtaatgggttatgttgtgcaaggggtattgtccccaactcctttccgaggtaccgtggtggtattgaggcacatgaagaggagtatctcagtgaag

SEQ ID NO: 92572 - DNA, 396 bp, Oryza sativa
  Clone ID: PAT_MRT4530_9103C.1
atggcggttcaagcagaggtcgcgggggcgagcgggagacggcgccgggccgagcggcgacggcggtggggcctggcgccgtgcctcccctcctcctcctccggcggcggtgaatcaagcggcgcccctcgagcggaagactgcagcggtgtcgagcggcgcggcggaagacggcggcgcgatgcgatgctctacactgccggaggcgggtcgagcggtggaggcgccggaggcgggtcgagcagcaccatcgtcttctcttctccttcgccgagcagcggcgggcagcggggcggccagatctggcctcctccggttgccgcgacgaagaatcgggcggcgcggtccagcgtcgagcttctccggctccgacgaccggcaactcccctcccctga

SEQ ID NO: 92573 - DNA, 889 bp, Oryza sativa
  Clone ID: PAT_MRT4530_91040C.1
ttattttttaaaaggaaaaggagattattgcgtcagcgggctcggctcacggtggaccgggtgcacagcggcggttcacggaaacgaatggccgagatcgatctatccaaaacggacggccaagatctaacggtctacgaccggtctacggcggacggcgtcgatgacgtcagcggtgatgtcatcaccgacggcggctcggcctcgcgtgctcgccggcgaacgacggcgcggcggcgtgaacgaaggacacctacgggttgcgggcgacgcggtgaactcaccggtgaccaaagaagaaacggcggcgaccttcggcttgacgacgacggcggggctccggcgatctacagcgacgacggaggggcggacgaggacggcgacgagatgacgatcaggacgacggccttcccgagcgacgacgatgaccggagcgactgtggcacatggctggacgaacagcggtgacggcggcgctaggctacacggcgctagggctctaccgacaatgagagacgaaagcgagggtggcggcggcggctaaggggcggcggcgaaggcccacggcggccggcggcgcaaaggaaaggttagggttcagagagagagacgaatccgattcgagatcgaatccacgggtttccaaacgattttagccaatgattccaaaagagaaaaggtagaggggatctcggagatcatttcccctctatcaatttcaccggatcgagaaagggagttgacgacggccctctcagcgggaggacgcgcgagcacgcgcgagcggcgctcgactgcgggccggcttgggccggggagagagagagagaggtttgggccgactttcggcccaaagccaaaagagaactttttaaaacctttttcaatt

SEQ ID NO: 92574 - DNA, 866 bp, Oryza sativa
  Clone ID: PAT_MRT4530_91042C.1
cttttctcttttggaatcgtcggttaaaatcgtttggaaatccatggattcgatctcgaatcggattcgtctctctccccgaaccctcgaccttccttcgccgtcgccggtcgccgtgggcctccatcgctgcctcctagcccctttaaaaggacccccggtgtctccgctacccgccgctaccctcgtcttcgcctctcgccaccggtagagttctagcgccgtgtagcctagcgccgccgtcgccaccgttcgtccagccgtgcgccgccgccgctccggtcgtcgtcgtcgctcgggaaagccgccgtcgtgatcgtcaagtcatcgccgacctcgtccgcccctccatcgttgctgtagaccgccggagcgccgccgtcgtcgtcaagccgaaggtcgccgccgcttcttcctcgtcgccgtcgccgtccgttgatcttctgccgccgttttggtcactggtgagttcgccgcgtcgctctctacgcgctggtgccctccgttcgtgccgtcgcgccgtcgttcgccggcaagcttgcgcgcccgagccgccgccggtgatgacgtcatcgccgacatcatcgttgccatccgttcgtggaccgatagatctcggccgttcgtttttggatggatcgatctcggccgttcgtttccgtgagccgcttttgtatagcatggttcattgcggagcaccagactgagaagtggcggagataagcccacgggggtcgctggggagtccatgccttgtttataagggggtgattatgatccaggaaaggtgcgctgtggtggattgtgttgtgcgggggtactgtcacagctcctttccgaggtaccgtggtggtattgaggcacat

SEQ ID NO: 92575 - DNA, 382 bp, Oryza sativa
  unsure (1)..(382): unsure at all n locations
  Clone ID: PAT_MRT4530_91043C.1
tcagtcgagtgccgcatggtgcgtcgcggtgtccgtngcatgcaacacgtttaatgaggtntatagtagttgccacntatatagtagtagtatagtatatatagtagtatatccatgtactccatccggtcccatgtataataacttcattcggggatcctcccacttagtggctcctcccatataaataggtacgttccnaaataagtttttgtttttggttcgatatatttgtgtggatgtataccttaagatcaatgtaccttggtcaatgccggaggaggaaccaccaggtgaattatgggggttattgtggtctaacatgatgaagtatgacaggtgacaagatgggattctgggtcattaaaaaaaaaaaaaaaaa

SEQ ID NO: 92576 - DNA, 306 bp, Oryza sativa
  Clone ID: PAT_MRT4530_91044C.1
atggtggtggctcggggcgcgggggcgggcgatctggcggcggtggggaggagggcgggtgaggaagggttggtggagcgtggaggagaagtccttgaagtagaggacggagacgaaggtgatgaaggcgagcgtgagcgccaatgggagaaggagaagatggatgtgttcttggctctgcagtctgcaatgagaggagaggagtggcttttggtgatggggcctccccctttcttgcactttggtggagtaggcttgaaaatggttgaatggcgtggccgactactggttactggtagtgggtag

SEQ ID NO: 92577 - DNA, 1065 bp, Oryza sativa
  Clone ID: PAT_MRT4530_91045C.1
atggagacagtaagaggaacgcaccggtttacatttcacggctacagcttgtgcaagggcggcggcgccggccggtgcattcgctccggcaccttcaccgtcggcggctacgactggtgcatctgcttctacccggagggccagggcggcggcggcggcgaccgggaacacgtctcggtcaagctcaggctggtcacccgctgcgccacggccaccgcgttctacgagctccgcctgctcgaccaggacaccggccgcgccgccgccgtcgcccgggcctccggcgcgcccagggtgttcgcgtcgagcaatcccggcacagcgtgcttcggccgccgcgcgttcatggagcggagcaagctggaggcgtcgcccgcgtgcctgcgcggcgacagcgtcgtcatcgactgcgccgtccgagtcgtcgtccacgaccccgtcgtcgccgccgtgcggcgccgcgaggcgccggacgacgtcccgccgtcgaacatactccggcagctggtggcgcaggtggagtccgagggcgccgacgtgacgttcgccgtgcagggggagacgttcacggcgcaccgcctgatgctcgccgcgcggtcgccggtgttcaaggcggagctctacggcgccatgaaggagaaggacgccgaccacgtcatcgccatcgtcgacgtgcagccggccgtgttcaaggccctcctccatttcatctacaccgacgacatgccacccgacctcggcctcgccgccgctgacgacgacgacaccgacagaatcgacatggcacgccacctgctcgtcgccgccgaccgatacgccgtcgagaggctgcgggtgatctgcgagcgcgtgctccggcgaagcctcggagtcgagacggtgatcgacacgatggcattggccgaacagcatagctgcggcgagctcaaggaagcttgcctcgagttcatcgattctcatagcaagcgaatcgtggagagtgatggttacaagaacctcaagagggcgtgccctttgctcgtcgcagacatgtgggagaggatcgtcctatcacgtctagagtaa

SEQ ID NO: 92578 - DNA, 751 bp, Oryza sativa
  unsure (1)..(751): unsure at all n locations
  Clone ID: PAT_MRT4530_91046C.1
gtatctcagtcngctggttnacgattcnaanggtttgttgggattgcaggtcgtgagagctgctgagcgtggagattttttctttaaaacttttttgggtgatttgctggaatgggggatcatgtttcngtggatgttggggggctcatggcgtccccgggcgccggcgaagaaganacnggggcgctgattgggatngtggaatgccccntttgccacgangagganctcgccaagaacctcnagagcccctgcgcttgttgcggtagcctccactnctctcntnnanaatgtntnctnanatggtgcantganaaangagacatnatctgtgaaatctgccncgtgattatnaatttttcttctctgttgttcagtcatacnancctggctattctgccccccccccgtncntcctgatnagactactatanaaatcaatantggagattggtctatctctggcaatccgttggatttacntgatcctaaaaatcttggctatggctgcccgccccnccaccgnntacttgaanatgaattatgatgaatatnctgccnccaacaaccaatgctgctgccttttgccgctccctatttctaattcctaatggctcctcctactcttanggcatgcnctaanccatnactanttnttgatgatgaaaaaataacnccaccgcccaattttccnccctttgttttcctttttnaaagggctgccnggaattttttgcttgcccntgccnnt

SEQ ID NO: 92579 - DNA, 1669 bp, Oryza sativa
  unsure (1)..(1669): unsure at all n locations
  Clone ID: PAT_MRT4530_91047C.1
atggggctggatttgggagctctcgttctcaaatccggcgggctgttggtgtcggactacgactcgatcgtcgcgatcaacatcttcgtggcgctgctgtgcagctgcattgtgatcgggcacctgctggaagggaaccggtgggtcaatgaatccatcaccgcgcttgtcatggggctgatcactggaggtgtgattctgctcgtcagtggtgggaagaactcgcacattcttgtgttcagtgaggacctcttcttcatttatttgcttccaccgatcatctttaatgctgggtttcaagtaaagaaaaaacaattcttccgcaattttatgacaattattttatttggtgctgtggggacattgatatcctttgtgataatctctctagcaattggggctatcttctcagcaacagattctgtttgcaccttacaggtgcttaaccaagacgaaacacccctactctatagtctggtttttggtgaaggggttgtcaatgatgctacatctgttgtgctctttaatgcaattgaagacattgatattgctaattttgatagccttgttctactagcgttcataggaaattttctctacctattcttcaccagtacccttcttggagtagttgctgggttgcttagtgcctatattattaagaaactatgttttgccagacactcaactgacagagaagttgctatcatgatactcatggcgtacctttcatatatgctgtcgatgctgctagatctgagtggcattctcactgtgttcttctctggaatagtaatgtcacattacacttggcataatgtgacagaaagctctaggattactaccaagcacacttttgctactttatctttcattgctgaaatttttctatttctctatgttgggatggatgcactggacattgaaaaatggaaattagctagcagcagtcctaaaaaaccaattgctttaagtgcaactatattgggcttggttatggttggaagagcagcatttgtattccctttgtctttcttatccaatctaagtaaaaaagagacacgcccaaagatctccttcaagcagcaagtaatcatatggtgggcaggtctcatgagaggagcagtatcaatagcacttgcctatcacaagttcaccgcatctggtcatactgaattgcgaatcaatgctatcatgatcaccagcacagtcattgttgttctgttcacacgagtctggtttttggtttttttaccaagcctctcctcaatctcctcatcccaccaaggcctgacatagcagctgatctctcaagccagtcaatcatagacccacttcttggaagcctgctggggtctgacttcgatgtaggccagccctcccctcagaacaaccttcagcttcttctcaccattcagactcgctccgttcatcgcgtgtggcgcaagtttgatgatagattcatgcgcccgatgttcgggggccgaggcttcgttcctttcgtgcctggttcgccagtggagcggagcatccatggatctcaactgggcactgtgactgaggctgaacatagctgagtttgaggttcagaaggtgcaagcatttctgtaaattttcagagaccactcaattttgttgcangatacatttgtgtactggtgncatatct

SEQ ID NO: 92580 - DNA, 3154 bp, Oryza sativa
  Clone ID: PAT_MRT4530_91048C.1
gatgagttcaaactgaagatatattagtaaaaacaacagagaaataaacttgcagtagtgtgattgtacaaggtccagaccaacaacaggtttacaacaccatacaggattatttttgaggtactaaacctcataaaggagtgcaggtagctcctgcttcatattaagaaggaaaaaaaaccgaagagttgccacacaggattatgcatggctgcttattccactatcaaaagaaaagacctatatgaactcactcactcaagaatgccacaccaacaatggcacattattggttcagtaatagtaaaccgcagtttcatccttgggggatgaaatggttattccgaggctcgctccgcttgcatattcccgggcaagggaagcgaagagcagcagtagtagtgtccactttcatctcactccatttgcatctcctaatcttgcaaaagtatcagagaacaagattagcagtaccgtcattccgacctcccgaatcctcccaactccgccgccgccgccgcgaagcgcaagccgacatgggcgtgtacaccttcgtgtgccggagctccggcgacgagtggacggccaagcagctcaagggcgagctggaggcctccgccgccaccccctacgagctgcagcgccgcctcgtcgccgccgcgtccgccgccgactcggccgccggagtccagtcctccttctccatggtctcgcccagctccgccgtcttccaggtgatcattggtgccgttggtggtggtgccgcgattggtggaggtgctgctgctggtgccgcctccggtggagctgctgccgaggcccccaaggccgaggagaagaaggaagaagagaaggaggaaagcgaggacgacctcggattctccctcttcgattagatatcacttcgcttgtatcccacaaatttgtcatggagttcttgcagtagttttgttgttctatgcatatgaaccagaggcttgtgaacctgtgaaatcttcttaagagaaattgtgttctggaatgctggctgtatctgcgttacttccgttcgacttcatatttctgttatgttgtattttgcatcaacagaaagttataatcaagttacatgcaaaatatattcgtgcttgggatagaagtaccaaaaacctctgaaattcacggcttacattagcttgtcccttcagtagttttagcttcaagaacaacacatgtttcctccttagaagatggaaatataattttgaccccagtttcatcttcaatctgcttctgcatggttccactgcatgccaaagaatacgattgattctcagtcacagagagagacaggccagcattatcctcaactgaggatagttgaggataatgcatatctgaaacaggttcaagagaccaatacccttttcctttcacaaagcgcatcagaggagcatctacctgaacagaagaggaacacttttcagatagattggacctatctatgtccttattgaagctagcatcctccatagtatcttctgtggctaatttattttctggcaaggatgcgttgtaggtggaaacttcaataacaacattagttgttccatctgaggctgaattctcttccacttgtttgcttacaggacctgacatctcattaaggtcagcttttggagcagcggcttctgtggagattggcctccatctctgcacagcagactttcttttcttgtgttttgccgaattatttgaggctccttgtgcacctttcattacaagtgagtgaatactattttgattaacagatccctggaggaagcgcggcccggaaccccccgcgcatagagggcgagcgagccgactaaacattttaagtcgtgctccctcatcatcaattatcgatgtaggactaaacctgcgtgtctgacaaagatgaatctcgggaatgagatattcgccccattcatgttccgcgtatttttcgaatatcttccgagcatcaaatgaagcatccggacagtagcccttcctgaaccttgcattcatcacggtagcgtgcaacttcagttctcgcttctcatcacttgtaggtgctaggtttgagatgttgaatacatgatttatgagggcatctactaccgttttcatgctgccagacctctaagctgtatggagataggtctgtttttcaaggcttccattagtttgtccgatactgactggagcacactggaagccttagcaatgttctcaccctttagctccaacataagaaccgttaggtgaagtgattcgggaatagcaaatattgactcgtcgatgcggaaacctgcagctttatattcattagaagtcaggattgacctcttgaattcattcagcttatcaacaagttgtgggtggatacccaacggaagcgagatgaagtgagtgaagctagacattggactgtcaacagcggaggaggaaaagattggatcttcgatctccactcgcctcgcaagccttcccgaagcctcctccatctccgccgccgccgccgccgccgccgccgcgtcatgggcgtctacaccttcgtgtgccggagctccggcgaggagtggacggccaagcagctcaagggcgagctcgaggcctccgccgccaccccctacgagctgcagcgccgcctcgtcgccgccgcgtccgccgccgactcggccgccggggtccagtcctccttcgccatggtctcccccagctccgccgtcttccaggtgatcatcggtgctgttggtggtggtgctgccattggaggtgctgctgctggcggtgccgctgctggtggagctgccgccgaggcccccaaagccgaggagaagaaggaagaggagaaggaagaaagtgaagacgaccttggattctccctctttgattagattttgctttcatatatccagcaaatttgtcatggtcctcttgcagtagttttggtgtttgatgctcatgctcttgcagtagttttggtgtttgatgctcatgctcttgcagtagttttggtgtttgatgctcatgaaccagaaggccttgtgaacctgctaagtatgataagataatttgtggtcatgaatgttggctatatctgtgtgacttgcagtttatgtttaaaaaaaaaaaaaaaaaagcggcc

SEQ ID NO: 92581 - DNA, 156 bp, Oryza sativa
  Clone ID: PAT_MRT4530_91049C.1
atggcggccgccggtgcagggaacatgcaccggcaagaaccaatgtcatgggctaagataccaaatcctgatgaaatgacccagcaggctcaggcgccggcggcggaggaggaggaggaggcggcggctggactaaacgggagcagcggcaatgcg

SEQ ID NO: 92582 - DNA, 881 bp, Oryza sativa
  Clone ID: PAT_MRT4530_9104C.1
ttctagatgacgataggctggctcgccggcggggtgcgcgacgccctcgtctgtgtcttggctctctctctacgcaccccaggctctgctcgctctgctgcccgctcgggtgctgtggggtattgtccgccggtgtccggtgcccgccgccatgcagctacgccaggagatgtttatattttgggataatgttgttggagatttttacaggaaaaagcccaccagatcctatgttcacggacggacttgaccttgtcagctttgtggacagaaactttccggatcaaatattccaagtcatcgatgttcgtctgaaggaagaatgcaacaacttatctcgagataacatggtatccgaagatacaatctatcacattgttggtgtctttgctacaagtagcactttcttgcacacgcccatcaccatctgaacgattgaacatgaagcaagcagcaacccaaatacatgctatcaatgcgtcgcttcacggatggaatgaaaaaaagtatgcctcagttgatgagtagggtgaattgtacaacgtacatggacatacatacatatttttagagaagggaacatacatctgataaacacgtacgtattggttgtgtcttgtatagtataacaaattagcgtggcggcccgcgcaaattgcacattaccatgggcatattttttttctcacataatagcatatatattttcatattttattattaaaatatattaaaatagcaagataattttaaattctgtactaacttggtcaaagtaacccatgtgtaatatttatatactatatattatatatgtgatagttattaattattaattattttttaaaactagttatttataaaaaaaaaaaaaaaaaaaa

SEQ ID NO: 92583 - DNA, 347 bp, Oryza sativa
  Clone ID: PAT_MRT4530_91050C.1
ttttgttttttgatttttttgtttttttatttttttttttttttttttttttttttttttttttttttttttttttttaggccaaggggtttgcccttaaaatttgggcgttttcgaattatttttaccccccttttaaaaacccggaccctggtgggcttatgttttaccccaaaattggggggttgggccccacattgggcccaccgggggaaggaaaccccgacaggaggggtattagcaaaggggggatggcccaagaacacttgtgggaatggttaaagggggaaacctaatctttttccagagaaacccggggaacctaattcccggggtttggggaaaga

SEQ ID NO: 92584 - DNA, 513 bp, Oryza sativa
  Clone ID: PAT_MRT4530_91051C.1
atggagaagctcatcatcatcaagagtagcggcagcggcagcggcgacgcacgccatgacgacggcggcggcgaggtggagaccgtgcggtgcgcgtgctgcggcgtggcggaggagtgcacggcggcgtacatcggcggcgtgcgcgcggcgttctgcggcgactggctgtgcgggctgtgctcggaggccgtgaaggagacggcgcggcgcgacccggcgccgggcggcggcgtggcggcggcgctggcgtcgcacgcggcggagtgcagggacttcaacgcgacgacgaggctgaacccgacgctgtcgctggcgggctccatgcgccgcatcgcgcggcggagcttcgacaagaggacgtcggcgtcgtgccaggagcggcgcctcggcgcggcggcgtccaaggcggtggcgctcgccaggtccgccagctgcgacccgcgcttctgcagcctcctcgccgccgacgtcatcaacggcggcgctcctcccggcgatcggtgcagatga

SEQ ID NO: 92585 - DNA, 291 bp, Oryza sativa
  Clone ID: PAT_MRT4530_91052C.1
atgcagagtctacctgtcccactccagtggcctagcttgacacatggtggatcggcgagcgcgccacctgttgcccctgccggggattttcacgagttttcaacggcggcgagcggcgacgtgcgaaacctcgctgcggataccgggggaagtgacgatgtcaggccagattttggtctagatgtgcttcacgattcgtactctagctgcttcttctccaactccggcgaactcctctccttctccggcgtcggcaacaacccaaactccgacggagggccgatgagttag

SEQ ID NO: 92586 - DNA, 777 bp, Oryza sativa
  unsure (1)..(777): unsure at all n locations
  Clone ID: PAT_MRT4530_91053C.1
acgagttttccaaaaccccaaacccttgttcccttccccgtctccggttggcgcggcgcggggcaatggcggcggaggacaacccggggtacgccctgcgcgcgacgctggcgggccaccgccgcgccgtgtccgccgtcaagttctcccccgacggccgcctcctcgcgtcggcctccgccgacaagctcctccgcgtctggagcacctccgacctcgccagccccgtcgccgagctcgcgggccacggcgagggcgtctccgacctcgccttctcccccgacggccgcctcatcgcctccgcctccgacgaccgcaccgtccgcatctgggacctcggcgacggcggcggcggcggcggcggcggcgagccccgcctcatgaagacgctctccggccacaccaactacgccttctgcctcgccttcagcccccacggcaacatgctcgcctcgggctccttcgacgagaccgtccgcgtctgggaggtcaggtccgggaggtgcctccgcgtgctccctgcgcactccgagcccgtcacctccgtcgacttcaaccgcgacggcgccatgatcgtctccgggagctacgacggcctctgccgcatttgggactccgccaccggccactgcatcaagaccctcatcgacgacgagagcccgccggtctccttcgccaagttctcgcccaatgggaagttcgtgcttgccgncactcttgatagcaagctgaggctctggaatttctcagctgggaaattttctaagacatatactg

SEQ ID NO: 92587 - DNA, 587 bp, Oryza sativa
  Clone ID: PAT_MRT4530_91054C.1
gtgcctgtgtgggtgtgttcccctcccctccctgcttaattacattatctttaacgtaaagggggggggatcttcaacggtaggaaaaagacgctctattaaacctccaaagcgggtttcctaccgagaaaaaaagcccaaatccaaagctccccaaaaggctgtccaaaagggcaaaaagaaaaaaaaaaaaagggaaatagaatgatcccacatcggaaacccaccccaaagagacggggtatataagcgtctgaccgggcaaactccccagcgcgaccgcggcctcttgcacgagcgaaccggtggactgcgcaaaaccatgcgcggggctctcggaggcctcccgcggggagccaaactcggacatgcgggggacaaaggcgacaaaccggggccagtagtcccggggaaaaagggggggccccaaacaaaggggggtgaaggggaccatccggaactcccccccccggtcggggggggggggaaccacataaatcggccccccgccctcgtaccgcgggagggggttatcccccgggagagcgaaaccccccgcgcgcgccgcggggggcacctgcctaaaa

SEQ ID NO: 92588 - DNA, 294 bp, Oryza sativa
  Clone ID: PAT_MRT4530_91055C.1
atggcagacagatccagcgtcgccgatgtcggcagcgcgcggatccggcgcgtcgttgtcggcgtggtggtcaccgtggtcgctgtcgctagtgggggcgtcgggttgatggaggggaaaaagtacgggtcggcggatccggcctccccgtggcccggcggtggcggatccggcctccctgcccgtgcccgagcgccgccgcctgccaggtctggcacgtcggcggcggcgtcactctgccgccaccggcctgccgacgccgctgcggcgccgccgccccctccctccggctag

SEQ ID NO: 92589 - DNA, 378 bp, Oryza sativa
  unsure (1)..(378): unsure at all n locations
  Clone ID: PAT_MRT4530_91056C.1
agatcgtgagcggttcgcctnnnncccacaaacaatagttaaatttattagcaggtcaaaatttctggaaagaataccatcaactcatttgggtatacaagcctggagttattctttttgccacccagacacccctacaaatcccaaacttccatttaacctgtttacctggtttaaaggactttataaaacctaatatctggccctcccatgctacccggcccaaaactttgttttccattggaggaaaggaaggaaagctctgaatctctctctcttttttagctaactagctgattactgccttacacaggtaggccgccattgccacaaatacacatgttagggtgcgggacgggggagccttaaccggttccc

SEQ ID NO: 92590 - DNA, 280 bp, Oryza sativa
  Clone ID: PAT_MRT4530_91057C.1
atggcgtgcacggcgaaggcggacgggccggtggcggagctggagggcggagctcgcttgggcggccgacggcggagactgggctctcccaggcggctggaggccagtggcggagcgggcgccacggcggcgctgagacggagctttgcccgagcaatcacggtgcggcgtccccatggcagccacaatggcgttgaggagacggagcttgctcaggcgacggcggcggctgaggcaaagctcgcctgggcggctggcaacggaggcggagcatgccccg

SEQ ID NO: 92591 - DNA, 310 bp, Oryza sativa
  Clone ID: PAT_MRT4530_91058C.1
aaccctaaacagcaactatagaccatgtgttcaaccttgtttcttcccgttatccataaataggattgcaatttacggcatttactaaagggttttaaattgaaacccgaaacttgtgtaaccggactggtccccgaagcccctttttgtttttgaccaaaaaagtggacttggggttcccccctaattttacattaaaattgtttcccggggtgggcaaattttattacctttaaatgggttaacggggtggcccttttcccatttttttttttagacccgaagcttgtttggccaaatgagaaatgtt

SEQ ID NO: 92592 - DNA, 426 bp, Oryza sativa
  Clone ID: PAT_MRT4530_91059C.1
atggctcctatgggggtggcgcacctcgacccccacagtatggaggccatcgacagctcgagctcagtggtcatcaaggaggatgaggacgatacggtggagcacgatgatgggtttaagcggagagcagtttgtggtggcagcagtagcgcggcagggggtggaggctggaaggtgtggcgcggggaggagcagcacgacttgtggcagatcaaggaccgtcgtcgcggagctacttctatatccactggcatcgtcgtcaggccaccttcccctgaagtcaagcacgccctgcatctagacacgacgctcacccacaatacggagaggaggcacaccctcatcaacctaaatctaatgtcgagcaatctcagggcggcggacgacgaattcctcatgcagggtcaacaagaaaggatagtgtag

SEQ ID NO: 92593 - DNA, 5748 bp, Oryza sativa
  Clone ID: PAT_MRT4530_9105C.1
atggccgagcaaggaaaaacgcacgacctctcgccgagtgtgagcggcgacgacggggagccgaatccacgccgtcgagctcgtactcctccacctcctccgcgccaaagccctaagcagggggaggcgcttgagagggtcgacaagtccgcggcgtcaccggccgcaggtgatgcaggagaacggcgagacggggagcgtcgcctcctcgtctacggcgacggcagcacgcctcagggtgcgcttcaagctgctggcgcgctcctacgacacccgcctgtcgtccatgacccggagtctccagcccaacgatggctggaagacgtggccaacttggtcatgacggcacagcagcgcctgggtgctggtggacggtccgccaccaccaccaagacctccggcgccgctaccaccggctccgtgtcatcaaggcggagggcgcggcgagcggcggcggctgcacgtcattcggctgccactccctcgtctacaccgtcgactcgggaggatcagcatggggagccggatgcccgcctcaacatcgggcgccggtgtaatagccggcgtactccccgtgcaacggagggagcctcctcgtccagagtgtcacctcgacatggacgtgaagatcagccctccgtgcccccggccggtggtgttggctgtagagcctttgtggcgagtcttcggaatgtccgttggcccccaaggttccggcccaccatcaccgagaagtacgatgggagcgtcaaccccaccgagtttctccaggtctatacgaccgggattgaggccgctgggggtgacgacagggtcatggcgaacttctttcccatggccctaaaaggacaggcgcggggttggctaatgaacctgccacccgcgtcggtccactcctgggaagatttgtgccaacagttcaccatgaacttccaaggcacatatccgcgcccaggcgaagaagcggacttgcatgcagtacagcgaggcgatgatgagtcgcttcgctcgtacattcagcggttttgccaagtccgcaacactataccatgcatccctgcacacgcggtgatctacgcgttcagggggggcgtgcggcacaaccgcatgctcgaaaagatcgcttccaaagagccccagactaccgcggagctttttcagctcgcggaccgagtggctcgtaaggaggaagcgtggacctggaactcctccggttccggagtggcagcttcggccgcccccggatccgccgctcagacagggcggcgtgataggaggaggaagaagaggtcggaccgttccggcgacgagggtcatgtcctcgccgtcgagggcgctccgcgggccacccgaaaggggaggcctgcgagcgacaaaaagaaagaggctggtactcccggcagggagcgccccgccggcaggtggtgctccgtccacaacacctccctccacgatctcgcggactgtcgtgcagtcaaaaacttggctgagcgaacgaggaagtgggaggaggacaggaggcaggaacgccgtgacggcaagtccccggcggttccttccgacaaacggcgaagtgaggccaagaagaaggcccccgctgttgacattgatgatggtgatgatgatctaggtttccaagaacctggagccaccattgccaccgtcgatggaggagcatgtgctcacgtctctcgccggagcttcaaggctatgaagcgagagcttctgaccatggcccctacccatgaggcgatgcgtcgggcgcggtggtcggaggttgctctcactttcgaccagaccgaccacccaccgtgcattgcccggggagggcaggttgcgatggtggtttcccccaccatctgcaacgtgaagttgggacgtgtcctcatagatggaggagcggctctcaacatcctttcccccgcggcctttgatgctatcaaggccccggggatggtgctccagccgtcacaaccgatcatcggtgtgacgccggggcacacgtggccgttaggtcacatcgacctaccggtcaccttcggtggacccgccaacttccgcacggagcgggtgagcttcgatgtggtggacctcagtctgccctacaacgcggtcctggggagacccgcgttggtgaagttcatggcggcggtccactacgcctacctccagatgaagatgccgggccccggtggccccatctctgtccgtggcgaccttaaagtcgcgcttgcttgcatggagcagcgcgcggaccgcctcgctgctgcgtccaagcccgagggtggtgacgagaggcttggcccctctgcccccaccgccccgaggcagcggatggccacttgcgacgaggtcccggaagacgcgctcgtctccttcctgcgggcaaacgctgacgtcttcgcatggagaccagcggacatgcccggggtccccagggaggtgattgagcaccgtctcgccgtgcggccgggcgcaaggccggtccggcagaaagtgcggcggcaagccccggaacgtcaagccttcatccgcgaggaggtggctagacttttggaggccgggttcattcgtgaggtcatccacccggagtggctggcgaacccggtggtcgttcccaaggcgaacggcaagcttcggatgtgcatcgactacaccgaccttaacaaggcatgtcctaaggatccttaccccctgcctcgcatagatcagatcgtcgactccactgcggagtgcgaccttttgtgttttctagatgcatactctggcattgaggccaaccccgagaagattcgagctatcgagcggatgcgcccccccagcaaacttagggacgtgcaatgcgtcaccggttgcatggccgccctaagtcgtttcatatcaaggctgggagagaaggcgctacccttgtttaagctcctcaagcgctcagggccgttcacttggacggaggaagctgaaaatgccctcgcccagttgaaggcgtatctcagctctcctccggttctagtcgccccggagccaaatgagtccctgctactttacttagcggcgaccccccaagtagttagtgcagcgttggttgtggagcgcgatgaggacaatcctcattctgcgcacccccgctctgtgccgacttggcccgggagcaggcagggaggagaggcccccgagtcgaacggtggcctaaggcccccgacgaccggagtcggccctccacccgcttgtcaaacggtgctgggtgcccccgaccctcaggaaggccccaaggccactgagggaaggctgcacttaaagccctttggccccgaggctaaccctgtgctgactcgacccaggaaagagcagggagaagaggcccccgagccgaacggaggccagaggcccctgacgaccggagttggccctttgcccgcttgtccgacgatgccaggagtccccgacccccaggacggccccgaggccactgtgggagggccgctcctgtcatcctccgaccccgaggtcatcagcgcagaagacgagttcgccccgaggggccacttggacgaagaacgccccgggggtacggcccctaacgaggaggatcggccccgccgaaaggtgcagcggcctgtctactttgttagtgaggccctccgggacgccaagacccgatacccacaggcccagaaaatgctttacgctgttctgatggcctcaaggaaactgcgccattatttccaggcgcatcgggtcactgtggttacgtcttaccccctcggtcaaatcttgcataatcgggagggtactggacgggtggtgaaatgggcaatcaaactttctgagtttgatttgcactttgaaccacgccacgctatcaagagccaggccctcgccgactttgtggcagaatggaccccggctcccgagctcgtctcggtccccgaagccggctcgggtccctcgcagctgcctcacaccgcccactgggtgatgcagttcgacggctccctgtctcttcagggcgccggtgcgggggtcacgttgacctctccgagtggagacgtcctcaaatacttggtccgcctcgactttcgagcgaccaataatatggcagagtatgagggactccttgccggactcagagtggcagctggactggggatccgccgcctcctggtgttaggcgactcccagctggtcgtcaaccaagtctgcaaggagtaccggtgctctgacccgcagatggacgcctacgtgcgccaagtacggcgtatggagcgccattttgacgggattgagcttcggcacgttcccagacgggataacatgatggccgacgagctctcacggctcgcgtcctcgcgagcccagaccccaccgggcgcctttgaagaaaggcttgcccagccgtcggcgcgacccgaccccttaggggagacggatgcgcctgaccggcccccgaggcccgtcggagtccaggcctcgggacccaaggggagtgctcccagctcccttagattgattacttggatcgccgagatccaagcatatctcacagataagactctacccgaggaccgcgaagggagtgaacgcgtccgtcgcatctccaaacgctacgtgctggtagaagggaccctctatcggcgcgcggctaatggaatcctcctgaagtgcattcctcgggaacaaggcgttgtgcttcttgccgatatccatgaaggcgaatgcggagcccactccgcctcgcgcaccttggttggtaaagcttttcgccaaggtttctattggccgacagctctcaatgatgcggtcgacctggtccgccgatgtagagcatgtcaattccacgccaagcaaatccatcagccggcccaggccctgcagaccataccactttcgtggccatttgctgtctggggactcgatatcctgggaccgtttaggcgggccccgggcgggtttgagtatctgtatgtcgcgatcgacaagttcactaagtggcccgaggcttatccggtcgtcaagatcgataagcactccgcacttaaattcattaagggcatcacggcccggtttggagtgcctaaccgtattattacggataatggcacccaattcactagtgaactcttcggcgactactgcgaagacatgggcatcaagctctgcttcgcctcacctgcccaccccgaaagcaatggccaagtggagcgcgccaatgcggaaatcctcaaaggccttaaaaccaagaccttcaacatactcaagaagcacggcgattcatggatcgaggagttgccagcggtgctctgggcaaaccgaactacaccaagccgagcaaccggggaaacacctttcttcctcgtctacggcgcggaagcggttctcccatctgagctcaccctgaagtctcctcgggccaccatgtactgcgaggctgatcaagatcagcttcgcagagatgacctcgactacttggaagagcgaaggcggcgcgcggccctccgagccgcgcgctaccagcagagcctgcggcgctaccatcagcgtcacgtccgggcccgatcactctgcgtcgacgatctcgtcctacgccgcgtccaaacgcgagctggattgagcaagctctcaccaatgtgggagggtccgtatcgagtggtcggcgtcccccggccgggctccatacggctggacacgggcgacggcactgagctgcctaacccgtggaacatcgaacaccttcgtcgcttctacccctga

SEQ ID NO: 92594 - DNA, 828 bp, Oryza sativa
  Clone ID: PAT_MRT4530_91060C.1
tcacagcccgaggaaagcatacagcaattgattcagagtagttagcttaactagctcctctgctttaattagtttgccccttccaggtagagtatatatgggtagtataggaggagtagcggtggtgctggtgggcatggcggcgatgctggtgggcatggcgtcggcggcgacctacaacgtgggcgagccgggcggcgcatgggatctcaccaccaactacacaaactgggtcgcccaaaagaggttccatccaggcgaccagatagtgttcaagtactctgctcagcggcacgacgtggtggaggtgaacaaggcgggttacgactcgtgctccacctccacctccatcgccacccacaccaccggcaacgacgtcatccccctcacctgccaccggcacccgctacttcatctgtggcttccccggtcactgcaccaccaccggcaccggcaacatgaagatccagatcgacgtcgtgcaggcagattcctcctccgccccggcgcctgtggccaccactactcccccttcgccgccctcctccgccgccacctccctcaaggccaccgccgcagctgccgtcctactcgccgccctcctcatcatggcttaattaattaatactcctagctgctagcttatttgttttcttttccgatcctgagagagccatgtatactaccagtcccagctagctttttgcttgtatcctcatccactccggattgattgtacttatatgattagtattttagtctttagaggaggcctttgattatatatatgtctagtattatgttgattaaaaaaaaaaaaaaaaaaaa

SEQ ID NO: 92595 - DNA, 289 bp, Oryza sativa
  Clone ID: PAT_MRT4530_91061C.1
aataatggattttgcccttttaaaacaagggcgccttgctaacacatgcttttattatttaaccttgcatttacatccaaatccttccaggcacaccatcgttaataaccttttcttttccttttccctttttaaaatactttattgccaccaataaaccaagccctaatgtgtcttttaccacacttaatattttcacccctggaacgtacactttggtgcttcaaattttcccctcatttattttaacttatacacaccagaaccgctttcttcttgggggaccata

SEQ ID NO: 92596 - DNA, 1380 bp, Oryza sativa
  Clone ID: PAT_MRT4530_91062C.1
atgcgggtgatcgtcggcgccgccccgcgcggggtggagggggcgcgcccgggcggggacctgctgtgcgtggtgcgcgccctcctcaagaagatccgccgccgcgtcctcgtcggggacagggtgctcatcggggccgtcgactgggccggcggccgcggggtgatcgagggcgtcttcgagcgccgcgccgaggtggccgacccgcccgtcgccaacgtcgaccgcctcgtcctcctcttcgccctcgaccagccccagcccgagcccgctacgctcaccaggttcctcgtcgacgccgagtccaccgggatacctttcgtgctcgtcttcaacaaggtcgagcttgtggacgacaagaccatatcatactggagagataggatgaagagttggggatacgatccactatttttaagtgttgatcagaaatcaggattatccgctcttgaagaaacattggaaggacagacaactgtaattgttggtccaagcggtgttggaaagtccagtctgatcaatgctttgagaagcaaccagaacatctcagaagaagatcccatacataaactagttgagcagaatagtaaatggtttggtgaacaacgggtcggtaccgtgtcgaagaaaagcggcaaaggaaagcacacaacacgtcatgtttcattgcttcctatagctggtggaggttttcttgctgatactccaggatttaaccagcctagcctgatgaaagtgaccaagaagggtcttgcagaaacatttccagagataagaaagatgcttgcagagaatgagccctcaaaatgtttatttaatgactgtgttcaccttggtgagcgtggatgtgttgtgaaaggtgactgggaaaggtatccatactatctacagttgcttgatgaaatcaaaatcagagaatcattccagttaagaacatttggaacaaaaagagagggtgatgtcagatacaaaacaggtgtcatgggtgtaaagcaagcagagcctcgtcttcaactcaaaaagcacagaagggtatcaagaaagaagattaaccagtcaattcttgatgatattgatgatgagctcgacgaagacaactagtttgatgtcaagcagcggtctaggaaacgatgacctaattactttctgatctaacggctacaaacattgggaacctatgtatgtgttgtacatagctggcgtaatctgtagctccaccatgccctttaacttgtatgctgaacagtgaacacttgcaaatagaaatctgtaggcaaaggaaactgtagaaatattttcctgttaatggcgatgagtattttgtttccaaaaaaaaaaaaaaaaaaaaaaaaaaaaaaaaaaaaaaaaaaaaaaaaaaaa

SEQ ID NO: 92597 - DNA, 490 bp, Oryza sativa
  Clone ID: PAT_MRT4530_91063C.1
ttttatcttatctgcagtaaaacctatgagtgaacggaacatgaaggattcctctgctcaaaggaataaaacatttgaagctactaatatgatagcagctgaaaaagctgcttccagaccagcagatcaatctgagcacattgtgaaatgtggtccttctcacaacccaatgtgtaggcctaaagatcttttatccacctcatttggccatgtaaagaagccctcacaattgtacgggcaaaccaatgagcaggatatgagaaacacttcgagcaacaaagcttccacagatggtagcaagttgaaacccaatgagtgccagactgtatcagtcaagacaggaagattagttgatggcagcttaactatgccagatgctctgatggacaaatcttcaactgttccagagttggatttcatatggcaaggtggttttgagctgcagaggactggaagatctcctgagctatgtgatggttttcaagctcac

SEQ ID NO: 92598 - DNA, 216 bp, Oryza sativa
  Clone ID: PAT_MRT4530_91064C.1
atggagctatggagtattgtccttcatgggaagaagcggaacacgcacagggaagaggcaccatggatcgaggacggtgaagctgtggaccatctagaggacaaagggacggtaggtccccatcttgacctcccggacattgaagtggaagtcgaggagggccttaaggagggagctcttcccatccgactagctgccgatggccacaatctctaa

SEQ ID NO: 92599 - DNA, 507 bp, Oryza sativa
  Clone ID: PAT_MRT4530_91065C.1
atggtagaacttcaggggcacagggaaggattttcgataggctttgatgagcaggggaacagtttggtgaggtggtggggaatagacctcaaatcggcggcggcggcggcggcggtggcgagccaagatttacatcggcggcgacggcggcggtggcagcgacatggatctcctaccgtcctccagcagccagatgatagcacgggcgttaccggcggcgtgccattctcccactatttctacttcaagtggttgagttacgactactacctggtcctcaaccagaggcctctgaggaacctaagggaacttcggctgaggacgcccagagcggataaggccttgttggatcatgtagagacaaacgaccatgtaagacctggtcatgtcatgggtccaagagccttatcctccgagaacgattctccgacgacaaggctagggaaaattctattcgacattgtggaagactccatgtctctatggttctacaccaagatcgactaa

SEQ ID NO: 92600 - DNA, 117 bp, Oryza sativa
  Clone ID: PAT_MRT4530_91066C.1
atgtcgacaacaagcaacaccggctccggccaacaggatgtagggttattacctgacagttcaggggcccgaacctgagtgatgacgtggcatgctgacaggtgggtcccacactga

SEQ ID NO: 92601 - DNA, 1998 bp, Oryza sativa
  Clone ID: PAT_MRT4530_91067C.1
atggtgaacacccgcactggaagtggaagtggaagtggtcacaatgaaggagatcccacacttgcccaagagaaggtttcctttgcttcgcatcagttgcatggtcctgttgctgagtggtgggatcactttcgtctaaacagagccgcgggagagcctatcacttggcgggagtttactgctgctttcaagaagacacacataccatcaggtgttgtggcacttaagaagagagagttcagagcattcaatcggggatcccgttctgtcacagagtaccttcatgactttaatcgcttagctcgttatgccccagaagatgttcgcactgatgaagagcgtcaggagaagtttttagagggattgaatgatgagttgtcttatgcattgatggctatggagtaccgggatttccagcagttggtggacaaggcgagtcgccaagaagacaagtacaataggatggaacagaagaagcgtagggctgctcaattcaaggctcaacagggtagtagccagaggccgcacattgctatgggacctcaagctgcaccatacccacagggaggatcctcttcagttgttcgccctcaacgccagttctacaacaacaacactggtaatcgcagcaacaacaatcgtaatgtggtcactcgtcctgtagcagctccaacacagaatcagtctgtcaggaaggaacaaggaagcaagccaggggtgtgcatcaattgtggtgatccaggacattatgctgataagtgtccaaatcctcgacgtgtgaagaatgctcctgtccagaatgactccaatgctccagcaccgaaggctcgtgttaatcatgttgtagctgcagaagcccagaatgcacctgatgtggttttggacgctacagcttcggaagatccactcttcgtggaagttgaagccgacgtttgggaaagcgagcaaggcaagctgggctcggggtgcatggttttgatggtagcacctcggccatataaggaccggtcttcgggcctctgttgcaaagcactaccgtacttccacatgtctagtggggcaaatgaaggctacacgagctgcggcccggtagtcgagatgtcatggcagagggttggtgccctgctgctaggggctcagtcctgcctgcctgtcccggaggttccggccgtaggcgggattgggtcgatggccggcagcgtcacccgtcgtggtttggacatgactggcttcgtcttggagttgcggggcatgtgcgtggttctggggtatccacacggagtggactaccaggccaggccgcttccggagcaggagggtgacgatgcagagccccacgctggttgggaggtcactgcagtgatcctctctggctctcccgagcggacttcgctggcagtcaccgcgggtggagattccttccccaccgcttgccagaacgccgctctcctcgccatcggcactcttcaccagcgctacccggacgagttgcaacactcgccctaccgctaccaccctcgtcgcggaggagcccgcgactacgccaccttccgggatgctagctcagaggatgacgctaccatcgtgcacctggcgcggatggtggaggcgtacaacgcggctcgtatcgacttccaccagatggtacgtcgcgggatggtcgagaacaacatgaagatcctggaactgcgccaggagaacctgcagctcaagaaggacctagacgcggtggaggcgcagctgcatcagctcaagatcgcccagggaaaggtctgtcgccccaagcgtcgccgcgtctgccgcagccagaagatcaccgcccgcaagagcacctccaggcccgagcttgttcgtcagtccctggcgtggacttgcttcatcgagacccctcgtgccgagcccgcgcccgtggttccccaggagggggaagcctccggcgtcggtagcacggaggatgcgctgttgctcaccttccgtcctggcccgtcgcagcagtag

SEQ ID NO: 92602 - DNA, 265 bp, Oryza sativa
  unsure (1)..(265): unsure at all n locations
  Clone ID: PAT_MRT4530_91068C.1
ctggggcaaaantttaacaaattactagaacttagnttatctcaactgcagncatgcaaaccaccatttgaacgnggctcactttttnttggcggcagcttggtcaccttggcaccggttgggcctttttctcacgttnttatgacgcaacagcaccgtttgnctanngtacggaccaaaaacgnccaatggnggactagggagtttnanaaccatgggtttgtaggattattttnccaancatttttacntttttaaagnattt

SEQ ID NO: 92603 - DNA, 602 bp, Oryza sativa
  unsure (1)..(602): unsure at all n locations
  Clone ID: PAT_MRT4530_91069C.1
attcccggttcgtttacttgtccgactttagataccatcctccnccgtcgccccctcctcctcctccgtcccccgccgggcgccaccgttcttccccttcccttcccggccgaggcgatcgatcgatccacgcgcccgcgcgccaccgccgctgatcataacaagcaccagcagcctcccttctccgcgcgcgcggttagctcgcggctcgccatggcgcccaagacgacgacggacccttccacgtccaccccgccgccgccgggcgcgttcaggcgctgcagcgggcgcgtgcgcggcgccggcatctcgtgcgcgggctgcttcggcgacgcggagtccaagcggcggcggcgggtggcggtctacaaggcgtacgccgtggagggcaaggtgaaggcctcgctccgccgcggcatccgctggttcaagcgcaagtgctccgccatcttccgcgcctagcgctgatccctccaagaacaacgccgccaatgccaacgcatacgcgcctcgcctcccctctcctcctcgtcgaaggtaatttttgaaagaaaaaaaagagaaggaaaaaggaaaacacagggccttatttaataatgcag

SEQ ID NO: 92604 - DNA, 317 bp, Oryza sativa
  Clone ID: PAT_MRT4530_9106C.1
agcaattggtgaagaaattgacaggaagggtctgatataaagactatatatagaacatgttagcgtgtatataagatgctatagatcggatctgaaacgcgtggaggggagctatggcgcaaagaggtctttccatgaatagaacacataatgcttagaggtccgagattaatgctctggtctatgcatgtatatgcccagatgcctacgctcatcatgctctggttagggacactgccatttgctgcagctgaacgcgatactagtacaaactgctcagagggctaattgctgtacgacatcactttctacacaag

SEQ ID NO: 92605 - DNA, 3388 bp, Oryza sativa
  Clone ID: PAT_MRT4530_91070C.1
atgaaggcaaggagtgaaatcttcaactcagtatcagatgctacacggagtgaaaactgcaagcaccggttaccaggcaatgccatgtcttgggagatgatccaatgggaaggaactcatcaaggtcaaaggagtaaaggaatacgttgaatgctaaataatgacaaccatggtattctcatgatgacaagcatgtcgaagtcagctagaggtgcaaccagggaaaagtcatgtgaagagaagattccatctataacaggagatcgagccaagcagtccagagtggagaggttttgctaggcaagtttgttatagaagacgcgacggaagaagtcagataagaagagaagcccgcccaacctatcttcttgctagcctcctcgaatctcggggacgagattcttgcctccgtttcgcggggaaatcaccggagacgcgtcttcgccggcaaaacagtggcgttgccgccactgtaccgccttcagtcgccccggtcgccgcgtcagagcgtcggccgatgtcgccgtctccttcgtcgacgtcgcggcgtcgccctccaccccggcctgccctcggtttcgccggaacgccgtcgcccgcgccgcctctccctcggtcttgtcggcacccactccggcagccccttccgccgtgccagtgcgccggccgacgtcgccgtctccacctctggcatcgcagcggcaaggtcgtcctcggcatcgcttcccctccatccaaacccctccgcggtccatcgtcgtcgcctccgttcgttctcgtcgtcgacgtcccgtcggtcgcccggctcgtcgtctcgcggcgtcgcctccgtcgtcggattcgcagcggcgcgttccacgtcgtccccgtctccgtgcagctgttgccggctgccctcgtcgcttcctcgccggccccggtcgtcgtcgtcgtcgtcctctcgtcgttcccggtcgtcgtggcgttcgtccctccgtcgagccgttctcgtccgtcgtccgcgttcgtcaagcgagccgctgcagccccgtcgtcgtcttcgtcctcggctccgcgtcgtcaagcattgcgccggccgcgtctcaccttcgtccaaggatcgccgctgaagtcgtcccctcgccatttgtctccgtcgttcccggccgcctccgccgcgcccgttcgtcgttgtcgttcccacgcctcgtcgcgtggtggtaaggatctctcctctcgctgccccgtcctcgtcctttcggtgtcgcccgtgcccgttgtgcggttgtcagccccgcccgtgtggtgtctagtggagtccgtttgtcggccactcgcctcggttgacacacgggatctgcttccgtcgacccgtggaccgtatctgtgtactcggttttctttttatgtattgttattgcttctttataggcttgtagctttgcttgtgtgcttcgcgtagctttcgtcgttccggaggttcccgaagcgtggttcgtggtcgtcgccgaaggttcggaaggccgttctctcccggccactataaggattaagctcgggcctctgttgcaaagcactaccgtacttccacatgtctagtgggacaaatgaaggctacacgggctgcggttcggtagtcgagatgtcatggcacagggccggtgtcctgctgctaggggctcagtcctgcctacctgtcccgggagttccggccgtaggtgggattgggtcgatgtacacctctgatcagagtataatctattcgaatagccgcgccctcggttatgggcaagccgagcaatgtacccaaatggccggcagcgtcagccgtcgtggtctggacatgactggtttcgtcttggagctgcggggcatgtgcgttggcctggggtatccacatggagtggactaccagggcaggccgcttccggagcaggagggtgacgatgcagagccccacgctgcttgggaggttactgcagtgatcctcactggctctcccgagcggacttcgttggcagtcaccgcgggtggagattctttccccgccgcttgccagaacgccgctctcctcgccatcggcactcttcaccagcgctacccggacgagttgcagcactcgccctaccgctaccaccctcgccgcggaggagcccgcgactacgccatcttccgggatgctagctcggaggatgacgctaccatcatgcacctggcgcgcatggtggaggcgtacgacgcggctcgtatcgacttccatcagatggtgcgccgtgggatggtcgggaacaacatgaagatcctggagctgcgtcaagagaatctgcagctcaagaaggacctagacgcagtggaggcgcagctgcatcagctcaagatcgcccagggagaggtctgccaccccaagcgtcgccgtgtctgccgcagccagaagatcaccgcccgcaagagcacctccaggcccgagcttgttcgtcagtccctggcgtggacttgcttcgtcgagacccctcgtgccgagcccgcgcccgtggttccccaggagggggaagcctccggcgttggtagcacggaggatgcgctgttgctcaccttccatggtgacgaccaggagaaatgctaacaccggtgatggcaaccaacctgaaggcagcaaccaccaccaccagggcagcccacctccacctcctcctccgcctccaccaccaccaccagataccaacgccattctcacccaaatcctcgcccagcaggccaacatgatgactgctttcctccaccacatccaaaatccgccacaacataatgctccaccaccacccccacaacactctaaactcgccgagttcctccgcatccgcccacctaccttctctagctccaacaaccccatggatgcgttggattggttgcatgccgtggggaaaaagctagacactgtgcagtgcagcgatgaggagaaagtcatcttcgccgcccaccagctgcaggggcccgcatctctatggtgggaccatttccaggctacgcagccagaggggcagcctattacttgggcccgtttcaccgccgctttccggaggacccatgtgcctgccggagtcatggcccttaagaaaagggaattccgggagttgaagcaaggcaaccgctctgtgatggagtatttgcatgagttcaacaacctggcccgttacgccccggaggatgtgcgggaagatgaggagaagcaagagaagttcttggcaggaatggaccctgagctgtccgtccgtctagtctccggggactatccggatttccaacgtctggtggacaagagcatccgcttggaagccaagcacaaggaactggagtcgcacaagcgccgcttggcgaatttccgcaatcaacagatgctaaccaaagg

SEQ ID NO: 92606 - DNA, 237 bp, Oryza sativa
  Clone ID: PAT_MRT4530_91071C.1
atggcggcacaactatttgtggaaatccggcggctcgatcgggtgacggggcccacacgagcgtggcgcgatgaggcgcggcgcatggtcatgcttggtgcagcgcacgggctgggaaggcgcgcgcgtggctcagtagcgatcggggaggagcagcgctgggtcgggaagacaaccatggttaccttgcttgtctccaagcggcgcgccattggtgcgccccaggctctagtgtaa

SEQ ID NO: 92607 - DNA, 1549 bp, Oryza sativa
  Clone ID: PAT_MRT4530_91072C.1
agaaaaaaaaaaaaaaaaacacagacggactctcgatcgtcttctccacctgcgccgccgcagcctcctcaactcaactctcttcggcagcgagcagcagcgccttccaccatgccgaagcagatccacgagatcaaggacttcctcctgacggcgaggaggaaggacgcgaggtcggtgcggatcaagaggaccaaggacgccgtcaagttcaaggtgcgctgctccaagtacctctacaccctctgcgtcttcgacgccgacaaggccaacaagctcaagcagtcgcttcccccgggtttgactgtccaggaggtttaagcatcaaagccagaccatgctgtttgtagcagcaggattgcttgctcccgttcgcattagtagctattagatgctgaaattttatctgtcttgagttttgaatgtaacacccaaagtttatgtgctgaaccttcttcgagtcagattgcgctgttactcctttctggagatagctaccagtcgtactgtccctaaacacactgaattttgctccatttctctctaattgctggagtgtttcagaaaaaaaaaaaaaaaaaaaaaaaaaaaaaattgtaaaccttactgaggagttagattccatagataatggccttcttgaagaagcctcaaacatcataaaggcattaaacaaagcactagacctcttggagaagactcagcttccttctgggccttatgccaaggagccgcctgcgatgaagatacctgccggggctgggggccccgttgcacagggttgcgctcgacatgttactgacggtgtatgttagcgggggtgagaagcagcgggccaagacgagagtgggggagtaatcccctggtgaagaagctggagtaaaatcagctaccattgaattagaaggaggtatgcctatgggtatctctctttttttcgcgccggcgaaagaggccgcgtccaccggcctcctctccacccgctggcgctcgctctggcgctccaccggagccgtcaacctcgccgtccggcctcatccaccggggcaacgacgacttctccctccacgacgcgtttgtccgctccgcccacgccgcgctcgccgacgtgttcctgcaccgcgacccgcaggattgggagaggaagcacgatgtggtcgctggtgtcgtctcccacccagtggcgcgccgcgtcgaggagctccgtgtcgccgccgtcaagtccgccgacgagccgtcgtccgacaaggaggtcgcggagatggaaggggaattccacctctccctccgcagcaacacacagccgtcggagacgctccacgtgctcgatgtcaaggacttgcagggcgtcgtcgactccgcgccggcgctcgccaccgtgcacctcgagtccgtcttcctcgccggggcgaaagaagatggctgcgcccgcgcccgcccgggcagtgcaccacgtcggcgtgcgtcgggagatagaggaaaagaaaagaagagaaagagaggaactcgtgtgctgggatgccgccgtgcgtcgtcgctgtcggagtga

SEQ ID NO: 92608 - DNA, 4883 bp, Oryza sativa
  Clone ID: PAT_MRT4530_91073C.1
atgtcatggcacagggccggtgtcctgctgctaggggctcagtcctgcctgcctgtcccgggggttccggccatggccggcagcgtcacccgtcgtggtttggacatgactggcttcgtcttggagctgcggggcatatgcgtggtcttggggtacccacatggagtggactaccaggccaggccgcttccggagcaggagggtgacgacgcggagccccacgctggttgggaggtcactgcagtgatcctctctggctatcccgagcggacttcgctggcagtcaccgcgggtggggattccttccccgccgcttgccagaacgacgctctcctcgccatcgtcactcttcaccagcgctacccggacgagttgcagcactcgccctaccgctaccaccctcgtcgcggaggagcccgcgactacgccaccttccgagatgctagctcggaggatgacgctaccatcgtgcacctggcgcgcatggtggaggcgtacgacgcggctcgtatcgacttccatcagatggtgcatcgcgggatggtcgagaacaacatgaagatcctggagctgcgtcaggagaacctgcagctcaagaaggacctagacgtggtggaggcgcagctgcatcagctcaagatcgcccagggagaggtctgccgccccaagcgtcgccgcgtctgccgcagccagaagatcaccgcccgcaagagcacctccaggcccgagcttgttcgtcagtccctggcgtggacttgcttcgtcgagacccctcgtgccgagcccgcgcccgtggttccccagaagggggaagcctccggcgttggtagcacggaggatgcgctgttgctcaccttccgtcctggcccgtcgcagcggagaaatgctgctaccggtgatggcaaccaacctgaaggcagcaaccacaaccaccagggcaacccacctccacctcctcctccacctccaccaccaccaccagataccaatgccattctcacccaaatcctcgcccagcaggccaacatgatgactgctttcctccaccacctccaaaatccaccacaacataatgctccaccaccacccccacaacactctaaactcgccgagttcctccgcatccgtccacccaccttctctagctccaacaaccccgtggatgcgttggattggttgcatgccgtggggaaaaagctagacacggtgcagtgcagcgatgaggagaaagtcatcttcgccgcccaccagctgcaggggcccgcatctctatggtgggaccatttccaggctacgcagccagaggggcaacctattacttgggcccgcttcaccgccgctttccggagaacccatgtgcccgccggagtcatggcccttaagaaaagggaattccgagagttgaagcaaggcaaccgcttcgtgatggagtatttgcatgagttcaacaatctggcccgttacgccccggaggatgtgcgggaagatgaggagaagcaagagaagttcttggcaggaatggaccccgagctgtccgtccgtctagtctctggggactatccggatttccaacgtctggtggacaagagcatccgcttggaagccaagcacaaggaactggagtcgcacaagcgccgcttggcgaatttccgcaatcaacagggtgctaaccaaagggtccgctacaccaatccctatcccgggggatcctcttcgcagcagcaacaacagcagcagcaaccccgctctgcgccccgacctcaattcgtggtgcgcgtcccacagccgcagcagcagcagaatcagcaagggactcgtgcgccccgtcctcctacgccaacggtgcagcctggtcaaggccgcagggacgctcaaggtcagcagcgtctgtgcttcaactgcttcgagcccgggcactttgtggataaatgcccgaagccaaggcgccagcaaggccaagcgcctccccgctccaacaacggtgggaaggatgtcattcggggtcgtgtgaatcacgtgacggccaaggacgtgctgacaactccagacgtcatcgttgggagttcggagatgtgtttccggaagaactacccggtatgccgcccaagcgagagattgagttccggatagatcttgctccaggaatcactcctctgcacaagcgaccctaccgtatggcagcaaatgaactggccgaagtaaagaaacagttggaagagttgaaagaaaaggggtacatacgtccgagtacttccccctggggtgctcctgtgatttttgtagagaagaaagacaagacgaagaggatgtgcgttgactacagagctctcaatgaagtcaccatcaaaaacaagtaccctcttccccggatcgatgatctgttcgatcagcttaaaggtgccactgtattctccaagattgatcttcgttccggatatcaccaattacgtattcgtgaagaggatattccgaagaccgcattcaccacgcgatacggactgtatgaattcacggtgatgtcgtttggtttaaccaatgcacctgccttcttcatgaacttaatgaacaaagtgttcatggaatacttggataagtttgttgtggttttcatcgatgacattctgatatactcacaatcagaggaagaccatcagcaccatctccgtctggtgttgggaaagttgcgggaacatcaattgtatgccaaacttagcaagtgtgagttctggttgtccgaagtcaaattcttagggcacatgatatctgctaaaggagttgctgtggaccccgaaacagcgaccgccgtcaccgattggaagcaacccaagacagtcacccaaattcgcagtttcttaggtttggcaggatactaccggagattcatcgagaacttctccaaaatcgctcgacccatgacacagttgctgaagaaagaagagaaatttgtgtggagcccgcaatgcgagaaggcgttccaaactctcaaagaaaagctggtttcctcgccggacggtcatgtggtggcctatgcctcacgccagctacggcctcatgaaggcaactaccctacccatgacttggagttagccgcggtggttcatgctctaaaaatctggcggcactatctcattgggaatctctgtgaaatatatactgatcataagagtttgaaatacatcttcacccagtcggatctgaatcttcggcaaaggagatggttagaactcatcaaggattatgatgtgggaattcactatcatcctggtaaggccaacgtggttgccgacgctctaagtcgaaaaagccattgccacactcttaacgtccgtggcattccacccgaacttaatcaacagatggaagccctgaacctaagcatagttagtcgtggattcttggctacgctggaagccaagcccaccttgctcgatcaaatccgcgaggctcagaagaacgacccggacatgcatggactcctcaagattatgaaacagggtaaagccgctggtttcacagaggatgaacacggaaccctatggaacgaaaatcgggtatgcgttccagataacagagaacttaaacagctgatacttcaggaagctcacgagagcccttattccattcactcgggcagtacaaagatgtacttaaacttgaaggagaaatactggtgggttagcatgaagcgggaaattgcagagtttgtggccctatgtgatgtgtgccagcgtgtcaaggcagagcaccaacgaccggccggacttctccaacctctccaagtaccagaatggaaatgggatgaaattgggatggatttcatcaccggacttccaaaaacccaaggtggatatgattctatatgggtagttgtggatcgattaaccaaagtagctcgatttattcctgtgaagaccacctatggagggaacaaactagccgagctctacttcgctaggatcgtgagtctccatggcgttcccaagaaaatcgtatctgataggggaagccaattcacctctcatttctggaagaaactccaagaagagttgggaacccgattaaatttcagcaccgcgtatcacccgcagacagatggacagaccgagcgtctatatcagatcctagaagatatgcttcgcgcatgtgtcctagatttcgggaagacctgggataagagtctcccctatgccgagttctcctacaataacagttatcaagccagcatacaaatggcaccttatgaagcgttgtacgggcgcaaatgccggacaccactattgtgggaccaagttggagaaagccaagtgttcgggactgatatcctgagagaaactgaagctaaagtcagaaccattcgggataatttaaaggtggcccagtctcggcagaaaagttatgcggataaccgacgccgtgatatggaattcgcagtggatgactttgtgtatcttcgggtcacgccattgcgaggtgtacacaggtttcagacaaaggggaagctcgcacctcggtatgtgggtcctttccgtatcattgctcggcgcggagaagtcgcttaccagctggagctgcccgcctccttgggcaacgtgcatgatgtgttccatgtgtcgcaactcaagaaatgccttcgtgtgccatccgagcaggccgactcagagcagattgaagttcgcgaagacttgacctatgtggagaggccagtgaaaatcctggacaccatggagcgcaggaccaggaaccgggtaatccgtttttgcaaggtccagtggagcaaccacgccgaagaagaagctacctgggagcgtgaagacgagctgaaggcagcccatcccgatctcttcgccagttcttccgaatctcggggtcgagattccgtttaa

SEQ ID NO: 92609 - DNA, 4260 bp, Oryza sativa
  Clone ID: PAT_MRT4530_91074C.1
atgtcatggcacagggccggtgtcctgctgctaggggctcagtcctgcctacctgtcccgggggttccggccgtaggtggggttgggtcggtactcttgtctatggctaggatgggttggaaactatgtcacgtcttccatccgtataccgtggtgatggccggcagcatcaaccgtcgtggtctggacctgactggcttcgttttggagctgcggggcatgtgcgttgtcctggggtatccgcatggagtggactaccagggcaagcagctcccggagcaggagggtgacgatgcagagccccacgctgcttgggaggtcactgcagtgatcctcactggctcacccgagaggacctcgttggcaatcaccgcgggcggagattccttctccgccgcttgccagaacgctgctctcctcgccataggcactcttcaccagcgctacccggacgagttgcagcactcgccctaccgctaccaccctcgccgcggaggagcccgcgactacgccaccttccgggatgctagcccggaggatgacgctaccatcatgcaccttgcgcgcatggtggaggcgtacgacgcggcccgtatcgacttccatcagatgctaaaaaaggacctagacgcagtggaggcgcagctgcgtcagctcaagatcaccaagggagagatggtgacaaccaggagaagtgctgctaccggtgaaggcagtcaccccgaaggcagcaaccacaacaaccatggcagcccacctccacctcctcccccgcctccaccaccaccaccagacaccaacgccatcctcacccaaatcctcgcccagcaagccaacatgatggctgctttcctccaccatctccaaaatccgccacaacataatgctccaccaccacccccacaacactctaaactcgccgagttcctccgcatccgtccgcctaccttccctagctccaataaccccgtggatgctttggattggttgcatgccgtggagaaaaagttagacaccgtgcagtgcagcgatgaggagaaagtcatcttcgccgcccaccaactgcaggggctacgcagccagaaggacagcctattacttgggctcgcttcaccgccgctttccggagaacccatgtgcccgccggagtcatggcccttaagaaaagatgaggaaaagcaagagaagttcttggcaggaatggaccctgagctgtccgtgcgtctagtctctggggactatccggatttccaacgtctggtggacaagagcatccgcttggaagccaagcacaaggaactggagtcgcacaagcgtcgcttggcgaatttccgcaaccaacagggggctaaccaaagggtccgctacaccgatccctatccagggggatcctcctcgcagcagcaacagcagcagcaacctcgctccgcgccccgacctcaattcgtggtgcgcgtcccacagccgcagcaacagcagagtcagcaagggactcgtgcgccccatcctcctacgctagccgtgcagcctggtcaaggccgcagggacgctcaaggtcagcagcgtctgtgcttcaactgcttcgagcctgggctctttgcggataaatgcccaaagccaaggcgccagcaaggccaagcgcctcctcgctccaacaacggtggtaaggatgtcattcggggtcgtgtgaaccacgtgacggccgaggacgtgctggcaactcaagacgtcatcgttggtacgttcctcattcattccatccctgctaccattttgttcgactctggagcttcccactcgtttatatctgtgccattcgtggggagaaatcagttgggggtagaaaggcttaggaaccctcagctcatcaccacccctggaggggttatgacagcaaagtattatagccctgccgttcctatagaaatccagggaattccttttccctcggatctgattcttctagacaccaagaacttggatgtgatccttgggatgaattggttggctcaattccagggagtagtggattgcgcaagatgcactgtcactctgtaccgagggccggaacaaccgattgttttctttgcacccccaacttctgtcggcagtgcagaacttcatcagataggactatcggaaacccccatcgtcagtgagttcggagatgtgtttccggaagaactacccggtatgccgcccaagcgcgagattgagttccagatagatcttgctctaggaaccactcctctgtacaagcgaccctaccgtatggcagcaaatgaactggccgtagtcaagaaacagttggaagagttgaaagaaaaggggtatatacggccgagtacttccccctggggtgctcccgtgatttttgtggaaaagaaggacaagacaaagaggatgtgtgttgactaccgagctctcaatgaagttactataaaaaacaagtaccctcttccccggatcgatgatctgttcgatcagcttaaaggtgccactgtcttttcaaaaatcgatcttcgctccggatatcaccaattgcgtattcgtaaagaagatatcccgaagactgcattcaccacgcgttatggactgtatgaattcacggtgatgtcgttcggtttaaccaatgctcctgccttcttcatgaacttaatgaacaaagtgttcatggaatacttggataagtttgttgtggttttcattgacgacattctggtgtactcacaatcagaggaagaccatcagcaccatctccgtctggtgttgggaaagttgcgggaacatcaattgtatgccaaacttagcaagtgtgagttctggttgtccgaagtcaaattcttagggcacatgatatctgctaaaggagttgctgtataccccgaaacagtgaccgccgtcactgattggaagcaacccaagacagtcactcaaatccgcagttttttgggtttggcaggatactaccggaggttcatcgagaacttctccaaaatcgctcgacccatgacacagttgttgaagaaagaagagaaatttgtgtggagcccgcaatgcgagaaggcattccaaactctcaaggaaaggctggtttcctcgccggttttaatcttaccggatactcgcaaggacttcctggtgtactgtgacgcttcgcgccaaggattggggtgcgtgctcatgcaggaaggtcatgtggtagcctatgcctcacgccagctacggcctcatgaaggcaactaccctacccatgatttggagttagccgcggtggttcatgctctaaaaatctggcggcactatctcattgggaatcgctgtgaaatatatactgatcataagagtttgaaatacatcttcacccagtcggatctgaatcttcggcagaggagatggttagaactcatcaaggattatgatgtgggaattcactatcatcctggtaaggccaacgtggtcgccgacgctctaagtcgaaaaagccattgcaacactcttaacgtccgtggcattccacccgaacttaatcaacagatggaagccttgaacctaagcatagttggtcgtggattcttggctacgctggaagccaagcctaccttgctcgatcaaatccgtgaggctcaaaagaataatccggatatgcgtggactccccaagaatatgaaacagggtaaagccgctggtttcacagaggatgaacacggaaccctatggaacggaaatcaggtatgcgttccagacgacaaggaacttaaacagctaatacttcaggaagctcacgaaagtccttattccatccaccctggcagtacgaagatgtacttagacttgaaagggaaatactggtgggttagtatgaagcgggaaattgcagagttcgtggccctttatgatgtgtgccagcgtgtcaaggcagagcaccaacgaccggccggacttctccaacctctccaagtaccagaatggaaatgggatgaaattgggatggatttcatcaccggacttccaaaaacccagggcggttatgattctatatgggtagtcgtggatcaactaaccaaggtggctcggtttattcctgtgaagacaaccatggagcgcaggaccaggaacagggtaatccgtttttgcaaggtccaatggagcaaccacgccgaggaagaagctactagggagcgtgaagacgagctgaaggcagcccatcccaatctcttcgatagttattccgaatctcggggtcgagattccgtttaa

SEQ ID NO: 92610 - DNA, 195 bp, Oryza sativa
  unsure (1)..(195): unsure at all n locations
  Clone ID: PAT_MRT4530_91075C.1
acattttctctnttnaaaagtctgttgcagccacaaagtcacacgagagacaggacgatcattcataccagcccatgtatctataagcctgatgttgatagcacccacaatcatctgcacgtttggtgcgcaatgtccatttagagtctaaaaccttcattcgtttacagctaactgtttatcactccgatagtt

SEQ ID NO: 92611 - DNA, 219 bp, Oryza sativa
  Clone ID: PAT_MRT4530_91076C.1
atgggcttgactaaagtggaggcatggctcagatgtggcgacggggagagcctctcctctcctctttccgtgacgaagccgtcgatgccgcggtcggccaccaatgagatcataggcagcagggacgcagtacaaaaggggagccacagcgtgttgggttttgtactgcaaatccccgggcggataggggataagaacaaggacgcctgggaaaagtaa

SEQ ID NO: 92612 - DNA, 119 bp, Oryza sativa
  Clone ID: PAT_MRT4530_91077C.1
atgtccacgggacactcacctagccacgccctctacaatgcgtctcctagctcggtgtctcaacaaaaggctggtgaggaacatgaccccagcgaggtgccgcttggcagaagagacgg

SEQ ID NO: 92613 - DNA, 2566 bp, Oryza sativa
  Clone ID: PAT_MRT4530_91078C.1
gcgggagcgggcggatgggaaccgcgcgtcggctccatggtccacggaatcctcgcatacctggccttgaacgccgaagcagtaccagcaagtactgcagaagaatgacttcttccaggccggccggcaacaagccgaggacaggttcaatagatctgtggttcgcgttcaagccctgttccgttcttacaaggcacaacaggagtaccggaggatgaagattgctcatgaggaggccaagattgagttcagtgaagggcagctaggagcagcatgcaggagttgaaatggtttttagggacagctagtttctctaattcttgtcttgtacattattggaaatgctagaacaacctgcagtttgccgacgctgtacattttaggaccatctgaatgatctgatacagcttttgctgaccccttatggctgatgaatttgatgttagccctgtagtaactgtggtggtttgcgtttggctggctttaagctggacataaacagcgtgtgcttcaatgtacatgtagatgcaatgcaagtacatatcatgttgtaaatgctaataagattagcaataatcagcaaagccctgagccaatgacaaggagtgtggtttttctctgttaatttgatccattacacctctcctctgacctctgcagattcaacctctgcaaatcatggcctcaatcaagtaaatgcaaatcattttggagctctgaagcatcaaggagatcagactcaatctcttttggcgtctgatgtagattctcaatcagatcaatttataagttcttcggtgaaatctccaatggatggtaacacatctattcctaatgaggtgcctgctaggcagaacagtcttttccacagagcttctgtccagtgaccaatgaaagactattagaaatcaatgagatctccccagaatgggcttactctacagagactaccaaggtcgtggtgattgggaatttctatgagcaatacaagcatttggctgggtctgctatgtttggtgtctttggtgagcaatgtgttgccggagatattgttcaaactggtgtttaccgtttcatggttggaccacatacacctggaaaagtggatttttatttgactttggatgggaaaacgccaatcagtgagatttgcagtttcacgtatcatgttatgcatggtagttccttggaggctaggctgccgccatctgaggatgattacaaaaggacaaatcttaagatgcagatgagactagctcgcttgttgtttgccacaaacaagaaaaagatagcaccaaagttgcttgtagaaggcaccaaagttgccaatctcatgtcagcattaccagagaaggaatggatggatttgtggaatattcttagtgacccagaaggcacatatgttcctgttactgaaagcttgcttgaactagtgttgcgaaataggttgcaagagtggcttgttgaaatggtaatggaaggtcataagtctactggtcgcgatgatctaggacaaggagctatccatctgtgttctttcctaggttatacttgggctattcgattgttttctttgtcggggttctccttggatttccgtgattcttctggttggactgctttacactgggctgcataccacgggagggaaaggatggttgccactcttttatctgctggagcaaatccaagtttagttacagaccctactcccgaatcccctgctggactcactgctgctgatcttgcagcaagacaaggttacgatggcttggcagcatatcttgctgagaaaggattgactgcacattttgaggccatgtcactgtccaaggatactgagcaatcaccatcaaagactaggctaacaaaactacaaagcgagaagtttgagcaccttagtgaacaagaactttgcttaaaagaatctctagcagcctatcgcaatgctgctgatgctgccagtaatatccaagctgcactcagggagagaactcttaagcttcaaacaaaagcaattcaattggctaatcctgagattgaagcatctgagatagttgctgctatgaagattcaacatgcatttcggaactacaacagaaagaaagcaatgagagctgctgcacgaatacagagtcatttccgtacatggaagatgaggaggaacttcattaacatgcgaagacaagttatcaggatacaagctgcgtaccgaggtcatcaagtgagaaggcagtaccgcaaggtaatatggtctgttggaattgttgagaaagcaattttgcgatggagaaagaagagaaaaggccttcgtgggatcgcatctggaatgccagtagttatgactgtggatgccgaagcagaaccagcaagtactgcagaagaagacttcttccaggccggccggcaacaagccgaggacaggttcaatagatctgtggttcgcgttcaagccctgttccgttcttacaaggcacaacaggagtaccggaggatgaagattgctcatgaggaggccaaggtaattttttttaaaactttctccaataattgctggcatgtgccg

SEQ ID NO: 92614 - DNA, 518 bp, Oryza sativa
  Clone ID: PAT_MRT4530_91079C.1
gctcctcaactcaactctcttcggcagcgagcagcaacgccttccaccatgccgaagcagatccacgagatcaagggacttcctcctgacggcgaggaggaaggacgcgaggtcggtgcggatcaagaggaccaaggacgccgtcaagttcaaggtgcgctgctccaagtacctctacaccctctgcgtcttcgacgccgacaaggccaacaagctcaagcagtcgctccccccaggtttgactgtccaggaggtttaagcatcaaagccagaccatgctgtttgtagcagcaggaatgcttgctcccgttcgcattagtagctattagatgctgagattttatctgtcatattttcaatgtaacacccaaagtttatgtgctgaaccttcgagtcaggttgcgatgttactcctttctggagatagctaccattcgtactgtccctaaacacactgaattttgctccatttctcccaaattgctggagtgtttcctaaaaaaaaaaaaaaaaaaaaa

SEQ ID NO: 92615 - DNA, 6096 bp, Oryza sativa
  Clone ID: PAT_MRT4530_9107C.1
atggccgagcaaggaaaaacgcacgacctctcgccgagtgtgagcggcgacgacggggagccgaatccacgccgtcgagctcgtactcctccaccccctccgcgccaaagccctaagcagggggaggcgcttgagagggtcgacaagtccgcagcgtcaccggccgcaggtgatgcaggagaacggcgagacggggagcgtcgcctcctcgtctacggcgacggcagcacgcctcagggtgcgcttcaagctgctggcgcgctcctacgacacccgcctgtcgtccatgacccggagtctccagcccaacgatggctggaagacgtggccaacttggtcatgacggcacagcagcgcctgggtgctggtggacggtccgccaccaccaccaagacctccggcgccgctaccaccggctccgtgtcatcaaggcggagggcgcggcgagcggcggcggctgcacgtcattcggctgccactccctcgtctacaccgtcgactcgggaggatcagcatggggagccggatgcccgcctcaacatcgggcgccggtgtaatagccggcgtactccccgtgcaacggagggagcctcctcgtccagagtgtcaccccgacatggacgtgaagatcagccctccgtgcccccggccggtggtgttggctgtagagcctttgtggcgagtcttcggaacgtccgttggcccccaaggttccggcccaccatcaccgagaagtacgatgggagcgtcaaccccaccgagtttctccaggtctatacgaccgggattgaggccgctgggggtgacgacagggtcatggcgaacttctttcccatggccctaaaaggacaggcgcggggttggctaatgaacctgccacccgcgtcggtccactcctgggaagatttgtgccaacagttcaccatgaacttccaaggcacatatccgcgcccaggcgaagaagcggacttgcatgcagtacagcgaggcgatgatgagtcgcttcgctcgtacattcagcggttttgccaagtccgcaatactataccatgcatccctgcacacgcggtgatctacgcgttcagggggggcgtgcggcacaaccgcatgctcgaaaagatcgcttccaaagagccccagactaccgcggagctttttcagctcgcggaccgagtggctcgtaaggaggaagcgtggacctggaactcctccggttccggagtggcagcttcggccgcccccggatccgccgctcagacagggcggcgtgataggaggaggaagaagaggtcggaccgttccggcgacgagggtcatgtcctcgccgtcgagggcgctccgcgggccacccgaaaggggaggcctgcgagcgacaaaaagaaagaggccggaactcccggcagggagcgccccgccggcaggtggtgctccgtccacaacacctccctccacgatctcgcggactgtcgtgcagtcaaaaacctggctgagcgaacgaggaagtgggaggaggacaggaggcaggaacgccgtgagggcaagtccccggtggttccatccggcaaacggcgaggtgaggccaagcagaaggcccccgttgttgacatcgatgatggtgatgatgacctaggtttccaagaacctggggccaccattgccaccgtcgatggaggagcgtgtgctcacgtctctcgccggagcttcaaggctatgaaacgagagcttctggccatggcccctacccatgaggcgatgcgtcgggcgcggtggtcggaggtcgctctcactttcgaccagactgaccacccaccgtgcattgcccggggagggcaggttgcgatggtggtttcccccaccatctgcaacgtgaagttgggacgtgtcctcatagacggaggagcggctctcaacatcctttcccccgcggcctttgatgctatcaaggccccggggatggtgctccagccgtctcaaccgatcatcggtgtgacgccggggcacacgtggccattaggtcacattgacctaccggtcaccttcggtggacccgccaacttccgcacggagcgggtgagcttcgatgtggcggacctcagtctgccctacaacgcggtcctagggagacccgcgttggtgaagttcatggcggcggtccactacgcctacctccagatgaagatgccgggccccggtggccccatctctgtccgtggcgaccttaaagtcgcgcttgcttgcattgagcagcgcgcggaccgcctcgctgctgcgtccaagcccgagggtggtgacgagaggcttggcccttctgcccccaccgccccgaggcagcggatggccacttgcgacgaggtcccggtcaaggaggaagacgcgctcgtctccttcctgcgggcaaacgctgacgtcttcgcatggagaccagcggacatgcccggggtccccagggaggtgattgagcaccgtctcgccgtgcggccgggcgcaaggccggtccggcagaaagtgcggcggcaagccccggaacgtcaagctttcatccgcgaggaggtggctagacttttggaggccgggttcattcgtgaggtcatccacccggagtggctggcgaacccggtggtcgttcccaaggcgaacggcaagcttcggatgtgcatcgactacaccgaccttaacaaggcatgtcctaaggatccttaccccctgcctcgcatagatcagatcgtcgactccactgcggggtgcgaccttttgtgttttctagatgcatactctggttaccatcagattcgcatggctagggaggatgaggaaaaaactgcgttcattacccccgtaggaacctattgttatacatcaatgcccttcgggttaaagaatgcaggtcctacttttcagcgtactactcgaatttctttgggtagtcaaataggacgtaatgttgaggcgtatgtcgatgacttggttgtaaaaacgcgcaaccaagagaccttactttcagatctagcggaaacttttgagaatctccgctccgcccgcataaaactgaaccccgataagtgtgtgtttggtgtacctgcgggtaagcttctcgggttcttggtctctgcccgaggcattgaggccaaccccgagaagattcgagctatcgagcggatgcgcccccccagcaaacttagggacgtgcaatgcgtcaccggttgcatggccgccctaagtcgtttcatatcaaggctgggagagaaggcgctacccttgtttaagctcctcaagcgctcggggccgttcacttggacggaggaagctgaaaatgccctcgcccagttgaaggcgtatcttagctctcctccggttctagtcgccccggagccaaatgagtccctgctactttacttagcggcgaccccccaagtagttagtgcagcgttggttgtggagcgcgatgaggacaatcctcattctgcgcacccccgctctgtgccgacttggcccgggagcaggcagggaggagaggcccccgagtcgaacggtggccccaggcccccgacgaccggagtcggccctccacccgcttgtcaaacggcgctgggtgcccccgaccctcaggaaggccccgaggccactgagggaaggctgcacttaaagccctttggccccgaggctaaccctgtgctgactcgacccgggaaagagcagggagaagaggcccccgagccgaacggaggccagaggcccctgacgaccggagttggccctttgcccgcttgtccgacgatgccaggagtccccgacccccaggacggccccgaggccactgtgggagggccgctcctgtcatcctccgaccccgaggtcatcagcgcagaagacgagtgcgccccgaggggccacttggacgaagaacgccccgggggtacggcccctaacgaggaggatcggccccgccgaaaggtgcagcggcctgtctactttgttagtgaggccctccgggacgccaagacccgatacccacaggcccagaagatgctttacgctattctgatggcctcaaggaaactgcgccattatttccaggcgcatcgggtcactgtggttacgtcttaccccctcggtcaaatcttgcataatcgagagggtacaggacgagtggtaaaatgggcaatcgagctttctgagttcgatctgcactttgaaccacgccacgctatcaagagccaggccctcgccgattttgtggcagagtggaccccggctccagagaccgtctcaatgcccgaggccagcgcgaacccctcacagctgcctcacgccgcccactgggtgatgcaattcgacggttctctgtctcttcagggcgccggtgcaggggtcacgttgacctctccgaacggagacgtcctcagatatttggtccgtctcgactttcgagcgactaacaatatggcagagtacgagggactccttgccggactcagagtggcggctggactggggatccgccgcctcttggtattaggcgactcccagctagtcgttaaccaggtctgtaaggagtaccggtgctctgacccacagatggacgcctacgtacgccaagtgcggcgtatggagcgccattttgacgggatagagcttcggcatgtgcccagacgggataatatgattgccgatgaactctcaaggctcgcgtcctcgcgagcccagaccccaccaggcgcctttgaagaaaggcttacccagccgtcggcgcgacccgaccccttaggggagacggatgcgcctgaccggcacccgaggcccgtcggagtccaggcctcgggacccgaagagagcgttccaagctcccttagattgattgcttggatctctgagatccaaacatacctcacagataagactctacctgaggaccgcgaagggagtgaacgcgtacaacgcatttccaaacgctatgtgctggtagaagggaccctctatcggcgcgcggctaatggaatcctcctgaagtgcattcctcaggaacaaggcgttgagcttcttgctgacatccatgagggcgagtgcggagcccattctgcctcgcgcaccctggttggcaaggcctttcgtcaaggattttattggccgacagctctcaatgacgcagtcgatctggtccggcgatgcagagcgtgtcagttccacgccaagcaaattcatcagccggcccaggccctgcagatcataccactgtcatggccatttgctgtctgggggcttgatatcctgggaccgttcaaacgggccccgggcgggtttgagtatctgtatgttgcgatcgacaagttcactaagtggcccgaggcttatccggttgtcaagatcgataagcactctgctcttaaatttattaagggcatcacggcccgttttggagtgcctaaccgtattattacggataatggcacccaattcactagtgagctcttcggcgactactgcgaagacatgggcatcaagctctgcttcgcctcacctgcccaccccagaagcaatggccaagtggagcgcgccaatgcagaaatcctcaaaggccttaaaaccaagaccttcaatattctcaagaagcacggcgattcatggatcgaggagttgccagcggtgctctgggcgaaccgaaccacaccaagccgagcgaccggggaaacgcctttcttcctcgtctacggcgcagaagcggttctcccatctgagctcaccctgaggtctcctcgggccaccatgtactgcgaggctgatcaagatcagcttcgtagagatgacctcgactacttggaagagcgaaggcggcgcgcggccctccgagctgcgcgctaccagcagagcctgcggcgctaccatcagcgccacgtccgggcccgatcactctgcgtcgacgacctcgtcctacgccgcgtccaaacgcgtgctggattgagcaaactctcaccaatgtgggagggtccgtatcgagtgatcggtgtcccccggccgggctcggtacggctggccacgggcgacggcacggagctgccaaacccatggaacatcgaacaccttcgtcgcttctacccctga

SEQ ID NO: 92616 - DNA, 5490 bp, Oryza sativa
  Clone ID: PAT_MRT4530_91080C.1
atggcggccggatcttccgcgccgtttccccctcgtccggccgctctgtccccctcccgaccctatataaaccctccccgtgcctccctccaccgttttcgccactcgccgctctctctccccgccggaatcgagctcgcgccgtcgccctctctctccgtcgtcgccgccgagctccggtccgccgccgttgtcgccccggaccacctctcccctcggcgccgcctccttcggcttcgccgcatccccggcgaccttgtccacccctccgtttcgctcgccgaccgccggagcaccgtcgaccccatccacccgagccgcgccaccgccttcctccgcaccggtcgccgtttccgtcgttgccgtcgacccggggtgagtcgtggaccgccgcttcttttcccccttcccttcccctctctcggccgccgctccgccgtgcctatggccgccgccggcgaccataggggcgcgggcgtgccgcctcccgccgctgcgccggcgtggccgccttcgggcgcaccgtgcggctaccgcgtggggcccggctatcagccgcccgcgccctcggcacctcggccatataaggaccggtcttcgggcctctgttgcaaagcactaccgtacttccacatgtctagtgggacaaatgaaggctacacgagctgcggcccggtagtcgagatgtcatggcacagggctggtgtcctgctgctaggggctcaatcctgcctacctgtcccggaggttccggccgtaggtgggattgggtcgatggccggcagcgtcagtcgtcgtggtctggacatgactggtttcgtcttggagctgcggggtatgtgcgttgtcctggggtatccgcatggactggactaccagggcaggccgctcccggagcaggaggtcaccgcgggtggagattctttctccgccgcttgccagagcgccgctctcctcgccatcagcactcttcaccagcgctacccggacgagctgcagcactcgccctaccgctaccaccctcgtcgcggaggagcccgcgactacgccaccttccgggatgctagctcggaggatgacgctaccatcatgcacctggcgcgcatggtggaggcgtacgacgcggctcgtatcgacttccatcagatggtgcgccgtgggatggtcgagaacaacctgaagatcctagagctgcgtcaggagaatctgcagctgaagaaggacctagacgcagtggaggcacagctgcatcagctcaagatcgcccagggagaggtctgtcaccccaagcgtcgccgcgtctgccgcagccagaagatcaccgcccgaaagagcacctccaggcccgagcttgttcgtcagtccctggcgtggacttgcttcgtggagacccctcgtgccgagcccgcgcccgtggttcctcaggagggggaagcctccggcgtcggtagcacggaggatgcgctgttgctcaccttccgtcctggcccgtcgcagcgctccaacaaccccgtggatgtgttggattggttgcatgccgtggggaaaaagctagacactgtgcagtgcagcgatgaggagaaagtcgtcttcgccgcccaccaactgcagggacccgcatctctatggtgggatcatttccaggctacgcagccagaggggcagcctattacttgggcccgcttcaccgccgccttccggaggacccatgtgcccgccggagtcatggcccttaagaaaagggagttccgagagttgaagcaaggcaaccgctccgtgatggagtatttgcatgagtttaacaacttggcccggtacgccccggaggatgtgcgggaagatgaggagaagcaagagaagttcttggcaggaatggacccggagctgtctgtccgtctagtctccggtgactatccggatttccaacgtctggtggacaagagcatccgcttggaagccaagcacaaggaacttgagtcgcacaagcgtcgcttggcgaatttccgcaaccaacagggtgctaaccaaaggatccgctacaccaatccctatccagggggatcttcctcgcagcagcagcaacctcgctccgcgcctcgacctcaattcgtggtgcgcgtcccacagccgcagcaacagcagagccagcaagggacccatgcgccccgtcctcctacgccagccgcgcagtctggtcaaggccgcagggacgttcaaggtccgcagcgtctgtgcttcaactgcttcgagcccgggcactttgcggataaatgcccgaagtcgaggcgccagcaaggccaagcgcctccagacgtcatcgttggtacgttcctcatccattccatccctgctaccattttgttcgactctggagcttcccactcgtttatatctgtgccattcgtggggagaaatcagttgggggtagaaaggcttaggaaccctctactcatcaccacccctggaggggttatgacagcaaagtattatagtcctgccgtccctatagaaattcaggggattccttttccctcggatctgattcttctagacaccaagaacttggatataggactgtcagaaatccccattgtcagagagttcggagacgtgtttccggaagaactacccggtatgccgcccaagcgagagattgagttccggatagatcttgctccaggaaccactcctctgtacaagcgaccctaccgtatggcagcaaatgaactggccgaagttaagaaacagttggaagagttgaaagaaaaggggtatatacgtccgagtacttccccctggggtgctcctgtgatttttgtggagaagaaagacaagacgaagaggatgtgcgttgactacagagctctcaatgaagtcaccatcaaaaacaagtaccctcttccccggatcgatgatctgttcgatcagcttaaaggtgccacggtattctccaagattgatcttcgttctggatatcaccagttgcgcatccgtgaagaagatattccgaagaccgcattcaccacgcgatacggactgtatgaattcacggtgatgtcgttcggtttaaccaatgctcctgccttcttcatgaacttaatgaacaaagtgttcatgaaatacttggataagtttgttgtggttttcattgatgacattctggtatactcacaatcagaggaagaccatcagcaccatctccgtctggtgttgggaaagttgcggaaacatcaattgtatgccaaacttagcaagtatgagttctggttgtccgaagtcaaattcttagggcacgtgatatccgctaaaggagttgctgtggatcccgaaacagtgaccgccgtcaccgattggaagcaacccaagacagtcactcaaattcgcagtttcttaggtttggcaggatactaccggaggttcatcgagaacttctccaaaatcgctcgacccatgacacagttgttgaagaaagaggagaaatttgtgtggagtccgcaatgcgagaaggcgttcaaaactctcaaagaaaagctggtttcctcgccagtgttaatcttgccggatactcgcaaggacttcatggtgtattgtgacgcttcgcgccaaggattggggtgcgtgctcatgcaggacggtcatgtggtggcctatgcctcacgccagctacagcctcatgaaggcaactaccctacccatgatttggagttagccgcggtggttcatgctctaaaaatctggcggcactatctcattgggaatcgctgtgaaatatatactgatcataagagtttgaaatacatcttcacccagtcggatctgaatcttcggcagaggagatggttagaactcatcaaggattatgatgtgggaattcactatcatcctggtaaggccaacgtggtcgccgatgctcaaagtcgaaaaagccattgcaacactcttaacgtccgtggcattccacccgaacttaatcaacagatggaagccctgaatctaagcatagtgggtcgcggattcttggctgcgttggaagccaagcccaccttgctcgatcaaatccgcgaggctcagaagaacgatccggacatgcatggactcctcaagaatatgaaacaaggtaaagccgctggtttcacagaggatgaacacggaaccctatggaacggaaatcggagttcgtggccctttgtgatgtgtgccagcgtgtcaaggcagagcaccaacgaccggccggacttctccaacctctccaagtaccagaatggaaatgggatgaaattgggatggatttcatcaccggacttccaaaaacccaaggtggatatgattctatatggcaccgcgtatcacccgcagacagatggacagaccgagcgtctaaatcagatcctagaagatatgcttcgcgcatgtgtcctagatttcgggaagacctgggataagagtctcccctatgccgagttctcctacaataacagctaccaagccagcatacaaatggcaccttatgaagcgttgtatgggcgtaaatgccggacaccgctattgtgggaccaagttggggaaagccaagtgttcgggaccgatatcctgagagaagctgaagctaaagtcagaaccattcgggataatctaaaggtggcccagtctcggcagaagagttatgcagacaaccgacgccgtgacctggaattcgcagtggatgactttgtgtatcttcgggtcacgcccttgcgaggtgtacacaggtttcagacaaaggggaagctcgcacctcggtttgtgggtcctttccgtatgattgctcggcgcggagaagtcgcttaccagttggagctgcccgcctccttgggcaacgtgcatgatgtgttccatgtgtcgcaactcaagaaatgtcttcgagtgccatcccagcaggccgactcagagcaaattgaagttcgcgaagacttgacctacgtggagaggccagtgaaaatcctggacaccatggagcgaaggaccaggaaccggtccgccgccgtcgtcgccccggaccttctcccgcttcggcgccgcctcctttggtttcgccgcaaccttgccgacctcgtccacccctccgtttcgcccgccgaccgccggaacgccgccgtccccgtctacccgagccgcgccgccgccttcctccgctccggtcgccgttcccgtcgtcgccgtcgacccggggtgagctgtggaccgccgattcgtttcccccttccctcccctctctcgggcgccgctccgccgcgccggtggtcgccggcggcgaccatcggggcgcgggtgcgccgcctcccgtcggctgtgccggcgtggccgccttcgggcgcgccccgcggctgccatgtggggcccggccgtcagccgcccgcgccctcggacgctgcagcttcggaagatccgctcttcgtggaggttgaagccgacgtttgggaaagcgagcaaggcaagtcacatcatctttga

SEQ ID NO: 92617 - DNA, 650 bp, Oryza sativa
  unsure (1)..(650): unsure at all n locations
  Clone ID: PAT_MRT4530_91081C.1
tgtttcacacatttatgtgcatatgtatagggggatttttttatgtatctattcaggctatcccagcacttaatgtggtgtcagaaacttatgctacaaatcatggtctgaatcaagtaaatgcaaatcattttggagctctgaagcatcaaggagatcagactcaatctcttttggcgtctgatgtagattctcaatcagatcaatttataagttcttcggtgaaatctccaatggatggtaacacatctattcctaatgaggtgcctgctaggcagaacagtcttggactgtggaagtacttggatgatgacagtcctggtttaggagataatccaagttcagttccacagagcttctgtccagtgaccaatgaaagactattagaaatcaatgagatctccccagaatgggcttactctacagagactaccaaggtcgtggtgattgggaatttctatgagcaatacaagcatttggctgggtctgctatgtttggtgtctttggtgaccaatgtgttgccggagatattgttcaaactggtgtttaccgtttcatggttggaccacatacacctggaaaagtggatttttatttgactttggatgggaaaacgccaatcagtgagattngcagnntcacgtatcat

SEQ ID NO: 92618 - DNA, 567 bp, Oryza sativa
  Clone ID: PAT_MRT4530_91082C.1
ccggccggggtcttctccacctgcgccgccgcagcctcctcaactcaactctcttcggcagcgagcagcagcgccttccacgagatcaaggacttcctcctgacggcgaggaggaaggacgcgaggtcggtgcggatcaagaggaccaaggacgccgtcaagttcaaggtgcgctgctccaagtacctctacaccctctgcgtcttcgacgccgacaaggccaacaagctcaagcagtcgcttcccccgggtttgactgtccaggaggtttaagcatcaaagccagaccatgctgtttgtagcagcaggattgcttgctcccgttcgcattagtagctattaaatgctgaaattttatctgttttgagttttgaatgtaacccccaaagtttatgtggtgaccctttttcgagtcagattgcgctgttactcctttttggaaatagctaccagtggtgctgtccctaaacacaatgaattttgctccatttttctctaattggtggagggtttcaaatttgttttggagtgtttcgtatttgttttgaaccctggattgttgcctcc

SEQ ID NO: 92619 - DNA, 3288 bp, Oryza sativa
  Clone ID: PAT_MRT4530_91083C.1
atggtgatggccggcagcgtcacccgtcgtggtttggacatgactggcttcgtcttggagctgcggggcatgtgcgtggtcctggggtatccacatggagtggactaccaggccaggccgcttccggatcaggagggtgacgacgcggagccccacgctggttgggaggtcaccgcagtgatcctctctggctctcccgagcggacttcgctggcagtcaccgcgggtggagactccttccccgccgcttgccagaacgccgctctcctcgccatcggcacccttcaccagcgctacccggacgagttgcagcactcgccctaccgctaccaccctcgtcgcggaggagcctgcgactacgccaccttccgggatgctagctcggaggatgacgctaccatcgtgcacctggcgcgcatggtggaggcgtacgacgcggctcgtatcgacttccatcagatggtgcgtcgcgggatggtcaagagcaatctgatgatcctggagctgcgtcaggagaacctgcagctcaagaagaacctcgacgcagtggaggcgcagctgcatcagctcaagatcacccagggagagatctgccgccccaagcgtcgccgtgtctgccgcagccagaagatcaccgcccgcaagagcacctccaggcccgagcttgttcgtcagtccctggcgtggacttgcttcgtcgagacccctcgtgccgagcctgcgcccgtggttccccaggagggggaagccttcggcgttggtagcacggaggctccttctctgtttgctggttctgtgtggggttttcagatggtgacgaccaggagaaacgctgctaccggtgatggcaatcaacctgaaggcagcaaccacaaccaccaaggcaacccacctccacctcctcctcctccgccaccaccaccaccagacaccaacgccattctcacccaaatcctcgcccagcaagccaacatgatgaatgctttcctccaccacctccaaaatccgccacaacagaatgctccaccaccacctccccaacactctaaactcgccgagttcctccgcatccgcccacctaccttctctagctccaacaaccccgtggatgcgttggattggttgcatgccgtggggaagaagttagacacggtgcagtgcagcgatgaggagaaagtcgtcttcgccgcccaccagctgcagggacccgcatctctatggtgggaccatttccaggctacgcagccagaggggcaacctattacttgggctcgcttcaccgccgctttccgaaggacccatgtgcccgctggagtcgtggcacttaagaaaagagaattccgagagttgaagcaaggcaaccgctccgtgatggagtatttgcacgagttcaacaacttggcccgttacgccccagaggatgtgcgggaagatgaggagaagcaagagaagttcttggcaggaatggaccctgagctgtccgtccgtctagtctctggggattatccggattttcaacgactggtggacaagagcatccgcttggaagccaagcacaaggaactggagtcgcacaagcgccgcttggcaaatttccgcaatcagcagggtgctaaccagagggtccgctacaccaatccctatccagggggatcctcctcgcagcagcaacaacagcagcagcaacctcgctccgcgcctcgacctcaattcgtgtctggtcaaggccgcagggacgcttcaggtccgcagcgtctgtgcttcaactgcttcgagcccgggcactttgcggataaatgcccaaagccaaggcgtcagcaaggccaagcgcctccccgctccaacaacggcgggaaggatgtcattcggggtcgtgtgaatcacgtgacggccgaggacgtgctgacaactccggacgtcatcgttggtacgttcctcgtgcattccatccctgctaccattttgttcgactctggagcttcccactcgtttatatctgtgccgttcgtggggagaaatcagttgggggtagaaaggcttagaaaccctctgctcatcaccacccctggaggggttatgacagcaaagtattatagccctgccgtccctatagaaattcaggggattccttttccctcggatctgattctgctagacaccaagaatttggatgtgattcttgggatgaattggttggctcaattccaaggagtagtggattgcgcgagacgcactgttactctgtaccgagggccggaacaaccagttgttttctttgcacccccaaccaaggtagctcgatttattcctgtgaagaccacctatggagggaacaaactagcggagctctacttcgctaggatcgtgagtctccatggcgttcccaagaaaatcgtatctgataggggaagccaattcacctctcacttttggaagaagctccaagaagagctgggtactcgattaaatttcagcaccgcctatcacccgcagacagatgggcagaccgagcgtctaaatcagatcctagaagacatgcttcgtgcatgtgtactagatttcgggaagacctgggataagagtctcccctatgccgagttctcctacaataacagctatcaagccagcatacaaatggcaccttatgaagcgttgtacgggcgcaaatggcggacaccgctattgtgggaccaagttggagaaagccaagtgttcgggactgatatcctgagagaagctgaagctaaagtcagaatcattcgggataatctaaaggtggcacagtcccggcagaaaagttatgcagataaccgtcgccgtgacttggaattcgcagtggatgactttgtgtaccttcgggtcacgccattgcgaggtgtacacaggtttcagacgaaagggaagctcgcacctcggtatgtgggtcctttccgtatcgttgctcgacgcggagaagtcgcttaccagttggagctgcccgcctccttgggcaacgtgcatgatgtgttccatgtgtcgcaactcaagaaatgccttcgagtgccatccgagcaggccgactcagagcaaattgaagttcgtgaagatttgacctacgtggagaggccagtgaaaatcctggacaccatggagcgcaggaccaggaaccgggtaatccgtttttgcaaggtccagtggagcaatcacgccgaagaagaagctacttgggagcgtgaagacgagctgaaggcagcccatcccggtctcttcgccagttcttccgaatctcggggtcgagattccgtttaa

SEQ ID NO: 92620 - DNA, 150 bp, Oryza sativa
  Clone ID: PAT_MRT4530_91084C.1
gacaaatattaatagatgttcattgattagtttttttatctttatacttagggagactaaacagggttaaacggattatatgacaatggtgttagtcagagacactttctattcctacagaagttgaaagcctatgaaagcacgtgcatc

SEQ ID NO: 92621 - DNA, 866 bp, Oryza sativa
  Clone ID: PAT_MRT4530_91085C.1
atggacggcggaggcgaggcagagcacgggagcagcggccacggtgaggaggcgaatgggagaggaaaggaagggagggggaagaccggcttaaatgggcggcaatgtcgacaagtttgcccatgggtctacttgtcaatctctctttctctgttcatcttcttcctctctttctctgttcatgtcttcctctcgctgtcacggcacacctcgccgtccggcctcatccgccggggcgacgacgtcttctccctccgcgacgcgttcgtccgctccgcccacgccgcgctcgccgacgcgttcctgccccgcgacccgcaggactgggagaggaagcacgatgtggtcgccggcgtcgtctcccacccggtggcgcgccgcgtcgaggagctccgcgtcgccgccgtcaagtccgccgacgggccgtcgtccgacaaggaggtcgcggagatggaaggggagttccacctctccctccgcggcagcacccagccgtcggagacgctccgcgtgctcgacctcaccgggtgcggcagcttctccctctccgccggcatggcgctcccgcggctgacgacgctgcggctgcggctgcggctgtgcgtcgtgcaggtcaaggacctgcagggcgtcgtcgactccgcgccggcgctcgccaccgtgcacctcgagtccgtcttcctcgccgggccgaaagaagatggctgcgcccgcgcccgcccgggcagtgcaccacgtcggcgtgcgtcgggagatagaggaaaagaaaagaagagaaagagaggaactcgtgtgctgggatgccgccgtgcgtcgtcgctgtcggagtgaaccccggcgatgcgccgcctttgccgccgccccat

SEQ ID NO: 92622 - DNA, 5577 bp, Oryza sativa
  Clone ID: PAT_MRT4530_91086C.1
atggccaatctcaaccctaatccgctgcgcttcctaatgcatggtcttgttgttcatgctggaggtgacttccgcatcccgcgggttgacctcactgtcccgcaacgccctgctcggcgccatgaagacttctatgtggccattgtagagccaatccccttggagcaggactgggatcatcatcgggccctcattgcaaacttcgttcaagatgagctacactatgaggtttgtaacagcttctggtacccgtctgtagtaggtttcttccagatgaggtctgccatgaatagggatgctctggtcctctccccgcccgagttctatgatggggttcactctgttatttttgttaatcatgaccaatgtcctaattggagggcggctaactaccatagagaaggctggttcatgttcctagatttcccgcttgatttcattgatcgccatcatgtgcaccaggcagttacctcttttggggctcagtcctgcctgcctgtcccgggggttccggccgtaggcgggattgggtcggtactcttgtctatggctaggatgggttggaaactatgtcacgtcttccgtctgtataccgtggtgatggccggcagcgtcacccgtcgtggtttggacatgactggcttcgtcttggagctgcgcggcatgtgcgttgtcttagggtatccacatggagtgggctaccaggccaggccgctcccggagcaggagggtgaggacgcggagccccacgctggttgggaggtcactgcagtgatcctcgctggctcttctgagcggacttcgctgacagtcaccgcgggtggcgactccttccccgccgcttgccagaacgccgctctcctcgccatcggcactcttcaccagcgctacccggacgagttgcagcactcgccctaccgctaccaccctcgtcgcggaggagcccgcgactacgccaccttccgggatgctagctcggaggatgacgctaccgtcgtgcatctggcacgcatggtggaggcatacgacgcggctcgtatcgacttccatcagatggtgcgtcgtgggatggtcgagaacaacctgaagatcctggagctgcgtcaagagaacctgcagctcaggaaggacctcgacgcagtggaggcgcaactgcatcagctcaagatcgcccagggagagatctgccgccccaagcgtcgccgcgtctgccgcagccagaagatcaccgcccgcaagagcacctccaggcctgagctagtccgtcagtccctggcgtggacctgcttcgtcgagacccctcgtgccgagcctgcgcccgtgatggtgacgaccaggagaaacactgttaccggtgatggcaaccaacctgaaggcagcaaccacaaccaccagggcaacccacctccacctccaccttcttctccaccaccaccaccagacaccaacgccattctcacccaaatcctcgcccagcaagccaacatgatgaatgctttcctccaccacctccaaaatccaccacaacagaatgtttcaccaccaccttcccaacactctaaactcgccgagttccttcgcatccgcccacctaccttctctagctccaacaaccccgtggatgcgttggattggttgcatgccgtggggaaaaagctagacacggatgtgcggggagatgaggagaagcaagagaagttcctggcaggaatggaccttgagctgtccgtccgcctagtctctggggactatccggatttccaccgactggtggacaagagcatccgcttggaagccaagcacaaggaactggagtcgcacaagcgccgcttggcgaatttccgcaatcaacagggtgctaaccagagggtccgctacaccaatccctatccagggggatcctcctcgcagcagcaacaacagcagcagcaacctcgcccagcgcctcgacctcaattcgtggtgcgtgtcccacagccgcagcaacagcagaatcaacaagggactcgtgcgccccgtcctcctacgccaactgtgccgcctggtcaaggccgcagggacgctcaaggtcagcagcgtctgtgcttcaactgcttcgagcccgggcactttgcggataaatgcccaaagccaaggcgtcagcaaggccaagctcctccccgctccaacaacggcgggaaggatgtcattcggggtcgtgtgaatcacgtgacggccgaggacgtgctgacaactccagacgtcatcgttggtacgttcctcgttcattccatccctgctacaattttgttcgactctggagcttcccactcgtttatatctgtgccattcgtggggagaaatcagttgggggtagaaaggcttaggaaccctctgctcatcaccacccctggaggggttatgacagcaaagtattatagccctgccgtccctatagaaattcaggggattccttttccctcggatctgattcttctagacaccaagaacttggatgtgatccttgggatgaattggttggctcaattccaaggagtagtggattgcgcgagacgcactgtcactctgtaccgagggccggaacaaccggttgttttctttgcacccccaacctctgtcagaagttcagaacttcatcagataggactgtcagaaatccccatcgtcagggagttcggagacgtgtttccggaagaactacccggtatgccgcccaagcgagagattgagttccggatagatcttgctccaggaaccactcctctgtacaaacgaccctaccgtatggcagcaaatgaactggccgaagtaaagaaacagctggaagagttgaaagaaaaggggtacatacgtccgagtacttccccatggggtgctcctgtgatttttgtagagaagaaagacaagacgaagaggatgtgcgtcgactacagagctctcaatgaagtcaccataaaaaacaagtaccctcttccccggatcgatgatctgttcgatcagctcaaaggtgccactgtattctccaagattgatctccgttccggatatcaccaattacgtattcgtgaagaagatattgcgaagaccgcattcaccacgcgatacgggctgtatgaattcacggtgatgtcattcggtttgaccaatgcacctgccttcttcatgaacttaatgaacaaagtgttcatggaatacttggataagtttgttgtggttttcattgatgacattctgatatactcacaatcagaggaagaccatcagcaccatctccgtctggtgttgggaaagctgcgggaacatcaattgtatgccaaacttagcaagtgtgagttctggttgtccgaagtcaaattcttagggcacgtgatatctgctaaaggagttgctgtggaccccgaaatagtgaccgctgtcactgattggaagcaacctaagacagtcactcaagtccgcagtttcttaggtttggcaggatactaccggaggttcatcgagaacttctccaaaatcgctcgacccatgacacagttgttgaagaaagaagagaaatttgtgtggagcccgcaatgcgagaaggcgttccaaactctcaaagaaaagctggtttcctcgccggtgttaatcttgccggatactcgcaaggatttcatggtgtattgtgacgcttcgcgccaaggattggggtgcgtgctcatgcaggacggtcatgtggtggcctacgcctcacgtcagctacggactcacgaaggcaactaccctacccatgacttggagttagccgcggtggtgcatgctctaaaaatctggcggcactatctcattgggaatcgctgtgaaatatatactgaccataagagtttgaaatacatcttcacccagtcggatctgaatcttcggcaaaggagatggttagaactcatcaaggattatgatgtgggaattcactatcatcctggtaaggccaacgtggtcgccgacgctctaagtcgaaaaagccattgcaacactcttaacgtccgtggcatcccgcccgaacttaatcaacagatggaagccctgaacctaagcatagttggtcgcggattcttggctacgttggaagccaagcccaccttgctcgatcaaatccgcgaggctcagaagaatgatccggacatgcatggactcctcaagaatatgaaacagggtaaagccgctggtttcacagaggatgaacacggaaccctatggaacggaaatcgggtatgcgttccagataacagagaacttaaacagctggtacttcaggtagctcacgaaagtccttattccatccaccctggcagtacgaagatgtacttagacttgaaggagaaatactggtgggttagtatgaagcgggaaattgcagagttcgtggccctatgtgatgtgtgccagcgtgtcaaggcagagcaccaacgaccggccggacttctccaacctctccaagtaccagaatggaaatgggatgaaattgggatggatttcatcaccggacttccaaaaacccaaggtggatatgattctatatgggtagttgtggatcgattaaccaaggtagcccgatttattcctgtgaagaccacctatggagggaacaaactagccgaactctacttcgctaggatcgtgagtctccatggcgttcccaagaaaatcgtatctgataggggaagccaattcacctctcacttttggaagaagctccaagaagaactgggtactcgattgaatttcagcaccgcctatcacccgcagacagatggacagaccgagcgtctaaatcagatcctagaagacatgcttcgtgcatgtgtactagatttcgggaagacctgggataagagtctcccctatgccgagttctcctacaataacagctatcaatccagcatacaaatggcaccttatgaagcgttgtacgggcgcaaatgccggacaccactcttgtgggaccaagtaggagaaagccaagtgttcgggactgatatcctgagagaagctgaagctaaagtcagaatcattcgggataatctaaaggtggcacagtcccggcagaaaagttatgcagataaccgccgccgtgacctggaattcgcagtggatgactttgtgtatcttcgggtcacgccattgcgaggtgtacacaggtttcagacgaaagggaagctcgcacctcggtatgtgggtcctttccgtatcgttgctcgacgcggagaagtcgcttaccaattggagctgcccgcttccttgggcaacgtgcatgatgtgttccatgtgtcgcaactcaagaagtgtctccgagtgccatccgagcaggccgactcagagcaaattgaagttcgcgaagatttgacctacgtggagaggccagtgaaaatcctggacaccatggagcgcaggaccaggaaccgggtaatccgtttttgcaaggtccagtggagcaaccacgccgaagaagaagctacttgggagcgtgaagacgagctgaaggcagcccatcccgatctcttcgccagttcttccgaatctcggggtcgagattccgtttaa

SEQ ID NO: 92623 - DNA, 1846 bp, Oryza sativa
  Clone ID: PAT_MRT4530_91087C.1
gaaataccgcatacctgatattagattgaagaacagtgggatgccaatgggttatcgacgaggagaaggaacagcttgttcccgcttggcatcgccggcgtcaccggccagcagatgtccccatgcaccagctcgagtttttctttcgcgcggtacttggccttggacgagaagggcaggcgccgctgcttcccggccaggcagctgtcacagacttgatcaacctggttgatcaggggaagcccggcaggaggaggaggctaggggcgcagggaaggaggaggggagagagatgggggacgaggaggagagggcatgggtaggtgggtggagagaaggatatagaggagagaggaagtgggtggatgggtgggtggggcggtggaagaggaggtggaggaggaggaggtccgatggccggccgacgatgcggcggaggtgacgcggcggcggagacacgggagaagggtagggcggcggcagggtgaggcggcgtcggcgggcaagcgcggtggcggagaggcggcggcgatggtggtgggggtgggggggggggggtcttctcgggctcgggtaggggagaagagggcgaatgagtggggagggggagggggtggaggcggcggccgagtcgcgtcggcggcagtaggcagtgacggcggacggcgacgggccgcggtcgtggcggcaggccgcgaacgcggcggtgggcggcacgcgatggcgagggcagcaggcgatggcggcggcgtcgacaggctgcggcccggctcgtaggctaatcggcggcggcagctcgaggtggcaacgtcgacaggcggcaggcgtgggctgactggcggcggcggctcgcgggctacccggcagcggtggacgtgggatgaccggtggcggcggcccgcgggttgccaggcggcgcggtgcgcaggcggcgacaacggtaggttgccatgaaatggtgacgaggaatgtggtggtggagggggaaaggggagcactagggacggcggcgctagaggtctcgctggaaagcgatagagcttgtggggacaatatatggggggaggaggacacggcagtggagaggacaacggggcagagggaggagtaggcgatgatgaggacgagatcaccgcggcagaggtggaggcaccggcaccggtgtgggtgatgggaggaactttaggtggcagcggaggtggctccgctgctggcgacaacgtcggagatgaagtcggattgccggggtgtggggccggcttggctgagactggaggggtgggtgggttgccgcgcggcggcgggaggcacggaggagcgggcggcgagcggcgaaaggcggcgcacgggggcggacggcggcgtcgcggcgaagtgagcggaggcggctgcgggcatggcgcacggggggcgggcggcggacggcggcgtcgcggcaacgcgcatgggggcgggcgacgaggtgcctcgccgcataccactccgcgcgtcccgtggcgagatcgacggcatcgacaagacggagaggcaggcgggcggcggcggacaggcggacgaggcgggcgaggcgagcggcggcgaagaggcgggaggcggcggacaggcggacaaggcaggggaggcgagcggcggcggacaggcggacaaggcgtcggaggcgcggacgaggcgggcgagacgagcggcagcggagaggcgagcgaagcgggcggcggtggagaggcgagtggcggcggagaagcggacgaggatgcctctacgccccgcgcggtcgccgccgctgctcccttccggacctcccccgcacccacattcgctgcaaggtccgctctacgcgctacgatga

SEQ ID NO: 92624 - DNA, 603 bp, Oryza sativa
  Clone ID: PAT_MRT4530_91088C.1
cactcctatgggcgattgggttcatcaaggccggccgggctcgtcttctccacccctcgccgccgccgccgccgccgcctccgtcgtcttctgccgccgagcagcagcagcagtgccttccaccatgccgaagcagatccacgagatcaaggacttcctcctgacggcgaggaggaaggacgcgcggtcggtgcggatcaagaggaccaaggacgccgtcaagttcaaggtgcggtgctccaagtacctctacaccctctgcgtcttcgacgccgacaaggccaacaagctcaagcagtcgctccccccaggtttgactgtccaggaggtttaagcatcaagacagactatgctgttggtagcaccaggaatgtttgctccagttcgctttagtagctattagaaggtgaaatttatatgctgggttttgaatgtaacaccaaaagtttgtgttgagccttgctgtttctccttgctggacttatctaccactcatattgtcccaaatagactgaattttgaatcatttctccctggttgctggagagtttcgtatttgttttgaactcaaaaaaaaaaaaaaaaaaaaaaaaaaaaaaaaaa

SEQ ID NO: 92625 - DNA, 1266 bp, Oryza sativa
  Clone ID: PAT_MRT4530_91089C.1
gggattccttttccctcggatctgattctgctagacaccaagaatttgaatgtgattcttgggatgaattggttggctcaattccaaggagtagtggattgcgcgaggcgcactgtcactctgtaccgagggccggaacaaccggttgttttctttgcacccccaacctctgtcagtagttcagaactgcatcagataggactgtcagaaatccccatcgtcagggagttcggagatgtgtttccggaagaactacccggtatgccgcccaagcgagagattgagtttcggatagatcatgctccaggaaccactcctctgcacaagcgaccctaccgtatggcagcaaatgaactggccgaagtaaagaaacagttggaagagttgaaagaaaaggggtacatacgtccgagtacttccccctggggtgctcctgtgatttttgtggagaagaaagacaagactaagaggatgtgcgttgactacagagctctcaatgaagtcaccatcaaaaacaagtaccctcttccccggatcgatgatctgttcgatcagcttaaaggtgccactgtattctccaagattgatcttcgttccggatatcaccaattacgtattcgtgaagaagatattccgaagaccgcattcaccacgcgatacgggctgtatgaattcacggtgatgtcgttcggtctaaccaatgcacctgccttcttcatgaacttaatgaacaaagtgttcatggaatacttggacaagtttgttgtggttttcatcgatgacattctgatatactcacaatcagagggagaccatcagcaccatctccgtctggtgttgggaaagctgcgggaacatcaattgtataccttcgggtcacgccattgcgaggtgtacacaggtttcagacaaaagggaagctcgcacctcgaagtcgcttaccagctggagctgcccgcctccttgggcaacgtgcatgatgtgttccatgtgtcgcaactcaagaaatgccttcgagtgccatccgagcaggccgactcagagcaaattgaagttcgcgaagacttgacctatgtggagaggccagtgaaaatcctggacaccatggagcgcaggaccaggaaccgggtaatccgtttttgcaaggtccagtggagcaaccatgccgaagaagaagctacttgggagcgtgaagacgagctgaaggcagcccatcccgatctcttcgtcagttcttccgaatctcggggtcgagattccgtttaa

SEQ ID NO: 92626 - DNA, 9360 bp, Oryza sativa
  Clone ID: PAT_MRT4530_9108C.1
atggcgtttagaatgccagtacggatatctgttgtgctgctgatcatcgctttgtctgcagtgacttgtgcttctgcagttccgagcaagagcaatggcagtgacactgactatgctgcactgctggctttcaaagcgcagctggccgaccctctcggcattcttgccagcaactggaccgtcaacacaccgttctgccgctgggtgggcatccgatgcggccgccgccatcagcgcgtcactggcctggtgcttccaggcattcccttgcaaggagagctcagctctcacctcggtaacctctctttcctctccgtcctcaatctcaccaacgccagcctcacgggctcagtcccagaagacataggaaggctccatcgcctagagattcttgagcttggctacaattctctgtcaggtggcatcccagccaccatagggaaccttacaaggcttcgagttctttacctcgaatttaaccagctatctggctcaatccccgcagagctgcagggcctaggaagcattggtttgatgagcctccggaggaattacctcactggctcaattccaaacaatctattcaacaacacacctttgctagcttatttcaacattggcaacaacagcctttctgggtcgataccagcctccatcggctctttgtcgatgctcgaacaccttaacatgcaggtcaaccttctcgcaggaccggtgccaccaggcatcttcaatatgtccacattgcgtgttattgcacttggactgaacaccttcttaaccggccctatcgcgggcaacacaagtttcaacctaccagctctccaatggctctccatcgatggcaacaatttcactggtcaaattccactggggctcgcatcgtgtcagtacctccaagttctttccctgtctgaaaattattttgaaggtgttgtcacagcctcagctgcatggctgagcaagctcacgaatctcactatccttgtgttgggtatgaatcactttgatgctggtccaatccctgcttcactaagcaacctcaccatgctaagtgtcctagatctctcatggagcaacctcactggagccattccgccagatggaaatagcttggctggctctgtcccatcaaacgctggaatgctaaagagtgtagaaaaaatattccttcagagcaataaattctctggctccttaccagaggacatgggcaacctctccaacctatatgtagtcatccgaatgaaagttaagaagcatcaaatgatttcttctggtatggttgacatgatcagcaacagattactctcctaccatgagcttgtccgtgctactgataatttcagttatgataacatgttgggggctggaagctttggaaaagtttataaggagtacatgcccaatggtagcctagaggcactcctgcactctgaaggaagaatgcaattaggtttccttgagagggtggacattatgctagatgtttcaatggcaatggaatacctgcatcatgagcaccatgaagtggtcctacactgtgatttgaagcctagcaacgtgctacttgacgatgatatgactgcacatgtatcggactttggcattgcaaggttattgttaggtgatgacagctccatgatctctgcgagtatgccgggaacagttgggtatatggcaccagaatatggtgctcttggaaaagcatcacgaaagagcgatgtgttcagctacgggatcatgctactcgaagtgttcactgggaagagacccacagatgctatgtttgtgggggaactgaacataaggcagtgggtttaccaggcgtttccggtagagcttgtccatgtactggacacccgacttttacaagattgctcttctcccagtagcttgcatggcttccttgtgccagtgttcgagctgggcttgctttgttcagccgactccccggagcaaaggatggcgatgagtgacgtggttgtgacactgaagaagattaggaaggactatcatacccgcagggtgcgtcgccactcagccaactccggcgcacgcggcagcgtcgaggtggtcctggatcttggcggcgatttgcagctggccggagcgaagaggtactggagattggggcggcatgagcagttggtggaggaactggagatggacgaggagatgggagcagtggcggagtcctggagcaggagcaacagcagcgacaccgacctctctgcactgcttgccttgaaagcccagctctctgatcctaacaacatccttcaccttaccggcaactggaccgtcggcacgccgttctgccagtgggttgtgttcgagctgggcttgctctgttcggctgactcccccgagcaaaggacggcgatgagcgatgtggtcgtgacactgaagaagattagaaaggactatgtcaaattgatggcaaccacccgacccggcaaaaaattgatggcaaccacaacacaatcgcccacgtggcctggcaccttcggggacgtcgggcccgaggcgcaatgcagcgcgctcttttatccggtctgtgaccagtcacagaccggtcagatcaacgactcttccgtgggcgccaagtttttcttgttcagcctaatggccgagcaaggaaaagcgcacgacctctctccgagtgtgagcggcgacgacggggagccgaatccacgccgtcgagctcgtactcccccacctcctccgcgccaaagccctaagcagggggaggcgcttgagagggtcgacaaatccgtggcatcaccggtcgcgggtgatgtaggagaacggcgagatggggagcgtcgcctcctcgtctacggcgacggcagcacgcctcagggcgcgcttcaggctgctagcgcgctcctacgtcacccacccgtcgtccatgaccctgagtctccagctcagcgatggctggacgacgtggccaacttggtcgtgacggcccagcagcgcctgggtgctggtggacggtccgccaccaccaagacttccggcgccgccaccaccggttccgtgtcatcaaggcggagggcgcggcgagcggcggcggctgcacggcattcggctgccactccctcgtcgacaccttcgactcgggaggatcagcatggggagccagatgcccgcctcaacatcgagcgccggcgtaatagccggcgtactccccgtgcaacggagggcgcctcctcgtccagagtgtcacctcgacatggacgtgaggatcagccctccgtgcccccggccggtggtgttggctgtagagcctttgtggcgagtcttcggaatgtccgttggcccccaaggttccggcccaccatcaccgagaagtacgatgggagcgtcaaccccaccgagtttctccaggtctatacgaccgggatcgaggccgctgggggtgacgacagggtcatggcgaacttctttcccatggccctaaaaggacaggcgcggggttggctaatgaacctgccacccgcgtcgcggttttgccaagtccgcaatactataccatgcatccctgcacacgcggtgatctacgcgttcagggggggcgtgcggcacaaccgcatgctcgaaaagatcgcttccaaagagccccagactaccgcggagctttttcagctcgcggaccgagtggctcgtaaggaggaagcgtggacatggaactcctccggttccggagtggcagcttcggccgcccccggatccgccgctcagacagggcggcgtgacaggaggaggaagaaaaggtcggtccattccggcgacgagggtcacgtcctcgccatcgagggcgctccgcgggccactcgaaaggggaggcctgcgagcgacaaaaagaaagaggctggtactcccagcagggagcgcccagccagcaagtggtgctccgtccacaacacctccctccacgatctcgcggactgtcgtgcagtcaaaaacctggctgagcgaacgaggaagtgggaggaggacaggaggcaggaacgccgtgagggcaagtccccggcggttccttccagcaaacggcgaagtgaggccaagcagaaggcccccgctgttgacatcgatgatggtgatgatgacctaggtttccaagaacctggggccaccattgccaccgtcgatggaggagcgtgtgctcacgtctctcgccggagcttcaaggctatgaagcgagagcttctggccatggcccctactcatgaggcgatgcgtcgggcgcggtggtcggaggttgctctcactttcgaccagaccgaccacccaccgtgcattgcccggggagggcaggttgcgatggtggtttcccccaccatctgcaacgtgaagttggggcgtgtcctcatagatggaggagcggctctcaacatcctttcccccgcggcttttgatgccatcaaggccccggggatggtgctccgaccgtcccagccgattatcggcgtgacgccggggcacacgtggccattaggtcacatcgacctaccggtcaccttcggtggacccgccaacttccgcacggagcgggtaagcttcgatgtggcggacctcagtctgccctacaacgcggtcctggggaggcccgcgttggtgaagtttatggcggcggtccactacgcctacctccagatgaagatgccgggcgccggtggccccatctctgtccgtggcgaccttaaagtcgcgctcgcttgcatggagcagcgcgcggaccacctcgctgctgcgactaagcccgagggtggtgacgagaggcttggcacctccgcccccaccgccccgaggcagcggattgccacatgcgacgaggtcccggaagacgcgctcgtctccttcctgcgggcaaacgctgacgtcttcgcatggagaccagcggacatgcccggggtccccagggaggtgattgagcaccgtctcgccgtgcggccgggcgcaagaccggtccggcagaaagtgcggcggcaggccccggaacgtcaagccttcatccgcgaggaggtggcaaggcttctggaggccggattcatccgtgaagtcatccatccggagtggctggcgaacccggtggtcgttcccaaggcgaacggcaagcttcggatgtgcatcgactacaccgaccttaacaaggcatgtcctaaggatccttaccccctgcctcgcatagatcagatcgttgactccactgcggggtgcgaccttttgtgttttctagatgcatactctggttaccatcagattcgcatggctagggaggatgaggagaaaactgcgtttattacccctgtaggaacctattgttatacatcaatgcccttcgggttaaagaatgcaggtcctacttttcaacgtactactcgaatttctttgggtagccaaataggacgtaatgttgaggcttatatcgatgacttggttgtaaaaacgcgcaaccaagaaactttactttcagatctagcggaaacttttgagaacctccgctccgcccgcataaaactgaaccccgataagcgggcccgcccgccactctcgctgacgggtggggcccacctgtcatcttcctcctcctgccgcgcccgccgccgcgcccgtgccctagcgccgccgccgccgcggattgcgccgcatcccgccgtccccgcgcgcattaaagagaggggaatcattccccgtgattccctctcccgtttcccccgatttcccctctctctctccctcggattcgttcgaatcgtggccgcattcgtcgccggcgcaatcaatggcggccgagatcttcgcggccggtttccttcctccccggccgcgctctccccctcccgttgctatatattcgttgcccgagctccgctcttccgtttccgccgctcaccgctcgctctcgccgtcggaatcgtgctagcgccgtgctcctctctctccgccgtcgccgtcgaccttcggttcgccgccgccgccgctccggacttcctccttactcggcgacccctccgtccgcttcgccgtgttgtcgccgaccccgtccgccgctccgcttcgcccgccgaccgccggagcaccgtcgccctcgtcatcccgagccgcgccgccgtcttcctccgctccgtccgccgtttcaccgccttcgccgtctcgggggcaaatgaagactacacgagctgcggcccgatggccggcagcattacccgtcgtggtttgagcatgactggcttcgtcttggagttgcggggcatgtgcgtggtcttggggtatccacatggagtggattaccaggccaggccgctcccggagcaggagggtgaggatgcagagcctcacgctggttgggaggtcactgcagtgatcctctccggctctcccgagcggacttcgctggcggtcacagcgggtggggactccttccccgccgcttgccagaacgccgctctcctcgccatcggcactcttcaccagcgctacccggacgagttgcagcactcgccctaccgctaccaccctcgtcgcggaggagcccgcgactacgccaccttccgagacgccagctcggaggatgacgctaccgtcgtgcatctggcacgcatggtggaggcgtacgacgcggctcgtatcgacttccaccagatggtgcgtcgtggcatggtggagaacaacatgaagatcctggagctgcgtcaggagaatctgcagctcaagaaggacctcgacgcgttggaggcgcagcttcaccagctcaagatcgcccagggagaggacagccgtcccaagcgtcgccgcgtctgccgcagccagaagatcaccgcccgcaagagcacctccaggcctgagcttgtccgtcagtccctggcgtggacttgcttcgtcgagacccctcgtgccgagcctgcgcccgtggttccccaggagggggaagcctccggcgttggtagctcggagggtgcgctgttgctcaccttccgtcctggcccgtcgcagcgctctccttctctgtttgctggttctgtgtggggttttcagatggtgacgaccaggagaaatgttagcaccggtgaaggcaaccaacccgagggcagcaaccccaacccccaaggcaacccacctccaccaccaccaccagacaccaacgccattctcacccaaatcctcgcccagcaagccaacatgatgaatgctttcctccaccacctccaaaatccgccacaacagaatgctccaccaccacctccccaacactccaaactcgccgaattcctccgcatccgtccacctaccttctctagctccaacaaccccgtggatgcgttggattggttgcatgccgtggggaagaagttagacacggtgcagtgcagtgatgaggagaaagtcatcttcgccgcccaccagctgcaggggcccgcatctctatggtgggaccatttccaggccacgcagccagaagggcaacctattacttggactcgcttcaccgccgctttccggaaaacccatgtgcccgccggagtcgtggctcttaagaaaagggaatttcgggagttgaagcaaggcaaccgctccgtgatggagtacttgcatgagttcaacaacctggcccgttacgctccggaggatgtgcgggaggatgaggagaagcaagagaagttcttggcaggaatggaccccgagctgtctgttcgtctagtctctggagactacccggacttccaacgtctggtggacaagagcatccgcttggaagccaagcacaaggagctggaatcgcacaagcgccgcttggcgaatttccgcaatcaacagggtgctaaccagagggtccgctacaccaatccctatccagggggatcctcctcgcagcagcagcaacagcagcagcaacctcgcccagcgccccgacctcaatttgtggtgcgcgtcccacagccgcagcagcagcagaatcaacaagggactcgtgcaccccgtcctcctacgccagctgtgcagcccgttcaaggccgcagggacgctcaaggtcagcagcgtctgtgcttcaactgcttcgagcccgggcactttgcggataaatgcccaaagccaaggcgtcagcaaggccaagcgcctccccgctccaacaacggtggcaaggacgtcatccgtggtcgtgtgaatcacgtgacggccgaggacgtgctgacaactcccgacgtcatcgttggtacgttcctcgtccattccatccctgctacaattttgttcgactctggagcttcccactcgtttatatctgtgccattcgtggggagaaatcagttgggggtagaaaggcttagaaaccctctgctcatcaccacccctggcggggttatgacagcaaagtattatagccctgccgttcctatagaaatccaggggattccttttccctcggatctgattctgctagacaccaagaatttggatataggtctgtcagaaatccccatagtcagagagttcggagacgtgtttccggaagaactacctggtatgccgcccaagcgagagattgagttccggatagatcttgctccaggaaccactcctctgtacaagcgaccctaccgtatggcagcaaatgaactggccgaagtaaagaaacagttggaagagttgaaagaaaaggggtacatacgtccgagtacttccccttggggtgctcctgtgatttttgtggagaagaaagataaaacgaagaggatgtgcgttgactacagagctctcaatgaagtcaccatcaaaaacaagtaccctcttccccggatcgatgatctgttcgaccagcttaaagatgccactgtattctccaagattgatcttcgttccggatatcaccaattacgtattcgtgaagaagatattccgaagaccgcattcactacgcgatatggactgtatgaattcacggtgatgtcgttcggcttaaccaatgctcctgccttcttcatgaacttgatgaacaaagtgttcatggaatacttggataagttcgttgtggttttcatcgatgacattctgatatactcacaatcagaggaagaccatcagcaccatctccgtctggtgttgggaaagttgcgggaacatcaattgtatgccaagcttagcaagtgtgagttctggttgtccgaagtcaaattcttggggcacgtgatatctgctaaaggagttgctgtggaccccgagacagtgaccgccgtcaccgattggaagcaacccaagacagcgggcccgcccgccactctcgctgacgggtgggacccacctgtcatccccctcctctcgccgcgcccgccgccaacgcccgtgccctag

SEQ ID NO: 92627 - DNA, 2031 bp, Oryza sativa
  Clone ID: PAT_MRT4530_91090C.1
cacgtgatatctgctaaaggagttgctgtggaccccgaaacggtgaccgccgtcactgattggaagccacccaagacagtcactcaagtccgcagtttcttaggtttggcaggatactaccggaggtttatcgagaacttctccaaaatcgctcgacccatgacacagttgttgaagaaagaagagaaatttgtgtggagcccgcaatgcgagaaggcgttcagaactctcaaagaaaagctggttgcctcgccagtgttaatcttgtcggatactcgtaaggacttcatagtgtattgtgacgcttcgcgccaaggattggggtgcgtgctcatgcaggacggtcatgtggtggcctatgcctcacgccagcttcggcctcatgaaggcaactaccctacccatgatttggagttagccgctgtggttcatgctctaaaaatctggcggcactatctcattgggaatcgctgcgaaatatatactgatcataagagtttgaaatacatcttcactcagtcggacctgaatcttcggcagaggagatggttagaactcatcaaggattatgatgtgggaattcattatcaccccggtaaggccaacgtggtggccgacgctctaagtcgaaagagccattgcaacactcttaacgtccgtggcattccacccgaacttaatcaacagatggaagccctgaacctaagcatagttagtcgtggattcttggctgcgttggaagccaagcctaccttgctcgatcaaatccgcgaggctcagaagaatgatccggacatgcatggactcctcaggaatatgaaacagggtaaagccgctggtttcacagaggatgaacacggaaccctatggaacggaaatcgggtatgcgttccagataacagagaacttaaacagctgatacttcaggaagctcacgaaagtccttattccatccaccctggcagtacgaagatgtacttagacttgaaggagaaatactggtgggtcagtatgaagcgggaaattgcagagttcgtggccctttgtgatgtgtgccagcgtgtcaaggcagagcaccaacgaccggccggacttctccaacctctccaagtaccagaatggaaatgggatgaaattgggatggatttcatcaccggactcccaaaaacccaaggtggatatgattctatatgggtagttgtggatcgattaaccaaggtagctcgatttattcctgtgaagaccacctatggagggaacaaactagccgagctctacttcgctaggatcgtgagtctccatggcgttcccaagaaaatcgtatctgataggggaagccaattcacctctcacttttggaagaagctccaagaagagctgggtacccgattaaatttcagcaccgcgtatcacccgcagacagatggacagaccgagcgtcaaaatcagatcctagaagatatgcttcgcgcatgtgtcctagatttcgggaagacctgggataagagtctcccctatgccgagttctcctacaataacagctaccaagccagcatacaaatggcaccttatgaagcgttgtatgggcgcaaatgccggacaccgctcctgtgggacctagttggggaaaaccaagtgttcgggactgatatactgagagaagctgaagcgaaggttatcattgctcggcgcggagaagtcgcttaccagttggatctgcccgcctccttgggcaacgtgcatgatgtgttcgatgtgtcgcaactcaagaaatgtcttcgagtgccatccgagcaggccgactcagagcaaattgaagttcgcgaagacttgacctacgtggagaggccagtgaaaatcctggataccatggagcgcaggaccaggaaccgggtaatccgtttttgcaaggtccaatggagcaaccacgccgaggaagaagctacttgggagcgtgaagacgagctgaaggcagcctatcccgatctcttcgccagttcttccgaatctcggggtcgagattccgtttaa

SEQ ID NO: 92628 - DNA, 2981 bp, Oryza sativa
  unsure (1)..(2981): unsure at all n locations
  Clone ID: PAT_MRT4530_91091C.1
tggcggctgggggtcaccccaccggcgagccggagccacctcggccccctttctcgtgttctntaagggccccggccatggcaatcctcgcaccaatccattccacctccgttaaccccgttcgttttatttgcgtttccatcggttctcggctctgttcatccatagagtttcctcctcttctcctttagtgcaaggcttgaggatccatctagaagatagcaatgggggaaactactggagaacgtgccctgacccgtctccacagcatgagggagcgcatcggcgattccctctccgcgcacaccaatgagcttgtggctgtcttctcaaggcttgtgaaccaaggaaagggaatgctacagccccaccagatcattgctgagtacaacgccgcaatccctgagggcgagcgtgagaagctgaaggactctgccttagaggatgtcctgaggggagcacaggaggcgattgtcatccctccatggattgcccttgccattcgcccaaggcctggtgtctgggagtatctgaggatcaatgtaagccagcttggtgttgaggagctgagtgtccctgaatacttgcagttcaaggagcagcttgtggatggaagcacccagaacaactttgtgcttgagctggactttgagccattcaatgcctccttccctcgcccttctttgtcgaagtctattggcaatgaggtgcagtccttgaacaggcacctgttcgtcaaagctgttccatgacaaagagagcatgtaccccctgctcaactttcttcgtgcgcacaactacaaagggatgaccatgatgttgaacgacaggattcgcagtctcgatgctctccaaggtgcattgaggaaggcagaaaaacatcttgcaggcattacagctgacaccccatattcagagttccatcacaggttccaagagcttggtttggagaagggttggggtgactgcgctcagcgagtgcgtgagactattcaccttctcttggaccttcttgaggcccctgagccgtccgccttggagaagttccttggaacaatcccaatggtgttcaatgttgttatcctctccccgcatggttactttgcacaggctaatgtcttggggtaccctgataccggtgggcaggttgtctacattttggatcaagtccgtgctatggagaatgagatgctgctgaggatcaagcaacaaggtctaaacatcacaccaaggattctcattgtgaccaggttgctacctgatgcgcatggcaccacatgtggccagcgccttgagaaggtcctaggcactgagcacactcatatcctgcgtgtgccattccgaacagaaaaatgggactgttcgcaaatggatctcgcgttttgaagtctggccttacctggaaacttacaccgatgatgtggcacacgagatttctggagagctgcaggccacccctgacctgatcattgggaactacagtgatggcaaccttgttgcatgtttgctggcacacaagttgggtgtcactcattgtacaatcgcccatgcacttgagaaaaccaagtaccccaactccgacctttactggaagaagtttgaggatcactatcacttctcctgccagttcacagctgacctgattgcaatgaaccatgctgacttcatcatcacaagtaccttccaggagattgctggaaacaaggaaactgtggggcagtatgagtctcacatggcattcacaatgcctggcctttatcgtgttgtccatggtatcgatgtctttgaccccaagttcaacatcgtctctcctggtgctgacatgtccatctacttcccattcaccgaatcacagaagaggctcacctctctccatttagagatagaggagctactcttcagtgatgttgaaaacactgagcacaagtttgttctgaaggacaagaagaagccaatcatcttctcgatggctaggctagaccatgtcaagaatttgactggtctggttgagttgtatggtcggaaccctcgcctgcaagagctagtaaaccttgtggttgtctgtggtgaccatggcaaggaatccaaggacaaagaagagcaggctgagttcaagaagatgtttaatctgatcgagcagtacaatttgaatggccacatccgctggatctccgctcagatgaaccgtgtccgcaatggtgagctctaccgctacatctgcgacatgaggggagcctttgtgcagcccgctctctatgaggcctttgggctaactgtgattgaggccatgacctgtggtcttccaacatttgcaactgcctatggtggtccagccgagatcatcgtgcacggcgtgtctggctaccacattgatccttaccagaacgacaaggcctcggcgctgctcgtggagttctttgagaagtgtcaggaagacccaaaccactggatcaagatctcgcagggtggacttcagcgcatcgaggagaagtacacatggaagctctactctgagaggctgatgactctctccggtgtctacggtttctggaagtatgtcaccaacctcgacaggcgtgagacacgccgctacctggagatgctgtacgccctcaagtaccgcaagatggctaccaccgttccattggccattgagggagaggcctccaccaaatgatctggccttacccggtgaaaagaatgggcaatgggtgctccattgttgcagtgctgatccaggggtgaagaaaaacagaaatcgaggaacgaatgcatccatttagtttctaagggtttagttgatttcagggccagttcttgtggggttttcaatggaagaaattgatgtaatgctctggccttttcatggatactatgaatgaaataaatgaataacaagattctctaaaaaaaaaaaaaaaaaaaaggctcgagggggggcccggtacccaattcgccctatagtgagtcgtattacaatt

SEQ ID NO: 92629 - DNA, 815 bp, Oryza sativa
  Clone ID: PAT_MRT4530_91092C.1
cttcttgcacgcgtgcaagaacgagaattcgatcccactccgcccaatttctcgcgcgaattcgccgccaattcgagcaggcagcaatggagtcccccgccgacgatgccctcccggcgctgccgccgatcaggaccgctttgtcgaccccgtcgccgccgccgacgaccgtggaggcggaggtctcagcttcgccttcgccgccgaaggaggaggtggtggcggaggcggatgcggaggaggaagagccgtcgacgccgacgtcggaggagagcaggctgaggccgccggcggtgtgcccgccggcgccgcgaaagccgctgccgccgcggcggctggcggctgcggcggcggggaagaggaagtcgtcgccggtggtgttcgtcgacgtcccgcgagacctcgccgccgtgttccggtcactgccgccgaagaagcggatccgggcgtggtgatgccgccgcgatctggccagtataatttcccatggccgcccggcttcttggtttggttgatttcttggagaattcttggagttcttccccttcttcttctttttttctccttttcttttcttcttaatttatttactggtgtccacggccatcgtataaattatagttcttcgtataaataaggtgttatttttatgtgtgttttttatcttattttttatgcctttgtgtgaaggagaatttgtagttgtagaattgaggaggctgttactggatggaagtgaaaagccaaataatggttgtaagaaaaattcacagaaatcttggtaattatgatagctaccaaaaccatttattatc

SEQ ID NO: 92630 - DNA, 382 bp, Oryza sativa
  Clone ID: PAT_MRT4530_91093C.1
gtcaggctttcagacttcagaagttcagagacttcatttaaactggtgtgcctctgtctagaatcctatgttgactggagttatatatctgccttgaccggccaaaagaagccagatctaggaaaatagataaacctagaaataatagaagaaaccaaaatctcaaggacattgccataggaggcccccaacaaatgttttccgtgtcaaggaggatgtccgccctatattctgggctaacagaccaaagagctatatttcaaggaccctcggttgggatcaatacccacattggcggtggtgtgattcccggaacccatcgtatggagcactttactgactaccagttcactcgaccccctgggaagggttaagaagcttc

SEQ ID NO: 92631 - DNA, 151 bp, Oryza sativa
  Clone ID: PAT_MRT4530_91094C.1
tctgttttctgctggattgaacaacagtctggggacagggtgtttcttatactggagcgaggttcttgaacatcaagggcatgatcggctcagcgtccgtattctaattccacgctggtgagaatggttgaccctattcgaatcgatctat

SEQ ID NO: 92632 - DNA, 1671 bp, Oryza sativa
  Clone ID: PAT_MRT4530_91095C.1
aataaaacggtgatggttaacttaaacttgcagaacagctgctgctgctgtacagtaaatttaatttccatccaaatacaagatggaggcaattacagtaaggggataatatatctattcctatcgagataaacctctgataaatactgggacgaattactagtttactactgctactactttctagtacacagtaagagtaaaaatgcaaagaaaatgtgaaagaaaaaagagtcgaatcggtggttgttaggctataatgcttctttttttgtagtctcccacttttccagtttattccctttggatgagcatcttttcttcttcttcttctcctctctctagctcgccttccctttctacacggcgcccccctgtaccttcctttctagcttccgcttaatctgcacgctcgcttcagcttcggctgctgaccaccggagtccactcgaaccgaccggcgtcgaggggcacgccgcgaacgacgtcgaagttgtacttggcggcgaagcgcttggcctcagcctcctcggccgccgcgaagaacgcctcgatctcggcggccggcggaatcttcggccgcgtggcttgctgtgctgaggctgttgccgcagaaggtagtggacggctgcgcttctgtcctccagccagatccgactccagatcgctcacctctccggggagaaagcttgatggagttgtttctctcctctcgcggtcacggccgctcgccgagtcgctcgcggagccctccgggacatgctcgctgcctgcctccgcgacgtcggagcggcacgcgaggctcctgtcctgagccgccgcgtccacggacgacgccgtgctggagcaacgcgagaggccagccgccgcatgcgccgccgctccgttcccggaacccgccgcctccgctacaaccggagccctcgcggccggcgccggcctcggcggggccatgaacagcatgcggctcctcagctggaggtagcagctcccgccgtcacggcgagtagtccccacgaccgccgtcggcagcagcgccttcctcctcctggtggacgccgccgacgccgccttcaccttcgtcgtcgtcgcgcccgccgccgctgccgacctcgacctcgtccggacgccaaccacctgcgtgacctccatggcggccaactcctcccccgtggcccccctgaacttcctcatgtacttgcccatctgcgccgcgtgcgcgcccctccggatctggccgttgggctgcgacgctggtgccggtcgcgtccggtcgttttcacaaacctcccgaacagccgcaacggggaatcgccggtcgcggaaacggaacggaaacggaaagccggtaatgacggaattgcccccgccgcaccgtccttggatacccgacacgtgttcagggacagatcggacgggtgccgttgctccagggctccggctgactgtttgaaatttgaacctctcggacggccgcgaggagcgcccaagaaaggaaccggccttaactctcaaaaggcttctctggaaaagcgagcagtctggcacagcaaccagcatcggcagcaggtcggggcccagcccagggagggtggacgcggctccagattctacccatctcccacggagacacagagccagccaccgcgtacgtccacggcggtagtacat

SEQ ID NO: 92633 - DNA, 715 bp, Oryza sativa
  Clone ID: PAT_MRT4530_91096C.1
ttcggcacaagagaaccattagtcaaaccaaattaccaacaaagtacacctctcccttgctagggtttgttccctctcccaatctccaaagtgtcatttcacattgacttcattcttcttcccagatcccccaatttctccctttcaccatgaagcttctccctcttctcatcctcgcaatggtcatggccaacgccttcggcgccgtcacttctcgcacggcgccgggggaggaggcgctgctggcgcacggcgtggtgaagacgacgacggcggaggggacgtccatcgacaaccaccacgcgataccgcggccggagtacgacagctggagcagcccggggaacatgccggggagtggccatgacattgggagcgaacaagctcagccatgatcgagctagatgcagcttacccagctctacccatgtcctgtacgtatatacatagcaagcttgcaagccatgggttatacacttattacgtacgcttgattgcatgtagctagtatccatatatgtacggttgtggctctagttgtggttgcatgataattcgaagatgctttgtagtttctacagtgattgtatatttgtattgctcatgtaaaagtgtttaactgtatttaacctcatcacgtgtactaatgttaattaattaaatactgaataaaatttatacgtccctacatgaagggagagttcttgttttctcc

SEQ ID NO: 92634 - DNA, 632 bp, Oryza sativa
  Clone ID: PAT_MRT4530_91097C.1
cccaaaccaaaccctagcccgccaccggagcgccacatccatgccgcacgccgtcgccggcggcggatccatcgctcccgccaccccccgccgtcgccggcgccggatccgtcggcagcggcaccggatccgtcacccccaccgctcggcgtcgtcgtcggcggcggatccgtcacccccgtcgcccagcgtcatcgccggcggcggatccatcgcccccgccacccatcgtcgtcaccgatgccggatccgtcggcggcggcatcggatccgtcgcccctgccgcggccgtcgtcgttgtcggccgccgagccgaggttgccaagccgccgccgcgaccccgctgcgagcccgccgccgccgtagccgctcccgccgcccgccgtcgttgctcccaccgcggccgtcgtcggcggtggatccatcgcccccgccacccatcatcgtcaccggtgccggatccgtcggcggcggcatcagatccgtcacccccgccgcggccgtcgtcattgtcggccgccgagccgccgccgccgccgtagccgctcccgccgcccgccgtcgccgctcccaccgcggccatcgtcgttgtcggccgccgagccgaggaagccgagccgccgcgcccgccg

SEQ ID NO: 92635 - DNA, 792 bp, Oryza sativa
  Clone ID: PAT_MRT4530_91098C.1
atggcagtggcgctccccgaccgctcctttcccgccggacacagcccttctccctgccgggcactggcagtggcaggtaggctcttctcgccaccgtcatccccgcacttatccggcatccaccatgtcgcgctcacgctcccgcactcatccggcggccacacctccaacatgcgggcggtaggcggcgtcgagcagcgggcggcgggcggcggcggctcggcttcctcggctcggcgaccgacaacgacgacggccgcggtgggagcggcgacggcgggcagcgggagcggctacggcggcggcggcggctcggcggccgacaacgacgacggccgcggcgggggcgacggatccggcaccggtgacgacgatgggtggcgggggcgatggatccgccgccggcgaggacgctgggcggcgggggcgacggatccgccgccgacgacgacggccgcggtgggagcagcgacggcgggcggcgggagcggctacggcggcggcgggctcgtagcggggtcacgacggcggcttggcaacctcggctcggcggccgacaacgacgacggccgcggcgggggcgacggatccgatgccgccgccgacggatccggcaccggtgacgacgatgggtggcgggggcgatggatccgctgccgacgacgacgctgggcgactggggcgacggatccgccgccgacgacgacgccgagcggtggggcgctccagcagcaggtcaaccggctctaccacctgaaagtccctttgatcaagtgcaccatgaccgaatga

SEQ ID NO: 92636 - DNA, 1765 bp, Oryza sativa
  Clone ID: PAT_MRT4530_91099C.1
aagcttgggacaaaccttgaattgatctctaagtggctgccgacgcgcgcgaagccggcctggacctcgtcggcgatgcacagcccgccggcgctccggaccgcctcgtacgccagcggcaggtaccccggcgacagctccacgatcccaccgacgccctgtatcgcctccgatatgaagccggcgacctgcccggtggtgccaggggctcctcctcttcttcctcctcctcctcttcttcctcctcccatctccccccccccccccccccctccctctccccccgagcgcagcagcgccgcacacaccgctacgactacggcagcattgcatcgcgccagcgcctcctccggccggcgacgcgaggccccctccaccgccctcctcacgtacggttgccaaatccacccccgacccacctctctctcgcgctcccagacccgcgtcctctctccgtccgcggtccgcccgaaattttctccgacggcggcgcctccgcccacgatctcgcgcatccctccccctctcgccctcccaggaccgcacctcaccgccgccgccgctcgcgataagccgtcgctgccgattcctcccgatccctcagcccaccgccgccacccgatccctcaacccaccgccgccagtgagccgtgcgcaccttcttctccggccgaggcgtgcagtcgcgccgccgtccctccgccttgctgatctcctccggcaacgcgcggccgcctcaagcaccacccgccgtctctccgaatcgcactcacgcggtccctttgtcgttggaaggtacagagcccctcgtcccccatccccctctcccttctctctctctcccccatccctaatatgtaagtctcctctcacccaatcagtcaccccgccaccgcccaaaccaaaccctagcccgccaccggagcgccgtatccacgccgcacgccgtcgccggcagcggatccatcgctcccgccaccccccgccgtcgccggcgccggatccgtcggcggcggcaccggatccgtcacccccaccgctcggcgtcgtcgtcggcggtggatccgtcgcccctgtcgcccagcgtcgtcgccggcggcggatccatcgcccccgccacccatcgtcatcaccggtgccggatccgtcggcggcggcatcggatccgtcgcccccgccgcggccgtcgtcgttgtcggccaccgagccgaggttgccaagccgccgccgcgaccccgctgcgagcccgccgccgccgtagccgctcccgccgcccgccgtcgctgctcccaccgcggccgtcgtcggcggcggcggatccgtcgcccccgccgcccagcgtcgtcgccggcggcggatccatcgcccccgccacccatcgtcgtcaccggtgccggatccgtcggcggcagcatcggatccgtcgcccccgccgcggccgtcatcgttgtcggccgccgagccgccgccgccgccgtagccgctcccgccgcccgccgtcgccgctcccaccgcggccgtcgtcgttgtcggccgccgagccgctgccgcccaccgcccgctgctcgacgccgcctaccgcccgctgctcggcgccccctccgtcctcgaggccacggcctcctgcaccgacaccttccgcctagaagccatcggtagcgaggtaattatattaatcagctaacaaattatatcattagcggccaaaattcaaattaagcccaagtcaatttgggtagaattcattgagccctttcgagaggta

SEQ ID NO: 92637 - DNA, 1075 bp, Oryza sativa
  Clone ID: PAT_MRT4530_9109C.1
ccggcctgcagccctcggctcgaggggtccggcctctctcgtgttgcccagttctggcttttgctgtaaaattcctagctccctcggtgtagctgacagatcatctattgctgcaagatctttcaatgctggttatgttaatgaaaatggtgcttctgaagctaacaatattggcaacaaaaacaataccatggtgtatcagacaagtttggccatgcgcccagtctctccttgtgatctgcaacttggatttagtggtcagaagcagcagatattgcctggttatggagaacttagaccagctgcgtctgggtcccctcagcttgggggcatggcagcaaacagttcaattcccaccagaccctctcagccgcagtttgggagtatggccagaaccgatgctttgcctactggaccctctcaaccagggagcttggccagacctaattttgtgcccacaggattttctcagtttgcaagcaggccacctacttctgtaccaccagccgattcctctcagtttgcagggggcatggccaggcaaaacattccgaccacgtctgaaccaactctagtattgggctatactcctcagatggtcaatggccctccagcccagctaggatgggatctatctttgtcaaggatggtcagtgaaggcatgctcccagtgttatgtatatggtgcaacagccaattccaccattttggccccattgatgcacagcaatctggttcgtttggtttcatttgcccagcttgcaaggagaagatgtcaggcaatcctaatgcgcccaataacggtccatggcaaccatgataactgttgtggctggtctacaatcatttctgttgctggatctttggtctaaggttagctgcggtgtgcctgcaccccagagttttagtagggtatctaggaacgatgtctgtattttgtggactctcttctgtacgtacttctgttgaaatgtgaagaaaaccccaagagaaaaacccaaaaaaaaaaaaacttttggcaggatggatctccagtaagattcaagggttgtacgcagccaaaaaaaaaaaaaaa

SEQ ID NO: 92638 - DNA, 296 bp, Oryza sativa
  Clone ID: PAT_MRT4530_910C.1
gcacgacgaacacgggcagcgacgccagcacgtcgtcccgggtcctcttcctgcacccgacgccgccggtgcggcgcatcgtcatcgccgccctggggatctacttcttccagcacctcaccggcatagaggtcgtggtgctgtacggcccgagcatcttcaaggcggccagcatagctagccgcaactcggtgctcgcggcgacgatcggcgtgggcgtaaccaagacggcgttcatcatcgcctcccttctcgtgaacgaacggtctaggaaccttccgctgtccattctgtca

SEQ ID NO: 92639 - DNA, 582 bp, Oryza sativa
  Clone ID: PAT_MRT4530_91100C.1
atgctgctgcgctgccagtgtgaagctatccatgatatctatccaatctcaccttcctttgctgaaggctaccatgccatgggcatctcttctgataatggatttctttgctgcatcaagcaagtagcacagacagcgtcgctgtcctccaggtgcagagagccactgagcccaacgcccccgttcgccggttcacgtgaagagcgtgacctccgtgccaccggctgccaccctcccgtcgcgcggtggggcgccgccgactcccgccctcccgtcgcgcgcgccgccggccgctaccctctcgtcgcgcggtggggcgccgtctgctcccgccctcctgtgtgcgggcgccgccggccgccaccctcccgtcgcgcggtggggtgccgccggctcccgccctcccatgtgcgatggggcgccgccggcccccgccatcccatcgcgcggtggcgcgttgccgacccccgccctcccgtcgcgcggtggcgcgccgccggcctcctgtcgcaggcaccgccggccaccgtcctcctgccgtgcggccaaagtccgataccctctcgtcactgcgccacctag

SEQ ID NO: 92640 - DNA, 876 bp, Oryza sativa
  Clone ID: PAT_MRT4530_91101C.1
atggcgtactccggcggtggcgggaagctgtccgccgtcgatgcgatcctcgccgaggcggccgacctcgtcgcgctggagcagatcgccaagctcaacacagcccacctcgccgccgacggcgactccgcgctcccttccagcctcgagtcccgcttccgcaagctcaagtccctccccgccgcgccgttgcctccgccgccgcccgccaagtccctgggccgcagcgccaccgcgccgccccaccacaccgacccgccgccatcggagacgccggaccctgctccgcctgcgccccctgcaccggcggcacaagaacgccgaccagaagacgccgccaaggaagcccaggagaaggagaactcctcgccgccgccgtcgcaggctcatcctccaccggccgtgaccgttccgacggcggcggcggcggacgacaacgaggaggacctggagaagctgttcaggccagggcgcggccggccgacgctgagggagaggaacagggggagggacgacggctcaccgtcgccgccgcgccaggcgtgctgcttcggcttctcccccaagaagacgctgcagaggactccgaccgggagcggcaggaagagccgccgcgccggcgtcgccgccgccgccgacgacgacgtccttggcatcggcgacgccggcgagtggggcgacgagaacaggaggatcgtcaccgagctcaagcagcagcagcgcaagctcaagaaggcgctcgaggagcaggtcaaggtcagcagggagacggccaagatggcgcagtgggtgaagcaggcgtccgcgcggatgacgcacaccgctgccattgacgacttgctcagcgactgcgacgatgaagacgagctcaagtga

SEQ ID NO: 92641 - DNA, 539 bp, Oryza sativa
  Clone ID: PAT_MRT4530_91102C.1
ccgggctgcaggcagagtagctggtgctggtgctatgctaagacctgtatctaccgggacacaggttgtaatgaggagagctcgtagtgtagcacaagcagcttggacaagaccagcacttcagctatcctcatggacatgtattggcccaaggaggcgaactaatactgtatccacttcaacagtaacatcagaagaaataagagcaacaacaaatgatggctctgagtccacttctctgttgactgaaaccacagagatagttaaaactgaaaccatgcagtttgcttcatcagaagaggttcagagttcgagtgaggtgtcagatgctgttggaatgatggatgagaaggtagatagtgacggtgaggacatcattgatcaccatgtggatgaggacaggatgactgacgtagagctgtggcagcaacttgaaaatgagttgtaccgaaggagtgaagatgacgaaatagtggaggatatgactgaaagtgctattactgaagaggtgggtggcacagctgaagatgtgctcagtg

SEQ ID NO: 92642 - DNA, 1298 bp, Oryza sativa
  Clone ID: PAT_MRT4530_91103C.1
aggcgcaatccggtagcccctccccccggcaaacagaaggccccgggtatggagtggatcggtcctgatatatatatctaaggctctttaaagctcccttgcgatactattgttaataagaaagatatccatgtttcctgtaatcggtatcgctcgaacttgtcttcatgatggttttttaccccatggacaacacgagccgcgtctccgtgccttgcctctccttggagcaacgcgacgactccgcggataagccggcgttgttcagcatctcggacaagaaggccatcgacggcggcatcccagggctgaccaacaccaacgcatggaggcttgtcgaccatatgctcatgccgtctctccagcaagccatctctccccggttgtgcgtcctcctcatcgagcccatcgccactgtgatttggtattgtcgcattggcgacgatgagtggatgagatacgaatacgacattggaatccagccattggatccgcccttcgaaggcaaggaccatgagaaggtgccgatatgccagatcgccgcttgccggggcaagttctacttcaacagcaactttgagaaaatcgaagtgttggagttaacccccacgccgacgttcagctccattgagatcgcggactctattgccggaggattaggggtgattggcggggcgtatgtgtaccttgttgagtctgaggatgaactatacatggtctgcctgcggcttgaccatgacttcaccatctacgatatgaccgtccacaggatggatttcttcagccatcaatggcgcagagtgtatgagattgggggtcgtgcattctttctagctccgttctattttggcgcttcatgttcggctgatgagtacgggctcgagaaggattctgtgtatgcctcgtatgcactggataagtgttttgaggtatccaagcagcagcagcagcacggcctggaatcagtaaagacgacactgttcaacatcttcgagggacaggacatcgcctgcgacatcgatgccctgacgaacaacaacagcatccctgtttcttgtctcttttacctcaccacgaaaattggccttttgcctccaattccgattacttcagatgtctgagtgttgtcgtagatttacccgtatttgttggtcagagcctgtaagcaagtatcagcaccctctcccaaactaatgaatgcggcagtagaaaaaagatgcagaaccctgctgtcttgaaaaccaccaaaaaaaagggggcgcccgctcagggggccccgcgcttgtgcgcgtgcgcat

SEQ ID NO: 92643 - DNA, 489 bp, Oryza sativa
  Clone ID: PAT_MRT4530_91104C.1
cggacgcgtgggcaataggtgatttggtgagtgcttcagatggttctccgctgaatgttgataagcagggggatcaggggggtggtgcgtgaagttgtcaatgacgagcctgttgattctgaagttgtcaatggtataaagcctgagcctttggtaggcgagtctgttgatgctgaggttgtcaatggtgtcgtgcctgagccttttgtaggcgaatctgggggctccgacggtggtggtatgcatgttgaggatgaattggagatggagggtggaaagtctgacaatgggattgctgaattgcctccagtggtgagtgctctagagaaacaagatactgatctcgagcttcgcaatgattattctggtgcaaaaaatggcgcggacaatcattaggatgcaacgaattttgttgattccagttctggatatgtttgcacaagagatggcgcatctgtacctttaaaggttcctgccaatgttgacgac

SEQ ID NO: 92644 - DNA, 2264 bp, Oryza sativa
  Clone ID: PAT_MRT4530_91105C.1
gataacagtgcatggggagcacacaactgctaaggttcagccatgcccaaccaaacacatacaactttatttttctatcatatcattatccatccgattgtatcatttaccagctatcgcttacgctgttgttccaggacaattctatctactctacaaagaacaacgctacatccattacagaaaaagtacagattcggcttacgccgtttgtttgatgtctgttgtcacggcccttgtcatctacctccagacaactctattgcttcctggttgtagacagagtcctctccccagtcgaaccgccgctgcatccgctcgtactcctgcctccttgtcacctccacctgctgccactcctcccaccgctccgccagcccctcgccttctagcatccgaaccacctctgacatggatggccgatcctcgggcgatgactgtgtgcacagcaatgctatctgtatcatcatctcaacttcctcgtcgtcataattctggttcaggttgcggtccacaatggatcctagctgcccttctctttgtagcttctttacatgatcgagcaatagaacatcgtcctcttcctccaagcgtgagaagtcaatggcacgctggccagtcacaagctcaagaagcatgatcccgtagccaaaaacatcagttctctctgatgacttccctgtggatagatattcaggtgctatgtgacccattgttccacggacttgagtagtgacagatgtcttctgcacatccactagcttcgctagtccaaaatcaccaacaacaggttcaaagtcctcatcaagcaagacattcgccgctttgacatcacggtgtatgatctttgggttgcagtgttcatgcagatattctagtccacgtgctgtaccaatggccacccgttttctttctggccagtttaagacaggttctccaggcttaaaatctcgcaatcggtaggcaacactcaaattctgcatgaatggatataccaggaggcgctctgtttgtgttgtgcagaagccaatcaattttagaagattgcggtgaactgcaacactaatcagctccacctcacgcaagaaggcggcctcaccaccaggactttcataatcagtcaatcgttttacagcaatcttagtaccatctggaagaacacctttgtaaactttaccaaaacctccctgcccgagaacatttctttcactgaaattatccgtcgcgatttgtagttctcgccatgcaaatctcttgagctggccaaatgcaattcgtcgatcatcctcacctgctacatccacaaaaacttcccgcagatggcttttcctcctccctttacagaacagaaagagagcagctacaatgagaagtcctattactcctccaactgttccaagtactatgccaatttttgagctatgggatccactctggtaggacatgttggttgagcaagagtgggggaagttggttccacaatttaagtgattaccagaaaagttgtaacgtgctacttggaataacggaccaggtatctgaccagacagattattgtacgccagccggatgtcagtcaagcttgagatttttgctagactgtcaggaattgatccattgaaattattatcactaagtatcaacaactggagcttagaaagctggccaagagaagctggtatttctcccaccaaaaggttgtcttctaaatctaagcttgtcaaactagaaagattaccaaattgctctggtatgccaccggaaatcctattaccagccaaggacaggacagtcaaatatttcagttctccaattcttggtgacaaaactccagcaaatccacgagcagccaatgttacttgaataacattgttgttattgtcacaaattacagaattccatgtacaagggttgacttgattttggttccaatccgaaagctgattgccagtaacattcagtttttgtttcatatcatataaggcatctccttggcggtcggacgcggagaaggacggcagcgagaccgcgatgatgaggacggcgacgcgcagctccctcatctcgcctcacaacccgacggggaaagggggcaaggggatggtcggtcgccggtgccggggggcaggaggaggagggcgccccggtggccgcggcggctgctggtggtggccggaatcccgcggcggcggagcccccggcgagggttttggcgggcgggtgacttgggcggcgagaggaacgggaaagaggagagagaagaa

SEQ ID NO: 92645 - DNA, 153 bp, Oryza sativa
  Clone ID: PAT_MRT4530_91106C.1
atgtccgaactgcaccgcaaccgtcattgggagaacatctggagcatccacgccaaaccccaggatgaacgactttatgaagatgttggcggtatgggattgtcatttaacaaccgccaacaatggggcatggcatcgggtccacgagattga

SEQ ID NO: 92646 - DNA, 252 bp, Oryza sativa
  Clone ID: PAT_MRT4530_91107C.1
atggctgcggtggcggggtcggcggcggtggagcctgctcgcggctcctcctcttcagcggcgccggtgcgcacgaggttagttgtaccggtgagggagagtggcgtgagcgtggtggtggcggcgtctgtggtggagccagtggcggctgctgcggcggagctagactacatgaaagaatatcgtagggagctatgcaaaaggttgctgtaccattgcttcaacgacttacatccaaaacgtcgtttctaa

SEQ ID NO: 92647 - DNA, 1743 bp, Oryza sativa
  Clone ID: PAT_MRT4530_91108C.1
ctaacactgtagatccgcccctgctggagctgccgctctcttgctctccctctctccctctctctgcccgagcaacgacgcgacgcgacactgcgccaccctctgcccgcgaatcccgctgtgccaaggctgcataaagccgacgccgtccctgccgattccctgccacgcccaggctccgaccaccgcagccgccgtggccaatccaacaccgtggccctctgcccgatgccgaccaagccagaccgacgcagccttcctcctctgcctcctccccggagccgccgccccctgccaaagccgacgcacgaagcgacaaggcgagaccgaccgcccctggctccccgtaactatccctgcaccccctctgcaatccctgcgcaaagccggcgcctgctgcaagccgtgttccccgccgaccaccgcctccctaaatccatttccgcaatctattttaggacccctcgaccggagagccgccgccaccaatgtcgccgccgaccgcctagggagctcgtcgccacgccgcctcggaccgtctccactccaaccacgcacggggtaaggattctcgtagtcccggccatggcgctcgccgcctccagccttccccggccacgcctccgcctctagggtgtgcgaaaggaccactctagcttccccggccttctgccgagccatccccgtcgctgctcgtcgccggcgagcacttcccgagccaccgcgcctctgccaatcgagctgcctgtaggttgaagaagaaggaacttgtcccgccatcatcttcttcgcaatacctctcctgctgcttgtcataccttctttgatatttgttgataatccatcaaccttcatcggcttctttgaatcatcaaacttaatcttccccccttcaatggcaacctggatctgctgtttgaaaactttgcaatcattggtattgtgagaaccagaattatgccacttgcaataccttctcttgcctagttcctcagtcgatggaatcacatgaccagcaggaagttgaatttgtttttccttttgtgcaagatgagataagctttcaaactcctgagatgaaaacttctccttgatcgaagttatcagacctaggactcctgattggttgatcaaagcatgttgcactgcgtagtcaatccgatcttggaagttgttaaactgtggttgcacttcattgttatcttcatcaagatcctcaaccacttcatcctgaaggccgtcacctttattgcctgagccatctgcaatgcctttatcaccttgggatgagcttgagccaactttgtcggcaacaactactttcactttgtacttttggtagactttcccgcgagtttctacgaacgacttcatgaattgctcctgagcgctcttcatcattaattcaaaatccttcttttgttctggtgacaacttgtctatagtgactggaacaatgttcccttcattaacgtcggacccagtcggttttggaatcttggtttgagggtctgacgacttgcctttaggttcgtgagcgtgccagttgattttatcccccgtcgacagagagtgtccaccatggccttcatcttgtggcaaatagtcggtgattgaaagatcgccttgatggaaggtgcggaattcagcttcaagcatgagggcgcgctgctcggtcgcatccccaattccactgtaaacatgagcagcagccgccataaagtctcccttctcatttctcat

SEQ ID NO: 92648 - DNA, 182 bp, Oryza sativa
  Clone ID: PAT_MRT4530_91109C.1
gcacgaggacgatgaatcattggtatgtaacagtgtttttatcaaaatgcacgtgattgttaagtttatgtaccggtttgctcattttacaagtttttacactaaatcgcacccacctgccaagtttttgtacaactggcgcaatttactctatttttatatatgtggatatgccaggccat

SEQ ID NO: 92649 - DNA, 706 bp, Oryza sativa
  Clone ID: PAT_MRT4530_9110C.1
tttgtttttttttttttttgttttttttttttttttttttttttttttaggaaactaatactagattcttaaattgggacacgcaaatgcaccaacaagctattccgatacatgttattcaagcaataagggaagcattaaaatttttccaagaaaaaaactactagggaaactgaacacatagagatagatcagattggggatagcaagctgtagcacgcacccaataaatatgggagcagagaaaaaagggcaatggcccccggggaggcggggcaaaccccaaggggggagtcggagtcgggggccggctcagccggtctcctggtcgaagtcgtctccgtcggactcctcgacgttgtcggcgtcgtcgtcctcggcctcggcgtcgtactcctccttgacgtcgccggttggcttgcctatgatcaccaggttactgttggtcttgcggatctcgttcagcttgtcctcgaggtcggactcggccatggcgaggaggagctcgtcctcctgggtggtggcggggacggggagcagcgtggacgccgggatcagcggcggcgacggccactgccgcatcagcgccgggaactgcagcatctccgcccgtgccgccgccgcaaccgccgccggggttggggattggggagagtggggtgccctctccgtcgaatcgagtgctcgcttttcgattcgaactcgc

SEQ ID NO: 92650 - DNA, 181 bp, Oryza sativa
  Clone ID: PAT_MRT4530_91110C.1
agctcttggggaaaggttgaatgatgagaacattggatggcaatgctggaaatgctggaacttgatgggtgcaatgtgctgtgatgatggccatggaacctggtgtgatgtgccatggaatgttggaaacaatgatggagggatggctgagaatggcaagtgaaatgctgggaaattttgc

SEQ ID NO: 92651 - DNA, 522 bp, Oryza sativa
  Clone ID: PAT_MRT4530_91111C.1
atggcgaggggcgtctcctacgtttccgcggcgcagctcgtccccatgctccgggacccccggatcgccgtcgtcgatgtcagggacgaagagaggatctacgacgcgcacatcgccggctcgcatcattacgccagcgacagcttcggggagcggctgccggagctggcccaggccaccaagggcaaggaaaccctcgtcttccactgtgccctcagcaaggtgcgtggcccatcttgtgcgcaaatgtatctggactatttgtcagaggctgatgaagattcagatgtaaagaacatcatggtccttgaacgtggatttaatggatgggaactttcagggaggcctgtttgccgctgcaaggacgctccttgcaaggacttcagggtagccatttatgctttatggtcactacagcacattaaaaaccgtgtatctcactttggtggatccgcaattgtgctattatgtggctctatcaattcagtggccgttaatgtcacttcacgacatgtaaactga

SEQ ID NO: 92652 - DNA, 737 bp, Oryza sativa
  Clone ID: PAT_MRT4530_91112C.1
aatggttgggccctttgcaacagggtatgttgtatatgacaatcagatagcttacattttagtttctcgcacctatgttgatgaatcttacttagtgcaagatcatatacataagcatggagtagatggatcactcatattctttttccaggttgtacaaatgaaatcccgttacctaacccagggtatcatttgtataattgtcttgagctaactattcccctgcagacgatagaggaatttcgtgctggtacaatacatagagagccctgttacatggcatggagatgaacatgaaggatcaacgtcctcaccatcagtgcagatgtacgaggctgactgggaaccaactgggggatgctcctggatggacccaagtatccgactacgctggaggttcagcctggcagagtgccagtgaacaccgatggcaagtgcctcaagacacatcctatgggaactcccattcctccagcactagtggcatgccacccatctccaagatgtggcgctctagttcctctcgaggggacttgtgggagctcactaggagaatggacacacgagagctgcaagcaggagagatccagcacaacctcgaaggacacatggcccaaatgtaagtatggccaacctctgatgctcagtacgccaacctcaacaatctgatgcagcaacagcaggctgacctacaggcgtactttcgctttcagcaattcaaccctatcaggggccct

SEQ ID NO: 92653 - DNA, 710 bp, Oryza sativa
  Clone ID: PAT_MRT4530_91113C.1
ccggccgggggcccatcaaacacagagtgccatcgctcacacggccggcggcggcggcgatggcgaggggcgtctcctacgtttccgcggcgcagctcgtccccatgctccgggacccccggatcgccgtcgtcgatgtcagggacgaagagaggatctacgacgcgcacatcgccggctcgcatcattacgccagcgacagcttcggggagcggctgccggagctggcccaggccaccaagggcaaggaaaccctcgtcttccactgtgccctcagcaaggtgcgtggcccatcttgtgcgcaaatgtatctggactatttgtcagaggctgatgaagattcagatgtaaagaacatcatggtccttgaacgtggatttaatggatgggaactttcagggaggcctgtttgccgctgcaaggacgctccttgcaagggtgtgtgctcttgagtatccatatgaaactatgcatttacctgtgcatttcaaatttggttgctacctgcagacttcagggtagccatttatgctttatggtcactacagcacattaaaaaccgtgtatctcactttggtggatccgcaattgtgctattatgtggctctatcaattcagtggccgttaatgtcacttcacgacatgtaaactgaaaaccacattggtaattattgaaaatcttctgcttccgttccaaaaaaaaacccaac

SEQ ID NO: 92654 - DNA, 1956 bp, Oryza sativa
  Clone ID: PAT_MRT4530_91114C.1
atggcggctttgctcctttggctgtcatggcttctactctccctcctctccatctacctcctcgacctcctcgcacactcacgacgctgcctcccgccgggaccccgtccgctgccgctgatcggcagcctccacctgctcggcgacctgccacaccgctcgctcgccggcctcgccaagacttacggccctctcatgtcgctccgccttggcgctgtcaccacggtggtcgcctcctcgccggaggtcgcccgcgagttcctgcagaagcacgacgccgtcttcgccacccgttcaacccccgacgccaccggtgaccacgccaggaactccgtcgcctggctgccccccgggccgcggtggcgcgagctccgcaagatcatggcgacggagctgttctccacgcgccggctcgacgcgctccacgagctccggcaagagaaggtggcggagctcgtcgaccacgtggcgggtctggcgcgcgacggcacggcggtggacatcggccgcgtggcgttcaccacgagcctgaacctcgtcgcgcgcaccatcttctcgcacgacctgacgagcctcgacgaccacggcgcgtcgaaggagttccagcgactgatcacggacgtcatggaggcagtcggcagcccgaacctgtcggacttcttccccgcgctcgccgccgtcgacctgcagggctggcgccggcggctgtctgggctgtttgcgcggctgcaccggctgttcgacgccgagatggaccatcgcaggctgcacggaatgaaggagaaggacggcgacttcctggaggtgctcctgaggctcgccgcgcgggacgacgacacggcgaggctcgacggcgacacgctccggtcactgttcacggacttgtttactgcaggtagtgacacaagttctagcacagtagaatgggcaatggccgaattgctacagaacccaatatcaatggctaaactatgcgatgagctaagacgagttgttgggtcaagaagaagaattgaagaatctgaaattggtcaattgccctatttgcaagctgtcataaaagaaacatttcgactgcattcaccagctccgttattattaccacggcaagctacgaggacgatccaaataatgggttatacaatacctaaaggtactagagtgttaataaacgtgtgggccatgggtcgagacgaagatatatggccagaagcgggaaagtttattccggagagattcctagaaaggacaattgactacaaaggtggagatttggagctcatcccatttggtgcgggacgacgaatctgccctggaatgccattagctgttaggatggtgcatgtacttcttgcatccctgttaattcattttaaatggagactcccagctgaggtagaaggaaatagaattgatatgacggagaagtttggtgtgactttagcaaaagccaatcatttatgtgcgatggccgcaccaacgacgagcaacagcggcggcgtgagcggcaagggggaggaggaggacgaggcgtactgggacgagtggctggcgaagccgatccacgagcgggtggcatggcagatgccgtcggcgacggagctgcaggatgccggggtgacgttccacgccaaggggttgccgtgcagcctcgtcgacgtcacgttcagccagcgcgacggcgtgatggagatccccaccgtggagaactatgccaaccacgccatgctcgccaacctggtggcgtacgagcagagccgggggcggttagagatgcagcgggtctatagccggcggtgctccaccgtgcgatggagggcggcggccagcggcgtgcgcgacgagagggcggtgggatggcaaaggcaccacctgcacgattggagactggcggtgcacggtagccgctcgcgtggagaggatgggggagaagagaaggggattggatctgtttag

SEQ ID NO: 92655 - DNA, 180 bp, Oryza sativa
  Clone ID: PAT_MRT4530_91115C.1
attgccccttctctttccttggttttctccttcgccgggatcgcgcgcagtggggtgaggttggcgaggtcggcacaagaggacgcctgtgcatgctccgacttgcaaatcagagaccagatcgagcccctgaccggctgcagctgcctcctggctgcctgctcaagctctcaagcctga

SEQ ID NO: 92656 - DNA, 183 bp, Oryza sativa
  Clone ID: PAT_MRT4530_91116C.1
atggatctcagcgacgatggccatgagggaggcgctatagcaaagccacccaaacaggaggccaaagcatcactcactactgatacgatcgagctagaggccaaggccacccgaagcctcccaatcaccctgcccatggtgaaaccatggagtccactgattgtgctcctcctactgccatga

SEQ ID NO: 92657 - DNA, 404 bp, Oryza sativa
  Clone ID: PAT_MRT4530_91117C.1
tcgtttaactccttgggacagcttgacactgcatggcagagggtgggtataggtggggacagaaagaaatgggctaggaggccaattgcatcgtggggatggagtccgactgtgcccaaggagaacggtcacaccaccgttggcgccggggcggaggccaaggccgtcgacgactgggctgagatcgccgtcaccgacgccgctggggatgccaaagccgacgccgccgcctgcggccgtagacgtcgaccccctgcttcagggcatctccgacgccatgcgagtggaccaccacttcctcaaggaaggcatcatgttcaacgacattacgccactagtgctgggcccggcagatgttaaggacaccgtcgacatgttcgtcgagcgctaccgcagaatggtca

SEQ ID NO: 92658 - DNA, 140 bp, Oryza sativa
  Clone ID: PAT_MRT4530_91118C.1
atggcgaaattgcccctggcaccatcttcctctcacggctcgcccatccacgacaggttcccaacagcacctccgccggcggagagtcgttgtcctcatcatcgcggcgctggcgcctgcgcgacctcgtcggcgtcggc

SEQ ID NO: 92659 - DNA, 936 bp, Oryza sativa
  Clone ID: PAT_MRT4530_91119C.1
atggcgcctggggccattctccgagtgacggcgcttctccgcttcatcctcctcgtcgccggcgccgcgacggcgacggcgaccgcggcaaggttctcccgcctgttcagcttcggggactcgctcaccgacaccggcaacctggtgctcctccccgccggccgcgatgtcccggagcgccgcctcccgtacggccagaccttcttccaccgcgccaccggccgcgcctccgacggcaggatcgccatcgacttcatcgcggaggcgctggagctgccgcgcctgaagccgtacctcgccggcgagggcgccgacggcttccgccacggcgcgaacttcgccgtgggcggcgcgacggcgcgggacgccgggttcttccagcgccgggggctcaggtccgtgccggtctccctcgccaccgagatgggctggttcaaggaactcctgccgcttcttgcctcctcctgtcctcaagagcaaaggaagatcacggcgagctcgctgttcttcgtcggcgagatgggcggcaacgactacctcaacgccatcttccagaaccggactctcgacgaggccaagaccttcgttcccggcatcatcgatgccatccgttcatctctcgccgagttgatcggggttggagcaaagacggtgttggtccaggggatgctgccgatcggctgtgagccgcgggtgctcgagctcttcaagctcaagcacggccgctccaccgccggcgacgacagcgactacgacgccgcgaccggctgcctgaagagcttcaacgagctcgccgagcagcacaaccgcgcgctcaccgccgccctggacgagctccgccgcgcccaccctggcaccgccatcgtctacgccgacctctaccgcgccgtcaccgacatcgccgtctcgccgcgcagatacggtaacgtgcattga

SEQ ID NO: 92660 - DNA, 633 bp, Oryza sativa
  Clone ID: PAT_MRT4530_9111C.1
atggtggacgatctgatgaacgcagtagcagcgattagctactggtgcggcggcagcatcgagctcgacctgtgcgccatcgctggcatccagcgcggctcaaatctggtcgctgtcgatcccgtcgacggcatgcctcgacaggaggacggcgacgcggtcagagtcgttgacttgggcggggacgacgcggaggaggtggagacaggcggtggtgacctcgtcggtgagatagcgaggcgaaaggagctcccggccaccccctcgttggtggcggcaccgagacgtccgccgccagccaccgtcgcccatgccagattcgccgcaccgtcgccggatccacgcgtgtgggcgcggagcggcggccagatccgctcgggaagaaggcggtggagcctccgccccttgcgcccacccgcttggcctcccggccacctcctcattagcagcggcgccgcccgaggccgtcgagccggcgaagccccccgccgccgccgccgctccacggccgcgcccacatcctcaacgcgcgccacagccccgccgcccccacgacatgagaggagaaagaaggaagaagatggagaaggaaggagatggatggaaaacgtgacggtattggcacggttctaa

SEQ ID NO: 92661 - DNA, 2640 bp, Oryza sativa
  Clone ID: PAT_MRT4530_91120C.1
cagagaaaggctggttgtttttcaagtcatttttactttaagggtgtgtttggttgggtttctcaacctgcttttgcttttgcaaaagtgaaaagccaaccaaagggtccaaaagctataagtgcttttgctccaaagatgcttttagtgtagcacaaatccaaaagcacccctacccctgctttcactggcttttgagggaaaaaaattactcccctttaccattaccccggggcccaaaggaatgctcgatttagggtttcgccgccaggctcccccggccgaccgccgcccgtctggcccccgcttgccgccgcctgctggtccccgctcgacaccgccccacccgatggcgctgccgctcgtccccggcccaggcaccgccccactcgacgccaccaccgcccgacgccgacccctgctcggccccagccaacgccgccgccgcccgacgccgacccctgctcgtcccggccaacgacgatccctgctcgtccccagccgacatgcccgacaccgaccctgcccgtccccgcccgacgccagcagagaaacggtagtagagcatgtgaggcttctataagcagacaactccaatgatatttccaattgaatgttcagcaatatatcgagatgacagtccatagaagtaatattattcggttcaagaatgggtgacaaggcagaatggggtgatggttttgtaaggcattgtttgatgtctgcaaataagagatagaagctgggaatagacccatgggaattttcaccactacaggttggaaaaatattgtttccaagtttgcaaaaaaaatcgggtgacaagcgaactaaaaagcaattgaagaacaaattagatgtgctgaaaaaggaatattcaatgtttatggagttcaagaattgtgccactagtcttggatgggatgaggcgaaacaaactattgtctgttcggcggaatggtgggacgaacaccttgctagatgcaacaatcgtgagaaaggaatcaaatgcaatcatgtgaagtttcgaaaacaaggaccaaaattcctagatgatctgcgtatcatttttggcaagtcacatgttaatggggcttcagcatcatgtcctagagatgtatcctccgatgaggcaagtgatgaggatatggctgaggtacccaaacctgcagagaaggctgagaagacagtgaacccgggaaaaataaacgcaaggggtcatccactgttgttagagacaaggatgagaagatcccatttgctcgtatgtacaagaacacttgtttgaagatagaaacggcaacagagaagatctctacaagtattgaagcatcattagcttctccatgcaatgtagtccctatcattaaagaggctatgaatatggtgaaagattgtggggtagaagaaaaaactgctctaatgcacacatccacaactttgattatgaagcctgaatttagagaggtctttagctatctagaaacaaataaaggaagactcgatttgatcgagagggagcatgaaaaggagatgacgaagatggatggaaaattggtagatgtagtcaaagaaggacaaaagggattactgatgctaactgaacttgcccaacatgctgctgttatgggagaaatgggcaatttgtatttttataagatgtttcggatgagccctgagatttttcatgcacttccatgacttgctagtctctacctacggattgagctcgagcaacaatgtttcatccattgagtcattggcgatgtttctgtggatcgtcggagggccacaatcattttcacaagctgaaagttgtttcacacggtcactttggacggttcacaccaagtttcatgaagtgttgaagtgtttgcgcaagttagctaaagacaatattactcctagagatcctaatttttctatggagcatgaaaggttgagagaggatcgattttggccatacttcaaagatgcgattggagcaatagatggttcacatattctagtggtagtgccagtggatgaaacgattagccacacatgccgtcatggatatacatcgcagaatgtgctagctatttgtgtctttgacatgaggtttacctttgcggttgctggttggccaggttttgcacatgactcgcgcatcctcagtcatgcattggcaaactttccttcatttcccatgcctcctacaggaaaatattatctcgtcgacttgggttatccaaaccgaatagggtatcttgcacctttcaaaggagccacataccatataccagaatttcggcatcattcgggatctcctcaaggaaacaatttacgttataaggagtttgagagatgtgatgctgatgaggactacttactacaagatacaagtgacacgccagacgatgagagtgaagatgcaaagaatgatgataccatgaatactattcgtgctaggatagctgatgctttgattagttcaagaagcagggaggagcaacaggccaagtcctggccctgttgggccaggccagggttcggccgaaccactctcgtggccgtttgatccaggtttcggcatggacggtccaaatcacctcctgatggcggtttaagggcagaaaggacaattcgtatcagaataat

SEQ ID NO: 92662 - DNA, 496 bp, Oryza sativa
  Clone ID: PAT_MRT4530_91121C.1
tgcacttttgcagccatggatcgaagttagatgtacgaaaccgatcgacatatcaaggagtatagaagtggtgtttcaaattttataaacgtcgcagaggaggagaggaaaagaaggaacgattgcatgacttgtccatgtacaaattgcataaatgggaaggagtttgatagctaactagatatacactctcatatgatacgttgagaattcatgaaggggtacacatgttgcatgaagcatggagagcaagaatactatagatacagcgagtagtggtgcacaaaaccaggaaaaagatgaagctgacttgttcgtaacttctccgttgagcagtgaaatggttgatgtcgatcaagatgttttgtaagcaatgttgcgcgatgttgaggagctagattataatgagagagattatatgacgttcacctcaaatcaaagtaacatcccaaaacattcacatcacaaatcttaagttacttatacacacaaatca

SEQ ID NO: 92663 - DNA, 204 bp, Oryza sativa
  Clone ID: PAT_MRT4530_91122C.1
atggcgagggaggtggacagccgaaagaggaggggtcatagcctcataggaattggaaaaacggataaaagctcatcaagtttattcagtttcgatctggcggcagcgtgcgtcaaggtgggtcgcatggtggctttgaatttgaaaacggacttgggtgattattatgattcaatttttgatgttgaaggagtgaaaatgtga

SEQ ID NO: 92664 - DNA, 388 bp, Oryza sativa
  Clone ID: PAT_MRT4530_91123C.1
ttgttttgcatgttgcagctgaggtcaggtctcctggcatacatggaagtcggttgccacattaatacatcatgtacatgtcatgcgctactgatagctttggagtcacaggactccagattacgtcaagaatgctagtcaaccggtcgatagatgggttgcgagatgtggcataactgaacccaggttcgggcagccaatgtatactagtgaaagagatgtttaccaccgttgtgagaatcatcaagggccttggaacaactacgtgggatgactttaagtgcgtgagtctaaactatacagtactctagtctccacaaacttatagcacactcagtgggcaaggtatcccatacaaggatgccttcagacactgctgatcttgtct

SEQ ID NO: 92665 - DNA, 2217 bp, Oryza sativa
  Clone ID: PAT_MRT4530_91124C.1
atggccgccctaagtcggttcatatcaaggctgggagagaaggcgctacccctatttaaactcctcaaacgctccggaccgtttacctggacggaggaggctgagcgggccctcactcagttgaaggtgtacctcagttctcccccagtcctggtcgccccggagcctgatgaaccgttgctactctacctggcggcaaccccgcaggtagttagcgcggcgttggtcgtggagcgcgatgaagacaaccctcattccgcgcatcctcaccctatgtcgacccgacccgagagagagcagggaggagaggcccccgagccgaacggcggcccgaggcccccgacgaccggagttggccctccgcctgcttgtcagacggtgtcaggcgcccccgacccccaggatggccccggggccactgcgcgaaggccgcacctgtcgccctctgaccccgaggttaatcctgtgtcgactcgacccgggagagagcagggaggagaggcccccgagccgaacggcggcccgaggcccctgacggccggagctggccctccgcccgtttgtccgatggtgccaggcgcccccgacccccaggaaggcctcggggccactgcgggaaggccacgcctgacgccctccgaccccgaggtcatcggcacagaagccgagtgcgccctgcgcagcctctcagacgaagaacgccctggagatgtggcccctagcgaagagggtcggccccgccgaaaggtgcagcagcccgtctacttcgttagcgaggccctccgggacgcaaaaacccgataccctcaggcccagaagatgctttacgctattctgatggcttcgaggaagttgcgccattattttcaggcgcatcgggtcacggtggtcacgtcttaccccctcggccaaatcttgcataaccgagaaggtactggacggatggtgaaatgggcaatcgaactctctgagttcgatttgcactttgaaccacgccacgcaatcaagagccaggccctcgccgactttgtggcagagtggaccccagctcccgagcccgtctccgcccccgaggacagctcgggcccctcgcagctgcctcacacagcctactgggtgatgcagttcaacggctccctgtctcttcagggcgccggtgcgggggtcacgttgacctcgccgagcggagacgtcctcagatacttggttcgtctctactttcgggcaaccaataatatggcggagtacgagggactccttgcaggactcagggtggcagctggactggggatccgccgcctcctggtgttaggcgactcccagctggtcgttaaccaggcctcggggcccgaggggagcgcacccagctcccctagattgattgcttggatcgctgagatccaggcatacatcgcagataagactctacccgaggactacgaagggagtgaacgcgtccagcgcatctccaagcgctacgtgctggtggaagggaccctctatcggcgcgcggctaacggagtcctcctgaagtgcattcctcgggagcgaggcgtcgagcttcttgccgatatccatgaaggcgaatgcggagcccactccgcctcacgcaccttggttggcaaggcctttcgccagggtttctattggccgacagctctcaacgatgcggttgacctggtccggcgatgcagggtgtgccagttccacgccaagcaaacccatcagccggcccaggccttgcagaccatacctctttcatggccatttgctgtctgggggctcgatatcctgggtccgttcaggcgggctccgggcgggttcgagtatctgtatgtcgctatcgacaagttcactaagtggcccgaggcttatccggtcatcaagatcgataagcactccgcgcttaaattcatcaggggcatcactgctcggtttggggtgcctaaccgtatcattacggataacggcacccagttcactagtgaactcttcggtgactactgtgaagacatgggcatcaagctctgcttcgcctcccccgcccaccccagaagcaatggccaagtggagcgcgccaatgcggaaatccttaagggcctcaaaaccaagaccttcaacatcctcaagaagcacggcgactacgccacgtccgggcccgatcactctgcgtcgacgacctcgtcctacgccgcgtccaaacacgtgctggactga

SEQ ID NO: 92666 - DNA, 509 bp, Oryza sativa
  Clone ID: PAT_MRT4530_91125C.1
ctagggtttgcgccaccgccaccgcgcgccacccatgttcccgccgccagcgtgctcccgtcgtcgcgagccgcgtctcccggcgctggcatgctccgacgcccgtctccccattgcccgcccccacgccacccaacgccgccccaggctgcccgatggccgacggctgtctccctgtcgctcgcccggtggccgtctccccgtcgcccacccgacgccgccccacgccgcgccgaagccacctctgctcgacgctgcttgaagacacccctgctcgacgccgcccgacgctgctccgatgcctttgccactgctctagccggtttgaaagaatgggtgacaaggcagattggggtgatgattttataaggcatttgtttgatgtttgcaaagaagagatagaagctgggaatatacccatgggaattttcaccactaccggttggaaaaatgttgttttcaagtttgcagaaaaatcgggtgacaagcgaaccaaaaaaaacaattga

SEQ ID NO: 92667 - DNA, 2158 bp, Oryza sativa
  Clone ID: PAT_MRT4530_91126C.1
agaccgagcgcctggccattcgcagttcgacgcggcactagggtttgcgccaccgccaccgcgcgccacccatgttcccgccgccagcgtgctcccgtcgtcgcgagccgcgtctcccggcgctggcatgctccgacgcccgtctccccattgcccgcccccacgccacccaacgccgccccaggctgcccgatggccgacggctgtctccctgtcgctcgcccggtggccgtctccccgtcgcccacccgacgccgccccacgccgcgccgaagccacctctgctcgacgctgcttgaagacacccctgctcgacgccgcccgacgctgctccgatgcctttgccactgctctagccggtttgaaaggtgaggccgaatcgcccctgcccctgctcttgtgttgatgcatgtgttgtccctagaatattacagcaaattgatttttggcctgcaaattgattgaagaaaaatttatttggttcaagaatgggtgacaaggcagattggggtgatgattttataaggcatttgtttgatgtttgcaaagaagagatagaagctgggaatatacccatgggaattttcaccactaccggttggaaaaatgttgttttcaagtttgcagaaaaatcgggtgacaagcgaaccaaaaaaaacaattgaagaacaagttagatgtgttgaaaaaggaatatacaatgtttatggagttcaagaattgtgccactggtcttggatgggatgaggcaaaacaaactattgtctgttcgctggaatggtgggaagaacaccttgctagatgcaacaatcgtgagaaaggaatcaaatgcaatcatgtgaagtttcgcaaacaaggaccaaaattcctagatgatttgcatatcatttttggcaagtcacatgttagtggggcttcagcatcatgtcctggagatgtatcctccgatgaggcaagtgatgatgatgtggctgagatggatggaaaattagtagatgtagccaaagaagggcaaaagggattattgatgctagctgaccttgcccaacatgcttctattatgggagaaatggccaatttgtacactgagcggtatttgcaaaaaggtgcatacagacaaacgccagaaactggaattcaatgggtgatgaggttgatggatcgtccaaggtatttttataagatgtttcggatgagccctgagatttttcatgcacttcatgacttgctagtctctacctacggattgagctcgagcaacaatgtttcatccattgagtcattggcgatgtttttgtggatcgtcggagggccacaatcattttcacaagttgaaagtcatttcacacggtcactttggacggttcacaccaagtttcatgaagtgttgaagtgtttgcgcaagttagctaaagacaatattactcctagagatcctactttttctatggagcatggaaggttgagagaggatcgattttggccatactttaaagatgcgattggagcaatagatggttcacatatttcagtggtagtgctattggatgaaacaattagccacacatgtcatcatggatatacatctcagaatgtgctagctatttataactttgacatgaggtttatctttgcggttgctggttggccaggttctgcacatgactcgcgcatcctcagtcatgcattggctaattttccttcatttcccatgcctcctacaggttatccaaaccgaatagggtatcttgcacctttcaaaggaaccacataccatataccagaatttcggcatcgttcgggacctcctcaaggaaagtatgaggtgttcaatttcttgcattcctcccttcgaaatgttattgaaaggtcttttggagtcttgaagcaaaagtggcgtattttgaagggcatcccaagtttctcacatactactcagaagcatatcatcatggcttgtcttgctttgcataacttcgtccgtgatagcaatttacgtgataaggagtttgagagatgtgatgctgatgaggactacttactagaagataccagtgacacgtcagacgatgagagtgaagatgcagagaatgatgataccatgaatactattcgtactaggatagctgatgctttgattagtgcaagaggaggatag

SEQ ID NO: 92668 - DNA, 3377 bp, Oryza sativa
  Clone ID: PAT_MRT4530_91127C.1
aactagtggatccccgggctccaggctgaatgaatgaatgaatcctactaggccagcactgctgctgcctgctgctcccaactcgacgacgccaaccacctcgcctcgcttagctcccacctaaacagtaagagcacacagcccaaaccggcgggagatccgaagcgcagccaagaacgcatcactgtcctcttcgtcttcgtgcatggagttgaccggcctgacgcgggcggcggcggcggccaccgtgacgccgccggcgccgcgccggggatggggcgagctccggttcgcgccgctgctgcccggcgagcggcatgggaggaggaaggtggtggtggcggccatcagcgaggaggtgccgcggctggcggcgtcgccgtcgtcggggatcaagggcggcggggccggggagaggcggccggcgccggagaaggtggcgctgcgggcggcgctgacggtgcggcggaagcagaaggaggacatcaaggaggcggtggccggacacctcgacgcgctctgggacatggtcggccggaatgtcgtgctcgagctcatcagcaccaagatccacccaaggaccaagaagccgatgcagagtggccgtgtgtccatcaaggactggtgccagaagaggggagccaagggcgaccacgtcgtgtacacggccgagttcacggtggacgccgacttcggcgagccgggcgccatcgccgtggccaaccggcacaacagggagttcttcctggagagcatcgtcgtcgagggcggcggcctgccgtgcgggcctgtgcacttcgcctgcaactcctgggtgcagtccaccagagagctgccaacaaagagggtgttcttcagcaacaagccatatttaccttctgaaacacctcccgggcttagagaactaagggagaaggaacttaaagacctaagaggagatggcacaggtgttcggaaattatctgacagaatatatgattatgccacatacaatgatttgggaaatccagataaggggaaggaattcatcaggccgatccttggaggagagaagataccttacccacggcgttgccggactggtcgcccgccaacggataccaacatgctagcagagagcagagtagagaagccgcatccaatatatgttccccgcgatgaggcatttgaggagctgaagcagggtgccttctcatcagggaggctccgggcagtacttcacacattgatcccatcgctgattgcatccatctcagctgagacccacaatttccaaggcttccaccacatcgacaacctctataaggagggcctcaggctgaagctgggcctgcaagaacacctattccagaagataccacttgttcagaagattcaagagtcgagcgaagggatgcttcgttacgacactcctagcattctttctaaggacaagtttgcatggctccgtgacgatgagtttgctaggcaggctgttgcaggaataaacccagttaacattgagcggctgcaggttttcccaccagtgagcaagctggatcctgcaatctatggaccaccagaatcatcaattactgaaacacacatagctggacatctcaacggactcacagtacaacaggcaatggacgaagcaaagctgttcatagtggactaccatgacgcatacctgccattcttggaccggatcaatgcgatagatggacggaaagcatatgcgacccgaacaatcttcttcctgacagaagctggcacactgaaaccgatcgctatcgagcttagtcttcctccagccaagccaggggagcctcggccaagcaaggtcctgacgcctccctatgatgctacctcgaattggctctggatgcttgccaaggcccatgtcagctccaacgatgctggtgtccatcagctggtcaatcactggcttaggacgcatgcaacaatggagccgttcatcctggcggcgcaccggcatatgagcgcaatgcaccccatcttcaagctcctgcacccgcacatgcggtacacgctcgagatcaacgcgcttgcacggcagagcctcatcaacgccgacggagtgatcgagtcctgcttcacccccggccctgtctccggcgagatcagcgctgcttactaccgtaaccactggcggggagttgctgtggaggacgcgacgcagccccatggcgtcaggcttctcatcgaggactacccatacgcgaatgatgggctcctgctctggtcggcaattcgaagctgggtggagtcctacgtgcagctctactacccggacgccgggacggtgcagtgcgatcttgagctgcaggggtggtaccacgagtcgatccatgtcgggcacggcgacctccggcacgcgccgtggtggccgccgctctccacgccggtggacctggcgtccatcctgacgacgctggtctggctcgcgtcggcgcagcacgcggcgctcaacttcgggcagtacccgctgggcgggtacgtcccgaaccggccgccgctgatacggcggctgctgccggacctggagcgcgacgcggcggagtacgccgcgttcctcgccgacccgcaccgcttcttcctgaacgcgatgcccggggtgctggaggcgaccaagttcatggcggtggtggacacgctgtcgacgcactcgcccgacgaggagtacctcggcgaggggcgggacgagggcggcgtgccgtggacggcggacgaggcggccgtggcggcgcacggcatgttcgcggccgatgtgcgacgcgccgaggagaccatcgagaggcggaacgccgaccacggccggaagaaccggtgcggcgccggggtgctgccgtacgaactgctggcgcccagctcgccgccgggggtcacctgccgcggcgtgcccaacagcatctccatctgatctggcgacattgccgatccattcattcctctttgtgttctggatcaataattttagtaaaatgaatatgaaataggagtattaatcagtatccgtaaacaaaaaaaaccaaaccctccgcttctccaccgctccagtgccgcagccctcgccggagttcggtgactgggggcctccgaactccgggacctgcagacgacgacatcctacgcagccttgtccctgcctctgctcaccggcgacgatcacctcgcgcccattcagggaccatgttagaaaacaacagtgttgtggtgacagacttctcagatgatgatagcaattgtgaatgttctgtaaaaaaggaagaagattgtgagagtgtaagaacgagagcaaaatgggcttttcagcatctattcagtttgcaatgttgaggtgaaggcaatgccttactgatcttgcaattatgctc

SEQ ID NO: 92669 - DNA, 712 bp, Oryza sativa
  unsure (1)..(712): unsure at all n locations
  Clone ID: PAT_MRT4530_91128C.1
tctcccaaggctgggagcatctgcataaatatggtgacatcagacttggtacgaattcatcgttccatgtttaccctttaaacttttgacaaatttatatgaaaaaaaaaccaccaaattcaaatgagttttgcagaaatcgaatcctttcgggtctcaaaattataactacttctagcattcaaaatttatctcaaaatataacttctttattaacaatcacttttcattcaattacaaccttccaccgtttaattcccacttacctttgtttttcaacccatcataattttcnccttttaattctacccactgtcttagtaattgtgtgtaaaattaaaaatccttatatcttagaacgaagatatgcaaacactgtggcactgtgccattgactcactcgaatgagagaaacgcccagggatcctctagctaactccacaagatgatgatttagttggcttgggttcaaaatctctccccttccacttattcaatatcagatgcttccctagtattcatgtttttttttactacctccatcccataatacttgtcgttttgagttttttttaatgtttgttcattcgtcttatttaaaaaatataaaattattatttattttatttgtgacttgatttatcataaaagtattttaagtataactttttttttatatttgtattaacgttgcaagaaaaaaaaaaaaaaa

SEQ ID NO: 92670 - DNA, 247 bp, Oryza sativa
  Clone ID: PAT_MRT4530_91129C.1
agtcaaactaaaatattgattttttaagcttggttaaataacggttacataagcaacaagtgtcaaataagtgaatgatagaaaaactcaaagattatttaactaggaacctaaattgggaaacaaacactaactacacatctgaatagcaatgcaacaggttagtgccatacaggatacattgaaagtaagctttaaacagaaatacgccaattgtcaggggtcatcactatacactgtgactcag

SEQ ID NO: 92671 - DNA, 738 bp, Oryza sativa
  Clone ID: PAT_MRT4530_9112C.1
atgccggcgtcgtacctgcagccgcgccgcgggacgaacgggcggcgtattatggagcacggcgcgggcgaggagatggtggcgttctacgaggcgtgggtggggcgcgaggagcggatcgtcgcggacctcacggacgcgctcctcccggcgcggcggcggcgggacgtgctcgccccgctcgtggacgccgcggtgggccacgtgtcggagtactacgagcgcaaggcccgcctcgccgaccgcgacgtggtggcggcgctggacccgcgctggctcaacccgctcgagcgcaccttcctctgggcgtggggctggaagcccgcgctggtgttccgcttcgcggacggcgccgtcgccggcggctcgtcgcaccagcagcagcgccgcgcgctggagcgcgtgcgcgccgccaccgcggaggccgagcgggaggtggaccgggaggtggcggtcgtgcaggagtcgctcgccggaccccgcgtgctggcggcgctgcggaggcagcacccgcggaacggcgaggccgacgaggccgtcgccgcggtcgggcgctcgctccgcgtgctgctcgccgcggccgacgcgctccgcgagcgcacggtgcgggacgtcgtcgggacgctcgcgccagaccaggccggcgcgttcctcgcggccatgctgaggttccacctcggcgtgcaccgcgccggccgcaactggggctccggcaacggcggccggcggggcctctag

SEQ ID NO: 92672 - DNA, 721 bp, Oryza sativa
  unsure (1)..(721): unsure at all n locations
  Clone ID: PAT_MRT4530_91130C.1
ggccgcgggttttttttttttttttttggaagtggataattagtctttgacattggttaccagtatggaaccttttttgtccgcctcctgtaattaatacttttcaagataccctcaagtacatctgattttgttctcctttcgatcccatgcaacacaatggtagatgcagggagacgaaacctcttatgcaagatacttggtatggactctcaagtgcataaaggcccagaagcgattcttttgcatcaagtctcatatgattaatatcgtaaagtaattcttcccttcccccgtcttttcgtatgctgtattacgcatcggtctgagtggccttggccttggccagcgtctccttggcctgctgcacctgctcctccggcacgttgagctggtcgcttacagcgagctgctcctctagcttctcgatagcgagggcaatcttttctcgcaggggtccgaaaacgccctttgtctgctcgagggcggtttgctgctgcttgagtatgtacggggcgttctcatcactgtcgccggcgccgctgtcaatcttcttcttcaaggcttcaatgctggcttcctcctgttcgagctctttgtggtacgaagcttcctccttgagaaggcggttgacggagcctgtagcaatggcgagttgtgaaggcggcggcatggtgaaatagattgatgcgatttgatgtanagtgaatgttgtgtctgt

SEQ ID NO: 92673 - DNA, 914 bp, Oryza sativa
  Clone ID: PAT_MRT4530_91131C.1
gtggaaggtgaggtcgccgggcgcccaccattgccgtcgcgtggcgaggcatgaagatcctagtggcggtgaagcgggtggtggactacgccgtcaaggtgcgggtgaggcccgaccggacgggcgtcgagacggcgagcgtcaagatgtccatgaacccattctgcgagatcgccgtcgaggaggcgctccgcctccgcgagtccggcgccgccaccgaggtcgtcgccgccaccgtcggcccctcccagtccgtcgacaccctccgcaccgcgctcgccatgggcgccgaccgcgccgtccacgtcctccacgaccccgacccctcccgccccctcctccccctcgccgtcgccaagatcctccgcgccctcgcgctccaggagaaccccggcctcgtcatcctcggcaagcaggcaattgatgatgattgcaaccaaacaggacaaatgctagctgggttgcttaattggccacaaggaacctttgcctcaaaggttatattgaacaaggaaaaggctactgtggagagagaggtcgatggcggaatcgagaccattagcttggatttgcctgcagttatcaccacggatttgagactgaaccaaccaaggtatgcaacattgccaaacataatgaaggcaaaatcaaaagtcatcaagaaagtcacccccgaagatctggatgtagatatcagatcagacatggaagtagttgaggtcactgaaccacctaagagaaaagccggtgtcattctttcatccgtcgatgagctcgttgacaggttgaaaaatgaagcccgtgttttataacattctttgtactaatgctcatgagctaaggaatgtggcatatgcaaataaagtgtagttataaatggtcatcgtatgcaaataaaaatgtggcgttcccgt

SEQ ID NO: 92674 - DNA, 651 bp, Oryza sativa
  Clone ID: PAT_MRT4530_91132C.1
tttttttttttttttttttttttttttttttttttgacattatcagccaagggtttatttgatgctgggacatcatcaacaggaggccacatgcattcatggtagataggtaaacactaatactatatgacacatacttttggccggtggccacttgatcaactcaactggtcacaggtgcaacactacgtaccaatcctaattaattcactcggcacctgcaaattctgcatgcagattactacaggctacggcagtaatctgatgctgaattaattccttatcccctttctggcgaaacatggtgaccactgcatcttgcatgctctagctacaacctcatctctgtcactacagctagcttgcacattgcatgcccagttcatcatcatcaatcacactttgcgtctttggtttgcaattcgatccccttctgcatgaactactactgtcgatcgatcgtcgatcgatagttaatttgattggatgatcagtcgtaggcggagctgaagaaaacgttgacggtgcacccggcgagggatctgggaggacgccgggagtttgagcggggagacgcaacggggggacttgaactgggtgacgggggcgcccgaggaaaggtagtggcggagaaccttctagaaggttcca

SEQ ID NO: 92675 - DNA, 1690 bp, Oryza sativa
  Clone ID: PAT_MRT4530_91133C.1
gcacgagggcgcaccgccgccccccccgcccccggctcccccagatctcgccgcgatggccaccgccgcggccgccgcgcgcgccctcctcctcctcatcgccgtcgccggagcgctcctccgtcccgcggcggcggagatcaagcaggagtccttcaaggacgactcccgcgcgtccatcctcttcgagaagttcgggttctcccgccgtgggttcgtgtccatcgccatcaccggcgcgaggacctcctcgaagctcgccaaggcggagccggatcagttcgggttcttcctcctctccgacgaggcgctcttcgaggccatctacgagcagccgccgcccacggatctgaaccccaaccccgagcccaacccgggatgcgtcctctccagcccctacgtcaagccgctcttcagcttcgccgacctcgacggcaacggcaactacaaaaagaccttcccggtcacccaacccgacgagtacagcctcttcttcgccaactgcgcgccggagacggccgtcaccatggaggtccgcaccgacatgtacaacaccaacctggatggctccaaggactacctctccgtcggccaggcccccgtcccggcgatctacgccttcttcacggtctgctacctcgtgttcttggccgtctggctctacgtcaccctctaccgcaaccgcctctcggcgcaccgcatccaccacctcatgtccggcctgctcgcggcgcgcatgctctactgtatctccgcggccgaggaccagcactacatccgcatcgcagggacaccacacgggtgggatgtgatgttctacctgttccagctggtgaagggtgtgatcttgtttgctgtgattgctctgattgggaccggttggtcattcctgaagcccttccttcaggacaaggagaagaaggtcctcatggttgtgatcccattgcaggttgcagctaacattgctgcagctgtggtcggtgagactggtccattcttgcagggatgggtaacatggaaccagatcttcttgtttgttgatgtcgcctgctgctgtgctgtgctcttcccggttgtgtggtcgatgcggtcgctgcgggagtcatccaagacagacggcaaggcggcccgaacccttgccaagctcacccttttccgccagttctatgttgttgtgattggatacctatacttcactaggatcattgtgtatgctctgaagacaatcaccaactacaagtacagatgggtgagtgttgccgcagaggaggtggccactgtggcattctacctgttcatgttctacatgttcaggccagcagagaggaaccaatatttcgctcttgatgaggatgaggaggaagctgcagagctggcactccgggaggaggagtttgagctctagagtgttgtgatccagtgagaggatacatgatgggaaatacagcctgacctgttcaatttctcctccattgatgtcggtcatactatacagatgcaggatttagcctatatttatctatgtgttatggatatattcactcttttcacttctttcttctagcatcaaatgttgttgagaagtccaaagataattgggctgcttgtgttgcaaattaggggcatttattcaatgttgccattttgccaaaaaaaaaaaaaaaaaaaaaaaaaaaaaaaaaaaaaaaat

SEQ ID NO: 92676 - DNA, 304 bp, Oryza sativa
  Clone ID: PAT_MRT4530_91134C.1
ctctgcttgcaaccacatgtcaaaacttgtgccgcttgatccaacgtgctgggaaggtggagaaaagcggctgagagctcggtgcttcagcgtcggagctcgaggagggggtaatgccataagtggcctgcgtgtcgacgttgggcaagcaggttctggtagcgtcggagctcggggaggggatgacggtgtagcatggctggccggcgacgtcggggctcgacgcgggcgagaagagaaggagaagaatcggccgtgggagaaaagagatggaagacagggcctacatgtcagcgagggctga

SEQ ID NO: 92677 - DNA, 330 bp, Oryza sativa
  Clone ID: PAT_MRT4530_91135C.1
atgcagtacgagacgccatccatcgattcgaggtcgctctcgcgcgctttggctcggccccttctctcgccgaactccaccaaaccggtcgctattttcttccttttccacacggaccgagcacctccccaaacgcgccctcctcgctttgttcccgtctccttccctcctcctcgccggtgcatcgtccacttcggtcggtatcggcgcgcgaaatccgtagtcagcaagttgggcggccagatctgcacgttacacaaggagaaagaaaaacgattcacaatgcggcctgccacgccaagactactcgtgctgtcgtacagcgcagaa

SEQ ID NO: 92678 - DNA, 270 bp, Oryza sativa
  Clone ID: PAT_MRT4530_91136C.1
atggattggagctccagcttgagcatcgttagacatctggacctggatgacattgcagacagcggaccagtactccttccagatcatctgccgcttgttgtgcttctagagctccgccattggatcgtcgcgatgatgagagcacaaccgttgagctcgaggaagcagccgtgcgacgtcgatctcgagcactatcgtagccagtgctcgggagcaacctctgatgcctgtgtcgcatcgacgtacgacgccgttgcagctgcacgatga

SEQ ID NO: 92679 - DNA, 3504 bp, Oryza sativa
  Clone ID: PAT_MRT4530_91137C.1
atggatccagcagccctcacaagtgaggagaggtgggtatttatacccacagcacaaatatgcccgttggagtgcaataaaaggttcaaggttgttcttggcatcaagaacagcaacaacgtggagtcggtgtaccaattgctaaggcgcagcacccctgtggtagttgaagtcggaccgccaacgtcgtgtcctcccccaaatcgaagtttatcctcctctcatcgaaagatcaggaacccccgttgctgcatcaagtgctgtaccttgacattacttgcagtcacctatagctccacaaatttttatgtactacatcacaagatcatgcttgttgtcggctccggaggatcaggggagcaccctcaacattcaccacgtacaaggggcatcatacaacattttgagcgccaagtgagggagcatgctgaaggccttgatgaggatgttagggtcgccaatggtcgccttggtcaattggaggctgctcaaattgacaccaactctaagctttccttattggacaggtcccttgtggctgtgaatacttctcctgtaggcatcttgaatactttggagagaatgggccaagatggtcatgatggaccggctaggcacaaccacattggccatgatgctaatagcaacatcgcagcaagggaagaagtggactacgctgctgacaccgagcatgatgaggcgatacatgataatgacgattctttaggcaagatcaagtttaccattccttgctttgatggaaaatatgaccctgatgcatatcttacttgggagttagccattgatcagaaatttgattgtcatgattttcctgagaataaacgtgttagggctgctactactgaaagggaagtgcagggacgaagagctagcttcaggactaacatttctgcatatcgtgctagctcttcgacaccttccaacgctgctgcaccaccaactcgagcagcagcaccatcgtcctcaagcaacaagctgcgtccctccacaacaaactctacaccaagcccgagtgaaccaacaagaggggtcgctggtacaccttccaagagctcatcatcagtggcattattagcaaggataagagatattcagtgcctatgctgcaagggctttggtcatgtgcgtaaggacttcccaagcacgcgcataatgatcgtgagagctgatggtgggtactcctccgctagtgatttagatgaagaaacctatgctttgcttgcaactaacaatgcaggggaaggtaggctatggcagtttgataaagattctttacactttggcaaatccaatcagtactcctttgtgcataatggaaaaaagcttgtgttacatcctatgtctcctgaagttattttaaaggatgaacttgctagagctagcaaacaaaaaaatcaggagcatactaggagtgagcatcatattgtggctaatgaacttgagaagcataagaagaaatccaccaactctgttcaaaataataaaaatgagattaagctgaagggatcttgtttcattgcaacaaaatcagatttggatgaagttgaccctgatacttctgtttgctatgctttggaatacgccgatgttttcccaaagaaggttccactagggctgccgccaattcgagggattgagcaccagattgacctcattcctggggcctctttgccaaacctttctaagaaagatggctcatggcacatgtgtttggattgtagagcaattaacaacatcacaatcagatatcgtcatcctatccctaggctagatgatatgcttgatgaattgagtggttcacaagtgttttctaaaattggtttgcatagtggttaccaccagattcgcatgaagttaggagatgaatggaaaacaacttttaaaactaaattcggcctgtatgagtggttagtcatgccctttggtctcactaatgcgcccagtactttcatgagattaatgaatgaagtcttacgtgctttcatcggtagatttgtcgtggtatattttgatgatattctcatatatagcagatcaacagaagatcatcatgatcatttgcgtgctgtttttgatgctctacacgatgcacgtttatttggtaaccttgagaagtgcacaatttgcacagatcgagtttcttttcttagctatgttgtgactccgcagggaattgaggtagatcaagccaaggttaaagccatatatagctggtcgacaacggtcagacaagagaaaagctttgtaggacttgctaggttctaccgccgctttgtgagggattttagcaccattgcagccccactacatgagcttaccaagaggaatgtgacattcacttgggctgcagcacaaaggaatgcattggacactttgaaagataagttaatacacacaccattactccaacttcctgatttcaataaaacttttgagcttgaatgtgatgctagtgtgattggattgggtggtgtgttgttacaagaaggcaaacctgtagcatatttcagtgagaaattgagtgggcctagtttgaattattctacctatgataaggaattgtttgctctagaagcgcatggaggagggctgatgaggcactttggtgtgaagaagacagaggataaccttactgatcatttcttttggcccacgatgaggagagacgtggagagggctgttttgaaaaacaatattaaaatgtgggaagaatgtttgcctcatattgagtttgcttataatcattcacaacattcgactactaagaagtgcccttttgagtttctttatggccttcttccccgtgctccaattgatcttttgcccctcccaactttagagagggtgaacattgatgcaaaacaacgtactgaattgatgttaaaactacatgagactactaaggagaacatggagcgcatgaatactaagtataaacttgctggaagcaaaggaaagaaacatgttacttttgaacctggtgatttggtttggttgcatttgagaaaagataggttccctaatttgagaaaatctaagttgctagctagagctgatggtcctttcaaagtgctacaaaagattaatgataacgcatacaagcttgagctgcctgtagattttggggttagccccacatttaacattgcagatttaaagccatatttgggagaagaagatgagttagagtcgaggacgactcaaatgcgagaaggggaggatgatgaggacatcccttccaatgatacaaccatgcctattgcacaacaaggactaatgactagagctcgagctcgtgaacttaattatcagctatgtgtagcctcacaaccagatttgactcaggctactcagaatgacgaaaatagtttttcacatcagaaactttcttgccgaaaaccatcgtcagcgacgctacatagggaagaagatgggaaaaacaagaagaaaatggaaaatgaagggggtggatggaaaatgtga

SEQ ID NO: 92680 - DNA, 2346 bp, Oryza sativa
  Clone ID: PAT_MRT4530_91138C.1
atggcgttggagatgcccggcaacacaacaaacacgatgacgacccgagaacgactagatctggccataaaaaccccaaataaacaggcacccaagggggctgagggcttgacggccaacgccctacccctcccagatttgtcagccgacgccctccccctcccagctccggtggcagcgggcttgggagaggccggtcatgggtgggagcggcatggcgggcgacagtggcggggggttgagggcaacgacggctgtggacggatccggtggtggggagggtactcggtagtggctggggaactccggatccaccgtgtgggctctggcgactccaacaacaacgatgggagggggagggtctggtggcagtgtgatgaggacatcccttccaacgatacaaccacgcctattgcacagcaaggaccaatgactagagctcgagctcgtgaacttaattatcaggttcaaggttgttcttggcacggcaagaacagcaataacgtggagtcggtgtaccggttgctaaggcgcagcacccctgtgcccaaaagaaaaaccactaaaataggaggatcgggggagcaccctcaacattcaccacgtacgaggggcatcatacaacattttgagcgccaagtgagggagcatgctgaaggccttgatgaggatgttagggtcgccaatgatcgccttggtcaattggaggctgctcaaattgacaccaactccaagctttcctcattggagaggtcccttgtggctcaagggaagaactggagtacgctgctgacactgagcatgatgaggaggtacttggtcgtccacaaagacaactgcgccggcagcgccatggcatgggcgctccaccacggcgggagcagcaccatcgtcctcaagcaacaagctgcgtccctctacaacaaactctacaccatgcccgagacaagagatattcagtgcctacgctgcaagggctatggtcacgtgcgcaaggactgcccaagcactcgtgtaatgattgtgagagctgatggtgggtactcctccgctagtgatttagatgaagaaacctatgctttgcttgcaactaacaatgcaggggaaggtgacgcgccccaccaagatgaggaacacattggggctgaagctgcagagcactatgagagcctcgtggtgcagcgagtgctaagcgcacaaatggaaagggctgaacagaatcagcgccacaccttgtttcaaaccaagtgtgtgatcaaggaacgctcttgccgcgtgatcatagatggaggaagctgcaataatttggctagtgctgaaatggtggaaaaacttgcattgagcacacagccacatccacagccctactatattcaatggcttaatagcagcggcaaggagtatgctgatattttcccaaaggaggttccaccggggctgccaccaattcgagggattgagcaccaaattgacctcattcctggggcctctctgccaaaccgtgcgccatacaggaccaacccggaggaaacaaaggagattcagcgtcaagtgcaagagttactcgacaaggggtatgaagcgcatggtggagggctgatgggacactttggtgtgaagaagacggaggatatccttgctgatcatttcttttggcagagagtgaactttgatgcaaaatatcgcgctgaattgatgttaaaactgcatgagaccactaaggagaacatagagcacatgaatattaagtataaacttgctgggagcaaaggaaagaaacatgttgcttttgaacctggtgatttggtttggttgcatttgagaaaggataggttccctaatttgagaaaatctaagttgctacctagagctgatggtcctttcaaagtgctacaaaagattaatgacaatgcatacaagcttgagctacctgccgattttggggttcaaggttgttcttggcacggcaagaacagcaacaacgtggagtcggtgtaccggttgctaaggcgcagcacccctgtgtcagacaacttaagggaccgcatcaccgcggcgagcaccgcgaacaccaggcaactgatcatcgtcttctccgcgtccgacgtctgggacgcgcaccaccaccagtgtcaatattcattctcgcaggaacatgaattaatgccgccggcgtcgacgccgaggcaatgctgctcaaggctgccgacggccgacctcatctctggacatattgtccacgctgacctcttaactccaagcatcacaatcggtcatgctgttcttccacgccgcgcaggaagcatgcggatgacgtggacggaccaaaaagttagagatggatga

SEQ ID NO: 92681 - DNA, 4179 bp, Oryza sativa
  Clone ID: PAT_MRT4530_91139C.1
atgacaggaggatcgggggagcaccctcaacattcaccacgtacgaggggcatcatacaacattttgagcgccaagtgagggagcatgctgaaggccttgatgaggatgttagggtcgccaatgatcgccttggtcaattggaggctgctcaaattgacaccaactccaagctttcctcattggagaggtcccttgtggctgtgaacacttctcttgcaggtatcttgaatacgttggagagaatgggccaagatggtcatgatggatcggctaggcgcaaccacaatggccatgatgctaatagcagcatcgcagcaagggaagaactggagtacgctgctgacactgagcatgatgaggaggtacttggtcgtccacaaagacaacagcgccggcagcgccatggcatgggcgctccaccacggcgggaggtacgtgataatgatgattctttaggcaagatcaagtttaccattccttgctttgatggaaaatatgaccctgatgcatatcttacttgggagttagccattgatcagaaatttgcttgccatgattttcctgagaataaacgtgttagggctgctactagtgagttcactgattttgcatccatttggtggagtgaatttgttcgttccaatccaaataacactccccaaacctgggatgcaatgaaaagagtcatgcgagctagatttgttccttcatatcatgcacgtgatttgctgcacaaattgcaacaacttagacagggaaacaaatctgtagaggagtattatcaagctttgcaaataggaatgcttcgttgtggattggtagaaaatgatgatgctggtatggctagattcatgggtgagctgaaccgagaaattcaggacattctagcctacaaagaatataattcaattaatcgtttgtttcatcttgcttgtaaagctgaaagggaagtacagggacgaagagctagcttcaggactaacatttctgcagcagcaccatcgtcctcaagcaacaagctgcgtccctctacaacaaactctacaccatgcccgagtgaaccaacaagaggggttgctgctacaccttccaagagctcatcatcagtagcttcattaggaaggacaagagatattcagtgcctacgctgcaagggctatggtcacgtgcgcaaggactgcccaagcactcgtgtaatgatcgtgagagctgatggtgggtactcctccgctagtgatttagatgaagaaacctacgctttgcttgcaactaacaatgcaggggaaggtgacgcgccccaccaagatgaggaacacattaaagctgaagctgcagagcactatgagagcctcgtggtgcagcgagtgctaagcgcacaaatggaaagggctgaacagaatcagcgccacaccttgtttcaaaccaagtgtgtgatcaaggaacgctcttgccgcgtgatcatagatggaggaagctgcaataatttggctagtgctgaaatggtggagaaacttgcattgagcacacagccacatccgcagccctactatattcaatggcttaatagcagcggcaaggagcatactaggagtgagcatcttattgcggctaatgaacttgagaagcataagaagaaacccaccaactctgttcaaaataataaaaatgagattaagctgaagggatcttgtttcattgcaacaaaatcagatttggatgaagttgacactgacactgttgtttgctatgctttggtttgcaaagaaaccttatttccaattgaggatactcctatttctttgcctcctccggtcactaaccttttgcaggagtatgctgatattttcccaaaggaggttccaccggggctgccaccaattcgagggattgagcaccaaattgacctcattcctggggcctctctgccaaaccgtgcgccatacaggaccaacccggaggaaacaaaggagattcagcgtcaagtgcaagagttactcgacaaggggtatgtacgtgagtctcttagtccttgttctgtccccgtgcttttagttcctaagaaagatggctcatggcgcatgtgtgtggattgtagagcaattaacaacatcacaatcagatatcgtcatcctatccctaggctagatgatatgcttgatgaattgagtggttcacttgtgttctctaaaattgatttgtgtagtggttaccaccagattcgcatgaagttaggagatgaatggaaaacagcttttaaaactaaattcggcctatatgagtggttagtcatgccctttggtctcactaatgcacccagtactttcatgagattaatgaatgaagttttacgtgctttcattggaagatttgtggtggtatattttgatgacattctcatatatagcagatcaatagaggatcatcatggtcatttgcgtgctgtttttgatgctctacgagatgcacgtttatttggtaaccttgagaagtgcacattttgcacagatcgagtctcttttcttggctatgttgtgactccgcagggaattgaagtagatcaagccaaggttgaagccatacatagctggccggttccaacaacgatcacacaagtgagaagctttctaggacttgctgggttctaccgcctctttgtgaaggattttagcaccattgcagccccattacatgagcttaccaagagaaatgtcacattcacttgggctgcagcacaaaggaatgcattcgacactttgaaagataagttaacacacgctcctttactccaacttcctgatttcaacaaaacttttgagcttgaatgtgatgctagtgggattggattgggtggtgtgttgttacaagaaggcaaacctgtagcatatttcagcgagaaattgagtggacctagtttgaattattctacttatgataagcaattgtttgctctagtgcgaacattggaaacatggcagcattatttatggcccaaagaatttgttatacactctgatcatgaatctttgaaacacattcgaagtcaagcaaaacttaaccgtaggcatgctaaatgggttgaatttattgaatcttttccatatgtcatcaaacataagaagggaaaagaaaatgtcattgttgatgctttgtctagacgttacgcaatgctatcccaacttgacttcaaaatttttggcttagaaacaataaaagagcaatatgcgcacgatgatgattttaaagatgaagcgcatggtggagggctgatgggacactttggtgtgaagaagacggaggatatccttgctgatcatttgttttggcctaagatgaggagagacgtggagaggttcgttgctcgctgcacaacatgccaaaaagctaagtcacgccttaaccctcatggtttgtatatgcctttgcctgttcctagtgtgccttgggaggatatttctatggactttgttttagggctgcctagaacaaagaaggggagggacagtatctttgttgttgtagatagattttctaagatggcgcatttcataccttgtcataagagtgatgatgctacacatgttgctgatttgttctttcgtgagattgttcgcttgcatggagtgccaaacaccatagtttctgatcgcgatacaaaattccttagtcatttttggagaaccttgtgggctaagttggggactaaacttttattttctactacatgtcacccccaaactgatggacaaactgaggtggtgaatagaacagtatctacaatgcttagggctgttttgaaaaagaatattaaaatgtgggaagaatgtttgcctcatgttgagtttgcttataatcgttcacaacattctactactaagaagtgcccttttgagattgtttatggccttctaccccgtgctccaattgatcttttgcccctcccaactttagagagagtgaactttgatgcaaaatatcgcgctgaattgatgttaaaactgcatgagaccactaaggagaacatagagcgcatgaatattaagtataaacttgctgggagcaaaggaaagaaacatgttgcttttgaacctggtgatttggtttggttgcatttgagaaaggataggttccctaatttgagaaaatctaagttgccacctagagctgatggtcctttccaa

SEQ ID NO: 92682 - DNA, 441 bp, Oryza sativa
  Clone ID: PAT_MRT4530_9113C.1
ctggtggtgctgggggcagggaaccgtagattagagcaagtataatagtacagcaggctatcagccaaatctggcgagaaaattgcatatctactcgctagaatggcatcacttttaactggcattcgatgtaatgccattcgccgccgccgccgccttcttctcctccttccaatctctcctctgatcttctcttcactgtgtacgcttgcgtgtatcagtttgacgctctacaaactgagctataagggcaagcagaaattatggggaaatttaactatttgccattggatccatgccattgtaactggagtatttgctactcttcgacacttcggggccgcctccaccatgcggctggttgcctggatgctcatccatggccgtgcggcggcgttgggggccgggaaccgtaggctggtattgcctggtgtggcatca

SEQ ID NO: 92683 - DNA, 756 bp, Oryza sativa
  Clone ID: PAT_MRT4530_91140C.1
tcaggatgtcacgtcatctctctgtttcccctcttctctcccttcctcctctctctctatcactcttctctcgtaggccggccgacgggtggggaggagaccgacggggtgtatcgggagaggaggtccgatggctggcaacgcggcggcggcggtggcgatgcggagcatcctgtctttcccctttctttttcctcttcttttttttcttctctttgacgcgggggagtagcaacgggcggcagcgagcagggttgagcggcgcccgacggaggcggcgtgtgagggcacgacggccggtggagtagagcggcggcaagtgagtgtgtggcagagggcggtggcggtaggcgggcgagcatggggcggctgatggaacggcacggcggcggtctgtggccagggggaggagctgggagagggtggcagccaccgagccaccgcctcctttgcgcccctgccttcgagctcctcaccgacgatcgcggccaccccacctcctccctttccacgcagtggagctcgccgacaatggaggatttggacttgggaggagctcgtcgacctccccgcatgtccgccgatcccgcctccgcgtgtctcactcgctcgctggcctctgccgtaggcctcggagccgccgtgtttcccgctgcagccgccgccaccgcccgccgccgtcgcggtgctaccctcctcctctcccgcggcagagaagactgagagagagaggaagggagagagatgacgtggcat

SEQ ID NO: 92684 - DNA, 4179 bp, Oryza sativa
  Clone ID: PAT_MRT4530_91141C.1
atgcctattgcacaacaaggaccaatgactagagctcgagctcgtgaacttaattatcaggttcaaggttgttcttggcacggaggatcgagggagcacactcaactttcaccacgtacgagggacatcatacaacattttgagcgccaagtgagggagcatgctgaaggccttgatgaggatgttagggtcgccaatgatcgccttggtcaattggaggctgctcaaattgacaccaactccaagctttcctcattggagaggtcccttgtggctttgaacacttctcttgcaggtatcttgaatacgttggagagaatgggccaagatggtcatgatggatcggctaggcgcaaccacaatggccatgatgctaatagcaacatcgcggcaagggaagaactggagtacgctactgacaccgagcatgatgaggagatacttggtcgtccacaaagacaacagtgccggcagcgccatggcatgggcgctccaccacgacgggaggtacgtgataatgatgattctttaggcacgatcaagtttaccattccttactttgatggaaaatatgaccctgatgcatatcttacttgggagttagctattgatcagaaatttgcttgccatgattttcctgagaataaacgtgttagggctgctaatagtgagttcactgattttgcatccatttggtggagtgaatttgttcgttccaatccaaataataacactccccaaacctgggatgcaattaaaagagtcatgcgagctagatttgttccttcatatcatgcacgtgatttgctgcacaaattgcaacaacttagacagggaaacaaatatgtagaagagtattatcaagctttgcaaacaggaatgcttcgttgtggattggtagaaaatgatgatgctggtcgtgctagctcctggacaccttccaacgctgctgcaccgtcaaatcgagcagcagcaccatcgtcctcaagcaacaagctgcgtccctctacaacaaactctataccatgcccgagtgaaccaacaagaggggttgttgctacaccttccaagagctcatcatcagtggcatcatcagaaaggacaagagatattcagtgcctacgctgcatgggctatggtcacgtgtgcaaggactgcccaagcactcgtgtaatgatcgtgagagctgatggtaggtactcctccgctagtgatttagatgaagaaacctatgctttgcttgcaactaacaatgcaggggaagtgtgtgatcaaggaacgctcttgccacgtgatcatagatggaacgtgatcatagatggaggaagctgcaataatttggctagtgctgaaatagtggagaaacttgcattgagcacacagccacatccgcagccctactatattcaatggcttaatagcagcggcaagataaaggagcatactaggagtgagcatcttattgcagctaatgaacttgagaagcataagaagaaacccaccaactctgttcaaaataataaaaaagagattaagctgaagggatcttgtttcattgcaacaaaatcagatttggatgaagttgacactgacactgttgtttgctatgctttggtttgcaaagaaaccttatttccaattgaggatactcctatttctttgcctcctccggtcactaaccttttgcaggagtatgctgatattttcccaaaggaggttccactgggactgccaccaattcgagggattgagcaccaaattgacctcattcctggggcctctctgccaaaccgtgcgccatacaggaccaacccggaggaaacaaaggagattcagcgtcaagtgcaagagttactcgacaaggggtatgtgcgtgagtctcttagtccttgcgctgtccccgtgcttttagttcctaagaaagatggctcatggcgcatgtgtgtggattgtagagcaattgacaacatcataatcagatatcgtcatcctatccctaggctagatgatatgcttgatgaattgagtggttcacttgtgttctctaaaattgatttgcgtagtggttaccaccagattcgcatgaagttaggagatgaatggaaagcagcttttaaaactaaattcggcctatatgagtggttagtcatgccctttggtctcactaatgcacccagtactttcatgagattaatgaatgaagttttatgtgctttcattggcagatttgtggtggtatattttgatgacattctcacatatagcagatcaatagaggatcatcatggtcatttgcgtgctgtttttgatgctctacgagatgcacgtttatttggtaaccttgagaagtgcacattttgcatagatcgagtctcttttcttggctatgttgtgactccgcagggaattgaagtagatcaagccaaggttgaagccatacatagctggccggttccaacaacgatcacacaagtgagaagctttctaggagttgctgggttctaccgccgctttgtgaaggattttagcaccattgcagccccactacatgagcttaccaagagaaatgtgacattcacttgggctgtagcacaaaggaatacattcgacactttgaaagataagttaacacacgctcctttattccaacttcctgatttcaacaaaacttttgagcttgaatgtgatgctagtgggattggattaggtggtgtattgttacaagaaggcaaacctgtagcatatttcagcgagaaattgagtgggcctagtttgaattattctacttatgataagaaattgtttgctctagtgcaaacattggaaacatggcagcattatttatggcccaaagaatttgttatacgctctgatcatgaatctttaaaacacattcgaagtcaagcaaaacttaaccataggcatgctaaatgggttgaatttattgaatcttttccatatgtcatcaaacataagaagggaaaagaaaatgtcattgctgatgctttgtctagacgttacacaatgctatcccaacttgacttcaaaatttttggcttggaaacaataaaagagcaatatgcgcacgatgatgattttaaagatgtgttgttgaattgcaaggagggaaggacttggaacaaattcgttctcaccaatgggtttgtgtttagagctaataagttatgcattccagctagctctgtgcgtatgctattattgcaagaagcgcatggtggagggctgatgggacactttggtgtgaagaagacggaggatatccttgctgataatttcttttggcccaagatgaggagagacgtggagagaatactaaaaatgtgggaagaatgtttgcctcatgttgagtttgcttataatcgttcgcaacattctactactaagaagtgcccttttgagattgtttatggccttctgccccgtgctccaattgatcttttgccccacccaacttcagagagagtgaactttgatgcaaaacagcgcgctgatttgatgttaaaacggcatgagaccactaaggagaacatagagcgcatgaatattaagtataaacttgctgggagcaaaggaaagaaacatgttacttttgaacctggtgatttggtttggttgcatttgagaaagaataggttccctaatttgagaaaatctaagttgctacctagagctgatggtcctttcaaagtaatacaaaagattaatgataacgcatacaagcttgagctacctgccgattttggggttagccccacgtttaacattgcagatttaaagccatatttaggagaagaagatgagttagagttgaggacaactcaaatgcaagaaggggaggatgatgaggacatacgttccaacgatacaaccatgcctattgcacagcaaggaccaatgactagagctcgagctcgtgaacttaattatcaggttcaaggttgttcatggcacggcaagaacagcaacaacgtggagtcggtgtaccggttgctaaggcacagcacccctgtggtagttgtagtcggaccgccaacgtcgtgtcctcccctaaatcgaagtttatcctcctctcatcgaaagatcgggatcccccgttgctgcatcaagcacgaccacaatggcagtggtgacgaggacgacgagttcgtgcgctggtaa

SEQ ID NO: 92685 - DNA, 3567 bp, Oryza sativa
  Clone ID: PAT_MRT4530_91142C.1
atgctgtacatggggggacgtggatgtatcgatggtgttgatgtcctcatcatcatagatggaggaagctgcaataatttggctagtgctgaaatggtggagaaacttgcattgagcacacagccacatccacagccctactatattcaatggcttaatagcagcgacaaggtaaaggtaacacgattggtaagagtacattttgccattggttcttatcatgattcaatcaactgtgatgttgtgcctatgcaagcatgttctatgttattaggtaggccatggcagtttgataaagattctttacactttggcaaatccaatcaatactcctttgtgcataatggaaaaaaacttgtgttacatcctatgtctcctgaagttattttaaaggatgaacttgctagagctagcaaacaaaaaaatcaggagcgtactaggagtgagcatcttattgcggctaatgaacttgagaagcataagaagaaacccaccaactctgttcaaaataataaaaatgagattaagctgaagggatcttgtttcattgcaacaaaatcagatttggatgaagttgacactgacactgttgtttgctatgctttggtttgcaaagaaaccttatttccaattgaggatactcctatttctttgcctcctccggtcactaaccttttgcaggagtatgctgatattttcccaaaggaggttccaccggggctgccaccaattcgagggattgagcaccaaattgacctcattcctggggcctctctgccaaaccgtgcgccatacaggaccaacccggaggaaacaaaggagattcagcgtcaagtgcaagagttactcgacaaggggtatgtacgtgagtctcttagtccttgttctgtccccgtgcttttagttcctaagaaagatggctcatggcgcatgtgtgtggattgtagagcaattaacaacatcacaatcagatatcgtcatcctatccctaggctagatgatatgcttgatgaattgagtggttcacttgtgttctctaaaattgatttgcgtagtggttaccaccagattcgcatgaagttaggagatgaatggaaaacagcttttaaaactaaattcggcctatatgagtggttagtcatgccctttggtctcactaatgcacccagtactttcatgagattaatgaatgaagttttacgtgctttcattggcagatttgtggtggtatattttgatgacattctcatatatagcagatcaatagaggatcatcatggtcatttgcgtgctgtttttgatgctctacgagatgcacgtttatttggtaaccttgagaagtgcacattttgcacagatcgagtctcttttcttggctatgttgtgactccgcagggaattgaagtagatcaagccaaggttgaagccatacatagctggccggttccaacaacgatcacacaagtgagaagctttctaggacttgctgggttctaccgccgctttgtgaaggattttagcaccattgcagccccattacatgagcttaccaagagaaatgtcacattcacttgggctgcagcacaaaggaatgcattcgacactttgaaagataagttaacacacgctcctttactccaacttcctgatttcaacaaaacttttgagcttgaatgtgatgctagtgggattggattgggtggtgtgttgttacaagaaggcaaacctgtagcatatttcagcgagaaattgagtgggcctagtttgaattattctacttatgataaggaattgtttgctctagtgcgaacattggaaacatggcagcattatttatggcccaaagaatttgttatacactctgatcatgaatctttgaaacacattcgaagtcaagcaaaacttaaccgtaggcatgctaaatgggttgaatttattgaatcttttccatatgtcatcaaacataagaagggaaaagaaaatgtcattgctgatgctttgtctaaacgttacgcaatgctatcccaacttgacttcaaaatttttggcttagaaacaataaaagagcaatatgcgcacgatgatgattttaaagatgtgttgttgaattgcaaggagggaaggacttggaacaaattcgttctcaccaatgggtttgtgtttagagctaataagttatgcattccagctagctccgtgcgtatgctattattgcaggaagcgcatggtggagggctgatgggacactttggtgtgaagaagacggaggatatccttgctgatcatttcttttggcctaagatgaggagagacgtggagaggttcgttgctcgctgcacaacatgccaaaaagctaagtcacgccttaaccctcatggtttgtatatgcctttgcctgttcctagtgtgccttgggaggatatttctatggactttgttttagggctgcctagaacaaagaaggggagggacagtatctttgttgttgtagatagattttctaagatggcgcatttcataccttgtcataagagtgatgatgctacacatgttgctgatttgttctttcgtgagattgttcgcgatacaaaattccttagtcatttttggagaaccttgtgggctaagttggggactaaacttttattttctactacatgtcacccccaaactgatggacaaactgaggtggtgaatagaacattatctacaatgcttagggctgttttgaaaaagaatattaaaatgtgggaagaatgtttgcctcatgttgagtttgcttataatcgttcacaacattctactactaagaagtgcccttttgagattgtttatggccttctaccccgtgctccaattgatcttttgcccctcccaacttcagagagagtgaactttgatgcaaaatatcgcgctgaattgatgttaaaactgcatgagaccactaaggagaacatagagcacatgaatattaagtataaacttgctgggagcaaaggaaagaaacatgttgcttttgaacctggtgatttggtttggttgcatttgagaaaggataggttccctaatttgagaaaatctaagttgctacctagagctgatggtcctttcaaagtgctacaaaagattaatgacaatgcatacaagcttgagctacctgccgattttggtgttagccccacatttaacattgcagattcaaagccatatttgggagaagaagatgagttagagtcgaggacgactcaaatgcaagaaggggaggatgatgaggacatcccttccaacgatacaaccacgcctattgcacagcaaggaccaatgactagagctcgagctcgttcaaggttgttcttggcacggcaagaacagcaacaacgtggagtcggtgtaccggttgctaaggcgcagcacccttgtggtagttgtagtcggaccgccaacgtcgtatccttccccaaatcaaagtttatcctcctctcatcgaaagatcgggaacccccgttgctgcatcaatcaggaatcaaaaacatcgcacccgtgtgggccaatattagcgttaattga

SEQ ID NO: 92686 - DNA, 2425 bp, Oryza sativa
  Clone ID: PAT_MRT4530_91143C.1
ttccagccttccaggcgaagttgcggcgaccggcgacactgcagcagttagggcacgcggcgcgccggccgctggccgctggggcctgggggccccgagcggcaacaagggggttcaaggttgttcttggcacggcaagaacaacaacaacgtggagtcggtgcaccggttgctaaggcgtagcacccccgtgtcacctatagctccacaattttttatctactaccatcacaggatcgtgcttgttgtcggctctggaggatcaggggagcatcctcaacattcaccacgtacgaggggcatcatacaacattttgagcaccaagtgagggagcatgctgaaggccttgatgaggatgttagggtcgccaatgatcgccttggtcaattggaggctactcaaattgacaccaactccaagctttcctcattggagacaccccttgtggctgtgaacacttctcttgcaggtatcttgaatacgttgaagagaatgagccaagatggtcatgatggaccggctaggcgcaaccacattggccatgaagctaatagcagcgtcgcagcaagggaagaagtggactacgctgctgacaccgagcttgatgaggaggtacttggtcgtccacaacgacaacagcgccaacagcgccatggaatgggcgctccaccacggcaggaggtacatgataatgacgattctttaggcaagatcaagtttaccattccttgctttgatggaaaatatgaccctgatgcatatcttacttgggagttagccattgatcagaaatttgcttgttatgattttcctgagaataaatgtgttagggctgctactagaaggacaagcgatattcagtgcctacactacaagggctttggtcacatgtgcaaggactgcccaagcactcgtgtaatgatcgtgagagctgatggtgggtactcctccgctggtgatttagatgaagaaacctatgctttgcttgcaactaacaatgcaggggaaggtgacacgccccaccaagatgaagaacacattggggccgaagctgcagagcactatgagagcctcgtggtgcagcgagtgctaagtgcacaaatggaaagggctgaagaaaatcaacgccacaccttgtttcaaaccaagtgtgtgatcaacaaacgctcttgccgcgtgatcatagatggaggaagctgcaataatttggctagtgttgaaatggtggagaaacttgcattgagcacacaaccacacccgcagccctactacattcaatggtttaatagcagcggcaaggaatacgccgatgttttcccaaaggaggttccaccggggctgccaccaattcgagggattgagcaccagattgacctcattcctggggcctctttgccaaactgtgtgccatacaggaccaacccaaaggaaacaaaggagatacaacatcaagtgcaagaattactcgacaaggggtatgcgcgtgagtctcttagtccttgtgttgtccccatgcttttagttcatggctcatggcgcatagctattttgaaaaagaatattaaaatgtgggaagaatgtttgtctcatgttgagtttgcttataatcgttcgcaacattctactactaagaagtgccattttgagattatttatggccttctaccccgtgctcctattgatcttttgcccctcccaacttcagagagggtgaactttgatgcaaaacaatgtgatgaactgatgttaaaactgcatgagaccactaaggagaacatagagcacatgaatactaggtgtaaacttgctggaagcaaaggaaagaaacatgttccttttgaatctggtgatttagtttggctggctgttgttgcactcggcctcaaagtagggagacaagtcgtgagccttgggcatgctagaggtagctacgtggacagcttagtgcaatcgactgagtccagctcccgcgccaccgcagcccagggcggcgccgttgtctctgggccggcgcggccgccgcgctcgcctcctcgctcgcccaccgagcgcttcacccaggggcgggcccgtgagcagcccggaggcggaggccgcggcatcgacggtttgagcgccgccgctgcattggtggaccgcaaaggaaagagaaagatcggagaaggatcttttacagtctctgatgatcgggaacaggcacgaaggaaggaggagaggacatctgattcccccaaagtgaagcttctcaggagtagcattcgtgcgtatcatggcgacgccgaggagaaggcatttgagaggctgatagagaaaataaagggatggaagcgcatgcaggagcacccaatatcaataatcagggggaagattcttgagttcttcagcagttatgatacaacggatgacagtgagaaaacaccttga

SEQ ID NO: 92687 - DNA, 3951 bp, Oryza sativa
  Clone ID: PAT_MRT4530_91144C.1
tcatgggcctttgggcttgtaacttcgtttgggaccccggcccaagtggggcccatgtggggtgcgccccaatctggtggagcacgacccttgtcgagtaactcttgcacttgtgatgcagcaacgggggttcccgatctttcgatgagaggaggataaacttcgatttggcgaaggatacgacgttggcggtccgactacaactaccacaggggtgttgcgccttagcaaccggtacaccgactccacgttgttgctgttcttgccgtgccaagaacaaccttgaacctgataattaagttcacgagcttgagctctagtcattggtccttgctgtgcaataggcgtggttgtatcgttggaagggatgtcctcatcaacttgacgctgattctcctttgtttcctccgggttggtcctgtatggcgcacggtttggcagagaggccccaggaatgaggtcaatttggtgctcaatccctcgaattggtggcagccccggtggaacctcctttgggaaaatatcagcatactcctgcaaaaggttagtgaccggaggaggcaaagaaataggagtatcctcaattggaaataaggtttctttgcaaaccaaagcatagcaaacaacagtgtcagtgtcaacttcatccaaatctgattttgttgcaatgaaacaagatcccttcagcttaatctcatttttattattttgaacagagttggtgggtttcttcttatgcttctcaagttcattagccgcaataagatgctcactcctagtatgctccttgccactgctattaagccattgaatatagtagggctgcggatgtggctgtgtgctcaatgaaagtttctccaccatttcagcactagccaaattattgcagcttcctccatctatgatcacgcggcaagagcgttccttgatcacacacttggtttgaaacaaggtgtggcgctgattctgttcagccctttccatttgtgcgcttagcactcgctgcaccacgaggctctcatagtgctctgcagcttcagccctaatatgttcctcatcttggtggggcgcgtcaccttcccctgcattgttagttgcaagcaaagcataggtttcttcatctaaatcactagcggaggagtacccaccatcagctctcacgatcattacacgagtgcttgggcagtccttgcgcacgtgaccatagcccttgcagcgtaggcactgaatatctcttgtccttcctgatgaagctactgatgatgagctcttggaaggtgtagcagcaacccctcttgttggttcactcgggcatggtgtagagtttgttgtagagggacgcagcttgttgcttgaggacgatggtgctgctgctcgagttgacggtgcagcagcgttgggagatgtccaagagctagcacaacctgcagaaatgttagtcctgaagctagctcttcgtccctgtacttccctttcagctttacaagcaagatgaaacaaacgattaattgaattatattctttgtaggctagaatgtcctgaatttctcggttcagcccacccatgaatctagccataccagcatcatcattttctaccaatccacaacgaagcattcctgtttgcaaagcttgataatactcctctacagatttgtttccctgtctaagttgttgcaatttgtgtagcaaatcacgtgcatgatatgaaggaacaaatctagctcgcatgactcttttcattgcatcccaggtttggggagtgttatttggattggaacgaacaaattcactcccgccgtggtggagcgcccatgccatggcgctgccggtgctgttgtctttgtggacgaccaagtacctcctcattatgctcagtgtcagcagcgtactccagttcttcccttgctgcgatgctgctattagcatcatggccatgtggttgcgcctagccgatccatcatgaccatcttggcccattctctctaacgtattcaagatacctgcaagagaagtgttcacagccacaagggacatctccaatgaggaaagcttggagttggtgtcaatttgagcagcctccaattgaccaaggcgatcattggcgaccctaacatcctcatcaaggccttcagcatgctccctcacttggcgctcaaaatgttgtatgatgcccctcgtacgtggtgaatgttgagggtgctcccccgatcctccggagccgacaacagcacgatccgagcaacttgagctctcataccacttgatgcagcaacgggggttcccgatctttcgatgagaggaggataaacttcgatttggggaaggatacgacattggcggtccgactacaactaccacaggggtgctgcgccttagcaaccggtacaccgactccacgttgttgctgttcttgccgtgccaagaacaaccttgaacctgataattaagttcacgagctcgagctctagtcattggtccttgctgtgcaataggcgtggttgtatcgttggaagggatgtcctcatcattatggtcattctcccaccccttttttgattttggtgcggatggcggcttcttctgagccggctgatctgacttcttggccggtacgggtgattttaccggcgttttccaataacggttcctgggcatcgttgtttccttctccaggaaattcatggagcattgttccgtccttggttgaaactcaaacttttcctccttcccgttgatatggaaacggatactccccgttcccacgtcaatgttggctcctgcggtactaaggaatggacgccctaggatgagcggcatctccttccccatgtccatgtctagcaccacaaaatcaaccgggatgaagaaatcccgtatcttgactggcacattctccgctattcctgctgggtaacgaactgatgagtcagccagttggaggcgcatcggtgttggttccaacactgtgaagttgagcttgtcgaagacgtcttttggcatgacgctaacgctggctccaaggtcgcaccaggtctggtcgaattgttgtgccccgatcgagcaggtgatcgtaggacaccccggatctttcttcttctccgggagcttgtggagtatcaggttgctgcattgttccgtcagcttgaccacctccgttgttggcagcggtctcttgttgttgagtatgtccttgagataacgggcgtatgttggcacttgcatagcatccaacaacggcactttgatgtggatcttctggatcacaaaacgagcgaactgctcgtcttgtttcttcgatttgcttgcaggaatagggttgatctgcaccggcaagatcaacaacccacggagaggtgtatcgatcgctaaggcgcaacacaacgtctcgtacggttgtagtcggatcgtcaacgtttctcccaaatcgtagttatcacaactcaccgaaagatcgggccaacaacagcccttagcggaatcaaaaagttcaaaaaacgccaaaacatgatttttggacatattggagttattgggtgcattcgtggcaaaaactcactacgtgattcgcgcggcgaacttttgtcaattaatgccaatattggcacacgagggtgcgatgttttgtactgtaatcaaaaagttcaaaaagcgccaaaacatgatttttggacatattagagtgtattgggtgcattcatggcaaaaactcacttcgtgattcgcgcggtgaacttttgtcaattaatgccaatattggcacacgagggtacgatgttttctactggaatcaaaaagttcagaaagagccaaaacatgacttttggacataatggagtgtatcgggtgtcttcgtggcaaaaacacatttcgtgattcgcgtggctaacttttctcaaataatgtcaatattggcatatattagcccacacgggtgcgatgtttttgacc

SEQ ID NO: 92688 - DNA, 600 bp, Oryza sativa
  Clone ID: PAT_MRT4530_91145C.1
atggatccagcagccctcacaagtgaggagaggtgggtatttatacccacagcacaaatatgcccgttggagtgcaataaaaggttcaaggttgttcttggcatcaagaacagcaacaacgtggagtcggtgtaccaattgctaaggcgcagcacccctgtggtagttgaagtcggaccgccaacgtcgtgtcctcccccaaatcgaagtttatcctcctctcatcgaaagatcaggaacccccgttgctgcatcaagtggtatcagagctcaagttgctcgcgccaagtgagggagcatgctgaaggccttgatgaggatgttagggtcgccaatggtcgccttggtcaattggaggctgctcaaattgacaccaactctaagctttccttattggacaggtcccttgtggctgtgaatacttctcctgtaggcatcttgaatactttggagagaatgggccaagatggtcatgatggaccggctaggcacaaccacattggccatgatgctaatagcaacatcgcagcaagggaagaagtggactacgctgctgacaccgagcatgatgaggcggtagttggtcgtccacaacgataa

SEQ ID NO: 92689 - DNA, 3948 bp, Oryza sativa
  Clone ID: PAT_MRT4530_91146C.1
atgacaggaggatcgggggagcaccctcaacattcaccacgtacgaggggcatcatacaacattttgagcgccaagtgagggagcatgcagaaggccttgatgaggatgttagggtcgccaatgatcgccttggtcaattggaggctgctcaaattgacaccaactccaagctttcctcattggagaggtcccttgtggctgtgaacacttctcttgcaggtatcttgaatacgttggagagaatgggccaagatggtcatgatggatcggctaggcacaaccacaatggccatgatactaatagcagcatcgcagcaagggaagaactggagtacgctgctgacaccgagcatgatgaggagttacttggtcgtccacaaagacaacagcgccggcagcgccatggcatgggcgctccaccacggcgggaggtacgtgataatgatgattctttaggcaagatcaagtttaccattccttgctttgatggaaaatatgaccctgatgcatatcttacttgggagttagccattgatcagaaatttgcttgccatgattttcctgagaataaacgtgttagggctgctactagtgagtttactgattttgcatccatttggtggagtgaatttgttcgttccaatccaaataacactccccaaacctgggatgcaatgaaaagagtcatgcgagctagatttgttccttcatatcatgcacgtgatttgctgcacaaattgcagcaacttagacagggaaacaaatctgtagaggagtattatcaagctttgcaaacaggaatgcttcgttgtggattggtagaaaatgatgatgctggtcgtgctagctcttggacaccttccaacactgctgcaccgtcaactcgagcagcagcaccatcgtcctcaagcaacaagctgcgtccctctacaacaaactctacaccatgcccgagtgaaccaacaagaggggttgctgctacaccttccaagagctcatcatcagtagcatcattaggaaggacaagagatattcagtgcctacgctgcaagggctatggtcacgtgcgcaaggactgcccaagcactcgtgtaatgatcgtgagagctgatggtgggtactcctccgctagtgatttagatgaagaaacctatgctttgcttgcaactaacaatacaggggaaggtgacgcgccccaccaagatgaggaacacattggggctgaagctgcagagcactatgagagcctcgtggtgcagcgagtgctaagcgcacaaatggaaagggctgaacagaatcagcgccacaccttgtttcaaaccaagtgtgtgatcaaggaacgctcttgccgcgtgatcatatatggaggaagctgcaataatttggctagtgctgaaatggtggagaaacttgcattgagcacacagccacatccgcagccctactatattcaatggcttaatagcagcggcaaggagtatgctgatattttctcaaaggaggttccaccggggctgccaccaattcgagggattgagcaccaaattgacctcattcctggggcctctctgccaaaccgtgcgccatacaggaccaacccggaggaaacaaaggagattcagcgtcaagtgcaagagttactcgacaaggggtatgtgcgtgagtctcttagtccttgtgctgtccccgtgcttttagttcctaagaaagatggctcatggcgcatgtgtgtggattgtagagcaattaacaacatcacaatcagatatcgtcatcctatacctaggctagatgatatgcttgatgaattgagtggttcacttgtgttctccaaaattgatttgcgtagtggttaccaccagattcgcatgaagttaggagatgaatggaaaacagcttttaaaactaaattcagcctatatgagtggttagtcatgccctttggtctcactaatgcacccagtactttcatgagattaatgaatgaagttttacgtgcttttattggcagatttgtggtggtatattttgatggcattctcatatatagcagatcaatagaggatcatcatggtcatttgcgtgctgtttttgatgctctacgagatgcacgtttatttggtaaccttgagaagtgcacattttgcacagatcgagtctcttttcttggctatgttgtgactccgcagggaattgaagtagatcaggccaaggttgaagccatacatagctggccggttccaacaacgatcacacaagtgagaagctttctaggacttgctgggttctaccgccgctttgtgaaggattttagcaccattgcagccccactacatgagcttaccaagagaaatgtcacattcacttgggctgcagcacaaaggaatgcattcgacactttgaaagataagttaacacacgctcctttactccaacttcctgatttcaacaaaacttttgagcttgaatgtgatgctagtggaattggattgggtggtgtgttgttacaagaagacaaacctgtagcatatttcagcgagaaattgagtgggcctagtttgaattattctacttatgataaggaattgtttgctctagtgcgaacattggaaacatggcagcattatttatggcccaaagaatttgttatacactctgatcatgaatctttgaaacacattcgaagtcaagcaaaacttaaccgtaggcatgctaaatgggttgaatttattgaatcttttccatatgtcatcaaacataagaagggaaaagaaaatgtcattgctaatgctttgtctagacgttacacaatgctatcccaacttgacttcaaaatttttggcttagaaacaataaaagagcaatatgcgcacgatgatgattttaaagatgtgttgttgaattgcaaggagggaaggacttggaacaaattcgttctcaccaatgggtttgtgtttagagctaataagttatgcattccagctagctccgtgcgtatgctattattgcaggaagcgcatggtggagggctgatgggacactttggtgtgaagaagacggaggatatccttgctaatcatttcttttggcccaagatgaggagagacgtggagagggctgttttgaaaaagaatattaaaatgtgggaagaatgtttgcctcatgttgagttttcttataaccgttcacaacattctactactaagaagtgcccttttgagattgtttatggccttctaccccgtgctccaattgatcttttgcccctcccaacttcagaaagagtgaactttgatgcaaaacatcgcgctgaattgatgttaaaactgcatgagaccactaaggagaacatagagcgcatgaatattaagtataaacttgctgggagcaaaggaaagaaacatgttgcttttgaacctggtaatttggtttggttgcatttgagaaaagataggttccctaatttgagaaaatctaagttgctacctagagctgatggtcctttcaaagtgctacaaaagattaatgacaatgcatacaagcttgagctacctgccgattttggggttagccccacgtttaacattgcagatttaaagccatatttgggagaagaagatgagttagagtcgaggacgactcaaatgcaagaaggggaggatgatgaggacatcccttccaacgatacaaccacgcctattgcacagcaaggaccaatgactagagctcgagctcgtgaacttaattatcaggttcaaggttattcttggcacggcaagaacaacaacaacgtggagtcggtgtaccggttgctaaggcgcagcacccctgtggtagttgtagtcggaccgccaacgtcgtatccttccccaaatcgtagtttatcctcctctcatcgaaagatcgggaacccccgttgctgcatcaccgcgcgaatcacgaagtga

SEQ ID NO: 92690 - DNA, 357 bp, Oryza sativa
  Clone ID: PAT_MRT4530_91147C.1
gcctgttgcaaggcgaggtgcacaggagggggtttttctaagcgttgggcgaaaccacaaacactggtgtgtgctactttactgaagtcacattttcttaccacgaagtcttaaaggtgagccaccctccaggctgccgtccccaagccggtgactgtatccatggttgtgcctgctggtgcctacgacaatgatcttgtaaagaccgcgaaatccattgcatcaccaggaagggggatccttgccatggatgagtcgaacgcaaccttgggtaataggcttgcgtcaattgggctatacaacaccgatgccaagcgccatgctttacctgaccctgcttgtcacctcacctgactt

SEQ ID NO: 92691 - DNA, 606 bp, Oryza sativa
  Clone ID: PAT_MRT4530_91148C.1
cgaatccattttttctattggttttttgaaggtttttttttttttttttttccaaggaccggggggtcaacccgaaaaccccggcccggccccggaaggcaaacccctttccccaaaggggagcccaataaaacctgggggaaaacaggaaaaaaccggcccccggggaaaaaatgataccccccccaaaaaccacacaaaacccgccccggaaccaaaaaggaaaaacccggggggcccaaaggagggccctaccccccaaaaaggggggggcccccccgcccccttttcaagaggaaaaaccgggcttcccagttaaaaaaaaaaaacgcccaccccccgaaaaaaggcgatttccctatggggccccgggggggtttttttttcccccagggaaacggccaacagggaatggccctccccccccggcccctaaaaagaccccaccagggccccccccttggtttcccccacaccgcaaaaattttgttagagggggaaaaacgggggaaaaaaacagaaaccggccttaggaaccccaaccccccccccccaaaatatcccaccaaccccccgacccgaccccataaagggcccccatgcccc

SEQ ID NO: 92692 - DNA, 351 bp, Oryza sativa
  Clone ID: PAT_MRT4530_91149C.1
atgtggggcccacagctcccctctctgcctttcccctttctttctctctcggtcgtcttctacctcgcgcacgcggctgaacagaggagcagcgcgcggcggtgcgacggcccgagccagaacggctcggcgcgcggttctggttcagtgtacaggcgcggcatgattgcctacgcggtagtatgcaggagaggtctcgctagctggagaaaggggcgccgcattacccagcggtcgcaaccgggggtgacaagatggagacgcgacggggacgcgatggcgacaagagcgacggcgatgggcagtggtaacggcttggataggggggcgcagggctatgccctagggtga

SEQ ID NO: 92693 - DNA, 685 bp, Oryza sativa
  Clone ID: PAT_MRT4530_9114C.1
cccacgcgtccgcccacgcgtccggatcgatctgatccacctagttgcaagctcgatcgatctctcatctgctctgctaattgatcctaaggcgatcatggcagctgccaacagatcggctctcctcgtcgaggccatggcggcggcggtgctcacgacgacggcgacgggcgccaccacctacacggtaggagcaccggccgggtcgtgggacacgcgcaccaactacgcgcagtgggtgtccgccgtcaccttccgtgtcggcgaccagcttgtgttcaagtactcgccggcggcgcacgacgtcgtggaggtgaccaaggctggctacgactcctgctcgagctccggccccgtcgccaccttcaactccggcgatgacaccgtgccattgacagctaccggcacccgatacttcatgtgcggcttccctggccattgcgccgccgggatgaagatcgcagtcaaggtcgaggccgccactgccaccggcggtagtggcactgcactgtcgccaatggcgcctcgtccgcgcacgcctacagcaatggcaccgaacgcgatgccacctatggctggtggtcggcctgtgtctccatcgagctcggcgagcaagtccactggtgttgcatctctggttgggcttagtttgggcgccatagttgctggcctcatgtccttctaa

SEQ ID NO: 92694 - DNA, 295 bp, Oryza sativa
  Clone ID: PAT_MRT4530_91150C.1
ccgccgccccaacatttcattaaacaacccagaggtttgcttcattaccaaactggggggatcaacaaataaaataccagggggcctggttaaacatgaccaaacaagaatacctacccactcccaattccaggacacctttgcccaaaattacttctacttcttccacccaaacaaatttaattttcccttccctaattacactttaagggaggaccaaacttcacaaaaaaccctcccccccctaacaaaaaattccatttaaggggcaaaaaaaaaagggccaaacttcatc

SEQ ID NO: 92695 - DNA, 296 bp, Oryza sativa
  Clone ID: PAT_MRT4530_91151C.1
cccacgcgtccgccaacccgtccggggacgcgtggccaaaaacggtaggaggccgttgtccaccaggatgtaaatcctaggtcacggtgttgtagtgtaaagaaatattaacacctaaataccgatgctttttttgtgtaaatatatagtttgttcgatatctgctactcttgatggacactcattgtacagcattttttactaaaatgttctgagtcttatggatatgattcttcttttttgttgaaagaagaatataatttatgtatattttttatgatccgggtggccgtttt

SEQ ID NO: 92696 - DNA, 1485 bp, Oryza sativa
  Clone ID: PAT_MRT4530_91152C.1
atggcgagcggtggcgacgacgcggcagcgccgctcctcgcctcgaagcacggcggcgagcctcgccggaacacgttcgcgttcgcctgcgccacgctcgcctccatgaccaccatcctcatgggctacaatctcgcgctgatgagcggcgcgcagctgttcgtccgggaggacgtggggctgagcgacgcgcagatcgaggtgctcgccgggtcgatgaacgtgttcatgctcgtgtccatcctcgccgccggctgggcggccgacgtgctcggccgccgcggcacgctcgtgctggcgaacgcgtacctcatggccggcgcgctcgccatgtcgctcggcgccacctacgccgcgctcatggccgcgcgcttcgtcaccagcgtcggcgtcggcttctccctcgtcgtcgcgcccgtgtacaacgccgagatctcgccggcctccgcccgcggcgtcctctcctcgctgctcgatatgttcgtcaacgtcgggatcttgctgagctacgtgtcgaactacgcgttggccggattgccggtgcacgtcgggtggcgcgtcatgtacggcatcggcgtgctcccgccggtgttcctcgccgcgggcgtgctcgccatgccggagtcgccgcgctggctcgccatgcgcggtcgccacgccgacgcgcgcgcggtgctcgtgcgcacctccgactccgtcgaggaggccgagctccgcctcgaggagatcaagcgagccgtcgaggcgccgcaggagtccgccggcgtcggcgtgtggcgggagctcctcctgcggccgtcggcgatggtccggcggatcgtcacctgcgttgtcggcctccacttcttccagcaagcgtccggcatcgacgccatcgtgctgtacagcccgctggtgttcaagaaggcaggcatggcgtcgaacacctccgtcctgggcgccacggtcgccgtcggcgtcgtcaagacgtgcttcatcctcgtcgccacgctcctctccgaccgcctcggccgccgcccgctcctgctcgccagcaccggcggcgtggccgtcaccctcacctcgctcgccctcgccctccgcgtcgcgtcgccgtccacggcgagcgccgcggcgtgcgtggcgtccgtgatggcgttcgtggcggcgttctccgtcgggttcgggccgatgacggcgacgtacaccgccgagatcatgccgctgcggctgcgcgcgcagggcgcgagcctcggcatggccgtgaaccggctgacgtgcggcgtggtgagcatgactttcatctcgctcgccggcgggatcaccatggccgggtgcttcttcctctacgccggcgtggcggcggtggcgtgcgtgttcgtgtacgtgcggctgccggagacgagggggcggagcttggaggacatggacgtgctcttcgccaacctggatcttagggtaaagacaactccgggctaatctgacaatcatggagttgatgataga

SEQ ID NO: 92697 - DNA, 2180 bp, Oryza sativa
  Clone ID: PAT_MRT4530_91153C.1
tttttttgttttggaattaagtttggttcagtgcgtgtaatagctcacttggcataataatacaatcaaatgttttgtgaataacaaaatccaagtatggtacagtagaaaataatcggcgtcacgtattgtaactatgtcatgaacaaagagaataaaatagttgcattatgctcttataaatgtaagtccaacaaagccacaaggcgtcctctattcaaagagatcggcatcatgaacaatatcgactctcttcagctgtaggaaacaacatatgcaattagctgctatattcttcctcttatttgtccaggacagctacaaggtgtcgtaatatccacaagaagaaatgctgcctcataaaagagtgtacaaggcccccggttccccctaataaaatctgctgtgtccatcgttgcatacaggcccatttgtttaatttccaagtatagcaagtgttcatcgcttggagaacagtccttgagttaatgatgaaaaatcatattctttgcctgattgagaggggagggaagaagaggtcggggatgtgctcttgttagcagctgcacttgcggccccatttgctgggacagatgagctagtgttgtatgctccaggtgtactaaaattgaaattcccaaaagagaattcctgattgttgttcgcaaccttggtggcaccattctgtgctgctactggagccaacccaggattctgataagcaagatttgtccagctttgtgaaggcaagcctccattggcaggattagaaccattaccatttagcagactggcgttccctggaatcatttggggtgcatttccagctttaagagcagccattagtaaagcttgctgctgagacagaagtgcaagctgctggggggtcataaaagcaagttgctgctgctggacagcatatggcgaaaccatactggacttctcaaacagactcatgatatcattcttcacatttacttgtggggcagctggagctgaggatactgtcacagctggtgaatctttaaacaagtcctctatgcctgatgtagactggggcttactttctactggcttagcagaatcctttttgtctgagctaggtactggctctgcagactggaagccctcccatgcactatcatcattagaagatgactctgcttctttctcggttgttccatccattgataacatgttgaagagatcagttgcatagtcaaccttaggaggtggtgcaactgatggcctctcaacctttggtggtgttgcattaggaggtgatttctcgggttgaggaggtgaaaccttgggaactgatggttgtgcttttggctgatgtggtgcctgggtgggcgtcctagaaaccactggagcaattttgctcactgcagctggtgaagtgcggtgttgctcaaatgaagatctttgattatggccacccctgttaacactagtttgtgactctgagctcttctcatctctagcaccagatgatggtcttgatgacccattcctcggtatccatctcttgtcctcgtattttgcacggatgaagttctctatcccaaccctatcatagttagggggcagctccgcttcccagtagctatttgacttttcattccccattgattgaataaatgcaacttgctctggcagccatgtatccagggtagccgatcttaccttagatatatgtaccccgaggcttctatgaattccagaacactgcatgcatataaagatcccaagatttacacttgcccatcgaggaccctttgacttgcagtctgcacattctctattctcaggcagccgcaggaggccttccaatatcttcttgtgcttggcgttgagctccttggagacggaggccttctcgttcatggctgcgcgcgcccccgaaatccctcgaccccgaacggaaactcctcccgaatccgggggcaaaccaggcgccggaccaggattcgccgtctccggtggggggcctcgggatctcagcctcccttcctcccttcccccctctcctcctcctcctcctgatctcgccgcgtcgaggggaagagagagagagagatgggcagcgaggagaggggagggatctgtgcgtgcgtgccctccccggcttgaccttcctcgcttcgcttctcctcccccctcgtgccgaattcctg

SEQ ID NO: 92698 - DNA, 567 bp, Oryza sativa
  Clone ID: PAT_MRT4530_91154C.1
gcaccacatcagccaaaagcacaaccatcagttcccaaggtttcacctcctcaacccgagaaatcacctcctaatgcaacaccaccaaaggttgagaggccatcagttgcaccacctcctaaggttgactatgcaactgatctcttcaacatgttatcaatggatggaacaaccgagaaagaagcagagtcatcttctaatgatgatagtgcatgggagggcttccagtctgcagagccagtacctagctcagacaaaaaggattctgctaagccagtagaaagtaagccccagtctacatcaggcatagaggacttgtttaaagattcaccagctgtgacagtatcctcagctccagctgccccacaagtaaatgtgaagaatgatatcatgagtctgtttgagaaggtcagcgccagcattacttttactaatgcttttgtgaaatggctctgtcatttaaaagaaagagcacatctatggggatcctctagagtcgacctgcaggcatgcaagccagtatggtttcgccatatgctgtccagcagcagcaacttgcttttatga

SEQ ID NO: 92699 - DNA, 1322 bp, Oryza sativa
  Clone ID: PAT_MRT4530_91155C.1
aaattctagctccggccttgacgtggtgcagtggacgaagcgcatctcggcgctggcgaggagcgggcgcgcggcggaggcggtggcggcgttcgccaggatggacgcggcgccgaacgcgctcacgctcgcgagcgtcctcccggcgtgcgcaaggctgggggacctcgccctgggccgggcgatccacgggctctggctcaggcgcgggggcggccacggcgccaacccgatcgtggacaacgccgtgctggacgtgtacgccaagtgcggcgccctcgccagtgcgcgcaggctgttcgacgaaatgccggagagggacgtgttcgcctggaccacgatggtgtggggcctcgcgaggaacggcagccctcaggacgccgtcgcgatgttccgggggatgctctccgacggcgacgccgcgccgaacgacgccaccgtggtcagcgctctgcacgccgtggccacctccggctctctggtcagctgcaagctgttgcactcgtacgccgtgaagcaaggtctcggaggcgagctggtcgtaggcaacgcgctgatcgacgcctacgccaagtgcggggacgcctggctggcgttcaaggtgttcgtcgagctcccggagacggacatggtttcctggggcaccatcacgcgggccatggccgtgcacggccggtgcagggaggcgctgcagctcttctccctgatgctccggcgcggggtccggccggacggcgccgtgttcttggcgctgctcaccgcctgctgccacgccgggcgggtggaccaggcgctgctgttcttgggcgccatggcgagggtgtacgggatctcgccgcggcgagagcactacacgtgcgtgctcgacgcctgcggccgagccgggcagcttgacagagctggagagatcttcaggcagatgccagcggaatacgacgccgagaaggcgctgggagtttactgctcctatgccgtatcgaacggcgttgccggtgtcgccggcgagcggctgccggagttgttcctcgacggagaagtggacgccggaggaggcacatacgctgtcgtgtccaagtcgctcgccgatgcagggaggtgggaggatgcgtgtgctgtccgggagaggatggccgaaagaaggattgaaaaggaagccgcttgtacctggattgaagtatagcaacaccctgcatcactacacttgacaaatgcgtgaccacccttcatttccaaggttgcattcatatgtatatgcagaagagacctataataggaagcaccacaatgatgagcttgatagtttgatccaagaatgtatcagc

SEQ ID NO: 92700 - DNA, 2988 bp, Oryza sativa
  Clone ID: PAT_MRT4530_91156C.1
gcacgaggcgactacccacagtcgtcttgctcgcacctccgccgctgcggtggccgccggtcccggaggcggcctccgatttaatggagaagtcctacgcgtcggcgagctccggcgagctcggcgtcgttgcgggtggtggggggacgtcggtgcgggttatactattccggcatccacaggaggaggtcgcagggtcctcgaatatgtggtggtccgtggtgatggtgaccgtgcacctgatggggccgcgggattctttggaggcggctctgccctgcctgttgcgtacgcggacttacaggttgaaggaggatctgcaggctgacctcgccgctggcccacgcgtccggctagcgcagaaagaaagagagaccattccgtccattcccctcctgcgtacttccgccgcgcggctcgccgacgcactcatcccgctgccgcgcgtcgccgcatcccgtccacggccgcccgcctcctcgactacccacagtcgtcttgctcgcacctccgccgctgcggtggccgccggtcccggaggcggcctccgatttaatggagaagtcctacgcgtcggcgagctccggcgagctcggcgtcgtggcgggtggtgggggcaggtcggtgcgggttataccactgcggcatccacaggaggcggtcgctgggtcctcgccgtcgtggtggtccgtggtgatggtgaaggcgcggggaatggggccgcgggattgggcggaggcggctctgccctgcttgtcgtggatgcggacgtacaggttgaaggaggatctgcaggccgacctcgccgctggcatcaccgtcggcgtcatgctcgtgccccaagcaatgtcatatgcaaagttggctgggcttcacccaatatatgggttatacacaggctttgtcccgctatttgtctatgcaatttttggctcatcgagacagttggcagtgggtccagtggctcttgtctctcttctagtttctaatgtcctcggtggtattgttgattcatctagtgagctgtacacagaattagccatattattggcattcatggttggtgtattagaatgcttgatgggattgctaaggctcggttggcttattcgatttattagccattctgtcatatctggctttactactgcttcagctattgtaattggtctgtcacagatcaagtatttcttgggctacagcgttacgagaagcagcaaaattataccacttattgagagtataattggaggaatagatcagttctcctggccaccatttgtaatgggatcaagtttttttgttattcttctcataatgaaaaatctaggaaaatcgaataaaagactgcgtttcctaagagcttctggtccccttacagcagttgtgtttggaacaatttttgtgaaaattttccatccatcttccatatcagtgataggtgaaataccgcaaggtcttcccaaattctccattcctcgaggatttgagcatctgatgtccctaatgccaactgcagtacttattactggcgtcgccattttggaatctgttggtattgctaaagctttggctgcgaagaatggctatgagttggaccccaataaggagttatttgggcttggtatagcaaacatatgcggttcatttttctcttcatatcctgctacaggttccttttctaggtcagctgtgaatcatgaaagtggagcaaaaactggtctatctggaatcataatgggcataataattggtggtgctctcttgtttatgacacccttgtttacggatatacctcagtgtgccttggctgcaattgttatttctgcagtcactagcctggtagactacgaggaggctatcttcttgtggagtattgataagaaggatttctttctatgggcaatcacattcattacaacactaatttttggtattgagattggtgttcttgttggggtcggattctcattggcctttgtaatccatgagtcagcaaatcctcatatcgctgtattgggccgcttacctggcaccacagtgtaccgaaatagattgcaataccctgaggcttatacctacaacgggatagttgttgttcgaattgatgcacctatctactttgccaacataagttacataaaagacaggttgcgtgaatatgagcttaatctcccaaattcaaaccgtggacctgatgtcggaagagtgtactttgtgatcctcgagatgtcccctgttacatacatcgattcaagtgctgttcaggctctcaaggacttgtatcaagaatacagggatcgccatatccagattgcaatagcgaacccaaaccggcaggtacacctgctgctttcgagatcgggcatcatagacatgattggtactgggtggtgcttcgtgcgagtgcacgacgctgtgcaagtatgcctccagaaggtgcagagctcatcatcaagttccataaagctgtcgccacaggcatcaggggacctagctgactccgttaccactccaaaggttcaacagcggtatagttttctaaagaacctctggaaatcacaggttggggacgggtgtacaggtagtgaggttcaaccgttgctacgccaaaaccttgtttaacattatggccgactacctttctattagtatctgtctgcctgtttatatttgatgtacatgtatgcatacagtgtaaaggaaaaaaaaggaatatgttattactctcttgcaattttatatagaggaattgagatggggttgtaagtggacagtatatgtgctgccaacacattggttatctacacataaggacgtagaatatgctgtgtactgtacggtgccgcggcttgcctatcgtgaggagttgaaatgttcgcaaaattcttgtttaacttgtaagtttatgtatatacattttcctaggcatgtaataacagccgctttccatctgtaaaaaaaaaaaaaaaaaaaaaaaaaaaaaaa

SEQ ID NO: 92701 - DNA, 1823 bp, Oryza sativa
  Clone ID: PAT_MRT4530_91157C.1
attcggcacctggcgggcccccccgcccgcacccgcacacacatcgctcggtcgaaggaggaggttctagaaacttctggaagcggcggaggtgtggggagagagagagagagagagagagagagagagaggcagagagccatggcgcggaagaagatccgggagtacgactccaagcgcctcctaagggagcacctcaagcgcctcgccgccatcgacctccacatcctctccgcccaggtcacggaatcaactgatttcacagagctcgtcaaccaagagccatggctctcgtctatgaagttggttgtgaaacccgacatgctgtttggcaaacgtgggaagagtggccttgtggccctcaacctagatcttgctcaagtccgccaattcgtcaaagagcggttgggagttgaggttgagatgggtggctgcaaggctcctattacaacattcatagttgagccatttgttccacatgatcaagagtactatctttctattgtatcagagaggcttggttccaccattagcttctcggagtgtggaggtattgagatcgaggagaactgggataaggtcaagacagtttttcttcccaccgagaaagcaatgacacctgatgcgtgtgctccattgattgccaccctaccgttagaggttcggacaaaaataggtgatttcatcagaggtgtatattctgttttccaagacttggatttctcattccttgagatgaatccgttcaccatggtgaatggggaaccatatcctctagacatgagaggagaattggacgacacagctgcctttaagaactttaagaagtggggaaacattcagttccctctgcctttcggaagagtcctcagcccctctgaaagctttatccatgaactggatgagaagacaagctcatcgctcaaattcacagtcctgaacccgaaagggcgcatttggacaatggttgcaggtggtggtgctagtgtcatatatgctgatactgttggagatttgggatatgcgtcagagcttggaaattatgcagaatacagcggcgctcccaacgaggaggaggttctgcagtatgctagagtggttttggattgtgccactgctgatcctgatggccgtaagagagctcttctcattggaggtggtatagcgaacttcactgatgtcgctgctacattcagtggcatcattcgagctttaagagagaaggaatccaaattgaaggctgcacggatgaacatttacgttcggagaggtggtccaaactaccaaactggccttgccaaaatgcgtacactaggtgcagaacttggtgttccaattgaggtatatggaccagaggcaacaatgactggaatctgcaagcaagccattgattgcatcatggctgaagcataattcagacaactatttgcgctgttcccagcttgagtccattttgtttcagaaattgtcagtgtgaggtgttgcctttctctctgagggaatgtgtgctgttgttggtgtaaaacaaaacaaagaaagatcgtattgttagaataaactacatctgtaagtttgtaacgtaattacgcaataatgttaatgtttgtttctagttctgaaaaaaaagaaacttggttggtggccttatccaccaaactcaaagagggttcttgattttgtcatgtatgagagacagtgaaatggagggcttagtgacaggaactgcgttgttgtggcttgattattgatgtagtcatatggtcatatattcataaaattcattctttttgccgaaaaattaaaaaaaaaaaaaaaaaaaaaaa

SEQ ID NO: 92702 - DNA, 273 bp, Oryza sativa
  Clone ID: PAT_MRT4530_91158C.1
atgcgggcacagatcttgcaagaaccaaagtctgcgtgggatggggaaggagacggaaatgactcgcaagaagtcgatgggaagacagcgacgatgacgatgatgaagatagggggtcgatggttaccgatagggaagatggtagcggcggagctcaggcgaccgcctgacctgatcatcgggacttcgggaggtggctccgctactaatgggttatatcaacatgttttcagcaaagatgggccaaaacaattgatgatgataatcttttga

SEQ ID NO: 92703 - DNA, 1785 bp, Oryza sativa
  Clone ID: PAT_MRT4530_91159C.1
atgccaaatgtgttacacatctctcaggagcctacacgtggaagcagatggaatcgatggtcgaattggtacttaaggatcgtcaacaataggctacaattgttgtgtcaagggactcgtacagtggatgagtattacaaggaaatggagttgctcttgatccgtgctcacattaaagaagatgagtcgaaaatgacaagatttttgcatggtctcaatgatgaaatttctgactttttggagatgtttattcaacacttttgcaagatcttcttgatcaagcccaacatatggaaagtcctatggcatcgcacgcaacaaactatcacttttgttggcgctcgttctcagagagcctccacacgagcctctccactagctgctatagccaagctacaaccatcttcggcatcttctccagctacacgcaatgagtctcgtcggcttgttacacctatagcaaaatcctcgtcccgtagccgcgatattgaggcggcctccgatttaatggagaagtcctacgcgtcggcgagctccggcgagctcggcgtcgtggcgggtggtgggggcaggtcggtgcgggttataccactgcggcatccacaggaggcggtcgctgggtcctcgccgtcgtggtggtccgtggtgatggtgaaggcgcggggaatggggccgcgggattgggcggaggcggctctgccctgcttgtcgtggatgcggacgtacaggttgaaggaggatctgcaggccgacctcgccgctggcatcaccgtcggcgtcatgctcgtgccccaagcaatgtcatatgcaaagttggctgggcttcacccaatatatgggttatacacaggctttgtcccgctatttgtctatgcaatttttggctcatcgagacagttggcagtgggtccagtggctcttgtctctcttctagtttctaatgtcctcggtggtattgttgattcatctagtgagctgtacacagaattagccatattattggcattcatggttggtgtattagaatgcttgatgggattgctaaggctcggttggcttattcgatttattagccattctgtcatatctggcttcactactgcttcagctattgtaattggtctgtcacagatcaagtatttcttgggctacagcgttacgagaagcagcaaaattataccacttattgagagtataattggaggaatagatcagtgcatgttccaatgtaatccaattcttcagttctcctggccaccatttgtaatgggatcaagtttttttgttattcttctcataatgaaaaatctagaatctgttggtattgctaaagctttggctgcgaagaatggctatgagttggaccccaataaggagttatttgggcttggtatagcaaacatatgcggttcatttttctcttcatatcctgctacaggttccttttctaggtcagctgtgaatcatgaaagtggagcaaaaactggtctatctggaatcataatgggcataataattggtggtgctctcttgtttatgacacccttgtttacggatatacctcagtgtgccttggctgcaattgttatttctgcagtcactagcctggtagactacgaggaggctatcttcttgtggagtattgataagaaggatttctttctatgggcaatcacattcattacaacattaatttttggtattgagattggtgttcttgttggggtcggattctcattggcctttgtaatccatgagtcagcaaatcctcatatcggtgagtaa

SEQ ID NO: 92704 - DNA, 301 bp, Oryza sativa
  Clone ID: PAT_MRT4530_9115C.1
acattccattattattatgcattaatgacacctgaaaatacatcgcatggccgtgtaaatcatatcacaaaattctatctgaacaaaacaccttacgtccatagccatattgtccaaataacaaaatacgacctgctctcgttaactcaacgagatggctcgattccttctttcacaaggaattaaacacctcatattttacaccaccatcatcatgagcaatggctgaaactttgaaagcagaactccagtttgtctgtttaaccagcagcccatggtatcaaagcaatctgtctgatca

SEQ ID NO: 92705 - DNA, 843 bp, Oryza sativa
  Clone ID: PAT_MRT4530_91160C.1
atgccatgggtgcaggagcatgtgtatgcatgcttctcctctcttcctgaccccctcatgtgctctacgtccatacatattgctctttgtgccctactgcgaccttgcctaaaccaggatatattgccgtcgacttgggacggaaaccaggactgcactttgcaatccaatcctcatgggcaaaaagccgtattgggccgcttacctggcaccacagtgtaccgaaatagattgcaataccctgaggcttatacctacaacgggatagttgttgttcgaattgatgcacctatctactttgccaacataagttacataaaagacaggttgcgtgaatatgagcttaatctcccaaattcaaaccgtggacctgatgtcggaagagtgtactttgtgatcctcgagatgtcccctgttacatacatcgattcaagtgctgttcaggctctcaaggacttgtatcaagaatacagggatcgccatatccagattgcaatagcgaacccaaaccggcaggtacacctgctgctttcgagatcgggcatcatagacatgattggtactgggtggtgcttcgtgcgagtgcacgacgctgtgcaagtatgcctccagaaggtgcagagctcatcatcaagttccataaagctgtcgccacaggcatcaggggacctagctgactccgttaccactccaaaggttcaacagcggtatagttttctaaagaacctctggaaatcacagttggacaatagtaaaatgaggaccacaaaatttgttaggagtgcatttagatcaaaacaatacttgtgcaatgctattcagttgaacattcattggctctaa

SEQ ID NO: 92706 - DNA, 2904 bp, Oryza sativa
  Clone ID: PAT_MRT4530_91161C.1
atggaaggctccaagctcatcatcaacagggacatcatcaccgaggcggcagccatggcgttcgcggatcccaacctgcagatcccggacaggtacgaccgctccggcgaggtcccggccggcgaagttgtcgtcgccgacgacgacgagagctatgacctgccggtggtggacatggcgaggctgctcgaccctgagcaccgggaggccgaggtcgcttggctctgctctgcttgtcggagctggggtttcttccagggtccctgcaaccacccggagaaggtgatcggcatcgcgccgcactctgacggcttcggactgacgctgttgttgcaagtcaatgatacgcctggcctgcagattagcaaggatggccggtggcaccccgtgcggccacagacaagtgccttcgtgatcaatgtcggtgagatcctagaggttctcaccaatggccactataagagcgtgttccacagagtggtcgtcgacaccgagaggggtcgggataccattgtggtgttccaggacgcatgtatcaatggagtggtcaagccactactggagctcggcgaggcacgatatcatgcgatcgacaggttggagtattccaagggccacgcaacagaaatatttagccgaggggaacggttcgtcgacatccttaagaaatatcaggagccgagcaccaaagcgtcgtcgccggtggtcccaccgtccacgtcccacgccggagctcgtcgccggcagccacatcctcaaccgtccgcgccacatcggagctcatcgccggcggcctcgtcctccgtcatccacgccccacgccggagctcatcgccaacagccgcatcctccaccgtccacgccacgtcggggctcgtcaccggcggctgcgtccttcgtcatccacgtcccacgatggagcttgtcaccggcggctgcttcctccgccacctcgacgagctagccaagtacgtgctcatcatgctccgcgccgacgacggcggcaagggtagcaccttcgcactctacttcctcatgtaccgccacgtctgcgttgggctcctcctccctggtgctggcgccgccggtgaggagctcgtggtcgcggggcagtgcgttgatggtgcgggcgtggccgcgtgggcgccgcagtcggcgccgccggcgaggagctcgtggtcgcggggcagtgcgtcgatggtacgggcatgggtgtcgcagccggcgccgccggtgaggagctcgtggtcgcggggcagtgcgtcgacggtgcgggcgtgggcgccgcagcgccgctgcccatgtcagccatgcgtgcgagctggagtggcacagtgtcctgcagaggctgctgctgctgctgctgctcgggacgtgcatggtcaggctctggcgttaactgcaacaaatatggcaagggatgaacccatgatgtcagcagctacctatttctggtccacaaccatgaatgccttcctgttctcacaaggaccgatgaccccaactctactggatattgttatgatcactggtctagacattacctcgtcggctaacctgtccagccttaacacccaactcactcacgagtttaaaactagaagcatagatggttggggtggttatgttgccaagaatatgggaactgggccagtcaccccaagagaacacacagctttccttatgatgtggcttgagaagttcttgttttgtggtccaagctatggtccgactgcaaactggcaaagggtagctgaaaacctggtggaaaagaagcattttccccttggcaagtatctgctcggctacttgtatctgaccctcaataccgcagttgacaagatggcctctggaaaaacaatcggcacaggaggtccatggtggttactccaaacttggctaaacctgcacactagaaaagttgccaatcggccagcactagccgatgtagaattcccaagattcaagccgatcatcagggacgatggagaaacaagcaccacccgccgatgcatgtcttttggagaagcagcatcggtcagcaccgtatgcaagttatcggctgaacctttcagggaacggttcaacaacttctatgatggatttccaagaaatgatagggtctggtttgcatatgaaggatctgccagctttgaactcctagatgactttcggtttgatgaaatcaactctgacatgtacgaaaaatccagggaagtgttcacaacagctattagcccttgcatcatccctattggcatccatcagggcaagaatatcaagatgacctatgaattctatcatccgacaagtgctgcaaggcaatttggcatggggctccttcccaatggtggtggactaacacctccagtcatcggctataatgcctccaagacttccacattgctgcacggcctacctcatgtgccgattgctcctgttgctggaagaaaaagagcaaaatcgactgctgcaccatcggctgtgaagaagaagcccaagaaccaaaagactactaccgacgatctgccagccattgatccagatgtagcagatttcctggaagatgaagcattgtccgaagaggtgaatgaagcggctgaacatattagtgaaactagggagcagactcctccagccgatccacctggccctcaaataacaccatcacctccggttcgccctacttaccagcccagggttctagctgatatgttttcctttgacatcaggccattcttagatgaagaggaagaaacaacaagccaagctctggtgcccctagctgatgacatcaagacaactctaatggacatctcaaaaaggcttgaaggttctctggagaccttagtaacaagttgcggatccatccgagatagacttaatgaaatccatccaagatag

SEQ ID NO: 92707 - DNA, 2451 bp, Oryza sativa
  Clone ID: PAT_MRT4530_91162C.1
tctcgttcgtgtaggcaataacccctatctggtccagccatccatcggctggaatctgtgctccagtgcggatttagctgcctctccaccctcgcggattgaccatcgccgtcgcgctaagccgggggatcggagcgtcggggatggccgccgccgccgccgtataggatggagctggattcctccggcggctgctcggctgctcccgcggatggtgtgatcgttgcgactggggttgggttcggagttgctggtgggtggtggtcggcgggcggtaggagatctccccgagcaactgtaagagctgccgaatagctggcggacatgaggaggagaaggcggcggcggcgccgtcgtgggagcctagcgtgggcacggtgttcggcgttctagcttgcagtgaggattcttggtggaagcaagacatttccctgtcagctgatttaagcaccagcgatcaccttggggatccaggtaatccaacacgtggatccgccagaacagcaaatgtccaaagccacattttcatgggctcgaacccattaccaggaggcgaaagttacagagcagaccaatttttttcacgcatcttctcgtgggtcgcttggagggaatactcattctgctgttcctgttaactatggtggctataaccctgtaaatcatccccaacaaaatccccaaattcggcatgggcaaccatatattcagcatcgatacaaccaggcaacttcaactcataatcatcctagagggagtcaccacaacaggcaacctgcatggcccatggccgatggaacgccctggggaggaacgagtgggcatccatttaccacaactgggctaccttcatctcttccaagaaaggattacgggagcatcttctagcgcggaattgtggagcagtgcgattcattgctggcgacatgaattatttgtagtttcaaactgggagttgcgttgcgttgcctcagcccgtctgagtattcttttgcagtgttgctgcacttgcattcttccattgggggtggtcctttgtcgtactcacaattatatgaaggcataatgcgatcgataattacagcaaacaaaaaaaaaattgattttggttcagcatgcttggagggtaaaacagtatactcatacattcaggccttcccttatttcccggagcatcagaatatgatgtgctccagcgcatggggtcaaccaccagattacatgctaagggaagctaagaactcagcaaagttttttaaacatgttggaagtatttatcgtggtaacgaagtgcatgatggtattggcagttcttacagattgttaactgaagaggagattgaagtgagggagtctgaaaagccaaaggtagtgaaatggtacttcccacaactcaggcttgaccaactcatatgcagttacccttggaaaaattcagaactgacagagacagaaaaggcagagcgggtgatactggttgatttcctaaaggggcttctgaaatttgatcccaatgagcgatggtcgccattgcaggcttcatgtcatccatttataacaggcgaacctttcactggtccatatgaacccatacctgagactcccaaaattccaattggtcgtgctgccgcagttgaacacaatcctggaggaggtcactggctagccgcaggcctatctcctcaggttggaagtgttaataggtctctaccacccaataatccctatcctccaaaaataccttattcttatgggagtagttatggaagctttggtagccatggtagctatgttggtaatgctggtcatgccagcagctatggaagctttggtgatggcaatgctgtcaacatgtattactcaccattaggtcctggttttaaacaaattgagtctagtccagacgtaagattgcgaccccgtttctcacatgatagagggattcgcttgagccctgggagtacggggcctatgtctcttggtgccagtccatcacaatttaccccacctaactaccaaatgcaaatcccatctaattccactgggatgcatggttctggttcacctgcaagtggaggcattcatggatccccattaggaaaaactccatccagttacagcaagaggaggggtttgccaatgccacctcatgaatatccatctcagcatggacaaggacgtcatggagatggtgtcggttttagtcattctgatgccaatgttcgaggacatcctgtctactcccagaattcaataccaagttctggttattctagttggagaccgcaaattggttccggtagtttttccttggaggcttcttctagtcatgggccttctcaaacatttcattcacactttgctcctcgtctgcaaactcttgataatttatctgattcatcagcggcatccacacttgacaatgcttattgggacccttattttaggtga

SEQ ID NO: 92708 - DNA, 382 bp, Oryza sativa
  unsure (1)..(382): unsure at all n locations
  Clone ID: PAT_MRT4530_91163C.1
catggctagagataacggctacatcggcataccattcctcaaccatgttttgtaatctctacacattatgttgctactttntttcaacacatcctgtcattagactggttgtgggattatctgcttatagaagcctaatcatgtattgaaaatctacttcatgtgcatacagttagcttaacattgctatctgtccaaccacgcagatttgctacgttgagcatggttatgtctgcnttgctcgtgaccaggacgtcaagtggctcaagtatgacactacgacggtcaaggcagtagatacctggggngngctactagaactttacagggtggtcaacatccaacctgaagnccttgtctattnaggtcatcaagtagctat

SEQ ID NO: 92709 - DNA, 1362 bp, Oryza sativa
  Clone ID: PAT_MRT4530_91164C.1
gcgtgcgcgtgtgagcgagaaggagagagagagatggtggtggtggtggccatgccgccggcgctctccctcctcgttctcctcgttctcgcgctccacggaggcgccggcgacgccacgccgccgccgccgctgcggctcgtccgcggcgcgcggcgcgtggcgttcgacgaggggtacacgcggatgttcggcgacggcaacctcgccgtcctccgcgacggccgccgcgtccgcctcaccctcgacgagtccaccggcgccgggttcgcctcccaggacgtcttcctccacggcttcttcagcgccgccgtcaagctccccgcctactacgccgccggcgtcgtcgtcgccttctacctgtcgaacggcgacacgtacgagaagacccacgacgaggtggacttcgagttcctcggcaacgtgcgcgggcgcgagtggcgcgtgcagacgaacgtgtacggcaatggcagcaccgccgccggcagggaggagcgctacgacctcccgttcgaccccaccgacgagctccaccattactccatcctctggactcgccgccgaatcatattctacgtggacgagacgccgatcagggaggtggtgaggacggcggcgatgggggcggcgttcccggcgaagccgatgtcggtgtacgccacaatctgggacggctcggcgtgggccacgctcggcgggcgctacagggtgaactacaggtacgcgccgttcgtcgccgagttcgccgacctcgtcctccacggctgcgccgtcgacccgctcgccgtcgaacactccgcgtcgtgcggggacgaggaggaggaggcggccgaggccgtcgtgtcgtccgcggcgatggcggcgttccggcgcggccacatgtcctactcctactgccacgaccggcggaggtacccggtcgcgctgtccgagtgcgcgctcaccggcggcgcagcctccctcggccgcctgttcggccccgacgggatgaagcgccgccgcgctcgccgcgcccgcgacgcctcgtcgtagcgccggccgcgggggcgctgtacagtaagcatcagcagtgggaacgcgtcgaggcgccgctcgccgctcgccgccgtggcagacaggcgtactcgccggcgtgattgtgcgcgcgccgtggaatccggccgggatgtatgccattgtcacggctcgccttgtaactttagctatagcattaggattatttgccgctttggaccattcatccgtgtgctccattgatgaaaccaagaaaactccattttttatctcagggaaaggaacggattatttatccatcaattaatcaatttcagcaaatcaatcgatcaatttgagccccggagt

SEQ ID NO: 92710 - DNA, 172 bp, Oryza sativa
  Clone ID: PAT_MRT4530_91165C.1
acttaaatcaaacacaaaattcattctctcatgtcgcgtacctctcaaacgagcgtttcatccacatacctcccacttcacacaaatctacacttacaaacatataaactaactcaaccaattacattttatatttcatcccatttttattcatccaacctcacttaaccac

SEQ ID NO: 92711 - DNA, 3711 bp, Oryza sativa
  Clone ID: PAT_MRT4530_91166C.1
tcaactaggagcaacgcttgagacggccgagctcctcgtcgtcggcaccccgtccgggttgccagaggggaatccccatttggacatgctggagctcaccggcgagccgaccaggagcgaggcggcggcgccgaggtctcgagagctcatgcttcgcagcgtctgctgctgcatcttctcctgctgcgccagagcggcgaggaggcgggagttcatcggggagactggctccggggtcaacgcggccgcccgcggcgagagcaagctctgctgctgctgctggaactggttgagcacggcggccttgcgggtcggggagaacgccgcgccgccttggtcggcgtaacgtggcgagcgcgacgccgcggcggcgagctcaggctcagccgagaagagctcgtcgagatttgacggcacgagcgccttccccctcgcggaccggatggaggcgggcgagccgacgaggccatcgtagtccgcctccgccgccgccgccgcggcgagcagctcgtcgacggccatgtcgcgggcgctcagcaacgtgcgcagccgactcagatgcaggttcccggcgctcccgggcaggcagagcgccggcatgctcggctgatgcgaccaagcgccgccgcccatcccgctccccccgccgccggccgacggcgacagcggcggcgtgaacgacgaccccggcgacgacagccccatccccatcgccgccaccgccatctccaacgccctgcgcggcgacggcacggccgaccccgtggacatgtacagcgggcagagctccgattcaattgactcaggggcaaaagcgtctgggaaaagcagggagacagcacggccaacaaggagacagccggggaaaccgcttggatcccgatcaaaaggcggcattggtggcgggtccagctcaacagcgacaaccgacaacgagttgggttggcccgatggtggcagcgttgaggagtgagcgagaggcactgacggaagagcagatttgactatgactaacttaagatgttttgatattgcagatgatctctccatttgactacaacttcctttcatttccacctcatcatcatgttcagtaacctcgaaaaaaaactcaagaatgagtttctctataactggtgtgtgtctaagaatggaagtgattccatgcaaatcgaaggccacacagaagcagttaatgagtaacaacgtcttcaagttactaaatgtagggcaccgcatcaattcctttttgaaaataaactcttgttcatgagctgacaacaccaaattcttagcctgtgataaagcttgcataatcacacaattggtgttgctatgacaaaagtcacaatcctcacaaaggcattcctcaaaatcagcattaccacttgtacaactataccaatccccagatcgatcgtgtactctgacaaatgcatccactattaacggcataacctcaaagacaggagtccggtgccaataattttctagccgcaatgaaatgagattaggggcagaaatacgagtgcgggatatttggctgaaagtgcaatgtctgatattgaggcatttcatggactgtgaagtgatcttcttggcatctgacaagtcacagaagaagatatctagatgttccagcaccggacagcatgagaaatcgggaaaactgtgcatcaaatggacaccagaaaggtttagcttcgccaagcaccgggaggctagaggcaggtcgtctagcttgagctgaaagccattaagaatgagatccagccggagcacttggacctcgcacagaaccgcatgccggaaccagaggttcacacggcgggcgtcgccgtcggacgacagccgggtcaagttgagccagcacgtctcgagcggcgcgcgcccgcggaggagcagcaggtggtccacgaaatcctggagcttttccatgggcgccggctcccgcatttcgcggtcggtgatgcgcaggcccgtggcgaacttccagaggtggcgccaccgccgcgcgagcacgcacgtccgcgcggcgtcccgcgccggcagggacccgaggatgtggtggaggatcccatccggcaggtctcctgtccggtcttcgtcgccgtcgctgctccgaggtagggctctcttgcccatttccaacgtcttcccttgtggacgcattccgtcgaacaggcggcgggcgtcggggccacggtgcaagaaacaaccagtgtgacttcctgtgcaactcaactcctgtactctgtacaatttattgttcaaaactactctgaatgaaaaattcagcatgttcttacggtttaatctgcggaaaactccatatacactctcatgttttggtgattgattcctccgtttgataagaacttttatgtccaatgtactcaaccacttcccaattttgtaaaccacctcatcaacttctttacagtggactttcactaccttaaggtgttcagatattgcagctggtttccgcaatggattgtcattctcttctgtttgcatcatagatttagcttccttggaaatttgaagagtgagcttccgtagaactggtgagtgttcaagaatacaggctagtgcccagaaattagacagaagacaccactcattgagtaacaaattcttcagcttgctaaacatagggcaccatctcaaatcacttccaaaaataattatttcaggtccagctatcaacttcaaactcttagcttctgatagacctccaaggagcacacaattggaactgttgccgatcttatctatcataccatgacaaccatcacagtcttcatcttcacaattaccagtgtaagtattactacaccagtcatcacaatcctggtggggtctgacagatgcttcaactaatgagggcattctttccagaaaaggagttctgccccaaaaaccttcaagaaagagcctaatgaggcttggtgcataaatgagtgtgcggtgatattcactgaattgacaacagaagatccgaaggcattgcattgactgggagaagatcttcttgacagagtcaaagcagcaattcttggtgaaatatagctctttcaatgcgggacagcttgagaagttaagaaaacaatcctttaacactataccagaaagttctatcttagtcaagtgctgtgagacgagaggcatgccgccatctatttcaatgtatctttcattgaagttgtggattttgagcacctgaacttggcatattagagcatacatgacccacatcatgacacattggaatggattactgtcttcgtcctcgtcactgtcgtcatctgattcaccgtcgtcactgtgttcatctgattcatcgccatcactgtcttcatctgattcatcctcacctctgtcatcgtctgattcatcctcgtcactgtcttcacccttttcatccttctctcgacatgaactgaattccaaatcaaactcgcgtagaggcgagcagccccggaagagcactagatggttgacaaacttcttgaaccgcttggagctcttccatctctccttatcagcatcaaggcgcaggacgtccgtggatctccagaggtggcgccatcgccgggacaggacgcaggtcttgacggcctcatcggctgacagcaaggacaggacgtgctggaggagctcgtcggggagggcgttgatcccgccctccttgctggcctccgccat

SEQ ID NO: 92712 - DNA, 534 bp, Oryza sativa
  Clone ID: PAT_MRT4530_91167C.1
acatatgtatatatcgtcaaattatgtatatttgctcgtcgtagcacccacacgtttcatcgtgctccggcgacggtttatttcttgaaacacacctcattcacctcatccatgatcctcccacatccattgatgcagtactttttatattcaatcgctccgctcgcgccgcacgagaacagggtttgggatatctgcatgtcactgattggacgccccgaggatctgatctgggcggttatctcggttttgtaggatgggtccgcttgcaaaagggtatagccgcaatagtcgaacccttcgacacacggctctgcggagacggtgatgcccgcggagaggatggcggtgagggtgtagattgagaagcgcattttgtctggtacttgtatgcgtctttttttctcaagaagttatgggctgggtttgtaatggaagtgaagatattaacgatgtactgattagtgcaagtggacaatagtctctgtgccgatctggaggcaagggttgttctgattaaaagttcctcgtgcc

SEQ ID NO: 92713 - DNA, 183 bp, Oryza sativa
  Clone ID: PAT_MRT4530_91168C.1
ctcacgcgtccggaaattctcagcttatagtcaggcgaggtctgagctgaggttgacagatggcacacgcaatggcggccatgaccgggctgtcagatggcgttcacctaccaggcggtcccatgcgcgccagaggtaggtccaggctcgccgacgtcagtcaccacccaggccccgagctac

SEQ ID NO: 92714 - DNA, 2021 bp, Oryza sativa
  unsure (1)..(2021): unsure at all n locations
  Clone ID: PAT_MRT4530_91169C.1
tcatcagaaaatccatgaagataattgagcttggttctaacagctaatagctgatcagaccaccatggtggcctctctcctttgcaccgtcgccgttgcggttctcgccgtggcagcggtcggcggcgaggcgggggtggtggagcacaccttcgtggtgcacgagatgaacgtgacgcacttgtgcaacacgaccaagatctttgtggtgaatgggcagttaccgggcccgacggtggacgtgacagagggtgacacagtggtcatccacgtcgtcaacaaaataccacatgggcttaccatccactggcacggtgttcgccaattgaggagctgctgggccgatggggcaggcttcatcaccgagtgccccatcccgcctggcagtgagcgcacctaccgcttcaatgttaccgaccaagtcggcacgctgtggtggcacgcccacgtcacctgcctccgctccaccatcaacggcgcattcatcatccgtccccgcgatgggaagtaccccttcccgacacccgtcaaggatgtaccgatcatcataggtgaatggtgggagctcgacctcgttgagctggacaggaggatgagggatggcaacttcgacgacaacccgttgtcggctacgatcaacgggaagcttggcgaccttagcaactgctccggcatagtggaggagagctttgttctcaacgtgaagcatggggagagctaccttctccgggtcatcaacactgcattcttctccgaatactatttcaaggtcgccggccacacgttcacggtggttggcgctgatggcaactacctgacgccgttcaagacagacatggtcaccgttgcccccggcgaggccattgacgtgctcatggtcgccgacgccccaccagcccactatcacatgatcgcgttggctaaccaaccaccggagccagacccacagatcccgaagtacatctctcgtggcctcgtccgctacaccggtgtcgatgccaacaacaatggcctaccggtcccaatgccgatcatgcctaaccaacacaacaccatgccatcctactacttccatgccaatcttactggcctcatgcatccgaagcatcgtcgtgtgcccatgcacgtcgacgagcgtatcttcatcatccttgggcttggtaccatctgtcgtggtcggaacaccacctgcaagcggcagcgcagcctggagaccatcgaggtggccaccatgaacaatgtctccttcacccacccaaacaccactgcgctcctcgagcgctactacgacggcactccagaaggcgtttacacggaggacttccccgttcggccaccacggccatacaactacaccaaccctgctctcatccctcctggccctctcgaagaggtgctggagccaacattcaaggcgaccaagctgaaacggttcaagtataacacatcagtggagatcatcttccaaagcagcacgttgttgatgagtgactccaaccccatgcacctccatggctatgacgtcttcctccttgcgcaggggcttggcagcttcaacgccaagagggacatcaggaagttcaactaccacaaccctcagctcaggaacaccatattggttccccgcggtggttgggccgccgtccgcttcatcacagacaatccagggatgtggtacttgcactgtcactttgagttccacatcattatgggcatggcgacggcgttcatcgtggaggatgggccaacaccggagacgagcctgcctccaccgccgccggagttcaagagatgtgatgcctcttgaaacaacttatcctaacaactatggcaaggaccttcctcctntttgccagtattcactagataatggcattgcctttggggcattttattcttgtattgcattagttaagacgtacatgttaaattccagcgtgcacaagccggtccaggccatgtggtcatcagcttcaggccaaggtcacgaaaagcacaacttgatcaaaaaaaaaaaaaaa

SEQ ID NO: 92715 - DNA, 365 bp, Oryza sativa
  Clone ID: PAT_MRT4530_9116C.1
ttttgcttgagttctatgcaccttggtgtggccattgccgcaagtttgccctgatcctggaggaaattgcagtgtcattgcaagatgaccaagatatagtgatagcaaagatggatggaactgtgaacgatataccaacagacttcacggttgagggatatccaactatctacttctattcatcaagtgggaaccttttgtcgtacgacggtgcaaggacagctgaggagatcatcagttttatcaacgagaacaggggaccgaaagctggtgcatctgctgcagtggatgagaaaacccatattgatgctgtggaagaggaggacactgatggtctctacactgcatacaacagagactactga

SEQ ID NO: 92716 - DNA, 474 bp, Oryza sativa
  Clone ID: PAT_MRT4530_91170C.1
atgtgcagtgaggttcttggttttgaaagtggtggcagtcatgtcaccatggatatcttaccgcatgaggtctcagagccagagtcaaatcttctagatataaatgagaagagaaggttggcaaaggagtcacgaccgcctctaccaccagcaatgccatggagagggaagcgcatagtcttagaccgctatgatgggcgactgataatgtcacaggtacccacaaagctacccttcactctccatgcatctcgcgtggatgggcggcttagattgtcttgtatgcacccatctgatagtgttgatgagcttaaagtagctagcaatggcaaaaaagatgtcgaggatcatgcaaagggtaaccatggtgagaagaatgttgagtacatcagtagcaaagcaaaagtgggtgaggggaataacttgacgggttgtgggagatcatctgggaatggtgttgcatggaggatttga

SEQ ID NO: 92717 - DNA, 518 bp, Oryza sativa
  unsure (1)..(518): unsure at all n locations
  Clone ID: PAT_MRT4530_91171C.1
tggcanattcatgagtttgctttncagctgatactggccaagtggaagatggaagtttntggatacangaggaggaacactgctatcctaacctgggcaacttgcactggaatgcgatgataaattgggtgagaatgtcngcaaagatgagcctaagctgcaatgtggcanggtggctgctgatagataaattgcgtgtgtctggggaaagggtgtggacaatggccctgggcctgggtggccatgcacgtgtggttatattgagtttgtgttggttgagagctggtgctgttgtgccacgttgattgtgtgttgacaataggtggtttgttggtgggtgcatggacaattatggtgggccgtggtgatgtgtgtgacagctgtgcggcccacaactgatgcattggaaatgagctgtggattgatggtgagatcctagggcgacccnttggttctcatanccagaaaagactgcctaataaaatgtattttttttctaaaaaaaaaaaaaaaaaaaa

SEQ ID NO: 92718 - DNA, 468 bp, Oryza sativa
  Clone ID: PAT_MRT4530_91172C.1
atggatatcttaccgcatgaggtctcagagccagagtcaaatcttctagatatacataagaagagaaggttggcaaaggagtcacgaccgcctctaccaccagcaatgccatggagagggaagcacatagttttagaccgctatgatgggcgattaataatgtcacaggtacccacaaagctacccttcactctccatgcatctcgcgtggatgggcggcttagattgtcctgtctgcacccatctgatagtgttgatgagcttaaaggaggcaaaaaagatgtcgaggatcatgcaaagggtaaccatggcacactgcacaccgcgctaaattgcaactaccccaagagcatcaattttgaaagaaaatatgagtcgttctttacccattggatactaacaaacttggtgaaaagaattgttggttactacataaatagtaccacatgcaccttcttatataactag

SEQ ID NO: 92719 - DNA, 611 bp, Oryza sativa
  Clone ID: PAT_MRT4530_91173C.1
catacaaagatatattacaataacatatttacaacataaatatatcacaataataaacacgacaaatcgtataataagaaataaacgaatatctacaataagtgaactttatatttttaagaacctaaataaaactatttcagatatatgactattcgtcgatcaaccgtcgttggttacacataggggttacacataggagagaatattccagccgcaactcctatcgcgaaagatgagcaggctcgcggcctcactagccacatgcctcccccaaccctaaccaccataggcatacggtattgcgcaggcatgaacaatcaccccctaatcctctctatctaaggccggcgccaccggaacggtttgaggaagaagaagacgagacctccccagatctggcctcttcttggctccttccgccatagtcgtactcgtttgacagggtggtcgtcttcctctctctctctctgatgctttaattgtcaccgtgttgatccgcgattggatcgcggtggtcgacgacgggatggtgtgtcgtggatggatggacggatgtgggggcgacgagaaccgatggcgctgcccgcggctggctgacagcctcgtgc

SEQ ID NO: 92720 - DNA, 442 bp, Oryza sativa
  Clone ID: PAT_MRT4530_91174C.1
tttattactctctttctcctgccgataagcttggaaatctcactttggccctcgatatcggtgccaagtattgcaatgtcgaaaagtatctcgaagctgatgatatccacaagttggacgaagtctcgatgattgtgtatctttcggattggtactatggagtcgctcttcttcaaaagcaagacatctccgccaaaagaatcggaaaattggtcctcatgaccgaacttcatgatcaaatgagagcccaatacactgcgggagccaatgccttcatcagctgggtgaatgccaagattgccgagctcaatgtccgagatttcgacaatactctcgctggcgtcaagaaaaaactcgagcaattctacgcttacaaggctggagagaagagcaagcaattgacttccgtcttggacctcgaatccctcttcgacaacttggc

SEQ ID NO: 92721 - DNA, 825 bp, Oryza sativa
  Clone ID: PAT_MRT4530_91175C.1
atggtgccgcctccgccgatggaaaatccgcgatttgaaggtggcgaaaacggagacaacgactatcctctcgtcgccacctccgatggagaggccgtgtcctcgccgtcaccgtccgcggccgcttcaacgccgacggccgcctctgcgcctacgggagggagctggtggacgtctgcatcgtggacgtgtcctccggtgaggtcgtcaggaaggtgtccgccgggagtgacatttatatatccatttttagtccctatactttgtatgtcgggcctggcctgctggcccatcgtgccgggctggcccgaccgtgcccagtgtgccggtggggaggcccaggcacagcccagcggtcgggccgggccaaaaagccatgtcgtgggccgggccttcgggccccgggccttatggccatctatagtgtccaccaccaccaccacggcgcaccgcggcgtggctctcctcgtcggcagcagcgaccggttcgtccgccgccgtctcttcgtccccgactgggtgaaccaccccaccaactgctccttcgcgctcgggcggaccgtgtcgacgggaggagatcagtacaagctgttgtgcatccgcatggaccgcgtactgcaggtttgctcggtgctcaccctcggcggcaatggcatcaacagcggcagcttcgcgcgatggaggaaggtaccgagcccaccccagaacgtcttcacggggcgcaggagcgtggccatcgtcgacggggtcgcctacttcgtgctgtctatggcgttcatccaccgcgggacgccgggccactacactggccaaggtctcctgtga

SEQ ID NO: 92722 - DNA, 647 bp, Oryza sativa
  Clone ID: PAT_MRT4530_91176C.1
gtttctcgagggaacgcgatgtaggatccacaccggccaaaccacccatgactgacctttcccgaccgtcgcacgcatcatccacactctgttgctgctgatataccgcgcccgatctctgaaacaggagcacgaggaggcagaagaacgcacgggaggcgaaagcccctaggaagactgacaggagaactccaagctcttctacgtcgatagcgaccctaaacgatccctgcatggtgcacacgccggaaatgctgcacatcctcaaacacgaaccctaccatgtgactgcctgcgacctggggggatctgaactgcgaaatatttcctaactactaacatgatgacctctactgactaccagtactgctgtgacagataatgggctgctgcgcacaagaacggaggaaccctcgaaacctatattgtgataaagtgtctgactagatgatcactctaagaaatttattaacttcacgctcaattacattactgacttgtacatccgaatgaactagtgcacattcatagaattccgaactgacatgctgaatgtcacatccataaccagaaattgttttctagaacatcgacaccgagttgttagatgtggtcacgtgcctaacattcggcctaaaatggtctca

SEQ ID NO: 92723 - DNA, 427 bp, Oryza sativa
  unsure (1)..(427): unsure at all n locations
  Clone ID: PAT_MRT4530_91177C.1
ggccccaatttacaaggtttgggggctccgggggcctgtgcccctggcgatgaaagggaccaaacaggtggcagcttcttcactttcctcaccaaatgaccaaagggagaggaaacgcaatttccctgcctttaatctatccttaaccctgaaggcatttggaatggggccccattacacgggctggggccattaatgggacacttattttacatacatatacatgggactcggtcgggcgggaataatttaaaaggccctccctaacgggctaaagtttaattaaggggggcaccccaaaaagaaggggttgcgtcaggcngccagatcaggcattttttttcagccaatcttctcagggggggggccgcctgttggccagatgaccggctccatgagccgctttcgcttcaacgccagggtctgg

SEQ ID NO: 92724 - DNA, 441 bp, Oryza sativa
  Clone ID: PAT_MRT4530_91178C.1
tgtgtgatgaaaaatttatgatcatgatatgtcatgcaaccaaatgctgttttgaaggataaaaataatcaaatgttgataggcaagactaaagttgtgagaatctaatcagtgtttgttgtttatgtataaattttcattgtaaatgtgtcttgacatcagatagatctgcaggagaaatagctcttattgcggatggtatgaacatgataacggaaacagctgttggaggacatgctgttggtgctgttcgaagtcaaagttttcttggaactagcacaaaccagatgtcgcgccacagtactttctattggcacctgtcagatcattagttgatcttcttggaagcatcctgagagtatgtcggaattaggagctgggcgaaacagctacttccctgtcttcacaagtttatattgtggaacaagacagacgagtgag

SEQ ID NO: 92725 - DNA, 556 bp, Oryza sativa
  Clone ID: PAT_MRT4530_91179C.1
aatgttacattgttttggtggttttttacaataaaaaggctactacaggcaactaggggcaggtttgggggggggcattttatgttccaacaacaaaaaaacttgacaaaggaaacacaaaaaaaaaaaaaagaaaaaaaaagaaaaggaaataaaacccccgaacaaaaaaaaaaaggaacagaaaaggaagggggggaaggccaaacccaaaaggagggctggaaggggaaggaaaggcaatggaggggtttgaaacgggaaccatagcccgaccccacccaaaaaaggaaaggaccccatccgaaggacctcaggaaaggggggacggggaggaaagaatccctcttagggcccaaacccgaaaaggcttggcaagggagccggaaacaaccaaaagaacccccggggccgggaggtttggaaggggaccatcatggccccgccaaaccgcaacaaaatttccactacgttcatcaagcaaacgacaataaccaaaacttaaacccggtgttttccaggaaaaaaaagccacagtgccggcctttcttaactt

SEQ ID NO: 92726 - DNA, 588 bp, Oryza sativa
  Clone ID: PAT_MRT4530_9117C.1
tcatttccgcctatccttggctcttttgagtgttttcttgcccttgttcctccacttctggctgcctcctggagtgcggctctcctgaatttcccttactttgcgcatcctgtagttcttaagatgttgatcagataagagctcatcaaccaatgttgttttgcgctccctctttgtcagcctacttgagaagaactcagatgcaggctcaataactgtaccaacttggaagtatttcggaagggccttggattttcctgccctcttgaagtgtctttttgggtccattacatgtctcagctgcaaaatctcaagatctttcttcaactcaggagtgatggtgggagccggcatgtcgaaccagcccttgccggaggtgtccttgacgttcttcctggccagcttgttggccttcctcgggtccctcggtggcacgaagagcccgtcgacgagctcgctcgcgggcttccagagcgacccctgcgctctgctagagctggctcccgtgtccttcttcccgccgctggtcgtcggcagggagggcagcttgggcgcccacgacaggccaatcggcgccgcctccgccat

SEQ ID NO: 92727 - DNA, 646 bp, Oryza sativa
  Clone ID: PAT_MRT4530_91180C.1
ctctctctccgggccgccctttttttttttttttttttttttagactatgtttctgcttagcgtaagttttgcgtagaacttgtaaatgtcatttaaagttctggtccttattttcatgtggaatttgtggagctaggatgggttggattatgtggtttatatcgttattaagttatcttataactgcctgtcgtggatgctcgtatttttaggggagactctaccgaaatttctaataattttgggagttagtggtttttgagtgtattttggtgtggcactctaggtaggtggctacctggagtgttacaccgtcgtcctcgtcgccgctgtcgtctcgccaccgctgctcccgttgtcgtcgctgtcattgcactgccaccgctctcgtcatcgtcgccgcgcagccgctcgtggtcaccgtcatccttgtcgtcaccatcgttgcgccgccgctgctcccgtcgtcatcgccgtcgttgtgcagccgatcgtggttgccgtcgtcctcgtcgtcaccattgtttccatttatgatggataaaagatcaaaaaagaattgatggatgaaaattgtattacttagagatgtggttcaaaaactatttattggtttttacgaatatattataacaaacatttacc

SEQ ID NO: 92728 - DNA, 444 bp, Oryza sativa
  Clone ID: PAT_MRT4530_91181C.1
atggtcggctggtcggctttgaggccgagccgagcccggcggctgctccccgcgccgtccgatcggctcgaggccgatccgggcagtcgtcctgtggaccggcggtggaccacccgcgtggtcccggcgacgtacccaggcaagggtgagcgtgatggagttgggtcggccggggccggcggtggggaggaggtcgccaggacgaggaggtccgacggctcgcggcgatgcggcggcggcgacacgggagaaggggggggaggcgatggcgggagcacgggggagatcaaagaggacaagctcaagcatggcggcgggcggagtggggcgacggcaaggcggagcggagtggggcggtggcggacgacgacgatggcggcccgcgcgcgcaattcctcccccgccgctcgccggcccgcacgcgaggaactcaccaggagatga

SEQ ID NO: 92729 - DNA, 453 bp, Oryza sativa
  Clone ID: PAT_MRT4530_91182C.1
atggccaagccaagcgccgctccggtgaccggcgtccccgtcggctccgccgcctggtccaccggcctctgcgactgcttcgacgactgcggcctatgctgcttgacgtgctggtgcccgtgcatcacgttcgggagggtggcggagatggtggacaggggctcgacgtcgtgcggcaccggcggcgcgctgtacgggctgctgtgcgcgttcaccgggtgccagtggatctactcctgcacctaccggggcaagatgcgcactcagtacgggctcgccgaagccggctgcgccgactgctgcgtccacttctgctgcgagccatgcgcgctgtgccaggagtaccgcgagctcgtcgcccgcggctacgaccccaagctcggctggcacctcaacgccgaccgcgccgccgccgccggcgccgctcccgccgtgcagtacatgggccgctaa

SEQ ID NO: 92730 - DNA, 461 bp, Oryza sativa
  Clone ID: PAT_MRT4530_91183C.1
aaaaaaaaaaaaaaaaaaaaaaaaaaaaaaaaaaaaaaaaaaaaaaaaaaaaaaaaaaaaaaaaaaaaaaaaaaaaaaaaggaaaaaccattataaaaaatggcggggtgccttacgggggcctgcggttccgtagcgtttgctttgggggcccttattttcttttttttgcccctctttttactccctggggggtggttttcccttggcgttcccgagttaacccggttggggccccatcccctttcctggcggtggggcccttttgagggggccggttccgatcgcctttggccccagctggtcccccttcctggcgtttgggcctccccttgggggggggggttaccccctggggtgggggtgtttccccgcagggtgcccgtttccctcgcctgggccctgtggccctgtccttccctttattccccttcctttcggctccctttcggggcttttcc

SEQ ID NO: 92731 - DNA, 360 bp, Oryza sativa
  Clone ID: PAT_MRT4530_91184C.1
atgacatgggaggagcttctcgcggacagcttggacatgagcgatgaggctcactgcttcagagaggaggataagcccgctttccgtgagtccaaggcgcatatggccaggcggctggctagcgggccagctttagggctctttggtcagctcctcggtgacaggagggctgcgcccattaagggagcggcgccgattcccgaaggcgcctgctattactcgggtaaaggcgtgctctgggtaatagcggctcttcaagccctagcttcctctggagcccttgaacagcttcggagggcctggaaggctttggagtccttggatggctccggagcccacgaacagctctggtggccttga

SEQ ID NO: 92732 - DNA, 431 bp, Oryza sativa
  Clone ID: PAT_MRT4530_91185C.1
aaagggagagctgctgcgcgtgccggtaccggaccgccgggtcggggcaggccgacgtgtacgtgctgccgatgctaacacgttgtacgtgcaggcactggtcctcctcgccgccgccgccgtcacggacgccacattgccgaccaccgagaacgcctacacccccgacaccgataatgcggacgccgggacggcgtatggagagggggtcggagacaacaccgagtagaacatcgtcgccggcgccatgaagggcatggtcgtggacgccgtggacactgtggtggcgaaacattggcgcctatatgccggaggccgagaacaaccaggcgaagacgtgcgacaacgcggcggcgaagggctcgagcgtggaggtgctcacgaggattcccggtacgctgacggcgccggactatggagcgctcgtggtg

SEQ ID NO: 92733 - DNA, 420 bp, Oryza sativa
  Clone ID: PAT_MRT4530_91186C.1
atggccgcctcttccttctcaagcgctggcgccgccgcgcagcttctttccgggcgatcgcctgcccggcgcccgctccgcctgccgccgccgcccgcctctcccttctcaagcgtcggcgtcgccacgcagcttcttcacgcccggttgcctgccacggctcccgctccgcccgccaccagccgcctctaccttctcaagcgccggcgccgccgcgcggtcacctgccgcagcgcctgctccgcccgccgctgccccttcttcgccgccggccgcctctcccttctcaagcatcgccgccgcccccgtctcccttgccccgtcgtccccaccgccaccgacgccctcccttctcccctgtcgttgcccccgctgccgcggcggccgctgacgcagcaccggccctcccctcccgtgtag

SEQ ID NO: 92734 - DNA, 2130 bp, Oryza sativa
  Clone ID: PAT_MRT4530_91187C.1
gctcatgcgaacaacatatatgcaattgcaaacgcatggaaataatgtaacagtatatatgtatgtactgatcaattcgcagatcaatcactccttgtcgttatcatcagcacccccgcgagacgaggagccaatgccgacttgcagccacggtgtcgtctcccctgccatgctcacgtccttgagatcgctaagcctcgctctcttgacggtggtgctgtccgcctcgtcctctgctgcggcggtgcttaacccgaccgcgtcgttggcgttctggctgccggttgtcgcggtagccttgttccgttggctgggtatcgccggcgacgatgggatgtataccggtggtggcgcgtcgagatgaaacgagctgccgccgaccttcggacggactgttgcggccgaggccagcagtggcgggttcgccgcgatgctgaggtcgagagcgggctccggtgcgtccaacattggccggaacgagagcgggacaaggtcgtcggctaggggtgggactgaggcggtgtgatccgccgaacttgacgtcagccagtggcaccgtttgtggcctccaagcgcctgcccggaggtgaacagtcgatggcagaccgagcattcgtgcatcttgcccttcttcttcaacggtgcagcggcgagcgcggcgaccggcggttctatgggcacgatggccatcgacagttctgccgcggcatcgctcgtgccggcgtttccatcaccgtcgatgcttgcgtgcacgttcctcctggcatcagaagtggccttggcgggattgtcctcgctccgatcagcgacctctgcatggtgtgatggctcagccacctctggcggttgctctccagcttggcagcgaagcagcccttcaccttcttgtggcttcttgcacgccttgcactcgaacatgcctcgaggcacggtcgagacatactgtggcgccggcgccggcgggggaagcgccatcactgtatccagtacatacgtcgtcggctccatgaacgtgatcagtctcttatgttccttactcgcggaagaagatgaccgttgttctgcttcagtgacgcctgcctgatctaccttggacgacgagagcatgaccaggcaattggccaggtcctcctcctcgccggcagcgcacgctgagggtgtcggtgacaaatcgactcctgtgcccttgcagcgacgcgagcgcttccctttcaaccaaccggcggccggtgcagaatcctcttcgccgtcggcctcgggcgaaggcgaccacggttgcagcgagtgatccacgtcgtcctcgtcgtcgtcgtcctcgccggagctgcacttgccgtgctcgaggaaatgctcccacgacgtgaactccttcccgcagttcttgcacacctggcggctcctcgtgacccggttaggattggtgcggagctcgtagacgtgtgtcgctgcccctgacgacgacgggccgcccgcgttccaaggatcatctgccccgccgcgcgcacgccgcacggcctcatcgccgagcgaatcgtcgtcgtcgtcgtcgtcatcatcggcacccaacccatcgccgtcgccgacgccgtgggccctcatgtgcccgcctagggcgcttccgcacgtgaaccccttgttgcagactctgcagaagtgcttgtaccccgacgcctgcgccgccgtcggcggcggtgcccgaggtgatgacggcgacggctgcatgatcgcagcaatgccgcgagttctcctgaacgtggctcctttgacaaggtctttatcccacgtaacattgacgtggcgcttatgtggcaatttgattcgccccacccaacctcttgcacccaccagatccgcgcgccaatacatccactccccctcactatagccaacctgtcgaaatctagggctcccaaattttcccctctctcctcttctctttcctacccatgttttgtttggtctttggaagtaacagagagacaacaaatgaagaagaaaaccggcggaatccacttctagtctacgcacttgggggtcataatgcggaagagcaccacgaccacaagaaccgtggtggccttggaggcacggtcgaagagggaaggcaccggtgaggtcgccgcccaccat

SEQ ID NO: 92735 - DNA, 1677 bp, Oryza sativa
  Clone ID: PAT_MRT4530_91188C.1
tcactccttgtcgttatcatcagcacccccgcgagacgaggagccaatgccgacttgcagccacggtgtcgtctcccctgccatgctcacgtccttgagatcgctaagcctcgctctcttgacggtggtgctgtccgcctcgtcctctgctgcggcggtgcttaacccgaccgcgtcgttggcgttctggctgccggttgtcgcggtagccttgttccgttggctgggtatcgccggcgacgatgggatgtataccggtggtggcgcgtcgagatgaaacgagctgccgccgaccttcggacggactgttgcggccgaggccagcagtggcgggttcgccgcgatgctgaggtcgagagcgggctccggtgcgtccaacattggccggaacgagagcgggacaaggtcgtcggctaggggtgggactgaggcggtgtgatccgccgaacttgacgtcagccagtggcaccgtttgtggcctccaagcgcctgcccggaggtgaacagtcgatggcagaccgagcattcgtgcatcttgcccttcttcttcaacggtgcagcggcgagcgcggcgaccggcggttctatgggcacgatggccatcgacagttctgccgcggcatcgctcgtgccggcgtttccatcaccgtcgatgcttgcgtgcacgttcctcctggcatcagaagtggccttggcgggattgtcctcgctccgatcagcgacctctgcatggtgtgatggctcagccacctctgcggcgttgctctccagcttggcagcgaagcagcccttcaccttcttgtggctggcacggtgcccgccgagagcttggtgagaagagaaaaccttcttgcacgccttgcactcgaacatgcctcgaggcacggtcgagacatactgtggcgccggcgccggcgggggaagcgccatcactgtatccagtacatacgtcgtcggctccatgaacgtgatcagtctcttatgttccttactcgcggaagaagatgaccgttgttctgcttcagtgacgcctgcctgatctaccttggacgacgagagcatgaccaggcaattggccaggtcctcctcctcgccggcagcgcacgctgagggtgtcggtgacaaatcgactcctgtgcccttgcagcgacgcgagcgcttccctttcaaccaaccggcggccggtgcagaatcctcttcgccgtcggcctcgggcgaaggcgaccacggttgcagcgagtgatccacgtcgtcctcgtcgtcgtcgtcctcgccggagctgcacttgccgtgctcgaggaaatgctcccacgacgtgaactccttcccgcagttcttgcacacctggcggctcctcgtgacccggttaggattggtgcggagctcgtagacgtgtgtcgctgcccctgacgacgacgggccgcccgcgttccaaggatcatctgccccgccgcgcgcacgccgcacggcctcatcgccgagcgaatcgtcgtcgtcgtcgtcgtcatcatcggcacccaacccatcgccgtcgccgacgccgtgggccctcatgtgcccgcctagggcgcttccgcacgtgaaccccttgttgcagactctgcagaagtgcttgtaccccgacgcctgcgccgccgtcggcggcggtgcccgaggtgatgacggcgacggctgcat

SEQ ID NO: 92736 - DNA, 343 bp, Oryza sativa
  unsure (1)..(343): unsure at all n locations
  Clone ID: PAT_MRT4530_91189C.1
ctttagccggaaagggttcccaacggggtttccccccgcaaccggaaggggccgggaatcttggtcggaaggggcctcccaaattgaactggggccacgcctgcccccaatggaatgcacccgnaacgggcggaaggcccaggcgcaccgaccgctggaatggatcggttccatcccccgcgataaaggaagaacaaggccgccggcgtcgtcggcggcggcggaggcgcggcgacacttcaccaacctcgtcgcgcggcctccaccaccggctgcaggctccgccgtgcgggacggggttgcggcggcggcggaggcgttcactcaggaaggagtcagatag

SEQ ID NO: 92737 - DNA, 205 bp, Oryza sativa
  Clone ID: PAT_MRT4530_9118C.1
tcggtaatatccagagcgtcgttgaagataggagaggcatatgtagtacgatggcgagtgggacaaacctcaagtagatataataatagtctgccctaccgtgccccatgagctcagatagactaaacgattcgaagaagaagacacagcttattacattgatgtggacgaaagcagagcgttgttcccatcagatagtgttgct

SEQ ID NO: 92738 - DNA, 607 bp, Oryza sativa
  unsure (1)..(607): unsure at all n locations
  Clone ID: PAT_MRT4530_91190C.1
tttttttttttttttttttttttttttttttttttttaatttttttttatatatttttttttttttttttttttttttttttttttatttttttttaaattattaataaattaattaattttttttttttttttttttttttttttattattcttttttaagggggaattattttctttgggaaaagggaaggaaacttttaacaagggtggaaaccgcccagagaccgaaaattgaggaaaaaaaaaaggggaaaaaaatttggtcttgggggggacaaaaggcggggaaaaagaaaaaaaaaaaaccccccgggaggagaaagaaaaaaggaaaaagactggtaatgggagggaagcgaaaatattgggcgatgatgggggaaaaaaaaaaggagggctggggaattacttggtaaaaaaacaggtgaaaaaaagaaggagggaaaaagggggctgaaattgtgcttaactatttaatggcgaaggaaaaaaatggggtggggaaacattagaggagggtgaaaccctgtttgccttaaacttgactgncaccctcaaaaaaacctgaaaatgtgaaaaaagggtttccccggggggcccaaggg

SEQ ID NO: 92739 - DNA, 338 bp, Oryza sativa
  Clone ID: PAT_MRT4530_91191C.1
gtattttaacctttttgtattaaacccgattttcatttttttgtttgaggggggttttttgtgttgttaacatgggtgagatccaaaaatacatttttattgaggagaaaaaaaaaaatcccatgggggcaaagaaacaaaatcattcttaaaaagacagtaaaccacccaaggttaccgttgcaaaacatcgggcaaaaaaaaagacttattgattaaataccaccagggggtttatggtaggggcctttattgaaaaaaaagggaataggcgaaacctacagaagaagggagttttttttggggggggaggaataatcaagcccaaaaatgggggg

SEQ ID NO: 92740 - DNA, 1410 bp, Oryza sativa
  Clone ID: PAT_MRT4530_91192C.1
atggaggatataattagtgatattattaggaatagattcgggattgaaactaggaatcgtgctagaacttacaaaaagccatatcctgattattatgataatgtgccgtttcctcgaaattatagagttcccgaatttgccaagtttagtggtgaggatggtaagaccacatgggagcatgtaggtcaatttttggcacaatgtggtgaggctaatagtgatacttttaaattgcgcttgttttctctatctttatccggtaatgctttcacatggtttacttctttaccggcaaattctattcatacttgggctcaattagaagaacaatttcatgattatttctatactggagaaactgagcttagagaaagactagatggccaacaattttttgatgttagtcaactcatgcaaagggctttggctcaagaaagtcgggttaaggataatagaaaacttgctagaccatttgacaaaaagcctaatgttaatgtggttgattaccctgaggctagtgatagtgaggaagagggtgatcatgatatttatgttgctgaatggtcatggactaacaaaaataagccttttgtttgctctaacctaatgccgattcctcgcaaagatcggcaaattgaggttcaatcggccatagatgaaggacaattgaagttcaccgatggctccaagatgaagcttgatcatgatccttttccggtgaatacaattaatttcaatgataagaaggtgttgattcggtcggagcaagccagatctactaagggaaaggaagtggtcattggtgaaccaaggtccaagatgatagtaccaaagaagccagaagttgccgtttggaaggagaataggagtggagcttcaacatcaaaagcccctaggaagaccaaggtgacttttgatatgcttttggagaaatatgagaagcaaggtggtgagaaaattcgcaacaaagggaaaagaccaagatcacctcctagggagcgatttggtcattcaccaagtcggtcgcattcaccttcatatcattatccacaagacatgtcatggggttcctatccaatgccgccgccggattatccttatccttgcttcatgccatggggggcgacgacgccaatgttcaatcgtatgcctccaatgcaattcaaccaagggtggggaggaccacggaggccaattcatgagcgtttgtctttactaaacaatagccgattttatggtaagaatagggctaatgaagaaaagagggaaggaaagcgcgtcaaagtggaggagaggacttcggaagtgataactattaaagtggggtctcatgatgtgccaatacctactggagatggagttgaagtgtccccgaacagaaaatctgaagctggtaccagctcctcgtag

SEQ ID NO: 92741 - DNA, 352 bp, Oryza sativa
  unsure (1)..(352): unsure at all n locations
  Clone ID: PAT_MRT4530_91193C.1
gcttccgaagaaaatgcaatttaattcttccatggtcattcagctccacgcaattctcagctacaacgaaaatcaccaaacaaaaaagaaaaatctccacacgattttcagctaaaacgaaaatcacaaaaaaaaaattgtaagatgagtcatggaaactatttctcactatcagcaaagaaatgtagccgtggagaacgccaccgtgttgccattgcctgctctgcctccccttgccacggctgatctcgcggcggccaccggcgccgtcgccggngacgcgtncgtgctcctcgccgtgaaccggnggnggngcngcggcntggngttggcgccggggcggtggngcgcg

SEQ ID NO: 92742 - DNA, 2427 bp, Oryza sativa
  Clone ID: PAT_MRT4530_91194C.1
atgacgaagccgccatccaagacggaggtggagccatccaatatgataccggtcacattggatgatttcgaaggagaagaccgcaaagctatggaggaatacatcaacgaactcacacgggaggcgttgatgagggcaagcactaggactcataagttagatgcaacttttgagggtaaatttgatgaatttttaagggttaaattcggccctcttatggccgattacatgtcaaaagataaagcctctaccactgctaaccaacctcctatagatcaaacgggtagtagaaccgatggagcggcgcacacggtcggtccgaccgggcctgacgaccggtcagaccgtgacctagccgtcggtccgaccgaccaaacggccggtcagaccgggtattatccccgcggtcagaccaggactcaggcaggtctgaccgcgcctttggatgccagtcagaccgggccctgggccggtcagactgacgcgattataccgatacaggggatagatctgatgactaatgctagttatttgtatcatcttagaacatttgatccctctgtatctactgctgcaaataatccccaagttcccccacatgttcctaatgcttataatgatgttgctagggggtatcctcccgatactagacaaggccaatataatcatattgcgccacaaacacaacctattaggccaccaaatccaccgccaaatcaacatggacctaataacatggaggatataattagtgagattattaggaatagattcgggattgaaactaggaatcgtgctagagtttacaaaaagccgtatcctgattattatgataatgtgtcgtttccccgtaattatagagttcccgaatttaccaagtttagtggtgaggacgaaactgagcttaggttatgtgatttaatatcggttaagcaaaagtataatgagcctgtcattgattatattaagagatttagggatgttagaaaccgatgttatagcttgaatataactgatagagatttggctggtcttgcttttaatggtttaattgctcctcttagagaaagactagatggccaacaatttcttgatgttagtcaacttatgcaaagggctctggctcaagaaagccgggttaaggataataaaaaacttcttagatcatatgacaaaaagcctaatgttatgattgattaccctgaggctagtgatagtgaagaggagggtgatcatgatatatatgttgctgaatggtcatggactaacaaaaacaagccttttgtttgctctaacctaatgctgactcctcgcaaagatcggcaaagtgaggttaaatatagttttgatgtggctaagtgtgataagatttttgattatcttttacaagagaaacaaattagattacctaaaggccatgtcataccatctcaagaagagttgaaacgtcgagcatattgtaaatggcatgattctcattctcattctactaatgattgcaatgtgtttcgacgacaggttcaatcggccatagatgaaggacgattgaagttcaccgatggctctaagatgaagcttgatcatgatccttttccagtgaatacgattaatttcaatgataagaaggtgttgatccggccggagcaagccgaatctactaagggaaaaggagtggtcattggcgagccaagacctaagatgatagtgccaaagaagccggagattggcgtttggaaggagaataagagtgaagcttcaacttctaaagcccctaggaagaccaaagtgacttttgatatgcttttggagaagtatgagaagcaaggtgacatgtcatggggttcttattcaatgccgccaccgggttatccttatccttattatataccatggggggcaacaccgccaatgttcaaccatatgcctccaatgcaattcaaccaagggtggggaggaccaagaaggccaattcatgagcgtttgtcttcaccacacaatggccggttttatggtaggaaccgggccaatgaagaaaagagggaaggaaagcgcatcaaggtggaggcaaggacttcggaagtaattaccatcaaagtggggtttcatgatgtgccaataccttctagagatgatgttggagagtcctcaagcaaaaggtccgaagccggtaccagctcatcgcagtcggccggtctgaccaggccttctggccggtctgaccgcagccatacggccggtctgaccgggccatcaggccggtctgaccaccgacccgatagcggtccaaccgacgcctcaggccggtctaaccgtgcgccaaatgtcggtctgaccggcgcatctggccagtttgaccggtggtatacgtccggcctgaccgggctccagcgccggtttgataggaggtttgcaaagggcgatatttga

SEQ ID NO: 92743 - DNA, 909 bp, Oryza sativa
  Clone ID: PAT_MRT4530_91195C.1
atgggcgccgcggaggggtgctgcggcggcgccgcgatcgccgccgccgccggcgtgatcgaggaggccgaaactgtggtgccgccgcccgccaccgccatcgcctcgtctaaaggaatccggatcatgacgaggacacagaaaagccaccccttagacccactatctgctgctgaaatttctgtggctgtagcaactgtcagagcttctggaagaactcctgaggatgccatggaatatgctgaatgtgaagctactgtgaaaagtcacccccctttcattgaagcaatgaaaaaaagaggagttgatgacatggatcttgtcatggtagatccatggtgtgcaggatattacagtgatgctgatgctcccaatcgaagaattgccaaacctctgatcttctgtagaactgaaagtgatagccctatggagaatggttatgcgcgacctgtggaagggatccatatcgtcattgatgtgcagaataataccgtgatagagtttgaagataggaagtttgtccctcttcctccaccagatcatttgagaaactatactccaggggaaacacgaggtggtgttgatagaagtgatttgaagactcttatcatcaatcaacctgatggccccagttttcgtgttaacggttactttgtggaatggcagaagtggaacttccgtattggctttactcccaaagaaggtttagttattcattctgttgcatatgttgatggaaaccgtgggcgtcgacctatcgctcacaggctgagtttcgttgagatggttgttccttatggagatccaaatgaaccacattatcggaagaatgcatttgatgctggagaagatgggcttggaaagaacgcacactctcttaaaaaggttatttttgttgttccctgttag

SEQ ID NO: 92744 - DNA, 892 bp, Oryza sativa
  Clone ID: PAT_MRT4530_91196C.1
atggaggagtacatcaacgaactcacacgggaggcattgatgagggcaagcactaggactcgtcaaggtgtgaccatcaagcccgggccacgtcctaagctcgctcctgacttggttcaatcggccatagatgaaggacgattgaagttcaccgatggctccaagatgaagcttgatcatgatcctttttcggtgaatacaattaatttcaatgataaaaaggtgttgattcggctggagcaagccgaatctactaagggaaaaggagtggtcattggcgaaccaagacctaagatgatagtgccaaagaagccggaggttggcgtttggaaggaaaataagaatgaagcttcaacttctaaagcccctaggaagaccaaagtgacttttgacatgcttttggaaaagtatgagaaacaaggtggtgagagagctcgaaataaaggaaaaagaccaagatcacctcctagggagcgatttggttattcaccaagacggtcgcattcacctccatatcatcatccacaagacatgtcatggggttcttatccaatgccgccgctgggttatccttatccttattacatgccatggggagcaacgccgccaatgttcaatcatatgcctctaatgcaattcaacctagggtggggaggaccaaggaggccaattcatgagcatttgtcttcaccaaacaacggccggttttatggtaaaaatcgggctaatgaagaaagaagggaaggaaagcgcatcaaggtggagggaaggacttcggaagtaattaccatcaaagaggggtctcatgatgtgccaataccttctggagatggagttggagtgtccccgaacaaaaaatccgaagccgataccagctcatcgcagtcggccg

SEQ ID NO: 92745 - DNA, 549 bp, Oryza sativa
  Clone ID: PAT_MRT4530_91197C.1
atggagtatttatacggctgctccacatagttgactaaggctgtctcagcgccaaggatgttactacaaaaggattcttgataaatataagctgaattcccaatgtcaaatagatagcactttgtacaccaagatgctaatagtactaattataaggagctggggaagatgctaatctcgccattgcttcatcagaggcctcttgtctagaaacgaggccatccacttattccacatcgacttcctcgtcatcaccctcatactgctcataagcattctgtaccactggtggtggctgcaggggaatagcaggtgatctagttttgtcatcagcatcattttctagtaatgcgtctatggattcatgtctgtcctccagttcaatagcttcgttgagatcatcaatagcatgagcagccatgcccagtggagggcaaaacatgtctgacgggagaacctttgaccttttctgtgaaaatgttggctcctagttactttttttcatctgcccataattcttccttaaaatttaaagactttgtttgcctt

SEQ ID NO: 92746 - DNA, 1662 bp, Oryza sativa
  Clone ID: PAT_MRT4530_91198C.1
atgactaatgctagttatttgtatcatcttaggacatttgatcctcctatatctactgctacaactaatccccaagttcccccacatgttcctaatgcttataatgatgttgctagggggtatcgtcccgatactagacaaggccaatataatcatattgtgccacaaacacaacctattaggccaccaaatccaccgctgaatcaacatgggcctaataatatggaggatataattagtgatattattatggatagattcgggatcgaaactaggaatcgtgctagggtttacaaaaagccgtatcctgattattatgataatgtgccgtttccccgtaattatagagttcccgaatttgccaagtttagtggtgaggatgaagaaaaattccatgattatttctatactggagaaactgagcttaggttatgtgatttgacatcggttaagcaaaagtataatgaatctgtcattgattacattaagagatttagggatgttagaaaccgatgttatagcttgaatataactgatagagatttggctggtcttgcttttaatggtttaattgctcctcttagagaaagactagatagccaacaatttcttgatgttagtcaactcatgcaaagggctctggctcaagaaagccaggttaaggataataaaaaacttgttagaccatatgacaaaaggcctaatgttaatgtggttgattaccctgaggctagtgatagtgaggaggagggtgatcatgatatatatgttgccgaatggtcatggactaataaaaataagccttttgtttgctctaacctaatgccgactcctcgcaaagatcgacaaagtgaggttcaatcggccatagatgaaggacaattgaagttcaccgatggctccaagatgaagcttgatcatgatccttttccggtgaatacaattaatttcaatgataagaaggtgttgattcggccggagcaagccgaatctactaagggaaaaggggtgatcattggcgagccaaggcctaagatgatagtgccaaagaagccggaggttggcgtttggaaggagaataagagtggagcttcaacttctaatgccccgaggaagaccaaagtgacttttgatatgcttttggagaaatatgagaagcaaggtggtgagaaaattcgcaacaaaggtaaaagaccaagatcacctcctagggagcgatttggtcattcaccaagacggtcgcattcacctccatatcatcatccacaagacatgtcatggggttcttatccaatgccgccaccaagttatccttatccttattacatgccatggggggcaacgctgccaatgttcaatcatatgcctctaatgcaattcaaccaagggtggggaggaccaaggaggccaattcatgagcgtttgtcttcaccaaacaacggccggttttatggtaaaaatcgggctaatgaagaaaggagggaaggaaagcgcgtcaaggtggaggcgaggacttcggaagtaattaccatcaaagtggggtctcatgatgtgccaataccttctggagataaagttggagaatccccaatcaaaaaatccgaagccggtaccagctcatcgcagtcggccggtctgaccgcggccatacggccggtctga

SEQ ID NO: 92747 - DNA, 253 bp, Oryza sativa
  Clone ID: PAT_MRT4530_91199C.1
gaagatctacccacacacattcccttggattcgatacccttggaatactccagaagtattcctatcaaactcttctggattatggagcaacctttctttgagttgcctgctcctaggggcgaattctatgagccatctccttcatcggagccaatttataaaactggctatgaaatttgccccgaactaatcaacatggttagggaaaatcctttttttggttttgatccaaaaaaatacctaccatcatcta

SEQ ID NO: 92748 - DNA, 181 bp, Oryza sativa
  Clone ID: PAT_MRT4530_9119C.1
gggaggaacaaaaaattgttgggatttttttaccaaatgcgggagaacaaaaaagggctcgggaacaaagcagccatttttacattatgggggccctttttaatccccttttttttacacgaaagtacacatttttactggattacggttggaacttaaacaaagcatatcaagaacaaga

SEQ ID NO: 92749 - DNA, 274 bp, Oryza sativa
  Clone ID: PAT_MRT4530_911C.1
tctcagtctcatttcctacagaaagtttaactacattatgagcagcctgagattgttaagagtatccccgatactgaatttctggggtacgactctgtttctgccactgctgttgttaaaggtcttttagttaatggcaactcagtgaatgtagtttcagaaggttctgatgttgaaaatattttagattggacaccatttttagttctatctggtgttcaagttgttagataatattctttttttaatttcacttttttttctatcttctcta

SEQ ID NO: 92750 - DNA, 2073 bp, Oryza sativa
  Clone ID: PAT_MRT4530_91200C.1
atgacgaagccgccatccaagacggaggtagagccatccaatgtgatactggtcacattggaggatttcgaaggagaggaccacaaagctatggaggagtacatcaacgaactcacacgggaggcgttgatgagggcaagcactaggactcgtcaaggcgtgatcatcaagcccgggccacgtcctaagctcgcccccgatttggtaagtaatgatgaggtaacacaatctatccaacaacaagtagcatctacaatagattcatctatgatttcttttaaagataagttagatgcaacttttgagggtaagtttgatgagtttttaagggttaaattcggccctcttatggccgattacatgtcaaaggataaagcctttaccactgctaaccaacctcctatagatcaaacgggtagaaaaaccgatggagcggcacacacggccggtctgaccgggcctgacggccggtcataccgcgacttagccgtcggtccgaccggccaaacggccggtccgaccgggtattaccccggcggtcagaccggtactcaggccggtccgaccgcgcctctggatgccggtcagaccaggccctgggccggtcagaccggcacaattattccgatacagggaatagatccaatgactaatgctagttatttgtatcatcttagaacatttgatccgcctatatctactgctacaagtagtccccaagttcccccacatgttcctaatgcttataatgatgttgctagggggtatcctcccgatcctagacaaggccaacataatcatattgcgccacaaacacaacctattaggccaccaaatccaccgccaaatcaacatgggcctaataatatggaggatataattagtgagattattaggaatagattcgggattgaaactaggaatcgtgctaggatttacaaaaagccgtatcctgattattatgataatgtgccgtttccccgtaattatagagtttccgaatttaccaagtttagtggtgaggatggtaagaccacatgggagcatgtaggtcaatttttggcgcaatgtggtgaggctaatagtgatacttttaaattgcgcttgttttctttatctttgtccggtaatgcttttacatggtttacttctttaccggcaaattctattcatacttgggctcaattagaagaaaaatttcatgattatttctatactggagaaactgagcttaggttatgtgatttaacatcggttaagcaaaagtataatgagcctgtcattgattatattaagagatttagggatgttagaaaccgatgttatagcttgaatataactgatagagatttggctggtcttgcttttaatggtttaattgctcctcttagagaaagactagatggccaacaatttcttgatgttagtcaacttatgcaaatggctttggctcaagaaagccgggtcaaggataataaaaaacttgttagaacatatgacaaaaagcctaatgttaatgtgattgattaccctgaggctagcgatagtgaggaggagggtgatcatgatatatatgttgctgaatggtcatggactaacaaaaacaagccttttgtttgctccaacctaatgccgactcctcgcaaagattggcaaagtgaggttaaatatagttttgatgtggccaagtgcgataagatttttgattatcttttacaagaaaaacaaattagattacctaaagggcatgtcataccatctcaagaagagttgaaacgtcgagcatattgtaaatggcatgattctcattctcattctactaatgattgcaatgtgtttcgacgacaggttcaatcggccatagatgaaggacgattgaagttcaccgatggctccaagatgaagcttgatcatgatccttttccggtgaacacaattaatttcaatgataaggagttgattcggccggagcaagccaaatgtgctaaggaaaaaggagtggtcattggcgaagcaaggcctaatatgatagtgccaaaaaagccggaggttgacgtttggaagagagaataa

SEQ ID NO: 92751 - DNA, 213 bp, Oryza sativa
  unsure (1)..(213): unsure at all n locations
  Clone ID: PAT_MRT4530_91201C.1
gcagaggcagcagccgncagccaccacccaccgcgaccgaggaagaagaagagaggagatcaggaggaggggaagaggaagnaagggagggccncgnganggagcncgcggagaacccgancccgcgganganggaggacccggggaagcgggacgcggcgcagcgagagcacgagcaccggangaaggagcggngcgagcgcaccaaggcgg

SEQ ID NO: 92752 - DNA, 1404 bp, Oryza sativa
  Clone ID: PAT_MRT4530_91202C.1
atggcgttcgagacggggggcgtcctccggctgctggcgctgatcctgctggcgccgctcgccggcgtgctctactacctggtgtccgagtcggccggcatccaggtgctcatcttcgcgtccatggccggcgcgagggtcgccgacgttgaggcggtggcgcgcgccgtgctgcccaagttctactgctccgacatccacccggagtcgtggcgcgtgttctcggcgtgcgggcgccggtgcgtgctcaccgcgaacccgaggatgatggtggaggcgttcttgaaggagtacctcggcgccgacatcgtcgtgggcacggagctcgtggtctggcgtggccgcgccacggggctcgtccggagccccggcgtgctcgtcggcgagaacaaggcggccgcgctccgggaggcgttcggcgacgcctcgccggagatcggcatcggcgaccggaggacggactacccgttcatgaggctatgcaaggaggggtacgtggtgccggtgtcgccgacgccgaggcccgtgccgcgggaggagctcccgaagccggtggtgttccacgacggccgcctggtccagaagccgtcgccggcgctcgcgctgctcaccgtgctctggatccccatcggcttcgtgctcgcctgcctccgcatcgccgccggcgcgctcctcccgatgcgcgtggtgtaccacgccttccgcgccctcggcgtgcgcgtcaccgtcaagggcaccccgccgccaccggccagccgcgagaccggccagtccggcgtgctcttcatctgctcccaccgcaccctcctcgaccccatcttcctctccaccgccctcggccgccccatcaccgccgtcacctactcggtgtcgcggctgtcggagatattgtcgccgatcaggacggtgcggctgacgcgggacagggcggcggacgcggcgatgatccggcggctgctggcggagggcgacctggtgatctgcccggaggggacgacgtgccgggagccgttcctcctccggttctcggcgctgttcgcggagctcaccgacgagatcgtgccggtggcgatggagaaccagatgagcatgttccacggcacgacggcgagggggtggaaggcgctggaccccttctacttcttcatgaaccctagccccggatacgtggtcaccttcctcagcaagctccccggcgagctcacctgcaacggcggtggcggcggcggcggcggccggagcagccacgaggtggccaactacatccagaggctcatcgcctccacgctctcctacgagtgcaccagcttcaccaggaaggacaagtacagggcgctcgccggcaacgacggcaccgtcgtgtccaagcccaacatcgacgagaagaaggccatgggatgttaa

SEQ ID NO: 92753 - DNA, 317 bp, Oryza sativa
  unsure (1)..(317): unsure at all n locations
  Clone ID: PAT_MRT4530_91203C.1
cccacgcgtccgcccacgcgtccgcccacgcgtgcggttacaaacttcttaaaaaaaaaaatgcatccacaaatctacagcaaaactttgtattttgcggaatggaagtatagaccaaagacccctggaactaaaaggggtgcttcatcggaggagatgttaccaaatgagcgcaaatcttggttcatttagacacgaagaggttaaccgtgggttcaaccgatgaagcacccnttttagttncnggggtctttggtttatacttncattccgcanaatacaaaggtttgctggagatatgtgggtgcatttttttt

SEQ ID NO: 92754 - DNA, 429 bp, Oryza sativa
  Clone ID: PAT_MRT4530_91204C.1
gtaaaatggtccagaacaatgtgcatatagcttaagtcgtagttttgtttatgtttcttgcaatcagcaggatgaggagtacaccataaatgtaaaatttaatgtatgtttgagtgcaaaattattagttatagatacttagttatataattatttaaattgaaacttgataaatatatcatggtcacaaactacaccagtaataaagtacgtatgtgtgttttattttgtggagtactctgtactctgtagagatttgttctagtcatgttacaatcttaacatttcttttaagattagtcttcgaagttcatatctgtcaaagtcttgtagttaatgttgtctttacgatagtaagattaattggccatattccaaaaattcagggagagctttcataatgatatactactactattttggcgatac

SEQ ID NO: 92755 - DNA, 322 bp, Oryza sativa
  unsure (1)..(322): unsure at all n locations
  Clone ID: PAT_MRT4530_91205C.1
gaggcgcccacctgcgccgccgactgcgtccacggcganatcagctgccgcgccgggtgcggcgcccccgccccgcccgccgcgtgacccacccaacgcaaaaaccaccttctcccattcacgcccctntgcgcatcgncgtttgcgtgatgaaatggagtagtatatctgatgtgatccactatatatatggagtaactagttagttcgattaatttcgatgctggatgtgtttagtatatttacctactgtttgacatataattaacgatttttagagtgattaattctaaaaaaanaaaaaaaaaaaaaaaaaaaaaaa

SEQ ID NO: 92756 - DNA, 217 bp, Oryza sativa
  Clone ID: PAT_MRT4530_91206C.1
tgcgaacaggaggaccacttcccccctccctcctctccagtctccctccgccgcgccgcgattcccctccctcccttctcccccccgcgccgacgtcaccgccgccgcgggaggagggggcagatacaagcggggaggtagcatacgctcagcggaggcaacctgctggtctgcggacatttagacagaggccgagtagaggattgaatgatgctat

SEQ ID NO: 92757 - DNA, 378 bp, Oryza sativa
  Clone ID: PAT_MRT4530_91207C.1
cgtgggtcacagaatgagcagtcaaagtaaatctataccagacgcactcctttcaccatttgggaacatcaacgtctcacagcgtcgtgtatattactcaagccgtgcccgggttcaagttgtcaacaccatggaaagacagtgttcaacggcgagcttcgccgcggacagctgcttattatacccacacactatgcagttgtaaagaaggcacaaagagaaggatgtgctttaccattgccaattccaagcccatcccttacttcttattggttaaaacccaccattgccaaggaaaagaagtccccattcttgccacggtgcttcttccccaaatgaatgtttcttaacctaaataccaatattcgccattcttcc

SEQ ID NO: 92758 - DNA, 1218 bp, Oryza sativa
  Clone ID: PAT_MRT4530_91208C.1
gcacgaggcagcaattagagggagaggggaggaatctttgatatatatatatatatatatatatcagggtgtgctcctctgaaccttcaagtggcttctgccgaggaagaacaagctctctgatctgctttctctctctccctcgcacacattaggctatcctaggttgcattgcaaagcttggaggctgaagcaaatggcgtcccgccggcgagatctcggccgcccgctgctggtcgcgctctgcgtcgtggcgctcttcgccgtcggatcggagtcccacggcctcgaggacttccgcgaggggaacaccgaggcgacgccggcgatggcttccttcttcggcagcaagcccgaggccgccgagctcccggaggcgctcgacgcctccaatgccgccgccgccaccgccaagccggaggccgcgtcggcgatccccagagccaccgccaccatcaccgcgtcggcgtcgtcggcgccgcctcgcagatccgtgtccgtggccgccggcgtggcgtgcgccgtcgcggcggtggcggtggtcggcgtcgcggtcgccgtggcgtacgtggtgcgcgccaggcgcgccgcgcggcgcgagtcggaggtccggctcggctcgccgtgagccgacgcctcggctcgtcggcgttgggtgggcccgcctatcagagggccgttgatgattaattaccagcaccattagggtggtaatttccgttttaattacctcggttgctcctagtttgatgattctttcctctctgtcagtgtgtgtgtgagtgagtgtgcgtgccatggaccattggagaacacaattatcagcacccctctgtaacataaataatgctatggcatgtagtgtgtgacactgtgagacgtgtaatctttaggctttgctactgcatcagaaaattcaggattttgttgatgtctcaaaaaaaaaaaaaaaagaaaccgacgagagaaatgaagctgcagagctggactacagtggcagaatcaagcggcttctgcatgcggtccctgctgcagcgagtgcaggctgcaggaaaagagcgagaagacattcagggtctgtttagcacagctccagctccagtttcactctttctagagctggagctcagccaaacagtttcagctttaccaaaactgggagtggagctgggtggagctctctcacaaaatgaactagagttgtggagctgggtttag

SEQ ID NO: 92759 - DNA, 474 bp, Oryza sativa
  Clone ID: PAT_MRT4530_91209C.1
atggagctatacattgaaatagcgcaaccaaaattaccagtagaaagaccaatggccaagtacctctgccagcgggtttgtccagttgataactcgcttgttcggattggagacagggtcctctcaacacttgcattgcttggcaattactataaagcaagtgattacattactaacctcaaaagatacggtttcatggaggcctttgttggagatatgtctagtgccgaggctgaagaacttgagaatttttaccgtccattgagtatctgcaggctcaaagatgatcaaattgaaagcttggtacgtaacaaagactggaaggttattgaacaaagaattgagaaaaaacttagtagttggaaaggtaatcttcagggcaacatattagctccggtgttgggcccagctacaaaggtgcgtgttctcaatgtttggttgaactacactctttttttaagtgcaactttataa

SEQ ID NO: 92760 - DNA, 254 bp, Oryza sativa
  Clone ID: PAT_MRT4530_9120C.1
atattgatgaatttggaagaggataccaccaggtcacgggaacgggaacacaaaaatacaaagaccagggtgggggatgtccttagcattcaaaactgatagaataagaaactgtaacaggccatagcaccaacgcaagtgcttgaaatatatatatttatttatttagttattccttatccgcatcgccaaaggaagaggattcctccacattataaacgtcttggtagctttggaatgggaggggagggaat

SEQ ID NO: 92761 - DNA, 203 bp, Oryza sativa
  Clone ID: PAT_MRT4530_91210C.1
gaagctttgcactgtccaagcatacaggggcagacatgatgcacatgatatacacttacaggtctaacagtatgtcctcagggaagttgctgtaatacgagctgatgattgtgcacacttcaagtaaggcatctacaagcatatcgtaggtgacctgacggatggacaggctgtgaaagtgtctgaaaggggcaccaagtatg

SEQ ID NO: 92762 - DNA, 189 bp, Oryza sativa
  Clone ID: PAT_MRT4530_91211C.1
atgggcgactgtgggcaggaggcgtggcagctccacctctaccgccgactggcggcgggtgcgatatcggcggatccggcttggcatggctgcgggggtggtggtgactggcgactgctgacggaaggtgaggaggctgcgcatccggacaccgctcaacgccccacgcgcgcggatcttagccactaa

SEQ ID NO: 92763 - DNA, 144 bp, Oryza sativa
  Clone ID: PAT_MRT4530_91212C.1
aaggataaaaaaaggctgtatccttaattgagtactgactgggcacagcataaccaccaagcgatagcctggaggtgatttatttaactatacgccattcctaagccgaactaacatgactctgacggattattaacggactga

SEQ ID NO: 92764 - DNA, 661 bp, Oryza sativa
  Clone ID: PAT_MRT4530_91213C.1
ccgccagacatttcctatgatagcattgtggcaaactctatactgcaaaacataaggcttggtgtccaaaagaccaaaactattttcaaccatgggagttgtttctgttatgcaaaaactctctcatccatcaccttctgttatgcaaaaactgcataactctctcatccatcaccttctgttatgcaaaaactctctcatccatcacctgaactctattttttcaccaggcagcaccagtatgtgtcatgaagagaactacaaaacgttgaacttaagccgatcagttattctcttcatcgatcttctctgaacctcctgatggttggaacatcctagaaaatgctttccgctcctgatcccgtctgtcagcaatcttcttttttgcagcagccagctcccgcttaattcctccatcgtttggctccaactgcagagcatgcttgaagctctcaactgcagcatcaatatcattgagtgcgatgcgtgcctgtccttgacggaaaaaagcttttgggtttccctccccttcacgcaatgcaaagtctgcatctagtaaagcacctttcaaatctcccaacttcagcttgcaagcagaactatttgtgagtatcattgactttgtcttccgtagtgctgagctcttctcttcatctatctc

SEQ ID NO: 92765 - DNA, 244 bp, Oryza sativa
  unsure (1)..(244): unsure at all n locations
  Clone ID: PAT_MRT4530_91214C.1
ggaaatccttnnccgcncgtaagttaaggaacaaanagtggntcgagaaacatcggtcccnctgtgncaatggctgtcgccnttgtaanaggtttanccgtggntaaactgtcatncncncncagtgtttgtgtgtgcgatgctgaccnttnttggtcagtcagaacccccnaactggaggggngtgaaaggcgaagtcgcncttacatcccgnaaaaaaaaaaaaaaaaaaaaaaaaaaaaaa

SEQ ID NO: 92766 - DNA, 649 bp, Oryza sativa
  Clone ID: PAT_MRT4530_91215C.1
attttattttgggggccccataaaaaaactattacctcccacgcccggggaagtaaactttggtcccttaaaaacgggcgcccctttttttttttttttttccctttttttttttttaaaaacttttttttttatattggcccttttttttttttgatcgcgtggtttttttttttttttttttttttttttttttttttttaacatgacaaagttaccaacctttttattcatgtaaaacatatttacacaagtacagacacacttatcaacctggtactgcagtacacagtgtctcccaactccgaactctccatccctcgcgtatcaccatgtccgttgcatgcgtgatgcgcgagtctagccagaactagacaacgggatacgactcgactcaagcagcaagccctttttatttatcagctgtgctgtttagctaagcagctatgagtactaagcatggcgcacgtacacacgcttaaccacacgtataaacacgtctcgttgggcatttttgggcgcatggatggatggatcaggtggtggccgcgggagcggtggtggtggtggagccgcaggaggcgcaggtgcaggagtcgccgcaggagcagccggccctccggttctccctccccgtcggctgcgactc

SEQ ID NO: 92767 - DNA, 263 bp, Oryza sativa
  unsure (1)..(263): unsure at all n locations
  Clone ID: PAT_MRT4530_91216C.1
cccacgcgtccggnagggccaagagcagatcttcgtgtagaccctaacggggaagaccatcacgctcgaggtcgagagcagcgacaccatctgactaatgtcaaggccaagatccaggacaaggaaggcatccctccggaccagcagcgcctcatcttcgncnncggncnaagactagncgtgcggaggggaatgngtccgcnaccnnnctggcncgactacctaacatccagnaaggagtccacgctccacctcgtcctccg

SEQ ID NO: 92768 - DNA, 1152 bp, Oryza sativa
  Clone ID: PAT_MRT4530_91217C.1
atgggccccatctcccccgtggcgtcgcccaaacctgagataaggcggccacccactccgccaccgccgccgccgccgccgccgccgtcgccggccatggtcgtcggcctcgccttcgcgccgggcgtgccccgcgtcgtccctcgtaggctcgccgccggcggccacgccatggcctgctcctcgtcgtcggcgcggttcatggccaggcggccgcggctcgtggtggtggcgcggtacaacgcctcctcgtcgtcgtcgtacgagagcgacgaggaggaggaggaagggttcggcggcggcggcgggtgggggaggagggaccgtggccccgaccccgactacgaccccgccctcgacatcgagcgaatcgagtacgggcattcgccttcctccctcgcttctgggttctgggatttatgcttttctttttcggcatttgatgttggtgtggtatctgtaagcgaagcagtgcagattgcagatgaaaatgatcttatactggcaatattatcactcgatggagatcctccggtgctccgactattccaagagaaagattacaagtacaacattgacattcatgattacagtgtgagacttaaagctgcaaggaagtttctgaaagctggcgacaaggatgagctgaacaaaaaggatactgcgatagaagacagtgaccaatcagatgaccaaccagaggagagtgaacctgtgccagcacaaccggaggaaagcaaggagactgagacagaagtctcagcaaataaggtggaaaaccataggcaggatgctaatgtgcctccatgtgttgaaggtctattcctcgatgggctcggcatcctcctaggggtaaaagatgatattgatgaagcctttgttggtgatggtgaagataatgttctggccaatcgtttcggaggtgcagatttttctgaatcatttgaagtcagatccatgcttcttgacatggcattagcaccatctggtcccagtattcttcttgcagaaaccacatgtgatggagctattgaggaaattgtggcattgatatcctctgagagagtcttagggccattagaaacagttctgcttggtgattgctcttgtgacgtaattgacattgagggtgcagacgtgcctatgtcatga

SEQ ID NO: 92769 - DNA, 394 bp, Oryza sativa
  Clone ID: PAT_MRT4530_91218C.1
acctaaaaatgacttaagatatattgacctaatcacctaagtctgtctaccaacaacgaaccgaaccaagctagctaaaactcatataaaaactagctgattcacgcgtaatagaccacgcgtactgagactcctggttagacccactaataacggaccgatacctgcacgcataccaaatctccatttagagagccatgttagagctagcctttaccatggatatagctggcaactgcatgaaagtgcaattgggtcacagccctacacacaatactatcgatctgcatagatcaagcatcttagggggcgtaatgagagtgtataagtgaaatgaattgcaatcgggctcactgtcagatttgcaaacgaaaaacctgcatggccagctgga

SEQ ID NO: 92770 - DNA, 831 bp, Oryza sativa
  Clone ID: PAT_MRT4530_91219C.1
ctattttcctgtttagtggctaggatgtcaggtcgctcgtctgatggtgtttgcaagatcaataggataaaaatgtgcatgccaacatgccatggagcccaggggtgttaaatttgaaaaaaaaatcatgtgggctctacggctgcgatggctatggtacgaacgaaaggaaccaggcaacaaataagagacacagtgtgacgaagtaaacaagctcctcttcacaacatcaacaaagattattgttggagatagcaacacaacgcgcttttgagattccacatatatagaagggcgtaggccaaaggatctcatgccgctggcctatgcaatctccaagaagaaagggaaatccctacgtcaggggaaggaaaatgacacttgggtcgatgacttggacctagaaccaaacccaccaaactcgatggttcttattgaacaacttgccaccttatggaccgttgttcgaagcatttcactagatgaggaggaagctgaccaaattgtgtggaagttcacaaaccatgaccaatattcagcatcgtcggcctaccaatcatagtgccttggagcgtcgagcgcaatgttcgactcgctgatttggagagcttgggaaccgtagaaatgcaaatcacacacatggctaatcatccaaaatagggtgtggacctccgacaggctcacgactagggatggaaaaataatgggcactgtcctctatgccatagagaaggagaaatggctctgcatatccttgcccaatttagatacacaaaagtagttgcttgggtggcctaccagcaacttgaccctagtcaatgggaggcaatc

SEQ ID NO: 92771 - DNA, 1164 bp, Oryza sativa
  Clone ID: PAT_MRT4530_9121C.1
gaggtggtgtgcgaggaggtggagggggacatcaccaaagcggacaccaaatgctggacaagctctgacctgtcagatactgctacaccagcgtgcctgtcattgacagggagcttcctcaacagttttgttaatgttgctagtatcactgtcaagctccatcttcgtcctgggcatatctacaacaatggggcggggaagcaggctctgaagaatatcgattcgcttggtttgttctccactatagaagtacagcctcgccctgatgagacaaatcaagggggagtaatagttgcaattaagctcaaggaacatgacccaaaatcagctcaggcgtccattcaaccaggaggaactgtgtcatttgagcaccgcaacatctgtggtctaaaaaggtctctcattggttctgttacatccagcaacttgctcaaccctgaggatgatctttcgttcaagctggagtatgcccatccttatctggatggtatcgacaaccttagtaggaaccgcaccttcaaaattagctgtttcaactccaggaaattgagtcctatattcgttgctgaccgaatggcgtttctacaagctaatataactcgagacaatacagagttcgtcaatggtgcaacaatcggtgacagatgtatattccagatggaccaaggtctcggcattggaagcaagaacccgttcttcaaccgtcatcagcttacagtgacgaaattcataaatttgaacaagcaagagaaaggctctcgcaagccaccaccagctgttttggctcttcatggccgttatgctgggtgtgtaggagatttgccaagctatgatgcatttgcacttggaggacctcattcagtaaggggctacggtatgggtgaattgggtgcttccagaaatcttcttgaggttgccactgagctgagcgtgcctatcaccgtgaagaacagacacacgcaggtgtatgcatttgctgagcatggcactgatcttgggagctccaaggatgtggaagggaaccctactgagtttttcagacgtgttggccatggctcatcctatggcgtcggtgtcaagcttggtgcggtaagggcagagtatgctgttgatcacaatgctggcacaggggccttcttcttgagatttggtgagagattctag

SEQ ID NO: 92772 - DNA, 180 bp, Oryza sativa
  Clone ID: PAT_MRT4530_91220C.1
atgggcgagttccagggggaggggttgccgggtgtgcagcgcggtgcaagaggaaggggttcaccgggccgcgccggcgcacgtgggaaggagctcactggcctcatgaaagacatgtgggccctacatgcaaaaaccacttttcaaaccatagaaggagtttatttgcaccggttttag

SEQ ID NO: 92773 - DNA, 125 bp, Oryza sativa
  Clone ID: PAT_MRT4530_91221C.1
ggcatcatcggacgagtcacgagacagatcatttttgttacattaaagtagagaatgagattcttagacgagcaggtccttcatttatcatcaagtaaatccattcggcgcgcacaggggtgaaa

SEQ ID NO: 92774 - DNA, 322 bp, Oryza sativa
  Clone ID: PAT_MRT4530_91222C.1
tttttgtatgtttacctggctaagggaggactctattaaagcacagagtatgggctagaacaaacaaacaacctacacttgtacgaggtctacaatcgagaataattttcatcaaacgtgagaaagaaagaaatttgatgcacagaaatctaacgagaaaagtgctctattgatcataacacctgtgtagcttctttatttatacaatagaacaacaagaggctattaattacagctttatgcttactaataaaacgcccttgatactggaggtcagctaataactgggacatcggaatcaaccagggccatgagccctgga

SEQ ID NO: 92775 - DNA, 1275 bp, Oryza sativa
  Clone ID: PAT_MRT4530_91223C.1
atggcgagtagtaggattctggtgataggcggcacggggagactcgggcgtcacctcgtgacggcaagcctcgacgccggccacccgacggcggtgctcgtccgccgcccggccaccgccggcgcccgagccgacagccccgtcaaggccaagctcacagaggaactctgtgacaatggagccagacttgtctatggggacgtcaacgaccacgatattctagtggcggcgatcaagaacgccgatgtggtgatctgcgctgttggtcacactacgccgcacaaactggtggagaaccagattaagatcatggaagcaatccgggatgctggcaatgtcaagatgctggagccagcaagaagcatcctgggagccaagcttcgagtccgcgaagctctgagagcttcagggattcctcacaccatcgtatgcggctatctggttcatggcttcctgctgcccaaggccggaaaccctgaagctgatggccccccgagagaggccgcggaggcgacgccgacggcgagtggcgagcggcgggccggggtggaggcggctagtagcggcgcccggggtcggaggcagctgggggcggcgggcgccgaggccgcggctgggtggcgtgcaggcaaggccgaaggtgggtgggggcggaggcagctgcgggcggcgagcgaggcgcggaggctggcggcggggggcgggcggcaggcgggggcggaggcggctaggggcggcgcgcggggtcggaggcggctgggggcggtgggcgcggaggcgaggccggcggcgggagtcgaggccgtggctagggggcgcggaggcgagaccggaggcgggcgggggcggaggcggctgcgggcggcgggcgaggagcggaggccggcggtgggcgggggcggaggcgccgacgacctccgccatcccggcggcctcgccgtcgcttctcgtccgcctcgactggaacatgacaggagcaactgcctcggctccggccacggttgggtcaccgttggggaggtggggatgctcgtctccgtgttggagaagaagatcggcagggacctcgagaaatgctacgtgcccgaggaagagcttgcaataaaaatcgaagcatccccgttcccgctcaactttcagttggccatagtgcactcggcgttgctgcccggggtggcgtcgtgcgggcagaccgccgtccgcgtcgaggcgacggagctgtacccggacatggagtacgtcaccgtcgaggagtacttcgacagcctgatatga

SEQ ID NO: 92776 - DNA, 305 bp, Oryza sativa
  unsure (1)..(305): unsure at all n locations
  Clone ID: PAT_MRT4530_91224C.1
acgctcgacggagcgagttgattcaaacatcagaacgcgccgacacgcatatggcatcacatgtgacaaggcgcctacgattctagggttattctcgcgcctnctcgggtattctccgcgtttaatcatgcggcctgcttcgtcagttgtcgtcctgatccacgccgacgagctcttctgcccttgacgcatagtgtgacgaggagtgctgctccccttgtcgcctagtatgatgccggcggtagtcgctgtggtactgtgctcagatgcctgcctactcccctgcagcatacagctacaatggg

SEQ ID NO: 92777 - DNA, 2499 bp, Oryza sativa
  Clone ID: PAT_MRT4530_91225C.1
aataaaaactaagacgcatgggtcgcaccttagtttttgcaacattaattaatgaatgttttcggatcaaaccaacagaggttacatggattcgaattcaatggcaaagccagcatctagcatcgtttgccacaagactaatgttgtaattgtttacagctaaagcttggactggtacagctattacagctaaaagcctaaaacttctgaggtgttatgtactgcagtagtaggaaatcctagtacatgcttgttacaatgaaattttatacttcaaaacgtgagccttcactagagtgaaggggcactatggatagctcatagcttgtacaactggcggaccaactccagggacttatggtcctctgcacaaagggcaataatttagtcaaattccaagggaaccatatgaagctgcagttccttatgctgtgacctgtgaacctgtgagaagtccatagccaccaagtactatcagcttctgagttggctccattgcgacgttctacattactactgtttcttggacaatgcgagaacttttgccaagtttgatttggcagcatcaagcagcggatcagattgcagagacttctcaaaacagctaatagcttcctcataacggccctctgcaatagatacaagccccaggttgttgttggctggggcatgtccaggacatagttccaacgaccgcagtagcatccttcttgcaagttcatacctcccatgctgtcggtaaagaattccaagattggagaggattgcatacgactgctggcttgaagacaggatgagtgctcgtttatatacagtctcacaggatgaatcgtctgatagttgcaatgcaatacacttaggtgatggtgacattaactcataagtcccacaaaatgagcaaggctcagttccaagatttgaccacacatagctgcaatctggcgaacgagctacagcagctttaaggaaatttaccgatcggctaaactgagtggtgcaaatattgtacaaaccaagttgatgccattgaacagcatcatctgggtcctcttggatagcctgttttagtgtataaagagctcgctcttctacatcactcagattaatttgttcagtatcataagcagcagcgatttcatgctgtgccctatgagccattgccaaccctgcccatgcaattggggcatcaactgctgaagggtctccttcttttagaactgttgccatttcatttgaagcccaaagaagttgatcatcagaacactgtgatctgacagcatctctgattcggtgaactgcaatagcataccgagcgggcatatgactgggttcatgctttgctgcctgttccaagcatctctttgaatttctgtgttcaccagccatgtaatatgcatttgcaagattaacccatactgatgcagctttaggatcagccttcactgctgcaagtaagcactcttttgcaacagctaagccttctttctgatgcagacaagagcctgcactaacattaccacctgaccctgcagcaaaagatccatatttacagagaaggagagctgcatagttcaccagagcagctgggtggttttgatcttttataacaagttcttgaaagcattttgtggccagttctagattcccacgttcaaacctttgaatgtaggcaacaccaagattcgcaagagagtccaagtaatctggagcaacaaccgtcagagaagataaaactgagatagcactctgaagctgaccactacgaagaagaaccaaaccaaggatattccaaacagctgcctgtctggggtcagattcaactgaactcttcattttaacaaggatttcatctagttcaccagattcaagctcttcatcaaaagtgtcacccatacttgtttgcaaaatgcactgagcatggtgtatcctcactgatgagagcaaatcaggccttcgaacttcttcttcatcttgtaacaatatctcagatgacttctcatatgccgctattgccttctgtggctgaccaagcctttggtacatcaaacccaacataaaatgtgcatgggcatttttaggcatcttccgtgccacatgtaccaaagcagctttcaggttgctaactttctcttcgcgtgcaacagaagccccttgacaatgttgatcagcatcttcgcattcaacagtatcaggttccttcgttgtgatcacgctttttgccaaactaccctcatcattgctactcctagtggaggaatcgatggcgaccaccgtcgccgcggtgacggcggcggtggcggggtttacgttggggttgggagttggtggttggtcctcgccgtcgctctccggcgggtcgacgttgaggtcggctagcatgaccggcctcggctgctactgcggcggcggcggcggcggggagacgggggacggcgaggcggagacgccggaatctctcgctctccagctcaccctcagtcctctctctccgtcctttcg

SEQ ID NO: 92778 - DNA, 438 bp, Oryza sativa
  unsure (1)..(438): unsure at all n locations
  Clone ID: PAT_MRT4530_91226C.1
cacgcgtgcgcccacgcgtccgctgcaatctgatccgctgcttgatgctgccaaatcaaacttggcaaaagttctcgcattgtccaagaaacagtagatgaacaaaagacaaaagatgccctttgactagagctttaaacatgaacagcattcataatgtagaacgtcgcaatggagctaactcagaagctgatagtacttggtggctatggacttctcacaggttcacaggtcacagcataaggaactgcagcttcatatggttcccttggaatttgactaaattattgccctttgtgcagaggaccataagggccctggagttggtccgccagttgtacaagctatgagctatccatagtgccccttcactctagtgaaggctcacgttntgagtataaaatttcattggaacaagcatgtanctagatttcctac

SEQ ID NO: 92779 - DNA, 528 bp, Oryza sativa
  Clone ID: PAT_MRT4530_91227C.1
tcatgtcctcttactcctgatgaggcacaccacacgcaatacggcgccgctgacaccgtccttctccatcacgccggcaggctcgtacgcaaacgtgggtagggcatcgatggcgtgataattagtcctgatgaggcacaccacacgcaatgcggcgccgctgacaccgtccttctccatcacgctggcaggctcgtacgcaaacgtgggtagggcatcaatggcgtcgcggacactcacatcgtgcccactatgccacgtcacgctctccgcgcgcaccctcgccgccctcgccgccgcctgcgcacagcgatgcagccgcaaccggcgaggacggcgacgccaatgcaaggcggtaggtgctgcatcgacgagaagtggtgctattccatcggctccttgccgtggccgccagagccagtgcccgaggcagcggctgttgctcggcttgctcctctcgccttgcttgcgcccgggctcggagggtcccgtagcaaatattgccaaagatgaaaaccacatttccat

SEQ ID NO: 92780 - DNA, 441 bp, Oryza sativa
  Clone ID: PAT_MRT4530_91228C.1
ttgttgtctttggatggctgcttctgatgaatagattgaatacgaagtatatgctggatcataagcattatactactccaaactgtgacctaccgtgtgttctttgttcttctcaatcagtggaggatctcttgcatatgttctttctttgctccttttcggcgagctactagaactctttgggcataatttgggacacttctctgtcctttgatcatatgctattgcagactaagtgcacttttcagaatcgttgcttcatggaaatctttctgttgggagcttggaatatttggaagcaaaggaatgactatattttttagaataagtctcattccctagtttcctggaggatctcttttagagtgatatgctcccgttattgtttaggcttaatgaaagtgataaagatgagtaattcttaactggattaggatgttg

SEQ ID NO: 92781 - DNA, 2473 bp, Oryza sativa
  Clone ID: PAT_MRT4530_91229C.1
ttaggagtagaaagagagtaaataaatatgaagaatgagccacaattgatggcctccggccgggaggagagcccacgcgagagaagagaagcacacgagatgaagaggaagctgaaggagcgaatcctggagctggagaaggaggaggtccccctccccgacgacgcctccgccttcgtccaccacctgtcgcgcctccccaaaaggtatctcttcgacctcggcgttgacagggtggacgacgtcctcctccactggaggatcctcacccactgcgcccacccacagaatcgccccgtcttccacgcccgcttccaaaagtccattcctctcccggattccgatttcgatccatgccagaggctcatggaagacctcagcttggagagaagaagaagaaacgacacaggagacaacaccggctccatagtacattagaggataataaagcatacaaatttctctctaaaacatcacaggatcgtgcaatgtttaaggatatatttgtttcctacaggtaccccaaaactaagcttattcatgagattatcttctcttccctggacaagcccaagcttcttagcaggctcactctactcttgtctgaggttggactgaatattcgtgaagcccatgtttactccacaactgatggcttctgtttggacgtttttgttgttgatggctgggacacagaggtcactctataaccatgcctgtttctacatccatctataaactctctgtgattaccagctcacatttcacgcacacagataatatcctacaacagcaggttggagattctgaaattgactggaacttgctaacaacaggggaaaagattgctactggatcttctgctgacttgtatcgaggaacttacaatggtcttgatgttgctgtaaagattctcagagattctcatttcaacaatccgtcagaagttgagttcttacaggaaatacttattctaaggcaagttaatcatgaaaatgttcttcaattttatggggcatgcacaaggcctcaaaagtattgcattgtaacagaatacatgcctggagggaatttatatgactttcttcacaagcaaaataatgttttggacctccttacgattttaaggattgctatcagtatttcaaaggggatgaattatctgcatcagaataccaaccccccggcggacagtctgaaattgactgacttgctaacaacaggggaaaagattgctactggatcttctgctgacttgtatcgaggtccgtacgagggtcttgatgttgctgtaaaatctcagagattctcatttcacaatccgtcagaagttgagttcttacaggaaatacttattctaaggagtgttaatcatgaaaatgttcttcaattttatggggcatgcacaaggcctcaaaagtattgcattgtaacagaatactggcctggcgcgttcttgctcgactttcttcacaagcaaaataatgttttggacctccttacgattttaaggattgctttcagtatttcaaaggggatgaattatctgcatcagaataacatcattcatagagatctgaagactgcaaacctgctcatgggctatcatcaagttgtgaagatcgcagactttggtgtggctcgacaaggaaatcaagagggacaaatgactgctgaaactggaacctatagatggatggcacccgagatcattaaccataagccttatgataacaaagcagatgtgttcagctttgctattgttctgtgggagctggtaactttgaaggtcccatacgataacatgacgcccttgcaggctgcactaggagtaaggcagggatttcgcttggagattccctcaagtgtgaacccgagattgtcaaaactgattcagcggtgttgggacgaagatcctgatgtccggcctgtttttgcagagattgtcatcgaacttgaagacatcttacagcatgcccaggcaaacagcaggggagccagtcggcgttctagagctaagatacagaagaaatcacctcgatagagtatcataccaaaggttatcttgctcttttgttttctttctttttggtaaaacaggctaacttgtagctgctttcttagcaactccacagaatgtgtaatttctttaggtctccttcaaatgaaggtatatatgcgtatatatatgtacttgccgatttgacggcagtaacagaatgactgcgaattcactgttggtgtcatctgtggactgattagaagatgaccattgtttgcttcccatcctcgatggcaagccgaccttagaacacttgtacagctgtagttgttgcacctaagtactagtacttcgtattataaaaaaaaaaaaagtggccttcgctgctcctgtacatgtattctcctgcattctttagttattcacttcagaaaaaaaaaaaaaaaaaaactcgagactagttcctcgtgc

SEQ ID NO: 92782 - DNA, 2569 bp, Oryza sativa
  Clone ID: PAT_MRT4530_9122C.1
ccgcaagaaccaagcaaaactgattcacacgaaaattttatacaaaattcatgctttccaaacaggtctttttggggggggaatgccatacttgggttcttcctcgagatcacaaacttgcctaatttggcaatctccatatttccccagcgctatatgggagcaaagcagccaggtccgattggaaactatgcggccacaggataatccagccagcataacggccatgaagagccaaaacagctggtggtggcttgcgagagcctttctcttgcttgttcaaatttatgaatttcgtcactgtaagctgatgacggttgaagaacgggttcttgcttccaatgccgagaccttggtccatctggaatatacatctgtcaccgattgttgcaccattgacgaactctgtattgtctcgagttatattagcttgtagaaacgccattcggtctacgccagtcccacttaaggttgtgggaggtccaatcatgctcaaggcgccactaggcaattgtcgagaacgatgtgtacatatattgttattctcatcgcgtgttgtaatctcttccactatgaggccatacgtgaatttgctctgctttgtgaagctctctgttatattggctttaaatccaattctatcaacccagataggtggagcttcatacatattgggaccagcaacgaatataggactcaatttcctggagttgaaacagctaattttgaaggtgcggttcctactaaggttgtcgataccatccagataaggatgggcatactccagcttgaacgaaagatcatcctcagggttgagcaagttgctggatgtaacagaaccaatgagagacctttttagaccacagatgttgcggtgctcaaatgacacagttcctcctggttgaatggacgccagagttggtcttccttgagagccaggcacaatgctccaatctgtgatcacctgagctgattttgggtcatgttccttgagcttaattgcaactattactcccccttgatttgtctcatcagggcgaggctgtacttctatagtggagaacaaaccaagcgaatcgatattcttcagagcctgcttccccgccccattgttgtagatatgcccaggacgaagctgttgaggaagctccctgtcaatgagagggatgctggtgttgccgtcgacgacattgccgagcttgtccaggaactggtactccaccttggtgatgtccccctccaccacctcgcacaccacctcgccggcgtcgaggttgccgtggtagctgaccacctgcgcgcaatggaacccctcgtcgtggtaccacctctcgatgcgccccgccatcctcttgagcagcccggagctcaccttcctctgcctcttcaccatcccttgcagctccctctgcaacttctccggcagtacgcacggcttggcgcggcggacgagctgctggtactcgcgctcctgcctccggaggtgttccatcctctccctcgccgtcatgtcgtcgtcgagctcgagctcatcgccgtccggccgcgccatggggccgcccacgttgatgcacttgaagtgttcgaccgcgggccactcggtctcggcgtaggagacggtgaggccgagcgtgccgtccggcttgggcttggtttggagggtgacgtggtcgaacatgccggaggtggcgagcgcgtcgagctcgtcgcgcagctgcgccctggtgtagacgccgccggggcgcagcgcgtcgaagaggggggcctccgcggcggcggcggcggcggcgcgggtgcggcagttgaggaaggtgagatccgagaccttgtacctcttcttgccgtccagcctggagagcggcaccggcagcgcgctagccgcgaggccgtgcgcgtcccagtccggcgacggcttccctccgtccgcgcgcgccgcgccggcggagaagaagccggacaggaagccaccgactccggcgggccatccctggccctgggcagtgcttcttccatcatcggaggcggagtcgagggtgaagcagcttggcattgcgattgcggttgttaaggttggcgccaatggcgcgagagcaccacgacgacgacgacgacggatgcttctgaataatcgatcgcgcaaccagtttatgtttggaatgccagatttttctttttccgcaagaaccaagcaaaaccggatcctgtatttgtatactgcgtatcctgcaatgcctgctaccactaggccaaagaagatcacccacaagaagttccatcctacctctgttgctgcatttttgcttatgcatgtatcatgctccttcatataaagcaagccgccactgcaaccgcattcatagcttccccatgtgttcttgcatttgcattccttgcactggcatgcagtcctttccttgcattcatcaatatccaacttaatcgccttgcagcacatccccctttcgccagctggcgtaatagcgaagaggcccgcaccgatcgcccttcccaacagttgcgcagcctgaatggcgaatggcgcctgatgcggtattttctccttacgcat

SEQ ID NO: 92783 - DNA, 615 bp, Oryza sativa
  Clone ID: PAT_MRT4530_91230C.1
ttggtctgcgttcagctcgcccggctcgaccttgctgccgccgctccgctggctggtctgtgggttcgcccctccttcgcctgtgtgggctgcccgtcctgcttggtttttctctgtctcgtcgacccgggtgggcgtcggtcgccgttgcctggcggccttccatcctgcgtggccgggagttccgctgctctgccttgatggtgctcgcctcccagctaccgccgcgtctattccggtcggcctggccgatctccctccaaccccggagagtgtcgcctcatgcgcgtgattgtactctttagcagcgacccgccctcggctctctggtttccatctcggggtccttcccctcgttcctggcattggcttcttgcgaagcgggctgccctcagtacggttgctggcgccgcttcgcccgatccctgggttctaggcggtgcctgctccccttgcagagaatccatcctttttccggaggaagagaggatgatacatgatgcgtgaacatgctggtggaaaaagtggaatcaaactactgcaagatatactgaaatcaagtcagtgggtaaaatctgacaaattatcttctgcactgaaatctcctttgatgcg

SEQ ID NO: 92784 - DNA, 434 bp, Oryza sativa
  Clone ID: PAT_MRT4530_91231C.1
ccatcccttcccggcctccatctcgaacccccaaccaccactagcctccccttcctcctttcccgccgcctcctttccgacgacgccgggcctccgcccgccgccgacgtcccaaacaaagagttttttttgcggttggaaacttactatgggggggacgaggaggcagaactaccatcggccacagaggctgttcttgagcggaagctggcggaggggcacagggagacggccgaggaactaatcgaggagctgggcagcaaaccactccctgaggttcgggacaggaatttggagtccgactttgaggagaggcccgatccggaggaggagcgggacacctggaccaccgccagacggttgggggggaaaagaaccagagaggacaagtccttataaagggtggacgccagggggaatagaaggaccaaaag

SEQ ID NO: 92785 - DNA, 972 bp, Oryza sativa
  Clone ID: PAT_MRT4530_91232C.1
atgtgcagcgcagcacgcggtgttcgtcgtcacggctcgccggtgatcatagcgtgggcgatcctgttcttctccattgcgtcgttgtccttgtcggaggcgcagctgcaggtcggatactacaactatacttgccccagggcggaggacctcgtccgcaacgtcgtccgcgccgccatcctccgcgaccccggcaatggccccggcctcgtccgtctcttcttccacgactgcttcgtcaggaagaaaaacattcgctatgagcaggaaccctgcaactgctcactgagattcaaggtcagaggcccgttgatattcgccagccgcggcgccgccgccgccgacgaacgcatcgccttcttcagcggcggcggcggcgacaacacctcaacagagggatgggcggagcggcggggtggagctgatgaggctgaggctgggacagaacccaacgaggacgcgtcaatgatcggcaacggctatgtggaggaagataccaaggatgggaagagagcgccagagctgcctcgggtggtcatggggtcgtctattacgaccccaagcccgaggacctcgcgatcggcgtcgtggtcgtcgacgccctcctctcgcttggtgccggagcggtcccttgttgccatctcttcgactccgccgactctgcctccaaaagtacacccaaggcaggccagcttcgtcggcgccgccttgcacgactacgaccggtgcagcggcgcggcgccggcgccaaggacaacgagcggccgcgacgaacggaggagggcgaggttgagggtcttgaagaacgttagggacttcatgtcggcagcgccgcggcgggagccaaagcgggcggcggggtccttggcgaagaggcaagcgatgaggtcacgcgcgtcggcgtcggcggggccgcacgacctcaccgtcaccggctcggccacgaaccgcagaggcaccaccgccacttga

SEQ ID NO: 92786 - DNA, 272 bp, Oryza sativa
  Clone ID: PAT_MRT4530_91233C.1
aggtctgccatgagttttgtaacggctttttggtcaggcgtttttgttgttacggagaaccaatcaccgtgaggcgcataattttcgcatacacaccaaaaaaaagagggaaatttgtggggccaccaacaaacgcagtgatgcaactgctgcttaaaaaatacgggggggtgatggggatattctggaaaattaactcactttgagtttgggcaattgttggacaccattatgaatgctgtgggtggcccggcgggaaaagaaagattatg

SEQ ID NO: 92787 - DNA, 592 bp, Oryza sativa
  unsure (1)..(592): unsure at all n locations
  Clone ID: PAT_MRT4530_91234C.1
ccccaatctcctcctccgccgatccgccccctccaagtaccattgccgcatccagtcgccggagcaatttccgatgcgccgccgtcgccgctgctcaatcgccggagtggagcagctccggctacagactcattgcttagcgatgaatgacgagtccctttgacagaaggtagctaggggcctcttgagttagcatttcaagcgattttgtttgatgaaatttgggatctttagatgggagcgtttggaatttctgtaaaattttttttacctagttggaattgtgggcttccaatagctgggacatttttgttgtcactcactgtgaaagtgatctgctagtattagtctagttgggctttgtgaggtttgagttggaagctgttagaaattagagctaaacatgcttcaggtttctggttgatactcctacttgatagttgaaattgagttagagatttgagagttttgaagttcagataaaaccgagtgaagggctttttagggagcgagttgaaaattcatataaaattngagtaaaaaaatatttctttcattaaaaggtccttatctttggctgggactgaaaaag

SEQ ID NO: 92788 - DNA, 553 bp, Oryza sativa
  Clone ID: PAT_MRT4530_91235C.1
gcacagccaatcaacagatgaagtgttcgaccgtcgtggcagccctgctgcttctgggcgttgtggcctgtgcccgcgccgacaccatccgcgtttccacccgagaagtcgaccccctcgaggacgacctggccgaccgcgccggactcctcttccgcgccatggacaagaaccgtgacaagatgatcgatgctgaggatgcccgcgcctccgccgagcagctggagctccacatgcccggcatctccacccaggacttcgtcgagttcatccagctcgccgacaagaacgccgacggcaagctctcccgcagcgagctcttccagggcctcgctgacggcatgtcccagaacgaggaggctgaggtcgagatcacccccgccgagtccctcatcgagtccgaggctgaggtccacactgaggctgatgccgagaagaagggtttcttcggagccgtcggccgtggtctgaagaaggccgccaagttcggcgccaagctgctcttcggcaagaagggcggtcgcggtggcaaggccggcaagggaggcaacgg

SEQ ID NO: 92789 - DNA, 389 bp, Oryza sativa
  unsure (1)..(389): unsure at all n locations
  Clone ID: PAT_MRT4530_91236C.1
nagcaaattctaggtcagacatgttatctagtttctctcaaataaagggggagtgactgttgattcagccacgcgtgcaacacatcatgttcagaagcatttccgtgctgctgtttgatctgtcatctatataccaactacttcactacggtaatcaataattccatacatcagaccttcattatgggcaagacttttatctctgtagatttgtccgatgaattttttcgtgctttgcagtgtgccagagctaatgagcaaacggaacgttgctattctcatcttagtttttttttttttttaacaaacagcagcaattgtagaaaactttatttagatgttgatatgaatcgagatgcctctggtcataaaccaaaaaaaaaaaaaaa

SEQ ID NO: 92790 - DNA, 1414 bp, Oryza sativa
  Clone ID: PAT_MRT4530_91237C.1
ccggccggggtcagccagggccagccccctcgtcttccccttcctctctccactcctccaccaccaccggccgcctcgccctccccgccggccatggcgctcgtcctgcccgacatcaccgtcgccacgatcgaggatctccacgtcctcgccatgctcgatgagccgcgcttcatcgacctcgtctccattcccgccgtccgccgcgcagccgagttcgaggtcgccatcacgccgaaggtggactacgatgggtgggtctgcaacaagctcgaggatctccggcgcgtcaggcgcttcgacgacctcctcaccgacctccagaagaggatcctccccatgctcggcaacaaccccgacgacaaggcggccctccgcaatctccgtacatgcgggtacgcaatgtggagcgttcgtcaacatgctcacccctccctccacaacctcgtcgggttctactccaacacggtgacccggaaggctcgccaagctctggatccgtacaaggcctacacgatcaagcaggagtggctgcacgccatggcgcttcgggtggagggatcccggtctgctttcatgccgttcgacagcgactacgtgccaccatctccgcccatgcccaccatcgtcgtcagctcgctcgtcgatgtccacggcgtgcgcttcgccatcgacccgcaccgcgtcgagctcggcgccgtcgacgccgtccgcctcgccccggagtacctccacatcctcctcgagaaggtggagcaggagggatggatctgcccgacgctccccgctctgcgccacgtcgctcgcttcgccaacctcctcaccgatctccaggatcgcgtcctccccgggctcctcaacgaccacaccgacccagccgtcctacgcaagctccgcacctgcgggtgtgggatgaagaagctgcgtgccgtcgccaagggtcctctcctccgcttgacgcgcctcttcagcaactgcctcacccgccacgctcgtgacgcgctcgacgcccggaaggacttccgcatctctgccgattggatcgataagattgcagttcgcgtcgacaggtgtctcactataccacttcatcttcaccaccacctggaggacccgttcgttgatcatctccatgatctcccctgagttgagtgccaccctgatgtcgagttgtacagacctcgctaagtcccactaagatgtcgttttagtcgtacaaggatgaacctcccctgcgtcccgtcctagtcctaagatgtctttgagtcttacaaggatgaacctcccctgcgtcctaagatgtctttgagtcgtacagggatgacagtctgatgtctttcagtcgtatatacagatctcctatgagtcatttgatatataaaatttccattaataatctaaaaaaaaaaaaaaa

SEQ ID NO: 92791 - DNA, 348 bp, Oryza sativa
  Clone ID: PAT_MRT4530_91238C.1
atggctacgcttaaaatgggacggagggagtacttgatgctccaaactcgccactcacgtactcttaaaatcaatgaaatacttcttggttgtctccagtataaggcgtataaatccaggaagtttggcttatcatcagttacactatttaaaaagaaagattattgcaatgaaataccaaataagtggccattactcaccagggaggtgaagggtttcaccactagtgagcagggtttgcaaaaccgtcagcaaccgtgcggttaccgtgcttacgacgggtttgccacggttaccatggttaccgtgcttaccgtcggggcgtgtaaccctggccccgacggttag

SEQ ID NO: 92792 - DNA, 792 bp, Oryza sativa
  Clone ID: PAT_MRT4530_91239C.1
ttaccacccgatctcactagcaagcggcagctcgatcgatatatcaccatgggtaggctcgccgtggacgccggccttggccgaggcttcaccgccgccgccggcggctccgtgcccgacgtgagcaggagtgttgtcggcatagcgctggtctttgtggcggccgtagcgatcgtggcgttcgtcgtgtttaactgcgccgatggctccggtggacggaggaggcgcaccggaggtggcggaggcggaggtggcggtggcggtggttgcggcggcggcggcggcggcggaggtggcggtggttgcggcggcggcggcggcagcggaggtggctgtgccgccccagccgcgccgctcagctggaagccggcggcgagaaacttgagctccgactcgtatagctccgcggccgtcggcgttggacataggagaggatgaatctggattacgacccctagccgttgccgccgccgccgccctctcgtcgccgtcactgtggccggatccgccgtccgcaccgtcacccgttcccatcgccgttgccagatctgtgcggcggaggtccgccgccgttggatccgcgcagggggtggccgccactgctgtcgcgcgccacctcgtcgtcgccgccgccaccctcccgtcttcgtcatcgttgccgtagccgtggccggatccgccgtcgcccgctcccgtcgctgttgccagatctgtgcgacggaggtccgccgccactggatccgtgcgaggggtggccgccgccgccaccgttgcgcgccacctcatcatcat

SEQ ID NO: 92793 - DNA, 2845 bp, Oryza sativa
  Clone ID: PAT_MRT4530_9123C.1
cttcctctgcctcttcaccatccctagcagctccctctgcaacttctccggcagtacgcacggcttggcgcggcggacgagctgctggtactcgcgctcctgcctccggaggtgttccatcctctccctcgccgtcatgtagtcgtcgagctcgagctcatcgccgtccggccgcgccatggggccgcccacgttgatgcacttgaagtgttcgaccgcgggccactcggtctcggcgtaggagacggtgaggccgagcgtgccgtccggcttgggcttggtttggagggtgacgtggtcgaacatgccggaggtggcgagcgcgtcgagctcgtcgcgcagttgcgccctggtgtagattttttcttttcgcgtcttttctatgactagaccatactcatgctttccatagacgtcgttttggcgggcgatggccatgcttgggttcgagatctagaacataaccttgccttctattccgcactccgtcttcccccagcgctatgtcgaaacaccgcgggcgggtcagatttgaaacggcgcggccacaggctaaaactaaaagttggcagagaataagttagataaacatccactaattacgccgagccaaacatggccctggttggtgcttcttctatcatcggaggcttaattgaggttcacccatcttggccctgtgatggcaattgggggggatggcgcctattgccctcactcttcacatcgccggatatggtgaaagtttttgggaaaatctccttggttctccaggggcatgtactgggccatgatggcgcggatctctgaatccatgtacctccggatcctgtatttgtatactgcgtatcctgcaatgcctgctaccactaggccaaagaagatcacccacaagaagttccatcctacctctgttgctgcatttttgcttatgcatgtatcatgctccttcatataaagcaagccgccactgcaaccgcattcatagcttccccatgtgttcttgcatttgcattccttgcactggcatgcagtcctttccttgcattcatcaatatcttcgcatttgtggactccatcacctttgaacccatccggacatttacaaccatcattcgtgcaggcagaatatgtccggccatgcctggaatccttccagcaccctccattgttaatttcacaacggccagatcccgaagcttcacagtgagtgtagccatcaccaacaaatttaacaccttttacaactggacattcacaaactcttccacgaaaagtgtccttgcatgcagagatgttagcagccttgtcttgccaacagccaccattgttctccaagcactcatttgtttgtatatcttcactcaagcaaacagctggttcagtggtttctcgaaaaccagcacaaattgccttaagaaccgctcctttatcaagtttccctctgtattgtctattgttgattacaagagtcggtaagatggtaacatcaccacgagagcccttgccaatctgtgcatcctgttcagctttcagcacaggattttctttatcagcatctggatcaccaatgcacttatctatggctttgtgatcaagaccaagtgacttgataactccatcagcgcattccttggtgtacttcttttccttcattgggcaccggattgcaaaatctgtcacgtagtcccaccacagccaaggttttccatgctccttagcaactttataaacacagacttgacgtaaattctggactaccacatctttcccatcataccctttgctgaaatcctgttccgggtcaggtgcacaatatctcccatggttgatacactgggacttgcattgcttgcttagaatgaaggaatctgggcaataccaggtaatgtaatgaggagtgaactgtgtgtatcccttcttctcaagtacctgtgctgctcctttgaagctcttgacaaactcaatctggctatcacatttagggccacattcatcattactgttagtccaaaattcatactcaacacgctcatcagggtgaggcagggactccctccaatccaaattcacattaaccatgtcaccattatcaattgctttcttgagtttgtccccaaagctcttggttatcagcgcagaaggaatggtgatattctctaaatagtctgtatttccactctcttcaggagtgtccattgtaatcaggggttccgtcttgtcatcagcaacaaggatggctcctgctccagcgttttgtgcattccatgccttctttgtgaaaaagcaatctcccctgtcgacgaggaggaaggtggggagtgacccgggtttggccttgtaggagatgtcgaaatcgtcgaagctcttgcaggccttcttgttggccttggggtaggcgacgacgccgaccatggtgccgccgtactggggcacgccgaagttgccaatggcgcactcgtaggtgcccttcatgtcgctgggcgacgtcaccttgaggctgttcttctccaccacgaacctcccatggcagctaccgcacagcagcgcggcccacaccagtagtgctaaccacagcatcgagttgggggatcggagcgccatgctccaatccacgcctagacctttgcaattcgtggaacccagctgcggattggatcggattggtgggggataggatcgatcttggggttgaaagggcgtgccgaaagcggcggagtggagaggaaagattggattttgacggcggggggaggcagttggagtgaggaagagattcgtggatggatttggagtcgcgcggtggtgagattttgggaggggacggcctgcagcccggggatcc

SEQ ID NO: 92794 - DNA, 183 bp, Oryza sativa
  Clone ID: PAT_MRT4530_91240C.1
taggcgagacttccgagtgaatgtgatattgggagaacttagttatccggcgttagtagtgagaaatgtagtcacccccgccgagtgatggcccacttgggtgggtggatgtctgattgcggatgacccagtgacttaataaaggttcaccaaatgtttgtttaaaaaaaaaaaaaaaaaaaa

SEQ ID NO: 92795 - DNA, 1557 bp, Oryza sativa
  Clone ID: PAT_MRT4530_91241C.1
atggccaccgcctggccacggtggcggccgtcctcgccgccgatgccgtcctcgtcgtcgtcgtcgccgtcgtcgtcgttcacggcggacccgccggcggagttcctctgcccgatctccgggacgctgatggcggacccggtggtcgtcccgccggggcagacgttcgagcgcgcctgcatccaggcgtgcgccgcgctcgccttctccccgccggccgtcgccgccgacctctcctccctcccgccctccgcctcctcccctctcgtcctcgtccccaacgtcgcgctccgcaccgccatactcaactggtgcgaccgcctctccctcccctaccccgcccctctctcccccgacaccgcgcgcgacgtcgtccgccgtctcatgccctcgccaccgcctcccccgccgaggtcgcaggcgccgccgcccccgccgccggcctcctccgtccggacgaggagctactacagcgacgacctcgtgcagcagcagcaggaggcgaggcgggagggtgggtctacggaggagaggatcatggccatgctcggcgctggccccgcggagcaggaggcggcgatggcgttgctgcggaagatggcgcgggagaacagggagatgcggagggagctctgcacgccgcggctcctcgccgcgctccgcccgatgctgctgtccggggacgccggggtccaggtcaacgcggcggcggcgctggtcaacctgtcgctggaggcggagaacaaggtgcggatcgtgcggtccggggcggtgtcgccgctggtggaggtgctccgcagcggccacccggaggcgcgggatcacgccgcgggcgccgtatacagcctcgccgtggaggacgagaaccgcgcggccatcggcgtgctcggcgcgatcccgccgctcctggagctcttcgcgtgcgccggcgccgcccacctcgcccgccgcgaggccggcatggcgctgtaccacgtctccctctccgggatgaaccggtccaagatcgcgcgcacgccgggggtggtgcggacgctgctcgccgcggcggaggcggcgagggacgaccgcgccaacgaggccgacgccgccgccctccgcaggatcgccgtgatgatcctcgcgaacctcgccggctgcccggacgggaggaccgcgctgatggacggcggcgcggtggccgccgtggtgaggctgatgagcagcggctccgccgcgccggggagcgcggaggaggagtactgcatctcgtcgctgtacgggatgagccgggggagcctgaggttccgagggctcgcgcgcgccgccggcgtcgaggccgcgctcacgccggtggccgagggcgccggcggcgtgggccgggacatggcgcggcggacgctccgggcgatgcgcggggaggacgacgaggcggcggtcacggccacggggctgctcggccggcagtgggacgacgggagcgtcgtgtcggaggggctcgtgtcgatccggcggccgccgccgcgccggagcagctacggcgccggggcgtccgggtcaaacaccacgcagttctga

SEQ ID NO: 92796 - DNA, 257 bp, Oryza sativa
  Clone ID: PAT_MRT4530_91242C.1
cctctatttagtctgcttctcttcgaccctaccatcttcaatttcccgaatatgactaccatcttcaacctcctgaagataatcacgtgcccgtaagtttgccggagcaaatctccccatcaaatccgtccgaatctttcttggtcaaccaaaattggtcgagggtttttatccactcgatctactctttccgtattccccaaaatcagagtgtaaaactcggaataaaaatgaccggggaacattaccgtcatcat

SEQ ID NO: 92797 - DNA, 763 bp, Oryza sativa
  unsure (1)..(763): unsure at all n locations
  Clone ID: PAT_MRT4530_91243C.1
acattaaagggaggggtgtattttacaattaaagaactgatgaaaatccaatagcctgtgcagatgaacaggtagacacaactgaatacaattacatatattgtagtactccactaagtaaaccgattgtcccactaaattagatgtgcacaactagatcgatcagaaatgatgaagtgacagtgataaaaatgtgctttggtgaccattagctgtttaagaacctttgcttgaaatgtgtggcaacaactacagcgaactcataattgtcaagctcttcttgtcatctttgttcaacaaaacgggcatctccttcttgaacctcgccatgggcaccctgggcagcagcatcgacaccaccgtcgacacctcgccgggcgaattcttgcacctcgtgtggtcccttccgaacctggaagtgagatccctgccaacgggtatgccgccccggggaatcagcccaccgaacttgagcaattcacggtggtccacttgatgtcgganactcnttcacctgtccttcccgacgggggcctccccactgccccnccgtctcccatgggctcatcgctcccngtctcccgcgcttggtcccccccaacccccctttngnnaacggccccaagaagtncccggnggggcccgnanggggaantcccttnccnaanccccggacnggtttnnctcccccccccnttngntttncgacgngcggccnncccccctgntccntgggnngcccnncnntnntccnttncncctt

SEQ ID NO: 92798 - DNA, 476 bp, Oryza sativa
  Clone ID: PAT_MRT4530_91244C.1
atatcacccaaagttccacatgtcacatatgatgatatacgagctaattttcaacattacaaacacactatcctagcaaaaactcaatgaaagacaccgccaaggggggaaatggtactgggtgcaccatagaacctagggtaaaaaccatatctagatggcgcgataaaagccaacagagcttgaacttgaaccaaattccgcccaaaggagaggtcaccagaactgttggcgcatgcacctgatgcactatggactgaacaatgacaaaggcctgatagtgagattgaccacgcttgcatggacacgtgccatgactcgtttatataggaacaactgctctgcgaggacccattaccattagaaatttggcaataacaggttcgtttcgcgaaagacatctagaaatctggcgtgtaattggagaggaaaacaattccctagagagcaaaacacaaattgtccaatgaaagata

SEQ ID NO: 92799 - DNA, 591 bp, Oryza sativa
  Clone ID: PAT_MRT4530_91245C.1
atgtcatcctctcttctctacctttttcatcctccccctctctttctcttcacgagagtgggacgagggccagcggcagcagcggtgaaggacgggcgggcgagggccggagcaggggccaaatcgtcggcggcggcggcggacgggggccggagcggcggtggccggcgcacccacggcgctctggagcgcgtaccgaagcgacgcctccacgacatcatctcccttcccgtcaatctggaccacgccaagccaagccactgcgtcgtcgactttgcatcgtcctcctctccgtttccccacaaaaatcccggagaatggcgcaccgaggagggagatcgacttcgtcttctccaactccggccgctggcatcggtggatcaagccgtcgccgttcaccccggaggttcttgccgccgccgagcacgattccggcgacgagacggcgacggcgcgatggagaccgacccgccgccgccgccaacccgacccccgtccgtcgctgccgccaacccgacccccgtccgtcgccgccgccaatgcctatgtggcccctgctcctgtgaagacaaacgggggagaaagagatga

SEQ ID NO: 92800 - DNA, 321 bp, Oryza sativa
  Clone ID: PAT_MRT4530_91246C.1
atggtgagccgtcagaagcgttgccgatgtcaggtcaggcctgatttcgacatgcttctgaagacgaacgagttgctctacatggctctgatcatcgatgtcctccatgagcaaccggagcgcgatcttgagttcttccagcagccgctctgtcatggatttcattttgctggcaacaatggcgacgtcgcctttgacaacatcccagacggtcaaatcttcagggatctgagaatgaaaaatgagatgcaaattagaggcgtcatcgatgaactcagcaagggttcttggttttccaaggccgaagagcgcggtgtctga

SEQ ID NO: 92801 - DNA, 2189 bp, Oryza sativa
  Clone ID: PAT_MRT4530_91247C.1
gaaacggagatattggaatcactttacagagcaagttctgctttattacacagcatgtcattgtttcagaccaaaactactcctgcacttagggggtgtttgggaacttagagactaaatttagtctttctcacaaaattataagtccctatggtagggacttatatttttgtgagagggactaaagtttagttccactttagtccctccaaccaaacaccaccttagtaaactacatgcctgctctttccggtggcaaaattgaagcgacccaggcttctgcattccgtaatctgggcgctatcttttcaattttctacagaaaaaatagcaacagagtatcgaacaggaacttctgtacagcatacaagtacaacacgccggggccttttgcaatcgtttgtttcagaccaaaactactcctgcacttagggacctccggtcctgacgcaaagaggttgacaaggcctcggaaagcttgaacagatacctcacaggcctgaagaagttctccgtccaagttccagacactttcgtcatgtgacgatataaaagtaaatgcttgtgtcttatgatgttcgacaaacttgaagctcagaggatctgagcccttcttggtaaattgtgttagatgccataagtaaaagggaagagggcaatctctaatgagcagaagatgaagaaaaccatcagataggtgtgcgtcagctactagaccatcaggggctctttcgttacgacatgaaatgacagctgcaccaacactgagaaaacgacccttggaccagacccattttggggtctcacaagctgttctggaactgtctggattttcatcttctgaattctgttcagatgttgaagttcctttgcatattaaacaatttgttcggcagatggttttccgatgtctattttgatggtattgcagtgtttggactccatttgcattattctctgccgatgctgtaagtgaatgagtgtttccattttcaagaaaagccacttttgcctcataagatcctgcaaacgaagcagcatagcgcacagttggtgaaacctcagctgatgggctacttttccatctgacaacttgagctatatcaagtgatatccttctgagaacaatagcatccgttgagccagaaggaattattccaagcctaaaccaattatttgggaaggagactaaaggcacctgatctccattgcatggttcatcactagaatctgatgacgagatgtccaatcctgtagatcgtgtggttgaaagaaggggctcatgatcatcaggtgtgttagaacttccagagatggcatttgcatcatctcctgtgagctcactattgcttagatcattatttctatgttcttgacacttcatgttgtttctgaaatatccaaacccttctggagttggaggataagaatttgtgtgccttgtacttagtagcccattcaaaatttcattaaataaaccatcaccacccactgcaataacaccatcaaatttcttgagatctttatctgataaagatgctaaagtatcatatgcatgtcctgctcgctgtgtgactatcaccttcgtttttacttttgcccgctcaaataatggagctactgtttcccaattcttacaccctctaccttttccacacaatggatggacaaataccatgaggctcttgggcctatcctgttccttatttatgcacgtctttatatgctccacccaagttttgcaggtttgctggtctttatgaccaaaaatatattcacaaggtacccatggagatggtctttttcttggtcttgtgaccgtgtgtatgacaaatcggttcatctcagtatttatcttgccttgaacggtagctcttgcattccaaggttcacatacaggacccacctcaagaagctctacagcatagacatctgaaaacttaagcttgctctctaacttaggttgcattatgatagatgaccaacatgaagaactcacttccttccgtttcttcgattcaagaacccgaagaccggaagctacgaatttcctgactccatcctggtgaaggggctggaaggagaggccgtcgtcgccgacggccaccgtgacctccccgacgccgtccaggaagagcgcctcgccgccgccttccatgaagaggaggggcaaatgcgaatcctcgtgc

SEQ ID NO: 92802 - DNA, 1592 bp, Oryza sativa
  Clone ID: PAT_MRT4530_91248C.1
gcctttctttttattttaacccaagccaaactggttctggtggtcttgtggattgcggccaccaccaccactgcacggtcgttggcctctcccttgctactataaggggaagccagccattgcagcctcgcctgcgcgcgccagccatcactgtggagtgagagctcagctagctcagcaccgccggctcatggcgatgccaagatcgccgtcgttctactacactgacatgtgaagcctcctagtcctagatagttgagagaggcttttcttctgttccggcgacggtggggatgggcctcgccggcggcattgtccggcgagtcttctccaagagcccctgctcgtcggccggcggtggcggccgtggttgccacaatgagaggggctctgctgatcacaagaggagatggagctctctccggctctacctctgcggcgacgagatcagcgcggccgccgaggacgagaacgacgacgacgatgatgggacggtctccgtcaagagcttcgagacctgcgcaatgccgcaggaaccgcaggcggcggcgctgacggttgctcgaccggcgaatggcgtggatggcgtcgccgacgccggcggccaccctgaagaacatgggagcatgagcatccccatcaaagacatcgcgcctccgacggcggccgagccggccaccgacagccaagtcgaagcggcgacgatgatccaatccgtgttcaggggattcatggcgaggaggcagttgcagaagctcaaatgctcagaaaacggctgctgcaccaccgacgagccgaggagccctactacggcgtccatcgcggcgtcggtggaggtccaggtcggcgagtcgctgagcaacctccgcctcagcgacgacagcgccgccgccgcggcgacgtcggcgcagcaccggagcagccagcggtcgcggccacaggcgttcagagtgaaggaggagtgggacgacagcacggtgagctcgaacgtgtcgaggatgcggatgcagagcaggatcgaggcgacgacgcggcgggagcgcgcgctggcctacgcgttctcgcagcagctgcggagctgcggcggcggcggcggcgggacgacgaagaagcgggcggcgcggtcggaccaggcggagtacaacgtggggtggagctggctggagcggtggatggcgacgcggcaggcgtcgtcggaggcgtcggccgacgactgcatgagcaagaacgcggcggacgctggctcgacggcggcggcggccggagggcggcgggtgatcgtggtgcggcggcggcacgacctcggcgccggcgccggcgaggagaaggagagctgcgggtccaacgacgtgtccgtcgtcagcttcgacggctccagcggcagcctcagctgctacaagcccggcagcaagagccgcctcaggggcggcggccggagcctgcctcgccggaaggtggcttcctccgaccaccgcctccacgcaagatcacacaaggtgagcaagaaggtgcaccggcgagatcaggagcaggagagggaagaagccgcggcggaggcctacgacggcaaccaaccaccgacggattactga

SEQ ID NO: 92803 - DNA, 487 bp, Oryza sativa
  Clone ID: PAT_MRT4530_91249C.1
cccacgcgtccgcccacgcgtccgcttcccccaccgcgggtgaccggggaggagtcgtgagaccaagcaacagcaagcgggaaaggccatggaaggcggcggcgaggcgctcttcctggacggcgtcggggaggtcacggtggccgtcggcgacgacggcctctccttccagccccttcaccaggtttacgcacagccgcacccgccgctgcccttctgcccgatggagtcaggaaattcgtagcttccggtcttcgggttcttgaatcgaagaaacggaaggaagtgagttcttcatgttggtcatctatcataatgcaacctaagttagagagcaagcttaagttttcagatgtctatgctgtagagcttcttgaggtgggtcctgtatgtgaaccttggaatgcaagagctaccgttcaaggcaagataaatactgagatgaaccgatttgtcatacacacggtcacaagaccaagaaaaagac

SEQ ID NO: 92804 - DNA, 408 bp, Oryza sativa
  Clone ID: PAT_MRT4530_9124C.1
aaaaatgtctttcttttttttttttttttttttttttttttaaaaaaaaagaaaaacaattttttttttttttttttcccccaaggtttcacatgtcaaatttggggatttcgggccttttttttaactcccaacccctttttctgttaaaacttttttcaagacccccccagggggggtaatggtcctgggcccccctttgcccctgggggaaatcccatttttagagggcccgttaaaagccaacaaagcttggctttgacccaatttccgttcaaagtaaaattccccaacctgctggatttttacctgctgccctttgccccaaacaatgttaatgtcctgatagggaaattgttgcccccccagcgcgagtttttgccaaatttggttttttttaaattaaaa

SEQ ID NO: 92805 - DNA, 829 bp, Oryza sativa
  Clone ID: PAT_MRT4530_91250C.1
aagagatgcaaaggttttgaagctttaatgccaccctttctgtcccttaaaaagcttacctcgctcgcccattctacttccattctcttcacaccatcacatgtagtgcgtgtactcctagagcttagctagagctagcttcctctcgttgatagcttgatacatctctctcgattcgtagagagtttggttggttgatagctagctcgacggcgcggccatggcggcggcgtctcatgcgccgaggtcggtggtggtgagttcgtcgtcgcctgcggcggcgattgccacggccggctgcgtggtggacacgaacacgacgttcgtgcaggccgacccggcgacgttccgggcgctcgtgcagaagctgacgggcgcgccggggagcggcggcagcaagccggcgccggcggcgccggtgatgaggaggccgaagctgcaggagaggcggcgcgcggcgccggcgaggctggagctcgcgcggccgcagccgctgtactacagccaccaccaccacaggctgatgcactcgccggtgtcgcccatggactacgcctacgtgatggcctcctcctcctcgtcgtcgtcgtcctcgctgccgtcgtcgtcgtcctcgctgtcgccgtcgccgccggcgtcgtcgtcgtcgtgcggggtggtggtgataaccaaggaggaggaggagagggaggagaaggccatcgcctccaaggggttctacctgcactcgtcgccgaggagcggcggcgccggcgacggcgagaggcccaagctgctgccgctgttccccgtccactcccccaggagctcctcctttgccagatcttaa

SEQ ID NO: 92806 - DNA, 405 bp, Oryza sativa
  Clone ID: PAT_MRT4530_91251C.1
atggatacccttgatatgcaaacgggacagatccaacacaaccttgaggaacacatagtgcaaacgcaaggatggcaacagaatgctgatgctcagttcaccaacatcaacaacctgatgcagcaacaacataatgtccttcaagcgtacttccgcttcgaagggcatcgacgattactgctgctctacaccttgcaggagcagctcgccaacagtgagtgctacgaggaggtgatgctcaaggagatggccaacatgcgcgagaccgggacccgcccctttggggacggggacggggctgcttttcgacccgtgggttgggcggggacggggccccacatatatgcggggccggggccgggtgaagggttccacccacgggtccccatggagccccggaattaa

SEQ ID NO: 92807 - DNA, 718 bp, Oryza sativa
  unsure (1)..(718): unsure at all n locations
  Clone ID: PAT_MRT4530_91252C.1
ccagcatccccgcacacctcccccccgccgcccgcgcatncatccangcacgcancgcancgcancgangcacgcancgcancgcancgcacgcatcatgcancgcancgcacgcancgcacgcacgcacgcangccacgcacgcacgcanncacgcacgcacgcangcacgcacgcacccacgcacgcacgcacgcaccgcccccccccccccccgcccccccaacaagcgcacccccncgcccagccagccccaccgcacgccaccacgctcccaccgacagcaaagcgccacccccgccgcacccaccaccgcgcacccgcacacccgccccaccaccacacacagcccagccacccgccacccacccacccaccacccaccccccccacccggccacaccgcgcgcgccgaaccgacccaccaccccggcccgcccccacacccccccgaccgccngccccccggccgcgccgaccccgccgcgggcccccccacgacccccgacgacgcccaccgccccgcgccgccgccgggcgcaaccgcgcacacccgcgccccagcccccccccccatcccgccccgcttccccatccccgggtcccggggccccctgnccccgcccaccgcccccacgcggggaacccaacggagtncccaatcaangnctaatgcncccttgcctaaccatggaatacccggcacccgcccaaatac

SEQ ID NO: 92808 - DNA, 160 bp, Oryza sativa
  unsure (1)..(160): unsure at all n locations
  Clone ID: PAT_MRT4530_91253C.1
tgccaacgtcgtggagtgtcagtcgtcacggtgttgggcacccgtgtgccaggccccaaaggaacacaaacagtaggtgtgtagtgtcaangtaccgtgtagtgcgtcaagtaaaattttgtggaattgtcgatggtcccaaaaaaaaaaaaaaaaaaaa

SEQ ID NO: 92809 - DNA, 324 bp, Oryza sativa
  Clone ID: PAT_MRT4530_91254C.1
atggagacaccaaacatacataaatcagcatccaagaacacgcaaatctggaaagaagagaacgacaccgatggagacgacgcacagatctggcaacctatgaaccaccgttgggaggtcgtccgccgtgccattgtagaggccgcccactacctactaggccccgtggagaggaggccgcccgccaccgtggaggctaccggctgccgtagagaccgcccgccacgcccccacagttgggaggccgcctgcgacataagggagcccacctaccgctcactgctatggaggttgcgccctcgccgctttgtataccggttctag

SEQ ID NO: 92810 - DNA, 180 bp, Oryza sativa
  Clone ID: PAT_MRT4530_91255C.1
atgaaagaacgccatgacaacgcctccaagaagggaaacgacgaccacgagcgccgtcgtcgtcgaaccggccaaaggcacggcaagactttcgctagcatcttcactttacccacacaagcaccccacatcgacggccatagaatagtctatgacgtctcacaagcattcataccttga

SEQ ID NO: 92811 - DNA, 1128 bp, Oryza sativa
  Clone ID: PAT_MRT4530_91256C.1
gggagtagtaaacaggcaaagcaagttaacaaccgcccgtcaatggccggcggcgaccaagcagcggccaaacccccaacaaccttgacctccgccccactgccgccgttcgccgcggctcggtgctcgccggcggtgatggcggcttggcccagcccgtggctgcctctcctcctcgtcggcgccctgctcgccttcgaggactggctcgccacgcccacctgctccggcggctcgaccgcccccgcccccgcccccgcccccgcccccggcgacctgagggtcatgatggtttccgacctgatgctgctcgggtcggacgccacctacgccgaccgcttcttccggaaccacgtcatgtccaagctcttcgccaaatctattgaaacacttaggccagatatgattgtagtccttggggacatctcggcaatgggttttcagctgaaggaaagcaaatggatagacgttattgaccaattcaaagggatattggggcaatactctgaccttcctcttcatattgccttaggcgataaagatgtaggaggatgtgccaacttggatgacagttttgtccaccatatggctaagcatttaccaggattggattcaagtggttgcggtacttttgaaattggtaatgtcagttttgtgtcacttaattcagttgcgctgctctgtggaaacaatcccctgcggatcagcgttgagaaggttatagagaaggaaaacaaccattttcaacagaaaatggtgaatgaagcaggacatttttctttggggagtatagaaagagagggttttaattggaggcaaaacagcatggaatcagggtcaggccctgtagttttgctccactttccactatataagttttcagagggaactatttcagaacctccggtctcctcaagtttgaaagaaagaggagctgatggcaggaggtctgatcaactacatgccctccctgcaaattcaactcaatatgttcttcaagcgcttaaaccaagaaatacacctgtagttctaaatccagatcacatctctgtctccacaggattgtatttagtgcccatgattgcagtttctcagattatactcactatgatgggacacgggaggtag

SEQ ID NO: 92812 - DNA, 350 bp, Oryza sativa
  Clone ID: PAT_MRT4530_91257C.1
gagagatttcagagaggagaagctcgccctgatggccggtggggtagcttggatgggtaaagggaggacccccctcggctggtaaagctcaaaggaagctggtttgggcccttttcctttcattggtttccccttggtggcttttttctttggcctggcttcggctttttttttttttttttttttttttttgttttttttttcttttgggttcttaaattccaaccgggataaaaagaattccttggttcacctcagggccgaccaaaggtcctcttccaccaaacctaaagggctttctgagaatggggggggtttcccccaaccttaaaaaacctcccgacccatga

SEQ ID NO: 92813 - DNA, 503 bp, Oryza sativa
  Clone ID: PAT_MRT4530_91258C.1
atggtaatgcgtgaaatgttttggtactatcagtcaccgactcatggtgctctctaatttgacagcaaaatttgttgctgaacaggactacttaattgctatgatctaattcttactatttcgtatatgatctaattcttgatcatctggtgtggcactttattctaaatttttgaagcgcctatgtgttcactccctttattttgttgttttcaaaggtaaaactccatcatatttttctgattgttatgtcgttttcaattgttatgtttcaatgtgtagcttaaaggatataataaatactttggttgcagtagatagtttttactaattaatgttcatgcttgcaaagaaaaaaaatatgttcagttctgctaagcagaacaaagaggttgactctatatagaagaacatagaggaatgcatgtgtgttttcacagtgcatgagaaaatcagtgagaaagttcagccatcttccagtggtatcattgattgctctaatg

SEQ ID NO: 92814 - DNA, 790 bp, Oryza sativa
  Clone ID: PAT_MRT4530_9125C.1
atacaaaattcatgctttccaaactagtcttttttggtgggaaatgccatactagtgttcttcctcgagatcacaaacttgcctaattttgcaatctccatatttccccagcgctatatgggagcaaagcagccaggtacgattgaaattatgcggccacaggataatccagaaatttacatgggctaaatttgctaaacataagatcgtcagagtgatactactacacatatcgtcaggctgtgtcatgatctccaggagttgttcacctcttctcatcccatttgggcaacatggggggaagttgcatgctatcctcactcttttcatagctcgatatggtgagaatgattgggaacatctccttggttgtccaggggcatgtactgggccatgatggcgcggatctctgaatccatgtacctccggatcctgtacttgtatactgcgtatcctgcaatgccggctaccactaggccaaagaagatcacccacaagaagttccatcctacctctgttgctgcatttttgcttatgcatgtatcatgctccttcatataaagcaagccgccactgcaaccgcactcatagcttccccatgtgttcttgcatttacattccttgcactggcatgcagtcctttccttgcattcatcaatatcttcgcatttgtggactccatcacctttgaacccatccggacatttacaaccatcattcgtgcaggcagaatatgtccggccatgcctggaatccttccagcaccctccattgttaatttcacaatggc

SEQ ID NO: 92815 - DNA, 322 bp, Oryza sativa
  Clone ID: PAT_MRT4530_91260C.1
ccggcccaaaaggaaaaacggaaagggcccttttttcccccgtcaaaggcccccccccccaaccccggggggggccgggaaaataaacaaattaagccccgggcaagaaaaaaacccccaaaattgggaaaggaatttcgggaaaggggggaaaacccaaccccgggccccccccaaacccggggccaccctgaccaaaggccgggccctccaaaattccaaaggggccaccccctcagggggctaaaataaggcgggccagggcaacgcaatttgggcccatcggggggggctcccccggaatcttccccagggggggggg

SEQ ID NO: 92816 - DNA, 404 bp, Oryza sativa
  Clone ID: PAT_MRT4530_91261C.1
atggcagcggtcatccggaaccctcgcgagtgggctgctgccatcgagttcataaaggacacgagtgatgagtggagctggctagctcgtggaggatggtcgcgtgaagagctcgacggtggccaggcgcactcgtggaggagcggcggcggcccggaggcgcctccctccgccagatccggcgggaggaagggcggcggcgacggcatcggcccgttgcggcggcgggaggcggcagcggcgggcgacgcctcccttccgccagatctggcgggaggggaggcggcgggctcgccgggactaggtggcggcaggcggtgccacggcgggttcacagaggagacgcagcgccgggctggccggagggaggcggcgggctcgccgacgggaggtggcacgacgag

SEQ ID NO: 92817 - DNA, 176 bp, Oryza sativa
  Clone ID: PAT_MRT4530_91262C.1
ccccgggctgcaggaattcggcacgaggcaaacttcgtcggcagcggaggcgcgatgcgttgcggcgcgccacaactggagcggccctcccctgagcctgaggggcagacgttggctagctggagcctggaggttgcagcggccgccgcgcactcgcaactactcacaagccgcct

SEQ ID NO: 92818 - DNA, 440 bp, Oryza sativa
  Clone ID: PAT_MRT4530_91263C.1
actatatagaaaccgactctgttggtgtttattttactcatgactacacattgccaaactccacacagctttatgccagaggctatcttatataggatgaacaggctcgggatcaaaacacgctgggacagtcactttcgggaggattgctacactttttttagctgatacggagccggttctgatgggagaaagcacctttctttgcagcgctatcatgcctaaacgtaccgacacaccgtcttgagacgccatgggcattatgtgtaaaccacacaggcagatgatgctataaataacatcttgcccctgaattggttatcccagacctcgaggtcggatctaaacgcagcggagtgcatgactttaagctttagtctttcgataaacacttagtgatgtgtcataagtagccatggccctggcactactttaccctt

SEQ ID NO: 92819 - DNA, 1443 bp, Oryza sativa
  Clone ID: PAT_MRT4530_91264C.1
atggccggccgagcccccgccgtcgccatcgccttcctcgtcctcgtcgtcatgccgggaatggcctccgccggaaagatcccacggttcttgccccagcagcagccagggcgcgacggcgcagatcacggcagcagcaatgccccgagcccgccgacgccgaggcgtgcccgccacgccccggccaccaccgccgtgacctacagcgtcgccttcgccgtcggctcgcagcaggacttctccggcgcgctcgacgtcaccagtgagttcgtgtgggtgccgtgctgcgccaccggcaactcctcctgcggcacgaacaacaacatgcccggcgtgacggtctacgacgcgcggcccgaggagctgtacaaatgcgagagtgatacctgccagcgtatcatcaagccgacctgcaacacgacgggcgatctgtgcgagtacacctacacgtacgggtacgggggtgacgacggaagggagacgaccggcaacctcgccgtccaaaacttcacgttcggcgacgacagcgaagacaccgccgtaaagggcgtcgtcaccttcgggtgcagctcctcaacggagggggacttcggcgcgtccggcgtgctcggcctcaacaaggggaatctctccctcgtctcgcagctcaacctcgggcggttctcctactacttcgcacccgaggtgaacaccacggacaacaacgcagcagacgacttcatcgtcttcggcgacgacgacggcatcaccgtgccagggaacagcggcggcagtcgtccccgctacacgccgttcttcaccaccggcgcagtccgtagcgcgaacctcgacctgtacttcgtcgagctcaccggcatacgcgttggcggcaaggacctgcagctcgggggcggcggcggcggctcggcggggggatccctggaggcggtcctgagcacctccgtgccagtgacttacctcgagaagaacgcctacggcctcctgaagaaggagctggtgagcgcgctgggttccaacaacacggaggatggctccgcgcttgggcttgacctgtgctacagaagccagcacatggacagggcgaagatccccgacatagcgttcgtcttcgggggaaacgcggtgatgaagctgcagcagtggaactacctctaccaggacgaggataccgggctggagtgcctgacgataccgccgtcgccggacgacagcgatgggttgtcgctcatcggcagcatgatccagacgggcacgtacatgatctacgacctccacaagtcgaggctcgggttccagacgtccgatccgccgccgtcccagtcatccgatctgccgtccaatccgacgtcatcggctaccgcgcagccaaagccacggggggtcgcggtcgcggtggtgacgatggcatgtttcgtgtggtgccttgtggtgctgaacgcctga

SEQ ID NO: 92820 - DNA, 107 bp, Oryza sativa
  Clone ID: PAT_MRT4530_91265C.1
aataaaacactggccggtacaatgtttgtgttgaattaggacatcgccacagatactatgggagttgataaggacacgtgagaaaggcacagggatgattacttaaa

SEQ ID NO: 92821 - DNA, 304 bp, Oryza sativa
  unsure (1)..(304): unsure at all n locations
  Clone ID: PAT_MRT4530_91266C.1
tcaagcttnnnnaggggcgaagataagatacattgaaatggaaaagcttgcttatgccctagtgatggcttcgtgcaaacttaaacactactttcaggcccacaaagtcactatgccatcgcagtatcctttgggcgaagtgctccggggcaaggaaattactggccggctcagcaaatgggcagcggagttatctcccttcaacctgcatttcacacaaatccctcaaagcaaatcagaaatggtcctttttggggcgccagagtggctagcgccattgtccaactggacggcgccagcctct

SEQ ID NO: 92822 - DNA, 498 bp, Oryza sativa
  Clone ID: PAT_MRT4530_91267C.1
atgggtgatgtcaccaccaaggagaagaatgtgatcgtgacggcatacgaggaggtgccgcccgcgccgcggcgccgtcgtccggggagcggccgcgctggcgcgacgtcgtcgtcgtcgtcgacgacgacagcggaggtgaccacttggcagcaggccaaggcggcgccggcggcgtatcaggccggcgtggcggcgggcgcccggtacagaggcagcaaccggcgggcgctgctgctcgcgtacgcgcagcatcttcggcggcgtgatcagcgcggagctagcggcgagcggccgcgggtgctgatggagtggggcaaatggaagacgcaaggtcatcccggtgccggcgccggcggcgacgcggtgaggaggaggagaagcttatactgcagattccggctgtggaccagggcgtttctccggcgagttcggagaatcggggagaatgcgttgtgcaagaacaaggagatcagtcaaccggccaatgtaggataa

SEQ ID NO: 92823 - DNA, 444 bp, Oryza sativa
  Clone ID: PAT_MRT4530_91268C.1
attcaagctgatgtggccatagctactacggatacaaccgttactcacatcatggatgaacaagatgatcaagatcaagtcctccaagtgctgtaattcgattcggctaacactgctgaattcaatcggacgccgaatctgcatacaacctccgtttttgacccgtgagtacttgatggaaagatctcggagtcctctttccaacggatctggcctcatatccaaattccatcccagtcatccgcaaatgaagaaataaggtgctgcgtcaccagtcatgggcctttgggcttgtaactttgtttgggaccccggcccatgtggggcccatgtggggtgcaccccaaccaggtggagcacgaccctaggcactataaaattttgagtggtaaaattatcctttcgaaaataggagtttcattacgatgctttttctatctgtag

SEQ ID NO: 92824 - DNA, 301 bp, Oryza sativa
  unsure (1)..(301): unsure at all n locations
  Clone ID: PAT_MRT4530_91269C.1
gacgcgcatgcaccgtantaagctggatcctcttaccggccaccctttcttcttttttttaccccnttttatccattcatactatccatattacaccttcaaccggcgcattttattcttacacgagaggggcactcnnnnnnatcaataaatgaactccctcattactcatcattgattcntcntgctactttatctcccggctatgcatttcccttctatacttttattttgttttgctctgtagtttttttatnnannnatagcacatccaccacaacacccccgacattaccactta

SEQ ID NO: 92825 - DNA, 2347 bp, Oryza sativa
  Clone ID: PAT_MRT4530_9126C.1
ctaggcagagcggcggtgaccgctagatccggcccgctccggctggatctggtgggacggcggctgacgccggcgagggtggcggtggctgaagacggcggggatggcgacgtcgatgctaagggcgcgcgacgctgggctgcggtgctctgaaggcggcggggagggcgacggcgatgctaagggcgcgcgacgctgggcggcggtggctgaaggcggcggggatggcgatggcgtcggggacagagttggccgatggcgcgaaggcggcggtggtgctcccgtggcggcgacagcgcgaaacctggcggcgacggcggcggtgccccccagatccgcccctctcagccagatctggagggtggaggcagttggcaacggcggcgacagtgtggcgacgacggcggcggcagttggcgacgacgacgatgacggccggcggcagttggcgacggtctcggccggatctggatgccggcggcagttggcgacgacggcggctgtgtggtgatggccgcggcggcggtagtgggtcggcggcaacatggtggctgccgtgtcaactggcaatggcggtggaagccatggcgttgggctgctagctgcttggtggtggagggcgacggcacagtggcggttttgtggaggcggtggttggcgtcggtggcagcggcgacggcgactgtgactctggaggcggtggcgacgtcggcggcggggaaggagtcgggtgcgaggtggggatgatgacggcgaggtggctgggtgttcggcagcagcggctgtggtggtggtgactgtgttcgcggtcaccggaggcattgctggcctcgggttgactaaccgagggcattggagacggctgtagctggcctggcgcggcatcgttcggtgaaggggtcggagaccggcttggcgcagagaagtgcagccggatggcagcggaggccggcttggcacgagaggcgcgggcagcggagagggaggccggcttggcgcgagaggcgcggcagatggaggaaggccggattggcggcgtgctagggtttggggaggggaggcgcggcgcgtgcgcgcggttcgcggaggacgcgcttgacccggtcgcggccgaggtggcgcggacgtggcgcctacgtggctgccacgcgggccggtgggaggtagatgacgacgtcggctggaacggacggcggacggcggtggcgagcggcggagcgaaccacggcgatacaggcgaaagcgagcacaccgggaggttgcacaggacgaggggagacgagccaacggctcggattcgccgggggatgctcgacggtggcggattgcggcggcggcaaccggcggcgagggaagggggaaacggcaacggcgcgatgggagaccgattcgggcgtgctagagcatctacgcgactccgggaatccgttgctagcgtcggattgggcggagctacgccgagcgaggccagcgacgagcgggcgctacggagcacgggcggcgacggcggcgagcacacagcgagcggcagcaacggtcggggcggcgccagcttgctacggggaggctactcgagctactacccgagtttaaggggaggagatggaacgagaagggagaacggagggaggcactaccgtgcggggcgcgcaccggctcctccggcacacgcgacggcggcggtgacggcgggggcgggacagaggggacggcaatggcgcgggcgaaaaacggggaagattgggagggaaaaagggaagggagggcgcctgggtttatatgggcgacaaagtcggtttgggagaggggaaccgacattggacggtcaagccagtgatcgggcgctcggcgctagtggccaaatcgtccacagggaggaggggaatgacgccggcgaaggaagagaaaaagggaaaaggaaggaagaaaggaaggagggaacggtggcgacgcggcaaagggaggaggagctctgcctccatcccttggaggctagcgcgcggagtggcgagggccgagtcaatgatgacggcgatgacggcgggggcggtttggagcggagcgacgacacgggcggcaggcgcgggctcaggcgcggcaggcgctgacggcggcggcgtctggccggtcggccaccatggcgcgcgcgcgcgggaagcaacgggcggcgccgcgatttcgcgggcggggagctcgcggggatggaggcggggagagggagagcgagggggaggcgctcggcgcggctcacgggcagagcggggagagagggagagagagagagagagagagatgaagagagatgggccgagaggaattcggcccatcgaacctgagggaggcaaaa

SEQ ID NO: 92826 - DNA, 387 bp, Oryza sativa
  Clone ID: PAT_MRT4530_91270C.1
ttctcttccaaccaaaagccaagccatatacagagagagaagaggcacaggccaaatcttgatcttcttcttgttcctcctccttcatctcctcttctcctttgcttcacctcatcggcctaaatttatcacccacaggcgacttggccagaggaggccgcggcggatacactgattgataggtacacagatatagacagcgatcgatactagcttcaaaacgagggatattctgatgctcttgcatctttagagagagagagagagagagccagacagagaggagatcccgtccggcgcgatgaaaaggctgcccgctgagtcatggccgtccgacgaagagcttacactccgcaggcaggcagaggctctgtgcgctcctcggcc

SEQ ID NO: 92827 - DNA, 354 bp, Oryza sativa
  Clone ID: PAT_MRT4530_91271C.1
atgaagctgtcatcattgtcccccacgtcgagctccaccagatccaacgagcctgaagcgtgctgccactacccaaagctcaaccgtgggaagcgagggacggggagaggcgatggaggtcaccattcctgtgccgccgacggtggatccgtcactcctgaggccattggaggtggatcgactgctctcgaggccagcgacattgtccagtcagctcgcggcagcggctcttccctgtcaaagagccgtagccataaacgttattgccgtcacagtcctcacacaagtgcaatggctcgccgccgccacccgtcgccggccacaaagccattgccggcgacctgctcgccgtaa

SEQ ID NO: 92828 - DNA, 1989 bp, Oryza sativa
  Clone ID: PAT_MRT4530_91272C.1
gcgcgcaatccaagaacacgagagagaaggagtcaagaacgagagagagagagagaggggaggggaatggaggaattaatggcgccgaagaagagggagctgctgctgctggagcgcagggggtcggagaagcgcctgcgggtgacggtcccagtcgccgccgccgccgccgtggcggccgtcggtgtggggacggcggcgctggcgtcgccggcgacgaggatgctgcgcaagatcgtgctcgtgctgctcttcctgctgcgaatgagcgagagggtcacggtcgtggagagcatctctcagattggccgtatggttcagaggcttcacaatgctcagggtgttattatcaaaaaattggaaaatatacaggaaaacatgctggagcggatggaaaacatgcaggagcggatggaggatatcagtcatgaagtgaaacaattgaagcatctgcattccaatcgtcatgctgatcaacacccaggactggagccaaacacaaatgttcaactgcgtttcctggataatctgaagactcctgtttacaccgaaaagaacatcacagctgaaagcaacgaggctatcagaataggtatctttgaaggtgacaacatgattacagatggcccactttccaaggtgaaagtcgaaatcgtagttctccgcggtgatttctccaacgatggtcgggtgagctggactgaagagcagttcaacaatcacattgtgcaaggtcggaatgggcaaggattcgtgttgggcggtgattgtggtgtttggttgaaaaagggggaaaaccgcttgggcaagatccgtttcaaggaaggatcatccaggacccgcagtcggatgttcattttgggagcaagagtatgcaagagcgaaaacaccggtgtccgagttcaggaagctgtcatgaagccagttaccgtgttggatcgcagaaatgaagcaaatgagaagaggcatcctccaatgctggacgatgaagtgtttcgcttggaggaaatctgcaaagatgggacttaccacaagaggcttcagaaggctaaaatcttcacagtgcatgacttcttgaaggctttgaacacgaacgccaagaagctccgtgaagaagttctccagatgaagaagaagacgaactcatgggataaaatggttgggcatgccagggagtgctgtctcagagaccagcatgagctgaaagcgtatcaaagtgaagaagaaaatgcgacacttttcttcaacggtgtgcatcaaattgttggagcaaaatttggtggtgattatgtcatatatgaaaattttgatccagcccaaaagacaaaagtgaataaactgaaagaccgtgcacatgctaaattggatgacattccatccgattttgtaatgaaaaacaacattcctgaaccgatcagtccaacttcagcagctgctgcaggcccatcaaatcgttctgatcatcagatgccaaatcaaggaactataggagctgaaaacttgtgcaatggtgtggcgttttactcgaatgcaatctgcgactgcagcacctctaatcctaatgatgtgagcacacatgattatccagatcaagcaccaacgccatttcctgattggcaacaagatctccaaaggctgatgagctcttctgatacaatcgactggccgagctttgagaggattgtattgggtggcacctcagaggaatcgagttctgctcaacaccaagttcatcaactccatgaaagcatgcctcctgctacatcgccatgggtggcggcgccgcaatcgcgtgctcaacacggggaggagcctagcagatcattagtgatctacggtgtgtttgtaatgtgtaactgtaagtctgtaacaatgcaggtgggagctcatttgtatatggaaacatggtctagattctttacatttattggatcttcacgctacaatgcaacatcaagggtccatgtattctgggttataatactttaa

SEQ ID NO: 92829 - DNA, 579 bp, Oryza sativa
  Clone ID: PAT_MRT4530_91273C.1
atggagacatgtgtaaatttacccttcctccgttttccttatcctagccccttcttacactacttcggttgtggtctcaacctccacctaggttcggacgccacgctgaaggctcgggagtttccttacaagtgtcagagttacatctacaagacacggtcgccccaggtgaaaaggcgtggtctggggaagaaagaaagaggaagcgagggaaatggaaggaatccagaggttgaaggaagaaagagaatatatgctgacaggtgggcctttagcttagccggcggcggcgagctgtccgtcgtcttccccgtcgccggcggcggggcgccaccaccggccgcctcctcctaccactctttccgctttgcccccgccgcctacaccggcccgccgctgtcctccagccccgtggcttcggcggcggcgccgccgcctcaccgcccgcccgatccgccgcccaccgttgggctgccgcctcccatggccatccctctaaagctggcgaactcccctctctcccccctccccctcgccccaccccaccccaccccaccccaccccaccccgggaccttaa

SEQ ID NO: 92830 - DNA, 537 bp, Oryza sativa
  Clone ID: PAT_MRT4530_91274C.1
atgtctgcttcttctcctgttgcctacgacgccaatgtcctcctggccgcggtcaccgcgctctcggcggccatcgcgttcgtcgccgcgctccacctctacgcccggtgtctcctgcggcggcgcgtcgccggcgccggcgccggcgccgccggcaaccctcacgcgctgcgccgcccggtgaccccgggcggcaactacgagctcgaggtgatcagcgtcgcggcgtgcgcgctggagggcggcggcctggacgccaagcagctgggcgcgctgccggtgttcacgtgggggtcttcttctccggcgacggcggcggcggacgccgccgtgcagtgcgcggtgtgcctcggggagatggaggacggcgagctggggaggctgctcccggcgtgccgccacgtgttccacgccgagtgcatcgacacgtggctcgccgtgagctcgacgtgcccggtgtgcagggcggcggtgggggcggcggaggatgatgagccagcggcggctccggtcgctggcgtgtcgccggcgagctag

SEQ ID NO: 92831 - DNA, 1612 bp, Oryza sativa
  unsure (1)..(1612): unsure at all n locations
  Clone ID: PAT_MRT4530_91275C.1
gaaaaacattcttcttgaatctccgtcgcatcacatcctgccacagatgttgaattcacctttactgcagcaaactgctgatcttgttaaggactatctaaaatttatggatgatcatttgaaagaatctgctgatcttacctgtcttgcatatagaccccgacttactcaaaggtaattgaatttgttcagttcaaagaacgcctgcaacactccatgcagtatctttctgtaagatctgattccataatattgagtctgaagcagaaggctgagtctcttgatgaagtggagtctattcttgaaaatgtgaaccatggggcaaggttggttgaactatcaaacgaagacaacgtgaaacgctttacttttaacgaagatcttcaggcacgcccttggtggacaccaacaacaagtgttaattttctgtcagaaccatttgatgaaggttctacacctgcatgctttagagccaaagcgtgtgaacacaaatctactgagaaggatgactcaaagataaaatatgctgagagaaaagctcttcttcctcgtcttgtttatctttcgatgcatggttgtgcatcttccctcagggagactcaactcaatggatctggtttggatactgatgccacagagatgaaaccattacttttgaaatatgctaggagtattggatattccattgatgatgcccttagtgtgattctgggtatgtcatctggcaagaagtctgtcaaggattttacccctgatatagtcagttggatgagctttgctgtatttatcaatgcatggaacttgtggtctaatgaatcggtagtccccagagctgatgagagcagcccaagttcctggcaaattgtggatagcttggtaaaaatttgcgtagaggagcagctgattgatgccaaccgaatcctaacttctcctggcaataacataccagtcctagtgcagatgattacagaacccatttcttggcatctcgtggttattcagtcttgtgtgaggtcgatggctccacagggaaagaagaaaaagaaggttggtccatcggtgcgaccaaagggacctgcgggggcgggcgattcacatgggccgggcacgggcctcctcgccccacgccaccaccggtcaaatcctggttatctgacccgatgagccggaggagcaagctttggatattttgttgtcatatttgcaaggaggtaatgaggatgggccaggacagatatccatgtatcttggaggagaattcagccagacatagacccctgaactcggcgaacggattgctccaatcatttggaaacctggagttctgctggtgtggtcagaagaatcgttggagccacgagaaggagctgttagttgagttaaagaaaatatgcgactccacaactaaagctgcttgcttcagtatcggcttctctatcatcgcccttaccttgaaattgaaaaattttgctcgtgaactctttgctccccttgttgtgacatatgttgtgagtgtaactgtttggctttgcnccgtccnttctttactttgtttntatgagattttgctggagtgatccctgcttatccccaaaaaaaaaaaaaaaaaaaa

SEQ ID NO: 92832 - DNA, 236 bp, Oryza sativa
  Clone ID: PAT_MRT4530_91276C.1
tcgttcaagcttatgcaaaccaacgcgggcaatctgtggtgacggtgaccgtgctcgatcatcgcggggaaggataagcacggaggggattctcgcattcatgcgagaggaggtgcctggcgaaatattacacacctggctaatcccttgttaaactgcgcaacctatctatggaatggccttcaccacactttcagaggatatgtgagtggatggattgcctgggagtgtagcat

SEQ ID NO: 92833 - DNA, 240 bp, Oryza sativa
  unsure (1)..(240): unsure at all n locations
  Clone ID: PAT_MRT4530_91277C.1
aaagaataaatttaacacnnngcttgatttatttacacattcaaaattacataaatcaanaaattataactttacataacttcaatttatacaaactaccatctataaacattatatacactaacactcaacatctgtacctaaaaaaaattaatatctctcccccaataccatttattttttacacaactcaacatttaaatatttattccaaaattacacaacatcttactttttaat

SEQ ID NO: 92834 - DNA, 1231 bp, Oryza sativa
  Clone ID: PAT_MRT4530_91278C.1
tttttttttttttttttttttttttattgggaatcagagtaaaattgctaccattacagagagcatctatttctcaatagtacaacacgctagttcaggacgaaatacaacatgaatatttatgcctcccaatacagattatatggaaccgaatgacagccaaagaccaattgttaaattatcctgaatatacatacaacaacagagctagaccacgaaccgaaactatcctcacggggagtaatttacatctgagaagcagccttggctcgacgcttccaagcagcatcagttcctggttgacaaacatgggacctagaggtggtagcaagttacttccttcactgctcaccatgaggtgtaggtatatatattagctaacgactgcagcaccaaataaaatccacctagcaacagttgcatgaaaaggtcctatcttcagtttgagacatccccattatggtactgaggttgcatataacccattccttgattgtatgctgcttgttggcccatcccttgggcacttgaactgcttcctccatgagaaccaagtacatcctttttcacagagccatcaccagcctttgcagttaatttactatcaccctccatctctctgtacttctgcaggtagaccttgaggggctcgatgtagtcctcgaagcccagcgtggccatcgcccacagcaagtcgtcgccgttgatggtcttgcgcttctccctctggcatttatcgctcgcctcgctggtgatgaaggagatgaactcggagacgcactcctgcacggtctccttggcgtccttggcgatcttcccgttggccgggatggccttcttcatgatgcggctgatgttggcgatggggaggaacctgtcctgccggacgcgtgggccacccccacccccacctccccctcctccccctccccccctcgggctcccgctctcgtggctcccccctcctccccccgggctccccggcccatccgccatcccacctcccccctccttatatagaagcgcgggcgcgcgcggagagggcgcgacgtggagaggagagagaggggggttgggcgcgaggtggtgaagcgaggaggagagagagagagagagagagagagagagggggggggagaggagagagagaggaagcgggggtgggaagcggagcggaggtgaggcggagaggcgagagggggagatcggacgctggagaagagaagcggcc

SEQ ID NO: 92835 - DNA, 1834 bp, Oryza sativa
  Clone ID: PAT_MRT4530_91279C.1
gtggtttctttcggttggttgttctctttctttcttggagttccagggtagcccctcagcaactgcgccggcccgctgctggccacaacgacaccatagcccatatgcacgcacaggcgcccacacatccagtgcggcagtgctcagcttaaatggaactagtggcatcttgtgcagttttattgtcgacagagattctaacaagagcaacaacaacatctggataacaacagcatacgagtacaaagcaaataaaatggctggacgtccggaccaaacagctgcttagtgcttgctagctagcacaatcagactaccatgcatagtgcacaatgtgttcctcaacaaactgaaaacaacaacggtggttatcacagtgctacaatgatgatgatgatgatacagtgctacaagctccatcatatgcgtgataaccactagacgagatgagatatggcctcttacttctttcccttttggatgactttgactgcattgttcacaccggccatcttctcatctgtgatcggccctccttctggaagatcgaacttcctgcgggtcaacgacctctgcttccctggtggctgagggtccacaatctccagcataccttcaagttcatcaagcatagacttctttgctgtcctcaccatgtagtcaggaccctcaagcgcatctacagtgagcagcagcacgatgattttctcagtgaacctttggcgctcttcatggtcatgtgccatgcgatgcctgtaagagatgttatagaagagggacctgatctccttgagcttggccttagccacagccagatcacgcaggcagcgaagcacctgtgaacggtgtgccaggtgagccctgtagttcaactggatcagcaatgccgcatcctgtggggacagttccttcttctttgccttgccattgcccaatgcaaaagcctttctaatggcgacgcatccagcggtgttgtcctcctcaggtgggatctcctcgatcttgacggagaaggggcatttcttctgctccttgttgaccaccacggtgttgttgtccttcttctttttcttcttgtcgtccttggccttggttttgagcttgctgtgatcctgcagggccttgtgatggagttggtcctcgatctcctcgtcgtcgtcgtcgtcggtggcagagaagtcctcctcccaggtgtaggagtgtgaccatggctcgaggcaacccttgcccttgaggtgggtggcccacttgagcttggtggcagcagcggaggcggtcttggccttggcctcccacttccacttgcggtcgaatccatcgtcgtagggggagtcgagctcagcctcccacttgagcaccctctcgccggcgcgaggcttgtcctcggtggtccacttgaccttgcggccggtggactcggtgacataggtgcacttcctgctggtgggcctggggtgtggggcgcgggcggcgagggcgagctcgagttgggagacgcggtcggtgagggtgtggaggaggaaggggtcgaggagggagctagtgggcggcgtggggaggaaggggtggagatggaaagggtcagcagcgaagggggagtcgagggcgaagaatgggcaggtggaggaagcggcgggtggggagaggaaggggcaggaggaggaggacggcggtgggaaggggaagaaggggtcgtcgaggaggtgggcgtagcggtggtgagaactcatggtggccggcggcggtggagctctctgctcagctgccgctggagtgggagtgtgaaggagacttggtgatctgctgatctgatctgatcggatctcccggccgg

SEQ ID NO: 92836 - DNA, 288 bp, Oryza sativa
  Clone ID: PAT_MRT4530_9127C.1
atggcgccgcccaacgggttggtcccgtcgtcgtcgggtggcgcggcgacggctgaggcatcggcatcgaaggcgtcgacggcgagcgcggcgtcggataagggggagtcgggttgcggaggcgggggtgtcgggaagattgggggtttcggcggcggatggggtggcgtcggatatcgggttcccggcggcaaaggggtcagaggcagcagcgaatcccttgtcttcctctgctggtgcttcggcgccgagtggctcctctgccggcatcaactggctgcgtcctag

SEQ ID NO: 92837 - DNA, 115 bp, Oryza sativa
  Clone ID: PAT_MRT4530_91280C.1
atggcctattcaccaattcagagggaagatcttgggaagcagaaagatggaagagttaccacgcgcctcacgcaggcgtggtgcggccttgccaggaacaacgaggccgtcgcgg

SEQ ID NO: 92838 - DNA, 479 bp, Oryza sativa
  unsure (1)..(479): unsure at all n locations
  Clone ID: PAT_MRT4530_91281C.1
cttctccctctccatcgccgtcgccgtccaagaagaggggaaaaggagatggatccggtcgcgggaagcaggtacaggtttggtccgcacgagatagccgagcggcaggtgttccgcacctcgcccctctccttcgccatcgtcaacctccgacccacccgccctggtcatatcctttatttctgccaattatgtgtatgcacagctgctctactcctctctctaatttagtgccttctagtatctacttcacattgcggtattatctgctctcaacttctcatactttattattattattattattattattattattattattattattattattattattattattattattattattnattatttgcaaaaaaaaaaacttctcttgctattcatcaatgaaatgtgcctctgtttcaaaaagaaaaaaaaaggaaagaaagaaagactctgcactgaactacatatgtaatgta

SEQ ID NO: 92839 - DNA, 507 bp, Oryza sativa
  unsure (1)..(507): unsure at all n locations
  Clone ID: PAT_MRT4530_91282C.1
nnnnnnnnnnnnnnnnnnnnnnnnnnnnnnnnnnnnnnnnnnnnnnnnnnnnnnnnnnnnnnnnnnnnnnnnnnnnnnnnnnnnnnnnnnnnnnnnnnnnnnnnnnnnnnnnnnnnnnnnnnnnnnnnnnnnnnnnnnnnnnnnnnnnnnnnnnnnannngnnnnnnaagagctcacacattggagtgattcattcagtcatcgtgtggaaaaaggaagcataatattacatctcccatcttacatgtcctcaccaaaagagagaaaagaagaagaagaagaagaagaagaagaagaagaggaagaagaagaagaagaagagagagaacaagcgagacatcggttgacgcgacgcgtgccgcgcttaaccacgaaaattaaccggccatacacatgacgatttagccggaagtactaagcacggcgcccctgtgtgtgcgatcgatgctgcatcaggcgccgatcttgtagctgcccatgtcctccttgatcatctccagctcctag

SEQ ID NO: 92840 - DNA, 243 bp, Oryza sativa
  Clone ID: PAT_MRT4530_91283C.1
ctcactcgttcacttgcggccagtaagaggactgaaatttactacattattagcagctcgtgtacatgaatataatggtgccgccgactgtcacgtgcctccgccgtcgcaggggtgcagctgcacacaaagactataaggggtcaagtatggcatatacggtgcagacattgtaagcgcagaaaacgcgctggcatcacaacagtcagtcaccagtggatcacgtgtgcttaggaaacgctg

SEQ ID NO: 92841 - DNA, 2125 bp, Oryza sativa
  Clone ID: PAT_MRT4530_91284C.1
ttttttttttttttttttaaaaaccaaccaacgaatagaacttttattgtcgtgaacttgaaacatcaccaatgcttatgtacacggattaaaagaataagattacaaaccgtaatgctggtgaccacagtgcttccatcagggcagcttgagccaaaacaaagcagctttactttcactgcttccaaccgggcagcttgaaaccaaaacaaagcagctttacttcactatacaggtttcattctattgacaaaacgatttcaacttcgcttgtacagtaaaaaaggcaagtttccaacatacaggctgaaattgcccatgacctaaaatcatttcccatcatcatcctccaagtcactaaaagacacatcttcctcatcacctatgggaatggttgtgtgcccggagagctcggcctcctcgtcgaaccaatcatctatgtcatcatcaaagctttcttgcaaaacatttggggtcttgctaccatccttggtaagctgctctttgatgacagatttgtcgactactgcaacttcagttacttggataggatgcttttcggtctcaaaatctgttatagggatgacggaagcggtctgttgtagcatagatgggaatacctctggaatatctttggaggtatcctcttctgaatgcatgccgaaatcatctttacgatgaaatagttgctccgtttcaaactttgactggtgctgcaaacattgcataagcatcgctctagcttcaacaatctgtggtgttgacagaagctcagcatcatgcttgttcagtctaggatgtaggagaacaaaataaattttccaaaaacattcttcgctcatatgtattgggcatagttcaatccgcaaagcagctaatctaggagcaagctgttcaatagccaaggcatgctcttgctgagcattcgacatgtcaaaatcccagagatcaatctggagttctggaccacaaaaatttggcgaagacttcttggtatcaaatactggtactaagaatgcagtctcacccaaatctcgtcttgtttccactgttatccacggcataagagtcataccagagaaatttatggcactaaaccgtagcttttcatggtcaaacaaatacatatgtctaaatgagaatggcccatcagagtcatcatcatcagggagcagtgggaagtcaagccaggtctcggggtgcctagcgatgtttgtggcgaatgcaagcacctcctcggtgattcctatcacatcccactcctcttcgacctcctcctcctcctcctcatgtcttacagtctccaactccaactcgtggtcatccagctctttatgcattacctcgccgccatccgcctcatgttttagcctctcctcccactcatcatgcctcccctcatcgtcgtcaacctcatgcctcgcttcatcgtcgtccaccctatgccgtacactctcttcccaaccatgcctcacctcgtaatcatctgcctcatgtcttaccctgtccgtcgccacctcctccgctcgaaacctcaactcttccctctgctcttccaccccgtagcccctcaccgcatccaccaattcctcttcttcctcgtcttcatcagcgaagaaattggaggcaatcctagagaatccggacatggccttgtgattcgagatccgcgagatcccgctcttgaacctcccgccgatctcggcaaaatcgctgcggatcccggagatctcaggcggcgtctgcgcggttccacctccgtatctggcctccgccgatggcggggagggcgagggcgaggtctccccgggcgggggcgcgaggaaattcgcgaccccccagaactgccgggttagggttttggacagctcggtgaggtcctccttgacgccctccgccgcggccgaatgcggagggtggggatgcacggattgcggcggatgcggattgcgcgcggagggagacggggcggcggcggcggcgtaggagtcggggtcgtcgtcggcgcctgggtcatcttcggggatgttgagggaggtggcgagggagcgggcgagccatgacatctccggcgatcgccggcagcggcggggaggggagggggaaggggtggggagtgggtcgc

SEQ ID NO: 92842 - DNA, 1633 bp, Oryza sativa
  Clone ID: PAT_MRT4530_91285C.1
tttctccgtccgccgcctccgccgtcgcgccgggctccctcatcacggcgagcagcggtgaccggcgtcctgctgcttcaggccgccgcgcacacccgcctctgactccttgcgccgcccaagccaatctccctgtccccctcggcctcgcctcccggagaggtctccttcgcgatcgagttcgcctgccgcctgcgcggctgcgccgatcccgagcaccggtgccggcgccctgctgcttccgcctccgaaatttgaggcttcagatgaatccccaggcccgaagttaggtccgcccctggttagaagatggctgaagcatgtacggtttcacaagataatggtaggcgctgcctccccgcatggatgctgaagccatgctcaaacgatgaagtgtcaaagactcgatatcggagtgagccggtgttggaatccaataaacaaccagctgatttggatcagatcaagccagccaaaaggaaaaggggagagcaggttaaaattgtggatgaagaggatgcggatgaactgggagctttgcagccgtgtcagggttggaaaaaggtgaggagaaagcgcttggatgctgtcaaagatgataataatggagaaaatgcaaaaataactaataagaatgcaaggaaagtaagcaggagatctgctccaaagaacagcggtaaacggaaactggacaatgttgagccagaagtatcatcgtcagaatcaattgatgatgatatagagcttactgtggaagatcttttgagcatagctgaagagtatgtaaaagctgatagattgaagcagcatgaagtgaaaacaacaaagacagccagatacaatgagaatcgttgcagtccttcaatttccaccgaggcagatataggaggatcaataataaatgctcgatcaatgatgggattgccagacacaactaggaatgctagatcaatgaagggattgccagacacaacgatgaatgctcaatcaatgaagggattgccagacacagctgaaacaaatacagctccaagtgagcctagcagatatgagatcaacaaacaacaagtacagcaatgtacgccaagtttcaccgcaacatgtgatgttgctcaggatatgttaaacatatttttcggtcctctgttgagtaaatgttcagggtatgaaaagaaaccagaggttgtccaggatgcaaatcatgcaacagagaagaaagacctgagctgtgatgttcaaaggcagggggaacatgcaacagagaagaaacacctgagctgtgatgttcaaaggcagtaggagcatgcaacagagaagaaagacctgagctgtgatgttcaaagacagggggaacttgtgacgaaaaagaagagcagcttgaaagataaggtgggcttgtttttttgagtagagcaaatcgagtgtttaggcagtagagtacaaatccatttactaggattatgtttatagtggccttttctttttcttttggtgagttagctggtttcaggagtgtacatcacctgtaaatatatctatcccacagcgttttagcttccatgtaactatatgctttggcctcacatataatgaggtggtttattgatgatgtaataaggccgccgcttctgtc

SEQ ID NO: 92843 - DNA, 418 bp, Oryza sativa
  Clone ID: PAT_MRT4530_91286C.1
tccccaaaccccgtttcgtctctccctctccctctcccgccgtcgccgccacgcgccgccgcctccgcttccccctcgcgccgccgcggccgcgcccaccaccgctgcggtggtcgcccccttctccgtttcgtctctccctcaccctctcccgcagtcgccgatcttgagccgtcttttgcactgaacctgtttctgggtgggtattcaattagtgacccaggcaaaggaatgcttctgtttctgattggtgatgatccacagaagaggccgtacagcaaggcatctcaagctctgttttctgatattgagcatggctgcttgcctcaagtcgtcttgggcgacgtgccttgcaaatttagaaacgggactattgtgtgtgagactttctcttctcttctctcgtgctagatctacc

SEQ ID NO: 92844 - DNA, 223 bp, Oryza sativa
  Clone ID: PAT_MRT4530_91287C.1
aaattcgatgataagctgtcaaacatgagaattggtcgacggcccgggcggccgcaaggggttcgcgttggacgcttcattaatgcaggtgtcacgacagacctgtcattcgtggccgaccaagctcaaaaagatcaattcatatttgcggccggcctcgatggtaagctgcttcctctggatgacctcatgtattcaccttacggctctgcgggcactaatg

SEQ ID NO: 92845 - DNA, 692 bp, Oryza sativa
  unsure (1)..(692): unsure at all n locations
  Clone ID: PAT_MRT4530_91288C.1
gcacgagggctctctccacctctgctgctgctgccgccgcggcgcgggcgctcgcggcgagggtgacgacgacgacgacgaggggttacgcggcgtcggcggcgtcgtcggcgatgaggcgtgcggcggcggcggtggaagggaagggcgcggcggggatgacgcatgcgaaggacgggtcgtcgtcgccggcggngagggaggtgtcgtgggtgcccgaccccgtgacgggccacttccggtccttcaactttctcggtgacgccgtactcgttctcctttgtgtcgttcactttatctcgtatttcgttcgttcgtgttgtgcgctaccttattctctttcgtctcttctactactttattcatttatttttttttgtttttttttacttcttattttcttttttttgttttctttttctcgccctactttttttttttttatattttcttttttctccattttttttttatttttttttgttagtttctcttgttttctgtttgtttacttttcttctcttttttctttttattttgtcttcttattttctctctttcttctctttctttgctctctctttctctttttatcttcgccttctttctcctttttttttcttttttcttttttactttatttactgcctctcctatctttttattgtctttattcttttattctccttttg

SEQ ID NO: 92846 - DNA, 219 bp, Oryza sativa
  Clone ID: PAT_MRT4530_91289C.1
ggcacgagcttaagtcagaaccacgctattgtttgcttgtaatgtacttgtcttgtgatgattgtttcaacggaatgaattccctagatttagaccacagcatgtcaccacttcaggagttaaaacaagtgcttaatatatactttcacaacgtgcaaccctattaacaaatggtctagatcagagtattgctattgatcactgcctctcgacgtctgt

SEQ ID NO: 92847 - DNA, 374 bp, Oryza sativa
  Clone ID: PAT_MRT4530_9128C.1
ggggcccaaaagggagctcccaagccctgggctcaataaaaaccttggccatttggtggaaccaacatatttgcccccccaggcccaaaattaacccggggtataaacattcgctgaaacacaaaaaagtttttagtttatttcccatcaggatcctcaggggggggaacgggctttaaccttgacagggtttcaggaaagccgggaaaagctttccaaaaaacccggtgggggaattttttaatttaccaaaatgattggtttgctgggggggcccgttcgggccaacaagccgggacccgggatacccgggggattcccccccaaaatttgccataaaaggtttttctttttttttaccatttaacccccct

SEQ ID NO: 92848 - DNA, 250 bp, Oryza sativa
  Clone ID: PAT_MRT4530_91290C.1
caatgcgtgcggtcatgctcataattgactcgaccactggaggcggggaggctctatctcgaaggaaggtcagacccgaaagcacatctcttcttgctgtcacactaggggtgacaaccaatgatcaagttcttgaaggacgatggatgccaacactcccaagaacttctatgctagctacaaagagatcgctacagaagtctcatgatacctgaagaacgtatgtttcagtcctgagaagacaacatga

SEQ ID NO: 92849 - DNA, 243 bp, Oryza sativa
  Clone ID: PAT_MRT4530_91291C.1
atgacgctataccggatgtgccccttcgggggtcagaagttcagggcaaaaggtttcccccgaacccccttccaaaagagtttgcctttgtggcagacgaccatccttcgtggttgggaacgagcctatgtggttcgggatgccgattggcaccaagagttagaagaaggatacctcaacccttctgccgaggcctactttcaggagcaggccaagtacgatttctcatggtttcaagcctag

SEQ ID NO: 92850 - DNA, 978 bp, Oryza sativa
  unsure (1)..(978): unsure at all n locations
  Clone ID: PAT_MRT4530_91292C.1
atgtactctatctacttgcttgttaaccaattaccagtgcaaaggccaaaggaacaagtcgcagatggtgaagctctgctggagctcgtcaattccctggccatcaccgccaaatccaagaagaaagatggacctaccccttcagagttcgtcacatcactgctgacgaagtttggtgtcagagcttctctcttggatgcttccatcgagtctttctcttgttctgatcttggcgccatggcgtctccattgttcatgacagcaactgggtgccaaacaatgaatggtgctttgaatcttgccatcgaggaacggaggaagcgtgtcgctagaagactatttgaccggtttcctagcaaacctgcagggctttatgagaccacaccagatctagatgaaaggaatgatactgacaagaacatggctgtcatgttcaaactcttgaggaagaacaaatgtgtgaagctggaaaatctcatcctaaaccggcaatctttcgcacagactgtcgagaacatatttgctctctcgtttcttgtcaaggatggaagagtggagatagatgttgatgataagggaaaccattttgtcgtgccacggaatgctccggcagctgaactgataacctcaagggaagntgatcaacangccaatatgtattccgatttgataccaaggattggaagatggataaatcttgagcttgatctattatttctcccatctataatggaaggcgttgtggagcctggagatgagctaatgcctcatagacaaaacaacattggagaacactacaataatgcaaaatcatattcagcttcagaaccacagagaaaacgagatgaatttgctcagggagagggaatggatgagacactcatcaagccttgcgctgaagatgtcatcctgaagaggaagaggagatcagaagcagagagcttgaaacattggttttcttcatgcaaatggcaatga

SEQ ID NO: 92851 - DNA, 5982 bp, Oryza sativa
  Clone ID: PAT_MRT4530_91293C.1
atggaagggacttctactggcgaatgtgttctagcgaactctaagagaaagagaacattgctagatataccgagaaatgctgctgcagccaatagggaaagacgttgtttgaagagatcaggagatcgggcaaactgtttggtgccagatattcgtagcggtcccaagcctactgctgatgacgtattacctttgcctaaggattatattgcatctttaaaagcattgtacccggaacggtcttactatggtggtccatcccatgaatgtccatattgtggtgccatcttttggtaccaggagagggtaaagaaagggagtgtgctctcacagcggaaaatcatttacaatctgtgttgtagaagcggtaagataaacctgcccgagctgaaagatccacctacttacctagcaaagcttctaaaatacgatggcgatgcgcgatccaaaagattcttgcgtcaaatccgatcatacaactccctttttgcatttacttccttaggagcaagcgttgataagtcgataaacaatggatcagcaccatgtgtttttaaaatcaatggagtggttcaccatcggattggtggtttgctgccacaacgaggtgctccaccaaaatttgctcagctatacatttacgacactgaaaatgagataaaaaacagaatggatatctttgagaaagataaacccagtgatgaaccagatccaaaaattgttgctggcctgacctctatgcttgatgagcataatgaattggtgaaagcattccgctttgctagggatcgtttgcaggcccatggcgatcacaaggttgctcttagattacttgggtgcgattctagggatgaaattcagtataatctcccaacaagtggtgagattgctggcattgtgtaccctttgcttttcccttatggagagcatggatttcatttaggcataaaatatactgacttccctagcatcgtcggtaactctcgacgctatgtgacaatgctcgaatactatcgataccagctacattatcgactaaataaaccaaatccatttacatgttgtggccgtcttagcgattctttgtgtgtggactcatattcgactgttgaggcatcaagacttaagtacatagctgacaatcaacctgatcttcgtactgaatctgtccaagggatatcagatgcgattgaccatgggcttgcatctggggattctgttggccaaaaatatgtgcttcctaccagtttcactggaggaaggcgctacatggtgcagaattaccaagatgcaatggccatctgtcacattaaagaagggaaaacgttcggtccagtccttgctgttctctacacagtagaattccagaagcgtgggcttccccatatccattgccttatctggcttgctgcagcaaatgctgaatttagcgtgcccattattgatggcttcatttctgccgaaattcccgatgtactcaccgatcctttaggttatgctttggttgacgaatctatgatacatggcccttgcggcaaacaaaacaaatcatgcccatgtatgaaaaaagatgaatgctccaagcatttccctaagtgctttcaggatgagaccactatggatgagtttggttttactgtttatagacgcaaaaacaatggtcgatatgtcattaagaatggggttaagcttgacaaccagtgggtagtgccatgcaacatggatcttttgaaaaaataccaggcgcatataaatgtagaatggtgcaataaatctaacatgattaaatacctctttaagtacgtgacaaaaggggctgacagaacaaaagcatactttgaggtttcttccgatgcatccagcaaaccatctgaaaataatactgctccaaaaaatgaaatacaagaatacattgatgcaaggtttctgtccacttgtgaggcgctttggcgttctttcgaatttgatatacactatagaatgccttctgtagaacgcttaactgttcaccttccaaacatgaactttgtccgatacaaaaagggttctgatctaaagtcattgctgtccagcccagcagccaaaaaaacaatgctgacagagtggttcgaggctaataagaaacatagcagcgcacgtacacttacctactgcgatttcccaaaggagtggtcatgggacaccagctcacgtcgttggcgtcctaaaacaccatcccagaaagtaggcagaatgtactatgtgagcccagtgagtggggagctttactatctacgaatgctattgatgattgtgaaaggagcgatgtgctatgccgacgttagaacctacgacggggttgtttacccaacttttagacaagcatgtgaggctagaggactcctagaaagcgataacgagtggcatttgctttttgatgaggctgtgatttctgcttcatcagcccagctaagacaactatttgcaactgtcgtgatgttttgctctgttgggaatgtgcgggctctctttgaaaaatattgggtgtactttactgatgatatccagcgacgcctccaaatagctctgtcaaatccttcttacattgttcctgctgatagactattatcattgttgatgaaagaaatgcaaattgttttttcaaacagcggtggtagtatagatgattatgatttgccacagccagcgatttactcgaatgacgtcatagggaatcgaatggtggaagaagaacttggtcttgatagtgttttgctaactgctgaggctccctcaatgatacctaagctaaatattgatcaacgaaatgtatttgacacaatcatgcaacgagtgaatgactccaaacctggcttcttctttgtctatggccatggcggcacaggcaaaacattcttatggaatgcactgatttcgaaaataaggtctgagaaaaaaattgttcttgcagttgcttcttcaggtgttgcttcccttcttttgccaagagggcgtaccgcacattctagatttaaaattccgattgatattactgaaaatagcatctgcacaatcaaaagaggaaccatgcttgctgagcttattcaaaaaacatccctcattatatgggatgaagctccgatgacacatagacgatgttttgaggctttagatcgaaccttgcgtgatttgctctctgaacacacaccttctaacagtattgttccatttggtggtaaggtggttgtgcttggaggtgattttcggcaaatattgccggtcataagaaaaggctcacgtgcttctatagtcgatgcatccatcacgaactctcctctctggcaccatgttattcttttaaggctgacaatcaatatgaggcttctgcaagataaccttagtgagcaaaatcgtgaaagcctcgagaaatttagtgactggattctagcgcttggggatggtagattacctgcagtaaaaatggacgatgaaactgaagcaacatgggtggatatccctgatgatatgttgattaagacagctggtgacaaaattaaagcaataatagaagagatcttacctggcatgccatcaacatcaagagcaggccttagaatactaatagaggatgaagatgagatggccgaggtcctcattccagatcttgaacagggtgatggcaacccaacgataatcgtccgtgtctcaaggttgtgggaatatcgtgatcaaaatgacgaaacaattgtgcacaacattagcttggtcctgcttgataaaaaggtcccttctcgaaactcatcggcaaattgttatccatatataaatgtgttctctttgtctaacagcaaatctaaacagggagctagcattgcagcttatatttatcctccactagatgtggtgtttgggcctattatcactgagggcaaggtgtaccgccttaccttctatcgagtgagaccatgcagcaggaactacaggccagttaacaacaggatgtcgattaatttcacaaagtggaccaccttggaagaacatcttgatgtgccagctgatttcccttgctacgcttactcacctactccatacaatgaactgcgctcgcatgtcgaccgcaaagactcatttacagatgttattggagtcattactgaggtgtcatcagtgacaactattcagacaaggatcaaggatggtgacagcctaaagaggagtgtttgcatccgcaacgccgacaatgtcattataaatattgcattgtggggagagcgggcaacaagctttcctgaagacgcgattatcagtgctggtgaaaaggaaccgcaggtggcaatctttgttggcacacttgtgcggggctatgtcagaaatgcctctctaggaaatgtctctttgtcaggtaactctgcttgcaaatggtatatcaacatcgacacaccagaggtgaactccttcaaagatagcatcaaagggaactacgagcccatacagtttatcgatataccggttccaaatgttattgttggtgctgaacagaaaacagttgctcaacttaaggagctccacccatttaaattcaagaaacatgagttccaggttactgttgttatcaagaagttctgcatgcaggcctcctggtggtatacagcctgtgatatctgcaaaaaaactgcaaagccctatggaagagcatacaggtgtggagacccaacatgcccacctattgtttcagcctcaccaagattcaagctgaatataatagcaggagatgagacagcagagaccacatttattctctttggccgtctagctcagaggctcattggtcgctccgttgatacactgctccatgagaatccatcagataaagactatataccaagtgcaattactgacctgcttgaaaagcaatttgtctggaatgtcagtatcacagagaacacagttgcaacaggcgttttgtcattccaagtgaataggattgttgggggtgttgttaacaataccttggcccttctgcagtctccctctgggtcgcaggcatatgctctggggcctacaatggctctatcaccagctgcatcacatgatcaatctattgcccagtcctcagcacctgcaaccccatcggttgatatcagtgatactaatgttggggcaactagcctgagaatcactggatctcaagaccagaatatagatctggagtgtgcatcaaagactcctgcacagacagctgaagaagatgagtatgatcaggggctgcgaagaagctcttcaaggacacagatgatgagggtgctggtggcagttatacagctaggattcggcattatcatgacatatcatgataatcctgaatactggcaggttgatgattttgcactgctaccgtttaagcgtcgtatgtacattgcactttttttggatgcagaccagcaacacgaattgtcccagaaagcatttgatcaaggatcgtacacattcaaaacaacaaagcttgaatttcaacctttcaaaatgaatttacacagcactcccaatccactacgtcaaagggtcatccttgctatggaaggagtgccaccagaatcatggaacaagccagctataacagaactcttggacaattgttgtatcgttgaagagctatatggagagcaccatataaatgacctttcaattttcaagctagctgcatggacaagagactgcgatctcatccctaagataattgactggagcattgaaacagacgaagaagaacatcaggcaagtgatcccggttgtggacaaaacacagctttatcagtgattttaatacacatcgagaagttatttgattacaacattgaaaacggtgggagccagaacgacaaagaaaatcctcggctactagtcataaaaacattccaatgggtatcctatcacatagactccgataatggaccaattgaaggaggatcgccgtcggaggcagcaaacaatcttcatatctag

SEQ ID NO: 92852 - DNA, 1064 bp, Oryza sativa
  Clone ID: PAT_MRT4530_91294C.1
atgcatgtggggtcagcccaccctagcccatggcttgatgggtacatcctgattattatgcactgctcgacaaggatatgccgtggcggctcacgtgaaatccacaaaaatgcacacaaatccacacaaatctacagaaatctgagcaccaccgcccgtgacctggcggcgtcggcttcacgctccccacggcgcagcgtcgatcgtgacgaggtcaaggccgacggtcgtgctccaccgcccgaggccccgcggccgtgcgccccgcgccgccgccggggcggatctgtccttcccggcggcagcctcctcccctcggacagatctaggagagggtagaggaggggatgggagggcgcggcgccaccgcttccttcgtggtcatcatcgtcaccgcttccgtcgtagtcgctgttgtcgccgtgcacatccgcgccgcgcccctcccgcccgtcgtcggcgccgcgcccctcccagatctcggtcgtcgacaagaggtggaagcagtccaggcgaccaaacaacagtttttttacaagtgtttctgggcagtcgttcggcagtgtgacaacaatgacgaagagttgacagtcggcaatgtggcaattaacgagcaacaatctgaggcactccctccatccggccagtggctgaggaggaggccgccagggcgaggcgcaagaggaggaggcgacggcggctgcgacgcgggagaaggtgagggtggcggacggtcgcgaatggcattgacggcgctgcgtcgcctccgccccgtgcgggcaggcgccgcggcattgggcacagaggcggagacagggccgggtgccgtggaggtggactcggcggacttggagccccggcctgctcttgcgccgcatcctccctctctccgtgtgctggttgtccctccctacctcctccctattcgcgtgcgctcgccgccggccggcgggcatgggagcaagcgagccgtccgtggcgtcggcagcaatggtggtgcgatgcatgaggatggggaggaccagcgtcatcgtcacgtcacgtcctcgtcggcgcgaagatga

SEQ ID NO: 92853 - DNA, 618 bp, Oryza sativa
  Clone ID: PAT_MRT4530_91295C.1
atggcgcgccgccgcctcgccgcggcgacgacgaccgtgccggcgatcggcgtcctcatcctcctcctcgcattggcgccgtcgccggcgacggccacggtgcccgcccgccgcagcgccgtgtcctactacgcctcggtggagaaccgcctccctgccgcggccggcatggagctcgtctgccgcgcgctcggcccgggattcgacgtctacccggagctcagcgtggtgccgcgcggccgcgttccccgcggcggcgcgcgcgtcgccgaggtcctcatcgagccggggcccgagcgggtcgcttgggtgctctgcagctggggctacgaggggaactacctcgccaacctgaagctgttcgacaccgagtggccggaggcggcggcgtgccaggacccggcggcgagcggcggcgagctgtgccgcctcgtgttcgaggacgacgcggtgtccgtcgtggcgcccggcggcgagcggcgcgtcgtcggcgacctgccggtgaagcgctgccggcgacactggctgctgttcagcaccgggtgcacgtaccccgaccacccaaacccgtacgccggccggctcctccgcaacgccttggagttcttcgccgtctga

SEQ ID NO: 92854 - DNA, 373 bp, Oryza sativa
  unsure (1)..(373): unsure at all n locations
  Clone ID: PAT_MRT4530_91296C.1
ctaaaaaaattaaaaatttatttcccacttatatatcatatacaaatcctaacccattccaaaatttttaacccaaaaatttccattcaaattcattcaaacaaacaactttaaaaaaccttttttttcccatttccccctaaaactatcccaaaataccaccattccaccaaactccccttttttttttacaaaaaataattttttcaaccccctaacttataattaatttccaaaaaatttctcaaacatttaattttaaaaatcaattttcttannttccccacttatccctctcccnattttcctttcaaaaaaccttaacctcatcaaaaattttcttaaactttttccccccttattttcccccccc

SEQ ID NO: 92855 - DNA, 471 bp, Oryza sativa
  Clone ID: PAT_MRT4530_91297C.1
gtcaaaagagaccacgtccaaacgaacttcttttatccaaaaagacaacaccatatcaatattctggatacgatttaatgggctggagatctataatatggctcgagttctccttttcacatatacttactatacacagaaatatttgcctcaatctcacacaagtacaagcatatatgtgcatgttgagatctcaccagtattctgttagggctttatggcacatgagctactagcattcaacaaagtattcaatgaaccatcacagccgcgctgctattcagtgatcagacttcagcatagtttggattgagaagacagatacaatagtgaaaagaactgccgctgaatagcagttggtaaccaagaaagggatttagcactcaagagtcaagactccaacaaatccatggaaaaaggcttagccaggttcgattctacttgcctcaaaggattgctttatgaattcat

SEQ ID NO: 92856 - DNA, 300 bp, Oryza sativa
  Clone ID: PAT_MRT4530_91298C.1
cctgggcgcatcctcctccgtgtggggcgcggcgccaatgacggcgaccacgggtgtcggtatccccgctgccggggaggaccgctgcggcgaggacagaaccggcccagcggcggcgcggatgtgcacggcgacaacggcgactggtgactgcgacgacggcgacctcgacagaagcggcgacgacggtgaccacgaaggaagtggcgggaccgcgccctcccatccccttctcttccctcttccagatcggtccgaggggaggaggctgccgccgggaagaacgggcgctgggaggac

SEQ ID NO: 92857 - DNA, 270 bp, Oryza sativa
  Clone ID: PAT_MRT4530_91299C.1
atggcaaggacggggacgtaccgggccggagtagtcgaatgcaagattgcaatgcagggatcaggtcaccaggacaacggatgggccatgcacccatcgccgtcgccggccgcgcggcgcggtggcgcgctccgctccacgctctcttcttccctgatgcccgacaagacccgttctttgctaatggtgtaccgcgcgcacacaatcaacatgaccaaaaagcatcagatgccgctagggatggcaatcgggtgcgacgggtacgggtag

SEQ ID NO: 92858 - DNA, 634 bp, Oryza sativa
  Clone ID: PAT_MRT4530_9129C.1
ttagtagtgtatatcatgatgaattagattgtcatatcggcgctttgagcgaaaattctatatttaaatcgttgcattgttatatgagacccaagaaatgtgcattgaccccaatggaagcgtgtgcggtgaatatagacggagcgcttcgtgaatggtttaatcacggtgagacaatttatgagcgtcgtcgtgaggaaatgatgaaggttgccgtagagaatcaactcgcagaacggtgcgtgatgttgagcaggtcttatatggattgtgttagtttgtggaagttaaacgctttggagtcatcaccaatgaatgcggaggttgattttaacgtccaaagtggatttgagtttgaagatttatatttgagagctcaagaagagataccaatggctttgttatctgtgaatcaagtcatattgcaccaagattttggtgaagttgatttagtatttaaaaggagttttgatggtgtacctcattatcttatcattgaagtaaagcattcttattgcccaaatgtgcggcgtagaggccgaattcaattgaggagagttgcccaagctcttaattttttacaacctcgtgcaccattgttggctgttttatatacgccttatgggtatgagat

SEQ ID NO: 92859 - DNA, 260 bp, Oryza sativa
  Clone ID: PAT_MRT4530_912C.1
aagccttagcgagatgcgtgggctggtatatctcgaaacaggtagtcgcagtaactcaggaaaatactctgttggacaacactgccagaatagagggatggtttgctagatataccatgtttgactgggttggcggaagaacatcagatatgtcaggtgtcggattgcttacagctgcgttacaggtgatggatatgaaagaaatgtttggtcaggcaactctaatgggtgaggtaaccaggactactggggcttaagaa

SEQ ID NO: 92860 - DNA, 1267 bp, Oryza sativa
  Clone ID: PAT_MRT4530_91300C.1
agagtaacatgataggagagctttcattttatcactttgaagagcacgttcagacaacattacattcaatattgatgggaacatcacctaagaaatgtatcgcatccacacgtctaagtccacaaccccaagtacatgatctagcatagaaaatattattatcaagcagtgactggctatctacatgtagacccaggaatgaagtgcagcatgaagctcaaatcctaattacacaaagcctcactcttgttccaagcagaacctttgtaaaaactgaaaaaaccatggacagaaggatgtgtggcgacgataaaacgatatgttcaagcaaccaatggtttacagttcatggtgccgtgtctacgctgaatcaaccccttcaatctgctgacgagcaaggtatctctctcttcgctccttccattcatcaattacaaggccttcaccaacaatgcgggggccggtgtcctctggaggtttcttgcgtgcttcaagtgctgcctctgcttcagcaagctggcgcttgagcttgtccatttgtggggtttgacgctcagcgtccaagaatacaacacgcagaatttgctcaactgctacctggtttttctgctcatcaaacagttctgggacatactccataggtcctttgaccttcagactgacaatcttgaacttaaccttgcacttctgatctaatggcttctcattattctcaggatgctccacaaacttgaacactgtagctatgatgctctctcctggagcaagtataccacctggaggcctcatgaagcaactcttcggtgctgttgtttggaacttaaatgctacatgagacttgctgatgttcttgatcttgacagcactccggacttgcttcccaggctcataagggaagaagagcttggatggcgggtcgaggcggaggcggcggcgggtggggagcagcgaccggatcaccgcggcgccgccggacgacgagcgggccgccccatcccctccggccgcgctgccctccgccgccgcggacgccgcggacgagcctgtcccccacagcggcatgcggcagagccccaaggtacctgctgcccccttctcctctgaacacgctgctgctgctgctgcggcggcgaccggcggtggctccccgggcagcagcagcggcgccccgtcgtctgcctccccgcgtcgtatggtgggggctcggctacgccgcgccggagaccgaccggagtttggaggaggagaccggagaccggaagcaaaa

SEQ ID NO: 92861 - DNA, 164 bp, Oryza sativa
  Clone ID: PAT_MRT4530_91301C.1
ggcacgaggcagcttccactggcagtaaacggaacgacttcaacgaacgcctcgagacgagagatgggcattgtgaggatggactggatgatgaatcttcgaagtgacgtcgatagcatgcctacaatacgaagtcaatgaaacacaaaaaaaaaaaaaaaaaa

SEQ ID NO: 92862 - DNA, 1347 bp, Oryza sativa
  Clone ID: PAT_MRT4530_91302C.1
atgactattggctatacacctgcgcacttgagcgtctacgacttcaccgccggcctgcctccgtcgccgccgactggtgtcctcgcctacacggctggaagtgctttggccgactcccgatgcgtgggggctatcactagtcgggcagagtgtttaaaccttgttatcgtcgccgccgactggtgtcttcgcctatacgggtggttggtcacaccaccgttgttgggcgtctacgtcttcaccgactggcttgtcttcgtttgccgccgactggtgtcctcgccttcacggtggttggtcataccaccgttgttgggcgtctacgtcttcaccgaccggctgcctcatcccccgccgactgatgtctccgcctatacggttggttggtcacaccaccattgttgggcatctacgtcttcaccgaccggcttgtcttcgtctgccgccgactggtgtcctcgccttcacgattggttggttacaccaccgttgatgggcgtctacgtcttcacccaccagccgccttgcccgccgccaactggtgtctttgcctgcacggctggcctattatgccgccgttgttgggtgtctacgtcttcaccgaccagcttgtcttcgtctgccgccgactggtgtctccgcctatacggttggttggtcacaccactgttgttaggcgtctacgtcttcaccaaccggtcgcctcgtcgccgccgactagttttctcaccttcgcggttggttggttacaccatcgttgatgggcgtctacgtcttcaccgaccggccgcctcgtctgttgcggactggtgtttccgccaatacggttggttggtcacaccaccgtcggttggcgtcatcatcttcaccgctggccgcctcgtccgccaccgattggtgtctctacctatacggttggttggtcacaccgccgttgttgggtgtctacgtcttcaccgaccggccacctcgtccgtcaccgactggtgtctccgcctatacggttggttggtcacaccgtcgttgttgggcgtctacgtcttcactgaccggcttccttgtcgctgcccgctggtatcttcgctgtcatggttggtttattatgccgtggttgctgggcgactacatcttcactaccggcttgcctccgtcaccgccgatgggtgctatcgtcttcacttccatggctgcatgactctgtcatcgtcagttggcgtcatcatcttcatcgctagccgcctcgtctgccaccgagtggttcatttgctgctacgggtgcatggttccacaactgttgatgggcgtcattgttatcatcgtcggccgctctcgtctgttgctgactga

SEQ ID NO: 92863 - DNA, 231 bp, Oryza sativa
  Clone ID: PAT_MRT4530_91303C.1
atggctggcgatggcggcgcgcggcttggacgaccggccgtgatgacagctgggcagcgaagggcaggggtcggcggcggctacccgaccgaggaggtgcaggcagctagtggaaggccggcggcggtagagggaggcactgactgcgtcggcgaagacgggagcggcggaagcagcgacaggagccgatgcggtagcagcggagggaggcacaacgcgaagtgggaatga

SEQ ID NO: 92864 - DNA, 462 bp, Oryza sativa
  Clone ID: PAT_MRT4530_91304C.1
atgcccgcggaggtggttgcggcacaggcggaagaggcggacgaggtgacggcgggcggggctgaggggcggtggcggtggcgaatggtggtggaggcggcggagtgcaggccagcggcggcggggatggagatggcggcggggatggaagggggcggcgaggagggagacggcgggcaggacccggtcgcgccggaggcggatccagccccccggagggcggatctggtgcggggcgacctcgcggcagtgctagcgctgcggagtttgcggcgtcggcggcaagggcgcgatggcgatggtggcaacggcgcggagctcgtggtgatggtggcagtggcggctggtcggcggcgacagcacggtggtggatcggtggcaacggcggaggaggtcgagtatttgaggatggcgacggtgaggtggttgggcgttcggcagcaacggctgcggtggcggtga

SEQ ID NO: 92865 - DNA, 1334 bp, Oryza sativa
  Clone ID: PAT_MRT4530_91305C.1
aagagcagagcagcgtctccacgatctccggcgatgggctcccgcgctgctggatcagtcctcctccgccacctctgcccccgagtctccagctcgacctctgcggctgcgcatgcgcatgcgcagcggcctccgttagccggcgccggcggagggggcgtggccttgtgggcgcgacttctgtccacctccgccgccgcggcgaaggaggagacggccgcgtccaaggagaacaccgggagcaccgccgccgcgaaggcggaggcgacgaaggccgccaaggaagggccggccagtgcgactgcgagtcccgtggcgagcagctactggggcatcgaggcgtcgaagctcgcgagcaaggacggcgtcgagtggaagtggtcttgcttcagaccatgggagacgtactcgccggacacgacgatcgacctgaagaagcaccacgagccgaaggtgctgctcgacaaggtcgcctactggaccgtcaaggcgctgcgcgtgcccactgacatcttcttccagaggaggtacgggtgccgcgcgatgatgctggagacggtggcggcggtgccggggatggtgggcggcatgctgctgcacctccggtcgctccgccgcttcgagcacagcggcggctggatccgcgcgctgctggaggaggccgagaacgagcggatgcacctcatgaccttcatggaggtggccaagccgaggtggtacgagcgcgcgctcgtgctcgccgtccagggcgtcttcttcaacgcctacttcctcggctacctcctgtcccccaagctcgcgcaccgcgtcgtcggctacctcgaggaggaggccatccactcctacaccgagtacctcaaggacatcgaggccggcaagatcgagaacgtccccgcgccgccgatcgccatcgactactggcgcctccccgccggcgccacgctcaaggacgtcgtcgtcgtcgtccgcgccgacgaggcacaccaccgcgacgtcaaccacttcgcgtcggatgttcattttcaggggatggatctcaaggatatccctgccccgctcgattatcactgaagaaatcttacggcggcttgtgtcctgctcagctctgcagttgttaccaagaaacacgagttgctgttgatctgtgctaccgcagtagtagataggaagttaggaacatacatgagaaatagtatcaaataacaatgttcttatgttcacgagttgacatgatttctcgtgatccggattcatgtgtgcatggaattatgctattgaactccctaccataagatagccactgtttgtgggttaatacattgattattcagttt

SEQ ID NO: 92866 - DNA, 1109 bp, Oryza sativa
  Clone ID: PAT_MRT4530_91306C.1
tcggttaaggcaaacacaaccacccacgcacatcaaggagtcatctcaccactcaacgacagcctcgcacaagagcagggaggaattttcggttgttcctcgtcccaaggatcaatagatggagaaggcagcgtgcaacgagcatgtgatcgggatcccagtgagcaacagggctttcggcatcgaggagccggatttcccaagcgaaggagcagccgcctaccacgccgaggcgaaaagctctgcaaccgcgcgtacgagctccagatttggcaggacagcacacaggctcggtcaaggcatcaaagaacatgtgactctaggaccaaaactgtacgagaccatgaaaggcagtgaccttggggccaaagctgtcggagacggtgaaggcgaagctgaggctgggcgcgaaaatcctggccgtcggcggggtggggcgcgtgttccggaaggcgttctcggcggccaaagccgagcggctggtcccggcgctgcacttctacctgtacaccaccggcgggcccgcgttccggagcgaccggtcgctggcgctgaccaccccgagcggcgacacggtgcgtgtgccgtacaaggtggccatccctctgaggagggtgaagacggccaagccgagcgagaacaagcaccggccggagcagaagtacgtccaggtggtgaccgacgacggcttcgagttctggttcatgggattcgtcagcttccaggtgaccctgaagaacctggagctggccgtcgcgcaggcgcagtgatcgatcgatctctgatgaaacaaacgtcgaagttgggtcgtcggtttcttggtcgtgtgccttgtgtgtggtctggttaatctgttgtgcatatgtggtagcgtcgtaggtgtttgtggtggattgcttggcgtttttggctttggagcaagtccggtacacatggtaggagaaattttagtgcatcaaatttcttgattggtgttggagaaaatagtgccacggcaaaagtgccatcatatacatgtggtatgtacaagatcaatgagaaatccaaaaatgtttgttcaacactaaaaaaaaaaaaaaaaaaaaaaaaaaaaaaaaaaaaaaaaaaaa

SEQ ID NO: 92867 - DNA, 377 bp, Oryza sativa
  Clone ID: PAT_MRT4530_91307C.1
gccttatgactcatattacatccgataccgtaatacacaaatgacgtggcggctgccaaaacactttgccagggccaccgatgtgagggcctttgcttgagacatcaatgatatcaggatactagaagtactgtactatgctaataaataatgctcacgtttgaaaaacatcaacttggcgcaatatggcctgcgctgaacaaggcatgcaaagcacacaccttgcgcgcactcctccatccacagactgccgggccacgccccacatgggccaggtgcgacatggtgaccatggggtagaaccaggcaaccagcttcacaagtgcgccaccacatacaagccccaactgttgaggcttgtgatccacttggggcct

SEQ ID NO: 92868 - DNA, 474 bp, Oryza sativa
  Clone ID: PAT_MRT4530_91308C.1
aaaaaaaaaaccccggaatggccaccacagattcaaggggccctaccatacaggggtaacctccctaacaaaaaaagcccaagagctaaatgagggggtttggaaggaaaaaaaaactagcgccttaaatataaaaaaccctcctccctccaactaaactcccaaggttggagtacctagggggggaggaggacgggccccccgggggccttgatttttttttgggggaccttggaaaagaacttggccttgacaaaaaggggcctttgggggggaagcatccccttgccgagcaccttgggggacccaaactgggggacgtcaaagaagggggccttggcggggccggcctggggggccttgggggggggccccatggaccaaaggcgctcgacgttgacgggggggcaggggaacctggtgctgagcttggggaagtagcccatgcccaccttgccgaagtaccccgggggg

SEQ ID NO: 92869 - DNA, 2488 bp, Oryza sativa
  Clone ID: PAT_MRT4530_91309C.1
gtatatgggcatgcctcgctggtttccaaggtgggctcaaccatccatgagatatgttgtaacctttacaacgcaagtaccaatgcgacgcattctctctaaaaagataatggctatcaacaccaggcttgaggaaattattcaaaacaaagataggtacaagatggacgatgtgaataagggaatagaagtgacatggaaggcttcaacgtcaatatccgaaagcaattctgagctggatgatttacaacaaggaaatttgacattatatgaagagcaccaagaggaacttgagaaagcccttactccaacagatcaagaactacagaaaaatgataatcgtccaattgtggtctctgtatctggaaagagtggggttggcaagacaactcttgtgagaaatgtgtacaatataatgaagaagaagaattgttttgatgttcatgctatggagagttttgcacctcatttaacagcccccaacatcctacatcaaattgttcagcagcttacagaagacaacaagaattgtcctagaagcatggtccatgaaatgttggctacagcgttgagagataagaaatacttactggtgatagatggtgaagttagcagaactgaatggaagaacattatcactatgctcactacccttgcagtcggttctactggtaatagaatagtgcatatcagatttgacagaccagaacagtcgtctctctattatcatcatcacattcggttagaacctcttgaaaataatgttgtcatgaaattgttccacaagcgattacgaaaccaagacaagcaaggtgatgccggaggtccaatggtattgaagttgaagaaactactccaatttgatgcacaatatcaaaaacttgaagaataccgtgaagacatatgcaaaatcacggaagggttgcctctggctgttgttcttttatcaggtcttgtccaaaccaaagagtttccccatgagtggacagaagtattcaagtatcttagttccaagaaatcaaagcggctcgacaatctactgtccctgtgttttgatgatcttccacacgaactgaaatgttgctatctatactttgctgcatttcctcccaatgtagtggtcgaggcacgcaacttggtgtgtatgtggatggcagagggatttctaacacctagagttggaaagacattggagaaggtgggctacatcttcctgaatgagctgatttccaggaatctagtcaatcttgttcttgtagatgataattctactaccgggactatgttcatctccatccaaaacaaagtacatgagtttttgcaatctgaagcgcatgaggcaagtttcttggaggtgcatagtggtgatgacatccctactttgacaagtgctcgtcgcctctctctacagaattacacagacaagtatgcggccctagctaatccattgccaaagctacgatccatcttctctcagtttgagcaagagccaaaggaacaagagcccaaaggagaccaaactagacaatgttgcacaccacctcaacagtggataaccaacaagaagcagaaagacatcagatctcacataaaaggattgctacaaggatcagagttcctccgtgtcattgacctacaagggattgagattggtgatgagttgccacatgcaataggtagtgttgtgcatctgcagtaccttggaattacatcttgttcattgacagtgatccctccgtccattggaagcctgagtggtctacagacattggatgtcagagaaactaatgttcggaagctcccactgaacttttggttgatgatcaagacactaaggcatgtatttggttttaccctcaaattgcctaaacaaattggcagcatgaagcatatgcagacacttgactcaatagagcttgacaactgtgagaaggatttgattgggacagttggaaagatggtccatctagaaaatttatttgtttggaacattacaactggtaatatggaggctttgtttgctgctctgagcaagctagagaatcttaggaatttggccttgcatggccacattattccatcaaccgtgttcatcacaatctcgcttcgccgcctcaagtccatgaagttacaagggaaactaaaatttttatatgagataactggtatggatgtatgccttcctaatctcagcatgctttcattggagaaaacaaaggtatctcagggattcatttcaaagcttgctgaactcccatctcttgaaacccttgccttatattctgagtcatacaaggacgagcatcttttattctcttcaattggatttgttagtctgaagaagatcaagcttgatgtaccaacaacgctgaaaactattgagatagagcaaggtgcgcttcatattctcaaggaatttgatattctctctcaacgtccccatgtcaaaatcattgcggaaagacgcatcaaaaagctcattgtctaa

SEQ ID NO: 92870 - DNA, 191 bp, Oryza sativa
  Clone ID: PAT_MRT4530_9130C.1
aagcttcgactgtaatgcttgcatggcctgctattgtattgctctggaaacacatctttaacagatgttgtattatcacatacattacattggaggagaaggatttaagtgatcatatatagaacagaggatatgatgttttagaaaaaagaagattaataatgtcaagaatactttgtgaaaaaaaaaaa

SEQ ID NO: 92871 - DNA, 293 bp, Oryza sativa
  Clone ID: PAT_MRT4530_91310C.1
acaaccaatgcgtgcgatacgccatacatgccgcacagccagtgtccgtgtacaaggaaaacatacggaactggaaggataacttacacggagagcctgacaagagcataagaaaacttgaacttaagaactgggatgaccatcactaacttaggactgaagataagcggcacttgacactgcatgacgaagactgcttacgggaagtggggaagggactacagagacataagctgtgaggctaagaagtcccttaagggggagaaggctttggcctaaaaacgggctttggg

SEQ ID NO: 92872 - DNA, 2067 bp, Oryza sativa
  Clone ID: PAT_MRT4530_91311C.1
atggaagagaagagaatagctcggatttcggtcacttggagaggcagacagctcgatgtcgatgcagacccgagctgtacggtgaaggaattcgggcaacttttgcaggatttgactagtgttaacccagagacattgaagcttattgttccgcagtctacaaacaaaggctccaagctgatcacaccgttttccgaccctcattcagttttgacattgaaagaagctgctattagtgatgggaagcctattagaatgatgggtgtttttaatgatgaaatcgaggaagtatcggacaatggcaaaagaacagatctacggataattggatttgaggaggaagaacaacggctgaggcaacgaacatcaggcaggccccaagttccactcaaacttccacagggccaatacatcttctgtgattttcggacacttcacttacctgggattgagttgaatcccccaccttcagaagctctgaaaagaatgcacatgctagcatgtgacccaggcataattgcgatcatgaacaagcatagatggcgagtgggaatcatgactgaaatggcaccagtagggtatgtaggcgtcagtccaaaatgcattctaggcttcaataagaacatgggagaggaaatatcccttcgcctacgaactgatgacttgaaaggatttaggaaatatgaaagtatcaagagaactctactccatgaacttgcacacatggtgcactccgagcatgatgcaaatttttttgctcttaataagcagttgaatgatgaagcagcttccttggactggaccaagtcaagaggtcatgtgctgagtggtcgcaaaatcttcgattcctatgaagacgaatttgttctggagccagacagtgttgttgttggccacaaacttggaggaggatccagttcactggcaagtgctcgtgtgttgtctgggtctgctgcttataagcgttttttgaatgcatcagcggatttagagagttctaaagacagcgttactatacctggaaatgaaattcttgtgcctaacacaaaatttgagcctgatccagatgatgttggtcaagatttttctcaggacaacactaaggtggagccagacccagatgataatgatgacatgaacgtggatgtagggactggggcatcttggtcctcagtttctagatcatttacagaacaagataccatcagtcactcagagcctgaccctgatgatattcaccagcaaagcactgctggttgcctagaacctgaccctgatgattcctcaaatgttgatattcttagccaggagttgacgattgatgggaagcagaatggagaacctgatcctgacgataatggtactagcaaatttattcccgaacctgtaaacaagatggaagtagagactgaattgggaagtaacttcgcagttcagaattctgaacctgatcctgatgattcctcaaatgctattctgaataagaagctgggaactgacaggtctgatgaaactacatgcgaagctgttgtagaagaatgtgtaaacaagatggaagtggagactgaacagagcagaaactcgacaatgtcaaaatctgagcctgatcctgatgatcatgctgctaattcaaacatcagtgagctccagaggatcgaagaaccagtggcagccctctgtgcacgccttcagaaggccattgaaatgcttcgctcacaagcaacacctacagaggcaacttctgctcttcaaacactctttaagatcatcaagaatgtgatagagcacccacatgatatcaagtacaggagactgcgtaagtccaatccacagttccaaaggagtgtggcgaactacaaaggtcttcaaaaatcaactgtaactaacttcctcatttttttcgcctccctgaaaacagctgcaatggaggtccttgaactgattggtttctgtgaggatgtcgtctcggatgagattggtcgtgcagagacttacttggtattgaaaaggaacgatcctggcttgctgtggcttgcaaaggcctctcttgaagtttccatggcctga

SEQ ID NO: 92873 - DNA, 253 bp, Oryza sativa
  Clone ID: PAT_MRT4530_91312C.1
agcatcgagtaaccgatggttccattaaacaactttagaatacacacatcgcagggggtttgaggcccgatgatcaagcaatagaccatgcggggagattaatgcaggaccgtgaccacaatctcaggtacttaaataattttatacccggtagggaggcttacaaaacgttttcgtaaacgtttttatccgaaatttcactcaaaaaacattatgtctgcttaggttggcatattcaaacacgataatgagg

SEQ ID NO: 92874 - DNA, 244 bp, Oryza sativa
  Clone ID: PAT_MRT4530_91313C.1
aagcacaacttagcgaacattatttatgaagcaagagcattacagacggggagcaaaaccccagggtcttacgggtcctagatttcccaccagcaagtattactgcaaacacagggacaagtgtaccattgtgttggtacccctaaattgcgtattctgtattcacctaaacacagcctatggataaaaataaccatgttgcatacatagataacgagacattctcctcagttacatgaataaa

SEQ ID NO: 92875 - DNA, 325 bp, Oryza sativa
  Clone ID: PAT_MRT4530_91314C.1
gggagcgcgcgcgcgccgccgtgcggggctcggcgcacgcgccgctgttctttctgtttcgacgacacgggccccgtcacgctgcgcaaggagtgggtccacttcggctacatcggcctctggaccggccagtccttcaccaagatgaacgaccgcttcctcgacgacgtccgcggcgacgtcaaggaaggcaaggacgccaagctgcttgtctcctggggcgaaggcctgcggtcgacgatcgcggtgaggacgctgctcgacgacgggtacaagaacctggcgtggctcgccggagggttcagcatgtgcgtcgacggcgact

SEQ ID NO: 92876 - DNA, 208 bp, Oryza sativa
  unsure (1)..(208): unsure at all n locations
  Clone ID: PAT_MRT4530_91315C.1
tctctgcatatanttttctgccctgttctgtttgaatttgaancggagtttgtcagtttgaattagtcatggcatncgtaggaganaattgtttttttgtgacggtncgtttaacacacatgtatggacctncttcttgacttgtaattttattttattttgncgncaaaaaaaaaaaaaaaaaaaaaaaaaaaaaaaaaaaaaaaaa

SEQ ID NO: 92877 - DNA, 214 bp, Oryza sativa
  unsure (1)..(214): unsure at all n locations
  Clone ID: PAT_MRT4530_91316C.1
cggacgtgnctctgcccaccgnggttnnngnctccanttgtcatgcacctttagtnagggttaattncgccgcttgggggtaantcaatggtcaaaagctgtttccctgtnttgaaanttnttnatccgntcaanaatttccacacaacattacggtgcccggnaagcataaaagtntaaagcctgggggtnccctaatgaggtgagcttaact

SEQ ID NO: 92878 - DNA, 589 bp, Oryza sativa
  Clone ID: PAT_MRT4530_91317C.1
ttccatcttcttttttttttgtctattaaagtgaaccccgagttggcgatcaaattggtttctgttatatgaaattttgtttttttctctatttctgtatttagcaaagtgtggtgtacgtgttcgccatttacttggttttcctggtgctatgtctatttgtgacaggagtgaggcgatggatcatgcgcatgcgctccagaaatatggcagtaaatttgattttttttatgagcaaagtcctcctcccatgaataacgtcgtaaagagttcattctatttcgttgagaggcaagattaattatgttctgctggctgcgcagtacctagctgtgatgcacccggcacggtagaaaagcttgtgccgatatgccaggaagaacatatagattccaagcaaatgaatgaatatgtacccaaataataaaatcttgcaattgttccaacgtatgcagcagggtcttttttattttgtcattcagggtgtacgggagtatgatcagtggagtatttaatttgtaacagctgcttgttgcatgatcagtataataaaatcgagttgatttccttgctaaaaaaaaaaaaaaaa

SEQ ID NO: 92879 - DNA, 163 bp, Oryza sativa
  unsure (1)..(163): unsure at all n locations
  Clone ID: PAT_MRT4530_91318C.1
cggacgggtatagcacacggttgtnatctagtctccttctactgttagaacccaaatgtaacttttggtgccagctacatttgggttctaacnattcgacttgaagaatttgtnttcttntaaaaaaanaaaaaaaaaaaananaaaaaaanaaaanaaanaa

SEQ ID NO: 92880 - DNA, 552 bp, Oryza sativa
  Clone ID: PAT_MRT4530_91319C.1
atgaggatgccacaccgccgtgccatcgtccgtccgaccgccgccgctgccgccgtcgtcgtcctccgccaccgcccgcccccacgtctatcacgtcgttgtcgttgtcatcatcatcgtccgtccgccaccaccatcgtcgtcatcgtcgtcgtcatcatcatcgtccgtccgccaccaccgtcgtcatcatcgtcgtcctgtggagctcacgacccacctgcagagctccgcctcgagtgcgcccgcagcggtggccgcgtgtgcccacagctgtggcagaggacgacgatgatgatggcagcggcggcagatgacgcgaggcaggttgtggtggaggcggcaggcggacgatgcgcggcagacgcagggcgggcggtggcggaggatgatgatgacgatgacggcagtggcggacggacgacgatgatgatgatgacgacgacgacgacaacgacgacgacgcggcagacgtgggggcgggcggtggcggaggacaatggcagcagccggacggacgacggcgcggctgaggatgacggtggcggctga

SEQ ID NO: 92881 - DNA, 425 bp, Oryza sativa
  unsure (1)..(425): unsure at all n locations
  Clone ID: PAT_MRT4530_9131C.1
cccgaattcggcacgagcgtcgcaacagctacaaacgcccacatccacacgcaagaaatccgcatcaacagccagccatggcgtccacgctgaccaacgtcggcctgtctaccccggcggcggcngcgtctccctcgttaggccggtcgccggaactggacccgttggtgtttccccctgttggccgcggcgggttcnccggcggtganggcgaacgggccggcaacacccgccggaatctcggacaaaatgtcggaaaacatcnacaaagccaaggaagccgttcgcggaagaacgcgaacggcnaattccgcggctttgggacaagttgaagactgaacccggcgggcaaaccacgccgcgcgaaagctcaaggaactccgacccgctcaagcctactgcaagaaacccggaaccgacaatcc

SEQ ID NO: 92882 - DNA, 792 bp, Oryza sativa
  Clone ID: PAT_MRT4530_91320C.1
atggataacaatattgggggctccacaccaacatcgttaagaagatcatgcccttttgctgatattaataatgcgagtgctggggattcgcccaaaaaacgtaacaatattggggtcttcacaccaacatcgttaacaaaatcaaaactgcaagaagatggtgctaaactcagcgcattagaattaagaaggaagcgtgctagagagaggtatgcatcaatgagcccaaagaaaaaggaggcgaggaaaatgaaggcccgtgtgtacaagcaattgaaggaggatgaatactcaggtttaactcaaacaactactaattatgtcaaagctccacttggtgatattacaaatgttagtgttgatgatttaagaagatgccacgtaaatgattgttctacactgcagcaaggatcaaaccatgcattattacagcccgttgataggactggacctggaagtgatcaacaacacatgatcacacctcggtgtctaccatttacagtgatcaacaatgtagctcagtatgataatgtggatcacactggatcccctttcagctgcatacttcaaggtgcaacacaaaacagccatacactacctgcaaatacagtggagaaatgtgcgagcgctagtggctttggtaaagacccggtccaccatgacaacgtacatcttgaaaagaccattggtagttggtcggaaattcattacaaactttcacattgcaaagcgttgatcttttgtagattcttataccagtacgccatgctcgaagctttatcgtgctcatag

SEQ ID NO: 92883 - DNA, 427 bp, Oryza sativa
  Clone ID: PAT_MRT4530_91321C.1
ccggccggggaaataaagctgccctttccttgtgtaaaaaaaaaaaaaaaaaaaaaaaaaaaaaaaaaaaaaaaaaaaatttccagaccaaaaaaaacctttttttagttccaattgaagaagtttgaattgtcccgttggagaaaaaaattgctgttaccggttgccaggggaaaatggtttcccgccccaaatcccacaaaaatataaagcggaaagcataaggggaacagcggggggggccaaaaaaataactgcgtctagttaatgggccggtttccattgcccgaattgggagcggaaaccgggttaaggcagtggaataaaggaagcgacaagcggtggggaaaaggggatttccttctggttcgctcttcctgtttctggggcgattgaatggtggggttcgatgggcgggatgcgctca

SEQ ID NO: 92884 - DNA, 2056 bp, Oryza sativa
  Clone ID: PAT_MRT4530_91322C.1
gttgtgtccttgttgtttttttttttttttggaactccgtgatgccgcctgacttttactagcaccaaatgtacaagtgtccccaaaagcatggttttaagagcgatgacagtatccaactccaaaagttgtgcctccactccaccgacggctatacccatcagaacttcaattcagaatgctttacaagcagaaatttgggcaggcaggtgagagctattctgatgattctccccttcctcatgggtttacaagcagatcctgcagctgtcaacttggcagctcagagcttgtaggagcagtttgtcaaattcgaccattctcttgtagcccagcctaagaactaaccaagaaccaaaattatccccaagagcccagcggataacccggctttctacctaaactatacacggcagtatcgcatctttgcagacctacctaccatagtacccagtacagtaccttccaagtttccttctcttgtggcataaccggagaagacaattgagagctatgttttccggatgcacaccaaccttccacattccaaggccagctcccatggcagccgcctgcaaactatgaggtggcgacgccaaccgcattccgagggtggtctggtactgctggctcggttgacaagacttcaacagggtgctccgctgttgctgacactggtgttgttggatctctcatgtggttgttgtctttagcttcctcaaacaaccgaagaagcagagcttgcatttcctttcgcagtgcagaagcctcttcacgttggaaccacccttcgccaaacatattagatgagtccttgttgttaagcctttcaggtgcttcctcgataaagcgtcgcatatagtacagaacaaagacaccacaatcgtattcattgtcctgctgtggaacctgtactgtacaactgtaagactgctccagattggatgcagttgtaactgctttcttcttaattttccgaggaaggttcttccacactgattcatgtagatgacaatcttctaaagaaccagttttattcaggtagttccattcttctttaaggaattctgcatgcacaggaattattatgtatgcctttttaaatatatctacacctttccaccatcttctcagattcaagaaataagcatcattgtccacctttgatgtcaaggcttcaagtttgctgaagaagtatgtattgaaaatatgatacttgcctccaagcctacttgtcgatggcatttgtcccattaggtacataatgtagaagttcagtataggtgaggacaacaatgattcaggctcaagacacttcatgtcagaataagaaagctcaatagaattaggggtgtcccatgcagaggatgttttttctgcagagtctgaaatgcaagtatctccatcgagtagaaccacctcttcaaccacctttcttgatcgcaatcgcattgaaaaggtaggtgaaaattctccattccttttcctagaagtgtgggcatctttgcatatcctactgtagccattatccttgccatcatcagcagcataggaatcttcctcttcacacaagatcccctcattatctgttgaagtttttgggtcgccaatgcatgcacttgtttccaaatgagatacatcaacgcctgcctcttcatctatcccaaaggaggaccgaaaatctgatatggttactgcttgttgtttaactgatgattctgcacatcccgattgaactacccttgcgcatttgtcatcatccgttgctgccttacggcgatcaatctcgcggacgatggcgtctagcaagcggcgaaacttggccccgcggtccttgagccttcgctcgatacccccactgagctccccctgaatgcgccgcgacttctccagcagctccacgtctgagaacctgcgaagctcggtgtcatctccgacgccgtcggccccgtcctcgccgccggccatagcattcacggcggccaggcgcaggaggcggcgcggattcccctactctaccccctacgcggaggagaggagaggagagacctcgtgc

SEQ ID NO: 92885 - DNA, 486 bp, Oryza sativa
  Clone ID: PAT_MRT4530_91323C.1
cattgttgtcctcacctatactgaacttctacattatgtacctaatgggacaaatgccatcgacaagtaggcttggaggcaagtatcatattttcaatacatacttcttcagcaaacttgaagccttgacatcaaaggtggacaatgatgcttatttcttgaatctgagaagatggtggaaaggtgtagatatatttaaaaaggcatacataataattcctgtgcatgcagacgcacactggagcttggtcattatatgtatgcctgcaaaggaagaccaatcagggcccaccatatttcatttggattcactgaagtttcatagcagcagatttattttcagcaccgttgagagattccttaaagaagaatggaactacctgaataaaactggttctttagaagattgtcatctacatgaatcagtgtggaagaaccttcctcggaatattaaaaagaaagcagttacagttccacaggaggaca

SEQ ID NO: 92886 - DNA, 195 bp, Oryza sativa
  Clone ID: PAT_MRT4530_91324C.1
atgtttgttgagacaaagagaaacttactgggacagcaggagcagttggttgttcttcttcctcaacgtgatgactccccacagccgaaggagtctggtcacttgacgattgctgtacagaaggagaaggaggaggaggaggctaaaaggaaacaagtcctggtcaacatcttcgccaatttcctcttcatctaa

SEQ ID NO: 92887 - DNA, 1820 bp, Oryza sativa
  Clone ID: PAT_MRT4530_91325C.1
ggccaggcattaggccattccggcctctatagcccatgttacgtgagcagaatatgcatctgtggcgagcggcaggttgcttccccttcgccttctcctttgtcttcctcgcgtgcagaataaccacttcaccgccggatctcacggcgccccaagtttaggcggttacctaaccaccccacgaatcccagccgccgccgccgacgagcaggaggagcgatctgactagtaagccggagcacatggagagctcgtcgccgtcggtgccgttcccgctgctgcaggcgccggtggagagcacgtacagggcctgcaccatcccctaccgcttcgcctccgacaacccgcgaaaggccacccccgtcgagatccagtggatcgacctcttcctcaactccgtcccctccttcaggcagcgcgcggagaacgaccccacggtgcccgatgcgcccgccaaggccgagaagtttgcccagaggtacactgcaatgctcgaggagttgaagaagaacccagagagtaatggagggccaccagattgcattcttctttgcaggcttcgtgagctagtccttagagaactgggatttagggatatattcaagaaggttaaggatgaggagaatgctaaggctatgtcactctttgagggcgttgttcagcgaaatgatgagattgaagatgatggaaaacgagcagagaacttgatccgtggaatcttagcaggaaacatatttgacttaggatctgcacagcttgcagaagtttttgctaaagacggtatgtccttcttagcgagttgccagaatcttgtatctcgaccttgggttatcgatgacctggatgcatttcaaaataaatggactaagaaatcttgggaaaaggctgttatttttgttgataattctggcgctgatatcatcttgggcatattaccatttgcaagggaattgctccgacatggcacaaaggtgattcttgctgccaatgacatgccatcaatcaatgatgtcacttacccagagcttgttgaaattataaacaagctcaaggatgaaaatggaaagcttgcaggtgtggatgcatctgacctactcgttgccaactccggtaacgatttgccagtaattgatttgtccagtgtgtcaccagaactagcttatttggcaaatgatgctgacttggtcgttctagaaggcatgggaagagcaattgaaaccaacctatatgcacaaatgaaatgtgactcgattaagatcggaatggtaaaacatcctgaagtggcgcaatttttgggtgggaggctttatgattgcgtcttcaaattcaatgaggcctaaactttgataacatcagacacacatgcggttgctttatttcgttttcaactggtgcgaggctacactgaacatatcacatgtgctcgtccctttcatattaatagcaaggaaaataagttagatcatggcatttttagggaatgcaattacggaacttttaattcgtattgcactacgtgccttttcatctaggtagcggaatagtaaaaaggaaaaaaaaatcccttctgcgattcagattaataataacagttcaactaaagtacctccgtgttttatcatgttatttaattcgaacattgtttgataccggttctgcttctgataaaagtgccattgaagatcagttgtgttctgtattatactagcctaactacttcgcagaaaaatgggtgtatagtgtagcctttacttcggatttgggaagaagatgaattttgtaacaaaaaaaaaaaaaaaaaaaaaaaaaaaaaaaaaaaa

SEQ ID NO: 92888 - DNA, 342 bp, Oryza sativa
  Clone ID: PAT_MRT4530_91326C.1
atggcgcaccgcgagcgcgaggcagctgacggtgaccggggtgacctggggattcaattaagaggagttagggagagggatgaggtccacgatgagtggggacatgggccgaaggcggaggttgtggaggtgctcaccagtgcgttgaggggaatggctgccagcgggggattccagcgattgaaggcgcggagcggaggccaaggtgcggcaaggagtggcgatgctggtggtacaagcggcacggaacgaggacggctgagcggcggtggcgcgtggccgaagctcgccggagtgcggcggaaatggcaggcggcgtggagagagcggaagggggcgtga

SEQ ID NO: 92889 - DNA, 409 bp, Oryza sativa
  Clone ID: PAT_MRT4530_91327C.1
gtgcagctgctcgtcgtcagccgcatatagccatatatgcatggcgctgaggccaagtgaattttttacggaaggaagaatgtgaggaatcatcctaagtatgaactgtagttcagccatgagccaagttgcctactggctcacgcctctttcggggagctccacaagaagagaagctgcatcagaagttatattcgccgaatcgactacagaggcacgtgctcttcatattccttcctccggatcttaccccttggtctagagctctataccttctacccaattcccaatcagcatccctcttcccagagggtgcgcattccagtttgcacccaactgctatgccatcaatgtgaggagtcgcgcaggaaataactcccactcctcagatcaaaaccacccaagccca

SEQ ID NO: 92890 - DNA, 153 bp, Oryza sativa
  Clone ID: PAT_MRT4530_91328C.1
cccccgtagcttggatcctgtttgcggttcccttttccttttttgggttaggctgtaaggggttactcccacaacatccgatgggcaacaataggactgagcatatccaagtttttaacctcgtacgaataaacggtgttgtaaacgatttac

SEQ ID NO: 92891 - DNA, 972 bp, Oryza sativa
  Clone ID: PAT_MRT4530_91329C.1
atgggcggcgacggcgagttcttcagcgtgggggagtgcgacggccagaagaccatcgacggcgagcaggtgccgctggtgctgacgccggcgtcgtccggctccggcgagcgaggcggcgaggcgctggcggcggcgctgcgcgcgaggcgcgagtgggtggaggcgaaggtggtgtcgaacagcgccgtgctgctgcgcgggttcggcgtgcgcgacgctgccgagttcgacgccgtggtgggcgccctggggtggccggacatccggtacgtcggcccggcgcctcgcacccacgtccacggccgcgtctggaccgccaacgagggccccctcgacgagttcatctactaccaccacgagatggtcctgataaaggagttcccggggaaggtgatactgttctgcgaggtggcgccgccggagggaggggagacgccgttcgtgccgagcttcagggtcacggagagggtgatggaggagttcccggagatggtggaggagctcgacgagaagggcctccggtacacgttcacggcgctgagcaagaacgacaccaagtccatgcgcggccgagggtgggaggacgccttcgccaccaccgacaaggccgaggccgagaagagggctcgggcgctagggatggaggtggagtggctggcgaacggcggggcgaggacgatcctagggccgaggaagctgacgcgagtcttcccggggcggcagggtcggcggatgtggttcaacacggtggtggggatgcacgggaaggcactgagctcggcgacgatggcggacggcgccgagatcccaacggcgttcgtggcgcggtgcggcgagatcatcgaggaggagagcatccagttccggtgggaggtgggcgacgtgctcatcctcgacaacctcgccaccctccacggccgccgcccctcgctgccgccccgccgagtcctcgtcgccacctgcaagtga

SEQ ID NO: 92892 - DNA, 445 bp, Oryza sativa
  Clone ID: PAT_MRT4530_9132C.1
ttttttttttttttttttttttttttttttttttttttttttttttttttttttttttttttttttttttttttggggacaaaaacaccaaaaggaccaggtttttataaacttttttgacatttttaacaccccccccccctatatttggcgacaattttgcccccatgatccattttataagaatttttgccccgcagtccaaaaaccccttaaaagtgccccccaaattaagaggccctaaacttaatttttagttttgaacaaaaaaacggggggggtccaaattcaaaatttaattggcaaacacaaaccccccaatataatttgggaataaaacaagccatgatataagttggcccccattattcttcggttaaacattcttaaacggcgacgggtttaacaattgggggcccaaactgcttcaatgggggggttcttt

SEQ ID NO: 92893 - DNA, 294 bp, Oryza sativa
  Clone ID: PAT_MRT4530_91330C.1
atggaggcggacgggcggagcgtggagggcggggaccggagagcggaggcggcgccgcggaggtggaggcggcgccgccgcggtggaggcgtaggcggcacggtggaggcggaaaggcagagtcggcatggtggaggcggaaggcggaggcgggggaggcgccgtggaagcggaggcggtgcggtggaggcggaaggtggatgcggcgtgaccgagccgagtgtgacgcgatggggagaggcggcgctgcgtgaggctggtgggaggagggattggatgtgtggttgcctctag

SEQ ID NO: 92894 - DNA, 300 bp, Oryza sativa
  Clone ID: PAT_MRT4530_91331C.1
gctgtgtttcaacatgagacacaacaacaacagtatacggctcagacagatgcaccaccaaattgactctcaggacaatcacgtagcacaggccagaattgcatctacatgcaggggcaaaatattgaagacaggctagcggataagcctacgacatatggtctagcaaagcagagcatgacagaactggagctattgcgagccatggaaggacacaaaggcgcagcaccttgcaccaaaatacttggcagcgggtcacagctgatggagtcgcatctaggcaaagatcacaggctacta

SEQ ID NO: 92895 - DNA, 296 bp, Oryza sativa
  Clone ID: PAT_MRT4530_91332C.1
gatcggatcgcctcccctccccaggcaaaatcaccgtgtcctcgccagaacatcacggaccgcctcgcacaggggttcaccggcctgctgcaggcgcaaccgccgcagtttccgtggccggcggattcccttcgagatcgacctccccgtggtccccttcggcgcctcctggggtgcccgggccgggaaggagttcttccccgccgcggccgtcgcctccgtcatcgacatcggcaggaggctcggccaggctggcgtagagattggggcgtccgtgggaggttttcttgcaatcg

SEQ ID NO: 92896 - DNA, 506 bp, Oryza sativa
  Clone ID: PAT_MRT4530_91333C.1
gatgtaatgaagtaaattatatttaaattaaaatagtattctgctaagtcatcagactaggcttgcattgcctacacaaccactttgtaaaataaaaaggtttacagtggcctgcccttcccctaagaggttaatagtatctcccggctctgaaactaatccaagggctagctttgcggtactgtacattcatctgtcatttcccctgtcctgaaaattattaggtagaaataacaggccttggaggagggggaggaagaggcatccttgaaggcgcatctgcagccagatcactgatcctcttgctgattatggctgcgtactggctcggtatcttcttcagcgcttctaaagcaaattgttcctccttttcggtttcaggcatttctcttgacattattattttggtgaaatcaacaaactggaaattgtcaaacagctgtcgatcctcctgacagtgcatcagctgctcatcccatggaccatcgcccactccgacaaacaaa

SEQ ID NO: 92897 - DNA, 598 bp, Oryza sativa
  Clone ID: PAT_MRT4530_91334C.1
ccctccgccatcgccgcggccgcgtgctgggagtcccgcacgatgcgccgcgagggggaggaggagtgggaggaggtcgtcgccggggccgaggaggcggttcatggggcccccgtgcctgttgcggaggaggaggaggagtacagggtggtgttctggtcgccgcccaccggcgacgaggtccgcgcagccttcaccagcatcgaggagtaagattcgtttgcctctcgcttaaatcctcgcctaaatcaggttgctgtgaatgattatgtcagttagttttgatcgaattgattgatttagattggaaccgtattggtaatatggtttgatgcgagaaagtcagcgaaaatctgttgtttgtcgttattagtgttcaaatccgtgctccagtggcaggttgtgatggtctttgtcgtgtgctgttcaatgtttgcaattggttggtttggtttctcctccataattggatgtgagcctggggaagcatcgtgtacttccgtgatctgcacggacagatgccaacggaccttggaacacttgccgtgcagagttcatgaatgaacaatcatgagttcgttaaagggcatacgtttct

SEQ ID NO: 92898 - DNA, 231 bp, Oryza sativa
  Clone ID: PAT_MRT4530_91335C.1
aacgatcgaaagtttcgtatggtattcacatggagtgcttcactgtgtatgagtatatatgtgtccatgtctaccattggcgcatccgttcccgctgtaatttatcagacgaatccaagacggatttcgctcctgctttggaaggaggtcccactgttgatctccggtcacattattcgtttcggacctggaaatcaccagcaaatatagtgtgccccaaaaaaaaaaaaa

SEQ ID NO: 92899 - DNA, 309 bp, Oryza sativa
  Clone ID: PAT_MRT4530_91336C.1
atgccggcatggcatgtgcgcaccgcgcctcgccgcgcacagacgcgaatagggccgtgcctagcgcagaacgtgcccttcatttggcaactgagatccgccgtccgccgctatcggcttgaaaccgccagaccgcgcacttgccgtcaggactcgtcgggtttgccacagggatcgatttactgcgtcatcatcacagcttcagcggccgccgtcgtcgccgtcctcaacaccgtcgctggcgccgaaactgcctccgccggtgccggcggcggtgccgccaccgccgccggcaccgccgtcgcctag

SEQ ID NO: 92900 - DNA, 320 bp, Oryza sativa
  Clone ID: PAT_MRT4530_91337C.1
attttgtcgactctagagcaccaaacgataccgggggggatagtgcagcaactcagggaggctttccccccaccgtgcttctgatgctcgcgccgggattctaggctcgtgtgatctacgtggccggtgacgtgccatcagcaaccatggaaggacacaggagggcggtgaggactgtccgggtgcccaacatctcagatctggcatgggagcagaaggtgcgtgagttcttctgcttctacggcgaaaaccagcacgttgacaacagatgcgatggggtggccacggggaggactgtctactgcacgttaaaggatccc

SEQ ID NO: 92901 - DNA, 357 bp, Oryza sativa
  Clone ID: PAT_MRT4530_91338C.1
ctatccatccattttttttttggatccttcattcctgcccggcggcgtgcgagatataggcggaggagattcgagatggccgtgtgcgggtggatggaggatcccggcgagccaggaggtcgatcatgtcttggcctggactaggtgtgcctctggtatcgtgctcgattccgccaccttggtccttgtccagtcgaagaaattaaaggcggattggactgattggacccacaaatgtatacttcaccttcagattgatagcaaaccctcaaaacaggttgggatggtacttttaagaaagactgttcctaatatgggtgacaacttccaagaacttttcacaggatagaacggctc

SEQ ID NO: 92902 - DNA, 265 bp, Oryza sativa
  Clone ID: PAT_MRT4530_91339C.1
aatacgacctcctatttgtgcgaattgggctgccctcccgccagccgaggcgtgcattttttcccacttcccacaagcgaggggggcggcctggtgaggcctctctccgctcgcgctagtcctctcgcgtcctcaagatgtacatctttgtgaagacatcgaccgcgaagcctatcaccctcgacgcggagccctctgacaccatcgataatgtcaaggctaagatccgcgatctggagggggggggccccggaccacccaccgt

SEQ ID NO: 92903 - DNA, 402 bp, Oryza sativa
  Clone ID: PAT_MRT4530_9133C.1
atgcggcggcttgacctgccatcgccgccgccgcgcgctgtcgtgatccttgcggcggccctcgccgccgccgtcgccaccggcggcgtggaggctgcaggcaacatgtacgcgtcgtctgcacgcgcgaccaccacctcatcatcttggggatcatacgccggcggcgccatgcacggcgccgaaatggcgctggcggcggcggcggcggtggaggacgaggtggcgccggagttcttcccggtgggcctcgtcgtcggcgacgggcacggctcgtatttcgacgggctgaagagggatcagcctttctgcccgccggacaagacgtgcgccgccaacggcggcacgccctacacccccggctgccttacgatctaccaatgcaacaatgggcggggctag

SEQ ID NO: 92904 - DNA, 727 bp, Oryza sativa
  Clone ID: PAT_MRT4530_91340C.1
attcccggcctcgatccacgcgtccgaccaattacactcaagaaaaacagcgctaatggcccagaacaagaccattgcggtggccctgctccttgccacccttgtggcggtcatgggaaaggagccagagacgctagaggaggcagtgagagctgggtgcaaagaggaatgcagtgagcagaaaaagaaagcccccatcgacgagaaacaatgtgaagacttctgcttcatcaagaccaagtctatatttgaggcccataagggagtgaaggatctaaaggcggatagattcatagatttttgcaacaatgagtgtaatgcagtatataaggaggatcccgccacaagcaagaagtgtgcagaaagttgcgaagctgatgctaaggaggccgaggtattccttgataaagtcgtcgcttatattcaaacaacgaaacaagcatgattatattatgtagtacctccccatctgttccttcatcatgaccgagcgacgacattattaatggttctcacccaacggccagccctgcattacattgtcatgtttattccttttaccttttaagttgtttccttttgttgaagtttataacttccgagtgattgatttggtatgtcgttcttcccaatattacgggagacatatgtaataatatttcaattgatgattaaataaatccagaggtgtttgggcttttagcaaaaaaaaaaaaaaaaaaaaaaa

SEQ ID NO: 92905 - DNA, 315 bp, Oryza sativa
  Clone ID: PAT_MRT4530_91341C.1
atgaacttgtacatggccctcaatcgagaatggtggtgccggagcctgagacgatgtcaaggttttttcgacagcgatttgtgggtgacggtggtgaaccgtgggcggtggcgtgagtacggatcggcgtcgatggcgcttgagacagaggaggcggcagtgacatcgcgttgtcggaggggatcaatgaggcatggcaatggcgacgatccgacgtcagcggcgcggaggaaattggcgaggttgaccaacggagttatgatggtgccgaggagatcgaagaggcaagcgacgatggccacagcgatagtgatc

SEQ ID NO: 92906 - DNA, 285 bp, Oryza sativa
  Clone ID: PAT_MRT4530_91342C.1
gaacactcttgatagagcctaaaccacaagaacccacaaaacaccagtacgattgggatgttgcaaccacattctctttcctacagaaatatggtctaacaggagaattcaagataaatgttgaatgcaaccacgctactctatctggacatagctgccaccatgagcttgagactgcaagaattaatggtctgcttgggaatattgatgccaacactggtgatccccagatcggttgggacaccgatcagttccttacagatatttcagaagctactttggtta

SEQ ID NO: 92907 - DNA, 654 bp, Oryza sativa
  Clone ID: PAT_MRT4530_91343C.1
atggcacgcctccacgtccccaggcttggcatgctgctcctgcaagaacgggtgttttgggctccactgcgtcatgtccaggtggcacacggacaccacctccatagtcgctggttccgcactgccactgacctagctgaccagcaccaccatgtaggccctggtggccgggccagccatgtggcagtagaatactacgtacggcacccaccgtatctcatcggcgatggcgagggagactggcacgaacatgttgagaatgttaccaagtcgatcgatggagaacggttaaccatggctaggattagacttttattgggcaagagtaaaattgatgccccatggccaccgccgactcaagtaagttacttggcatccttattgtgtgatattggaaaaacacccacagtaaggtattgggctgagtggaaaccttggcctccacctcaagaaattggcactacacatattcgagtgaatcaatgggcaagtgcaaaattatggaccttcctcacttggacatcccctgttgcagagaaatgggcagctgaactgaaagaaaaaggcataagattggaagatgttgaatttgattggaaaactcttgatccagatgtgcaagaggtcgattacattacatgggtttgcagttag

SEQ ID NO: 92908 - DNA, 2160 bp, Oryza sativa
  Clone ID: PAT_MRT4530_91344C.1
gcccgagggcctcaaccccctctgggctgtcccccccccccgcccgtgcattgctcaatggcttcctctctcctccgcgcctcgccgctctccctcctctcccgcctaaagccgctctaccctagccccaccgcctcgcacctccgccgcctcctactgctctccaccgcctccttcacctcgtcggcctcgtgctcgccgtctccgctccgaaccctagcggccaccgacgcggcgaccccgcagccggatgaggtagcggtgccatcgcccgcggccagaggcgaagcgcgagaggctgcagccactgcagtggcctgcgagaaacgcgatgtgctgcgatctcggcgccggtgacgccagccgtcgcgtgcgcctgggcggctggatcgctctccaccgcgcccccacgccggcctcaccttcctcacccttcgttaccgatccggcacggtccaggtgacaactttgccagaatatccagaagtttatgctgtggtgaacaaactaagagtagagttagtggttgcggtcgagggggttgttcgctcacgcccaacagaagccatcaacacagatatgaagactggggttttagacgttgctgcagatattatatatgtgctgaactatgtaactccttcctttcgttttccaatcaccactgctgatactgtaaaagagaattttcatgaagaaagttgcctgagatactgggttcccgacctacgcggacctcatataaattcaaacttcaacttgcacttgagaaatgttgaacgtaagaggcaagccgtagcaggaaaagaagatttttttacagacatgataaccattgtgccattagtttaatctgcatgttacctaaaaaattcctctgtcctcaagtgtataactacgggtgtagtatccttgtcctcatcgcattcagctacaatcggaaatcatggaggttactcgctgtttgcatcgctaccaccatgcgtggagcttggatgatgaatatgcgcgatcagatgagcaactcaagtttcaaaaacttgatagggtgttgtcagttatagcaatggaccttatgtagaagttgaacaaagaattaatgatacaaatgttccaagaggttgctgatgtccacctgcccatcctctctccaatgctaacctatacggaggcaatgaatcgctatggaacggataggcctgaccttcgttttgattggcagctgaaagatgttagtgatgcatttttgggcagtagcttcaagatttttgcagatacattagaaaacgggggtgtcatcaaggcattatgtgttcctggtggtgccaaagaatttccaaaagataacctaaaaaaaggaactgtctgcaatcaaacttcccaagctggagccatggacatgccttttatagaaattatggataatggagagctagaaggaattggtctacttgtggcaagtgtgaaaaccgttcatgaagaaggacaggagagaactctgcatccgagttctcgtgaaaataccttgtgaactctgttcgaggaataaacggcaaatagatagattggagaattcaggtcgaccatcaacaatttaccatcaggatagatacatcagcacattcaattctttgggtgacggattttccaatgtttgaatggaacagtgatgagcagagatacgaggcactacaccatcctttcactgcaccaaatcctgaagatatgaatgatctaccatcagctcgagccttggcttatgacatgatttacaatggagtggagattggaggaggcagtttgaggatatacaaaagtgatgtacaacaaaggatttttgagatcatcggtatctcacccgagcaggtgcatgctgtcattcataagccagtgtttttatctatagctcaattcaagcatgccttaatattcaaggcagaggaaaaatttggctatcttttagaatgttttgacatgggtgctcctcctcatggaggaattgcctatgggttagatcgtttggtgatgcttttggctggtgaaaattcaatccgggatgtgattgctttcccaaagactacaactgctcaatgttcactcaccaaagcgccatctcctgtagatccacagcaattgaaggatcttggcttccgtacgtga

SEQ ID NO: 92909 - DNA, 2298 bp, Oryza sativa
  Clone ID: PAT_MRT4530_91345C.1
atggtggccgtgctcgccctcctctccaccggcctctccctctccctctcccgcgcggacctcgccgccgtcgtcgtcgccgagccacggctgctctgcgcgaaggccgaccgtgcgtcgtcgcgcttctcctcccgcccgaccgcaatggtcggccccaccacgcagcccccaccaccgtcgtctcgccacgccgcgccgcgccgcgtcccgcggtgcgcgcctaaaatgcttgtcgcttcgcgccacggcgctcacccacgccgccgccgcgccggagggaacggcgtcgccgacgagctcgcgttgccactcgcgggcggcctcgcgctactcctcgccttcgtcaccgccgcagccgtgctctccggtggcgaccgccgcgaggaaggcgatcgccgccggccggacctgccaggcggcgcggcgggcccgcgagtcgccatcttctcggcgccgctgcctccgcccgacagctcgccggcgcggcaggagctggcggtgcggtcctggctggcgcttccggggaacgtcagcgtcgtgctcctcgccgcccacccgtcggctcacgcgctcgccgggaggctcggcggccgtgtcaccgtcgacgccgccatagatatctcgttcaccgggacaccattcttccactccattgttgcaagagctcaagctgctgattccgacatctgcgttctcgtcgacgccgagatcatcctgctcccggaaaccatcacattgctgaaacatttcagcagaagcgatctcgattggctcgttttttcagcgtcacgcaacatttctgctttcccctatcatctcgttgacaatgggacgcaatgggcggatgaacatggcaaacaagtcagcttcaagaaggagaatcagtctgacaagtgggcaggacatggcagtgacagggggctcattgtggcatggaacaatccaagcactcgtatggttgcaggagtaatgccttcttttctgaatggaagaggagtacacaattggtggctgattcatgaggttctctcatctgaaactagacttgtgtttgatgcaagcaatcttgttcttggattatatcctgaaaatttcagcgaaaagcgcagcacgagcactagcagaaatgttagtaaccctgatggatcctgggagtatgatgtcaatcgacatctagctgcactttatggatcgtattgctatgaattgccaagaagaaactcccccatggtgtataaagtggtgaagcagtttgaagattatatgtttagtaaaaatgaagggccaaacttgtcaaattctgtcataaacaaagaacaaaatgtacatccagagggaggtagcctgtgtgaaaaggagatcagctactcatcagcagttaatttgccacattctttagaaatgctccttgaacttgttgctgacaagaacaggtccgttgttcttgctgtggctggtgcaagttacagggacatgcttatgagctgggtgtgccgcttgcgccgtctccgggttacgaattttgtagtctgtgctctagatcaggagacatatgagttttctgttttgcagggtatgccggtttccagagatacattatcaccaaataatgtcagctttgatgactgccactttggaacccagtgttttcagcaagtgaccaaagtcaaatcaaggattgttctgaagattttaagactgggatacaatgtactattgagtgatgtcgatgtgtattggttccataatccagtgtcgttcctgcactctcttggccccggcacatttgcagcacaatcagatgaattcaatcaaactggacccataaacatgccacgccggctgaattcaggtttctactacgcgcgatcagacgacgccaccatcaccgcaatggagatgatagtaaaacatgcaacaaattcagggctatccgagcaaccgagtttctacgacatcttgtgcgggaaagatggcgcgaaccgcattggcgacgacagatgcctggagcccagcacgaacctcaccatcgtgttcttgagccgggacatgttccccaatggagcttacggtggcctctgggagaagaagcatggtgtgagctcagcttgcagggagcttgggtgtgtgatcatacacaacaactgggtgaatgggaggaggaagaagctgcatcgccagatggcctctgggctctgggactatgatccaggctctaggctttgcctgcagaattggagcaatgcaagtagattcagcgttcaaactgatgatcccgtttcatatgattcatga

SEQ ID NO: 92910 - DNA, 246 bp, Oryza sativa
  Clone ID: PAT_MRT4530_91346C.1
tcaggggatcctctctctcccgattccgttcgaccgccagccaccatcgacgggcgacgccgtgccgtcgacccctgcccgccccgcgtcggccccgcgccgtcgacgccggcccggcgcgcgacatcgacgcccgtcccgcgccatcggcccctgctcgcccagcgtcggccccgggccgtcgacgcgccgcccggcccgccggctcaccgccccacgccggtcctggtagggcatcgtcgccat

SEQ ID NO: 92911 - DNA, 637 bp, Oryza sativa
  unsure (1)..(637): unsure at all n locations
  Clone ID: PAT_MRT4530_91347C.1
ctcgttctcttcctctccctcacgctccacccagcgccgctgcttcccaggcagtgccgtcgctctcccctgcgcctgctgccacgccccactccggcgacccttctagccgccgccccgcaaccgtcgccggcctgaatcggtttcttggctcctcgcttctctgcccctaagctaaccccagccaccggtctcttgctgctgcagccgccgtggagatggccggtggaaacacagcgcacgcaactccggtggctgcatccctttcccccataggaagaatgcatgcttgaatcctgggcgtgcgtcccgtcgaagcgacagatgaggcactcttggtggatacctgcgaagaacctttacctgaatttgcaagcgtgggggagggtggttttggcgctgtaaaaactccggacgcaactggtcgcttgctcgttggtggaggcgcccagaaagagataggctcgggtagcctctaagatggcttcgcccgcggcgtgtgtgtgctcgccttgttcttaacctgttgatcaccccctgcaattacttctctgcaagcatagcanactgaaacaactgggttgacagttttaaattccttattatcaactatgtcctgaatttcgcacctcgaana

SEQ ID NO: 92912 - DNA, 720 bp, Oryza sativa
  Clone ID: PAT_MRT4530_91348C.1
agaagtaatctatctcatgaggataaaagttttggaatcagaagtatgagtgcttcattgtagtttcatcacgagatgatcagaaacacggaccaatggttcttcatcatgttccataaaacgattaattttgtggtagtcatacagcatagagccttgactgaatcatgttcatgatttagcaagcagaacactaacgtactgactaacgtacatatgaaaagaaagaaacaaatgtacaggatttggcattcagaatgagtaggaggaatttatcatcaaatagatcagataaacgtaaggtttcctcatcatgccaatacagtatcataaagaagaatcacatacagaacaaaggaaaatcggcaagaaaataaataaaatgttctctcagacaaatgcctcgattgtccccatggtttaatggaatggattagatcggactcgtcatctgtgtgttcatcaaggagaaccgcatccagaaatataacaatttagaacacctactcctatagtacacacgaagattgctagcgaaagaaacatttttacagctatatagcagtagtagcagaagaagaaagttaaatcgcgcaagcgcgacacgcaatgcaattctctcagacaaatgcctcgattgtccccatggtttaatggaatggattagatcggactcgtcatctgtgttcgtcatcacggagaatcgcaagccacaaaata

SEQ ID NO: 92913 - DNA, 348 bp, Oryza sativa
  Clone ID: PAT_MRT4530_91349C.1
ctcattggagccgaggatgccgctgcccccgaggtcgtggtggatggcgcgtgtgctgccgccgtgcgccatgaggagggtgccgccgccgaggggctcccatgaagaaggtgccgccattgtgccggagaagaaggtgatgccgccgaggagagaacgccgcccgctggggaaagggcatcgccggccaggaggagggtggtacgaggcaccgcggctgaggcgccgcccgccttgggagggcgccacagctaaagcgtcggtttccaagggcaggacgccacccgccggggaaaagaccctccgggcgggtgagggcaccctggccgcggggtccttgattttcat

SEQ ID NO: 92914 - DNA, 215 bp, Oryza sativa
  Clone ID: PAT_MRT4530_9134C.1
atcagaaaacaatcaatctggttacggtgcactaggcaacagatttctgagtttttttacacataataggtctagatttagcattaaccacgagcttgaacattttatttaaacttaaacttaaaatgtcactatttttcacagtatttacctagaactatgaattatagaattaaaccttaacacacacttttattaggtttgcttttcttttt

SEQ ID NO: 92915 - DNA, 1060 bp, Oryza sativa
  Clone ID: PAT_MRT4530_91350C.1
atggcctctctctcctcgcgttcagttcacaccgctcaatccttatcctctcccacccagcggttctccccatctctctctcctctactcctcagccttctcccgctccaccatcatgtggcggcggacgccgcctcgacggcgggggcggcggcggcgacaggcggacgcggcctcgtctgcgggggcggtggcggcaagcggacacggcatcggccgcggcgacgagcggacgcggcctcatcggtggcggcggcaagcagacacggcattggcggcagcggcggctgcgacgacggacgcggcctcgtcggcgacagcgaccagcggacgtggcatcggtggcggcagcggcaacaggcggatgcggcctcctcggcggcggcagcaacgagcggacacggcctagtcggctgcggcgaccagcggacgcggcatcggcggcggcggcggcgaccagcggacgtggcctcgtcagggttcttgctagttcatgcgtcggggttcttgctagttcttgtagtatctctttttctctgttgttggttcttctcggctcttggttcttctatgttcttggtacttgctagttcatgttcttggttcttctatgttgttggctctccacccagcgccgccgcttcccaggcagtgccgtcgctctcccttgcgcctgctgccacaccccactccggcgacccttctagccaccgccccgcaaccgtcgccggcctgaatcggtttcttggatcctcgcttctctgcccctaagctaatcccagccaccggtctcttgctgctgcagccgccgcggagatggccggtggaaacacagcgcacgcaactccggtggctgcatccctttcccccatagattaccttgtttgatggtcctactgcggctgcggaagactgatgatcatgtgactctctggttctacagcttcttctggaattggaagaatgcatgcttgaatcctgggcgtgcgtcccgtcgaagcgacagatgaggcactcttggtggatacctgcgaagaacctttacctgaatttgcaagtc

SEQ ID NO: 92916 - DNA, 1267 bp, Oryza sativa
  Clone ID: PAT_MRT4530_91351C.1
cacgcgtccgttcttttcctatcatttgattcattgttaaatatacttttatgcatacgtatagttttacatatttcacaaaagtttttgaataagacgagcggtcaaacatatgctaaaaagtcaacggtgtcaaataaaacgaaacggagggagtacatttttataaacttgattaaacttatttgacaaaaaaggtaaaagtgtattataatatataaaacgaagaaagtaaatcataagtcgtcacttggaaatcaacctgatttccaaatagttcagtacgtgcatgtacgaaagcgtgcttcatgggtaagccgtatgaggaacacgtcttaggttatgttcgcacgtcctttttcattttcactctctcattttctacgcgcacacatattttttaatctgtgaaatgatgaatttattttctttataaagttattttaaaaaatcatatcaatctattttaatttttttaagttactacttaattaattatgtgttaatgagctatattattttcgtgcgagaatgagttacgaagacgatcgccggtgctctagccacgcagggcttcaatctttttttttagggaagtcatttagcgcgctttattaatctgtaaacataattacatcgttcactagaacgttcagcaagaaaattaaaaatttattaaaaaaacacaaataattcttaaacttaaaagcatgattagctagaacatgtgccacacaattagcttcctttttacaatgctcaacagagactttaacaaaatcatatatcaaaatctggtattcatagaaaattgccacagctgttgttgccgaaaaacctccatcttgtatcgtctccaccacctgcaaacaatctgattgggtaataatattttgacaaccaatttgctaggcgaggatgagtccatccctaagggcgtaggcttctgccattgctgcatcagcaatatgagataagtacctacaagaaccagctaaaaaagtcccttgtgaatctcgtatgactgctccggttccttctgtagactttttctttgccatcttataatttagtgttagagcatacaatagatatagctgatctagcagccatctgaatcctttcaccattcaccacttgcctcctttcccaccaaatgtaccatcccctgttaaaatcaattcagcaaaaccctgatcattcagcgctaggtttttcgtaccttttttagaaactttttttaccaaaattattttgtaggtgagca

SEQ ID NO: 92917 - DNA, 316 bp, Oryza sativa
  Clone ID: PAT_MRT4530_91352C.1
ctgggctgggcaatggtgggccccacacatcctatctcctacacccgctacgccctgtgtgtctgtctcgcagactggcatccgtgtttttcccacccaatctcgacggcgagctcgagcacggcgcgaggaggcacgggaaggagcactgctacgatgcggtgacgacagtgccagccgcgacaatggcgcccgtagccccaggcgatggtggacaacggcgacgacaacgaagagaccgccatccgtgcgcgcatcctttcccatgcgagcggcggtggtgtccgcagtcgctcggttcttctccttgccgctt

SEQ ID NO: 92918 - DNA, 2163 bp, Oryza sativa
  Clone ID: PAT_MRT4530_91353C.1
atggtgtactacggcaagttttccaacggtgtacaggtggctgtcaagaccctgcaccgcacactggaccgccgcaccgaggagcagctatattaccacatcaaggcaccaccaccaaggcacttgtttacaagtacctcgagaacggctcgcttgactgcgtcatgttcgagcatggcagcggcggtggcatggtgtgcaaggccagtgaggtacctgcacgaggagttccagcactggatcatgcattacaacatcaagttgcgcaaggtgctgctcattgccgatgtactacgtgcccaagtgtcgggcctctactgggctgcaccatgggctcgcatggagttgatgggagagtactgcagcaacgccccatgcaagtggttgttagatttgggcaagggtgctgctcatgacaccgacacccacaacctgttcgatggaatgcctagccaatctgagatgcccaaggaaaatcagaggatatctaagcctgtccccatcaattctaccgtgaacaaaaaggagaaatggctagacaaagctctagatcggatattggagaaggcaatcaccgtcatcctcaagggtgcatcatctccaacaccaatggcaccaccccttccagtgcacaccaactgtttgatggaatgccccaatgatagtagctcgagcacaatatcgagatccatctacatcaacgaggggactgctccgactgtcatcctggagcatgaggatggtgagggcaaggatcacatgcccttcattgtcatcaaggaccttcctgagttcacgcccactatgtgttcgatgatatgttctagctccgacaccaagcctgatctcactgtggctgttgtggttacttgtgccacttctgtggagtcatcaatggagatggtagctactggcagcaccaccgacgacacccacatcgacacccttgatagtaccaaggtgatgcccgccagctgttcgacggttggccttgatgtcaagggtggcgcagaccataccagggtcacgtgtcggaccatgatgggtgtgcccgagggcgttctagtacctgatgcatcatccaaagtcttctcgccatggttgatggctgaaatggatcttattccattgctgcccactgggtgttcgatgaaatgtcccaaagacaagaagctgctaatggggaatgctaagagaaattcatggccaccttcttggttgggtggagtgattagacgatgggagttgcaacctttgcattggccaggatccaaattatatttggaaggtttaccattgatgcccccatggccaccaccggctggagtaagcttcctggcatgggagccttttgatattggagttttagtcattggaaccgtgattttaacacaggagatggctgggttgaaaccatggcctccaccaagtctagtaagttctttggcatgggggatggagggaagagaggtctatggtcttgcaatgcaggggcatcatatgaatagccaatctatggaacttgctcgtattatatctaaagaacttgctcgtattatgaaggaaagacagttgagcaacaaagagctgcaatgtatatttgaaggtgcaagtcctgggaagatgtgtattaacccaaaagcattaattcatgatggatctttgaggtcattgctatccaagctacaagttcactctattccaaatgccctttccttcactaagcaagagcatatcaagtcattaagcttgtcccagtgttcagacataatggttcggtttgatctgacatggaacttggaggtgcatttggactctggcggggttctgcttcagttccttaatgctgcagctctactgtaccatagaagagttgcacaaggatataggcgcacactcaagctctctatatgtgaatcaatttccatgctccaggtgattaaatcaatagctgccaacttaatttgggatgtggaggctagaaatcgtttggtagtcaagaaacaagatgaagatttcagtggcaaccattgggcaagctttcagactaagatgcaaagggtgctaacatcaaggcttgccaagctctgcaaccgtgacaatacccacctgacgatgaccggcgtgcggggcacgcggggctacgtggcgctagagctgtag

SEQ ID NO: 92919 - DNA, 524 bp, Oryza sativa
  Clone ID: PAT_MRT4530_91354C.1
ccggggatcagacagtgctaaccatggccaacgattaccaagggaaagcccaagattttgccctcgtggtgccggttccggtggtgctacaggaagaccaagtaaacgtaggggagagaaaaattattgagcgtttagacaattttagtgccccccgtttagtggaatattttgacaataatccctgtgaaacctacggcggccgtcaatttatggatgcaatgccagcggcccccagcatgaccagaggattgcaagaaaaaataagcaatgaagcgttgggagtcaccattgaaaatcagttttcggtaggagaatacgacattctcatcctcagtgccaaggaatccaatggcctagaaacttggttaaaccaaaataattaccgcattccccctggagcgaccgatgtattgggagcatatattaaacaagggctaaagttttttgttgctaaagtcaacctgaaagaattcgatcgccaaggatttcaagccttacggccgctgatgatggcctatgaa

SEQ ID NO: 92920 - DNA, 435 bp, Oryza sativa
  Clone ID: PAT_MRT4530_91355C.1
atcaccggcaaggctctcatgctggacgagatcatcaactatgtgcagtcgctgcagcgtcaggtcgagtttttgtccatgaagttggcgaccatgaatcctcagctggactttgacagccattacatgccttccaaagatatgagccatatgccagtacccgcatacccgtcaagcgatccgaccaccaccaccgcgttctcctacaccggctcacccgccactgctgatccattcaccgtctacaactgctgggagctcgacctccacaccgctatgcaaatgggagccaccaccggactcagccaagacggtccaatcgcaacgatggcaccctctccctcgccattgccgcaccatcctcctcttcacggcttctacggggggcagcagcagcaggggacgacagtaaaccacatgaaggccgagccataa

SEQ ID NO: 92921 - DNA, 879 bp, Oryza sativa
  Clone ID: PAT_MRT4530_91356C.1
atggccgggaggaggctaccggcgttctgccgcggcggccggacggtggcggtggccgcggcgacgacgacgacgagggtgaggaagcgcgtgcagcgggtggcggccgcctaccacgctgcctccaagctgccgccgccaccggcggtggcgacgaaggcgagcttgggcggcggttgcgctgacgcgccatgcgcgggagggtggtgccactcgtacggcgacggcgccgccgccgccgccgtcgctggcgccggcggcggtggcggtggcggcaagaaggacggtggcgggaggcgggtgatggtggtggcggacgggcgcgcggaggcggccggcgcgctgcagtgggcgctgtcgcaggccgtcaggcgcaacgacgcagtcctcctgctcgccgtcgtcaggccggcggcgaacgcgtcgtcagacggcggcggcggcggcggcgagtcgtcctgcgtgaacatatcgaggacgaggtgctaccagcagctggacgccatgaggagcatgtgtgaatcagccagaccagaggtgaaggtgaaggtgtgcgtgatggaggcggccggccgggagcgcgcgccggcggtggtggaggcggcgaggcgccacggcgcgtcgctgctcgtgctgggccagcggcggcggcggcgggcggcggtcgcgcggtggctgcagctggcgctctggccggcggtggcggcggcggcggcgaagagcaagtactggcggcggaggggcgcgcggaggtcgacgacgacggtggagtactgcatcgagcacgcgccgtgcgtggcgctgggcgtgcggcggcggagctccggcggctacctcgtctccagcaagcgccacaaggacttctggctcctcgcttaa

SEQ ID NO: 92922 - DNA, 1943 bp, Oryza sativa
  Clone ID: PAT_MRT4530_91357C.1
gtagaagaggtcaacataagcctgcgaggggggaagaccttgccggatccacacaagtccaaagctccaaatgtagacaagcctaccaaggaggcctctcctcctggagaagctccagaagctccaaaaacaaaaactggaagcaaagagaagcctgctgtcgactacaacgttcttgcgcatctcaaacggatcccagcactattgagtgtctatgatgctcttatgaatgtgcctgatctgcgtgaagctcttataaaggcgttgcaggctccggaagtttacgaagttgatatggctaagcatcgactctacgacaaccccttgtttgtgaatgagattaccttcgctgatgaagataacatcatcgaagggggcgatcacaatcgtcccctctacattgaaggaaacattggttctgctcatcttcgatggattctcattgacccaggatctgctgtgaacattctacctgttcgaagtctaactcgagtaggtttcacaacaaaagacttggagccaacagacgtggtgatctgtggctttgacaaccagggcaagccaacattaggcgccattactatcaagatccaaatgtctacattcagcttcaaggtgcggttctttgttattgaagccaacacatcatactctgctctcttgggacgaccgtggattcacaagtaccgtgtcgtgccgtctactctccatcaatgcctaaaattccttgacggcaatggagtgcaacagcgcatcattggcaacttctcaccatacactattcaagaatcatatcatgccgacgccaagtattacttccctgttgaagaaaacaagcaacaacttgggcgaacagcaccggcagccgacatcattattgaacccggcaccgagacaacccctgaggtgagacgcctcattatgccgtgctccccaatcattagcgaatcttcgtcaaggaatcgcaagaatagtaggcggggaaattcttcttcagcaaccaacctcagcaccaagcttccatctcccgctgaaaccagcacgtctgccccatctattacaccaatattgctcaaagtaagacgctctacctcaacaccgatcaccttgggggcaacctctcgaggaagcgagaaaccgcccaaaagcaacggcgatgtgccaactaccatcaccttacaggcaagatggattccaagcaaggaagccgcgcttgcacaacagggagtggtcaagaagagagttgcagagatagaggaggtaaaagcgggtgctcagtgcatgcagcccccagccctctacacttcagtttctaccccgttagaggaatgggcaattccagatccatcttcttctacatcccggaccattctctacaaggtcccacaggtacaagagtgtgattctataatcgaattccctaagcctcattctgatacagaagaagcgtgcacgaccatgaaggctgagcctagaatggctcgcctattggagaaggcgggcatcaacctacagcgaaacaacaggttgccaccacctccagcagttgcagctgttggggtagaagaggagcttgatgttgcaggggctcttaaacaacttgacgacggtggccaaccaaccattgacgagttggtggagatgaatttaggaactaaggatgatccacaccctattttcgttagtggcatgctgacgaaagaagagcgagaagactatcgaagcttcttgatggaattccgagattgcttcgcttggacatacaaggagatgccaggacttgaccctcgtgtcgccacccataagctggcgattgatccccaatttcggccagtgaagcaaccaccaaggcgcttaaggccagagttccaagaccaagtcatcgccgaagtcgatcgactcatcaacttgggttttatcaaggagatacaatatcctcggtg

SEQ ID NO: 92923 - DNA, 8316 bp, Oryza sativa
  Clone ID: PAT_MRT4530_91358C.1
atggaggaggtcgtcgggaagccgctctgccggagagcgccgaggatcgccggagctgtcgccgactgccaagacttctatccgttcccatgccggaggcctagacctgcggaggtaattaactgggagcttctcaaggccccagtaaccaggagaccacatcgcacaagaggaccttccatcatcaagaacaccccgccgccctttgtgattcagtttggatcactaccaccggtgacattcttcgagtatggctccaaggtctacatgcaacaagctcaagatgtgacccaattccaggaggcccagtctaagaagcaacgcaagcgtgcttctgccaaggcaaagaaggagcggcgaaccctcatgcttgaagcccggaccctcttgaaggagtccgttgtagctgagattaagggagacatccaagctgcacagaaactgcgcgtcaaagcttccaacaggcgttcaattactgcatccctgcgtgcccctgatccagtcgctactccaaagctgcctaccccaactgtgcaacacacagaggtggagctgcttgaggctctagaagctgtctccgacaaccttcgtcgacacatttcgcatactcgacgggcaaacagtcctcatcccctgcgcaactacaggaggaagtatcgcaaggtgcagcgtctacaccaactcgttagctcgcgcatcgcccagagctccctcctagaggaagactggtctcttgacacatctgtcctcatcaagaaggtgttcaagttcccaagcattctagagccaccttacgacttgttccctgacgaatgggcatgtgagccaactaagataaaggagaaagtcaggtgcgccatcatgaaagagtattggaagcggcgtgatagggagcacctcgtccttccaggctcaactatcttcgtcgactacaatacgtacacccctcgccagcagagcacgtgggagtcatgcctccacctgtctgcggtaggagggtcgtctgactacaacaacaacaggttcgccgtcctacggtctgaggcacccgctcctcgaagtgaggacttgcgacaagaacttcgtgagctgcaagaccgaatggcccaacttggaagacgactccaggatcatgaagcaccacgatcatcatcaacacaagctgggggcagatcaagacgataccagccaagttatcatcctcaacatgatcgccgcacgctggctcctcgacgtacgcttccatcaactcaagtgatgcaccagagacaaacagcgttgcctccacgctggaaccggtggtcaagacaccaagattatcccacatcttcacgtctcgctcaagaatggcgagttcgagaagctccatcttctcaagtgccgcctcatgttccatcttctccaagacgagaggtctatacacaaaggcgacgtgaaaccaacgcacctaacccagctacacggcaggtggcaccacctcttctcccgacgccgtcaattccaccaagacgtcagcatgcacctactgagaatcaacgcaagcgagagcgacgtcgtaacaaccgctacgctctctatagagagcttgaagacctggtgctaaaacacactcaagttcgtgttcgtccagatggagaagtgcatcaagaagatgaaaggatcgtgttccgtatctcccccagtttggagagggatgcgaggtataactaccttatagctcgtttaactccgaaaccccggagaacactagacgttgctgacaagaatagggagcaggcgttaactcaaccttgccccgtaaccatcctgcagcgagggaaggggccagttcaagctaccttaggcatatcgctatcaacatcagcaagacagtccaaggagaaccaatctactccaatggagggagtcgagcagacaccagtagagcaagtcgacaaggcgtctcgacaagaagaagctatcattaaccctatggttgatgttctacctcagcaggaatcatcctctgtgcctccagccagagttgaacaggtggcgggaagcaagaacatagaagatccaaaggaaagcattgtcatgtgcagcgcactagccgcgcattacgaaaccaagcccaatgccgcatgggttcccccgccggttactcacgacttcacctacccttctgatgaagagatcgtgccaaatccaagggcaaatttttccaagacgttcctccctcagttggatcaagagaaggatcgttatctgataggggcaaagcactccgacggagagggttatcctaataactttgatagtgcacctgcccatgtgacagcagaaggcgatcctaggcaacatgctagacaacacgctccacgtggtgagaatccatccattggaaactgggcaaccatgaaggaagtattcaagaagcactttgttgctatgaagaaagatttctctattgttgaactatcacaagttcgacaatggagagatgaagccattgacgactatgtcatccgcttccggaatagcttcgtgtgtctcgcaagggagatgcatcttgaagacgcaatcgagatgtgcgttcatggaatgcaacagcattggtctcttgaagtgtcccgacgtgaaccaaaaacatttagcgcactcagttccgccgtggcagcaaccaagctcgagtttgagaagtcaccccagataatggagctttacaagaatgcaagcgcctttgaccctaccaaacgctttaacgcaacaaagcctagtggtagtgggaacaaacccaaagttccaaccgaagctaattccacaaaagtcttctccaccgcacctcaaggacaggtgcccatgattggagcaaagaatgagcaagttgggggcaggcaacgctccacgcttcaagatcttctcaagaagcaatacatcttccgccgggagttggtgaaagatatgttcaaccagttgatggaacaccgtgccttgaatctgcctgaaccacgaagacctgaccaggtaaccatgactgacaatccattatattgtccgtatcataggtatatcggccatgctattgaagattgcatcgccttcaaagaatggctccaaagggcagtcaacgagaaaagaatcaatcttgatgcagacgccatcaacccagactaccatgccgtcaatatggtgtccgttgagcctttccctcaaaaacaaagagaaggtaggcgtgcaacatcatgggcgccgctggcccaagttgaagatcaaattgcaaagataatgctgacgaaagcacccgccactcatgtggaggctagccatggcgacaacaaccgagcatggagtattgtgcgatggaagcctcaaccaatgagctttccaccccgtcgcccacaaatgaagttgtcaccgcatactcacccgacttcaagaagatggctagatccaagtcggcgacgtcctccacctcgatttgtccccttctcagagggagacgagtcttttccccgccggggtcgtgagctacctactttggcgcaatttctgcccaagggttgggagcagtcctcaacaagcacaagggaggctaagggggtgaacaattctatcccgactccagacattgctccatgcaatgtcatcctcacctataatgactccacgagtaccggttccgatgaaacgtttacgggaagggagcgagaaatattccatgctgagttggatccagagaagacgaaggtagaagaggtcaacataagcctgcgaggggggaagaccttgccggatccacacaagtccaaagttccaaatgtagacaagcctgccaagaaggcctctcctcctggagaagctccagaagctccagaaacaaaaactggaagcaaagagaagcctgctgtcgactacaaagttcttgcgcatctcaaacggatcccagcactattgagtgtctatgatgctcttatgatggtgcctgatctgcgcgaagctcttataaaggcgttgcaggctccggaagtttacgaagttgatatggctaagcatcgactctacgacaaccccttgttcgtgaatgagattaccttcgctgatgaagataacatcatcaaagggggcgatcacaatcgtcccctctacattgaaggaaacattggttctgctcatcttcgacggattctcattgacctaggatctgctggcaagccaacattaggcgccattactatcaagatccaaatgtctacattcagcttcaaggtgcggttctttgttattgaagccaacacatcatactctgctctcttgggacgaccgtggattcacaagtaccgtgtcgtgccgtctactctccatcaatgcctaaaattccttgacggcaatggagtgcaacagcgcatcactagcaatttctcaccatacactattcaagaatcataccatgccgacgccaagtattacttccctgttgaagaaaacaagcaacaacttgggcgaacaacaccagcagccgacatcattgttgaacccggcaccgagacaacccctgagcacgtctaccccatctactacaccaatattgctcaaagcaagacgctctacctcaacactgatcaccttgggggcaacttctcgaggaagcgagaaaccgcccaaaagcaacggcgatgtgccaactaccatcaccttacaggcaagacggagtccaagcaaggaagccgcgcttgcacaacagggagtggtcaagaagagagttgcagagatagaggaggtaaaagcgggtgctcagtgcatgcagcccccagccctctacacttcagtttctaccccgctagagaagaagcgtgcacgaccatgaaggctgagcctagaatggctcgcctattggagaaggcgggcatcaatctacagcgaaacaacaggttgccaccacctccagcagtatgcgaggactggtgggcacaagcggaagagtttatcaagaggagatgtaaagaacaaccaaagtacggtctcggctacatcaacgtagatgaacccgatgatgaagatgaagtatttgaagacgatatatttcattgttgcaccataagtaccactacaagaggtgatgctttactccaacaacacccctttgaggttgcagctgttggagtagaagaggagctcgatgttgcaggggctcttaaacaacttgacgacggtggccaaccaaccattgacgagttggtggagatgaatttaggaactgaggatgatccgcgccctattttcgttagtggcatgctgacagaagaagagcgagaagactatcgaagcttcttgatggaattccgagattgcttcgcttggacatacaaggagatgccgggacttgactctcgtgtcgccacccataagctggcgattgatccccaatttcgcccagtgaagcaaccaccaaggcgcttaaggccagagttccaagaccaagtcatcgccgaagtcgatcgactcatcaacgtgggttttatcaaggagatacaatatcctcggtggttagccaacatcgtccctgtggaaaagaagaatggacaagttcgagtctgcgtagactttcgcgacttgaatcgtgcttgtcctaaagacgactttcccctaccaatcacggagatggtggtcgattcaacaacgggttatggcgcactgtcaggttataaccagatcaagatggatctccttgatgccttcgacacggcgtttagaacccctaaagggaacttctactacactgtcatgccgttcgggttgaagaacgccggtgccacataccagcgtgccatgcagttcgtcctcgacgatttaattcatcattcagtggaatgttatgttgatgacatggtggtcaagaccaaagatcacgaacatcatcaagaagaccttcgcattgtcttcgagcgactacgtcgacaccaacttaagatgaaccctctcaagtgcgcctttgccgtccaatccggtgtcttcctcggcttcgtcatccgtcatcgagggatcgagatcgagccaaaaaagatcaaggcgatacttaatatgccgccccctcaagaactcaaggatctgaggaaactacaagggaagctggcgtacatccgacgcttcatctccaacctctcgggccggatccaacccttctcaaaactcatgaagaagggcacaccctttgtgtgggatgaagaatgccaaaatggcttcgatagtatcaagaggtacttgcttaatcctcctgtactggcagctcctgttaaagggcgcccccttattctctacattgcaacgcagcctgcctcgataggcgctctcctcgctcaacataatgatgaagggaaggaggtggcttgctactatttaagtcgcaccatggttggtgctgaacaaaattactccccaattgagaagttatgtttagccctcatatttgcattgaagaaactaaggcactacatgttggcgcaccagatccagctcattgcaagggcggaccctataaggtatgtgctaagtcagcctgtgctcaccgggcgactagaatttcttgctacacatccaatgccagatgactccccactcatcgccaatctaccggatgaagagattttcaccgcagagcttcaggaacagtgggagctttacttcgacggagcctcacgtaaggacatcaaccccgacggcacccctcgacggagagccggggcgggattggtgttcaaaactccacaaggaggtgtgatctaccactcgttctctcttctcaaggaggagtgttctaacaatgaggcggaatatgaggctcttatctttggtcttctcttggcgctctctatggaggtacgttccttaagagcccatggggattctcggctcattattagacaaatcaacaatatttatgaggttcgtaaaccagaactggtgccatattacacagtggcccggaggcttatggacaagtttgaacacatcgaggtcatccatgtgccacgaagcaaaaatgcgcctgctgacgccctggcaaaactggctgcagcattggtctttcaaggagacaatcctgcgcaaattgttgttgaagaaaggtggcttcttccagctgtcctagagctcatccccgaagaagtcaacatcatcataactaattctgctgaagaggaagactggcgtcaacccttcctcgattacttcaagcacggctctctacctgaagatcctgtcgagagacgccaactacagcgacgacttccctcatacatctacaaggccggtgtcctctacaagcggtcttacgggcaagagacagctaaaacctgtcatggttgccagatccatgacaatttcaagcaccaaccgccggctccgcttcacccgacggtcccttcttggccgttcgatgcctggggaatcgacgtcatcggcctcatcaatccaccttcttcaagggggcatcgcttcatcctcactgcaacagactacttctccaagtgggcggaagctgtgcctctgcgtgaagtgaagagcagtgacgtcatcaacttcctcgaacggcacatcatctaccgcttcggggtaccacatcgcattacctccgacaacgccaaagcctttaaatcccagaagatctataggttcatggagaaatacaagatcaaatggaactactccaccggttattaccctcaagcaaatgggatggccgaagccttcaacaagaccctcggcaagatcttaaagaagacggtagacaagcatcgaagggattggcatgatcgtctttatgaagcactatgggcgtaccgagtcacagttcgtaccccgacacaagctaccccatactctctcgtctatgggaatgaagctgtgttgccattggagattcagctaccatctctacgagtagcaatccacgatgaacttactaaagacgaacagattcgccttcgatttcaggagcttgatgccgtggaggaagagcgcctaggcgcccttcaaaatctggagttgtatcgccaaaacatggtgagagcctatgataagctcgtcaagcaacgagtcttcaggaagggcgagctcgtactcgttctgcgacgtcccatcgtcgttacacacaagatgaagggaaagttcgagccaaaatgggaggggccatacgtcatcgagcaagcatatgacggaggtgcttaccagctgattgatcatcaaggatcacaaccgatgccgccaatcaacgggagggagcaatcgtcatggtcattcggcgattcccgcgacacgttcttcggcaatcttatctga

SEQ ID NO: 92924 - DNA, 4161 bp, Oryza sativa
  Clone ID: PAT_MRT4530_91359C.1
atgtctacattcagcttcaaggtgcggttctttgttattgaagccaacacatcatactctgctctcttgggacgaccgtggattcacaagtaccgtgtcgtgccgtctactctccatcaatgcctaaaattccttgacggcaatggagtgcaacagtgcatcattggcaacttctcaccatacactattcaagaatcataccatgccgacgccaagtattacttccctgttgaagaaaacaagcaacaacttgggcgaacagcaccggcagccgacatcattattgaacccggcaccgagacaacccctaaggtgagacgcctcattatgccatgctccccaatcattagcgaatcttcatcaaggaatcgcaagaatagtaggcggggaaattcttcttcagcaaccaacctcagcaccaagcttccatttcccgctgaaaccagcacgtctgccccatctactacaccaatattgctcaaagcaagacgctctacctcaacaccgatcaccttgggggcaacctctcgaggaagcaagaaaccgcccaaaagcaacagcgatgtgccaactaccatcaccttacaggcaagacggagtccaagcaaggaagccgcgcttgcacaacaaggagtggtcaagaagagagttgcagagatagagaaggtaaaagcgggtgctcagtgcatgcagcccccagccctctacactttagtttctaccccgttagaggtatgggcaattccagatccatcttcttctacatcccggaccattctctacaaggtcccacaggtacaagagtgtgattctataatcgaattccctaagccttattctgatacagaagaagcgtgcacgaccatgaaggctgagcctagaatggctcgcctattggagaaggcgggcatcaacctacagcgaaacaacaggttgccaccacctccagcagtatgtgaggactggtgggcacaagcggaagagtttatcaagaggagatgtaaagaacaaccaaagtacggtctcggctatatcaacgtagatgaacccgatgatgaagatgaagtatttgaagacgatatatttcattgttgcaccataagtaccactacaataggtgatgctttactccaacaacacccctttgaggttgcagctgttggggtagaagaggagctcgatgttgcaggggctcttaaacaacttgatgacggtggccaaccaaccattgacgagttggtggagatgaatttaggaactaaggatgatccatgccctattttcgttagtggcatgctgacgaaagaagagcgagaagactatcgaagcttcttgatggaattccgagattgcttcgcttggacatacaaggagatgccaggacttgaccctcgtgtcgccacccataagctggcgattgatccccaatttcggccagtgaagcaaccaccaaggcgcttaaggccagagttccaagaccaagtcatcgccaaagtcgatcgactcatcaacgtgggttttatcaaggagatacaatatcctcggtggttagccaacatcgtccctgtggaaaagaagaatggacaagttcgagtctgcgtagactttcgcgacttgaatcgtgcttgtcctaaagacgactttcccctaccaatcacggagatggtggtctattcaacaacgggttatggcgcactgtccttcatggacggctcatcaggttataaccagatcaagatggatccccttgatgccttcgacacggcgtttagaacccctaaagggaacttctactacactgtcatgccgttcgggttgaagaacgccggtgccacataccagcgtgccatgcagttcgtcctcgacgatttaatccatcattcagtggaatgttatgtcgatgacatggtagtcaagactaaagatcgcgaacatcatcaaaaagaccttcgcattgtctttgagcgactacgtcgacaccaacttaagatgaaccctctcaagtgcgcctttgccgtccaatccggtgtcttcctcggcttcgtcgtccgtcatcgagggatcgagatcgagccaaagaagatcaaggtgatacttaacatgccgccccctcgagaactcaaggatctgaggaaactacaagggaagctggcgtacatccgacgcttcatttccaacctctcgggccggatccaacccttctcaaagctcatgcagaagggcacaccctttgtgtgggatgaagaatgccaaaatggcttcgataatatcaagaggtacttgcttaatcctccagtactggcaactcctgttaaagggagcccccttattctctacattgcaacgcagcctgcctcgataggcgctctcctcgctcaacataatgatgaaggaaaggaggtggcttgctactatttaagtcgcaccatggtcggtgctgaacaaaactactccccaattgagaagttatgtttagccctcatatttgcattgaagaaactaaggcactacatgttggcgcaccagatccagctcattgcaagggcggactctataaggtatgtgctaagtcagcctgtgctcactgggcgactaggtaaattggccctgctcatgatggaatatgatatcacttttgtgccgcagaaagcaattaagggccaagccttggcagaatttcttgctgcacatccagtgccagatgactccccactcatcaccaatctaccggatgaagagattttcaccgcagagcttcaggaacagtgggagctttacttcgacggagcctcacgtaaggacgtcaaccccgacggcacccctcgacggagagctggggcgggattggtgttcaaaactccacaaagagaactggtgccatattacacagtggcccggaggcttatggacaagtttgaacacatcgaggtcatccatgtgccacgaagcaaaaatgcgccagctgacgctctggcaaaactggctgcagcgttggtctttcaaggagacaatcctgcgcaagttgttgttgaagaaaggtggctccttccagctgtcctagagctcatccccgaagaagttaacatcatcacgactaattctgctaaagaggaagactggcgtcaacccttcctcgattacttcaagcacggctctctacctgaagatcctgtcgagagacgccaactacagcgacgacttccctcatacatctacaaggccggtgtcctctacaagcggtcttacgggcaagaggtcttacttcggtgcgttgatcggagtgaagccaatcaagttctccaagaagtccaccatggagtatgcggtgggcatcaaagcagaccaaaaatgtaccatagcatccgactggcagggtactattggccaggcattatggcggattgcctgaagacagctaaaacctgtcatggctgccagatccatgacaatttcaagcaccaaccgccggctccgcttcacccgacggtcccttcttggccgttcgatgcctggggaatcgacgtcatcggcctcatcgatccaccttctccaagggggcatcgcttcatcctcgctgcaatagactacttctccaagtgggcggaagctgtgccactgcgtgaagtgaagagcagtgacgtcatcaacttcctcgaacgacacatcatctaccgcttcggggtaccacatcgcattacctccgacaacgccaaatcctttaagtcccagaagatctataggttcatggagaaatacaagatcaaatggaactactccaccggttattaccctcaagcaaatgggatggccgaagccttcaacaagaccctcggcaagatcttaaagaagacggagcttgatgccgtggaggaagagcgcctaggcgcccttcaaaatttggagttgtatcgccaaaacatggtgagagcctatgataagctcgtcaagcaacgagtcttcaggaagggcgagctcgtactcgttctgcgacgtcccatcgtcgttacacacaagacgaagggaaagttcgagccaaaatgggaggggccatatgtcatcgagcaagcatatgacggaggtgcttaccagctgattgatcatcaaggatcacgaccaatgccgccaatcaacgggaggttcttaaaaaaatattttgtataa

SEQ ID NO: 92925 - DNA, 387 bp, Oryza sativa
  Clone ID: PAT_MRT4530_9135C.1
atgtccatgtcgttttcgccctttaccaacattcggtctggaacattcccagatcaatgggtgccagctctccgtgtcgctagctgtcccctgtccggtgttgagctgcaaaagcccccggcgaccaatcgcccgcgggagcttgcgcggccgcgggtcaacacgtcgcgcgggcgcgccggccgtgcagagacccaggaggagaccgtgccgcgcggaaccgtccagaagcgcacgcgcacgcgcagaggagccagccacaagtcgcggtcgcacgaacgggacgccggatcgcgcggatcttacggcgtgttacggcattgtgtcgtgggggatagctggctcgttggcgtacatgggatgggatgctcgacgtgtcatggctga

SEQ ID NO: 92926 - DNA, 1314 bp, Oryza sativa
  Clone ID: PAT_MRT4530_91360C.1
gaattcggcacgagcagcaatcctctgcttttgtcagttgtagttcacaacgatcgagcatccggccatggcgttgaacccgctgttcaccgtgacgttcaacgtgagcggcagcggcagcgacaactacggcgacttcatcgccggcatccgcaagagggtggccaacccgaggcacttctcccacaaccgccccgtcctcccgccggtggagcccgacgtcccgccgcgccgctggttccacgtcgtgctccggacgcagaccagcgagctcacgctcgccacgcgcgccgacaacctctacctggagggcttccgcggcagcgacggcaccagcgcgtggtgggagctcacccgcggcctcatcgccggcgccacctacctcggcttcggcggctcgtaccgcgagctcctcgggcacacggacaacatggtcggtgtcacgctcggcccgcagcagatgacgcaggccgtggacacgctcgccggtctcgccgccagcggcggcggcgcggcgcggcaacgggccggcgaggcgttggcgacgctgctcctgatggtgaacgaagccgtgcgtttcctgaccgtggcggagcttgtgggcggcttcatgaaccccagggcggtgaggaagagcgggacgatcaccgccgacatgaaggagcaggtgaacgggtggaaggtcttgtccagggcgctgctcaccatggacgcgctgcagctagaggactccaactcggcgtccaagcacaacaaggtggatacaaagaagatggagcaggagaagaaggcgtgggaggcggcggagaagttggccgtggaggcggccaaggcggtggggatcctgctgttcgtcgagaaggtgccggccgggatgacgaaggcgacggcgcttcagctgtttcatgggaactaaagttgctgctgctggtagatttcagcttgcttgatcgaacagcaaatcaatctgagcgactcgagtaaaattgattctccctccaacccaaaatataagtattttcagttattaatctggacaactgcgtgtccagatacatagacaaaagttgttatattttgagacggttgttatattttgggacggaggcagtagttaaatagcctctatagtgtgatgtaactactatatactcccttcgtcccaaaaaagacaaacactggtctccgtgtccaacgtttgactgtccgtcttatatgaaattttttttataattaatattttcattgttgttagatgataaaacatgattaataatttatgtgtgaaaaaaaaaaaaaaaaaaaaaaaaaaaa

SEQ ID NO: 92927 - DNA, 1488 bp, Oryza sativa
  Clone ID: PAT_MRT4530_91361C.1
atggaggaggtcatcgggaagccgccctgccggagcgcgccgaggatcaccggagctgccgccgactgccaagacttctatcagttctcatgccggaggctccttcttgcagggggactttccatcatcgagaacaccctgacgccctttgtgattcagtttggatcactaccaccggtgacattcttcgagtatggctccaaggtctacatgcaacaagctcaagatgtgacccaattccaggaggcccagtctaagaagcaatgcaagcgtgcttctgccaagacgaagaaggagcggcgaaccctcatgcttgaagcccggaccctcttgaaggagtccgttgtagctgagattaagggagacatccaagctgcacagaagctgcgtgtcaaagcttccaataggcgctcaagtactgcatccctgcgtgcccctgatccagccgctactccaaagcggcctaccccaactgtgcaacacacagaggtggagctgcttgaggctctagaagctgtctccgacaatcttcgtcgacacatttcgcatgctcgacgggcaaacagtcctcatcccctgcgcaactataggaggaagtatcgcaaggtgcagcgtctacaccaactcgttagctcgcgcatcgcccagagctccgtcccagaggaagactggtctcttgacacatctgtcctcatcaagaaggtgttcaagttcccaagcattctagagccaccttacgacttgttccctgacgaatgggcatgtgagccaactaagatcaaggagaaagtcagacgagccatcatgaaggagtattggaagcggcgtgatagggagcacctcgtccttccaggctcaactatctccttcgactacaacacgtacacccctcgccagcagagcacgtgggagtcatgcctccacctatttgcggtaggagggtcgtctgactacaacaacaacaggttcgctgtcctgcggtctgaggcacccgctcctcgaggcgaagacttacgacaagaacttcatggagaagtgcatcaagaagatgaaaggatcgtgttccgtatctcccccagtttggagagggatgcgaggtataactaccttatagctcgtctaactccaaaaccccggagaacacaagacgttgctgacaagaatagggagcagacgttaactcaatctcgccacgtaaccatcctgcagcgagggaaggggcaagttcaagctaccttgggcacgtcgccatcaacattagaatcatcctctatgcctccagccagagttgaacaggtggcgggaagcaagaacatagaagatccaaaggaaagcattgtcatgtgcagcgcactagccgcacaccacgaaaccaagcccaatgccgcatgggttcccccgccgattactcacgacttcacctacccttctgatgaagagatcgtgccaaatccaagggcaaatttttccaagacgttcctcccttag

SEQ ID NO: 92928 - DNA, 1478 bp, Oryza sativa
  Clone ID: PAT_MRT4530_91362C.1
atccccgaaaaatcaaaccctagggtttacgggggggcccggcaatggccgacgccggtgagctggagggcttccggcgcctgtccggcctcgccttcgacgagctctcccggcgggacctctcctccgcctccggcccgccacccgccgacctccccacgctcctccgcctctgcctcctgtcgctgcctctctccgccgacgcggagctggcgttacgccgctgcacccgcctgctcgcctccctccgcggcatcctctgccgcgacctcgacccctcactgctccccgccctcgaggtgttcctggacaatcttgtatctagcaaccaactgatgacttgctttactgcggccaatgctgttatgccgagacgctcaagaatcacctctctgggttcggtgtgcagtggtggcaaccttttcgtcatggagctcatgtcgcatcacttcatttcatctgtgcaagacgaggaggggtttttgagcgcactatcatggtcagcgaaggctaagttggaagttccagaaattggcctttcaggagctctttccctgctccacaagagctgcttgctctctattccgcctgctgtccaggctcatttcttactgctggcgtgcagatgtgctgacaatggggatctgaacatgaatttgctggcgttcgagcatgccatggatgtctatttgagttacttacctgcattaggtgttttcagaagaactagtggtgtaaaaaggccgttgggttgttccatgaaaagaagacctttgagctcttgtttacaggctgcaactcatcagaagctagcctgtgatatcaataggctggttttgttttgcaacttgcactccaatgacgacttgcccatcaatgagagtgatatagtccgtttcattgaagagaaccagcaagtacttcatgaacaatctaggcaggacactattactgctgtgaaaagcatagtatcaaatgtccttcttttggcaaagcaggaagagatggatagattatatcctaatgtttcagaggagattatctgccttgctgcagcacttaggctaatgggctcctcttttatacgaattatgcattgcattaggcaaatgacagtgggagatggctgccagaccacacattgtttagaaccttgcaaggtgtttaacatcgtatcagaaaccatcagcttacttgggcactatgaacctaatgagcttcagagaaatgacttatttgataccattggttgcattttcatgatgatgatggccaatctttgtgctactgaaatgtatcattttcttattgatggttcaaaagcatctaaagttcgttgtgctgatcaagatggtagtttgaaggcctctgttccgagaaaatcttctacagtgatagcattacggtttcagaacacacagcaagtttatattcaagataagcttggccctggctttggtgagggatgtctattttaa

SEQ ID NO: 92929 - DNA, 8647 bp, Oryza sativa
  Clone ID: PAT_MRT4530_91363C.1
atgctgcatgatgatcttcaacggggactttccatcatcgagaacaccctgacgccctttgtgattcagtttggatcactaccaccggtgacattcttcgagtatggctccaaggtctacatgcaacaagctcaagatgtgacccaattccaggaggcccagtctaagaagcaatgcaagcgtgcttctgccaagacgaagaaggagcggcgaaccctcatgcttgaagcccggaccctcttgaaggagtccgttgtagctgagattaagggagacatccaagctgcacagaagctgcgtgtcaaagcttccaataggcgctcaagtactgcatccctgcgtgcccctgatccagccgctactccaaagcggcctaccccaactgtgcaacacacagaggtggagctgcttgaggctctagaagctgtctccgacaatcttcgtcgacacatttcgcatgctcgacgggcaaacagtcctcatcccctgcgcaactataggaggaagtatcgcaaggtgcagcgtctacaccaactcgttagctcgcgcatcgcccagagctccgtcccagaggaagactggtctcttgacacatctgtcctcatcaagaaggtgttcaagttcccaagcattctagagccaccttacgacttgttccctgacgaatgggcatgtgagccaactaagatcaaggagaaagtcagacgagccatcatgaaggagtattggaagcggcgtgatagggagcacctcgtccttccaggctcaactatctccttcgactacaacacgtacacccctcgccagcagagcacgtgggagtcatgcctccacctatttgcggtaggagggtcgtctgactacaacaacaacaggttcgctgtcctgcggtctgaggcacccgctcctcgaggcgaagacttacgacaagaacttcgtaagctgcaagaccgaatggcccaacttggaagacgactctaggatcatgaagcaccacaatcatcatcaacacaagctgggggcagatcaagacgataccagccaagttatcgtcctcaacatgatcgccgcacgctggctcctcgacgtacgcttccatcaactcaagtgatgcaccagagacaaacagcgttgcctccacgctggaaccggtggtcaagacgccaagattatcccacatcttcacatcccgctcaagaatggtgagttcgagaagctccatcttctcaagtgccgcctcatgttccatcttctccaagacgagaggtctatacacaaaggcaacatgaaaccaacgcacctaccccagctacacggcaggtggcaccacttcttctcccgacgccgtcaattccgccaagacgtcagcatgcacctactgagaatcaacgcaagcgagagcgacgtcgtaacaaccgctacgctctctacagagagcttgaagacctagtgctaaaacacactcaagttcgtgttcgtctagatggagaagtgcatcaagaagatgaaaggatcgtgttccgtatctcccccagtttggagagggatgcgaggtataactaccttatagctcgtctaactccaaaaccccggagaacacaagacgttgctgacaagaatagggagcagacgttaactcaatctcgccacgtaaccatcctgcagcgagggaaggggcaagttcaagctaccttgggcacgtcgccatcaacattagtaagacagtccaagaagaaccaatctactccgatggagggagtcgagcagacaccagtagagcaagtcgacaaggcgtctcgacaagaagaagctatcattaaccctatggttgatgttctaccttagcaggaatcatcctctatgcctccagccagagttgaacaggtggcgggaagcaagaacatagaagatccaaaggaaagcattgtcatgtgcagcgcactagccgcacaccacgaaaccaagcccaatgccgcatgggttcccccgccgattactcacgacttcacctacccttctgatgaagagatcgtgccaaatccaagggcaaatttttccaagacgttcctcccttagttggatcaagttgcaagtcgacctggtgctaacactcgcatgaaggctatcgctatcaagaatgttgagacaactccttctcaagcaagaaaagacctggaagaacatgttgaagttgaagatcttgatgagttagagtctacctcatcgtcatcgctggaagtgaatctcgatctccctcgctataatgaactcaacccatccctgccttcagacggagagggttatcctaataactttgatagtgcacctgcccatgtgacagcagaaatcgatcctaggcaacatgctagacaacacgctccacgtggtgagaatccatccattggaaactgggcaaccatgaaggaagtattcaagaagcactttgttgctatgaagaaagatttctctattgttgaactatcacaagttcgacaacggagagatgaagccatcgacgactatgtcatccgcttccagaatagcttcgtgcgtctcacaagggagatgcatcttgaagacgcaatcgagatgtgcgttcatgggatgcaacaacattggtctcttgaagtgtctcgacgtgaaccaaaaacatttagcgcactcagttccgccatggcagcaaccaagctcgagtttgagaagtcaccccagataatggagctttacaagaatgcaagcacctttgaccctaccaaacgctttaacgcaacaaagcctagtggtagtgggaacaaacccaaagttccaaccgaagctaattccacaaaagtcttctccaccgcacctcaaggacaggtgcccatgattggagcaaagaatgagcaagttgggggcaggcaacgctccacgcttcaagatcttctcaaaaagcaatacatcttccgccgggagttggtgaaagatatattcaaccagttgatggaacatcgcgccttgaatctgcctgaaccacggagacctgaccaggtaaccatgactgacaatccattatattatccttatcataggtatgtcggccatgctattgaagattgcatcgccttcaaagaatggctccaaagggcagtcaacgagaaaagaatcaatcttgatgcagatgccatcaacccagactaccatgccgtcaatatggtgtccgttgagcctttccctcaaaaacaaagagaaggtaggcgtgcaacatcatgggcgccgctggcccaagttgaagactaaattgcaaaaataatactgacgaaagcacacgccactcatgtggaggctagccatggcgacaacaaccgaccatggagtgttgtgcgacggaagcctcaaccaatgagctttccaccccgtcgcccacaaatgaagttgtcaccgcatactcacccaactccaagaagatggctagacccaagtcggcaacgtcctccacctcgatttgtccccttctcggagggagacgagtcttttccccgctggggtcgtgagctacctactttggcgcaatttctgcccaagggttgggagcaatcctcaataagcacaagggaggctaaggaggtggacaattctaccccgactccaaacattgctccatgcaatgtcatcctcacctacaatgactctacgagtaccggttccgatgaaacgtttacgggaagggagcgagaaatattccatgctgagttggatccagagaagacgaaggtagaagaggtcaacataagcctgcgaggggggaagaccttgccggatccacacaagtccaaagctccaaatgtagacaagcctaccaaggaggcctctcctcctggagaagctccagaagctccaaaaacaaaaactggaagcaaagagaagcctgctgtcgactacaacgttcttgcgcatctcaaacggatcccagcactattgagtgtctatgatgctcttatgaatgtgcctgatctgcgtgaagctcttataaaggcgttgcaggctccggaagtttacgaagttgatatggctaagcatcgactctacgacaaccccttgtttgtgaatgagattaccttcgctgatgaagataacatcatcgaagggggcgatcacaatcgtcccctctacattgaaggaaacattggttctgctcatcttcgatggattctcattgacccaggatctgctgtgaacattctacctgttcgaagtctaactcgagtaggtttcacaacaaaagacttggagccaacagacgtggtgatctgtggctttgacaaccagggcaagccaacattaggcgccattactatcaagatccaaatgtctacattcagcttcaaggtgcggttctttgttattgaagccaacacatcatactctgctctcttgggacgaccgtggattcacaagtaccgtgtcgtgccgtctactctccatcaatgcctaaaattccttgacggcaatggagtgcaacagcgcatcattggcaacttctcaccatacactattcaagaatcatatcatgccgacgccaagtattacttccctgttgaagaaaacaagcaacaacttgggcgaacagcaccggcagccgacatcattattgaacccggcaccgagacaacccctgagcacgtctgccccatctattacaccaatattgctcaaagtaagacgctctacctcaacaccgatcaccttgggggcaacctctcgaggaagcgagaaaccgcccaaaagcaacggcgatgtgccaactaccatcaccttacaggcaagatggattccaagcaaggaagccgcgcttgcacaacagggagtggtcaagaagagagttgcagagatagaggaggtaaaagcgggtgctcagtgcatgcagcccccagccctctacacttcagtttctaccccgttagagaagaagcgtgcacgaccatgaaggctgagcctagaatggctcgcctattggagaaggcgggcatcaacctacagcgaaacaacaggttgccaccacctccagcagtatgtgaggactggtgggcataagcggaagagtttatcaagaggagatgtaaagaacaaccaaagtacggtctcggctatatcaacgtggatgaacccgatgatgaagatgaagtatttgaagacgatatatttcattgctgcaccataagtaccactacaataggtgatgctttactccaacaacacccctttgaggttgcagctgttggggtagaagaggagcttgatgttgcaggggctcttaaacaacttgacgacggtggccaaccaaccattgacgagttggtggagatgaatttaggaactaaggatgatccacaccctattttcgttagtggcatgctgacgaaagaagagcgagaagactatcgaagcttcttgatggaattccgagattgcttcgcttggacatacaaggagatgccaggacttgaccctcgtgtcgccacccataagctggcgattgatccccaatttcggccagtgaagcaaccaccaaggcgcttaaggccagagttccaagaccaagtcatcgccgaagtcgatcgactcatcaacgtgggttttatcaaggagatacaatatcctcggtggttagccaacatcgtccctgtggaaaagaagaatggacaagttcgagtctggggtagactttcgcgacttgaatcgtgcttgtcctaaagacgactttcccctaccaatcacggagatggtggtcgattcaacaacgggttatggcgcactgtccttcatggacggctcatcaggttataaccagatcaagatggatccccttgatgccttcgacacggcgtttagaacccctaaagggaacttctactacactgtcatgctgttcgggttgaagaacgccggtgccacataccagcgtgccatgcagttcgtcctcgacgatttaatccatcattcagtggaatgttatgtcgatgacatggtagtcaagaccaaagatcgcgaacatcatcaaaaagaccttcgcattgtctttgaccgactacgtcgacaccaacttaagatgaaccctctcaagtgcgcctttgccgtccaatccgttgtcttcctcggcttcatcatccgtcatcgagggatcgagatcgagccaaagaagatcaaggcgatacttaacatgccgccccctcgagaactcaaggatctgaggaaactacaagggaagctggcgtacatccgacgcttcatttccaacctctcgggccggatccaacccttctcaaagctcatgaagaagggcacaccctttgtgtgggatgaagaatgccaaaatggcttcgataatatcaagagctacttgcttaatcctccagtactggcagctcctgttaaagggcgcccccttattctctacattgcaacgcagcctgcctcgataagcgctctcctcgctcaacataatgatgaagggaaggaggtggcttgctactatttaagtcgcaccatggtcggtgctgaacaaaactactccccaattgagaagttatgtttagccctcatatttgcattgaagaaactaaggaactacatgttggcgcaccagatccagctcattgcaagggcggactctataaggtatgtgctaagtcagcctgtgctcactgggcgactaggtaaatgggccctactcatgatggaatatgatatcacttttgtgccgcagaaagcaattaagggccaagccttggcagaatttcttgctgtacatccagtgccagatgactccccactcatcaccaatctaacggatgaagagattttcaccgcagagcttcaggaacagtgggagctttactttgacggagcctcacgtaaggacgtcaaccccgacggcacccctcgacggagagctggggcgggattggtgttcaaaactccacaaagaggtgtgatctaccactcgttctctcttctcaaggaggagtgttctaacaacgaggcggaatatgaggctctcatctttggtcttctcttggcgctctctatggaggtacgttccttaagaacccatggggattctcagctcattattagacaaatcaacaatatttatgaggttcgtaaaccagaactggtgccatattacacagtggcccggaggcttatggacaagtttgaacacatcgaggtcatccatgtgccacgaagcaaaaatgcgccagctaacgctctggcaaaactggctgcagcgttggtctttcaaggagacaatcctgcgcaagttgttgttgaagaaaggtggctccttccagctgtcctagagctcatccccgaagaagtcaacatcatcacgactaattctgctaaagaggaagactggcgtcaacccttcctcgattacttcaagcacggctctctacctgaagatcctgtcgagagacgccaactacagtgatgacttccctcatacatctacaaggccggtgtcctctacaagcggtcttacgggcaagaggtcttacttcggtgcgttgatcggaatgaagccaatcaagttctccaagaagtccaccatggagtatgcggtgggcatcaaagcggaccaaaaatgtaccatagcatccgactggcagggtactattggccaggcattatggcggattgcctgaagacagctaaaacctgtcatggctgccagatccatgacaatttcaagcaccaaccgccggctctgcttcacccgacggtcccttcttggccgttcgatgcctggggaatcgacgtcatcggcctcatcgatccaccttcttcaagggggcatcgcttcatcctcgctgcaacagactacttctccaagtgggcggaagctgtgcctctgcgtgaagtgaagagcagtgacgtcatcaacttcctcgaacgacacaacatctaccgcttcggggtaccacatcgcattacctccgacaacgccaaagcctttaagtcccagaagatctataggtttatggagaaatacaagatcaaatggaactactccaccggttattaccctcaagcaaatgggatggccgaagccttcaacaagaccctcggcaagatcttaaagaagacggtagacaagcatcgaagggattggcatgatcgtctttatgaagcactatgggcgtaccgagtcacagttcgtaccccgacacaagccaccccatactctctcgtctatgggagtgaagctgtgttgccattggagattcagctaccatctctacgagtagcaatccacgatgaacttactaaagacgaacatattcgcctccgatttcaggagcttgatgccgtggaggaagagcgcctaggcacccttcaaaatttggagttgtatcgccaaaacatggtgagagcctatgataagctcgtcaagcaacgagtcttcaagaagggcgagctcgtactcgttctgcgacatcccatcgtcgttacacacaagacgaagggaaagttcgagccaaaatgggaggggccatacgtcattgagcaagcatatgacggaggtgcttaccagctgattgatcatcaaggatcacgaccaatgccgccaatcaacgggaggttcttaaaaaaatattttgta

SEQ ID NO: 92930 - DNA, 354 bp, Oryza sativa
  Clone ID: PAT_MRT4530_91364C.1
atggcacaaccaaatgtcattttaaaggctgagatgaaattggtaaggcagcctttcttcttggtggcatcgaagcaagcactgcacagcgcagagcaagaagccagactccagactgtgagagaaggggaggcaggatgggttgaggaggaggaggaggaggaagaaaggaggcgacttggtggatccaaggaggccactgcttttgctttgctgctgctgggattccacttgtttcagggagttgcgacctgccagtgtatcttcctgccctttcaattaattggagaattagaacctgtacaatcattgccaaattgcagtggctgttctctgtgcctttcattctcttaa

SEQ ID NO: 92931 - DNA, 1198 bp, Oryza sativa
  Clone ID: PAT_MRT4530_91365C.1
tttttttttttttttgcggaatagacttgtgcaatcttcaaatgaaattagtctaacaacatagggctctagactagatgcactagtgatcaatgacatcgattgatcgatctgggtagatatgaaagggtctcaatttgacaatgcctgatcatataagtataaaccagtgaaccaacagtgccaaagatagcacatctcatctatctacgacggtagtaacaactatactaacaaggatatatacacacacactggactagtccatctccaacagagggatatctgaattttgagatggacagtgatcttgatgcaatgttgatgttcagaacagactcgagatcagccggcttctcaggctcctcgacgtagagtggtacgaacgggccaggaggccggcgccgatgccgatgccgaggcagatgcctacgctgatgccgacgccgactctgacgccggcggtgaaccacgagaaatcgccgtcgtcgtcttcctcgcctgcaggcttcacgtagaagccgtcgtagtcggcgtcgccggcgtcctgctccggcttgtagcacctgtactccgacacctcggtttcatgcttcggaggcagcgtttctttggagtcctccgccggctcgccgtgctccgggatgggctccatgaaggccttgacgtggcgccgcctcctgaaccgcagctgcatcgccctcgtgaagacgaccggcgcgccgcgggccaggccggcgacgtacacctccaccaccggcggcttcgcctccttgctaccgcgcctcacgaggcccgacccgcgctgcgccgcgacctggcacttcatcacccagccgccgccgccagcgccggcgtcgcgcgtgtccaggatcccgacgacgagccgctcgcctctgcactggacgtcgaaccgcgcgctcccggacaccctgacgtccgccgtgctgacgaaggtgcaggagtcgccgccctccgtggcggcggcgccgacgccgccggcgcggtccaggcggagcgacacgtggccgttgctggcgacgctgccgccgctcacctcgagcacggtgtccggggtgagcggggcgtgggtgacggtcacagaatccagcatggactcgttcacctcgcacctgctcaccctcaggaagaacaccttgaggctcagccaagacgacggctccggcggcgtggccat

SEQ ID NO: 92932 - DNA, 1509 bp, Oryza sativa
  Clone ID: PAT_MRT4530_91366C.1
ccggactgcggcatcccgcgctcaccctctgtctccctgatacccacggatccacgccggcggcggtctccctctctctctacgcctctcttctccccgtcgtggcggcggcggcggcgaccggcgagggcgacgccaccgatcgggggcctctcacccgctcccctccctcactcaccggggcctcggtttcgccagctcggagggagttctttctctctctccgtagacgtctccgtgggttcttgcttgtctctgattcttcttgtggattggcggtggaggagcggggatcgatcgatctacccctggactcggattgactctcctctctcgctgggctatgagagacggaattttagttttaaacggcagctatttcatagcctggagtaagctttttcattcagattagcatggggggctgctgttgctgttcatcaagaggatctgagacagatagagcaccagttcatatctatcgtcagcaaaatcaagaggagcatgaaccattgtcttcagcctatgatggatcatctccagcttctgctatagttgctgttgacacaaatctggatacatccactcctgatacttaccgagcaccacctgcaccattgccttatgatgttagtttgccagtcccagaaaaccctgatttggagaagtcagacctgaagagcaaaaccgatgaccaacaggaggaatctttagaggtggatgagttcaaatcatgtgaaaaatgtgtcgctgaagataagcctgatgaggaggatgtttgcccaatctgtcttgaagaatatgatgcagaaaatcctcgctctttaactaaatgtgagcatcatttccatctttgttgcatacttgaatggatggagcgaagtgatacctgcccagtttgtgaccagattactttgatagatgatatgtatgaatagcattggagcatgggactattatgtttggtttgatgctagtttgttttaatgaggaagtacagtcagcaaagctcctgatctatcaacctggtcagacgggggtgctattggaatgaattttgagaaaactaagggaaaataattgaagacgggaatggcttgaaatttgttaaatatcatctcagctttttacattttgtttgaagcattaactgttcatgacaacaggaggatttgttagtatccatatctactgctggttcgattgcttcacagttgatgaaacccccagatgagctatctgtttctttgtagttttgaacttgggatgtcttccatttcatttctggttgcggttagcgtctgtataaatcatgacacgttagataggtgacagggaaaaaaaactttattctaatttatgttcaacgatcaaagctgtacaagcttcatgtatatccttcgccttttgattagtcagggactattaagtcccctgttgtgaaacaagttggctgatttatgtaaaatggtatacatttgcctgctttataaaaaaaaaaaaaaaaaa

SEQ ID NO: 92933 - DNA, 2606 bp, Oryza sativa
  Clone ID: PAT_MRT4530_91367C.1
ggagagagagagaactagtctcgagttttttttttttttttttctaacaatcgtttcttttttttctttcttgagcagtaacagagaactcgattacttgtaaatagcagtaaaatacatttagggcttaaccaagccagagtctcagcacggaacggatacaaagacacaaaacgaccacgagaaaaaaggaaacagagagaaccaacgcaaactgcaggttgttcagagaaaccatggtttcacaacctgatgcgcctctccccacacacgaaaacttgggcactcacgccagcaagacgaagccttaagtatcacttcacaactaaaacttgggcactcacgccagcaagacgaagccttaagtatcacttcacaactaaaacttgggtactcacgccagcaagacgaagccttagttatcacttcacaactatagctctcctcattttattcagtctcatatggcattgggttttgcagctcctcacgccccccatccgcatcgtcgatcagcagtcgacgccaccggcgttgtcgtccagctctgcaagcgccagcctcttcccttccccagcggcagccttggcaattagctcttccttgagcatggttttgagcttcctcatgctcgtggcgttaagttcctggacagtcggcttctttttcttcttctctttcttcaactcctttgctcccacatcctcagcatcatctgtgctcttcatctcttcagtcagctcatccttctgggtgccctccaccgtgaaagtaaactcatccagggacttcacgatggagttaactgaggcttccacctcctgttgagaaacctcctcctcactggatgcttcagtgacggaggagtcatccagggtcttcacaacagcggccttggaagcagatgagatcacaacagtggcatcgctctcagtttcatcatcactgaagttgtcggcattgtcgaaatccgatggtaggtcaccgctgaaatcatcctcttcatcatcaacctgattggcctcggcagtcaatccatcctccattgcgacctgcagcttttctacttccacttcatcagaatcagtggccacttcagaggggtcactctcatcatcagtctcctcactggaggcatattcctcagcggcgaattcctcatcaagcataccttcctcattggactcctcatcaatatcagattcttcactgtaatccccatcaagatcatcttcctcactgctctcagcgtctatccgatcagcctgcggattctcataggccgacccttccttcacttcattcagatcctcttcctcactggttttatcacctgttagatcagcctgtggtatctcaacggcagataatttctcaacttcgttgaggtcatcttcctcgctggtcttgtcatcggtcacatcagctggaagcttctcttctggaacctcatcggcatcaacttccttatcattcatctcaccagttatctccttcaatgcggacagtttaccaaagcccagaccatcaccaacagaggcatcttctatcttctcgctgagtggttccacaggttctggctttgacaggactcctaggattggtgaatcctccatgacttcttgggttttagctggttcctccccagttgcaactatttcctcctccttagggtcatcacagctcataactgaaattactgcaagttcagttggtgcagcagaagaaacaacttcctcaccctcctctgattccacctctttactgtttcctcccagaattttcgtagcttcctcttcctcatcacatttctcatcggaagcaacatcttttggatcctcttcctgaaccttcacctcctgcaacgccaccgccatgtcctccacctcctgctccaaatcaaccatcaccttcgatctcgcagacctcctagttgttgtcttagttgccgtgacctcctccaccaccggagcagcggccttccgagcagccgtcctctggctcctccgcagagtagctggggtaggcgcagcctcctccaccttgcgcgcagcggcggtccgcctagtggtcgcaggggtcgggatcggcgctggcgtggccctcgcgcggcggctggtgctgcgcagcgccacgcccggggtcctcacgatctccttgacgagatcccgcttcatctcgtcctcgccctcctcgacgtccaaccggatggcctccggcgacatcaccgacacgcggcggccgcgggggagcgggctcccgtgctgctgctcctcgccgatcgccgcggcggccttcaaagccgacttcatcgtcgacctgctcggcgtcgggaggcagagcgccgccgtgccgatctcgtcgaccccatccaccgtggggagcgactggagggcatcggccatggcggcgttggtcatgttggcgcggacgccgttgcgcttgcacagcgcctgcagctcgcggcgggagagcgcgtggaagtccatggccgccgccgtcgccgcctccacctccatctcttctcggcacctacctctcctcttacctcctcctcctgatttgggcgcggcggatttgtgggtggtggatcacggacgcgtggg

SEQ ID NO: 92934 - DNA, 655 bp, Oryza sativa
  unsure (1)..(655): unsure at all n locations
  Clone ID: PAT_MRT4530_91368C.1
actagtggatccccgggctgcaggatcggcacgaggggcaagttgatcgaagaatttgatgtcaagatcgaattgatgccgtgctgagtgatcacctcaacaattggcttactttgccatgttatcacggaccaagaacctagctttcgatttagagcctgctacatcgtacagttggggtgattgtcacacatttccatttcacctatnggatcgtgaaagcattttccgtctagagcgtattcagcttagcttctagtctttcaaaccaccacctgatttcagaggattcccaaaccttagaaagcttgatctgaatttagtgcatctcaacagagaggatctttaagttatgttgcacggttgccataatcttgaatggctgagcttagtcaggtgctatctcaatggcaaactggagttgtgtaatccattatcccgcctggcacacctagcagtaatccaatgtggtgcaaccatggtagaaatccacgttcccaagcttgctaacttcaaatatcatggagactttgtgtctatcgccataaatcccgcatcgaagctggaaaacgcatacattcggttcttcaaggcaactttcgaggacgctctttctgcacttctcaatggcattccgagcatacaaaatctgact

SEQ ID NO: 92935 - DNA, 1065 bp, Oryza sativa
  Clone ID: PAT_MRT4530_91369C.1
atgtcgtgcaattctgccgaggtcgcggccaacgacggcagcagcaatggcggtgagaagcagcagcagcaggaggaggaggtggtgtgcgtgacgggagcgggaggcttcatcggatcatgggtggtgaaggagcacctcctccgtggctaccgcgtcaggggaacagccagggatcccaccaagaacgcccacctgctcgcgctcgacggagccggcgagaggctcaccctgtgccgcgccgacgtcctggactccgagagcctgcgcgccgcgttcgccggatgccatggcgtcttccacgtcgcctccccggtgtccaatgaccctaatctggtgccgatcgcggtggaggggacgaggaacgtggtgaacgcggcggcggacatgggcgtgcggcgcgtggtgttcacgtcgtcgtacggcgccgtgcacatgaaccccaaccggagccccgacaccgtcctcgacgagacctgctggagcgaccccaaattctgccgccaaaccgacgtatactgctacgcgaagacgatggcggagaaggcggcggaggaggaggcggcaaagcgaggcgtgcagctggcggtggtgctgccctgcgtgacggtcgggccaatcttgcacccggccatcaacaccagcatcaaccacgtcgtccgctacctcacgggcgccgcgcccacctacccgaacgccgtcgcggcctacgtcgacgtccgcgacgtcgcccgcgcgcacgcactcgtctacgagcgccacgacgcccgcggccgctacctctgcatcggcgccgtgctccaccgcgcccatctcctccagatgctcaaggaacttttcccacagtaccccgtcacttccaagtgcaaggacgatgggaatccgatggtggaaccgtacaagttctcgaaccagaggctcaaggatttgggcttcgaattcacaccaatgaggaagtgtctgtatgacgcagtcgtatgcatgcaacagaaggggcacctcccgctggttggtaccgccgtaccggaccaaaatgtgacctctaatacgagctcgatcgtctaa

SEQ ID NO: 92936 - DNA, 702 bp, Oryza sativa
  Clone ID: PAT_MRT4530_9136C.1
atggctcaaggtggtccgattggcccacagcaccgcgggcagttcctcggtccacgagtccccatgcttcttgaggacgttgtacattttggttttgaggcctttgaggatctcagtgtttgcgcgctcgacttggccgttgctcttgggcgcttagtgtttatcgatcttgatgaccgggtaagcttcgggccacttggtgaatttgttgatggcgacatacagatgctgatacccgcctcggggcttgggctggctgatgagtctacttggcatgaactggcaagctttgcatcgtcggacccagtcctgggcgtcctagagcatggttggccagtaaaagccctgccaaatggctttaccgaccaaagtgcgcaaggccgaataggccccgcattccccctcatgggcatcgccgatgatctcgatgccttgttcccgagggatgcatttcaagaggactccattggcaccacgctggtagagggaagagtgcgactgccaaggtatgcccggatgtcggccatccaggcaacctgtcgtggggggtcgaggtcgaccccctcgggcctcgaggcctgggcttcgcggggcgtcagggtgataaaccatgagattgggaggaaatctggactaaaggatggtccagatgcactcctgatggtagttgaggggcacttcggacaattccccttcctataa

SEQ ID NO: 92937 - DNA, 370 bp, Oryza sativa
  Clone ID: PAT_MRT4530_91370C.1
atgaccgtgggcacggctgttcgaacacttatggggatcagccacgtcgggagacctccaagctttcatgacaaggcatttcgaaagccgacacaggcgaccgtcgatactcgtgcagagtgcacgattttcgaggcgcgactaggtggttacaaggaaacatgaaaaagaaaagaaaagaaggagggagggaaatcagactttcctcgggcggctagggcgcggcccgagaggaaggggcggctcggccgagctaaatggtccggccggcccaagaaggcggcccaaagcgcgcgcgcgggcggagaggagagagggagccggtgggccgggtccaccttgcgtggtcccgggtgggacccgcttgtcg

SEQ ID NO: 92938 - DNA, 1451 bp, Oryza sativa
  Clone ID: PAT_MRT4530_91371C.1
atggccgctctcagctcgcgccgccgccatggcagcctccgcctcctcgccgtggccctcctggtgctcgccggagtggcctcctccgccgccgcggcggggagcggccgcggcgcatttgacccatcccgcgtcgtgcagctctcgtggcgccccagggcgttcctgcacaaggggttcctgacggacgcggagtgcgagcacctgatctcgctggcgaaggacaagctggagaagtcgatggtggcggacaacgagtccgggaagagcgtcatgagcgaggtgcggaccagctccggcatgttcctcgagaagaagcaggtagttttcttttgtagtttgcgagagatgaaattcgatcaattatttcctatttacattagtattgtttgcaaagcactgaaccacgtagtcatatttgccatatggacgtcaatactgagtaacaggccagttctcaagctcgacgaagttgtagctaggatagaggagagggattgcagcttggacgttccttccaccaagataatggcgaatccattcaaatattacattatcagaatggccgagaagtatgagccacactatgattacttccatgacaaaaataatcaagctcttggaggacatcggatcgccactgtgctcatgtacctttcagacgttgggaaggggggagagaccatctttccagaagcagaggggaagttattacaacccaaggatgatacatggtctgactgtgctaaaaatggatatgcagtaaaaccggtaaagggtgatgcccttctgttcttcagtctccaccccgatgcaacaacagactctgacagcctgcacgggagctgcccggtcattgaaggtcagaagtggtccgcaactaaatggatccatgtgaggtccttcgacatctctgtcaagcagggagcttccactgacgggtgcgaggatgagaacgtcctctgcccccagtgggctgcagtaggggagtgtgccaagaatccgaactacatggtgggtaccaatgaagcacctggcttctgccggaagagctgcaatgtgtgtgcacagtaagttactgatccacccttgtgatacatagcagcacgccctcgataattgttgccgcggtaccgggtgtatataggactgagcatagcatgtgtaacctggaaggagttaagatgtactaagatccatttcgccttgttctgttcatgccgaatcgaatggaacacctatgccctggcctatgtgtaaactcttctttgcttcactttctgtggcaatcgattgcttttcttcttggaaaaaaaagttattcttctggtgaaactggttgcttgcaatttacaaaaacgagagacaactcaattgatctggaccagatttgataagtagactcgtagtatgtataaaaaaaaaaaaaaaaaactcgagactagttctcc

SEQ ID NO: 92939 - DNA, 1099 bp, Oryza sativa
  Clone ID: PAT_MRT4530_91372C.1
cactgtccagatgctccctattgcgacagaaatggttggacatgccttcatgaagctgtaaaggaaggtcagacagagtttgtggaatttatcctaaggacaccacaacttcgtaagctcatcaacatgcgaaataacaaggacggacaaactgctctgcatgcagctgtccggatgtgcaatcctaaaattgttgcctcgttgttgtctcataaagacacagacttcacactgaatgatcacaaaactggccagtcagtaatttggcaattatgtttgggttcagagcgtgccaagactttaaactggaatgaagtgtccatgcttatgactaaagctgatcctgaagctgcaaccacgcttcacccgtcagttcgcaagggaaacgactaactgatgaattagcaaggaatgttaagtcactcactcaaacatacacaagcaacacttcgctagtggctattctcatggcgacgataacctttgccgcagccttcaccctgcctgggggatacagcaacgattctggaagcgagggacttcctgtcatggcaaagaagttagcgtttcaagcattcttgatctctgacaccgtagcaatgtgctcctcgcttgccgtcgcattcatatgcatcctagcaaggtgggaggatcttgaattcttgctttactacagatcctttacgaagaagcttatgtggtttgcatacatggcgaccactatagcgtttgcaacgggtttatacaccgtgttggccccacgaatgctgtggttagctgttggaatttgtttcctttcggttttactgcccattctcactaagctgctaggtgagtggcctgtcgtgaagctcagatttcgtttgggtaagactttcaagactgatctccttgatatggtatgacgtcatcaaatttatattatttgttctgctttccaacactacatataagttcatgcaaaatgtatgttgtaatatatacattttattttggtgatatgtctagaagatatcatggagagttggagacgattaaaccagaggcaatatttatgagttactccctctatctcaaaatataagacataattattttt

SEQ ID NO: 92940 - DNA, 1704 bp, Oryza sativa
  Clone ID: PAT_MRT4530_91373C.1
atggatctcggcaagtcggcttccaccagcgcgaccctgaagaagctccaggaggatggcgcccttcctagccgtggaactacggagagggaagcaggaggtctgagcagggaaaccgtggagcggcgtgttggtcaggtgatgatcagcggcccgaccacggtgagcgacatccccgcgcccctttgtgaaaagggagcggcggagcgcgacgaagcaatcaatgtggcggcatctctgaaagagaaggtcgtcaaggaggcgtccgacgctgccactactagtggtggccaagctccgagtaaggcgaggaaattctcgtctgtgctcggacaccgccgcaagacggagactccctcggtaattttcaccttatcatccggttatatgacgaggaaggcttccgacacgtctccgccgcctgcacgacgtcagcgcattgtgacgatcggcgagaaggaggcgcgggcgaaagctgctcgggccaaggccgggggaacatccagcgcatcccctgccacggcatcaacagatgtcgttcccgtggtcgggagtcgggaggcgacgccgaccggccccgtcagtgatcctgctgggggtcgtagtctgccagaggccgccctcacctgggaggagctccaagtcaaaatggggcaccttctcgaagctggtgctcgcggcattggccgcgagatctcagaggtgagggcggagacgacggcggcaaacgcgcgcgccgagcggttggtgcgggaactggctgaggcccacgaggacctcacgaaaatgagggagctggtggccgggaacgagcgccaacgcaaagggctcgaggaccgcatatcggaactgggagacaatctctccgagattcgtggttcgctgcgggtgacctacaccggcctccaccagctcgccagggagtgcggcgtcgagtccacgaccccggtgaaccccgatgagttctcgttgacttcttctcttgtggagctggcgacggcgatgggggaaatcccctccaagcatacggccaggatcgcggaggagacgtccaacggtatcttcaccggggcgtgtcacgtccttgcgtgtgtaaggttgtcgcgccctgaactcgatctgcgtgagatcttggatcagggggcggcaagcgacacgcgtagggagcggtcgttacgtttagtagatctcgaggatgcccttgcgacccaagatcgtcgtatcctatactggaagacgaaatttgaagtgacggaactcaagagggcaatgctagccgtaaagaaagagcaagctgtggaaacgctccgaggccgcgaggtgtggttctcgtcttacttgaagagttgctgcacttcgatggccagggtgtgccgggagcttcgggtaatctgcggtgatcctgaggaattggcggccgggtacatctcgtggctcaacggggcctgtgcccaactcgatggcattggcaagcgaatcgatgaggccttgaagcaagagtgtcgtcgagcgagccgatatgccggaggacacgtgctggcttgcctgcgagatcaccgcccgcggctggatctcgaatttttacgtgaagtttttccacgttctcggaggaacccggcggagatagaccaccttgcgaggtcgatgtcgccgttggccgagaaagttttccaatcaatggactggcgttggccgtcttggtaa

SEQ ID NO: 92941 - DNA, 293 bp, Oryza sativa
  Clone ID: PAT_MRT4530_91374C.1
ctggtgcaccgctccagaagaggaatcgcccacttgcttcttcgccgatctctccctttgatcttccaggacatgatacgcagatttaaccgagtacattcctctcaaataaatggcccactacactggccaaggtcacctgtgacgggcccaaaccctcatctttgacggcttcgcgcatggtcagtgatcagtggtcactggtgacacccacctctgacgggcaagttactagaaggccgtcagaggtgttggtctccgctagccttgagcgagttaggacccgtcacagg

SEQ ID NO: 92942 - DNA, 1776 bp, Oryza sativa
  Clone ID: PAT_MRT4530_91375C.1
atgccggagaatcagctggatgttgaagcacaccatcctctactaagcgctcttcatcatgccaacgttcttgtagataataacaatgacaaggaattgtctcttatgatcatgatcctcggcccgtcgccggcctgccgcggccgatcccctcgcgggctcaccgccgccgctgctgagaacgcgccgctggccgtcgtgactgtctccacggaagaactagatggctacctcagctctcccggcgtcgactcccgtcaaccaaccgagattctcgactatgacgacttcggctacaactatgacttcaacaacttcgacgaccttgatgaagactacgaagacaactacactcctctctttttggcgtctttatggccgacaacgagacagaagaacaacggcatcgagcgtgagctaatcagacaacaagacatcgaaggcacatcagtttttcgcaccccacagcagaatgcggttgcggcgattacaattttggataccctccttgtcgacgggccccttgacaggtccatctccggcgatcttctagcaacgatggatctcggcaaatcggcttccaccagcgcaaacctgaagaagctccaggaggatggcgcccttcctggccgtgaaaaggcggagaggaaagcaggaggtctgagcagcgaaaccgtggagcggcgtgttggtcaggtgatgatcagcggcccgaccacggcccttcctttgactgatgtcgtcggaacgctcgcggatcatcaggtggcggcatctctgaaggagaaagtcgtcaaggaggcgtctgacgctgccaccaccagtggtggcgaagctccgaccaaggcgaggaagttctcggaggcgcgggcgaaggctgctcgggccaaatctgggggaacgtccagcgcatcccctaccacggtgtcgacagatgtcgtgcccgtggtcgggagtcaggaggtgacgccaagcggccctatcagcgatcccgctgggggtcctagtctgccagaggccgtcctcacctgggaggagctccaagtcgaaatgggccgccttctcaaagctggtgctcgtggcatcggccgcgagatctcagaggcgagggcggagacggcagcggcaaacgcgcttgccgagcggttggtgcgggaactagctgaggcccgcgaggacctcacgaagatgagggagcttgtggccgggaacgagcgccaaagcaaagggctcgaggaccgcatgtcggaacttggagacaatctctccgagatccgtggttcgctgcgggtcacctacaccggcctccaccagctcgccaaggagtgcggcgtcaagtccacgatcccggtgaacctcgatgagttctcgttgacttcttctcttgcggagctggcgacagcaatgggggaaatcccctccaagcatacgtccaggatcgcggaggagacgtccaacggtatctacaccggggtgtgtcacgtcctcgcgtgtgtaaggttgtcgcgccctgaactcgatctgcgtgagatcttggatcagggggcggcaagcgacacgcgtaaggaggtgatggaagaagtcagtgacctgggggagtctgtcctccccctttttgaagaagatgctgatgacgaggatgtccagcagcgcgggcagcccgagtcactggcgataattccggtactcgaatttgaaccacacgtctcacacgacgtcgaggaccatactcttgatgtggaggtcgagatggcgacagccacctcaagtgagtag

SEQ ID NO: 92943 - DNA, 828 bp, Oryza sativa
  Clone ID: PAT_MRT4530_91376C.1
cttgttgtttttttgtaccctggcttgattcttggacaaggatttatgcacaaaacagtctgaaaatttggcacgtcggcatgtgccaagcagtccaggctccaccgacaattcagcccacgagttcgttcccaggggccccctcccaatgggaccaggcttcccaaccagttgtcagattcaatagcacacctcactttcactcgccgtgacatctcctatgttgtccaacaggtgtgccttcatatgcataaccctcgcgatcctcacctcactgcgcctcaagaggatattgcgctacgttcgcgagactctcagacttcggcatacacatctagcagtctccctacaatgaccttgttgtctactccaatgttgattgggttggatgtcctaacacacggaagtccacatccgggtatgctatccttcctcggcgaaaacttggtgtcttggtcttccaagaggcaaaacaccgtttcccactccagccccgaagcagaatacggggctattgcaaatgttgttgcagaagcaagctagattcaccaactcctcctagaccttcacacgccactccccaaagcaaccttggtgtattgtgacaatgtcaatgatgtctatctctcctctaatcacgtgcagcaccaacgcactaaacatgtggagattgatctacactttgtccgggagaaggtagcggtcggtgccatacgtgttctccacgttcctacctcctgccaatatgcttacaccttcaccaagggtctaccgacgcctgtcttcaccgagtttcactccagtaacaccgttcgtcctatcgacgtt

SEQ ID NO: 92944 - DNA, 2127 bp, Oryza sativa
  Clone ID: PAT_MRT4530_91377C.1
atggatctcggcaaatcggcttccaccagcgcaaacctgaagaagctccaggaggatggcgcccttcctggccgtgaaaaggcggagaggaaagcaggaggtactaatcctcagcccatcttaggtcgcatggttgcgatcaaagattatattgtctgcgggtttctccctccaccctccgaattccttctactggttttgaatttctatgggctttctcttctgcacttgaaccccaattccattgctttccttagcgtctttgtgcatctttgcgaggcctacattgggtgtccatcttctcgcagcaaatggcggaacaggtggttttaccttgaaatcaaggattcaaatcctgtcctcgttgttcccgaggaacaaccggacaagattccggtctggaccgccaagccccccttgaccccctctctccaatcatttatcgacatcatcgatgatctccaagaacggggcttatcgggatatgaagtcgttgcagacttcgtcggtctgagcagcgaaaccgtggagcggcgtgttggtcaggtgatgatcagcggcccgaccacggtggcggcatctctgaaggagaaagtcgtcaaggaggcgtctgacgctgccaccaccagtggtggcgaagctccgaccaaggcgaggaagttctcgtctgtgctcagacatcgccgcaaagcagcgactccctcggcttccgacgcgtctcctccacctccgcgacgtcagagcattgtgacgatcggcgagaaggaggcgcgggcgaaggctgctcgggccaaatctgggggaacgtccagcgcatcccctaccacggtgtcgacagatgtcgtgcccgtggtcgggagtcaggaggtgacgccaagcggccctatcagcgatcccgctgggggtcctagtctgccagaggccgtcctcacctgggaggagctccaagtcgaaatgggccgccttctcaaagctggtgctcgtggcatcggccgcgagatctcagaggcgagggcggagacggcagcggcaaacgcgcttgccgagcggttggtgcgggaactagctgaggcccgcgaggacctcacgaagatgagggagcttgtggccgggaacgagcgccaaagcaaagggctcgaggaccgcatgtcggaacttggagacaatctctccgagatccgtggttcgctgcgggtcacctacaccggcctccaccagctcgccaaggagtgcggcgtcaagtccacgatcccggtgaacctcgatgagttctcgttgacttcttctcttgcggagctggcgacagcaatgggggaaatcccctccaagcatacgtccaggatcgcggaggagacgtccaacggtatctacaccggggtgtgtcacgtcctcgcgtgtgtaaggttgtcgcgccctgaactcgatctgcgtgagatcttggatcagggggcggcaagcgacacgcgtaaggaggtgatggaagaagtcagtgacctgggggagtctgtcctccccctttttgaagaagatgctgatgacgaggatgtccagcagcgcgggcagcccgagtcactggcgataattccggtactcgaatttgaaccacacgtctcacacgacgtcgaggaccatactcttgatgtggaggtcgagatggcgacagccacctcaatggcggaactcgagagaaccatgctagccgtgaagaaagagcaagccgtggaaacgctccgaggccgcgaggtgtggtttgtgtcatatttaaagagttgctgtacctcaatggcctgggtatgcagggagcttcgagtagtccacagcgatcctgaagagtcggcggccgagtacatctcgtggctcaacggggcctgtgcccaactcgatggcatcggcaatcgcattgacgaagccttgaagcaagagtgtcgtcgaacgagccgatatgccggaggacatgtgctagcttgcctgcgagatcaccgcccgcgcctggatttcgaattcctccatgaagggtttgctcgttctcggaggacttcggcggagatagaccaccttgcgaggtcgatgtcgccgttagccgagaaggtattccagtctatgaactggcattggccctcttggtag

SEQ ID NO: 92945 - DNA, 1848 bp, Oryza sativa
  Clone ID: PAT_MRT4530_91378C.1
atggatcttggcaagtcggcttccaccaatgcgaccctgaagaagctccaagaggatggcgcccttcctggccgtgaaaagacggagagggaagcaggaggtactaatccacagcccctcttaggtcgcatggttgcgatcgaagattatgttgtctacgggtggttttaccttgaaatcaaggattcaaatccggtcctcgttgttcctgaggagcaaccagacaagattccagtttggaccgccaagccccctttgaccccctctctccaatcgtttattgacatcatcgatgatctccgagaacggggcttatcgggatatgaagtcgttgcagacttcgtcggtctgagcagcgaagtcgtggagcgacgcactggtcaggtgatgatcagcggcctgactacggcgagcaacattcccgcgcccctttgtgagaggggagcgggggaacgcgatgaagcaatcaatgtggtgacttctctgaaggagaaggtcgtcgaggaggcgtccgatgctgccaccactagtggtggcaaagttctgaccaagccgaggaaattctcgtctgtgctcggacatcgccgcaaagcggagactccctcggtttccgacgcgtcccctccacctgcacgtcgtcaacgcattgtgacgatccgcgagaaggaggcgcggtcgaaggctggtcgggccaagtctggggggacctctagcacgtccctcgtcacggcgtctacagatgtcgtgcccgtggtcgggagtcgggaggcaacgccgagcggccccgccagcgatcccgccgggggtcgtggtccgccagaggccatcctcacctgggaggaactccaaaccgagatggggcgccttctcgaagccggcgctcgcggcattggccgcgaggtctcggaggcgagggcggagacggcagcggccaatgcgcgtgctgagcgcttgcgcaaagggctcgaggaccgcatgtcggaactcggggataacctctccgagatccgtggttctctgcgggtcacttacaccggtctccaccagcttgccgaggagtgcggcgtcaagtcgacgattccggcgaaccccgacgagttctcgttgacttcttcccttgcggagctggcgacggcgatgggggagattccctctaagcacgcggccaggatcgcggaggagacgtcaaacgagatgctgatgacgaggatgtctagcagcgtgggcagcccgagtcactggcgatggttccggtactcgagtttgaaccacacgtctcacacgacgtcgaggacaaaactcttgatgcggaagtcgagatggcgacaaccacctcaagggtttccagcttgtcttagtggccgttacgttttcgcagatctcgaggatgcccttgcgacccaagatcgtcgtatccaatactggaagacaaaatttgaagtggcggaactcgagagggcaatgctagccgtaaagaaagagcaagctgtggaaatgctccgaggccgtgagggtggccgggagcttcgggtagtccgcggtgatcctgaggaatcggcggctgggtacatctcgtggctcaacggggcctgtgcccaacacgatggcattggcaagcgaatcgacgaggccttgaagcaagagtgtcgtcgagcgagccgatatgccggaggacacgtgctggcttgcctgggagatcaccgcccgcgcctggatctcgaatttttacatgaaggtttttcacgttctcggaggaacctggtggagatagaccaccttgcgaggtcaatgtcgccgttggccgagaagattttccaatcaatggactggcgttggccgtcttggtaa

SEQ ID NO: 92946 - DNA, 197 bp, Oryza sativa
  Clone ID: PAT_MRT4530_91379C.1
ggagacaaggtgttacattttctattgcaatataatgatgatatctaacaaattatagtattgtaaaagcactcaaaagaaatatataaacatacaacttttttatgttttcaaactaaatgttttgagaactattgatggtcaaagttttaaaagtttaactgaaaaaaaaaacagagctgccgctccctcgtgcc

SEQ ID NO: 92947 - DNA, 1806 bp, Oryza sativa
  Clone ID: PAT_MRT4530_9137C.1
atgcctatttcagggtccgaactatgtcataatggagaaaacaaggtttctgagattaccacctcagcaaagagggaacaaaataacagctatctacgtgaatggcgtgcaagaaagaaggctaaatcaagtggttgcagtattgtatctcctatcatgccaacgcaagcaacaattcttacccctgcagaacacaatgaagattgtgatgtccgacaatcttcaatgtgtgacaaagataagaaaagattagagaggaatatataccaacgtgagtaccgtgcaaagaagaatgcggagaaagtcgaagttaacaaatcgagcgctacaccaagcaccaggcggagaagcattgcctggacatacaattttggtccaatgttccataaggatatagatcttgtggggtcagttggtagctggtcgaaaatccattatgaagttgcaaaatgcaaatcgattcttataccagtatgtgctgttggaagctatatcttggtcatactggaccaagaaagtagaacactttatcttctagaccctaatccactaaatccaatgtatgagaacaacccaactatgagatataccaaaaaattgttaaatgttaccaactatttcaacagagccatgcgtgtggcatgtcctggctctaggtggattgacgatatcgacttgtggcgccatatatatgtcacaaatccggtggctgactcgaaggggaattgtccgaagtgcccctcaactaccatcaggagtgcatctggaccatccctgccaaaccccaggatcaacggtgttgatcaggatgttggcggtatagaattggcatttaatagttgccaacaggttcctgacgatgctgcccccaccctgacgccccgcgaagcccaggcctcgaggcccgagggggtcgacctcgaccccccacgacaggttgcctggatggccgacatccgggcataccttggcagtcgcactcttcctgaggatcacgcaaaaggcgagaagctcgcgcgcatctccaagcggtacatgctagtagaagggaccctctaccagcgtggtgccaatggagtcctcttgaaatgcatccctcgggaacaaggcatcgagatcatcggcgatgcccatgagggggaatgcggggcctattcggccttgcgcactttggggcatcacatcccgattcggagtgccgaaccgtatcatcacggacaatgcacccaattcaccagtgagctatttggtgactattgcgacgacatgggcttcaagttatgcttcacctcacccgcccaccccaagagcaacggccaagtcgagcgcgcaaacactgagatcctcaaaggcctcaaaaccaaaatgtacaacgtcctcaagaagcatggggactcgtggaccgaggaactgcccgcggtgctgtgggccaatcggaccaccttgagccatgcgacaggagaaacccctttcttcctggtatatgctgctgaggcggtcctacctatggagctctccctaggctcgcctcaggttgcgctgtacaacgaggcggatcaggacgagctccatcgcgacgacctcaactatttggaagagcgaagaaggcgcgcggcccttcgggcaacgcgctaccaacggagcttgcggcactatcatcagcgccacgtccatgactttgtcctccactgtgtccaatcgtgcttaggattgagcaaactttcaccaatgtgggagagactatacaaagtgatcggtgtcccccggccaggttcggttcgattggccatggaagacggcacataa

SEQ ID NO: 92948 - DNA, 450 bp, Oryza sativa
  Clone ID: PAT_MRT4530_91380C.1
tgggggatgacctctccgagatccgggggtcgctgcgggtcacctacaccggtctccaccagcttgccgaggagtgcggcatcaagtccacgatcccggcgaaccccgacgagttctcgttgacctcttctcttgcggagctggcgacggcgatggggaaatcccctccaagcatacggccaggatcgcggaggagacgtccaacggcatctataccggggcgtggggcggcaagcgacacgcgtaagaaggtgatggaagaagtcgatgacctgggggagtctgtcctccccctttttgaagaagatgctgatgacgaggatgtccagcagcgcgggcagcccgagtcactggcgataattccggtattcgagtttgaaccacacgtcccacatgacgtcgaggaccaaactcttgatgcggaggtcgaagtgactacaactgcctcaa

SEQ ID NO: 92949 - DNA, 681 bp, Oryza sativa
  Clone ID: PAT_MRT4530_91381C.1
caatacattcatccattcaagcataataacaataatatgcaatagtttcctcaaacaaaatttgccagtaatcaccctcttcataggttctcaacgcaattacaagtttaatgccatattttgagacgtgaatgtttgcccacataaccgatgttagtgctgaaatatatattataaaatgaacaaggggaaattcgtggccttaactcttcaagtgatgagggcacagtcaaacagattcgtggatagcacatcagtgagaaatggaaagtagaataatattcatccagataaactactcaggtttatcactggcattgtctaatacggataccttaggcttatgcaaaatactcctctgaagggaagtaataaaagatgtgacaagtcaaaatattatgatatgtgaatttttacattctcaatgggtgttttttgcatgcagagaattgcagaaatcaaacatgatatagtattccgaaatttgatttatttgtttggaaagtcaaagaacgagcaaaaaaaaaattcttcttgatggaagttgtaatgttcctgatagaagctataatagcaagatttacaaagtaacaaatttctcaaaaaaattagggctgtgtaaggaaattcactcaaaccaatccttttgtaaggttgcataccttaacaaccatagaaagt

SEQ ID NO: 92950 - DNA, 2217 bp, Oryza sativa
  Clone ID: PAT_MRT4530_91382C.1
atggatctcggcaagtcggcttccaccagcgcgaccctgaagaagctccaggaggatggcgcccttcctggccgtgaaaacgcggagagggaagcaggaggtacaaatcctcagcccatcttaggtcgcatggttgtgatcgaagattatgttgtctgcgggtttctctcttcaccctccgaattccttctgctggttttgaatttctatgggctttctcttctgcacttgaaccccaattccattgctttccttagtgtctttgtgcatctttgcgaggcctacattggggtagagccctttcttgatctgttccgcttttattacgagttgcgctggatggaacccaatagggtgtctggttgcgtcgggttccgacttcgtgacgggatgaagtcgcgctatgtccccttccagtgtccctcttctcgtagtaaatggcggaacaggtggttttaccttgaaatcaaggattcaaatccgatcctcgttgttcccgaggaacaacaagattctggtctgagcagcgaagccgtggagcggcgtgttggtcaggtgatgatcagcggcccgactacggcgagcgacatccccgcacccttttgtgaaaggggagtgacggagcacgacgaagcaatcaatgcccttcctttgactgatgtcgtcggtccgctcgcggatcatcaggtggcggcatctctgaaagagaaggtcgtcaaggtggcgtctgacgctgccaccactagtggtggcaaagctccgactaaggcgaggaaattctcgtctgtgctcggacaccgccgcaaggcggcgactccctcagtaattttcaccttgtcgtcaggttatgtagcaaggaaggcttccgacgtgtctcctccgcctgcgcgacgtaagcgcattgtgacgatcggcgagaaggaggcgcgggcgaacgttgctcgggccaagtccgggggaacgtctagcgcgtcccctgtcacggcgtcaacagatgtcgtgcccgtggtcgggagtcgggaggcgacgccaagcggccccgtcagcgatcccgctgggggtcgtggtctgccagaggccgtcctcacctgggaggagctccaagtcgaaatggggcgccttctcgaagccggtgctcgcggcatcggccgcgagatctcagaggcgagggcggagacggcggcggccaacgcgcgtgccgagcgcttggtgcgggaactggctgaggcccgcgaggacctcacgaagatgagggagctggtggccggcaacgagcgccagcgcaaggggctcgaggaccgcatgtcggaactcggggataacctctccgagatccgtggttcgctgcgggtcacctacaccggtctccaccagcttgccgaggagtgcggcatcaagtccacgatcccggcgaaccccgacgagttctcgttgacctcttctcttgcggagctggcgacggcgatggggaaatcccctccaagcatacggccaggatcgcggaggagacgtccaacggcatctataccggggcgtgtcatgtcctcgcgtgtagatgctgatgacgaggatgtccagcagcgcgggcagcccgagtcactggcgataattccggtattcgagtttgaaccacacgtcccacatgacgtcgaggaccaaactcttgatgcggaggtcgaagtgactacaactgcctcaaatctcaaggatgcccttgcgacccaagatcgtcgtatccaatactggaagacgaaatttgaagtggtggaactcgagagaatcatgctatccgtgaagaaagagcaagccgtggaaacgctccgaggccgcgaggtgtggtttgggtcatacttgaagaattgttgcacctcgatggctagggtatgcagggagcttcgagtagtccgcggcgatcctgaagaatcggcggccgggtacatctcgtggctcaacggggcctgtgcccaactcgatggcatcggcaagcgaatcgacgaagccttgaagcaagagtgtcatcttgcgagccgatatttcggaggacatgtgttagcttgcctgcgagatcaccgcccacgcctggatctcgaattcctccgtgaaggtttttcttgttctcggaggaatccggcggagatagaccaccttgcgaggtcgatgtcgccgttggccgagaagattttccagtcaatggactggcattggctttcttggtag

SEQ ID NO: 92951 - DNA, 374 bp, Oryza sativa
  Clone ID: PAT_MRT4530_91383C.1
ccgcgcttttttttttttttttttggatccatcaagaacaactatcgcactataaaataactgaaggttgaagtcaagttgaggttaaacatgattaaaaacaaaaaatgactgaaacacattaaaacatcgcggtagataactgaaaactgctactccaaacaaggggtaaacaatgatatttgctgcgctagaacatcttggccaataggcaattagctccttaccaatgattccagtgtttgtacagcgtataataatacatttaacaatcagattatgacataaaatgagtcagagaacatgactacaacaaccgtctagtaatacgctgggactaataaggcaaatgtcattcaagatacccatctttc

SEQ ID NO: 92952 - DNA, 1746 bp, Oryza sativa
  unsure (1)..(1746): unsure at all n locations
  Clone ID: PAT_MRT4530_91384C.1
ccaacctaagttttataaaactagtgggggtgtgcgaaggtaggctcaagcgttgattctgctcgtttagctagcccgcctctgacgctgcattatggagggagtaggcttgtagctagcccgcctctgcacgctatatttcaaggaatcagagatccatacagacagagacgttcagccatcagacctgcagaggcaatccatccatggcatctatcgttcctgtactcctgcgcctgctgctcctgctgctcccgcttcccctgatccgagaccacctctggccgagccaccgccggccaacgccgcaggacgatgcgggtgagctccacccgatcttcctggtgcccggggcgagctgcagcgacctggaggcgcggctcaccgaggcgtaccggccgtcgacggcgcactgcggcgcgatgaaggggaagggatggtttgggctgtgggagaacaacacggagctgctggtccacgactacgcggactgctcactggagcagatgaccctggtctacgaccccgccgccaacgagtaccggaacctgcccggcgtcgagacccgggtgcccaacttcggctccgcatggtcgttcggctacaagaaccctgttaaccgtctacagagagcacaatgccttggaaagctcagagactggctggaagaattgggataccgtgatggggacaccatgttcggagctccctatgattttcgctacgccccgccggtacccggccaaacatccgaggtgtactctcgctacttcagcgagttcatggcgctcgtcgaggcagcgaccaagaagaagcagaagaaggccgtcatcctggggcacagctacggagggatggtcgcgctcgagttcgtcaggagcaccccgcgggcgtggcgggacgcgcacatcgagcgcctcgtcctggtcgcgcctacgctccaagatgggttcgtaggctcggtgatgaagttcatcacggggacgggcataattttcgtcccgacagccacgtccacgaggcccatgtggaggagcttcgagtccgccatggcgagcttcccgtccccggccgtgttcggccgcgagccgctcgtggtcaccaagaggagggactactccgcgtgcgacatggaggatctcctagccgccctcggcttcggcgagggcgtcgagcctttccggcgacgggccgtccccaggatgtacagcctcgaggcgccgatggtgcccatgacgtgcatcaacgcggtgggcaacaagacgccgctgcaactggtgttgtgggacgacgacgacgatgacttattagacgcgtcaccggaggtggcagcgtatggtgacggagacggcgagatcaacctgatcagcatgttggcgtttgacacggagatgggtcggcagccaggacaggagaagcgattcaaatccgtcaagatagctaatgctaaccattccacgattgccatttatgattttgcactaaagaggatcattcaagaaattattgaggtgaatcaggtttgtgtgtagacaacccatgcgttggtggatatgacaaggaagaccaagaaaaacttcactgggaaggacacaatcatcattaccatactctcaattagagagtgaccatgcagctttgtgtataccgatgggttggttggtaaataaaanccaaaaattactgctcccaccatcccaaatcagaaggtatatatcattaatttatttcaaaaaaaaaaaaaaa

SEQ ID NO: 92953 - DNA, 327 bp, Oryza sativa
  Clone ID: PAT_MRT4530_91385C.1
atggcactacagcttgcaacacgctcaaggaagtctctcgccatcgccgtcgccgccgccgtgccgctgctgatgtgcctcttcctcgtcgccgccgccgccgcggctgcatcgtcggagacggcggtggcgagctccccacagtaccagccgagctatggtaatacgtactcgacgtgcttcgaggtttcggcatgcgatgacaccgggtgcgcgatcaggtgccgcgacatgggtcacaaccctgctggctcagcctgctggaccagcaacgtcgcgaccatcttctgctgctgcggccgtggtcgtcctcctccggttgcttga

SEQ ID NO: 92954 - DNA, 1589 bp, Oryza sativa
  Clone ID: PAT_MRT4530_91386C.1
ggattttgggtgcacgttttgaagtccgccaactccgtcaaacacaccacctgttagcactcctcaccttctccgctgccgtaaagaaccctagcttcgccagctctaggtccatctccggcgatctttcagcagcgatgaatctcggcaagtcggcttccaccagcgcgaccctaaagaagctccaggaggacggcgcccttcctggccgtgaaaaggcggagaggaaagcaggaggtactaatcctcagcccatcttaggtcgcatggttgcgatcgaagattatgttgttgttaacgaccaaatttgcgtctttgtgcatctttgcgaggcctacattggggtagagccctttcttgatctgttccgcttttactacgagttgcgctggatggaatccaatagggtatccggttgcgtcgggttccgacttcgtgatggcatgaagtcgcattatgtccccttccaatgtccctcttctcgcaacaaatggcggaacaggtggttttaccttgaaatcaaggattcaaatccggtcctcgttgttcccgaggaacaaccggacaagattccggtctggaccgccaaaccctccttgaccccctctctccaaccgtttatcgacatcatcgatgatctccgagaacagggcttattgggatatgaagtcgttgcagacttcatcggtctgagcagcgaagccgtggagcagtgtgttggtcaggtgatgatcagcggcccgaccacggcgagcgacatccccgcacccctttgtgaaaagggtgcgacggagcgcgacgaagcaatcaatgcccttcctttgactgatgtccccgtcggaccgctcgcggatcatcaggtggcggcatctctgaaggagaaggtcgtcaaggaggcgtctgacgctgctaccaccagtgatggcaaagctccgaccaaggcgaggaaattctcgtatgtgctcggacatcgccgcaaggcagcgactccctcggaagagctccaagtcgaaatggggcgccttctcgaagctggtgctcgcggcaccggccgcgagatctcagaggcgagggtggagacggcggtggcaaacgcgcgtgccgagcggttggtgcgggaactggctgaggcctgtgaggacctcacgaagatgagggagctggtggccgggaacgagcgccaacgcaaagggctcgaggaccgcatgtcggaacttggagacaatctctctgagatccgtggttcgctgcgggtcacctacaccggccttcaccagctcgccgaggagtgcggcgtcaagtccacgatcccggtgaaccccgacgagttcttgttgacttcttctcttgcggagctggcgacggtgataggggaaatcccctccaagcattcggccaggatcgcggaggagacgtccaacggtatctacaccggggcgtgtcacatcctcgcgtgtgtaaggttgtcgcgccctgaactcgatctgcgtgatatcttggatcagggggcggcaagcgacacgcgtaaggaggtgatggaagaagtcagtgacctgggggagtctgtcctccccctttttgaagagtag

SEQ ID NO: 92955 - DNA, 1404 bp, Oryza sativa
  Clone ID: PAT_MRT4530_91387C.1
atggagctcgtggagacagcaagcgagaagcagcatcacaacaagaaggccatcatcctcgggcatagcctcggaggaatggtggcgctagagtacatcgagcacctcttcctcgtcacgcccacgctctctcaagggttcgtaaccaccgtgaggaacctcgtctccgggccgagaaatctcgtctacgtcgcggacgctacggacctgtctctgaggccaatgtggaggagcttcgagacgagcatcgtcaatgttccatctcccggggtgtttgggcacgagccaccgatcgtggtcaccgagcggaggaactactccgcgtacgatgtggaggatctcctcgccgccgtcggtttcagcgacggcgtcgagcctttcaggaaacggacggtcgcgaggatgaactaccatgaggcgcccatggtgccgctgacgtgcatcaatggagtggggaacaggacgccacagcaattggtgtactgggatggtaacttcgatgagccgccacagatagtgtacggtgaaggagatgatatcatcaatctggcgctcgcggccaaaacggtgacagaggcggatgacgccggcggggaggggaaaaggaaaaaggaagggagaaagggagcttgccccttgctactttgggaaaaggaggagggagcgggggcgacgcggcagagggaggaggagctctgcctccgtcccttggaggctagcgcgtggagtggcgggggccgagtcgtgacaacggcgatgacggcgaggcggtgtggagcggagcggcgacacgggcggcaggcgcgggcaggcgcggcagatgctgacggcggcagcgaccaggcgaaggggcgattcaagtcgatcaagctcgataatgcttctcatggttcagttcttacggatgaatgggcactaagaagggtcatgcaagagattcttgagggcttgtataggaaagaaagatagcttattagacgcgtcaccgaaggtggcagcgtatggtgacggagacggcgagataaacctgatcagcatgttggcgtttgacacggagatgggtcggcagccaggacaggagaagcgattcaaatccgtcaagatagctaatgctaaccattccacgattgccatttatgattttgcactaaagaggatcattcaagaaattattgaggtgaatcaggtacgttagtagacactccgtacgttgggtttcacgtatatatgttgggtttcactgtgcgcggtaatcatatatatcacgtgtggaattctgtgtaataaatgaatcccatgcagctttgtgtataccgatgggttggttggtaaataaaaaccaaaaattactgctcccaccatcccaaatcagaaggtatatatcattaatttatttcacgttat

SEQ ID NO: 92956 - DNA, 385 bp, Oryza sativa
  Clone ID: PAT_MRT4530_91388C.1
gcaaaaactcggcccttgttataaacaacactccaacagtttattcttatccaggttgcaatgcatagcggttttacagtcaaatccatactgtactggtataagcacaactcatgtgccaaaatttatttttgttcatagagcggaaaccttttttttattacattggactggcattcactccataagggtttcttctttgccttctaaaacaaatcctttggcccttctcttaatctttcactggagttcctttaaaaaagttggtttttttaatcaaaaatccttttttctagctttaaagggtcaaggaaagaggcatccttttgatttgagcccctggtagtggacttggttgctcaaaaaatttttcccccttattttt

SEQ ID NO: 92957 - DNA, 2390 bp, Oryza sativa
  Clone ID: PAT_MRT4530_91389C.1
atggatcttggcaagtcagcttccaccagcgcgaccttgaagaagctccgggaggatggcgcccttcctggccgcgaaaaggcagagagggaagcaggaggtactaatcctcagcccatcttaggtcgcatggttgcgatcgaagattatgttgtctgtgggtttctccctccaccctctgaatttcttttgctggttttgaatttctatgggctttctcttctgcacttgaaccccaattccattgctttccttagtgtctttgtgcatctttgcgaggcctacattggggtagagccctttctcgatctgttccgcttctattatgagttgcgctggatggaatccaatagggtgtctggctgtgtcgggttccgacttcgtgatggtatgaagtcgcgttatgtccccttccagtgtccctcttctcgcagcaaatggcggaacagatggttttatcttaaaatcaaggattcacatccggtcctcgttgttctcgaggaacaaccggacaagattccggcctggaccgccaagccccccttgaccccctctcccaatcgtttatcgacatcatcgatgatctccgagaacggggtttatcgggatatgaagtcgttgcagacttcgtcggtaggcgaatccagccgctccaggctcgggcccatccagcatataactattccgggccagacgacgcgacccgggtttctcctcggggtctgagcagcgaagtcatggagcgacgcatggtcaggtgatgattagcggcccgaccacggcgcgcaacatccccgcgcccctttgtgaaaggggagcggcggagcgcgatgaagcaatcaatgtggcgacttctctgaaggagaaggtcgtcgaggaggcgtccgatgctgccaccactagtggtggcaaagttccgaccaagccgaggaaattctcgtctgtgctcggacatcgccgcaaggcgaagactcccttggcttccgacgcgtctcctccgcctgcacgacgtcaacgcattgtgacgatccgcgagaaggaggcgcggtcgaaggttggtcaggccaagtccgggggaacctctagcgcgtcccccgtcatggcgtctacagatgtcgtgcccgtggtcgggagtcgggaggcgacgccgagcggccccgtcagcgatcccgctgggggtcgtggtccgccagaggccatccttacctgggaggagctccaagccgagatggggcgccttctcgaagccggtgctcgcgacattggccgcgaggtctcggaggtgagggtggagacggcggcggccaacgcgcgtgccgagcgcttggtgcgggaactggccgaagctcgcgaggacctcacgaagatgagggagctggtggccggcaacgagcgccagcgcaaagggctcgaggaccgcatgtcggaactcggggataacctctccgagatccgtggttcactgcgggtcacttacaccggtctccaccagcttgccgaggagtgcgacgtcaagtcgacgatcccggcgaaccccgacgagttcttgttgacctcttctcttgcggagctggcgacggcgatgggggagattccctccaagcacgcggccaggatcgcggaggagacgtccaacggtatctataccggggcttgtcacgtccttgcatgcgtgaagttgtcgcgtcctgaactcgatctgcgcgagatcttggattagggagcggcaagcgacatgcacaaggaggtgatggaagaagtcggtgacctgggggaagatgctgatgacgaggatgtccagcagcgtgggcagcccgagtcactggcgatagttccggtactcgagtttgaaccacacgtctcacatgacgtcgaggaccaaactcttgatgcggaggtcgagatggcgacaaccacctcaaatctcgaggatgcccttgcaacccaagatcgtcgtatccaatactggaagacgaaatttgaagtggcggaactcgagagaacaatgctagccgtgaagaaagagcaagccgtggaaacgctccaaggccgcgagggtatgcagggagcttcgagtagtccgcggcgatcctgaggaatcggcggccgggtatatctcatagttcaacggggcttgtgctcagctcgatggcatcggcaagcgtatcgacgaggccttgaagctagagtgtcgtcgggcgagccgatatgccggaggacatgtgctggcttgcttgcgagatcaccgcccgcgcctggatctcgaattcctccgcgaaggttttgctcgttctcggaggactccggcggagatagaccaccttgcgaggtcgatgtcaccgttggccgagaagattttccaatcaatggactggcattggctgtcttgg

SEQ ID NO: 92958 - DNA, 420 bp, Oryza sativa
  Clone ID: PAT_MRT4530_9138C.1
atgccgtccagcgcgacggcggcgacagctctccaacaacaggacacggcggcgcacagggactcaacgaatggcgacggcagcggcagatcgatgtatggcggcggcggtcgagcgatggcaagcggcggtgggtggagcgacggtgggcgccgggcgaagcagaggggcggcgggtggaaatggagcgttggcagggcggtgggcagagtgacggcgggcgcaggacgccgggggagcagaggggcggcgggtggaagcgaagcgtcggcgggctctttataccggcaaggggtcgtcgccgttgccgccgccgcctggtgtgcgtcggtcgaggtggcggccatggacgcgagcagtaggtccagccagaggccggtcgggatgcgcgacgacgccatcaacgcaccaccaagatga

SEQ ID NO: 92959 - DNA, 1959 bp, Oryza sativa
  Clone ID: PAT_MRT4530_91390C.1
atgagaggcgcggtggtggcggcggcggcggcggcggtcggcaacatgcttcagggatgggacaacgccaccatcgccggcgctctcctctacatgaggagggacttgccggcgctccaagcccaccccgcactccagggtctggtcgtcgccacctccctcatcggcgccaccatcgtcaccaccttctccggcccgctctccgactcccgaggccgacgccccatgctcatcgcctccgcgctgctctactccctcgccggcctcctcatgctatggtctcccaacgtccccatcctcctactcgcgcgccttgtcgacggcttcgccatcggcctcgccgtcacgctcgtccccgtctacatctccgagacggcgccgcccgacacccgcggcctgctcaacacgctgccgcagctcaccggctccaccggcatgttcctctcctactgcatggtcttcctcatcacgctcgcgcccatccccaactggcgcctcatgctcggtgtcctcctcctgcctgctctcctctacctcctcctcaccatcttcttcctgccggagtcgccgcgctggctcgtcagcaagggaaggatgaaggaggccaggaccgtgctccagatgctcaggggacgccaggacgtgtccgccgagatggcgctcctcgtcgaggggctcaccaccggacgcgacacggccatcgaggagtacgtcgtcggcccaacggacgaggccaaggtcacgctctacggcgggatgtcctcgggattggcgccaggcagcatgttcggcagcgccgtcacgctggcatcgcgacagggcagcatgctcgaccacctcaaggaccccgtcgtcgccctcctcgacagcctccacgacatgaacccccccgccggtggcactactgacgtccccaacctcggcagcatgatcggcgtccacgacaggccgcccatcgactgggacgaggagaactccggggacgacgacggtgacatcgccgcgccgctgctaaccatggagggcgaggccgcgacgagcacggtgggcatcggcggcgggtggcagctggcgtggaagtggacggagggcgtcgcggcggacgggacgaggcagagcacggtgaagaggatgtacctgcacgaggagcaggcggagggggtgcacgcggcggcgctggtgagccagtcggcgttgtgcaccaagaaggaggcggaggcggaggtggagggtgggtggcgggaggtgctggagcccggcggcgtccggcacgcgctggtgtgcggcgtggcgatccagatcctgcagcagttctcgggcatcagcggcgtgctcttgtacacgccgcagatactggagcaggccggcgtgggcgtgctgctctccaggctgggcctgcgcgacgactccgcctccatcctcatcagcggcgtcaccacgctgctgatgctgcccagcatcggcgtggccatgcggctcatggacgtgtccgggcggcggagcctgctcctgtggacgatcccgctgctggtggcgtcgctggcggtgctggtggcggcgagcgtggcgccgatggcggcggcggcgcacgcggcggtgtgcacggggagcgtggtggtgtacctgtgctgcttcgtcatggggttcggccccatccccaacatcctgtgcgccgagatattccccacgcgcgtgcgtggcctctgcatcgccatctgctcgctcgccttctggctcgccgacatcgccgtcacctacaccctccccgtcatgctcgcctccctcggcctcgccggcctcttcgccatctacgccgccgtctgctgcgtcgcgctcgtcttcgttgcgctgcgggtgcccgagaccaagggcctcccgctcgaggtcatcatcgacttcttcaacgtcggagccaaagggaccctaccaaacctccacgacgatgacgaccactattaa

SEQ ID NO: 92960 - DNA, 892 bp, Oryza sativa
  Clone ID: PAT_MRT4530_91391C.1
tgtctttgtgcatctttgcgaggcctacattggggtagagccctttcttgatctgttccgcttttattacgagttgcgctggatggaacccaatagggtgtctggttgcgtcgggttccgacttcgtgacgggatgaagtcgcgctatgtccccttccagtgtccctcttctcgtagtaaatggcggaacaggtggttttaccttgaaatcaaggattcaaatccgatcctcgttgttcccgaggaacaacaagattctgacttcgtcgataggcgaatccagccgctccaggctcgggcccacccggcctataactattccgggccagatgacgcgacccgggtttctcctcggggtctgagcagcgaagccgtggagcggcgtgttggtcaggtgatgatcagcggcccgactacggcgagcgacatccccgcacccttttgtgaaaggggagtgacggagcacgacgaagcaatcaatgcccttcctttgactgatgtcgtcggtccgctcgcggatcatcaggtggcggcatctctgaaagagaaggtcgtcaaggtggcgtctgacgctgccaccactagtggtggcaaagctccgactaaggcgaggaaattctcgtctgtgctcggacaccgccgcaaggcggcgactccctcagcttccgacgtgtctcctccgcctgcgcgacgtaagcgcattgtgacgatcggcgagaaggaggcgcgggcgaacgttgctcgggccaagtccgggggaacgtctagcgcgtcccctgtcacggcgtcaacagatgtcgtgcccgtggtcgggagtcgggaggcgacgccaaacggccccgtcagcgatcccgctgggggtcgtggtctgccagaagccgtcctcacctga

SEQ ID NO: 92961 - DNA, 258 bp, Oryza sativa
  Clone ID: PAT_MRT4530_91392C.1
atgggcggctgggctgggcgggtagaggagaggagaggagagcacgggcgctgggcgccgtgtggtggcgggcggccggattcgctgttccgaccacggcgctgtggcgatcttgtgtgcgccgcgggcgcgaggccggtggtgggcttgttcagaatagaggagaaacacaggaaaaatgaaggatttgggttcctatggattgctttactgtggcgtcatttggatcacatgaaaatgttcgtaggaaatacatag

SEQ ID NO: 92962 - DNA, 171 bp, Oryza sativa
  Clone ID: PAT_MRT4530_91393C.1
ggggccatacttgcctggttcacctgccagttgtgcttggaggattagaactagctaagcggggattttgagaccaaaaaaccgttgtatgtggtacaatgtatgaacgctcaaattgtggaggtggcatataaaatatagtgctattgtttggttaaaaaaaaaaaaaaa

SEQ ID NO: 92963 - DNA, 604 bp, Oryza sativa
  Clone ID: PAT_MRT4530_91394C.1
tcgatagccggcattcgttgccagggcgttcgttggcattgtcaagcttcacaaactctgctactcactctcgtgtttgtgtgtgtctccgatcttggccatttccaacatttggtatcagagcgagtttagagaggggagatgatgacgccgacgaagactcttcgcatcgaggactcgagctctagcggcaccggttatggcagcacaccgcgtaaggccgtggtggagcgcgtcgtgcccaattccagcgtcgtggagctgccgatgctaaccagggctaactatcatcagtgggtcaggcttggagggcgcgacgctgtgcctggcctcctcccctccccgctcctctgccctccgtctcagttcgagtcgaatcgaaggtactcctccttccctcgtagccatccctcctcctctgccgcatctctttgactcgtgggattcgctcagggcgaggctgatcgatggatgcatgggcgaggcggatcggtggaggtgtgcttccagggacgaaggtgcgtgcgcccttatgatcaagggatttcttcttcttcttcttcttcttcttcttctttttctgatttggtttttgttcgttcat

SEQ ID NO: 92964 - DNA, 397 bp, Oryza sativa
  Clone ID: PAT_MRT4530_91395C.1
gaggaaaaagcggggaggtcaggtattcccggccaagcaaaaataggaccgcttaaggtcaggacccagggtatgcccaaaccgggggggccatttcaagagacaaacggggcgaaccttcatgaaaaggatggaaccccggggggggggaacaaaaataattgggcccggggggggccccccccacccgaaggggagggggttcaaaacccaaaccctggggccgggggggagccctcccaggggcccctctgggaacaaagggggcgaagccgaacccccgggtgggcccaggttttgggtcccccggaacggaaacccgggtaacggggccaaagggggggggtagccccaggggggggggttcccgggggggcccgggtgggttggcgccccc

SEQ ID NO: 92965 - DNA, 321 bp, Oryza sativa
  Clone ID: PAT_MRT4530_91396C.1
aacctaactccattatgtggtgagcaggggattttatacatttaacagatttgacacgcatctatatactgccaaagctatcaattcaggctaaagatcaagagtccatttcaccaataaacatgccttacaatcggatgcattacaatcaagcaattatttaacttgaaaaattaggcgccaaagccttgtctttctgctttatccaacaacctataccctgcacattttctttttttcagagaagcaatcaagcttttcccattataggactcacagtcctgtagtttctcttccaccttatcatcaagggtagatggt

SEQ ID NO: 92966 - DNA, 192 bp, Oryza sativa
  Clone ID: PAT_MRT4530_91397C.1
atggcgtctgaagatatccaggcatttgagacgctcactggaacactttatctgacattccaaaacaggaacaggatagcacttaaggatcagttcgactaccaccatcctccaagaaattacagccttggcagtaagctttccagccaaaccatggaacagaagacccctggcaccaaggccaccaactag

SEQ ID NO: 92967 - DNA, 383 bp, Oryza sativa
  Clone ID: PAT_MRT4530_91398C.1
ctggcacgacgcttaaatataacaagcacgtcttcagatattgaggaagatcaaaataactgagaaacaatatcctcttcattttgtcaacaggagaatctttctcaaaccatagaagagatagagttctttattttggtccacacttccactgtcggattcttattggacaataacccagctatactgataatggctaatggcaagccaccacatttcttcaaaattacactagctgcttccgtcaaatgtttggggcaatcttcgctagaaaagactcttctcctcgtgccgttgccggcgcgcgcccccctgtcgggctccgcctcccccgggggccccaaaaagtcgcaacaacatgactttgccacatctcttatggc

SEQ ID NO: 92968 - DNA, 1352 bp, Oryza sativa
  Clone ID: PAT_MRT4530_91399C.1
ctatgaagtggtcaatggttgtgaccagtagggcgcctcaggctttttcacttgtggtagatgttgacaagtaactgatgaagagagatgagctctgtagctattgacaactggcatcactgtacagccttgtcgtctgtagcaaacttgcaatttagcagcctgttctccatggaccttttgagatttaagaaaggattggcgatattttgtagtattagcttggcacctgtccatttcaaataaatacctgcgctccacgtcgtcggcgaacttgtcccacccggcgacgcggaagaagcccggggcctgcgcccgcgtgacctcgatcctcctcgccaggccaggcacgaccaccggcgcgttgtcgtcggcgacgccgtcgtaggcgccgaacctctcgacgttgtgctggcagaggaggcagaaggcgcacatgctaaagaaggtgagccgcgggacggtgaggccggcggcgagctccgacgcccacgggtggcagaagtccgccacgaggcacgtcggccgagcgtggaggaggaggtggcgtagtcgagcgggaactcggcgaggcggaccgccgggccgagtcgacggtggggcccgccctcgccgccgtggctggcgtggtgacgatggtgcagagcgccccgtgggtggcccccagcagtgtggtgtccaacgccggtatgaggtggccctgcgccatgagcgggacgaacacgaagtgcgccgccgcattgatgcagatagctcccactgctcgccctcggccggcggtgtccgacgtccggtcgagcaccaacctcgcctcgccgcgccgccccttcatcgccagccatcgccacgacggcgtggatggtccgcatggcgtcgtggaagcgggagtggcccacgtccgcccgccgccgccgtgtgcacgacgctcccggccgccgcgtcgtcgtcggcagtggcccctgtccgcctaccgccgcctccccacgtctgcccatcgtgagcccgctgccacgcgcatgccgctcccacccaccgccgccgcgagcccgccgctcccgccagccgccgtcgggcccgccgttgagagccgccgggaggagaagaaggaggcgtcggccatgtggtccggcctccccaaggcagcgagaagggacgacgacatgcctcctcattccccaaccacgtccgcccttttcacagcgatgaggagggatgctattgtggggtcacggtacccgggtacccacggttgggccattgggccgcataacatagagagggccgcgtaggcgcggtgggcgacgcagctcgccgaccgcccttctcgtcccgtgcaacctcccgcatcatga

SEQ ID NO: 92969 - DNA, 621 bp, Oryza sativa
  Clone ID: PAT_MRT4530_9139C.1
aatcagaatggttacaacacgtaagcatgataacattataaatggtgaaattctgatctgatagttctattcatacatgtatttccacttccatacactctagctgagcatttttttggctattgctcagatatcacaactctctactacactgacaaagtgacaagtgactacctgtacaatgtctaccatgctactgatggagcagagatagctccgaatttattatattttttacatacaggttttgctaaaaaaaagaaaagaaaagaacaaccgtgtgtatacctttaattagtcattccttcagaacaaaaaaagacacaagacgtttggtttcctgtggtttctgcttattaaccctggtctgagatgtatcttcagaagatatatgacataattttcattgttactttccatgatgagaatccaaaacatattaatctgcatttgactgaagccattcttgaattgcagaacggagggcatggttcggcaaaagatcacggtgtggtagatcgaggtttgtcatgggtgatgtatagtgaccactatcaaaccactctcttatagcctctgcttcgtaggtgaaaccatctgcaagcaattaaagggcctgca

SEQ ID NO: 92970 - DNA, 132 bp, Oryza sativa
  Clone ID: PAT_MRT4530_913C.1
gagttggtaagggagctctatatggaggttgaggtcttgagttcgaatctcacttgtagcatacaagttatattgcgtgaaaaattgtgaatttgtaggtagtgatgtgtaaccatgtataggatggctagt

SEQ ID NO: 92971 - DNA, 541 bp, Oryza sativa
  Clone ID: PAT_MRT4530_91400C.1
cctttccccagatgatcgactacgattatactgtgcgcaaatgtaatcccttttcggaggattcaagccagaaatctgatccataaaaaataaaaataaaaaaaaaaaaaaaaaaaaaaaaaaaaaaaaaaaaaaaaaaaaaaaaaaaaaaaaaaaccatgaaaaaaaaaaaaagacaagaagggggaggggggagaaataaaaaaaaaaaaaaaaaaaaattaaaaaaaaaaaaaaaaaacaaacaccgtgaaaaaaaaaaaaaaaacctgaaataaaactaaaaaaaaattgaatgaaatacatgctttctttcagctaattgtaatagatgaacaggaaggaaaacaatcgggcgttgcttacaaaaaaataaaacatcaaaaaaaaatgggtagggcgcgtggctcttttttattaatcaaacccggtggttatgggtacgcgcaattaatactagatttataagtccgagaaaacatctaccgaacgctggttatatctaaacttcgcttaaaggaaaaaaaacggggggggtgtt

SEQ ID NO: 92972 - DNA, 363 bp, Oryza sativa
  Clone ID: PAT_MRT4530_91401C.1
tcaaattccgccgcttattttccatctggtgtcttcctcctccgcgcgcgcgcgtggtgctgccactattctgcttccccgcttctcattgcttgcgcgcacgagagatcggaacgagcagggcctccggaaccacaccttcgcctgagatctgcaccaggtaggcgggtgatcaggttttaggggaatgcttccgcacgactgctcctcgtcttctgttcgtcgtcgtcgtctgctacaccatgtcttccgccactgctgctgctgccgcacctggagatggcgcaccgggagccggagccgcttatcgcgcaacacgctcatcggctgtctgatcccacaagcattggtgcgtccgtacat

SEQ ID NO: 92973 - DNA, 1809 bp, Oryza sativa
  Clone ID: PAT_MRT4530_91402C.1
ctagccgtctccccgagctaccctcctcgtggtcgtcgtcgtcgtcgccgtcgtccgtcgtccaccgccgtcgccgccgtcgtcggcattgccgccttccaccgccaccgccaccgctcccgagcccgccaccgctcccggccgcgtcgccacacctgggagggggagcagcagccgccgagcccacatgcggtcgccgtcggcgctaccactgccgtaagatccgccgcgggagggaggcgagaggggtcggagggagccgtcgccgccggatctatcctcggccgccaccaccgtgggcggcggcggcggcggtgctgtggtgccatttgccgcttccgatgccgccacgtggcgaggcctgaagcgctcgaccaaatccagcaggttggcgtgcgacgagcccccctcccgcgcggccgccctcgccttcgccgcgagcgcgcgcgcgcgccaccgcctcgcctcgccctcctccccgccgtccatggcgctcctcaccgccgcctccaccgtccccctccccaccacgatctccttcctcaccctctggtacaccagcggctcctccaccccgaccccgaccccgatcccgagcacctccaccgccatcttcgcgttcaggaactggtcggtgaagtgcggccacgccaccaccggcagccccgccgtcgccgcctccagcgtcgagttccacccgcagtgcgtcacgaacgcgcccgccgcccggtgggacaggatcagcgcctgcggcgcccacccccagatgagcagcccgcgccccgccggcgccacccgcgcctccagctcccggaggaacgcgagcgccgcctcgccatggcggtccggggatctcaccacccagatgaacgggtggcccgacgcctccagcccgaggccgagctccaccgcctgcttctcctccgggtgcacgatgctcccgaagctgacgtagacgacggagccgggctccttgccgtcgagccaccggaggcactcgtcggcgccgatggcggcggtgttccccctcgccgccagcgtcgcggtgctccggtggtagagcgcgaccggcccgacagtccagagcttcatccccctggcctccgcgtagccggcgacgtactccggctccatctcgaggacggtgttgatgacgacgccgtcggactccgcgcgggcgcgctccaggtcgtcggcgaacttctcccacccggggatgtcgcggaagaagcccggggcctgcgcccgcgtgacctcgacccgcctcgccaggccgggcaccaccaccggcgcgttgtcgtcggcgacgccgtcgtaggcgccgaaccgctcgacgttgtgctggcagaggaggcagaaggcgcacatgctgaagaaggtgagccgcgggacggcgaggccggcggcgagctccgacgcccacgggtggcagaagtccgccacgacgcacgtcgggggaggcgcgcccccctcgtccgcgcggaggaggaggtggcgctcgacgggctcgcggaggcgcgccacggcggcgaagtagcgcgccatgaactcggaggggacgttgtccatgttgtccacgccctccggcaggccggcgccggcgtggtcgagcgggaactcggcgaggcggacgggcaggccggacctcctggccgagtcgacggtggggcgcaccctcgccgccgtggccggcgtggcgacgacggtgcagaacgcgccgtgggtggcgagcagcagcgcggtgtccaccgccggtatgaggtggccctgcgccatgagcgggacgaacacgaagtgcgccgccgccat

SEQ ID NO: 92974 - DNA, 457 bp, Oryza sativa
  Clone ID: PAT_MRT4530_91403C.1
ttaggacaggacccatatgtcagcctctcccttcttctttctcccattccttcccctcttcctcttttctcgcattggcaggaagcaagcggtggcagcaagcggggaggggacggcggtggtgggcacggcggggagcttgcaccacacggaggccggcggccacggcgagcggaggcggcgggccacgctgcgcgggggctggcgaccgcggcgagcgaaggacggcagccgcgccgagtggaggcggcgggccacgctgcgtgagggctggcagcggcagcgagcggaggacggcggtcgcggcgagctgaggctggcagctgccatgctcaagctcctccccatgcctcctcctcgtgctccttccgtgcctggttgccatgtagggatggaggagatgggctgtgtggggcccaccattggccatccaaatagagtggccaaatttggctag

SEQ ID NO: 92975 - DNA, 519 bp, Oryza sativa
  Clone ID: PAT_MRT4530_91404C.1
atgtctggctgcttttgtgtgtgcagtttcgtgctatctgcctatctgggctcggtggtggtggcaaaagtattcttttctaccagagctggagaggggctcaaacccaagcttgatgaagtcctgcctcaagcagctgggatagtttttgctgttgatgctcaagatttcttgtccaccatgcaagtcgttgcagagtacctgtatgacattctgacaaaggcaactgtagtgaagaagaggattcatgttctgatattctgcaacaaaacagataaagttacggctcactcaaaagaattcatcaagaagcaattggaaaaagaaataaacaagctccgagaatcaagaaaagacatatcatctgctgacaccactgatgaagtgaagcttgggaaccctggagaaacattttacttcagtcaatgccagaacagggtgacagtcgcggagggtgctggtctgactggtaatgtttcagcagttgagcaattcattcgtgaatatgtgaaagcttag

SEQ ID NO: 92976 - DNA, 1500 bp, Oryza sativa
  Clone ID: PAT_MRT4530_91405C.1
cccacgcgtccgctcccatcggttgcatgccgccgcccaccgccgctgccttgcatgtccgccgccgccgccgcgccgccggcaacctcactgctccgcccagccgcggcgtcgctgaccactgccagcaacagcagcaacagggtccatctcaagaacctcgagcatctcttccgtaaccgcggcgccgccgtcgccgtcgagagcgcgacaccggcgcagcagcagcagccggtgctgaaggcgccgctgctgcggctgccgtcgtttcttgcgcgggggagaggggaggtggcgatgaaggaggaggcgcacggcgtgtcgccgcggcggctcgagcgggtgctcctcccggcggcgcccgacgggccgtcgccgcgcgggaacatcgcggcgacgtggaggcggctccacggcgagcacgactggagggggctgctcgacccgctccacccggacctccgccgcgagatcgtccgctacggcgagttcgtcggcgccgcgtacggcgcgttcctgtcccgccccgacgccgcgccgggggaccgcgcccgcgccgccccgccgctccaggacggcggcgcgtaccgcgtcacggcgccgctcttcgcgacctcctccgtcggcctccccgcctggctcgcctccgccgcgccgtgcgccgcccagcgcaccagcctcgtcggctacgtcgccgtctgcgacagccccgccgaggtccgccgcatgggccgccgcgacatcgtcatcgcgctccgcggcacctgcaccgtgctcgagtgggccgagaacgtccgcgccggcctcgtcccggccaccgacgccgcatccgccgccgactcgccggacgcgcccaccccgaaggtggaatgcgggttctggaacctctacaagacggccgccgccggcggctcgccgagcttgtcggagatggtcgtctccgaggtacggaggctactgacaaagtacgagggggaggaggtgagcatcacggtgaccgggcacagcctgggcgcggcgctggcggtgctgatcgccgacgagctcgccggcctcggcgcgccggcgcccgtggccgtgttctccttcggtggcccacgcgtgggcgaccgcgcgttcgcgtcgcgcgtcgaggcgcgcggcgcgcgcgtgctccgggtggtgaacgcgcacgacgtcgtgccgcggttcccgccgccgtcgcgctacgccgacgtggggcgggagctccggctggacagccgcgcgtcgccgtacctccggccggacgccgacgcggcgtgctgccacgacctggaggcgtacatccacctcgtcgacggcttcctcggctcgcattgcccgttccgggacaacgccaagcggagcatcctccgcctcctcgagaaccagggcggcaacgtcaagcagctctacatcagcaaggccatggacatgcgcgtccgcctcgacgccgccgtcgccgacatgcccgccgaggtcttggagtgcgtgcactga

SEQ ID NO: 92977 - DNA, 457 bp, Oryza sativa
  Clone ID: PAT_MRT4530_91406C.1
tcggtaaggcagcagtatggcatagcgacaagcagcttcttgcaataagatgcgacccaactgagaaacatccaaatctggcagcagttcgcgctgatggcgcaccaatctaactatctggacattaacattgttcaagccataccgcaacagctacaactgcaccagtttgacgatctctactatgatcggaatctgtctcaagctcaagctctgaaggctactaacgtgccatctagatatggtatctaccataggtactatgacgcacccagtaccattaccactcttggcctagtgtcggaacgaggtttaacagcatatagggtcagaggttaaaaataagctcaaacatcatcatatgtgacatgtgaaactttgggagatataaatagagaaaaaggtgcttgtctatttgccatactgctgccttaccggacgcgtgggcggaccctct

SEQ ID NO: 92978 - DNA, 478 bp, Oryza sativa
  Clone ID: PAT_MRT4530_91407C.1
cccgtttcccccaaaaccagcggcgccaccacccacacttcccccatggcagtcggcggcggggagatccggcctgcgttcgctgggggatcgcgcgaagttgactcctggctgagttatcctaggaacccatgtgactggtcagtaataaatagctaccttgtgcggctagtgtggaacctatataattagtgttgacttttgcttggaaacatatatatgtggtgaataaatgatagagctctgctcgattaacgagccgacggagtacccctatttgcacattcgtgacaaggagtgtccatggcgaccctatggcctaatggtatggatggtgcattaattattgctcataacaccatgataaggccagtgaatgacttaaaaggggtgctctggttgaagcatcgatttttggtttgcgggaaacctatttttcttgcaacaaagaaataagaatgacaaaactcttgggttg

SEQ ID NO: 92979 - DNA, 1607 bp, Oryza sativa
  Clone ID: PAT_MRT4530_91408C.1
atgaccgacgtgactggtctgacaccggtcatgtcgtcagcagacagccacgattccacgtcgcacctgctcccggcgaaagtggaggggaacgaagagaagtatactcgtgcttccacggtgccgccggtggttgcagcggcagcggcggaggcggcggcggcggcggcagcggccaaacggcctccgcctggcattggcgcgggcaatcttccgctgcgcctagctgcgatgctgttgcttccgcgtgtggcgatgacgacggcaccgggacgtaacacaggatgctggtgtggagcagaggtggaggcggaggccggcgcatggagcaataaagtgagtgtggtgattgtagagggccacgtgggtggaggggcgagcaggagactggccgtcctggagctcgtctccatcgtcgccgtcctcctcatctcctcaccagcagcagcagcagagttgtccgtggacttccacgcggcgtcgtgcccgcagctggagtccatcgtgcgctcctccgtgcaagccgctctccagcaggagatcgccctcgccgccggcctcctccgcatcttcttccacgactgcttcccgcaggcacgcacgcaagaacatttgcacgggtgcgatgcgtcggtgtatctgagaggaggcagcaactcggagcagggcatgggcccaaacctcacgctgcagccgcgggcgctgcagctggtggaggacatccgcgccaaggtgcacgccgcctgcggccccaccgtctcctgcgccgacatctccgccctcgccacccgcgacgctgtcgtcgtctccggcggcccctcttacgccgtgccactcggccaaaaagacagcctcgctccggcatcgttggacctcgtcggagatctcccgggcccgggcacctccagagtccaggatctcatcgacctttttgcaagcaggggactgcgggacgccgccgacctggtggcgctctccggcgggcacaccgtcgggaggacacgctgcgccttcttcgatgaccgcgcccgccgccaggacgacaccttctccaagaagctggcgttgaactgcaccaaggaccccaaccggctgcagaacctggacgtgatcacccccgacgccttcgacaacgcctactacatcgcgctcatccacaaccagggcgtcttcacctccgacatggcgctcatcaaggaccggatcacggcgcccatcgtcaggcagttcgccacggacaaggccgccttcttcacgcagttcgccaagtccatggtcaaactaagcaatgtgccgaggactgacaggaacgtcggcgagatccgccgcagctgcttcaggaccaacagccagagcctcgtcgacttcgccaccagcgatgaggagggcttcgctgcttctgcttgatcattcagctgtctgtcgttgctcgttaattagggagctaggtgcttgacgtcgctagctgatcctagtctctttagtcttcaggccttggcttttgtacgcatatgctttcgttatgtccgtgcaataataactagtaagactgtttttctttcctaaaaaaaaaaaaaaaaaagaaataaaaaaaaaaaactgaaaaa

SEQ ID NO: 92980 - DNA, 1461 bp, Oryza sativa
  Clone ID: PAT_MRT4530_91409C.1
tcaaagcctcgccgccgtcgccgccgccgccgccgccgccgccgcggcgatcgccacgccatgtctccctccctcttgcttacctctaggggtacccactcgccggcgccacggccgcaaacccgtcgagcatcacaactgctcgtctctttcccctcgcgctgcagccgcttcgtcggcctccgcctcgcgcgcgcagccgccgattcgcaggggcccaacggcgctgcccctggatctggatctggtggggacggagagggcaaggcagccaatggtgccgacaccaaattgccaaagaaccggagggacatactcctggaatacgttaaaaatgtccagccagagtttatggagctcttcataaaaagagctccgccacaggttgttgatgccatgcgccaaacggtgactaatatgattgggactctgccacctcaatttttcgctgtaactgtgacaacggttgctgaaaatctagctcagcttatgtacagtgttctgatgaccggatacatgttcaggaatgcgcagtatcgtctggaattgcaacagagtttggagcagattgcccttccagaaccaaaagaagaaaatgattctgcagattatgctcctggaacccagaaaaaggttactggagaagttatccgatggaacaagactactggtcctgagaaaattgatgcagtaaaatatatagaattgcttgaagcagaaattgatgaactcagccatcaagttgctagaaaatcatctcaaggaagtaatgaactcttggaatatctaaaaactctagaacctcaaaatctgaaggagctggcaagtagtgccggcgaggatgtcgtttttgctatgaatgcattcataaagcgccttttggctgtctcagatcctgcacagatgaagacaacagtttcagaaacaagtgctaatcagctagccattttgttgaattggttgatgattggtggctacagcatgcgcaatattgaagtgcggtttgacatggaaagagtattgggtgctgccccaaagataggggaattaccacctggagaaaacatatagcagggaggaaaggggcgtaagagtggggaagtgatgattagttaaaatctagggttactggccggccaagataactgtatttgcgtggtcatattattttgagtggaatggattacagcatttgtgcaaagacaccaatccacattttgggaactaagatgagatgctaggcatagccatttctgatatatttctcggggaggtatagacgacgagatacatagaaacaatagaacgggacctgatgctgtagttttgcaacctgactattgttggtaaaatacaatcaaggcaactcatattaccatattgtactcccatgttgtatgtctagttcaccaatcaagttgagtctgatgtgagtttgtttaaaaaaaaaaaaaaaaaaaa

SEQ ID NO: 92981 - DNA, 177 bp, Oryza sativa
  Clone ID: PAT_MRT4530_9140C.1
atggaggttgcggtgcaagagagtgctacatactggttcgaggaccagcgaacgtgtagaattatctctcgaacaccaatggaggttgcggtgcgagagattgctatgtactggttcgaggaccagcgaatggacgccgcgttggagatcgagtcaaccaaggatgaggaaggctga

SEQ ID NO: 92982 - DNA, 357 bp, Oryza sativa
  Clone ID: PAT_MRT4530_91410C.1
atggaacgcgattccctcacgctgggtcgcggggaggtggtggttgttgctagtgctgcttttgcatctttccttgtttcttctgcgacaacgaggtcgacaaggcgggcggcatgggagtgcgatgcaaggaagaagtcgagcccgccgcacggccgcgccgacgctaagggtgtcgccagcggcgcccaccgacgagaagggcggcgaggaggccgaggctcctcgtccccgctcaaccacgactctgcttgggtagtcccgctcaccgacgacgccttcagcggcgacgacgactccatggcgctgtggatactcaacgccatcacgcccatgctcctcggcaagcacagctag

SEQ ID NO: 92983 - DNA, 531 bp, Oryza sativa
  Clone ID: PAT_MRT4530_91411C.1
ggaacgggcagttcatacttttgaccaaagggacaaaattgacaacgaggctttaaatcgggagaaaaaaatacagcatccgaatttcaaatactacttactacttcctccgttttacaatataaaactttttagcattgcccacattcttttaaatattaaggaatctaaacatatgtatgtttttaaattcataccacacatatttactgagaccactggggacagtaataggcaaatgggggacgatcatcattgcaaaaaaaaatacatggggatgaaacgaatcgctccttgggaaaaaaaaggaaaaaaaaaggaaggacccgaccaccccgccgggtttagtttttgggcttgggaacctgctgggttgtccggccataccaggggatggcaagcgaaaagcatccccaatgggacaacaatcgcggaatgagcctgcttcctgctcgggagcgacggcgcctgagctgttcttgcaggcggaagggggggttccgccacgtccgagcccgtaaggaggggcat

SEQ ID NO: 92984 - DNA, 2433 bp, Oryza sativa
  Clone ID: PAT_MRT4530_91412C.1
atgatgcatgggctatgggtgcaagatcagggtgtggtggatcacttagcgcagctcgtccctctcttgcatgagtgtgcttcccatgtaactgagggatcttttgagaaggctgacttcagctttaagaagatcagaatgctcaccatagctgacgggccattgcagcgcctatccacgatcattgttgacagcctagctcaccgccttctctcctccatccagggccttcctggtgcccttatcgatccatctgattactttgagaagtcaaccctccgggctgcacgccacaacttcttcaagctgaacccctacctaagcaccggttttgtcactattaactgggccattatggaggcaatggaggatgaaaagtcattgctatctaagaaagctgaatctcttggggtgtccttccattttatttctgtgataggcagacttgagaccttggatttcagcaatctccgtagcacctttcagataaaatttggtgtggcagttgcaatcagctgcgctctacaaatgcatcgcctcctcttggttgatgacaatttgagctccaccagcattgctcagctccagaaaatggccaacttcactcagcctaagcaaatggccagctctgtgtgcagcccagcctccacactgaactatctgcagacaccatcccctcgtacaccaaaattgctggcaagattactgtctgccatccgagcgctcaagccaaacatcatgttgattatggagcaagatgcagaccataacaccctgctgttccgtgatcggttcaatgaggtactcaactactatgctgccctctttgactgcttccatgcagtggctgcagctaacccagggaggactgatgaacgcttacgtgtggataggatgatcctgagggaagagattaaaaacatactgttgaggctgtgctgcacggacaggggcatgttccaggacgacatgctgtcgtcggcgacgtcatcgccggcgtcgtcggtgtactcgccgtcgccgtcgccgtcgaacgggtcgtgggtgcaggagctgagccatgaccagcagagcgttcggctgatcggcctgctttaccagtgcgccgccgaggtgtccgccggctccttcgaccgcgccaacctctgcctcgagcacatcacgcagctcgcgtccctggacgcgccgcacgcgctccagcgcctcgccgccgtcttcgccgacgcgctcgcgcgcaagctgctcaacctcatcctgggcctctcgcgcgcgctgctgtcgtcggccaactccgccgacgcccacctcgtccccgtcgcgcgccgccacatgttcgacgtgctcccgttcctgaagctcgcgtacctgaccaccaaccatgccatccttgaggcaatggagggggagaggttcgtccacgtcgtcgacttctccggcccggcggcgaacccggtgcagtggatcgcgctgttccacgcgttccgaggccgccgggaaggcccgccgcacctccgcatcaccgccgtccacgacagcaaggagttcctcgcgaacatggccgcggtgctgtccaaggaggcggaggcgttcgacatcgccttccagttcaacgccgtggaggcgaagctcgacgagatggacttcgacgcgctccgccacgacctcggcgtcaggtccggcgaggcgctcgccgtcagcgtcgtgctgcagcttcaccgcctcctcgccgtcgacgacgggaggaggcacgccgccgccggctgcctcaccccggtccagatcatcgcgcgctccagcccgagaagcttcggcgagctgctggagcgggagctgaacacgcggctgcagctgagccccgacgcgtccgtggtgtcgtcgctgtcaccccactcccccgcagcagcaacggcggcgcacccgacgacgtcgacgccaaagctggggagcttcctgtcggcggtgaggtcgctgtccccgaagatcatggtgatgacggagcaggaggcgaaccacaacggcggcgcgttccaggagcggttcgacgaggcgctcaactactacgcgtcgctgttcgactgcctgcagcggagcgcggcggcggcggcggagcgcgcgcgcgtggagcgggtgctgctcggggaggagatccgcggcgtggtggcgtgcgagggggcggagcgggtggagcggcacgagcgggcgcggcagtgggcggcgcggatggaggcggccggcatggagcgggtggggctgagctacagcggcgccatggaggcgaggaagctgctgcagagctgcgggtgggcggggccgtacgaggtgaggcacgacgccggcggccatggcttcttcttctgctggcacaagaggccgctctacgccgtcacggcgtggcgcccggcggcgtcgcgacgcggccacactcggtcgtag

SEQ ID NO: 92985 - DNA, 319 bp, Oryza sativa
  unsure (1)..(319): unsure at all n locations
  Clone ID: PAT_MRT4530_91413C.1
caagccggtggcgatgctgggaaggcggcggcgaggcctttcaagctcggaggccactaactcagcgcggggaggatggggcatagccgacgacggcgacctcagcggccggagggagacagcaggccggcgtggggaggcggcggatccggcgcctctaaggccggatctggccggtacgggncgcgacgacggacggcnagggcgcggcggcccggggcttnagggctcggcggcagancggctncggcggtggtttcgctngcgtcaccgcggcggccggaggggcgtcggcactttttcggcggccgaaactttg

SEQ ID NO: 92986 - DNA, 845 bp, Oryza sativa
  Clone ID: PAT_MRT4530_91414C.1
ggcaaggtgattataacaacacaggagtgacaccactaatccttttttgagtcccaagccctttcttgaatacaggagagagggacatgagaacatactaggaaacaattaatataagaagaaacattagggatggcgaaaaaaagtgcgagtagatcaatcattaaaagagaaaagttgttaagagaaagaaagagtctgattgatgatgatgattcatggacagacgggcacaaccacatgtaatgtaatgtagtagtattgcgttgcatggttacgaggaacgatgggggagatggattgcaaaaaggcctcccgaatctgccttttcctctcctgccctactactcaacaacactgaactctgaaaccctctctctttctttctgctcgatctgctgctgctaccaccactattaccattgctgctgctacttttattgctgctgctctcggtgtcctctctctacaagcatcctcctccatagccggcgttcttgaacagctcctgctttatcatgtccgcgctcatcctctccctctgcatctcggagcaggaggcgtgcatgccgaagtcgttgaagcagctgacgacgcactgctggatgtcgaggcccagcgtctccagcgtgctcaccgtggacaggagcagccctggcttggccgcgcagtagatctccacccgcgtgtcgcccccctccttcctctccacatcgaacttgggtgtgttcctggccagcatctcgttggggttgagctccctgaagacgctgagcaccccgggcgtctcctgctgctgctgctcctcgatctccttcctgcagctgcctgatcctctccagcaa

SEQ ID NO: 92987 - DNA, 1790 bp, Oryza sativa
  unsure (1)..(1790): unsure at all n locations
  Clone ID: PAT_MRT4530_91415C.1
aacaacacaggagtgacaccactaatccttttttgagtcccaagccctttcttgaatacaggagagagggacatgagaacatactaggaaacaattaatataagaagaaacattagggatggcgaaaaaaagtgcgagtagatcaatcattaaaagagaaaagttgttaagagaaagaaagagtctgattgatgatgatgattcatggacagacgggcacaaccacatgtaatgtaatgtagtagtattgcgttgcatggttacgaggaacgatgggggagatggattgcaaaaaggcctcccgaatctgccttttcctctcctgccctactactcaacaacactgaactctgaaaccctctctctctctctttctttctgctcgatctgctgctgctaccaccactattaccattgctgccgctacctttattgctgctgctcctgctgctgctctcggtgtcctctctctacaagcatcctcctccatagccggcgttcttgaacagctcctgctttatcatgtccgcgctcatcctctccctctgcatctcggagcaggaggcgtgcatgccgaagtcgttgaagcagctgacgacgcactgctggatgtcgaggcccagcgtctccagcgtgctcaccgtggacaggagcagccctggcttggccgcgcagtagatctccacccgcgtgtcgcccccctccttcctctccacatcgaactgcacctcacaaactccattaatcccatcatcctcctcattatatatccagcaatggatggatgcagctaccttgggtgtgttcctggccagcatctcgttggggttgagctccctgaagacgctgagcaccccgggcgtctcctgctgctgctgctcctcgatctcctcctgcagctgcctgatcctctccagcaactccttcatgtagtcgatcgtgtccccaagaatcgatgtcctgtccatcttgctgatcttgggcaccacggaccggagcatggagaggcggtcgttcagccgcttgcgccgccgccgctccgccatcaggttcttcgacggcatcccttccaccctcttcttcttcgacgccggcgccgccgccgctgcgctgaacccgccctccgcctgcagcccgggctccaccttgcacaccccgagcccgccgccatccaccaccatactcgccttgggctcaaccacatcaagaaaccccatgtcgccgccgccgccgtactcgccgccgccgccgccggcattgggcccgaatgcggcggcggcgttgccgtagacctcgctgaggcagtcgaacccggccgccggcgccggcggcggctgctcgtaggaggccgtgaaggtggggaggacgctgaccgtggtggtggactggtgccgttcttggaagccgtccatggcggcgcacgccggcgagaagaagtcccccatggcattgtactcccacgcgtccctcctcagcgagaagagctcctccaagaacgcctgctcatccagctccatctccttcctctcttcttccctttgctttgcttcagctgcagctatagcttagctaagattgcttgtgtgtgtgagagagagagagagcacagcagcacagcttagctagctgcacaggtggttattggtgtgaaatggaggggatggagaaggtgagaggacaggggggggattaatatatggagnagtttgtaggagacaattattccctgtaataaatgatgaacagtggtattaaggatttgattagggagggggggtgcatatgcattt

SEQ ID NO: 92988 - DNA, 103 bp, Oryza sativa
  Clone ID: PAT_MRT4530_91416C.1
acgctcactcatactgtcgcttaagctctaggaggggttctattgggcgcgcataatgccattcacatggtgcaaggacttctaggtggagcgacactagaaa

SEQ ID NO: 92989 - DNA, 213 bp, Oryza sativa
  Clone ID: PAT_MRT4530_91417C.1
atgggaggggcggatccaacggtctcttcccctcatgcgcgcggatttggcggtggcggcgacgggaggggtggatccgacagcctctccccctcctgtgcggatctcaccacctctccacccctatccctacaacaacaacaacgatgggcctcaagaggtgcagatgtggtagtgggcgaggcagcggatcgacaaccacgacacggatga

SEQ ID NO: 92990 - DNA, 371 bp, Oryza sativa
  Clone ID: PAT_MRT4530_91418C.1
gttgtaggaccacagacccacaagctatattgatgtacgtatttacatatgtaggtcctgggatacggacctggtaacctgactacaattacggtactcgcaagcacacaaatgaaacgaggacacattatgttaaaatggagcatacctcaaaaccggatacaagggcacatacgaagatggacggaaagactctatctccacacgaaagctatgaacacaggaaaattgcctacttggtttactctctttccccttatcccatcaacagaaatacgggaaactgcattgcgacagggggttgatacatagtgaccgagtgaccgaaattttgaagagccctatgacccttttacgtttttaggttttta

SEQ ID NO: 92991 - DNA, 2134 bp, Oryza sativa
  Clone ID: PAT_MRT4530_91419C.1
gcacggggcgcggacaggccctcctcctcctcctgcccccacctctcgctccctcggtcgccgtcccccgcccgggccgccgccagggcggcggaggcggaggaggaagatcctgcgggggatggagcggcgtgcgcccttggggctccagcgagcagcagccggttctacgtatggaggagggatattcttccttgagattgtatttccgattgattattcgtttaaacatcccatggtaactttcaagacaaggatttactactgcaatgttgactccactggtaacttgagtatgggcattttaagggaaggctggagtcctgcttttactatttcaaaggtgctacttgccactaaagcaatcatcgcaaacccggatccatggattaaaggctactaggacaggcactgatcttccaaatgaccaaaccagactttacctctgaaaaggacattttaccagatcacctattcccagtatgtactatgcatctactgatcacatcaggcaacctataacaactccacccctgagaagaagcaagttgctcattccggtgatctttctccccaaaccactgacaatggccaccgagtgtgatgtgaacaaatctcgccgcttcgatcttggcatgtcgaggcggacacgaagatcaacaagtctcatcacttgttatcaagatcaacaggtgcagccccttgtgcagcagctacgtcaagatgccaagctgaagacattgttccagtgccaggatacagagctgcagccaccatgtccatatgaagatcaggagttgaggattctacaggcaccactgcaatgcgaagttgatgcacaggagacactgaatcaacaccgtgatgagcaggaggagaaacttcaccattatctagatgaagagcatgagaagaaacttcaggatcatttggatgaagaaccggagaagaaacttcatcattatctagatgaagagcaggagaagaaacttcaggatcatctggatgaagaaccggagaagaaacttcatcattatctagatgaagagcaggagaaactgttccaggatcaagacgaagaggagaaaacaccaaagcaatatcttgatgaggatcagaagacattgcagcaatgtcaagatgaggagaaggcgccaaatcaatacgaagatgaagacaacactacagggcaataccaagatggggagcagaagacagctgaacaatgcgaagaagagaagacatcagagaagtatcacgatgaagagcacaagtcactcgaggcacaacaccaatgccaagacacggagcggaaggccccggggcaatgcaaaactgcgaagacgaagctgatcacgccgccttgtgccaacgatgtgccccggttctcccttcaggatctgatacaagagaagcagctcctcatcggagaagccaaagccaccagcaagctcggaaacgggaagaaagccattgctgatcataaacttcccgtacctccggctgctggtggcgcgacgttggccatggtgataaagcgcccagacggggggaagaagtcgatgggagtgattcgccgttgcgtgaaggcactgaaccagatggtcaaggccaagcatggctccaagaagaacaaacctttctaatcaagtgagtacatgcatgcatcagagatccatagtagaatcagcacatctcagtataataatgcacctaatgcaaaaacatggttttggaggatagtttcagatgtgcagaatctgacaagaaactctagagcaaggataaccatctacctgaacgaataatcttgatcaactagtagggtatcatccatttgctgtattatctgagttgttttatggcatttgctcagcaatgtaattactcaatgatgtaccagataaacatcagagtctagctagttcacgcgctttgaattcatcctctgcaaagttactacacgaagtatgaacacgagggaattgcccagttctaccgacactctctggtcagagatggtgttggtgcacgctccctttccatctttttgagagtcacgtccccttttcaatttggtgtatgcatgatgaatgttgagagtgcacgttagtgaaaaaaaaattgagtttgt

SEQ ID NO: 92992 - DNA, 1469 bp, Oryza sativa
  Clone ID: PAT_MRT4530_9141C.1
atggcctcatggccgacatcatgtaccaaggtgtacgagatcattcagttttcgcgctgcaaggaggaggcgagcgcaacatcaagcatcatcgaccacaggacggccaaagtcggcagacgagatgacggcccgaacatgtcaaaggtgctaagagctacaatacctgagaattcagttagtggatcatcagttcgaggaaagctgcgagaaatggagatggacttggcagtcgagcagtacggcagtataggtgcgtcctccatattaagtactctctccgtcccagaatatagcaacctagcatgggatgagacctatcctaagaccatgttatctgctctctctgcaacaaagaacaggatgtacaacaggattgctccaattgtggggcatgcttgggtaaatatttctgcgcaaaatgcaacttttatgatgacgatgcaagttgtgctaaatatgcattcctgtgacggagtaatgaaatatgagccctttttgataaatctcaccatcacattttacagaactggtggtgcagagaacttctttcactgtgacaaatgcggatgctgctacagctatgtgctgaaggattcccatcattgtgtggaaagagcaatgcaccataactgccctgtatgcttcgagtatctatttgactcaacaaaagacatcagtgcactgcactgcggacacacgatccatctggaatgcctatacgagatgagatcccatcaacaattctcttgcccggtctgcctgaggtctgcttgtgacatgtcccatgcatggcaaaagcttgatcaagagaacaccatccaaataactcttcactcaggttgcagcatcgccgatgccagtgatctatcagaagaaaatgatatggatcctatgcaacgactgtgggacgacatcgaacgtgcaattccacatattgggacacaagtgccccggatgcagctcttacaacacccggcagacaagagccgcccctgctgccgcgtgctccagagtctgaattctgaagaacagtgagatgagagctagtctgaactccgaagaacagcgagagatttgcactgctctctgcagtctgaaatgcccaataaaaagatttgcagcctgtgattagtctcaaagcccatcaaaacgcaaacaaccgtttgttctgaaatttgggctcgtccatggtttgttccccctagtaggccggtctggtgctaatctggcccagcgttgtgctttaggcggatttcgactttgcttgcctgctgggccttggccgcaagcgccagtcaggactctgcatcgagatgatttttatcattaccgtgatttttatcgcgttgtgctttcgccggtgaggtatttctcgcaaagaaaaaggaactaacgaaatgtgctcgtcgttcattggcatgccggtgcttacgagattgaaataaagaagtagcggtatgatcatc

SEQ ID NO: 92993 - DNA, 348 bp, Oryza sativa
  Clone ID: PAT_MRT4530_91420C.1
gttgacagaaaacatgaggcctgagatatctgcttaactccagtgcaggtccaaaactcgccttcggatgtatgagcgtgccagttgatttgatcctataatcaacaagaaataaagacaaaggagccatagttaaatctataaatgatagccgatcggccaggactctatctatgcgtggcaatcatcttgaagcacatcaactcgaacccaatgttgcacacgggtcgtattgtcgaaatcggctatatcagcttatctagttcaactcaatctcagccgatcctagccatagccaatcaggactccagccgattcctgctctgttccagaactcgatctccgcct

SEQ ID NO: 92994 - DNA, 675 bp, Oryza sativa
  Clone ID: PAT_MRT4530_91421C.1
atgccgccgccgcccgtcgcgtcgccgctgccgcgccgcgcgccgtcacgtcgcctcgcaccccgagccgccgcgcgccgtcacttcgccgctgccgcgccgcgcagccatctcgtcgccccgcgcgcccacgcgccccgccgccgcccgtcgcgtcgtcgtccgcgcgtcgccgtcgtcccgagccccgtgcgccgctgtcgcatcgccattaagccgccgcgcacccgtcccctcgtgcctgcgcgccgccgcgcggccgtcgccatcgccgtcgcctgtcgtgttgccacccgccgtcgcccgtcgcgtcccgccccgagccccgtgccgcgcgcccccaccccgagccccgcgccgccgtcgcgtcttcccctccccttatctctttcccttcccctatataagccccactattcccctcttctcctccgtctccaccccctcatctctacccactcctccacgccaccgcgccgccgtctccacgccgccacgccgtcgcttaaagccgccgcgccgccgccacgaagccgccgcgccgcgccttgcgccaacaccgccaccgtcgctgtcgccgccgttgccgtcgccgtcgtcgaggcgggcgatgaagctacggaggacccctatgcctactaccaggagggagacgaggacgatggtgcccagtag

SEQ ID NO: 92995 - DNA, 418 bp, Oryza sativa
  Clone ID: PAT_MRT4530_91422C.1
ctaatagtgaaaatcaaggcagatatagttagatgaagtgtgcacactgcagacatcagcaacctcgtcaaggtataaagtagctttccccctcgtcttgtttgtactcactactaaccatggaagatgaatggcttgaacatgcacatggttcttgagagcagcaggaggaggaggatgaagagcaatggctaagctccagttcaagaagctcttcaactccatggtgcctttccggcctcctaggtggtcggctgagttagcagttggtcatatccttgctttgagacaaagttgcttctgctggggggatggagagtacacctcatttcatttctgccttatgccattgcaattttttctattgatatacgtttccaccgaggcagaaatttccagatggtacatcagttattaa

SEQ ID NO: 92996 - DNA, 580 bp, Oryza sativa
  unsure (1)..(580): unsure at all n locations
  Clone ID: PAT_MRT4530_91423C.1
ctttaattcgatatatcgatcgtttctttttcaatgatgccttagttntaatattttacattgtgtgtctgttaattcatcggcgatatgatctcatggccggctgcacattggctctgccagaatcgattcattcgagtattgcataagctatatatgctatggcacttcagtgatgacaaaagctacaattattcagtgttgtcgttctctcctgcaggaaaaataccaagaggtataacctctttgtaaatctatccgcggtccattcttcatggtgccaatcctcccttctcagagggtaattcttttctgattcatatggtgcgatgacttaccgtggcacgccgtgaaaagctgagattggcagatggctcattgggtgtgatgccggcatgtcggttctcaatattactggagtgcanaggggtgcgagcaaggctacattggacaaggcggtgcaactatgangccggagaatgaagatgctttcatggatatgcttgctctagatcccattgaaaaatcgtataaaaatgaggaggtcagagctcaagcccacgaggatctttctaagtgc

SEQ ID NO: 92997 - DNA, 188 bp, Oryza sativa
  Clone ID: PAT_MRT4530_91424C.1
atggaaagcttcacggaaggccagtgaatgtatggtatggcttgcacactgagaaagtttccaccgtgccgcttggtgatgatgtggatccccccgccttaacgcgtaacccggtgcattcttttttgtactcttgaggtagtagccaatgtgaatgaagtttgtgctaaaaaaaaaaaaaaaaaaaa

SEQ ID NO: 92998 - DNA, 1102 bp, Oryza sativa
  unsure (1)..(1102): unsure at all n locations
  Clone ID: PAT_MRT4530_91425C.1
caactcgtgttttttttttgttgatttcatgggaccaaagggcaggatcaacattcttgggcagggactcctggagttgtgacctctcccatagccattgttcggctttagtgcactccctttcaacagcatattgctcaggcgtgggtaatgatttggcagccatcctgtggtcaacaatgcacttagaaagatccctcgtggcttgagctctgacctcctcatttttataacgattttcaatgggatctagaagcagcatatccatgaaagcatcttcattctcccggctcatagttgcaccgccttgtccaatgtagccttgctcgcacccctttgcactccagtaatattgagaaccgacatgccggcatcacacccaatgagccatctgccaatctcagcttttcacggcgtgccacggtaagtcatcgcaccatatgaatcagaaaagaattaccctctgagaagggaggattggcaccatgaagaatggaccgcggatagatttacaaagaggttatacctcttggtatttttcctcctcgctttctccgcgtccgccttgaagcccctgctcggcgacagcgacggcgcaacggggaggccgaggcggcagcgcgagggggaggaagaggcatatacacctactcttagtacggcacggagggacggtggcggaacgcgggcggcggagacggtgctcagcgacgttgacggcgacggcggtggaggaggcggagacggctgcaccctgcgcgaggggaaggcggaggcggaggcagccggggacggggacgacacagtggcggcggaggaggtggaggcggcggggagaggcggaggacgaggcggcccccggcagcagttcccggccggntcctgcaggagagaacgacaacactgaataattgtagcttttgtcatcactgaagtgccatagcatatatagcttatgcaatactcgaatgaatcgattctggcagagccaatgtgcagccggccatgagatcatatcgccgatgaattaacagacacacaatgtaaaatattaaaactaaggcatcattgaaaaagaaacgatcgatatatcgaattaaag

SEQ ID NO: 92999 - DNA, 410 bp, Oryza sativa
  unsure (1)..(410): unsure at all n locations
  Clone ID: PAT_MRT4530_91426C.1
ccggccggggacctgccatagctcctggcctcccgagatggagacctcctccttncctcgcaccaccctccccaccgcgaagcccctcccggcgttccagaccctcgcacctcgccccagagctcgtgcgctgcgccgctccaccatcatcgcgatcatgatgcgagggcggcaggaggtaccggtggtcgccgtggtgccaggagctggagtgatgatacctccttaccgggattgcttctagggcctcacggcgttgtagctgcatgtcgtgcgcgtgacggtccatgtagctgccggctgctggcggagaacctctcgtggtgggggaaggactgtgcctgcacgccctgagagtcgatcaagtgatgtgtgatgggttttgacgagtgcatgttctgtaaaggcct

SEQ ID NO: 93000 - DNA, 942 bp, Oryza sativa
  Clone ID: PAT_MRT4530_91427C.1
caaggacgaaggccgtcaagcgaagcatgaagccgtcgtctttcctcttcttcctcttcccctccctctcgctgcctgccgcctctgcttgctcagatcttctcctctccttcccggattccaccctcagttgttgtctcacagtctccgaatcgctgggcggtggagccattggtgctcacccacgggcacgggcgatgggcgccgatggcggcggcggcggaggccggaagagctcgtcgccggccgggaagccggcggaggcggcacgggcggggagcctgctcgccggactcccctcgcggggcaacttcgtcgccgacagcatcgcgtccagcatgggaggcctcccggtttatgtctgcctgcacgacaccgctcctccaggaatgagggctgattgtagtgctagtgagggacaagttatagacacagacaccacaaacattttaatcagatctctccagttgagcaaacagaaaaatgaggcaaaagatgtaggatcaaggactccaggagaaagcagcaaggggaaaaggtctgcttccagacttttagatggcaagaatccatctaaaagagctaacactggcagcacggcagggtcatctgcccatggggaattgggatctgttttttctgagcagacgctccaatcatttacggtggagaagttgcgtattcttctgaaagagagagggctctcaccaaaaggcaaaaaggatgaactgatcgcccgcttaattgagtcctcggagtgatctgaactgcgatcggaacctcattttgttggatgttgtaccgtagtgacgatcatacaccatgcaagtgaacttctatcgcagacctcatgtaagcatatatttcatacagtgccgaaatgaaagatctggctgatagtttccaaaaaaaaaaaaaaaaaaaaaaaaaaaaaaaaaaaaa

SEQ ID NO: 93001 - DNA, 392 bp, Oryza sativa
  unsure (1)..(392): unsure at all n locations
  Clone ID: PAT_MRT4530_91428C.1
cccacccgaccggccgcgcgagacagcagcaagcgaaagcaccaggctcaagcacgggggaagagcacaggcaaggagcacccgcacgaaacgcccngccaaaaggcgggcacaatacacagangcgccgcaactacgcaggctcacggacatgaggaacagatgtggataaaacaagccgcgggtaagagccaggggtaccaccaaggtgtggtaatatggaatagatgaatacaaaagaatagtgagagagctatgcggcggcactcgcacgcacagaacgacgggacacatgtaagggaaacatgaccagattacacgtccttaggtaaaatagacaaaaaagggcggacgatctgggggggcgaagtagacgaaccaaggcaaccgac

SEQ ID NO: 93002 - DNA, 438 bp, Oryza sativa
  Clone ID: PAT_MRT4530_91429C.1
ggctgcaggagcagtaagtcgcagcggtaggagcaggtctcattgagttgctcccggccaggactgcgaggctgtgtgagtcattgttcgtgtcatgctgagataaaggcttctatctaattttggttcattctcacatattataccatggaatcaaaatataccaaggtaagagttttcagccttgaaattcacatgtgcattgtttcaggttcatatatctgaccctacttgccaaattcagttccagagcaacatgctactcccagtaaaagtaaaaccaaaaggtgatccgaacactccccccccccccccccccccctccttcgtttcttgtatacaaaacttacttttaaagttttttcatcaaagtttacttttcagtattggcatttaaatcgctacgaacacatgtattaaaaaattccaatcccactt

SEQ ID NO: 93003 - DNA, 457 bp, Oryza sativa
  Clone ID: PAT_MRT4530_9142C.1
atttgactcaacaaaagacatcagtgcactgcactgcggacacacgatccatctggaatgcctatacgagatgagatcccatcaacaattctcttgcccggtctgcctgaggtctgcttgtgacatgtcccatgcatggcaaaagcttgatcaagaggtgcattttccttctcccattgcacagcttatccattgacactgaccatgtacatatacatacatacatacatgcatagaacaccatccaaataactcttcactcaggttgcagcatcgccgatgccagtgatctatcagaagaaaatgatatggatcctatgcaacgactgtgggacgacatcgaacgtgcaattccacatattgggacacaagtgccccggatgcagctcttacaacacccggcagacaagagccgcccctgctgccgcgtgctccagagtctgaattctgaagaaca

SEQ ID NO: 93004 - DNA, 528 bp, Oryza sativa
  Clone ID: PAT_MRT4530_91430C.1
gtccccgactccgcactgctgctgctggtggtgtgggttcgcttcccactcactcacacacccacacacactatcctcctcctcctcctcctcgtcgccgcgacgccgcctttctctccaccgcgatttctatatataaaacgcccccaaaaataccttgcccctccctcactccaccggatctacaccgccaacgcacaaaacaccccatcggatcttgtgtgcttgcggctgccggagatcgatggcgcggtggccgaggccagcgctgctgctgctgctcgtcgccgtgctgctcctctcccacattgcgctctgctcctccgccgcggcgtcggggaagcccaaggggaagggtgtcggggggcggaaggcgctgctggctgatgatggtggggaggaggaggaggtggtggtggtcccgccgcgcagatgagaccctgaaggttgcgtgtattttgctcagctcttcttccactcctcggcgccgccgtcggtgcccccggcgaggtaggctttcttcctcct

SEQ ID NO: 93005 - DNA, 445 bp, Oryza sativa
  Clone ID: PAT_MRT4530_91431C.1
acggcacgaggatccggtcatcagcaaaggttaattaggcccggagatatttgcagctgagagcggggagggaacgaatcggaatcggcatcgttatcggcatcggcagcggcgatggagacagagagatggaacgcgagggagttcctacaggggcgagctgggaacacacggtgatagaggcggtctaggtactattcgtgtgttctacaggtcgcccctgccgggactctctggttgattatgtatatgttgattatatttcttttgccaaaaggtctcctaaatggcgcggtgtagaaatgattgagaggaccaaaaagggagaggatttgcgcgggctggatttggactgaaggacatcacaacttgtgacaactgccacgacttcatacaaactccattttgggcatgtaagtacaaatggatccatcctcatgtccat

SEQ ID NO: 93006 - DNA, 306 bp, Oryza sativa
  Clone ID: PAT_MRT4530_91432C.1
atggcaaggttgagctcatccctggcctgcaatcttggctttgacagcttcgttatgctgtcgaagctgctgacaagacagctgaaggagttggaggatatcctcaggtggatcctgaaggatgcacttgcacaacatgtattcaataagaaagaactggaagggaagtttcatcaagaattcaagatatggatccatgcctctagtagacttgagacgataagcattgccaaaaaagatggtaaagtcagtgacaggccatgggagcaagatgctgataactacccggttgggttcagttgctga

SEQ ID NO: 93007 - DNA, 126 bp, Oryza sativa
  Clone ID: PAT_MRT4530_91433C.1
atgggtacaacaatccttaaccaaggagcatgcatagtgatcggtgttgatgaagaactaaaaaatgaagttaaagcactagatgagaggaacatagcagagggccagaggagcgaagaattatag

SEQ ID NO: 93008 - DNA, 228 bp, Oryza sativa
  Clone ID: PAT_MRT4530_91434C.1
atggctctgctgcccttcaccttcctcttcctgtccctacgccccgccatcctctccgctgctgtcgtctcctcctctactgtcgccggagtccctgcggaccgcggtggagacgacccaggctcagggcgacgacggagtatgatagcgaggagactatattcgtccacgagagttctagaaggctcagatctagatgacggtggcccttcttcttctctcacgttc

SEQ ID NO: 93009 - DNA, 384 bp, Oryza sativa
  Clone ID: PAT_MRT4530_91435C.1
atgggggcgcccatgccgccatcatcatccagcgcaaaggaggacgagagggaacttatcagctcgtcccacccccctctcacccggttcgcccgcctctcctctccgtcaactgagacgacggcgacggcgagcggaccgcatctggtgacggtggcatgcaggatggctttggcggcattggcagcagacggatccagtgtcagcgggggctcccgtggcggatccagcgtcgaccgtgttagcggcgagtggctcaacgtcgttcgcgtcgatagcgaacgaggcggtgtcggtcgcgtcggcaacgggcggacccggtgccggcgggggctcccgttgcggatccggcgttggctgctagcagggtggcatcggcagtag

SEQ ID NO: 93010 - DNA, 1248 bp, Oryza sativa
  Clone ID: PAT_MRT4530_91436C.1
atggaggacggcgtggagttagatcaggatttggcggcgacaagagaggaagcagagcgcgagatactcaacacctggatatgggacaaagagatcgacttattgcagagggagatcgaggagcaagacgaactaagtcgccttcgacacgagcaagagagagaagacgacctatacgtgtgcaggatgatcgaggagcgacacggagaaccctgtcatcttgaagatcatgaattggagaaaatatatgggccgcacacgtacgaaactgattatgactccgatgggagtggagtgtccttctacagcaatggaaggaacattttcatgaaatacggcgatgggtttaggtatgaagacgggaacccttattatgcagctgatagggaggagacatgggagaagcaaattctcagacaaatgaagtttcccatccctgatctttcagaatcttgggaggggtctcttgtggttgaagggccattcaacttagatccaaacctaacacttacggatcatttgatgcctgcactccccaagtgggaaaggcgatggttagatagggacgggaaggaaccatgccgtcgagctatacaagtacttgatctatgtacatttgcattcagagatacacgcaatagtcagctgcgcaactatgtctttgactactcaagagaaaacccatgtaaacttaagccgggtgctcattgcctccaacctctgatgacccctcctcgaggcatttatgcagttgggattgtgctaattgagtatcgcctaattattaagggtcaaaaggaggaagaagatcaagtgttaatagatggatattctatctacgctccatctttctatgcagattttgaaaagctcatatggcacatcaacactggtcatttcggcaccattgatctgacaatttttgctatcccgaaagcggtcctggttgatttggagtttgagctgggtgttggcaagctacctccactcacattgagcgcgagacatgataaacatttccccataacagtttataaatactacaaccattcgggttgccatcccgatggtgttatcaggaactgtagattcggtacagaatatgattttgacgattttctatgtgaaagcttgtcttttacacctcaaaaatatggaaagagttcaaaaatattggcccgtaatctggacggcattcagatggctatgaagtcgacatggtctatcatgtgtgaaccatgtctataa

SEQ ID NO: 93011 - DNA, 807 bp, Oryza sativa
  unsure (1)..(807): unsure at all n locations
  Clone ID: PAT_MRT4530_91437C.1
ggcggcagcagctgcaacaaaaggcggcacggcgacgagtggtggcagtagcagtagcaacatcgacgcggcggcgcggcgacgagcggtggtagcagcaacagcggaaccagttggccatggcgctctcggcgttcggcagcgtcgccgcggggctcgtggcagtgccggtcactgtgttcggcactggcatcgacgaagccgtgctcgccaaatcattcaagaccgatgtgcccacaatccagaagctcaaggtgaacctgagtacctgactccacccaacaagccctaattaagcacgcttgctaatcttctctcgccattgtcgagtggctgcagtagtagggccacggcggcagcaatgagctgtagcgacggtgagcggcggcatcgcgagcagcattaggagtggtggggatggaatgagcggcgcagnaggggaaagagtgagggtaaaaggggaagagagagagtagagatgagagcattttcattcaatacatgcaaaatacgtatctcagtgacaccactaagatttcaaacagtagcagtggtatcgttacaaatatagacaaatagtaatgttatatttcaaaactgctaaaattttaatggcatggatctaattaacccttcaaacaatgccccttttcccaacccctttctctcgttntccgcgcgcatgtttttcaaactgttaaacggtgcatttttttaaaaaaaagtttctattacgaaagtagcttaaaaaataaattaatcctttttttaaaaaaattagctaatacttaataaatcacacgttag

SEQ ID NO: 93012 - DNA, 503 bp, Oryza sativa
  Clone ID: PAT_MRT4530_91438C.1
gctgtggcgtccgcacggcccgcccggcgctctacaccggccgatgaccttcgacgagtaccgcgagcacatccggcggtcggcctcagcggcaaggcgcagctccagtctcagcagatggcaaccgccatctgcggcgcccctcccgccgctactgcgtcttcttcttcttcctcctcagcgacagtctagctcgctagctagctattccctttgtgcccaaaaaatagcctatataagaatggaatataacttagaacaataaatatgaacatatttatttcgagattcgttgttataggttatgtcctatcctacctaggttagctttttggtacaaagggagcagttggcttcaacttgcaagctccgatatccatccagaaggaacatgtttttgtggatagcgtgcgttggcgacctgtagatattattactctctccatctcaaaatataacaacttgtcctcaggatttgtcccaaatagaaaaaaaaaaaaaaa

SEQ ID NO: 93013 - DNA, 1125 bp, Oryza sativa
  Clone ID: PAT_MRT4530_91439C.1
atgatcgaggagcgacacggagaaccctgtcatctcgaagatcatgaattggagaaaatatatgggccgcccgcatacgaaactgataatgactctgatgagggtggagtgtctttttacagcaatggaaggaacattttcatgaaatacggcgatgggtttaggtatgaagacgggaacccttattatgcagctgatagggaggagacatgggagaagcaaattctcagacaaatgaagtttcccatccccgatctttcagaatcttgggaggggtctcttgtggttgaagggccattcaacttagatctaaacctaacatttacggatcatttgatgcctgcactccccaagtgggaaaggcgatgtaatgttccattggagatctatggtatatttgcattcagagatacacgcaatagtcagatgcgcaactatgtctttgactactcaagagaaaacccatgtaaacttaagccgggtgctcattgcctccaatctctgatgacccctcctcgaggcatttatgcagttgggattgtgctaattgagtatcgcctaattattaagggtcaaaaggaggaagaagatcaagtgttaatagatggatactctatgtacgctccatctttctatgcagattttcaaaagctcatatggcacatcaacactggtcatttcggcaccatttatctgacaatttttgctatcccgaaagctgtcctggttgatttggagtttgaggtgtgtcaaattgaagataaccacgagcatgattcactcgcaatagttgcaacctactttaacattaatacttcttttattatcttcaacggtaagctgggtgttggcaagctacctccgctcacattgagcgcgagacatgataaacatttctccataaaagtttataaatactacaaccattcgggttgccatcccgatggtgttgtcaggaactgtagattcggtacagaatattattttgaggattttctatgtgaaagcttgtcttttacacctcaaaaatatggaaagagttcaaaaatattgtcccgtaatctggacggcattcagatggctatgaagtcgacatggtttattatgtgtgaaccatgtctataa

SEQ ID NO: 93014 - DNA, 625 bp, Oryza sativa
  Clone ID: PAT_MRT4530_9143C.1
aaagtcgaatatccagatgatctgacagttacaagtttgttagagtggagaaagaacgttgtagataaatctattagccctgtaacttggaatagctacattcgacaactaaaaacaatcttcaaatttggtatagaatacgaaatactttctttggagaaaaatccatttaataagttatcagttaaagagggaaaacatagaaagaagatatatagcccggaacagttacaaaaattgagttgtggtatacaagaaaatgctaacattcctgaatatctgcgtcctacttggtttgtacaaacaattattatgacacttcgttgtacagcgattcgtcggactcaattaataaaactaaaaataaaggatgttgatcttgaaaaaagaataatttacatacctcctgaaataaataaaaaccatgattaccataccttacctatttccaatgcattatatccttacttaacaaacttacttaataagttacaggaattaaaacaatctacagacaatcagctttttaatctgaatcttttctcgagagcagtaaagcgtagaggaggggatcctccagagtcgacctgcaggcatgcaagcttgagtattctatagtgtcact

SEQ ID NO: 93015 - DNA, 108 bp, Oryza sativa
  Clone ID: PAT_MRT4530_91440C.1
atgactaagctaatgtttattggcaagtcatggactgcagatttgggtcaagaggaggacccctacgactattattatgatgaccctgataacttagaaaatccctag

SEQ ID NO: 93016 - DNA, 602 bp, Oryza sativa
  Clone ID: PAT_MRT4530_91441C.1
ctcttccctctttccctcctttttttttttttttttttttttttttttttttttttttttttttttttttttttttttttttttttttttttggaaaaaaaaaggggaccatttttcaggggaaaaaaagcgggcccagaaagaggtccggggggggggtcccccggttttttcccaattagcccccccggggcccagagcccaaaaaggggggtttgggtcccccgaccaaaaccaacccccccccaattttccccagggccaaagaccaaccgggggccctagaccaaaaaaaaatcggctccccccccccttttaaaaaaccaaaaccccatttttggggggccccgccctaaaaattggccccgggggcccccccccccccctcctgggttttggggggaccccccgagccgaaaccaaaaccttggccgggggcctccggggaagcccccccttccaccgggggaatttcccacacgattttggggccccccccagggccgtttttgaccggaaaagggggagggggcattttgcccgggggcccccttggcccttttataacaaaccccataaaagcccccggggccacaaaaggg

SEQ ID NO: 93017 - DNA, 331 bp, Oryza sativa
  Clone ID: PAT_MRT4530_91442C.1
tccaaccattctctctccccttcccttcccttgacacttatcaacttcttttacccactagagagagaggtgtttcatcgtctacaccatttacccaatcctttccatacatttccacctattactatctcataacattttcttaagttttattaatacctccaaatttatcatatttattcgatttatctacatttcacctattgaatcctcatatctagactttcttctttttatcattactccttaaatttaaataattttacattttttatcttacacatcaacattttccctaacttcactatttatatacatttcttaaattttt

SEQ ID NO: 93018 - DNA, 489 bp, Oryza sativa
  Clone ID: PAT_MRT4530_91443C.1
atgggcgttgggcagcccagtaccggtggagccgcgtcaaccgatcagcacaggtacagagacccgtccccaagccacggccgccgcaaccacgccacgcaccagtcggtggtggtttggattgtggttttggtctacgtggcggtcttgaccaagtctttgttctacgtgacgcttacgtgggcattgcctcggaggcaaggttggtatctgctacggctgcaagcccgcaacgccgatgacctgccggcgccggacaaggtggtgcagctcatccagcagcagtcgctcaagtacgcgcgcatctacgacaccaacatcgacgtcatcaaggccttcgccaacaccggcgtcgagctcatggtcggcgtccccaactccgacctcctccccttcgcgccgttttcaatgagaacaagaaaccggaaattgaatctgagaggaactgggggctgttcttccctgaccaaagctctatatacagtatag

SEQ ID NO: 93019 - DNA, 3015 bp, Oryza sativa
  Clone ID: PAT_MRT4530_91444C.1
atggaggaggaagggagcgggaggggaggggatggccccgccgctcatggccggataggtgacacggcttcgcttggtgcttcgtgcgtgcgtgcgggtgtgggcggcgactcgccggtgatggtgtcgtcggcgtcggtcaggaagacggtgaagatgtccgagacctgcgacttcatcccctacgtcgacgacgacgacgacggcaacagcgaagaggagaattccgcctcgtcggggatcctcccgtgcgacgggatgcagcacgacacgcccgattacatcaggaggggcgccgcggccgccaggcacaggatcgcgccgctcgagctcttctcgggcccctcgccgccgcagggcccgccttctccttctccggccatcggcggtgccgccctggaagccacctccaacgatggcgtggccgagccgcaggttcatcctcccgaaggcatttctagcatcataagcacaggtggtggagagcaggagaccgccaccatgggttcacaaagcgtgcatgaaacacttcacattgaggaaaatgagggaaaatgcagctgctgtggacagctcaagcaggagtactctctgcttttgagggagaaggaagagtgcaggagagttttggaggacttgatgagggagaacgagctcaagagcagggaatgccacgaggctcaggcgtccctgcacgagctgaggatggagctgatgcgaaagtcaatgcatgttggctctttggcatttgcagtggaggggcaagtgaaagagaagagtcgttggtgtcagttgctgaacgatttgagtgagaaatttaaggcattgaaggcagagcaccagattttactacaagaatcgcttgaatgcaaaaaatttgtggcagatgctacacaaatgactacgacaatccaacaacatgtgaaccaatatgcaagtttggaatgtgagtttaaggatctcaaagagaagttcactgaggagacaaaagaaagaaaagatctttacaacaagcttatagaggtcaaaggtaacataagagttttttgccggtgtcggccattaaatggtgaagaaattgaagaaggggcttcgatggcagttgattttgaatctgcaaaagacggcgaactaattgtcagagggcatgtatcttcaaaaaaggttttcaaatttgattctgttttcagccctgaagaagatcaagaaaaggtgtttgagaaaactgtgccttttgcaacttcagtgctggatgggtacaatgtttgcatatttgcttatggacagacgggcactggtaaaacatttacaatggaaggaattgaagatgctcgaggggttaactacagaactctagaggaactctttcgaattaccaaagaaagacaaggcctttttcagtatgagattactgtcagcgttttggaagtgtacaatgaacaaattcatgatttgctgctgacagggactcagcctggtgcaacagccaaaaggctagaagtaaggcaagttgcagaaggagttcatcatgtgccaggacttgttgaagcacgtgttactaatatgaatgaggcctgggaggtcctgcaaactggaagcaaagctagggttgtcggttcaacgaatgctaatgagcatagcagccgatcacactgtatgcattgtgtaatggtcaaaggagaaaacttgatgaatggggaacaaacaaaaagtaaattgtggttaattgaccttgccgggagtgagcgagtggcaaagacagatgctcaaggagaacggctgaaagaagctcaaaatattaacaagtccctttctgcacttggagatgtcatatctgctcttgcaaccaagagccagcatataccgttcaggaactcaaagctaacgcacttgctgcaggactcactaagtggagactccaagactttgatgtttgttcagatcagcccaaatgagaacgatgtgggtgaaactctttgctcgctaaactttgcgagcagagtgcggggaatagagcttggacaagcaagaaaacaagttgatgttggtgaactgtcaagatataagctgatggctgggagagccaaacaggacagtaagaataaagatgctcagattaagagcatggaagaaacaatccaatcgcttgaagcaaagaacaaggccaaagacctactcactatgaatctccaagagaagatcaaagagctggaagcacagctgctggttgaaaggaagatagcgaggcagcacgtcgacaacaagatcgcccaagatcacctgcatcagcagcagcaaagcaagaagccagaaaactcaccgtgcccgacgagaagccccatggcagagaggaacctcaactccacagcagagaagccagtgacgttgctcaaagacctcggaatcgcgaggcagatgttctccgacagcaacacggacacctacagcatcaaccacctgatgtccatgtcgtcggagaaggagaacaaccctgccggcggcgcgcagcctacaaaagccagaagagtctcactctgcggcggagctcaccagcagccggctgctcctcctcgccggggctcgctgatcccgctgccgcggcggaactcactgatgctgcctctaccattgcccaagcccgcaacacccgcggcggcggcgtcgccgctggacatgatcaccgagcagtgctcctcgccgctggtgatcgcccccaacgacatcaggggtggcggcggcggcggcggacggaacaagaggatcatcaacagcatcctgcgtcgcagcctgcagaagaaggtgatcatcaggccgccactaatggcagctcatcagtcagggaggagggccggcgccggcgtggctggtacaaccacccatggcggcggcggcggcggggtgatgagagcgcggcgtgtgccggtgagcggcggccggggaggaggaggggtgcagcacaacagggagaaggagagagggtggaacaacgggaccagcctcaggcagctcaactag

SEQ ID NO: 93020 - DNA, 612 bp, Oryza sativa
  Clone ID: PAT_MRT4530_91445C.1
gggccccaaaaaaaaggggggggcaaaccccggaccacatttttttttgggaaacaaaaaaaaccccggccgggttggggggcaaacccccccttttggacgggggggggtggcccattcattcggaggggtccccgaaccccttggggaaaacggggatggcgaaggcaaacatgtcgccccccccccgccccaattggggcttcaccccctcaaacttggaaaaatgggaggccccaaagggcccccgggccccacccccccggggaaaacccccccccggaaagggcacccccttttaaaccttggaaaaccgcccgggggggggggaaaacaccccctggtgccccttggccttccccaaaaaggccgggatttcctttttaaggggggggattatgggaacagggccctggggggaccccaaacccttaaaaaattcgtggattcgacgggcacaggctttttttggaagggcattcaggggggaaagcaggcttttttgttttttctaaaaaaggtttttacccaggggcccagctacgggcccccaaaggggcttggcgtaaaaggaacctttggccccccccctgacttggggggggggaaaaa

SEQ ID NO: 93021 - DNA, 384 bp, Oryza sativa
  Clone ID: PAT_MRT4530_91446C.1
atatgacacatgttgtgagagaggaggaaaagaaccataaaagaagacaaaataagaaaacaaaggcaaataggacaccggcatccaaaaaaaccactccaagacctataaggggggcgggttgccacaagcccaggtggtaaaggaagacggaaatgggagagaggagcgtaacccaaaaaaaagaaagaaagtacaaatgcctgctgatccgatacaccaggaaataaaaccgaggcacgcgaggacacgaacaacggcgagctgaaccggaccggcctggaccgaagttatgagaaaaggcgaaccggtacaaaacagaccacgaatgaaggcgagacaatgcaagggaaaaaaaggctgggaaatgaaagaaaagcaacc

SEQ ID NO: 93022 - DNA, 714 bp, Oryza sativa
  Clone ID: PAT_MRT4530_91447C.1
atggcgactaggcagcgaaggcacttcgcccatccgcaacacctgcttctccggacgcactacagcaccacctcgagccatttctgcgacatctgccgaaccaacgtcgccggcatggtcggctaccgctgcaacacctgcgacatcgacatccacgacgcctgcgccgattacttcgaggagacagtctccttcttcgcccacccgtggcacaccctcacgctcagcaccatccccgacgacgataccaacaggtggtcgtgcaacctctgcacggaaagctgtccccggggaagcttcgtctaccgctgcgcacagtgcggtttcgacgctcacccactgtgcacgctgctgctgcagacgatccgtagcccgcttcacccgcagcatgatctcaacatggccccttcatgggggacatgctcagcgtgtcatcaaggcctgaacatgtggcactaccgctgtgaattttgcctctataagctgcacgtcgtgtgcccctctggcgcggcaaacgctggccaaggtgacaccagccgttctcacaacgctggtgctggtgctgctgctgctacgccgggctcgagccgcgccactcgtatcgccaagttcctcctcaggacaagtctcaacatcgcgatcaacgcagcaaccggcgcgctggcaacaacggtgctcgatgtccttgccacggccttggatgatcaggagtga

SEQ ID NO: 93023 - DNA, 479 bp, Oryza sativa
  Clone ID: PAT_MRT4530_91448C.1
ctagggatgcgattgagggcaaggtttggcggcggagcaggtcgcggcaggttcggcggcggagcaggtctcggcagggttcggcgatggagtatgtcgtggcagggttcttcggcggagtaggtcttggcgggcttcggcggcggaggcgatggcaggctcgagctccagtaggagcacaacacgggcggcgacggaaatatccaggcaagaatggtggatgcaaattatggcagtggtatgaaccagggacaacgccgtatttgaagcaggttttgaatgatttagtcagcactgttcgtgaagtgaagacagagaactctgaaattagagcatcccttgccaactcaagagctgtgattgatggacttgtcactgaacgcaatgtctatgaagcaaagagcatgggacaaaaagaggaatgtggctcatttgctgaaatggcctgtagaatcaagatgttagaagagagtagatga

SEQ ID NO: 93024 - DNA, 616 bp, Oryza sativa
  Clone ID: PAT_MRT4530_91449C.1
aattcggcacgaggatatctgctgttgccaaaaagagaagctcttgaaatagacatggcacgtggccttagattgccaatcgcccgatgtctcctcttgctgttctgctcatatcttccagcgagtagtttcaagccatgcggctcacccacaacaacctgacagcttcccaaacgagcggctctaccgcgcgtacctcgtcatccagcggttcaagagcaccatcacgtccgaccccaagaacgtcacagcctcttggacaggccatgacatcggcggcgagaaatcctacctcggcttctactgcgcgacaccaacagggagatccgacgacctcacagtcaccgggatcatttggaacggctacggcatgcgtgcgccgaagctgcaaggattcctcgaccagctcccagatcttgcacttttccatgctgcgtccaattactttggtagcgacatccctcgcctcaacgccgtcccgtacttgtacaatctcaatgtcgatagggatgccctggctcatcctcaggccgaaggtaagctaactggtgactcacgcattcacactccatgcattaatggcgagattcacttcataatcaaagtcatcacggac

SEQ ID NO: 93025 - DNA, 230 bp, Oryza sativa
  Clone ID: PAT_MRT4530_9144C.1
acggcaaggcgtcgccggtgagcacccaaggtgtggtgtgccacggaaagtttgtgaaggcttcgatttcgcctccgcaagggaagaaatcaagagtgaaaccgaggagtgcatttgtgcaacctcgtgaggaaagggttgaaatagacccggtcttgtggcccctcaacgaagatgtaggatccgtggatccgaacttcgggaaacaaatcaacgtgtctcctctcttg

SEQ ID NO: 93026 - DNA, 191 bp, Oryza sativa
  Clone ID: PAT_MRT4530_91450C.1
ggacgccacagctgctgatgacgactgcactaatgagggaaaagctgggtgaaccgcctgcaaggtgacccggtgcccggaaatgtgcccccgggtgcaagacaccaacgcgtgcccgatgatggccaaggcacattgactggtggtgcaaagatgatgactgacctggtgccaaaatgaccgggactgcc

SEQ ID NO: 93027 - DNA, 414 bp, Oryza sativa
  Clone ID: PAT_MRT4530_91451C.1
agggacctcttccttgcctccgcgaacccctcgcctcgcgacgctgccgctgccgccgccgcggcatcgtcatccttgtcctccgcctcgtcgctacgggggaggatgaggagaagggtgggggtggtgtgcgcggcggtgtcgtcggggcaggagggaagtggcgggggtgcagccgttggtggaggcgttgccgccggtggcgagagcggcggggtatgtggtcgggctgcgcagggggggacgcggaccacgacggtgctcggggcggtcaacgtcgccgaagcagcttcggcgaactccgccgtgcccggggtcgccgcggcagggctgcacaactacgtcgccggctgccgggaggagaggaaagaagagagggcagatcgggagaggaggaagaagaggaggggttag

SEQ ID NO: 93028 - DNA, 1059 bp, Oryza sativa
  Clone ID: PAT_MRT4530_91452C.1
atggtgcacccagctcagggccagatggtgcaagacctcgccgccggcggcgagctcggggcgccgccgagcaggtacgtgctgcgggagaaggaccgcccggtggcggcggccggcgccgtgcaggcggcgcagcgggagctcgccgccatccccaccatagacgtgagccgactggccgccgagagcggtgacgacgtcgtcgacgacggcggcgaggcggccaagctccggtcggcgctccagtcgtgggggctcttcgcggtgaccggccacggcatgccggagccgttcctcgacgagatcctcgccgcgacgcgggagttcttccacctcccgccggaggagaaggagaggtacagcaacgtggtcgccgccgccgacgccgacggcgtcggcgccggcggcgagaggttccagcccgagggctacggcatcgaccgcgtggacaccgacgagcagatcctcgactggtgcgaccggctctacctccaggtgcagccggaggaggagcggcggctggagttctggccggagcacccggcggcgctccggggactcctcgaggagtacacgcggcggagcgagcaggtgttccggcgggtgctcgccgccacggcgaggtcgctggggttcggggaggagttcttcggcgacaaggtcggcgagaaggtgacgacgtacgcgcggttcacctactacccgccatgcccgcggccggagctcgtgtacggcctcaagccccacacggacaactccgtcctcaccgtcctcctcctcgacaagcacgtcggcggcctccagctgctcaaggacggccgctggctcgacattccggtgctcaccaacgagctcctcgtcgtcgccggcgacgagattgagttgtttgcattgcttggtgttgcagatcatgagcaagtgttcatggcgccggtgcacagggtggtgacgagcgagagggagaggatgtcggtggtgatgttctaccagccggagccgcacaaggagctggcgccgtcggaggagctcgtcggcgaggagcggccggcgatgtactag

SEQ ID NO: 93029 - DNA, 330 bp, Oryza sativa
  Clone ID: PAT_MRT4530_91453C.1
atggcgaagaagaagagggccggcggtgaggggaaaggggaggaagcggagctcgtcgtcacagaggggcggtgccgtcatccgcatccagatccggtcggcctcttccccaactcatcagcgcacggggcccgtccctctccctctgccatccccaggtcatcaccgttgcagatccaccgactccaccaccatctcgccgcttccgtctcctccccaccgccttgggcctcccgcctcctcccatcgaagaggtcaagggtgaaaggggaaaattttggtgaggaagccgtgtccacgagccacgacgtcgcccaacgcgaagcctag

SEQ ID NO: 93030 - DNA, 616 bp, Oryza sativa
  Clone ID: PAT_MRT4530_91454C.1
atggactccccaacgacccccgtgggcttttctccaccacttcacagtctggtgctctactatgaaccatactatacaaaaagaaaaaggggaatattgcgtcagcatttagggttcacggtggaccgggtgcacggcggcagctcacgggaacgaacggccgagatctatcggtccacggcggttcacgggaaacgacgacgatgacgtcagcgacgacgtcaccaccggcggcggctcgggcacgcgtgctcaccggcgaacgatggcgcggcggcgcaaacggaggacaccaacacgttgcgggcgacgctgtgatccttaccgaggcacgaatggcggcggacggcgatcggacgacgacggcgacgaggatgcagaggcgacggcgttcggcttgacgacgacggcggtgctcctgtgatcctcggcaacaacggaggggtggacgagaatggcgatgacccggcgatcccgacggtggccttcccgagcgacgacgacgaccggagcaacggcggtgctcggctgaactcacgacggcgacgacggcgcacgggctaacgcggctagagctctacaagtggcggcgagcgaaggcgaaggtggtggcggg

SEQ ID NO: 93031 - DNA, 1125 bp, Oryza sativa
  Clone ID: PAT_MRT4530_91455C.1
accgcaccgtgttcagtagctacaataaacagctcacaatttacaagtagttctactacagtagttgccgacttggtttctcctctcaattatattagaaaaacaacaaaaagtgtgtgatcggttagtcaaggaagcacagagttcaatatgcagccgccacaaatgtccaccaacctccagcatctggtacaagtatcttggaaagtatccacgaggacgacctgggacctctttcgattgcccatgggctctgagcgcttcaaggatgctttcaacccacccgtcaagtcccggggtggtaggataatatatgctcttcaggccaaatttcttagctgctgaggcagtcgtctcgcctatgcaggcaatggcgttgccccagttgtcaacttgtgaagcaagatttagccaagctcggagagcagaaggagaagctactgcaacaactggagctgaaagagcaggctttaatattagcggatcgacatcctgtacagatacagttgtatatgtgttcagtcttgtcacctcaaatcctcgatttgatagcccattctggatttcatggccagcctttgcagatgcaggatataacactttacaagtagtttcagtggtccttggaagctctgaggccaaaaatttacccatagctttagaaggagaaaatgcaacctcaagggatccatcattgtattgaattacttcgtcaaaaactctttcagtacctgctccaacaaccgctattcgtaccttaggatttccagcagccttccatccctcaaggaacacagcagctgcctcaggagatgttatagtgatccagtcaaacttttcatcgcgcaggacagcagaaagcctatctgtatctggcccttcaacatgtttaataagaggaagctcaagactttgtacattatgtttttccagcgcggcgatgagcttggcgttcttcccgcgctcgcgggtgaccacgacgtcgggaggagggggcgaggagcacgctatgaacctccccgtggcgccggctcggcccctcccgccgccggcgtggcgtgctcgtgggaaggtcgcgggaggccgggagaaggggaggaggtgcgaagaggaggacaaggccat

SEQ ID NO: 93032 - DNA, 468 bp, Oryza sativa
  Clone ID: PAT_MRT4530_91456C.1
atggccggtgccagcggcgagcggccggcgagcaactgggactggtcggactatgacgccgcattcactgaggaggccgacggggcgatcgccgcgctgcaggacacgggcggagacgggctcgccaccaagcagctcctcgagaggtaccacgcctcgccgcttgcccacactatcctcgcgcaatggtacttcgcgcacgcggatcagcaaaagccgacgaatcacctcaggagagcggcatggatggccccgcgctgcctgcacatcgcctttgcgctcgccttggtgctcatcgagatgggctccttcgacgaggcagacatggtgtgtgcccacagcctcctcgtgccggatctcaccgacccggtgcacaacttcatctccccgaaagagcaggttgatgccattatcacctccaaagctccagagtatagattgggacgcggggcaatctgggcattttga

SEQ ID NO: 93033 - DNA, 441 bp, Oryza sativa
  Clone ID: PAT_MRT4530_91457C.1
atggccggtgccagcggcgagcggccggcgagcaactgggactggtcggactgtgacgccgcattcaccgaggaggccgacggggcgatcgccgcgctgcaggacacaggcggagacgggctcgccaccaagcagctcctcgggaggtaccacaccatccttgcgcaatggtacttcgcgcgcgcggatcagcaaaaggcgacgaatcacctcaggagagcagcatggatggccccgtgctgcctgcacatcgcctttgcgctcgcctttgtgctcatcgagatgggctccttcgatgaggcagacatggtgtgtgcccacaacctcctcgtgccggatctcaccaaccctgcgcacaacttcatctccccgaaagagcaggttgatgccatcatcagctccaaagctccagagtatagattgggacgcggggcaatttag

SEQ ID NO: 93034 - DNA, 818 bp, Oryza sativa
  unsure (1)..(818): unsure at all n locations
  Clone ID: PAT_MRT4530_91458C.1
cgcacttaaagggaataagcttgcggccgctctgttatattttattcttttggggatgaaaccgcagtagattatgttaagaagcctgccccgcatgaagagatagagcacgaatacatgataagatcaccctgatgataaatgatccatccaagctaactagggatccgtcccacacttgatgcgacaccactgcacacacctcgaccaacggacccaccgacacggtgcttatagtttcaacgccgctcaccaatgcgaagagaggcacagcgtcncttcgcgcgtactattagtcaacgccttggtgtctcgtatantcgctaacgtccaagacttacagcgcgcatcacgactcacacagccgtactgcatgcgcaccaggtacgcgacgcactgccactagcgactagaattcctccatcgccaccgcggggcgatcgtacgatccatcagacttgcaggtgcaccgagtcagacaccgagcaggccgcctgcagcgtggtgccacactgtgcactgtgattgcagcgcgcagcncgtccgttctcgccaggtctccaccgccatctccatttcttcaaagctagccttgttggatggagcaaccaggaccaatgtcttggtggaggctgtggcctccacatcatggaacatcttgcatgcgccgcaggcaccgtcgtactggcaagcgctgccagcaccgcagatgccgtcgcagcaagacatcttcttcttcttgggagggcgaatgacttaactaagcaagaaggagatagatgttgttgctgattgagctcaagaattgccctcgtgcc

SEQ ID NO: 93035 - DNA, 401 bp, Oryza sativa
  Clone ID: PAT_MRT4530_91459C.1
atggagtggcgcgtgggcggacggtgggcggagggcggacagcggagcggcgctcaggcggacacaaggcagaagggaagggcggtggcggcgggagcacgggggagatcgaagaggacgacctcaagcacggcggcaagcatagtggggcgacgacgaggcgaagcggagcggcggcgcggcagtgaggcggcggcgggcagagaaggcaggtggaatggggcgagggcggcggagcaaccaggcggagtgggacgacgggtactggagctcgcagatggccggcggcacaagactgcggcgacaacggtgaacggcgccgcgacggcgagaacggagggcaccggaaggaatagcatgacgcgagcagctcatcgaggacgccgccggcttcgcaaggg

SEQ ID NO: 93036 - DNA, 369 bp, Oryza sativa
  Clone ID: PAT_MRT4530_9145C.1
atggggtgggagctacccagatctgcgccgacggtggcggccgaagaagaagaggagaagacgacggttggggagagagccatcctccattcgcgcgatggcggtggccaggccgatgcccacggccgcctcgtgctctggtgcctggagcaggaggacgggtcggacaaaggaaactttcgtggtgctgagctgcatcctctgtccgggagaagctcgctgctgatttcaaccacatcctccaaaacttcgcctcagcaaacttcgtcgtgggaggaaattcaccaggtgacacctccagccagatttggcatgaccttggcagcatcaaccacctctgttgggataggagacggtgacgactgctag

SEQ ID NO: 93037 - DNA, 1901 bp, Oryza sativa
  Clone ID: PAT_MRT4530_91460C.1
ccctcccctccaccgactcctccgccgtctcctccacgccgccaccctcgccccctgcgcttccgccgccgcgcggtgggccaccccgccctccatcgccggcgggccaccccgcgcttcgttggttcgggccgcgccacgacgctgcctcggctcccttctccctccaggctgcacgacttgaaattctgtgtatgaagtagcatttactggagaaagctcaagggaaactatcatggatgccaactccagtttaaatgagcaaaagtctgaagaactcaagcttaaagcaaatgatgcctttaaagcaaacaagttctccctggctatagagctctatagtcaagccattgagctaaacagttcaaatgcagtttactgggcaaaccgtgcatttgctcatacaaagttagaggaatatggaagtgcagtgcaagatgcttcaaaagcaattgaaattgatgctagatactcaaaaggttactaccgacgtggagcggcatatcttgccatgggtaagttcaaggaagctctgaaggattttcaacaggtgaaaagaatcagccctaatgatccagatgctactaggaaattgaaagagtgtgagaaagctgtccagaaaatccgttttgaagaggcaatttctgtaggggatgaagagaagcgctctgtagctgattctattgactaccgtatcatagaagtagagccacaatatacaggaccaagagttgatggagacacaataacattagattttgtcaaggctatgttggatgagtttgagaaacagaaatgcatacacaaaaggtacgcctaccagattgtgttacaaaccgtgcagctattgcgttctgtaccttcgcttgttgatgtgaacgttcctgatggaagtcattttacggtttgtggtgatgtgcatggtcagtattttgacttgctcaatatatttaagctcaatgggcttccctcggaagagaatccttacctcttcaatggagactttgtagacagaggatctttttctgttgaagtcatactcactctttttgctttcaagtgcctctatccgacaggtatgtaccttgcaagaggaaaccatgagagcaagagcatgaataagatatatggttttgagggagaagtgaggtcgaagttgggagaagcatttattgaactatttgcggaagcattctgttgcctaccccttgctcatgtcatcaacaacaaggtctttgttgttcatggaggtctctttagtgttgatggtgttaagctttcagatattagagccatcgatcgattccgtgagcctcctgaagaaggtctaatgtgtgaagtattatggagtgatcctcagcctcaacttggtagaggtccaagcaaacgcggtgttggtctttcgtttggtgcagatgtgactaagaaatttctacaagaaaataatctggaccttgttgttcgatcccatgaagtgaaagatgaaggctatgaaattgaacatgatggaaagcttataacggtgttctctgctcccaattattgcgaccagatgggtaacaagggtgcatacattcggttcacagctccagaactaaaaccaaatatttcctctttctcagcggtgccacaccctgacgtcaagccgatggcctacgcgaacaacttcctcaggatgttccagtaacaacatatatccatatccgccttctttcgccatattttttttttgtgacgaggctgaagcctaaaaagcttgctagcatacgatgtttgtacaacagatctggtggtgtaagcaggaatgcaatttttctatatactgccatggcactctgttacaatttttttgtggagaactgaaaatcattcgtggtactaactcacgcagcccgggcatc

SEQ ID NO: 93038 - DNA, 642 bp, Oryza sativa
  Clone ID: PAT_MRT4530_91461C.1
atggcagccgtggggaagtcgaaggaggcggacgcggcgcggtgcaggaggcacccgaagcaccggcacgcggcgggggtgtgcccgttctgcctgcgcgaccgcctctcgcgcctctccgccgaggtcgccagcgctgcctcgccgtcgccgtcgtcggcgtcgtcgtcgggatcctcctcctcgctgtgctcgtcgaccggggaggggagttactccgccgcgtcggcgacccaggcgccgcccgtcggccgccgcgcgaggctgggcatgctgatgcgacaggaggagcagagggagacgaccgcgacggcggcgacggtgctcggcgccgcaggtcatgacaagaaggaggtgccccctgcggaggaggagaagaagacggcgaggaggagcggcttctgggcgaggctgcagcagcagctccatcacgggagctggcaccggaaggccgacgggtgctcactggcgcactccaaggcggttactcggttggtaaaacaaattgcaatatatcagttctgcaaattggcagaattccttccgcagcagctaggcaaacatcttggcctcctcttgggaacctttagagttgtccattcccatgaagctctcagatgtttcaacaagaacactgaataa

SEQ ID NO: 93039 - DNA, 1473 bp, Oryza sativa
  Clone ID: PAT_MRT4530_91462C.1
ttttcatacaggggaactggatattgaacgtttaaatcgtggagtgataacgttagtgccaaaatgcaaagaagcaattcaaatccaaaaatttcgactaatctgcttgctcaatgttagttttaaaattatcaccgaaatcctaatgaacaggctaacagaggttatataaaacattatatctaggaaccaggctgctttcataaaacacagatatataaaggaaggggtggtagccattcatgaaattttgaactcattgcacactacaaatggaaaaggagtgctattcaaagtggatttcgagaaagcttataataagattaagtgaccctttgtatatcaaatgctacaagttaatgaattccctgatagatggaatgactggataatgaaaacagtgaggggggggggggtcgagtatgtgtgaaagttaatatgtggaggggccatattttgaaacaaataaggggttaagacagcgtgaccccttctcacctcttttgtttaatattgcagttgaagctcttattgccctaaccaataatgcacaaaaacatggttttatctctggtttaaaggtggggagattaggggaggaaatctctatattacattatgttgatgacacaatattcttgttggataattctttgggaagcactaagaatttgaaatttatcttgtgcctatttgagaacatgtctggactgaaaataaatttccacaaaaatgaggtttttagtgtgggtttatccatgaaagaggaagaggatttatgtgcaatactaacatgtaaaaaagaccaagggtgattggggatccttgatctagatataatgaacattgctctactaggaaaaaggctttggaagttagaaaatgaaccagtactgtgcaggaaaatcctgagaaccaagtatttaaaaaaacaagcctctagctttgatcaaacacaaacaaggagactctcatatttttgtctggccttttagagattaaagacattttcctagctttttgtaggaaacaagttgggaatggaatgaggactcatttttggcaagatgagtgggtggggaacagtacaattgctgaacaatttatattacatttacaaaaaaaaaaattatagtagcaaaggcctttgagaaaggttgggatttctttaaatttaggagaattttgattgaggatatatatagctaagaaatgggaaacagttaaaaaaaatgtgtgcaatgatcactttgaaggcagaaaatgataaactgatctggactttaactaaaaatggacttttcactgtaaaatctttctaccatgctctaaaattatagacaagtgggtttccttttaaagagatgtggaaaaaaccagaaagatggtagctgttggaatttctgctatcatatagataatatggaagatcagaaataaatcttcatattggatctccatccaatcccctta

SEQ ID NO: 93040 - DNA, 1039 bp, Oryza sativa
  Clone ID: PAT_MRT4530_91463C.1
aactcaaagaaaatacttttcattccccagaaggattatcattttgattcttggggagaattgattgtccaagttcaattaactgtcaactcaagaaaaatatttggcaacgaaaattttcggtcaacaaattttgttctaaagttactaacaaaaaatagttactcgaagccaccaatcctgatacagggctgtacatagtacagcacacaagtatccataacaaggtgaactatggacctaacactccagaaaaagtatcagagcactgaccacctggattactttctccttcatctcggtcttggactatcggacgcggctaggtataatccaggctttggttgctgcccagactgctgtgccgaacggcagattagcagaaatctagcgatgcacaaccatgacaaaatactacagctgcatatccaattacacagatcgtaccatactttatctacaactttttccatgacgattttttcatgtcacgtttctgaaatgctttgtcaatcgacttatccaaaatgcccaaaacatcggcatagggcatagattgccccaacttggtgtttgcttggtgaaaactaagttgaaggcgctcgttcttttttttctcctccacgagcatggggttaaggcgctcgttcttgtccttctcctcctcgagcattgtcttatggggctcgttcttgtctttctcctccacaagcatagtcttaaggtccccgattttgttcgcctcctccacaagcgtggctctaaggggctccacttcactcgtctgtgtcaggatcacctctaccgcctgttgagccatctctgttaacttcgaccagtcaaatggcgtggtcggggcccctcctgcggagtcacgaatggctgttgtcatttctggccaaggagtgtcaacggcaggtccagatgttggagtcagcagtggcatggcatcagtcaatgtaaaggatgggcagggaccagagctgctgcgcatggtcttaaggcactcatttttgtctttctcaccacgagcatgcct

SEQ ID NO: 93041 - DNA, 646 bp, Oryza sativa
  Clone ID: PAT_MRT4530_91464C.1
gaagacagtaaaatgcttgcttatgatagtagttgttgttgagtcaccatgaaatacacatgaggaatcaatccattaatccaaagctgaccaagtgaccttcaccgagattgaggcgaacccgatctttatttcttcactagcacatccatgattggtcgctttgaaagatagacaatgttcagcgaaatagacagaacctaccttaaacttcaaatccatacacttattcttcatgacagcaaccacatgcggacatgcctcctcaagccacgcgactcaccaatcacaccatcaaagagctggatttcctcatgtaacccactggtaaaacagccgacacacaaattgaaaccggtttgcacttctgatatgacaacatctactgtcgcttcaaatgcgtagtcaagacacgctcgagttatgtctaccgcgccgtaatctccatgaatgcgatttatcactggattgcttgatgtcagtatttcgttaacacatgatacaccatcaatcagctgtagatcattctcatctcgttctcctgtcttgatcctcatgtcatattcaactagaacagcacgagacaaatcgatccctctcttagggccaatttcgatgatggaaccctgctccacaattatgggat

SEQ ID NO: 93042 - DNA, 5157 bp, Oryza sativa
  Clone ID: PAT_MRT4530_91465C.1
atggatcggcaatggatgtacgctaaccggcggtccaaagagtttattgacggcgtgcattattttttgagagtggccaaagctaacaggcataagggttttatttgttatccatgcaataagtgtaagaatcataaggagtattctgcatccaggactattcatttccacttgtttgagtcgggcttcatgccaagctataactgttggacatcccacggagagcaaggggttgaaatggaagaagatgaagtggaagacgacaatattccggactttgctcagtacgctggatttgaaggaaatcaaacgggcgaggaggaaagggatgctgatggtaacgacattgcggatgatcttggttagatgttgcaggatgctaaggaggactgcgaaagtgaaaagggggcctataaattggacaagatgttagaggaccacagaatgtcgttgtacccaggttgcgagcaggggcacaaaaagttagatacaactatagagttcttgcaatggaaggcaaaaaatggtgttagtgacaaggcatttggcgatttattgagactcgtcaagaacattcttccggagggaaacaaattgcccgagacaacgtacgaggctaagaagatagtctgccctctagggctggaagttcagaagattcacgcatgtccgaatgattgtatcctatatcgcggtgaggagtacgagaacctagaagcatgccctgtttgtaaagcactacgatacaagattagacgagacgatccaggagaagttgatgggcagctaacaaagaagagaattcctgctaaggtgatgtggtatttccctataataccacggctaaggcgtttgttcaggaacaaggggaatgatagaatgatgcgatggcacgctgaagagcgtcaacaggacgggatgctgagacaccccgccgatggttcgcagtggcgaaacatcgacagaaaatttaaagactttggaaaggacgcacgaaacatatggtttggtttaagtacggatggcatgaatccttttttagagatgagcagcggccatagcacttggcccgttacgatgtgtatctacaaccttccccgttggctatgcatgaagaggaagtacataatgataccgattattattcaaggcctcaagcaacctggtaatgatatcgatgtgtacctaagaccactggtcgaagatcttaaactgttgtggaaaaaggaaggtgtccccgtgtgggacgaggacaaacaggaggagtttaacctacgagcgctgctgttcgtaaccatcaacgattggtctgcacttagcaacctttccggtcagtccaacaaggggtacaaggcttgcacttactgtatggatgaaacagaaagtatatatggaaagtcgaaagatacactggaagcacgtaatgatctgaagcatatggaacaacgcggcgaccttcacccggaaccaaaggagaaaggaagccattacttgagtccagccagctacactcttagcaaggcagagaaggaaagtatgtttgaatgcttggagagcataaaggtaatgtctggatactccacgaatatcaagcgaataataagcacgaaggagaagaagttcacaaacctaaagtctcatgaccatcacgtgttgatgacacaactgctactagttgtaataaggggtatccttccagacaatgtccgggcaacaataacaaaactatgtgctttcatgaacgcaatttcgcagaaggtcatcgatctggatagattagaagcccttcagaatgttgtgaggtacatgggcgttctgaagaagtatattcgtaaccgtgctcgtccagaggcaagcatcgccaaggggtatggaacagaggaggtcatcgaattttgcatagaatttattgaagaccttcgcccaattgaggtacctgaatcacgccatgaagggagactacggggaaagggaactctcggaaggaaagcaataatgacggtagacaacaatttattccgtaaagcccatttcacggttctgcaacaatcttcatgggtagctcctaccatcaaggagcacttggctctagttcgcgccagaaacatcggtaagtccgatgcatgtattacacggcatcacattgatactttctccgcatggctacgacaacatctcatgggtaacgagacgatcaaccaacaactagccttcctggcgaggggaccatctgggtcgatcgcgacattccagggatatgagatcaatgggtacacattctacacgagagcccaagacatgaagagcacgaaccaaaacatcgctgttcgtatcgatgccatgggacacgatggaacaactggcacgtatttctgtgccatcgaggacatatgggaacttgactatggtcctctcaaggtccctctgttccggtgccaatgggttaggttgactggtggaggcgtaatgattgatgacagtgggatgacaacggttgaccttaacaaggttggatactcggacgaaccttttgtccttgccaatgatgtaacgcaagtcttttacatgaaggacatgtctagcaaaggaaagaagggcagagggcctgacgagccgaagcatcatgtggttctcccaggcaaaagaaaaatcgtcggagttgaggacaagactgacgaggattaagatcagttggatgggcaatcccctttcatggtgacgattgaccctagcatcctcctatcaaatgaagacaccccttactcacgtagcgatcacaaggagggaacaatatacttgaacgaggaagggaacgtggagagggatgcggaggggaactaagaggggaacatggagagggatgtggaggggaactaggaggaggaggctagtggaagtcaaccctccgctggacagaagagggctcgcgggcaatgaggtgccgtgaagaagctagagggtcggcgcatcataacggaagtggacgaagacggccgacctagtgccccggcggaagcagccaagaactacgtacgacacaacggttgggttgtgcgggataacgtgcctgtcagtactgtgtactggcgcagaacaagggcacgcggagatcatgagagctttgtcccagattcggagaaagagatgctgtggaccacaatgctcgagacattcacccttcccgcgggtatagaggacaaagtgaaaaggtggactctaaagaaaatggcagaacagtttcagagcttcaagggagatctgtaccagaaatatatcctgaagggacagacaccgaacttcgacacaatctcaaagctaagggatcactgggacgagttcgttgcatataagacaggtcaacaagggtaggcgatgatggaaaaaacaaagaaaatgccgccaagaagaagtactatcaccacgtggggtcaggcggctatagcgtcgcgatgccgaagtgggaggagatggaggcaagattgtttgagaggggtatcgaaccagccaccgctaaatggccagatcgatcgaagttctggtactatgctcacggtggaacgctcaacctagttgatggctccctggtccttagcgatcagatacgcgaggctgcgcgtcgactaacggacgagctgtggaagcctcttctcagggcacgttctgaccgacagagagaaggacgagctatctcggatgaggagcgagagagataccgaggcgaagattgcagatcttaagtatagggtatcgagctacgagctcagcatgcaagaggaggtggcaaggaaggttgatgaacgcatggccgcacatcagtcccatgatccccagccgaccattcctcctgcaatggtgagcccttcaggcaattgtagcagctgcgcctcaacggggcaggtggcatcgggcatggccatcccaacggaccgttcaggtacttaccactgcaggctgattccagcaggatactccaaggtcgaagttgagttggtggaaggcgcgtacgaggacctcgagttggattaccctggaggagacggtgagacgcatctacgagacacaagccacgccattatactatggcgcaagtggtacatcatcctccctgggcgacaagcggtgtctcgtgcaccatctcctccggctccaccatctcctcctcaggctcctgcaccgactcctcctcaggctcctgcaccggcaccttccaagtcaagggccctccaagctccaccgcctgcccccacaagggcaacgaagaaggcgaaagttgacgccgcaaaaaacaaggacccggggtacgattgcacgcaagaggagcttgacacttatgtggcatcagaagtcaggagacaattgaagcctcgaagtccagaaaagaagattcctatagacccgagtgccaggaacttcttcaggggtatgtctacacctgccaaggaggccataaagctatcggactatgagcgaacacttaagaaagcatcttctggaaagtccaaaccagtccctcagcttggagagcaaccaaaccaggagatagagccgttggtgaccggtgaagattttggaatacaagaatttattaatgacaccgggctaactacggatcaattgctacgaggcgcaccaatcgaaagggcggaagtgaaatacatgtacgaactcggtaaaccgcttgtcaagcctgagcagctgcagtccctacccacacaaatgtacaagttccatcaactgtacatggagatgagcgccaccggtagagagatgatcggagcgaggattagggacacggacttcttgcaaggagatgatattctctggatcaatttcaagggtatttacgaactataccagctggacgccctcgacgtctctattatgagttgctggattttaatggagattcaaagggcccgacggcagggggttttcgatactggattcatcgaccctcggaaagtaaacgtcgcaatactcgaccagtatccgcaagctacagaggaaaatctcgtccatctcctgaaggcgcagcattacaagacattcatactattgtcgtacaacacaaccgtcaacgtatatgactcaatggataaaaaagagtctacgtttgacaaggctttcgaacttatagacaggtattgtcataagttc

SEQ ID NO: 93043 - DNA, 2565 bp, Oryza sativa
  Clone ID: PAT_MRT4530_91466C.1
atggatcggcaatggatatacgctgactggcggtccaaagagtttattgacggcgtgcattattttttgagagtggccgaagctaacaggcaaaagggttttatttgttgtccatgcaataagtgtaagaatcggaaggagtattctgcatccaggactatttatttccacttgtttgagtcggggttcatgccaagctataattgttggacatcccatggagagcaaggtgttgaaatggaagaagatgaagtggaagacaacaatattccgaactttgctcagtacgctggatttgaaggaaatcaaacgggcaaggaggaaagggatgctgatggtaacaacgttgcggatgatcttggtcagatgttgcaggacagcaaggaggattgcgaaagtgaaaagggggcccataaattggacaagatgttagaggaccacagaacgtcgttgtacccaggttgcgagcaggggcacaaaaagttggataccactctggagttcttgcaatggaaggcaaaaaatggtgttagtgataaggcatttggcgatttattgaaactcgtcaagaacattcttccggagggaaaccaattgtccgagacaacgtacgaggctaagaagatagtctgccatctaggactggaagttcagaagattcacgcatgttcgaatgattgtatcctatatcgcggccccaagcaacctggtaatgacatcgatgtgtacctaagaccactggtcgaagatcttaaactgttgtggaagaaggaaggtgtccccgtgtgggatgaggacaaacaggaggagtttaacctacgagcgctgttgttcgtaaccatcaacgattggcctgcacttagcaacctatccgggcagtccaacaaggggtacaaggcttgcactcactgtatggatgaaacagaaagtacgtatcttaagcactgtagaaaggttgtgtacatgggtcatcgtcgattccttgcaacaaaccacctggttcggaagaaaggcaagcactttgaacataaggcggaccaccgtacgaagcctaaacatcgcggcgggaaaacaatgtttgctatggttaaagatcttaaagtagtgtttggaaaggggcctggtagccagcccatagagagcgaagatggtcacgcggcgatgtggaaaaaaaactctatattttgggagttaccctattgggaattcttggacgtccgccacgcaatcgacgtgatgcacctcactaagaatctttgcgtaaaccttcttctcttcctagttgtaataaggggtatcctcccagacaatgtctgggcaacaataacaaagctatgtgctttcatgaacgcaatttcgcagaaggtcatcgatcctgatagattagaagccctgcagaatgatgcggtgcaatgtcttgtcagttttgagttgatatttccaccttcatttttcaatataatgatgcatctgctttgtcaccttgtcaaagagatcggtattctcggtcctgtgtacctacacaacatgtttcctttcaagaggtatatgggcgttctgaaaaagtatgttcgtaaccgtgctcgtccagaggcaagcatcgccaaggggtatggaacagaggaggttattgaattctacgtagaatttatcgaagaccttcgcccaatcagggtacctgaatcacgccatgaagggagactacggggaaaggggactcaagggagactacggggaaaggggactctcggaaggaaagcaataatgacggtagacaacaatttattccgtaaagcccatttcacggttctggaacaatctttattggtggctccctacatcgaggaacacttggctttaattcgcgccagaaacattagtaagtccgatgcatggattacaaggcatcacattgatactttctccacgtgggtgcgacaacattccatgggtaacaagacgattaaccaacaactggcctttctggcgagggaaccatctggcttgatcacgacattccagggatatgaaatcaatgggtacacattctacacgagagcccaagacatgaagagcacgaaccagaacagtgttgttcgtatcgatgccatgggacacgatggtacaactggcacgtattacggtgccatcgaggacatatgggaacttgactatggacctctcaaggtccctctgttccggtgcctatgggctaggttgactggtggaggcgtaccgattgatgacagtgggatgacaacggttgaccttaacaagttttttacgtcaaggacatgtttagcaaaggaaaaaaagggcaaagggcctgacgagccgaagcgccacgtggttctcccaggaaaaagaaaaatcgtcggagtagagaacaagactgacgaagattacgatcagtttgatgggcaaccccctttcacagtgacgattgaccctagtatcctcctaacaaatgaagacaccccttactcacgtagcgatcacaaggaaggaacaatagtcaggagaaagtacgtgcggtcaaccgtcaccgctgatgtattaccgtaa

SEQ ID NO: 93044 - DNA, 646 bp, Oryza sativa
  unsure (1)..(646): unsure at all n locations
  Clone ID: PAT_MRT4530_91467C.1
accccatctccggccgggctacgatggccgccgccgccgcgaggtcgctgctccgctcgtccgcctctctcctccgcgcggcgccggcgaggtccgcgtccgcgtcctcctccgccgcgcgcccgtctctccgtcgcgcgctggccgcgccccctcgcatcctcaggtcgcctgttgagctgagtgtatgcgtggagtccctgctgcctctgcacagcgccaccgccgccgcgcggatgacgtccatgctcgccgttcccgggcaaggcctcgggtggctcacggaagctgaaactgatggattatgctgaattactattcttggacaacagctgatactgatggagtatgacggcagcctgcttctggaaccaggagattagtagtccgtcaagttcatttgtgagcctgcagaattagttagaaaaggaagcactcttttctttttatttatgtgaactatgaagatggcttaataaactactttggatattgctcaggaaaaaaaaaaaaaaaaaagcggccagatccttttgtaatggaaaccattggaggaccaatgtatncgttgctagctactgtaaaatgttgcataatttttttttcttttgatcaagtgttttaaaaaaaaaaaaaaaaaaaaaaa

SEQ ID NO: 93045 - DNA, 6418 bp, Oryza sativa
  Clone ID: PAT_MRT4530_91468C.1
atggatcgtcaatggatgtacgatggccggcggtccaaagagtttattgacggcgtgcattatttttttgagagtggccgaagctaacaggcaaaagggttttatttgttgtccatgcaataagtgtaaaaatcagaaggagtattctgcatccaggactattaatttccacttgtttgagttggggttcatgccaagctataactgttggacatcccacggagagcaaggggttgaaatggaagaagatgaagtggaagacgacaatattccagactttgatcagtacagtggatttgaaggaaatcaaacgggcgagaagaaaatggatgctgatggtaacgacgttgcagatgatcttggtcagatgttgcaggacgccaaggaggactgcgaaagtgaaaagggggcccataaattggacaagatgttagaggaccacagaacgtcgttgtacccaggttgcgagcaggggcacaaaaagttggataccactctggagttcttgcaatggaaggcaaaaaatagtgttagtgacaaggcatttggcgatttattgactcgtcaagaacattcttccggagggaaacaaattgcccgagacaacgtacgaggctaagaagatagtctgccctttaggactggaagttcagaagattcacgcatgtccgaatgattgtatcctatatcgtggtgaggagtacaagaacctagaagcatgccctgtttgcaaagcactatggtacaagattagacgagatgatccaggagaagttgacgggcaattaacaaagaagagaattcctgctaaggtgatgtggtatttccctataataccacggctaaggcgtttgtttaggaacaaggggaatgctagaatgatgcgatggcacgctgaagagcgtcaacaggatgggatgctgagacaccccgccgatggttcgcggtggcgaaacatcgacagaaaatttaaagactttggaaaggacgcacgaaacatacagtttggttttagtacggatggcatgaatccttttggagagatgagcagcggccatagcacttggcccgttacgatgtgtatctacaacctcaccccgtggctatgcatgaagaggaagtacataataatgccgattataattcaaggccccaagcaacctggtaacgacatcgatatgtacctaagaccactggtcaaagatcttaaactgttgtggaagaaggaaggtgtccccgtgtgggatgaggacaaacaggaggagtttaacctacgagcgctgttgttcgtaaccatcaacgattggcctgcacttagcaacctatccgggcagtccaacaaggggtacaaggcttgcactcactgtatggatgaaacagaaagtacgtatcttaagcactgtaggaaggttgtatacatgggtcatcgtcgattccttgcagcaaaccacccggtacggaagaaaggcaagcacttcgaacataaggctgaacaccgtacgaagcctaaacatcgcaacgggaaaacagtgtttgctatggttaaagatcttaaagtagtgtttggaaagggtcctggaagccagccgatagagagcggagatggtcacgcggcgatgtggaaaaagaactctatattttgggagttaccctattggaaattcttggacgtccgccacgcaatcgacgtgatgcacctcactaagaacctttgcgtaaaccttcttggcttcctaggtgtatacggaaagtcgaaagatacactggaagcacgtaatgatctgaagcatatggaacaacgcagcgaccttcacccggaacctaaaggagaaaggaagccattacttgagtccagccagctacactcttagcaaggcagagaaggaaagtatgtttgattgcttggagagcataaaggtaccgtctggatactccacgaatatcaagcgaataataagcatgaaggagaagaagttcacaaacctaaagtctcatgactgtcacgtgttgatgacacaactgctactagttgtaataaggggtatccttccagacaatgtccgggcaacaataacgaagctatgtgcattcatgaacgcaatttcgcagaaggtcatcgatccggatagattagaagcccttcagaatgatgtggtgcaatgtcttgtcagttttgagttgatatttccaccttcatttttcaatataatgacgcatctgctttgtcaccttgtcaaagagatcagtattatcaggcctgtgtacctacacaacatgtttcctttcgagaggtacatgggcgttttgaagaagtatgttcgtaaccgtgctcgtccagaggcaagcatcgccaagggttatggaacagaggaggtcatcgaattttgcgtagaatttattgaagaccttcacccaatcggggtacctgaatcacgccatgaagggagactacggggaaagggaactctcggaaggaaagcaataatgacgatagacaacaatttattccgtaaagcccatttcacggttctgcaacaatcttcattggtagctccttacatcgaggagcacttggctctagttcgcgccaggaacatcgataagtccgatgcatggattacacggcatcacattgatactttccccgcgtggctacgacaacatctcatgggtaacgagtcgatcaaccaacaacttgccttcctggcgaggggaccgtctgggtcgatcgcaacattccagggatatgagatcaatgggtacacattctacacgagagcccaagacatgaagagcacgaaccaaaacagcgctgttcgtgtcgatgccatgggacacgatggaacaactagcacgtattacggtgccatcgaggccatatgggaacttgactatggtcctccgaaggtccctctgttccggtgccaatggattaggttgactggtggaggcgtaatgattgatgacagtgggatgacaacggttgaccttaagaaggttggatactcggacgaaccttttgtccttgccaatgatgtaacgcaaatcttttacgtgaaggacacgtctagcaaaggaaagaagggcagagggcctgacgagcctaagcgtcacgtggttctcccagcgcgccctcgtcttctccaccaacacttagaagtttttgcccgatcgatctctctcggcttctccttcgccgccactgccaagggcatccccgcgccgacgccgccgccgtatctcgccgtcgtctcgcactcgtcgtcgtcgccgccgcatctctggggtgagagccgacgccgcctccctctcctgtttcatgtatgaacagatggctgatcgcgatgaggaacagatattgtatgatacaatcgcggagggaagcagccagtactggaacgaagaagaggggaacgaggatccaaaccagtatttgaacgaggaagtgcagagggatgcagaggggaaccaagaggggcacgttgaaagggatgtggaggggaaccaggaggaggaggatagtgcaagtcaaccctccgctggacagaagagggcacgcgggcaacgaggtgccgcgaagaagcttgagggtcggcacaacataacggaagtggacgaagacggccgacctagtgccccggcagaagccgccaagaactatgtacgtcatagcggttgggttgtgcgggataacgtgcctgtcagtacggtatactggcgcagaacaagggcacgcggagatcatgagagctttgtcccagattcgaagaaagagatgctgtggaccacaatgctcgagacattcacccttcccgcgggtacagaggacaaagtgaaaaggtggattctgaagaaaatggcagaacagtttcagagcttcaagggagatctgtaccagaaatatatcctgaaggggcagacaccgaacttcgacacattcccaaagctaagggatcactgggacgagttcgttgcatataagacatgtgaacaagggcaggcgatgatggaaagaaacaaagaaaatgccaccaagaagaagtaccatcaccacttggggtcaggcggctatagcgtcgcgatgccgaagtgggaggagatggaggctagcttgcttgagtggggtatcgaaccggccaccgctaattggccggaccgatcgaagttctggtactatgctcatggtggaacgctcaacctagctgatggctccctggtcttcggcgatcagatacgcgaggctgcgcatcgactaacagaagcagtggaagcctcttctcagggcacgttccgaccggacagagagaaggacgagctgtcactcgccctgcaaactctagagcatccaggacgaacacgagggaaatgggtgattccttggaagattgggttcaaggaggacatccacacgtacaggagtcggatgaggagcaagagagataccgaggcgaagattgcagatctagagttcagggtatcgagctacgagctcagcatgcaacaggaggtggcaaggaaggttgatgaacgcatggccgcacatcggtcccatgatccctagccgaccattcctcctgcaatggtgagcccgtcaggaaaccgtagcagctgcgcctcaacgaggcaggtaggatcacagagcatggacgccatgcaaacccagcacgaaaccacctgccccgttgatgacatcactcagcggacaccatgtgagctgcatattcccttcaagaacttatcaataaaggtggcgtcgggcatggccatcccaacggacccttcaggtacttaccactgcaggccgattccagcaggatactccaaggtcgaagttgagttggtcgaaggcgcgtacgaggacctcgaggtggattaccctggaggagatggtgagacgcatctacgcgacacaagccacgccattatactatggcgcaagcgctacatcatcctccctgggcaacaagcggcgtctcatgcaccatcccctccggctcctgcaccgtctcctcctcaggctcctgcaccgtctcctcctcatcagtctcctgtaccgtctcctcctcaggctcctacaccgactcctcctcaggatcctgcacagactcctcctcctgcacagactcctcctcaggctcctgcgtcgtgtcctccagcaccttccaagtcaagaactcaccaagcaccaccgcctgcccgcacaagggcaacgaagaaggcgaaagttgacgccgccgagaacaaggagccaccgtacgattgcacgcaacaggagcttgacgcttacgtggaagcagaagtgaagagacaattgaagcctcggggtccagaaaagaagattcctatagacccgagtgccaagaagttcttcaggagtatgtcggcaccagccaaggaggccataaagctaacggattatgagcgaacacttaagaaagcatcttctggaaagtccaaaccagtccctcagcttggagagcaaccaaaccaggagatcgagccgttggtgaccggcgaatattttggaatacaagaatttattaatgacaccgggctaactacggatcaattgctaggagacgcaccaatcaaaaaggcggaagtgaaatacatgtacgaactcggtaaatcgcttgtcaagcctgagctgctgcagtccctacccacacaaatgtacaagttccatcagctgtacatggagatgagcgcaaccggtagagagatgatcggagtgaggattagggacacggacttcttgcaaggagatgacattctctggatcaatttcaggggaatctacgaactataccagctggacgcccttgatgtctctattatgagttgctggattttaatggagattcaaaggggcccgacggcggggggttttcgatactggattcatcgaccctcggaaagtaaacgtcgcaatgctcgaccaatacccgcaagccacagaggacaatctcgtccatctcttgaaggcgcagcattacaagacgttcatactgttgttgtacaacacagaattccactgggtgcttttactcttcgacctggaggcctacaccgtcaacatatatgactcaatggataaaaaagagtctacgttcgacaaggttttcgaacttatagacagggcttggtatcggttccgtcatttggtccgcggcaaatggatagaaagacttaggcggaagttcaattttccttttattcgcatgagggataacctgatcacacacaaggaattcatcgcggcggttcaagaacaactcatgggattcatcaacgaacaaatccttgatcccaagggtgaattctactacgacggaaacacaattcataggtccttagcttctgagctagcgactactactacgtcgaaatcgtagctagctaggacatataatggatt

SEQ ID NO: 93046 - DNA, 246 bp, Oryza sativa
  unsure (1)..(246): unsure at all n locations
  Clone ID: PAT_MRT4530_91469C.1
gtgccgtcgcgccgtcgcctngaagccgccgcgccgcgccgagtgccgcgccgtgcgtcgccgccttgcgccgccgtcgctgccgccgccgtcagtaagccgaattatatcaagaataaggactatcctgagcaaggcaagtcatcactattccttgaacatgttgatcccaattgcgaaattgttttgtttataaataaaattgcatgcaatgatgaacatcctacttgtgattatgccatgcct

SEQ ID NO: 93047 - DNA, 253 bp, Oryza sativa
  Clone ID: PAT_MRT4530_9146C.1
cttttatgcggcggaccgtcctttctttttttttttttttgcccacaaaaaggtggatacaggacttttttacgacctaatacgaattggatgcgatgcaggagataagctaacatttctgtatgagattatcagatgaagcttgccaaaacgcctctattgttttgtggccaagtgagcacgaatgccaaaaatcgatctatttatttaggaaagggaagggtgtataaaaaccttccgaaagttattgcat

SEQ ID NO: 93048 - DNA, 4944 bp, Oryza sativa
  Clone ID: PAT_MRT4530_91470C.1
atggatcggcaatggatgtacgctgaccggcggtccaaagagtttattgacggcgtgcactattttttgagagtggccgaagctaacaggaaaaggggttttatttgttgtccatgcaataagtgtaagaatcagaaggagtattctgcatccaggactattcatttccacttgtttgagtcggggttcatgccaagctataattgttggacatcccacggagagcaaggtgttgaaatggaagaagatgaagtggaagacgacaatattccggactttgctcagtttgttggatttgaaggaaatcaaacgggcgaggaggaaatagctgctgatggtaacgacgttgcggatgatcttggtcagatgttgcaggacgccagggaggactgcgaaagtgaaaaggaggcccataaattggacaagatgttggaggaccacagaacttcgttgtacccaggttgcgagcaggggcacaaaaagttggataccactctagagttgttgcaatggaaggcaaaaaatggggttagtgacaaggcatttggcgatttattgaaactcgtcaagaacattcttccggggggaaacaaattgcccgagacaacgtacgaggctaagaagatagtctgcccgttaggactggaagttcataagattcacgcatgtccgaacgattgtatcctatatcgtggtgaggagtatgagaacctagaagcatgccctgtttgcaaagcactacgatacaagattagacgggacgatccaggagaagttgacgggcagctaacaaagaagagaattcctgctaaggtgatgtggtatttccctataataccacggctaaggtgtttgttcaggaacaaggggaatgctagaatgttgcgatggcacgctgaagagcgtcaacatgacgggatgctgagacaccccgccgatggttcgcagtggcgaaacatcgacagaaaatttaaagaatttggaaaggacgcacgaaacatacggtttggtttgagtacggatggcatgaatccttttggagagatgagcagcggccatagcacttggcccgttacgatgtgtatctacaaccttcccccctggctatgcatgaagaggaagtacataatgatgccgattcttattcaaggccccaagcaacctggtaacgacatcgacgtgtacctaagaccactggtcgaagatcttaaacagttgtggaagaaggaaggtgtccccgtgtgggacgaggacaaacaggaggagtttaacctacgagcgctgctgttcgtaaccatcaacgattggcctgcacttagcaacctatccggacagtccaacaaggggtacaaggcttgcactcactgtatggatgaaacagaaagtacgtatcttaagcactatcttaaagtagtgttcggaaaggggcctggaagccagcatatagagagcgaagatggtcacgcggcgatgtggaaaaagaactctatattttgggagttaccatattgggaattcttggacgtacgccacgcaatcgacgtgatgcacctcactaagaacctttgcgtaaaccttcttggcttcctaggtgtatacggaaagtcgaaagatacactggaagcacataatgatctgaagcatatggaacaacgcggcgaccttcacccggaaccaaaggagaaaggaagccattacttgagtccagccagctacactcttagcaaggcagagaaggaaagtatgtttgaatgcttggagagcataaaggtaccgtctggatactccacgaatatcaagcgaataataagcacgaaggagaagaagttcacaaacctaaagtctcatgactgtcacgtgttgatgacacaactgctaccagttgtaataaggggtatccttccagacaatgtccgggcaacaataacaaagctatgtgcattcatgaacgcaatttcgcagaaggtcatcgatccggatagattagatgcccttcagaatgaagtggtgcaatgtctcgtcagttttgagttgatatttccaccttcatttttcaatataatgacgcatctgctttgtcaccttgtgaaagagatccgtattctcgggcctatgtacctacacaacatgtttcctttcgagatgtacatgggcgttctgaagaagtatgttcgtaaccgtgctcgtccagaggcaagcatcgccaagggttatggaacagaggaggtcatcgaattttgcgtagaatttatcgaagaccttcgcccaatcggggtacctgaatcacgccatgaagggagactacggggaaagggaactctcggaaggaaagcaataacgacggtagacaacaatttattccgtaaagcccatttcactgttctgcaacactcttcattggtagctccttacatcgaggagcacttggctctagttcgcgccaggaacatcggtaagtccgatgcatggattacacggcatcacattgatactttccccgcgtggctacgacaacatctcatgggtaacgagtcgatcaaccaacaacttgccttcctggcgaggggaccgtctgggtcgatcgcgacattccagggatatgagatcaatgggtacacattctacacgagagcccaagacatgaagagcacgaaccaaaacagcgctgttcgtgtcgatgccatgggacacgatggaacaactgccacgtattacggtgccatcgaggaaacaaagaaaatgccgccaagaagaaccaattggccggaacgatcgaagttctggtactatacttacggtggaacgctcaacccagctgatggctcactggtcttcggcgatcagatacgagaggctgcgcgacgactaacagatgcagtggaagcctcctctcagggcacgttccaaccagacagagatagggacgagctgacactcgccctgcagactccagagcatccaggacgaacacgagggaaaggggtgattccttggaagattggtttcaaggaggacatccacacgtacaggagtcggatgaggagcaagagagataccgaggcgaagattgcagacctagagttccgggtatcgagctacgaactcaacatgcaagaggagttggcaaggaaggttgatgaacgcatggccgcacatcggtcccatgatccccagccgaccattcctcctgcaatggtgagcccgtcaggaaaccgtagcagctgcgcctcaacggggcaggtaggatcacagagcatggacgccatgcaaacacaggacgaatcgacctgtcccgttgatgacatcactcagcggacaccatgtgagctgcatattcctttcaagaacttatcaataaaggtggcatcgggcatggccatcccaacggacccttcaggtacttaccactgcaggccgattccagcaggatactcgaaggtcgaagttgagttggtcgaaggcgcgtacgaggacctcgagctggattaccctggaggagacgcaccgtctccacctcaggctccagcatcgactcctcctcaggatcctgcaccgactcctcctcgtgctcctacacctactcccccgcaagctcctcttccggcaccttcaaagtcaagggcccccccagctccaccgcctgtccacacaagggcaacgaagaaggcgaaagttgacgccgccaagaacaaggacccggggtacgattgcacgcaagaggagcttgacgcttacgttgcatcagaagtcaagagacaattcaagcctcgaagtccagaaaagaagattcctatagaccccagtgtcaggaacttcttcaggggtatgtctgcatctgtcaaggaggccatcaagctatcggactatgagcgaacgctgaagaaagcatcttctggaaagtccaaaccagtccctcagcttggagagcaaccaaatcaggagatcgagccgttggtgaccggtaaagaaatgacgatagaacaatttattactgacactggtctaactacggatcaattgctaggagtcgcaccaatcgaaaaggcggaagtgaaatacatgtacgaactcggtaaaccgcttatcaagcctgagctgctgcagtccctacccacacaaatgtacaagttccatcagctgtacatggagatgagcgccaccggtagagaaatgatcggagcgaggatcagggacacggacttcttgcaaggagatgacattctctggatcaatttcaggggaatctacgaactataccagctggacgccctcgacgtctctattatgagttgctggattttaatggagattcaaagggcccgacggcggagggttttcgatactggattcatcgaccctcggaaagtaaacgtcgcaatgctcgaccaatatccacaagaaacacaggacaatctcgtccatctcctgaaggcgcagcattacaagacgttcatactgttgccatacaacacagaattccactgggtgcttttactcttcgacctggaggcctgtaccgtcaacgtatatgactcaatggataaaaaagagtctacgtttgacaaggttttcgaacttatagacagggcttggtatcggttccgtcatttggtccgcggcaaatggagagaaagacttaggcggaagttcaaatttccttgcgcaaagcaaaagcagggaactaacttgtgcggctattacgtgtacgagtattgccactgccttgcagaccaaatcatcaccacaagagagctcgattttattcgcatgagggataacctgaccacacacaaggaatttatcgtggcggttcaagaacaactcatgggattcatcaacgaagaaatccttgatcccaagagtgaattctactacgacggaaacacaattcaccggtccttagcttctgagctagcagcgagtactactacgtcgaaatcgtag

SEQ ID NO: 93049 - DNA, 416 bp, Oryza sativa
  unsure (1)..(416): unsure at all n locations
  Clone ID: PAT_MRT4530_91471C.1
gtggcttgagagtaaaagcaatggtcaaggagaaatggatggttctggaattggggagaaggcaacgaatgtgcaaattgataagtcgtcgatctttcgttatagacgctattgactaggccgctatgtcactagttctctattattaaaaccgtcgtttcaccaatccactttatcccctttgccatcgcactagttagatttttcacttagtctatcgcccagagcaaaccaaccttgaggttgtctaagatccgtaatgggtggtggtgacgattgtgatggttggaggtatggaggatgatacngatggtaagtgggaanattttgggtataatgagaatgggnttatgtangtgaaatggatagggaaagaaaatggtagtgggggaagggggatgtagggggagatgggg

SEQ ID NO: 93050 - DNA, 7438 bp, Oryza sativa
  Clone ID: PAT_MRT4530_91472C.1
atgggggcgaggcgggtgctggtgatggggacggggccgctggggtgcgcgccgcacgtgatgcgcgcggcggagctgttcaacccgcagctgtcgcgcgcgctgcaggaactcgctggagagcctgttcccgttgaggaacacgttgcagagcgccgtggcggaggcaaggtctcccaggagcgcaccagtgagcgcattgaggtggaggctgagcgtgtgcagcgccgtcaaatcgtcgtggcggcagaggacgacgccgacgccgcgatggcaacggcggacaccgcgagtccgcgagctttccgacagatagagagagatgagagagcggtggtggtgtggcagcgcggcacgcggcacgcgccatggaagtgtggccgtgggcaaccggtttcggcagtggattggggaaatggagcggtggacggggtgctcacgatggctgcggtggcgggaaaagcgacggcgcagtgcggggtggacgggagcgacgatggtgcacggctgaatgcgatgggaggcggtggagagagggagcacggtggagagggttttttaacaggggaagacaacgaggtgatggaaaacaacaccgcctgccagatgcaaagatcaatagtgggaagaaacttggaagcctggtatgagctagtgtcgaaagttgttaacactgtattgacagatcagaaagatcgcttcttttggaaaaacaataaagaaggcattttcacagtaaaatctatgtacaagttcctcatgtatgaagggctggttcctaggaagaatttcatttggaagctcaaaattccacttaaaatcaaaattttattgtggtacctcaaggaagggatcattttcatgggaacacattgggcaaggacttggtctttgcttcttaagggaaccgatgaagaaatagttaagaactattgcaaagtgttggagaagcatgtgtgtactgatggtctagatggtgcatggatacaggaggctgttctacactggtggagaaaccatctttcgtcgatggatcggcaatggatgtacgctgaccggcggtccaaagagtttattgacggcgtgcattattttttgagagtggccgaagctaacaggcataagggttttatttgttgtccatgcaataagtgtaagaatcagaaggagtattctgcatccaggactattcatttccatttgtttgagtcggggttcatgccaagctataactgttggacatcccacggagaggaaggggttgaaatggaagaagatgaagtggaagacgataatattccggactttagtcaggacgctggatttgaaggaaatcaaatgggcgaggaggaaagggatgctgatggtaacgacgttgcggatgatcttggtcagatgttgcaggacgccaaggaggactgcgaaagtgaaaagggggcccataaattggacaagatgttagaggactacagaacgtcgttgtacccaggttgcgagcaggggcacaaaaagttggataccactctggagttcttgcaatggaaggcaaaaaatggtgttagtgacaaggcatttggtgatttattgaaactcgtcaagaacattcttccggagggaaacaaattgcctgagacaacgtacgaggctaagaagatagtctgccctctaggactggaagtttagaagatccatgcatgtccgaatgattgtatcctatatcgcggtgaggagtacgagaacctagaagcatgccctgtttgcaaagcactacgatacaagattagacgagacgatccaggagaagttgacgggcagctaacaaagaagagaattcctgataaggtgatgtggtatttccctataataccacggctaaggcatttgttcaggaataaggggaatgctagaacgatgcgatggcacgctgaagagcgtcaacaggacgggatgctgagacaccccgccgatggttcgcagtggcgaaacatcggcaaaaaatttaaagactttgaaaaggacgcatgaaacatacggtttggtttaagtacggatggcatgaatccttttggagagatgagcagcagccatagcacttggcccgttacgatgtgtatctacaacctccctcctggctatgtatgaagaggaagtacataatgataccaattattattcaaggccccaagcaacttggtaacgacatcgatgtgtacctaggaccactggtcgaagatcttaaactgttatggaaaaaggaaggtgtccccgtgtgggacgagaacaaacaggaggagtttaacctacgagcgctgctgttcgtaaccattaacgattggcctgcacttagcaacctttccggtcagtccaacaaggggtacaaggcttgcactcactgtatggatgaaacagaaagtacgtatcgtaagcactgtaggaaggttgtgtacatgggtcatcgtcgattccttgctgcaaaccacccggtacggaagaaaggcaagcactttgaacataaggcggaccaccgtacgaagcctaaatatcgcagcgggaaaacagtgtttgctatggttaaagaccttaaagtagtgttctgaaaggggcctggaagccagcctatagagagcgaaggtggtcacgcagcgatgtggaaaaagaactctatattttgggagttaccctattgggaattcttggacgtctgccacgcaattgacgtgatgcacctcactaagaacctttgcgtaaaccttcttggcttcctaggtgtatatggaaagttgaaagatacattggaagcatgtaatgatctaaagcatatggaacaactcggcgaccttcacccggaaccaaaggagaaaggaagccattacttgagtccagccagctacactcttagcaaggcagagaaggaaagtatgtttgaatgcttggagagcataaaggtactgtctggatactccacgaatatcaaccgaataataagcacgaaggagaagaagttcataaacctaaagtctcatgactgtcacgtgttgatgacacaactgctaccagttgtaataaggggtatccttccagacaatgtccgggcaacaataacaaagctatgtgctttcatgaacgcaattttgcagaaggttatcgacccggatagattagaagcccttcagaatgatgtggtgcaatgtcttgtcagttttgagttgatatttccaccttcatttttcaatataatgaagcatatgctttgtcaccttgtcaaagagaacagtattctcgggcatgtgtacctacacaacatgttttctttcgagaggtacatggcgtgttctgaagaagtatgttcgtaaccgtgctcgtccagaggcaagcatcgccaaggggtatggaacagaggaggtcatcgaattttgcgtaaaatttattgaaaaccttcgcccaatcagggtacctgaatcacgccatgaagggagactacggggaaagggaactctcggaaggaaagcaataatgacggtagacaacaatttattccgtaaagcccatttcacggttctgcaacaatcttcattggtagctccttacatcgaggagcacttggctctagttcacgctagaaacatcggtaagtccgatgcatggattacacggcatcacattgatactttccccgcgtggctacgacaacatctcatgggtaacgagacgatcaaccaacaactggccttcctggcgaggggaccatctgggtcgatcgcgacattccagggatatgagatcaatgggtacacattctacacgagagcccaagacatgaagagcatgaaccaaaacagcgcagttcgtatcgatgccatgggacacgatggaacaaccggcacgtattacggtgccatcgaggacatatgggaacttgactatggtcctctcaaggtccctctgttccggtgccaatgggttaggttgactggtggaggcgtaatgattgatgacagtgggatgacaacggttgaccttaacaaggttggatactcggacgaaccttttgtccttgccaatgatgtaacgcaagtcttttacgtgaaggacatgtctagcaaaggaaagaagggtagagggcatgacgagccgaagcgtcacgtggttcacccagcgcgccctcgtcttctccaccaacacttagaagttttttccccgatcgatctctctcggcttctccttcgccgccactgcctagggcatccccgcgccgacgccgccgtcgtatctcgccgttgtctcgcgggcgtcgtcgtcgccgcctccgccgcctctgccacctccgccgccgccaaatatttcttgtatgaacagatggctgatcgcgatgaggaacagatactgtacaatacaatcgtggagggaagcagccagtactggaacgaagaagaggggaacgaggatccaaaccagtacttgaacgaggaagggaacgtggagagggaagcggaggggaaccaggaggggaacgtggagagggatgtggaggggaaccaggaggaggaggctagtggaagtcaaccctccgctggacagaagagggcacgcaggcaacgaggtgccacgaagaaactagagggtcggcacatcataacggaagtggacgaagatggccgacctagtgccccagcggaagcagccaagaactacgtacgacacagctattgggttgtgcgggataacgtgcctgtcagtatggtgtactggcgcagaacaagggcacgcggagatcatgagagctttgtcccagattcggagaaagagatgctgtggaccacaatgctcgagacattcacccttcccgcgggtacagaggacaaagtgaaaaggtggactctaaagaaaatggcagaactgtttcagagcttcaagggagatctgtaccagaaatatatcctgaaggggcagacaccgaacttcgacacattcccaaagctaagggatcactaggacgagttcgttgcatataagacaggtcaacaagggtaggcgatgatggaaagaaacaaagaaaatgccgccaagaagaagtaccatcaccacttggggtcaggcggctatagcgtcgctatgccgaagtgggaggagatggaggcaagcttgcttgagaggggtatcgaactggccaccgctaaatggctggatcgatcgaagtgctggtactatgctcacggtggaatgctcaacccagttgatggctccctggtcttcagcgatcagatacgcgaggctacgcatcgactaacggacgcagtggaagcctcttcggggggcacgttccgacccgacagagagaaggacgagctgtcactcgccctgcagactccagagcatccaggacaaacaagagggaaaggagtgattccttggaagattggattcaaggaggacatccacacgtacaggagtcagatgaggagcaagagagataccgaggcgaagattgtagatcttgagtacagggtatcgagctacgagctaagcatgcaagaggaggcggcaaggaaggttggtgaacacatggccgcacatcggtcccatgatccccagccgaccattcctcctgcaatggtgagcccttcaggcaatcgtagcagctgcgcctccacggggcaggtaggatcacagagcatggacgccatgcaaacccaggacgaaatcacctgccccgttgatgacatcactcagcggacaccatgtgagctgcatattcccttcaagaacttatcaataaaggtggcgtcgggcatggccatcccgacggacccttcaggtacttaccactgcaggccgattccagcaggatactccaaggtcgaagttgagttggtggaaggtgcgtacgaggacctcgagttggattaccctggaggagacggtgagtcgcatctacgagacacaagccacgccattatactatggcgcaagcggtatatcatcctccctggctgacaagcagcgtctcgtgcaccatctcctccggctccaccatctcctcctccgactccgccatctcctcctcaggctcctgcaccgtctcctcctcatgctccagcaccgtctccacctcaggctcctacaccaactcctcctcaggctcctacaccaactcctcctcaggctcctacaccaactcctccgcaagctcctcatccggtaccttccaagtcaagggccccccaagctccaccgcatgcccccacaagggcaacgaagaaggcgaaagttgacgccacaaaaaacaaggacccggggtacgattgcatgcaagaggagcttgacgcttatgtggcatcataagtcaggagacaattgaagcctcgaagtccagaaaagaagattcctatagacccgagtgccaggaactttttcaggggtatgtctgcacctaccaaggaggccataaagctatcggactatgagcaaaccagtccctcagcttggagaggaaccaaaccaagagatcgagccgttggtgaccggtgaagattttggaatacaagaatttattaatgacaccgggctaactatggatcaattgctacgaggcgcaccaatcgaaaaggcggaagtgaaatacatgtacgaactcggtaaaccgcttgtcaagcctgagcagctgcagtccctacccagacaaatatacaagttccatcaactgtacatggagatgagcgccaccggtagagagatgatcggagcgaggatcagggacacggacttcttgcaaggagatgacattctcttgatcaatttcaagggtatctacgaactataccagctggacgccctcgacgtctctattatgagttgctagattttaatggagattcaaagggcccgacggcgggggggttttgatactggattcattgaccctcggaaagtaaacgtcgcaatgctcgaccagtatccgcaagccacagaggacaatctcgtccatctcttgaaggcgcagcattacaagacgttcatactattgccgtacaacacagaattccactgggtccttttactcttcgacctagaggcctgcaccgtcaacgtatatgactcaatagataaaaaagtctacgtttgacaatgttttcgaacttatagacagggcttggtatcggttccgtcatttggtccgcggcaaatggagagaaagacttaggcagaagttcaattttccttttattcgtatgagggataacctgatcacacacaaggaatttatcgcggcggttaaagaacaactcatgggattcatcaacgaataaatccttgatcccaagggtgaattctactacgacggaaatacaattcattggtccttagcttctgagataacgactacgactactactactcctccacgcgtcggcccgccatccacgcgcggagacggggc

SEQ ID NO: 93051 - DNA, 5427 bp, Oryza sativa
  Clone ID: PAT_MRT4530_91473C.1
ttctttgatttgggcctttaaattgactacaaagttaatttgggctttcatttgatgtaaattttgtatatggatcggcaatggatgtacgctgacgggcggtccaaagagtttattgacggcgtgcattatttttttagagtggccgaagctaacaggcaaaagggttttatttgttgtctatgcaataagtgtaagaatcagaaggagtattctacatccaggactattcatttccacttgtttgagtcggggttcatgccaagctataattgttggacatcccatggagagcaaggtgttgaaatggaagaagatgaagtggaagacgacaatattccggactttgctcaatacgctggatttgaaggaaatcaaacaggcgaggaggaaagggatgctgatggtaacgacggtgcggatgatcttggttagatgttgcaggatgccaaggaggactgcgaaagtgaaaagggggcccataaattggacaagatgttagaggaccacagaacgtcgttgtacccaggttgcgagcaggggcacaaaaagttggataccactctggagtttttgcaatggaaggcaaaaaatggtgttagtgacaaggcatttggcgatttattgaaactcgtcaagaacattcttctagagggaaacaaattgcccgagacaatgtacgaggctaagaagatagtctgcacctctaggactggaagttcagaagattcacgcatgtccgaatgattgtatcctatatcgcggtgaggagtacgagaacctagaagcatgccctgtttgcaaagcactacgatacaagattagacgagatgatccaggagaagttgacgggcaactaacaaagaagagaattcctgctaaggtgatgtggtatttccctataataccacggctaaggcgtttgttcaggaacaaggggaatgctagaatgatgcgatggcacgctgaagagcgtcaacaggacgggatgctgagacaccccgccgatggttcgcagtggcaaaacatcgacagaaaatttaaagactttggaaaggacgaacgaaacatacggtttggtttaagtacggatggcatgaatccttttggagagatgagcagcggccatagcacttggcccgttacgatgtgtatctacaacctccccccttggctatgcatgaagaggaagtacataatgatgccgattatttttcaaggccccaagcaacctggtaatgacatcgatgtgtacctaagaccactggtcgaagatcttaaactattgtggaagaaggaaggtgtccccgtgtgggacgaggacaaacaggaggagtttaacctacgagcgctgttgttcgtaaccatcaacgattggcctgcacttagcaacctatccgggcagtccaacaaggggtacaaggcttgcactcactgtatggatgaaacaaaaagtgtatatggaaagtcgaaagatacactggaaccatgtaatggtctgaagcatatggaacaacgcggcgatcttcacccggaaccaaaggagaaaggaagccattacttgagtccagccagctacactcttattaaggcagagaaggaaagtatgtttgaatgcttggagagcatcaaggtaccgtctggatactccacgaatataaagcgaataataagcacgaaggagaaaaaattcacaaacctaaagtctcatgactgtcacgtgttgatgacacagctgctaccagttgtaataaggggtatcctcccagacaatgtccgggcaacaataacaaagctatgtgctttcatgaacgcaatttcgcagaaggtcattgatccggatagattagcagccctgcagaatgatgtgaggtacatgggcattctgaaaaagtatgttcgtaaccgtgctcgtccagaggcaagcatcgccaaggggtatggaacagaggaggtcattgaattctgcgtagaatttatcgaagaccttcgcccaatcggggtacttgaatcacgccatgaagggagactacggggaaaggggactctcggaacgaaagcaataatgacggtagacaacaatttattccgtaaagcccatttcatggttctgcaacaatcttcattggtggctctctacatcgaggagcacttggctctagttcacgccagaaacatcggtaagtccgatgcatggattacacggcatcacatcaatactttctccgcgtggctgcgacaacatctcatgggtaacgagacgattaactaaaaactagccttcctggtgagaggaccatctggctcgatcacgacattccagggatatgaaatcaatgggtacacattctacacgagggcccaagacatgaagagcacgaaccagaatagtgccatgggacacgatggtacaactggcatgtattacggtgccatcgaggacatatgggaacttcactatggacctctcaaggtccctctgttccggtgccaatgggttaggttaactggtggaggcgtaacgattgatgacagtgggatgacaacggttgaccttaacaaggtttgatactcggacgaaccttttgtcattgccaatgatgtaacgcaagttttttacgtcaaggacatgtctagcaaaggaaaaaagggcaaagggcctgacgagccgaagcgccacgtggttctcccaggaaaaagaaaaatcgtcggagtagaggacaagactgacgaggattataatcagtttgatgggcaaccccctttcacggtgatgattgaccctagcatcctcctatcaaatgaagacaccccttactcacgtagcgatcacaaggaaggaacaatatacttgaacgaggaggggaacgtggagagggatgcggaggggaacgaggaggggaacgatgaggaggccagtggaagtcatccctccgctggacagaagagggcacgcggacaacgaggtgctgcgaagaagatagagggtcggcacatcataactgaggtggacgaagatggccgacctagtggcccagcagaagcagccaagaattttgtacgccacagcggttgggttgtgagggacaacgtgcctgtcagcacggtgtactggcacagaacaagggcacgcggggataatgacagctttgtcccggactcagagaaagagatgctgtggaccacaatgctcgagacgttcacgctacccacaggtacggagaacatagtgaaacagtggactctaaagaaaaatggcagaacagttccagagattcaagggagatctctacaagaaatacatcctgaagagactaacaccaaacttcgacgtattcccaaagctaagggatcattgggacgagttcgttgcttacaagacagggcaacaagggcaagcgatgatggccagaaacaaagaaaatgccgccaagaagaagtaccatcaccacttggggtcaggcggatatagcgtcgcaatgccgaagtgggaggagatggaggcaagtttgattgagaggggtaacgaaccggccaccgctaaatggccggatcgatcgaagttctggtactatgctcacggtggaacgcttaacccagttgatggctcccttgtcttcagcgatcagatacgcgaggctgccagtcgactaacggacgcagtggaagcctcttctcagggcacattccgacccgacagagagaaggacgagctgagtcggatgaggagcaagaaagataccgaggtgaagattgcagatcttgagtacagggtattgagctacgagctcagcatgcaagaggaaggtggatgaacgtatggccgcacatctgtcccaggatccccaaccgtacattcctcctgcaatggtcagcccatcaggcaatcgtagtagctgcgcctcaacggggcaagtggcgtcgggaatggccatcccaacggacccttctgggacttaccactgcaggccgattccagcaggatactcgagggtcgaagttgagctggtggaagccgcgtacgaggacctcgagttggactacccaggaggagacgttgagacgtatctacgagacacaagccacgccattatactatggcacaagcggtacatcatcctccctgggtgacaagcggcgtctcgtgcaccatctcctccggctccgccatctcctcctgcaccatctcctccagctcctccgcctcctccgcctccaccgtgtccgcctgcacctcccaagacaaggtctcgccaagctccaccgcctgcccgcacaagggcaacgaagaaggcgaaagttgacgccaccaaaaacaaggagccaccgtacgattgcagtcaagaggagcttgatgcttatgtggcaggagaagtgaagaggcaactcaagcctcggagtcctgaaaagaagatacctattgacccgagcgagaagaacttcttcaagtgaatgtccgcaacaaacaaggaggccttacagatatcggactatgaccgaacacttcagagagcctatcacaagaagtccaaaccagtccctcagcttggagaacaaccaaaccaagaggtcgagccgttggtgaccggcgaagattttggcataacagaattcatttcagacaccggtctaactgtggatcagctgattcgaggcgcacctatcccaaaggcggaagtggcatacaagtttgaactcggtaaaccgcttgtcacgcctgagcagctgcagtccctaccgacacagatgtacaaattccatgaacggtacatggaaatgagcgccaagggtagagagatgttcggagcgaggatcagaaaccctgacttcttgcaaggagaagatgttctctggatccatttcaaggatctcttcgatctgtaccatctggacgctctcgacgtctctcttctgagcgcatggattttaatggagattcaaagggcccgacggcggagggtctacgatactgggttcatcgatccttggaaaatcaacaccgaaatgatcgacaagtacaagaaagacacagaggacaatctcgtccatctcctaacgcagcagcatttcaagacgtacatactactgccgtacaacatagaagccactatgtacgactcaatgaataaagaggagacgatttttgacaaggtcttccaactgatagacatggcttgggatcggttccgtcaattggtctgcgggacttagaaagaaaaacttggacggaggtttcattttccacgtattcacatgagggataatctcccacacaaggattttatcacggctgttcaagaacaactgatgggattcatcaacgaagaagtccttaatcctgatggtgaattctactacgatggattgacaattcataacgccggtccttcctcttctgacataacgccggcgtcgaagtcgtagcta

SEQ ID NO: 93052 - DNA, 6226 bp, Oryza sativa
  Clone ID: PAT_MRT4530_91474C.1
atggatcggtaatggatgtacgctgaccggtggtccaaagagtttattgacggcgtgcattattttttgagagtggccgaagctaacaggcataacggttttatttgttgtccatgcaataagtgtaagaatcagaaggagtattctgcatccaagactattcatttccgcttgtttgagtcggggttcatgccatgctataattgttggacatcccacgaagagcaaggggttgaaatggaagaagatgaagtggaagacgacaatattctggactttgctcagtacgctggatttgaaggaaatcaaacgggctaggaggaaagcaatgctgatggtaacggcgttgtggatgatcttggttagatgttgcaggacgccaaggaggactgtgaaagtgaaaagggggcccataaattggacaacatgttagaggaccacagaacgtcgttgtacccaggttgtgagcaggggcacaaaaagttggataccactttggagttcttgcaatggaaggcaaaaaatggtgttagtgaaaaggcatttggcgatttattgaaactcgtcaagaacattcttctggagggaaacaaattgcccgagacaacgtatgaggctaagaagatagtctggcctcttggactggaagttcagaagattcacgcatgttcgaatgattgtatcctatatcgcggtgaggagtacgagaacctagaagcatgccctgtttgtaaagcactacgatataagattagacgagaggatctaggagaagttgatgggcagctaacgaagaaaagaattcctgctaaggtgatgtggtatttccctataataccacggctcaggcgtttgttcaggaacaaggggaatgctagaatgatgcgttggcatgctgaagagcgtcaacaggatgggatgctgagacaccccgccgatggttcgcagtggcgaaacttcgacagaatggtttggtttaagtacggatggcatgaatccttttggagagatgagcagcggccatagcacttgtcccgttacgatgtgtatctacaacctccccctttggctatgcatgaagaggaattacataatgatgccgattattattcaaggccccaagcaacctggtaacgacatcgatatgtacctaagaccactggtcgaatatcttaaactgttgtggaagaaggaaggtgtccccatgtgggacgaggacaaacaggaggagtttaacctacgagcgttgctgttcgtaaccatcaacaattggcctgcacttagcaacctatccgggcagtccaacaaggggtacaaggcttgcactcattgtatggatgaaacagaaagtacgtatcttaagcacagtatgaaggctgtgtacatgggtcatcgtcgattccttgcagcaaaccacccagtacggaagaaaggcaagcactttgaacatacagcggaccaccgtacgaagccaaaacattgcagcggtaaaacagtgtttgctttggtgaaagatcttaaagtagtgtttggaaaggggcctggcagccagcctatagagagcgaagatggtcacgcggcgatgtggaaaaaaaacaccatattttgggagttaccctattgggaattcttggacgtccgccacgcagtcgacgtgatgcacctcactaagaacctttgcgtaaaccttcttggcttcctaagtgtatatggaaagtcgaaagatacactggaagcatgtaatgatctgaagcatatggaataacgcgtcgaccttcacccggaaccaaaggagaaaggaagccattacttgagtccagccagctacactcttagcaaggcagagaaggaaagtatgtttgaatgcttggagagcatcaaggtaccgtcaggatactctacgaatataaagcgaataataagcacgaagaagaagaagttcacaaacctaaagtctcttgactgtcacgtgttgatgacacagctgctaccagttataataaggggtatcctcccagacaatgtccgggcaacaataacaaagctatgtgctttcatgaacgcaatttcgcagaaggtcatcgatccgtatagattagaagcccttcagaatgatatggtgcaatgtcttgtcagctttgagttgatatttccaccttcatttttcaatataatgacgcatctgctttgtcaccttgtcaaagagatcggtattctcggccctgtgtacctacacaacatgtttcctttcgaaaggtacatgggcgttctgaagaaatatgttcgtaaccgtgctcgtccagaggaaagcatcgccaaggggtatggaacagaggaggtcattgaattctgcgtagaatttattgaagaccttcacccaatcagggtacctgaatcacaccatgaagggagaatacggggaaaggggactctcggaaggaaagcaataatgacggtagaccacaatttattccgtaaagcccattttacggttctacaacaatcttcattggttgctccttacatcgaggagcacttggctctagttcgtgccagaaacatcggtaagtctgatgcatggattacacggcatcacattgatactttctccgtgtggctgcgacaacatctcatgggtaacgagacgattaaccaacaactggccttcctggcgaggggaccatctggctcgatcgcgacattccagggatatgaaatcaataggtacacattctacacgagagtccaagacatgaagagcacaaaccataacagtgctgtttgtatcgatgccatgggacacgatagtacaactggcacgtattacggtgccatcaaggacatatgggaacttgactatggacctctcaaggtccctctattccggtgctaatgggttaggttgactggtggaggtgtaacgattgatgacagtgggatgacaacggttgaccttaacaaggttggatactcggacgaatcttttgtccttgccaatgatgtaacgcaagttttttacgtcaaggacatgtctagcaaaagaaaaaagggcaaagggcctgacgagccgaagcgccacgtggttctcccagtgcgccctcgtcttctccaccaacacttagaagtttttcctccgatcgatctcggcttctccttcgccgccactgcctagggcaaccccgcgctgacggcatatatgattattacaattttaatataagattagttttaatattacgcttagcaaatatgacctatagacttagcaaatatttcttgtatgaacaaatggctgatcgcgatgaggaacagataatgtacgatacaatcgtagagggaagcagccagtactagaacgaagaagaggggaacgaggatccaaaccagtacttgaacgagaaggggaacgtggagagggatgcggaggggaacgaggaggaggaggctagtgaaactcatccctccgctggacagaagacggcacgcggacaacgaggttccgcgaagaagatagagggtcggcacatcataactgaggtggacgaagacggccgacctagtgccccggcagaagcagccaagaattttgtacgccacagcagttgggatgtgagggataacgtgcctgtcagcacggtgtactggcgcagaacaagggcacgcggggataatgacagctttgtcccggaatcagagaaagagatgctgtggaccacaatgctcgagacgttcacgctccccgcggatacggagaacatagtgaaacagtggactcttaagaaaatggcataatagttccagagcttcaagggagatctctacaagaaatacatcctgaagggactaacaccaaacttcgacgtattcccaaagctaagggatcattgggacgagttcgttgcttacaagacagggcaacaagggcaagcgatgatggtcaaaaacaaagaaaatgccgccaagaagaagtaccatcaccacttggggtcaggcggctatagcgtcgcaatgccgaagtgggaggagatggaggcaagattgattgagaggggtatcgaaccggccaccgctaaatggccggatcgatcgaagttctggtactatgctcacggtggaatgcttaacccagttgatggctcccttgacttcagcgatcagatacgtgaggctgccagtcgactaacagacgcagtggaagcctcttctcagggcacattccgacccgacagagagaaggacgagctgtcacttgccctatagactcccgagcatccaggacgaacacgagggaaaggcgtgattccctagaagattggattcaaggaggatatccacacgtacatgagtcggatgaggagcaagagagataccgaggcgaagattgcagatcttgagtacagggtatcgagctacgagctcagcatgcaagaggaggtggcaaggaaggtggatgaactcatggccgcacatcggtcctaggatccccagctgtacattcctcctgcaatggttagcccttcatgcaatcgtagtagctgcgcctcaacggggcaggtaggatcacagagcatggacgccatgcaaacccaggacgaaaccacctgccctgttgatgacatcactcagcggacaccatgtgaggtgcatattcccttcaagaacttatcaataaaggtggcgtcgggcatggccatcccaacggacccttcagggacttaccactgtaggccgattccagcaggatactccaaggtcgaagttgagctggtggaagccgcgtacgaggacctcgagttggactacccaggaggagacgcatctacgagacacaagccacgccattatactgtggcgcaagcggtacatcatcctccctgggcgacaagcggcgtctcatgcaccatctcctccggttcctccgccacgtcctcctgcaccatctcctccggctcctcagccacctcctcctgcaccatctcctccagctcctccggctcctccacctccaccgtgtccgcctgcacctcccaagacaaggtctcgccaagctccaccgcctgcccgcacaagggcaacgaagaaggcgaaagttgacgccaccaaaaacaaggagccgccgtatgattgcagtcaagaggagcttgatgcttatgtggcaggagaagtgaagaggcaactcaagcctcggagtcctgaaaagaagatacctattgacccgagcgtgaagaacttcttcaagggaatgtccacaacaaacaaggaggccttaaagctatcggactatgaccgaacacttcagaaagcctatcataagaagtccaaaccagtccctcagcttggagaacaaccaaaccaagaggtcgagccgttggtgaccggcaaagattttggcataacggatttcatttcagacaccagtctaactctggattagctgattggaggtgcaccaatcccgaaggcggaagtggcatacaagtttgaactcggtaaaccgcttgtcacgcctgagcagttgcagtccctaccgacacagatgtacaaattccatgaacggtacatggaaatgagcgccaagggtagagagatgttcggagcgaggatcagaaaccccgacttcttgcaaagagaagatattctctggatccatttcaaggatgtctccgatctgtaccatctggacgccctcgacgtctctcttctaagcgcatggattttaatggagattcaaagggcccaacagcggggggtttatgatactgggttcatcgaccctcggaaaatcaacaccgaaatgatcgacaagtacgagaaagacacagaggacaatctcgtccatctcctaacgcagcagcatttcaagacgttcatactactgccgtacaacatagaattccactgggtcctgttattcttcgacttggacgcatgcagagtcactgtgtacgactcaatgaataaagaggagaagatttttgacaaggtcttccaactgatagacaaggcttcggatcggttccgtcaattggtccgtgggacttggaaagaaaaacttggacggaggtttcattttccacgtattcacatgagggataatctcccacacaaggattttatcacggctattcaagaacaactgatgggattcatcaacgaagaagtccttaatcccgatggtgaattctactacgacggatcgataattcataacatcggtccttcctct

SEQ ID NO: 93053 - DNA, 386 bp, Oryza sativa
  unsure (1)..(386): unsure at all n locations
  Clone ID: PAT_MRT4530_91475C.1
catttcgacnctgccgacccacccggntccattgaccnttccccatttggtncagaatggattgaaaggcgttcaagggctacatcgagaatccaacgnccattgttgctntaaatgaggatgnccggggagantttattttttggtaggtttttccacaaataagggctcacaatanacggtgtcttcgttcttttcattgttttacactgtataaacctcggcacggcccnatgaggtcttgaaaccaaagagcaaacatacataggantcagcacagcatccccttgtcatctctgtaaatgcatttttatcctgagctaaatcacaatttacagcgcgtagtggaagtttgatgttctcttgtttaaaaaaaaaaaaaaaaa

SEQ ID NO: 93054 - DNA, 216 bp, Oryza sativa
  Clone ID: PAT_MRT4530_91476C.1
aaaaacaaaactggcgggagaaccgccaatttttttttcaataagcgggggtaaaaacccttgacgggttacaagaaaagaaaaaacaccccccggttgggtgaacacacaggatttgccacaacacatttaaattaaaaacccctggcggggcccaacatggggggtcgatcccaaatttgcccaaaagcaatttaggggggtccgactttgcaa

SEQ ID NO: 93055 - DNA, 3464 bp, Oryza sativa
  Clone ID: PAT_MRT4530_91477C.1
cacccaaacacactgatcgatttctccactaaatacatccacaatatagtagtatgtgccatgaacaaaaacaggtttacagctattacaagccaccttcaatcaaaagaatgaatacaatatatgaaaccgaaaaattaaaatgccagacccattgtaataattctcaaatttctcatccgcaatctcagatgcaaggcaccaccacttaataatcaacaccaaactttttccctgtacagcttttggagatctggctgttattttcgtcctgtttttctgggttgtgaaattacatgataaatactcggaatttttcgctgccgatatcagatgagctcataccatgcttcttctccttgagtggtctgtggtaactgactttggatttgaaagatggtcagcaccaccgatgctcttgggttcagccagcctcttcagtcgctcgctgaatgattcggtcgatccactcttttctttcttcagaccagttagagatggaactgatatacttagtccattggcatgctctctgcttgctttaggaggatcactcttcccattacttcttgcggctattctcttttgcctctctagtttaagcctctccagtcgcttcatttgttcttcctcctgctctttcttcagtttctggagatcagctttatatgctcgcatgttctgtgcacgtttctgtgcatcattgagtggggtctttggagcagagagcctcctgagtattgcatccttctttcttttatccgaaccatcctttgtaccccttatcttctccttctctggtttctttacatcgccatcattactatgtgagacatcctcgtcattactgtcttcaaccttgacggctctgaccatcatgttgctttcgtaatccattgccggatcatatccaaatgaagcatcttcagatccacgctctggcatcaattcatccggctcatagaagagttgagttccagccttcccatctgaagttttcttagtgtttgtaggaagctcaacatcaatgtcaatcgtggctcggtattccggcccaacattatcttgtgaaccagatctaagaggaattataaaggactcatcagccgcggcatatccattcttgtccacctgattaggattcctgtaccgggcctctgcaagaggatccaaagcactcctcctatccatggacctttcctggccatagagcatgaagtcctcacttgtccctctcctgtatcttccaccaccagcttctatctccttaatttcaccatccatatatcttcccccttccccagacatcatcagttcatcattggattgcagccgaatagctctactcctcccattgactggatcaaagcctgctcctctctgttcatatacatcaccagaatctcccccagccaaaagaataggatcagcagtgtttacattgttctttttccttgatggaggtgctttttcaccagaaaacatatctgcatcattagatcttgttttttcttctgctctcatcaggaaactctggaatgcattccagttcccttggtcagcatcttgcccataagatgattcatccttgttattatagtcgtctccagagtcaaagttagtttttgcaccctcctttttctttgaacctgagctcttatgcttcccatgtctctttttgtagtgtgtgtcatcactgtcttgagacccatcttcagaacttgactgcgactcactttccgacgagccatgctttttggatgttacatttacattttttatgacaactacactaggtttctttttccctgatcgcttaccctttttatgtgacttgtgaccatgagaactccctctttcagaactgctaccatcaattccttcgtcaagtacttctgactctttactgtctgaagagtgcttcctcgatgatttccttcccgagtagtgatacctggggtcatccactggaggatatggagggtagtacggcccaggatagtaaggcattccttgcatatggtaaggtggaggatgcattgcccatggaggatatgcagcctgataccccatctgttgaccagacttatgctcagctttagaagcatcctcgccatttgcctctccattggaaacagacatagtttccgtgttttgcttcatgttgtctccaacaaaaacaatacccgatggattaaaaggaggaaattcagagtgtgtagacattgcttctggttcaacttcaatccattgtccagtttcatgctttcgcttccacagttcgatgaactgcgaacatgccctcatcaaacgtgaagcaccaaagcgctctgcaaacgcaatcaagtaacccagattgtcgatgtcaaacccagctgccacagcacgtgcaaaagccatagcctgctctttccttaagacattttttcgggtttcaagcactctcagcagttggacttttgaattctcttcatgtgttgtagtctcatcatgcactgctggtgtaggctgtgatccaggctggtatataacaatagccttatctgcatcagggctgtgattcgctcgtgtaccttcgttgctttcagtcaattttcctccatgatcttctaccttccagatagcaaacaagaatgcgtcacctttagatcttagcccaagattatcgttgctctgaatagagatggcgtcctcgagctgcaagatctcggattctatcgtcgtcactcgctcaagcacctccggagtactcacgaagcgcacgaatctctccacggtgcctcttgtaaaccatggcgcgccaacccctgagctcggctcaagcgtaattgagtatcctccctttgcaatctgatcctgggcgaccttcaggtgtgccaggaacgggtttagcaggccagaggctatcttctccttccggccattcactatcaccaccaaatcgaacctggtccgggtcggggtgagctggaacacggccgcatccagcctcgcgtcgggcctcattgccgaagagagaatcccaacgcaagaactcctcctcctcccttgtgctgctgtcccctccttttgtaccccagatcttgcacacagatttaccacgaaaaaaagcgagcagagccaagaacccggcgctttgcttgggccagatgctaccctcccaccactgccacttgagaagttgagagggaaagggagaagcagcagaagcagaaaggggagagagtaaagctgaagccgcctactagtataaatccccagcaaatgcagctctggctgcaggacagagagtgttgcaaaatggattaaaaaaaccgaaagaaactcaagaacatggcactgcggggaggaatgagtaattaatctcgcagtactaagaattggaggtggcaataaataattgcagtagagcaagcagccagccacaggaggaggagagaagaacagcgagaggagtgtgaaac

SEQ ID NO: 93056 - DNA, 7628 bp, Oryza sativa
  Clone ID: PAT_MRT4530_91478C.1
atggcgtccgcggccgcgccgaccacgtcctcgctctccctcgccgccaggcgcgccgcggcggtggggcccgccgccgcgtcgccgctacggcgcggggggctggcggccgggtgccagccggcgcggtcgctggcgttcgcggcggccgcggacccgcggctggcgacccacgtcgcgtcgcggtgccggcaggcggcgtcgtcgtcctcgcgcgggacgcgcgccgtcgccaccatggcgaagaagagcgtcggggacctcaccgccgccgacctcgaggggaagcgcgtgttcgtgcgcgccgacctcaacgtcccgctcgacgacaaccagaacatcaccgacgacacccgtgtccgcgccgccatccccaccatccagtaccttatcaagaacggtgccaaggtcatcctctccagccacctgggtcgcccaaagggtgttactcccaagtttagcttggctccccttgtaccgcgattgtctgaacttctcggcatacaggtgactaaggcagaagatgttattggaccagatgttgagaaattggtatctgaattgccaaatggtagtgttttgctccttgaaaatgttagattttacaaggaagaggagaagaatgacccagagtttgccaagaagcttgcctccttagcagatctctatgtcaatgatgcattcggaacagcccacagagcacatgcatcaactgagggagttaccaagtttttaaagccttctgtcgcaggattccttttgcagaaggagcttgactaccttgttggagctgtttcaagccctaaacgcccatttgctgccatcgtgggtggttcaaaggtgtcatccaagattggggttatcgaatcccttttggagaaatgtgatatccttcttctaggtggtggtatgatcttcacattttacaaggcacaaggactctctgttggttcttccttggttgaggaagacaaacttgagcttgcaacatctctccttgcaaaggcaaaagaaaagggtgtctcccttctgttgccatctgacgttatcattgctgataagtttgctcctgatgctaacagccaggttgttccagcatctgctattcctgatggttggatgggtctggatattggtccagattcagtcgcgtcattcagctctaccctggaaacaacacagacagtcatttggaatggacctatgggtgtcttcgaatttgacaagtttgcagtaggaactgaggctattgcaaagaagttggcagaccttagcggcaagggtgttacaaccattattggaggaggtgattctgttgccgctgttgagaaggtgggagttgcagatgttatgagccacatttcaacgggaggtggtgctagcttggagctgttggaaggaaaggaacttcctggagtcattgcacttgatgaagctgtcactgtggccgtatgaggctaagtttcattttgttgcatcttcttcatgtaccattctaaacttgctatattctactcctttctcgcacctcttcaaccactcgaaatgtaagagaccaatgttttatagagatgctggaaatcgtttgaataacttcccagcattttgtgtttgttggatataccttacctcaggaaacataattatcaataccttacgttgtttcccccagaacaaaaaaaaacagaatgctcggatggcgtcctgtaaaagatggagtgatagggccatacatatggaaatcatacagggaagtgtatgaagaagtcctgcaagttggatctgctttgcagcagctgggggtgaagccaggttcccggattggaatatatggatcaaactgccctcagtggatagtagcaatgcagttcgccgggatcaataaagcttgttcaaaaaatggggttagtgacaaggcatttggcgatttattgaaactcgtcaagaacattcttccggggggaaacaaattgcccgagacaacgtacgaggctaagaagatagtctgcccgttaggactggaagttcataagattcacgcatgtccgaacgattgtatcctatatcgtggtgaggagtatgagaacctagaagcatgccctgtttgcaaagcactacgatacaagattagacgggacgatccaggagaagttgacgggcagctaacaaagaagagaattcctgctaaggtgatgtggtatttccctataataccacggctaaggcgtttgttcaggaacaaggggaatgctagaatgttgcgatggcacgctgaagagcgtcaacaggacgggatgctgagacaccccgccgatggttcgcaatggcgaaacatcgacagaaaatttaaagaatttgaaaaggacgcacgaaacatacggtttggccccaagcaacctggtaacgacatcgacgtgtacctaagaccactggtcgaagatcttaaacagttgtggaagaaggaaggtgtccccgtgtgggacgaggacaaacaggaggagtttaacctacgagcgctgctgttcgtaaccatcaacgattggcctgcacttagcaacctatccggacagtccaacaaggggtacaaggcttgcactcactgtatggatgaaacagaaagtacgtatcttaagcactgtaggaaggttgtatacatgggtcatcgtcgattccttgcagcaaaccacccggtacggaagaaaggcaagcacttcgaacataaggccgaccaccgtacgaagcctaaacatcgcagcgggaaaacagtgtttgctatggttaaagatcttaaagtagtgttcggaaaggggcctggaagccagcatatagagagcgaagatggtcacgcggcgatgtggaaaaagaactctatattttgggagttaccatattgggaattcttggacgtacgccacgcaatcgacgtgatgcacctcactaagaacctttgcgtaaaccttcttggcttcctaggtgtatacggaaagtcgaaagatacactggaagcacgtaatgatctgaagcatatggaacaacgcggcgaccttcacccggaaccaaaggagaaaggaagccattacttgagtccagccagctacactcttagcaaggcagagaaggaaagtatgtttgaatgcttggagagcataaaggtaccgtctggatactccacgaatatcaagcgaataataagcacgaaggagaagaagttcacaaacctaaagtctcatgactgtcacgtgttgatgacacaactgctaccagttgtaataaggggtatccttccagacaatgtccgggcaacaataacaaagctatgtgcattcatgaacgcaatttcgcagaaggtcatcgatccggatagattagaagcccttcagaatgaagtggtgcaatgtctcgtcagttttgagttgatatttccaccttcatttttcaatataatgacgcatctgctttgtcaccttgtgaaagagatccgtattctcgggcctatgtacctacacaacatgtttcctttcgagaggtacatgggcgttctgaagaagtatgttcgtaaccgtgctcgtccagaggcaagcatcgccaagggttatggaacagaggaggtcatcgaattttgcgtagaatttatcgaagaccttcgcccaatcggggtacctgaatcacgccatgaagggagactacggggaaagggaactctcggaaggaaagcaataacgacggtagacaacaatttattccgtaaagcccatttcactgttctgcaacactcttcattggtagctccttacatcgaggagcacttggctctagttcgcgccaggaacatcggtaagtccgatgcatggattacacggcatcacattgatactttccccgcgtggctacgacaacatctcatgggtaacgagtcgatcaaccaacaacttgccttcctggcgaggggaccgtctgggtcgatcgcgacattccagggatatgagatcaatgggtacacattctacacgagagcccaagacatgaagagcacgaaccaaaacagcgctgttcgtgtcgatgccatgggacatgatggaacaactgccacgtattacggtgccatcgaggacatatgggaacttgactatggtcctctcaaggttcctctgttccggtgccaatgggttaggttgactggtggaggcgtaatgattgatgacagtgggatgacaactgttgaccttaacaaggttggatactcggacgaaccttttgtccttgccaatgatgtaacgcaagtctttttggtgaaggacatgtctagcaaaggaaagaagggcagagggcctgatgagcctaagcgtcaagtggttctcccagtgcgccctcgtcttcttcaccaacacttagacgttttcggccgatcgatctctctcggcctctctccttcgccgccactgcctagggcaaatccccgcgccgacgccgccgtatctcgccgtcgtctcgagctcgtcgtcctcgccgccgcctccgcctcctccgctgccgccgcatctctcagatgtttcttgtatcaatagatggctgaccgcgatgaggaacagatattgtacgatacaatcgcggagagaagcagccagtactggaatgaagaagaggggaacgaggatccaaaccagtacttgaacgaggaagggaacgtggagagggatgcggaggggaaccagcaggggcacgtggaaagggatgtggaggggaaccaggaggaggaggctagtggtagtcaaccctccgttggacagaagagggcacgcgggcaacgaggtgcagcgaagaagcttgagggtcggcacatcataacggaagtggaagaaaatggacatcctagtgccccggccgaagccgccaagaactatgtacgtcacagcggttgggttgtgcgggataacgtgcctgtcagtacggtgtactggcgaagaacaagggcacgcggagatcatgagagctttgtcccagattcggagaaagagatgctgtggaccacaatgctcgagacattcacccttcctgcgggtacagaggacaaagtgaaaaggtggactctgaagaaaatggcagaacagtttcagaggttcaagggagatctgtaccagaagtatatactgaaggggcagacaccgaacttcgacaaattcccaaagctaagggatcactgggacgagttcattgcatataagacaggtgaacaagggcaggcgatgatggaaagaaacaaagaaaatgccgccaagaagaagtaccatcaccacttggggtcaggaggctatagcgtcgcgatgccgaagtgggagcagatggaggctagcttgattgagaggggtatcgaaccggcaacagccaattggccggaacgatcgaagttctggtactatgctcatggtggaacgctcaacccagctgatggctcactggtcttcggcgatcagatacgagaggctgcgcgacgactaacagatgcagtggaagcctcctctcagggcacgttccaaccagacagagatagggacaagctgacactcgccctgcagactccagagcatccaggacgaacacgagggaaaggggtgattccttggaagattggtttcaaggaggacatccacacatacaggagtcggatgaggagcaagagagataccgaggcgaagattgcagacctagagttccgggtatcgagctacgaactcaacatgcaagaggaggtggcaaggaaggttgatgaacgcatggccgcacatcggtcccatgttccccagccgaccattcctcctgcaatggtgagcccgtcaggaaaccgtagcagctgcgcctcaacggggcaggtaggatcacagagcatggacgccatgcaaacacaggacgaatcgacctgtcccgttgatgacatcactcagcggacaccatgtgagctgcatattcctttcaagaacttatcaataaaggtggcgtcgggcatggccatcccaacggacccttcaggtacttaccactgcaggccgattccagcaggatactcgaaggtcgaagttgagttggtcgaaggcgcgtacgaggacctcgagctggattaccctggagcagacggtgagacgcatctacgagacacatgccatgccattattctatggcgcaggcggtacatcatcctccctgggcgacaagcggcgtctcgtgcaccatctcctccggctccgccatctcctcctcatgatcctgcaccgtctcctcctcatgctccgccagcaccgtctccacctcaggctccagcatcgactcctcctcaggatcctgcaccgactcctcctcgtgctcctacacctactcccccgcaagctcctcttccggcaccttcaaagtcaagggcccccccagctgcaccgcctgcccacacaagggcaacgaagaaggcgaaagttgacgccgccaagaacaaggacccggggtacgattgcacgcaagaggagcttgacgcttacgttgcatcagaagtcaagagacaattcaagcctcgaagtccagaaaagaagattcctatagaccccagtgtcaggaacttcttcaggggtatgtctgcatctgtcaaggaggccatcaagctatcggactatgagcgaacgctgaagaaagcatcttctggaaagtccaaaccagtccctcagcttggagagcaaccaaaccaggagatcgagccattggtgaccggtaaagaaatgacgatagaacaatttattactgacaccggtctaactacggatcaattgctaggagtcgcaccaatcgaaaaggcggaagtgaaatacatgtacgaactcggtaaaccgcttgtcaagcctgagctgctgcagtccctacccacacaaatgtacaagttccatcagctgtacatggagatgagcgccaccggtagagagatgatcggagcgaggatcagggacacggacttcttgcaaggagatgacattctctggatcaatttcaggggaatctacgaactataccagctggacgccctcgacgtctctattatgagttgctggattttaatggagattcaaagggcccgacggcggagggttttcgatactggattcatcgaccctcggaaagtaaacgtcgcaatgctcgaccaatatccacaagaaacagaggacaatctcgtccatctcctgaaggtgcagcattacaagacgtttatactgttgccatacaacacagaattccactgggtgcttttactcatcgacctggaggcctgcaccgtcaacgtatatgactcaatggataaaaaagagtctacgtttgacaaggttttcgaacttatagacagggcttggtatcggttccgtcatttggtccgcggcaaatggagagaaagacttaggcggaagttcaaatttccttttattcgcatgagggataacctgaccacacacaaggaatttatcgcggcggttcaagaacaactcatgggattcatcaacgaagaaatccttgatcccaagggtgaattctactacgacggaaacacaattcaccggtccttagcttctgagctagcagcgagtactactacgtcgaaatcg

SEQ ID NO: 93057 - DNA, 605 bp, Oryza sativa
  unsure (1)..(605): unsure at all n locations
  Clone ID: PAT_MRT4530_91479C.1
agacattgtagagggaggggtgtagataaaggacaattacaagatgaacggacggcgtgtatacctggtagagataagaaacgccccagggaggctgcgcaactgttgggaagggcgatcggtgcgggcctcttcgctattacgccagctggcgaaagggggatgtgctgcaaggcgattaagttgggtaacgccaggaacagctacgagcacgtcgccgagttccctaactatgcgaagggggattgggagattggcgcacaggacatttcgcccgcacttcgtgcnnnnnnnnnnnnnnnnnnnnnnnnnnnnnnnnnnnnnnnnnnnnnnnnnnnnnnnnnnnnnnntcgggaaacctgtcgtgccagctgcattaatgaatcggccaacgcgcggggagaggcggtttgcgtattgggcgctcttccgcttcctcgctcactgactcgctgcgctcggtcgttcggctgcggcgagcggtatcagctcactcaaaggcgaaaccacacattatatcgccacgggcagaaaacccactggcttacaggaatttaccctcacccgagggatgtacggcagggcctccacaagactccgaagat

SEQ ID NO: 93058 - DNA, 1134 bp, Oryza sativa
  Clone ID: PAT_MRT4530_9147C.1
ttatcgattagcagctagctaggaggagctagctagtggagtaattaacattgtacaaggtagaaattaattaagatgggtgcagtgagcagaagcggccgcgcagtggccgtcctgcagcttgtctccaccgtcgtcctcctcctctcgccaccaccagcagctgcatctcgccgtgacatgtctgtggacttccacgctgcgtcgtgcccgcagctggagaccatcgtgcgctccgccgtgcaggcggcgctccagcgggagatcgccctcgccgccggtctcctccgcatcttcttccacgactgcttcccacaggggtgcgacgcgtcggtatatctgaatgccaccaaccccaacacggagcagtttccccagggacccaacgagacgctgcagccgcgggcgctgcagctggtggaggacatccgcgccaaggtgcacgccgaatgcggtcccactgtctcctgcgccgacatctccgccctcgccacccgcgacgccgtcgtcgtctccggcggcccctcttacgccgtgccactcggccagcaagacagcctcgctccggcatcggtggatctcgtcggagatctcccgggcccgagcacctccagagtccaggctctcatcgaccttttcgcgaccaggggcctgggagatcctgccgacctggtggcgctctccggcggccacaccgtcgggagagcacgctgcgacttcttccgtgaccgcgcggggcgccaggacgacaccttctccaagaagctgaagttgaactgcaccaaggaccccaaccggctgcaggagcttgacgtgataacgcccgacgccttcgacaacgcctactacatcgcgctcaccaccggccagggtgtcttcacttccgacatggcgctcatgaagaaccagaccacggcgtccatcgtcaggcagttcgcgcaggacaaggccgccttcttcgaccagtttgccaagtccatggtcaagctcagcaaggtacccaggcccggcgggaacgtcggcgagatccgccgcagctgcttcctttccaactccaacggaccacgcctcgacctcgtcgtcgccgccgccaccgaccaagaccccggtttcgctgcctctgcgtctgcttga

SEQ ID NO: 93059 - DNA, 7333 bp, Oryza sativa
  Clone ID: PAT_MRT4530_91480C.1
atggatcggcaatggatgtacgctgaccggcagtccaaagagtttattgacggcgtgcactattttttgagagtggccgaagctaacaggcaaaggggttttatttgttgtccatgcaataagtgtaagaatcagaaggagtattctgcatccagaactattcatttccacttgtttgagtcggggttcatgccaagctataactgttggacatcccacggagagtaaggtgttgaaatggaagaaaatgaagtggaagacgacaatattccggactttgctcagtacgttggatttgaaggaaatcaaacaggcgaggaggaaagggatgctgatggtaacgacgttgcggatgattttggtcagatgttgcaggacgccaaggaggactacgaaagtgaaaagggggaccataaattggacaagatgttagaggaccacagaacttcgttgtacccaggttgcgagcaggggcacaaaaagttggataccactctggagttcttgcaatggaagacaaaaatggggttagtgacaaggcatttggcgatttattaaaactcgtcaagaacattcttccggagggaaacaaattgcccgagacaacgtacgaggctaagaagatagtctgcccgctaggactggaagttcagaagattcacgcatgtccgaatgattgtatcctatatcgcggtgaggagtatgagaacctagaagcatgccctgtttgcaaagcactacgatacaagattagacgagacgatccaggagaagttgacgggcagctaacaaagaagataattcctgctaaggtgatgtggtatttccctataataccacagctaagtcgtttgttcaggaacaaggggaatgctagaatgatgcgatggcacgctgaagagtgtcaacaggattggatgctgagacaccccgccgatggttcgcagtggcgaaacatcgacataaaatttaaagaatttggaaaggacgcacgaaacatacggtttggtttgagtacggatggcatgaatccttttggagagatgagcagcggccatagcacttggcccgttacgatgtgtatctacaacctcccccctggctatgtatgaagaggaagtacataatgatgccgattattattcaaggccccaagcaacctggtaacgacatcgatgtgtacctaagaccactggtcgaagatcttaagctgttgtggaagaaggaaggtgtccccgtgtgggacgaggacaaacaggaggagtttaacatacgagcgctgctgttcgtaaccatcaacgattggcctgcacttagcaacctatccggacagtccaacaagggtacaaggcttgcactcactatatggatgaaacagaaagtacgtatcttaagcactgtaggaaggttgtatacatgggtcattgtcgattccttgcagcaaaccacccggtacggaagaaaggcaagcactttgaacataaggctgaccaccgtacgaagcctaaacatcgcaacgggaaaacagtgtttgctatggttaaagatcttaaagtagtgttcggaaaggggcctggaagccaacctatagagagcgaagatggtcacgcggcgatgtggaaaaagaactctatattttgggagttaccctattgggaattcttggacgtacgccacgcaatcgacgtgatgcacctcactaagaacctttgcgtaaaccttcttggcttcctaggtgtatacggaaagtcgaaagatacactggaagcacgtaatgatctgaagcatatggaacaacgcggcgaccttcacccggaaccaaaggagaaaggaatccattacttgagtccagccagctacactcttagcaaggcagagaaggaaagtatgtttgaatgcttggagagcataaatgtaccgtctggatactccacgaatatcaagcgaataataagcacgaaggagaagaagttcacaaacctaaagtctcatgactgtcacgtgttgatgacacaactgctaccagttgtaataaggggtatccttccagacaatgtccgggcaacaataacaaagctatgtgcattcatgaacgcaatttcgcagatggtcatcgatccggatagattagaagcccttcagaatgatgtggtgcaatgtctcgtcagttttgagttgatatttccaccttcatttttcaatataatgacgcatctgctttgtcaccttgtgaaagagatcagtatctcgggcctgtgtacctacacaacatgtttcctttcgagaggtacatgggtgttctgaagaagtatgttcgtaaccgtgctcgtctagaggcaagcatcgccaagggttatggaacagaggaggtcatcgaattttgcgtggaatttatcgaagatcttcacccaatcggggtacctgaatcacgccatgaagggagactacggggaaagggaactctcggaaggaaagcaataatgacggtagacaacaatttattccgtaaagcccatttcatggttctgcaacaatcttcattggtagctccttacatcgaggagcacttggctctagttcgcgccaggaacattggtaagtccgatgcatggattacacggcatcacattgatactttccccgcgtggatacgacaacatctcatgggtaacgagtcgatcaaccaacaacttgccttcctggcgaggggaccgtctgggtcgatcgcgacattccagggatatgagatcaatggatacacattctacacgagagcccaagacatgaagagcacaaaccaaaacatcgctgttcgtgttgatgccatgggacacgatggaacaactggcacgtattacggtgccattgaggacatatgggaacttgactatggtcctctcaaggtccctctgttccggtgccaatgggttaggttgactggtggaggcgtaatgattcatgacagtgggatgacaacggttgaccttaacaaggttggatactcggacgaaccttttgttcttgccaatgatgtaacgcaagtctttttcgtgaaggacatgtctagcaaaggaaagaagggcagagggcctgacgagcctaagcgtcacgtggttctcccaggcaaacctcatcttctccaccaacacttagaagtttttgcccgattgatctctctcggcttctccttcgccgccactgcctagggcatccccgcgccgacgccgccgccgtatctcgccgtcgtctcgcgctcgtcgtcatcgccaccgcctccgtctcctccgctgccgccgcatctctcagatgtttcctgtatgaacagatggctgatcgcgatgaggaacagatattgtacgatacaatcgcggagggaagcagccagtactggaacgaagaagaggggaacgaggatccaaaccagtatttgaacgaggaagggaacgtggagagggatgcggaggagaaccaggaggggcacgtggaaagggatgtggaggggaaccaggaggaggaggctagtggaagtcaaccctccgttggacagaagagggcacgcgggcaacgaggtgccgcgaagaagctcgagggtcgacacatcataacggaagtggaagaagatggacctagtgccccggcagaagccgccaagaactatgtatgtcacagcggttggtttgtgcgggataacgtgtctgtcattacagtgtactggcgaagaacaagggcacgcggagatcataagagctttgtcccagactcggagaaagagatgttgtggaccacaatgctcgagacattcacccttcccgcgggtacagaggacaaagtgaaaaggtggactctgaagaaaatggcagaactgtttcagagcttcaagggagatctgtaccagaaatatatcctgaaggggcagacaccgaacttcgacacattcccaaagctaagggatcactgggacgagttcgttgcatataagacaggtgaacaagggcaggcgatgatggaaagaaacaaagaaaatgccgccaagaagaagtaccatcaccacttgggtcaggcggctatagcgtcgcgatgccgaagtgggaggagatggaggctagcttgcttgagaggggtatcgaaccagccacctctaattggccgaaacgatcgaagttctggtactatgctcatggtggaacgctcaacccagctgatggctcactggtcttcggtgatcagatacgagaggctgcgcgtcgactaacagacgcagtggaagcctcttctcagggcacgttccgaccggacagagagagggacgagctgtcactcgccctgcagactccagagcatccaggacgaacacgagggaaaggggtgattccttggaagattgggttcaaggaggacatccacacgtacaggagacggatgaggcgcaagagagataccgaggcgaagattgcagatctagagttcagggtatcgagctacgagcgcagcatgcaagaggaggtggcaaggaaggctgatgaacgcatagccgcacatcggtcccatgatccccagccgaccattcctcctgcaatggtgagcccgtcaggaaaccgtagcagctgcgtctcaacggggcaggtaggatcacagagcatggacgccatgcaaacccaggacgaatccacctgccccgttgatgacatcactcagcggacaccatgtgagctgcatattcctttcaagaacttatcaataaaggtggcgtcgagcatggccatcccaacggacccttcaggtacttaccactgcaggccgattccagcaggatactctaaggtcgaagttgagttggtcgaaggcgcgtacgaggacctcgagctggattaccctggaggagacggtgagacgcatctacgagacacaagccatgccattattctatggcgcaggcggtacatcatcctccctgggcgacaagcggcgtctcgtgcaccatctcctccggctccgccatctcctcctcaggatcctgcaccgtctcctcctcatgctccagcaccgtctccacctcaggctcctgcaccgactcctcctcgggctcctgcaccgactcctccgcaagctcctcttccggcaccttcaaagtcaagggccccccaagctccaccgcctgcccacacaagggcaacgaagaaggcgaaagttgatgccgccaagaacaaggacccggggtacgattgcacgcaagaggagcttgacgcttacgtggcatcagaagtcaagagacaattcaagcctcgaagtccagaaaagaagattcctatagacccgagtgtcatgaacttcttcaggggtatgtctgcacctgccaaggaggccattaagctatcggactatgagcaaacgctgaagaaagcatcttctggaaagtccaaaccagtccctcagcttggagagcaaccaaaccaggagatcgaaccgttggtgaccggtaaagaaatgacgatagaagaatttattactgacaccggtctaactacggatcaattgctaggagttgcaccaatcgaaaaggcggaagtgaaatacatgtacgaactcggtaaaccgcttgttaagcctgagctgctgcagtccctacccacacaaatgtacaagttccatcagctgtacatggacatgagcgccaccggtagagagataatcggagcgaggatcagggacacggacttcttgtaaggagatgacgttctctggatcaatttcaagggaatctacgaactataccagctggacgccctcgacgtctctattatgagttgctggattttaatggagattcaaagggcccgacggcggggggttttcgatactggattcatcgaccctcggaaagtaaatgtcgcaatgctcgaccaatatccgcaagccacagaggacaatctcgtccatctcctgaaggcgcagcattacaagacgttcatactgttgccgtacaacacagaattccactgggtgcttttactcttcgacctgtcggcctgcaccgtcaacgtatatgactcaatggataaaaaagagtctacgtttgacaaggtttttgaacttatagacagggcttggtatcggttccgtcatttggtccgcggcaaatggagagaaagacttaggcggatgttcaaatttccttttattcgcataagggataacctgaccacacacaaggaatttatcgcggcggttcaagaacaactcatgggattcatcaacgaacaaatccttgatcccaaggatgaattctactacgacgaaaacacaattcataggtcctggcaaccttgtctaactcctctattagcattaaaagcaccataggattgaccattgatattaacagaaaaagaggaggagctttgattctattagctatggatttggcaatgactttgtacatcacattacacaagctgattggtctgaaatctgcaggattagcaggcctatttttcttagggataagaacaatgttagtcttgttgagctctctgggaaaattacttttcatacttctgatgatctgcaaaacttcctgttcatctgggcattgccagtcaacttgggctggatcatcatttccaggaaaataagaggtagacctgttgtttctatctgtacaaaagaggttagaaaaataatcaatgaaaacatttgcaatctcatcaggattagtgataagctgatcatttgatatgatggaagagattctatttttccttcttcttttgatagcagcttgatggaagaaggaagtgttcctgtctccatctttgacccagtgctttttggctctttgcttgtgataatctgaaagcttgtgcagaagggagtcatgcttggttattagttctttttctttttcttgctgatcttgtctgttgttagaagactgaatatcaagaatctcctgttcagtactggcaatctggtcttgaagaggcttctttttcctgcaccatgttagaagattctgccctagattcttagctttagcaacaaaggagccattaacaatagagttccagctgttttttgccaaatcatgaaaatcattttcagacagccaccaattttcaaatttgaaagatttttttggctttctatgagtaggattgagaaggatcaagataggagcatgatcaccataaataaggggaagatgataaacagtggtgtaaggaaatttagagcaccattcaacattagccagacacctatctaatctctcatagatgacattgttacctgtcctcttgttagtccaggtgtaagcaggaccattgtagcccat

SEQ ID NO: 93060 - DNA, 1025 bp, Oryza sativa
  Clone ID: PAT_MRT4530_91481C.1
tttttttttttttttttgtagggttagtagacagtaaacaaaataagtaacaactttcgcaacaacaattttattattcctctttgctaaaaaagagctacaaaaccgtcgacggatggcacaataatgcaacaatatgcccacatttacaaatttatttattttgccaccattccggattttccatttattatttgcattgttcttacatatgctaggtagctcgccatcaaagcactcctgacattgtctttgcgtaccttcttcagatctcactaaacgacttgatagtccggaaaccatgattctcagggagcggtgcatttcccgggcgaatggagattattacctcaaaacctgcactttttgcagcaacagcttcttggaagacatcggtgataaataagatctgagcaggactgtccaccccaagtgattgcgaaatctcaaagtagctccttgtttctcttttgttaccggttgtggtgtcaaagaaaccacagaggtattgtcgcagatcaccatagggccgtattgccaaataatagcctttgcgcctcccggctgccacttgagtatatgtagaccttcatgccactagcatgccagtgctttagcgcctcggggacatcatcgaaaacaactccttgcagttctttactttcaaaaccagtcctccatatgtggccctggagttgtttcaacgacgtaatcttcctgtctgctttaatcatcgattcaacattagcaactaatgcattgataacctcttctttgtcagcatcgtcaggtggaattggaacagacccaacaattccatttttcaggtcttcttcaacttggatgcgcaatagtttgatgtcctctttggtttcatcagaactatatgttgaagtcagatgctttcgcacattatcacgggcatagggaaacatcacatcagtcacaaatgatactcggagtagttgttccctcaatgtcaagaacaacacaatgctttgatgatttggaatcaggcctcgtgc

SEQ ID NO: 93061 - DNA, 6112 bp, Oryza sativa
  Clone ID: PAT_MRT4530_91482C.1
atggatcggcaatggatgtacgctggccggcggtccaaagagtttattgacggcgtgcattattttttgagagtggccgaagctaacaggcaaaagagttttatttgttgtccatgcaataagtgtaagaatcagaaggagtattctgtatccaggactattcatttccacttgtttgagtcggggttcatgccaagctataattgttggacatcccacggagagcaaggtgttgaaatggaagaagatgaagtggaagacgacaatattccggactttgctcagtacgctggatttgaagaaaatcaaacgggcgaggaggaaagggatgctgatggtaacaacgttgcggatgatcttggtcagatgttgtaggacgccaaggaggattgcgaaagtgaaaagggggcccataaattggacaagatgttagaggaccacacaacgtcgttgtacccaggttgcgagcaggggcacaaaaagttggataccactctggagttcttgcaatggaaggcaaaaaaatggtgttagtgacaaggtatttggcgatttattgaaactcgtcaagaacattcttccggagggaaacaagttgcccgagacaacgtacgaggctaagaagatagtgtgccctctaggactggaagttcagaagattcacgcatgtccgaatgattgtatcctatatcgcggtgaggagtacgagaacctagaagcatgccctgtttgcaaagcgctacgatacaagattagacgagatgatccaggagaagttgacgggcagctaacgaagaagaaaattcctgctaaggtgatgtggtatttccctataataccacggctaaggcgtttgttcaggaacaaggggaacgctagaatgatgcggtggcacgctgaagagcgtcaacaggacgggatgctgagacaccccgccgatggttcgcagtggcgaaacatcgacagaaaatttaaagactttggaaatgacgcacgaaacatacggtttggtttaactactgatggcatgaatccttttggagagatgagcagcagccatagcacttggcccattacgatgtgtatttacaacctccccccgtggctatgcatgaagaggaagtacataatgatgccgattataattcaaggccccaaacaacctggtaacgacatcgatgtgtacctaagaccactggtcgaagatcttaaactgttgttggaagaaggaaggtgtccccgtgtgggatgaggacaaacaggaggagtttaacctacgagcgctgctgttcgtaaccatcaacgattggcctgcacttagcaacctatccgggcagtctaacaaggggtacaaggcttgcactcactgtatggatgaaacagaaagtacgtatcttaagcactgtaggaaggttgtgtacatgggtcatcgtcgattccttgcagcaaaccacccggtacggaagaaaggcaagcactttgaacataaggcggaccaccgtacgaagcctaaacatcgcagcgggaaaacagtgtttgctatggttaaagatcttaaagtagtgtttggaaaggggcctggcagccagcctatagagagcgaagatggtcacgcggcgatgtggaaaaagaactctatattttgggagttaccctattgggaattcttggacgtccgccacgcaatcgacgtgatgcacctcactaagaatctttgcgtaaaccttcttggcttcctaggtgtatatggaaagtcgaaagatacactggaagcacgtaatgatctgaagcatatggaacaacgcggtgaccttcactcggaaccaaaggagaaaggaagccattacttgagtccagctagctacactcttatcaaggcagagaaggaaagtatgtttgaatgcttggagagcatcaaggtaccgtctggatactccacgaatataaagcgaataataagcacgatggagaagaagttcacaaatctaaagtctcatgactgtcacgtgttgatgacacagctgctaccagttgtaataaggggtatcctctcagataatgtccgggcaacaatatcaaagctatgtgctttcatgaacgcaatttcgcagaaggtcatcgatcctgatagattagaagccctgtagaatgatgtggtgcaatgtcttgtcagctttgagttgatatttccaccttcatttttcaatataatgacgcatctgctttgtcaccttgtcaaagagatcggtattctcggtcctgtgtacctacacaacatgtttcctttcgagaggtacatgggcgttctgaagaagtatgttcgtaaccgtgctcgtccagaggcaagcatcaccaaggggtatggaacagaggaggtcattgaattctgcatagaatttatcgaagccattcacccaatcggggtacctgaatcacgccatgaagggagactgtggggaaaggggactctcggaaggaaagcaataatgacggtagacaacaatttattccgtaaagcccatttcacggttctgcaacaatattcattggtggctccctacatcaaagagcacttggctctagttcgcgccaaaaatatcggttagtccgatgcatggattacaaggcatcacattgatactttctccacgtggctgcgacaacatctcatgggtaacgagacgagtagccaacaactggccttcctggcgaggggaccatctggctcgatcgcgacattccagggatatgaaatcaatgggtacacattctacacgagggcccaagacatgaagagcacgaaccagaacagtgttgttcgtatcgatgccatgggacacgatggtacgactggcacgtattacggtgccattgaggacatatgggaacttgactatgaactcaaggtccctctgttccggtgccaatgggttaggttgactggtggaggcgtaacgattgatgacagtgggatgacaacggttgaccttaacaaggttggatactcagacgaaccttttgtccttaccaatgatgtaaccaaagttttttacatcaaggacatgtctagcaaaggaaaaaagggcaaagtgactgacgagccgaagcgccacgtgatattccggttgcgccctcgtcttctccaccaacacttagccgtttttcgatctcggcttctccttcgccgccaccgtgcctagggcaatcccgcgccgacaccaccgtcgtctctcgccgtcgctcgatggtcctcaccgcctccgccgcagacaccgccgccgcacttcttgctaacaaatattttttgtatgcacagatggctgatcgcgatgaggaacagatactatatgacacaatcgcagagggaagcagctagtactggaacgaagaagaggggaacgaggatccaaaccagtacttgaacgaggaggggaacgtggagagggatgcggaggggaacgaggaggggaacgatgcggaggaggctagtggaagtcaaccctctgctggacagaagagggcacgcggataacgaggtgccgcgaagaagataaagggtcggcacatcataactgaggtggacgaagacggccgacctagtgcaccggcagaagcaaccaagaattttgtacgccacagcggttgggttgtgagggacaacgtgcctgtcagcacggtgtactggcgcagaacaagggcacgcggggatgatgacagctttgtcccggactcagagaaagagatgttgtggaccacaatgctcgagacgttcacgctacccgcgggtacggataacttagtgaaacagtggactctaaagaaaatggcagaacagttccagagcttcaagggagatctctacaagaaatgcatcctgaagggactaacaccgaacttcgacgtattcccaaagctaagggatcattgggacgaattcgttgcttacaagacagggcaacaagggcaagcgatgatggccagaaacaaagaaaatgccgccaagaagaaataccatcactacttggggtcaggcggatatagcgtcgcgaagccgaagtgggaggagatggaggctagcttgcttgagaggggtatcgaaccggccaccgctaattggccggatcgatcgaagttctggtactatgctcacggtggaacgcttaacccagttgatggctcccttgtcttcagcgatcagatacgcgaggcatgcaagaggaggtggcaaggaaggtggatgaacgtatggccgcacatcggtcccaggatccccagccgtacattcatcctgcaatggtcagcccatcaggcaatcgaagcagctgcgcctcaacggggcaggtcggataacagagcatggacgccatgcaaacccaggacgaaacctcctgccccgttgatgagatcacgcagcggacaccatgtgagctgcatattcccttcaagaacttatcaatcaaggtggcgtcgggaatggccatcccaacggacccttccgggacttaccactgcaggccgattccagcaggatactcaagggtcgaagttgagctggtggaagccgcgtacgaggacctcgagttggactacccaggaggggacgatgagacgcatctacgagacacaagccacgccatcatactatggcgcaagcggtacatcatccttcctgggcgacaagcggcatttcgtgcaccatctcctccggctccgccatctcctcctgcaccatctcctctggctcctccgccacctcctgctgcaccatctccttcggctcctccgccacctcctgctgcaccatctcctccggctcctccgcctcctccgcctccaccgtgtccgcctgcacctcccaagacaaggtctcgccaagctccaccgcctgcccgcacaagggcaacgaagaaggcgaaagttgacgccaccaaaaacaaggagccaccatacgattgcagtcaagaggagcttgatgcttatgtggcaggagaggtgaagaggcaactcaagcctcggagtcctgaaaagaagatacctattgacccgagcgtgaagaacttcttcaagggaatgtccaaaacaaacaaggaggcgttacagatatcggactatgaccgaacacttcagagagcctatcacaagaagtccaaactagtccctcagcttggagaacaaccaaaccaagaggtcgagccgttggtgaccggcgaagattttggcataacagatttcattgcagacaccggtctatctgtggatcagttggttggagccgcaccaatcccgaaggcggaagtggcatacaagtttgaactcggtaaaccacttgtcaaacctgaacagctggagtccctaccgacacagatgtacaaattccatgaacggtacatggaaatgagcgccaacggtagagagatgttcggggcgaggatcagaaaccccgacttcttgcaaggagacgatgttctctggatccatttcaaagatctcttcgatctgtaccagttggacgccctcgacgtctctctcctgagcgcatggattttaatggagattcaaagggcccgacggcggagggtctacaatactgggttcatcgaccctcggaaaatcaactccgaaatgatcgacaagtacgagaaagacacagaggacaatctcgtccatctcctaacgcagcagcatttcaagacgtacatactactgccgtacaacacagaattccactgggtcctgttattcttcgacttggatgcatgcagagtcactgtgtacgactcaatgaataaagaggagaagatttttgacaaggtcttcaaactgatagacaaggcttgggatcggttccgtcaattggtccgcgggacttggaaagaaaaacttggacggaggttttactttccacgtattcacacgagggataatctcccacacaagaattttatcacggctgttcaagaacaactaatgggattcatcaacgaagaagtccttaatcccgacggtgaattctactacgacggatcaataattcataacgtcggtccttcctcttctgacataacgccggcgtcgaagtcgaagtcactattgttatggcaaacgtcacgaa

SEQ ID NO: 93062 - DNA, 1436 bp, Oryza sativa
  Clone ID: PAT_MRT4530_91483C.1
cagcggctgctacctttcaaaaaaactcacctcctgctcttgtttgctgcgagttgcaccatctgtgaccatgcaaaacaggagggcgaaaaaaaagaaacggcgggaaattgccagagtattttaccagctgagcagaaattaccgcgcaacgcttgccgccctcgttgtttactttgcttaatttgcttgccctcatcctcatggctgcggcggcggcggctgcttctgctccccgcctcctcctgccgccggccgcctccaccttcccacaccagcacgagcacgtccgccgcaactggcaccggccccgccgccaggtcatctctgcccgcgccggcgcctccgtcgccgcccggggccttgatgcagacgacttccgccatccgctggacaagcagaacacactgctgctgagagcagttccagggcttaatgatatgggcaaggctttgctaggaccagtttctgagcaagttatggtacttcagaacattggatcgtctgtgctagtctctgaaaaccagctttcagatcttcatcagatcttgaccgaggcagcaaaactattgaacacagacgctcctgacttgtacattcggcagaaccctgttcctaatgcttacaccttagcgatcagtggcaaaaagccattcatagttgttcatacaagccttgtggagctgctcactagaaaagaactgcaggctgtgttggctcatgaactgggacacctcaagtgtgaccatggcgtgtggcttacatttgccaacatactgacaatgggagcatactctgtccctggatttggcatggttgctgggtttctggaagagcagctctacaggtggctccgggctgcagagctgacttgtgatcgagcggctcttcttgtagtgcaggaccccaaggttgtgatatctgtgctgatgaaactggccggagggtgcccgtcgcttgcggaccagctgaacgtggacgccttcctggagcaagctcgctcctacgacaaagctgcgtcaaaccccgtcggctggtacatccggaacgctcagacgagagagctgtcgcatcctctgccggtgatgcgagcccgcgagatcgacgagtggtccaggagccgagagtacaagacggtgcagcagaaggtcattcagctccagctcaatgatcacgatgcaagctagctaagctgcaggctggaccggcctgatcaactcacttcactgtacaagtagaagtagaaatggaatctagctgtatatgtttgtacatggatggaacggaaccgaactgttggaggtcagattgtattctagtgaagaatatgcacaccacagatatacaagaaaatgcaaagatatattgattctttaataagaaaaataaactaactgctaaaaaaaaaaaaaaaaaaaaaaaaaaaaaaaaaaaaa

SEQ ID NO: 93063 - DNA, 1682 bp, Oryza sativa
  Clone ID: PAT_MRT4530_91484C.1
tcgctccctactacaaaaaaccaaaccatcaccacaaaaagcatcaaggcgagctcgaatcccggcggcggcggcggcggcggaggagagccatggcgtgctgcggcggcggaaggggggagggggcggcggcgacggagtcggaggcgtacctggagggagaggcggtgagggaggcgcgggagctggtggcggagctgtgccgccacttctacggccaagggtgggtcaccggaacggggggcagcatcaccgtcaaggccaacgacccggcgctccccctcgccgatcagctcatcgtcatgtccccctccggtgtgcagaaggagaggatggtggcagaggacatgtatgtgctgtcagcagatgggaaggtgctctcctcacctgtatcaaagccatggccaaacaagcctccaaaatgtactgactgtgctcctctgttcatgaaggcttatctgatgagaggagctggggctgttattcatagccatgggatggaaacttgcattgcaaccatgcttgatcctggtgcaaaagagtttaggatgacacatatggaaatgattaaaggaattaaaggccatggttaccgtgacgaattggtggttcctataattgagaacactccttatgagtatgagctcactgactcactggctgaggcgattgcagcataccctaaggcaactgcagtccttgtacggaaccatggaatttatgtatggggtgattcctggatcaatgccaagacacaggctgaatgctatcattacctttttgatgctgccatcaagctctatcaattgggtattgattggacaactcctgagcatggtccaataaacagtgccaaaagaccacgcagtgttctaagctctagtattccaaatggatgccctgattccaaatcatcaaagcattgtgttgttcttgacattgagggaacaactactccaatatcatttgtgactgatgtgatgtttccctatgcccgtgataatgtgcgaaagcatctgacttcaacatatagttctgatgaaaccaaagaggacatcaaactattgcgcatccaagttgaagaagacctgaaaaatggaattgttgggtctgttccaattccacctgacgatgctgacaaagaagaggttatcaatgcattagttgctaatgttgaatcgatgattaaagcagacaggaagattacgtcgttgaaacaactccagggccacatatggaggactggttttgaaagtaaagaactgcaaggagttgttttcgatgatgtccccgaggcgctaaagcactggcatgctagtggcatgaaggtctacatatactcaagtggcagccgggaggcgcaaaggctattatttggcaatacggcctatggtgatctgcgacaatacctctgtggtttctttgacaccacaaccggtgaaattatgattccatctcgcataaaccgcagtaacaaaagagaaacaaggagctactttgagatttcgcaatcacttggggtggacagtcctgctcagatcttatttatcaccgatgtcttccaagaagctgttgctgcaaaaagtgcaggttttgaggtaataatctccattcgcccgggaaatgcaccgctccctgagaatcatggtttccggactatcaagtcgtttagtgagatctga

SEQ ID NO: 93064 - DNA, 1631 bp, Oryza sativa
  Clone ID: PAT_MRT4530_91485C.1
aaaacaaaacaccacattcaattgttcttctatttcagttcgacgaaacaaagatggtcccccaaacccatagaatcacaggcgggagagcaattacccattttttatgattaactaagaaagaaataccagcttatcaagtattcgagtgcaattgtttaactattctatcagagatgcaactcttaaatcacacttctgaattattttaagcatgcccaaatgccagtagctgcaatggagattacagaatactactatgtacaagaattcagactgcatcagccatcaggctacatcctaaagtaatttgcattaagcaagcaatcttgagtccaacaaacgaagataaaaggtcatgttcaattgttcttcagtttcaattcgacgaatttgtggctgttccacgattcgccagaagcgagtaccacggaacagagatcccaatccccccaacctatagaatcacaggcaggtacatatatacagaagcggcagcggatttcagacaagagtgacgaatccgccgacaccagagacgggatcaaggcaggaggagaccgaaccgtgcgaaccccacccaccctcagcagacggtggggacgaagcgcagcgccgccacgcgcgcggcgaggaggcccgcgagcctccgcacggcgaactgggtgcagttggagagcgcgatgaggcacatgagctcgtacaccaccccgagcgccgcctccgccgcggacctccgcggcgcgggcacgtcgggctcgccggacgagtcctcccatccagcccccgacccagacccgcggttccaccaccacccccctcctcctcctccacccccgccaccgcccgggccgaagaagccgtcgccgtcgtccccggagaagggcccgcccgcgtcggagggaggcttggatcggcgggtgcgggggcgggtgcgcgcgcggcggcggacggtggcggtggccgaggcggaagggcggcggcggatgatggtggtggaggaggaggtggcggtggcgggggggacgggcgaggaggaggcgagcgggcggaggaggaggagcgacagcggcggcggcggcggcctggaggagggcgcggcggcggagatctccatggttggtggggatggccgcgcgatcggagaaggggaaaaggaaaggaagagacgaagagtaggcaagtgggggaaaagttacgtgtggcgggtgaaagtggactggttcctccaggatttcaaggcgttcaataccaagggagctggttgtaacatactccatcaagctttcaaggttttcacctacaagagagttttggtcccttaccaacgatgcaatttggagatattgccaacaggccaccatctttgctgcaatttagctattcgtctggtgcttggtgctgcagccaacacctcttcccatggatctgagtctacttctccatgccttgcaagagaaaacgagaaacaacatgtaaccattgatgagtcaagcagtagcaatgacgaagaaccaaggcggcatacacacataaattggattgaagaagagaacatacgacttcttagctgttggttacaccgctcaactgatcctgtaaaaggcatcgacatgaaatcagaatattac

SEQ ID NO: 93065 - DNA, 235 bp, Oryza sativa
  unsure (1)..(235): unsure at all n locations
  Clone ID: PAT_MRT4530_91486C.1
ctcgcgtcntcnntctgactcancggaganatgggngacgngtccgtcggcgggcatcgncgncnnanatggtgggtcgagcggnanggtgnggtgcnagnggngctgnacnagcacggcgacgnngtncagnagtctntccggcgcgnctnctgcgacctacgctccgnattccgnccngacctcgactnctnccnnggcttcttncacgccgtcgantagaaggaacctncgt

SEQ ID NO: 93066 - DNA, 276 bp, Oryza sativa
  Clone ID: PAT_MRT4530_91487C.1
atggtggaggaagctgcgtcgccgagcaaagcggcggtgggggcgacccaagtggtgatagcgtccttgaaaagtgtcgggggcggagtgccacctctcctcattggcccagaaaccacaagagaagatgcaaatgatggcaccgtcaagctcggcagatccggcctagggctcatcaaatttggcctcgagcggtggcgaatgatcatcagggcgctgcacgaggacggcagcagctcaacgccagcgccactttacccttctcttaggcgatga

SEQ ID NO: 93067 - DNA, 1858 bp, Oryza sativa
  Clone ID: PAT_MRT4530_91488C.1
atggcggaaccccactctccagcaatgccgggaaggttgtacttcccctatccttagcagcgatgacgtccgccacgaagtgagaaggaagccgagcgcggccggcgatggagcggccaaggaagccggcggcgacagctgcggcgccggccggatctggagacgtcggcggcagcggcggctcgggttcttcctgcaatggcggcgactgacagcaacgttctgtctgcttctttcgatccagaaatagaaggccattgcagtttctagtacttgctattcgacaactaaaaatacataagaccgtgaactttgacgagaaaccaatagtgctggatcctccggtcacatttaatttacgagtaggcacatgaccggtttatcaaaaacctagccatgctgcagaaactgaacatactaaggaaggagatgtacagagggtattacacactcatctgcttcagatgccataacaatgaagaagacaatgtcaaagatcgtgaggtgagttactattttacaccttccaagttaaatcctgccaagcgtgtccgattctgcacgggcagtggccagactttacgagatcagctgcagcaagttcttggcagcctacaagtcacccttgaagatatgcgcgagtttctcatgttcttcaacagttgtcctcatttatgccgacagccatatagcatgcacttgcttttagacaggtgcttgttcggtcgtcaaatggaaacggagcacatcatgaacttcctgctcaaagaggacattcccagtgctgaaaatctaggtgtcctgccgatcattggcccaggaaaagttgggaagagcaccctgattgagcatgcctgcgaagatgaaagagtgcgtaaccgcttctctcaaattgtgtgttttaacgacgatgatgtaggacatgcaaacatggtggctcttagagattgtggtgtaattaagcataaaaaccattctattggtggagacaggatgctaatcattatcgaattaatgggagacattgatgagggtgtatggggaagattgtactcagcttccaaaattagtgttgcagttggaagtaaaattatagtcacaagccgatctgataagattgtaagctttggaacgacacaagttctcagagtaaatttctttactcaagaagcttattggtactttttcaaggtgcgcacatttggaagcttggatgcagaggagcacccaaagctggcatcattagccatggatatcgccagggagatgaaccagtgcttcatgggttcatgcatctacagtgtgcttctgaaagcaaactttaatgctcggttttggagcatggcgctggcaagaatcagagaattcaagctgaagaacaacttaatatacaacgcgtatcttgttggtggtccttgggaggcggttaaacctgcatatgttcggacggtaaacaaaatttcctctgaatatcttgtggttcttcacgactatcagacactctctgttccaaacatggtccattgttacacaaactctgctcagagtgaaggtgaagtccccgaggtcagtatgcaagattttctcttcggaagtgttaagcctcaaggaaaattcaaggttctcgcatggagatctcaccttccacctcactacaactacattttcaactgtgaggtacggaggccacatcatatggtcaccagtaagaagagatctcataagctttgcacctgaccatctcagatagtaatccatattgttaggttgtggtaccttttagtatctaagctacgagagctaaatcttgttattgtctgaaactgttgtataaatatgagcatctgtgtacatccaa

SEQ ID NO: 93068 - DNA, 159 bp, Oryza sativa
  Clone ID: PAT_MRT4530_91489C.1
atggggcccatcaaatcttgccgcttgacacgggggacgcccctatcaatcgccatttatggggtgaagacttccgggttcccattcatactgctcgtcatcgttgtgcttggtggttacaaacgtggcaagacacacgccgcctggcatgcgcggtag

SEQ ID NO: 93069 - DNA, 475 bp, Oryza sativa
  Clone ID: PAT_MRT4530_9148C.1
gccgacgacgccgcgtcctgccgccgcagccgtgcctgccgccctccggcgaggactcaagcaactgggcagccgacttcgtcaaggtcgcaccaggcccacctcttcgcacctcatcctggcctgcgacactcacctcaacatcaaggggttgctggcaccttcattgccagactgttgctgcaatgcatccaaggggcaagcatcctgcaggcagcatccgtaagcaccttccaacatccaagcacgcactttcaccccttgcaggcagcacagcaggagcatccgcagggcagcacaccagtggtgctttttgcagtcagcacaggccatccaaggccttcttgcatgtcataaggtgcttcagcatccttcacccctgtcatctcacgtcatgctacttgctttttcatcatgtcggtgcctggtttgtccacagtcattttaggcagtccagcatggggggttccatgtg

SEQ ID NO: 93070 - DNA, 192 bp, Oryza sativa
  Clone ID: PAT_MRT4530_91490C.1
atggagcagagaaagccctggagagcagttggatcaagtgccatggacccagccatcgtcgtgcaggttggtggtagctttaggttcacgatggttgttggcaagggcatccaggacttccaggcgctgctccaccaggggtacagccggacgccgtcggcgaccgccgcggcggcggcggcgcagccgccg

SEQ ID NO: 93071 - DNA, 433 bp, Oryza sativa
  Clone ID: PAT_MRT4530_91491C.1
acgcgaaacacatcatttttatgataattaacatatattcgtccatataatcaaagtacgggaatatcatatttcatctacaatctcatacagagtctactaaatatatttcttctctttgaacatggtttgacaaaccatttttatttgttgggcctgttaggtaagctggttgcagtggctgcggctgcgctgcagcacatgcagccgaacaggcccgttgttaataactaatattatttttacttttagctcgattattaaaaaatattaaaagttagttaggaatttccacagcaaagcgtggggaatcaccccagcaaagcgcgggaatcacccagtatgacacaaaatcatccacaaccatcgatgccaccctttgagccacagccactggcgcggtggcgccgttaggaagaaactgggggagagg

SEQ ID NO: 93072 - DNA, 311 bp, Oryza sativa
  Clone ID: PAT_MRT4530_91492C.1
gtcaaacatcaggtatgcatccctgctttatacactttgctctgtaatatgaagggctggatgatactcactggttagcaatagcaaggctaggaagatcagcacgttatatgccacgccagcagagctggcacttgcaggactggacttgaacaaaaccgcggccagagacaaaatatgcacggccatccattaccggtagaagatgatcacaggcgcacaacctgggacggcacaggatgtcgactggtccaccaccctagctagcaaagtggtccgactactcaagcgggtcaaggatctgcatggac

SEQ ID NO: 93073 - DNA, 1414 bp, Oryza sativa
  unsure (1)..(1414): unsure at all n locations
  Clone ID: PAT_MRT4530_91493C.1
atggcgacgggggagtcgcagcaggcgtctcggcgggaggggcgagagcgcgacgagcacgacgcgtctcggcgggagcgggagcgcgaccacacgcacgggaggcgcccccactcctcgtccaggtcgcggcgggacgatcccagtccgaggaggagaagagaggacaggaggcatcatgaatcagacagaagtcatcgccacaggagtcgagctgaagaaagtgctaaggcagttgaccgtgaccagaagagggataggccattgcaagatgccgcgcagcccgatgatcctttgcgagcggagacgaagcccctagatgatgccagaaatggctctcctgccaggcatgagagatctcctaggggaaccaaacggtttcctgaatcaagagatgctaggcggcctcgatcgttctttcagcacgatgaacgtggcagtgctgggcaaggtggtcggtgctattaccgccaggctagtgcttccctcatttgcgtttgcttattattgttttttaaagaccggggaagacaaagggatgaaaaggagcatgttggagatagagagaaaaacaaagatgaaggaaaggctatgcaggatgaacaacaaaatgatggtgaatctacatggaagcatgatgggttcttccagttggaggaagaagctcaccctgccaaaagaaggccaccatttaatgagatgggcatgccactggaggggaaagaatctgtgctttctgttacagaaccagattcaaggtcacataaacatgatcaagctgggcctacctctgcaataggagaagaaaggagaaattatcacccacggggatttgataggcatgagggacctttcgtaaggccagatggtcaaggtatgaggaggggattttctgatcacaggaatgctggccaaagaaatggctatgattcatgggggcgttttgctggtagaggaaggggcagatacaggtttaacaactcatatgatgggcgaaacagcatgcaccaggctgctggtgatcaagcagaaaaatggaagcatgacctttatgaacaaacaaatagaagccctactcctaagaccgaagaagagcagattgcaaaaattgaagcattgttggcgctgtagctactgctgtgtnagtncggtgtgntcatatttgcaatggctagataggtgatcatctacttggtgtcattggtgttgaatgctgtcagaccgtctatcctgatgctgcgtcactcaaatgcagctggctgaattttggggttgacaatgttttcttcttccatttaagaaaatgtgcctgatattctgggtttacttgatgtaggatccatgnactaagaacaagagtaaacaatttgccctcccattgaaatgcctatcgaacgcccatgtgttcttttgg

SEQ ID NO: 93074 - DNA, 935 bp, Oryza sativa
  Clone ID: PAT_MRT4530_91494C.1
ttttgttttttttttttttttttttttttggaaaaccgttaaaaatatttttgatgcaaaccagttcgggctagtaacagtattacagtgtgcctgatagtagcacatttcaggctttatttaattatttttttatcactctctggacactgaacagtgaacactatactaccacaagaggcagcagctcacacagtgaaaaccgaaaagatgttacggtggtttatggtacgagtgtaagtggcgtgaaatccacttgtaggctaaaataaaccgcaaatccacttataaattaaaataagtgggttcgcggctcaccgaccaacacccatagtctacccacttacaccgtctatggcacgccatggtgattgatggcgtcggtggcggtgtcaacgcggccggtgccggcggcggcagcggcggtgtcgccttgttggtggcggcgctgtgtggcgacggggacggcggtgccggggatggtgggggcgtcggtgccgcagccgccgtgggggacgtcggagacggggaggtggccgcgggcgccgtaggcgcgcagcttgtagtcctccaggccgtcgtccttcttgtactgcacgtacgggctggtgtccatcggcagctgcaccgtgtcgccggcgtccggcttcctctgctgctgctgctgctgggtctccttggttgcctccattgcaagtcctccgcttgatctgcagcaagagtgcaggggaaaaaagctcggtgccttccctcctagatatcaacaacagacctacccaggcttctcaaatgagtcggagaacgaggccttagagtgatgtactaatgaaatagtataggtgtatcaaaaaaataatgccccaagtatgtgaaactttgtggcggttctgttctaagtttatgaagccctaataaaatgctacaactgttttgtt

SEQ ID NO: 93075 - DNA, 929 bp, Oryza sativa
  Clone ID: PAT_MRT4530_91495C.1
gctttctcgtcggtgggtgcggtggagagcgcctacgcgatcgcgacgaagaagctgctccggctgtcggagcagcaggtgctggactgctccggcggcggcgactgcggcggcgggtacacatcgacggtcctgtcggagttcgccgtgaagaaggggatcgcgctggacgcgagcggcaaccctccctactacccgccctaccaagccaagaagctggcctgccggacggtggccggaaagcccgtggtgaagatggacggcgcggcgtcggttccgtcgtccaacgaggtggcactgaagcagagcgtgtacaagcagcccgtctctgtgctcattgaggccaacagcaacttccagctgtacaaacagggtgtgtatagtggcccgtgcgggacatcgataaaccatgccgtgttggcggtgggatatggcgcgacaccggacaacaccaagtactggatcgttaagaactcgtggggaacagggtggggtgagatgggttacatccggatgaagcgtgacattgcagcgaagtctgggctatgtggcatcgccctgtacggcatgtaccccatcaagaaaaccgctgcaatctctatggtcgttgatgctgtcgactcctactaagctacttgcttaataaattatcaagaaaacctgtgtcctacgtgttgattactggttacatatatatatatactagcaaaagtgcccgtgcgttgcaccgggtgattacagagtgtgtatattgaccaaaagtgttgtttggtttagcaaaagtgcccgtgcgttgcaccgggaagtttacagatcagaaaaatatgtaattaattaaaatacaaattcgctgaaatatttggtatttttaagtaggtatgtgtataattaaataaatttacaagtaaaattctccattctccatggtt

SEQ ID NO: 93076 - DNA, 3152 bp, Oryza sativa
  Clone ID: PAT_MRT4530_91496C.1
acgaacacgtcaacgtgaccgagaacgtgaacgagggaacgaacgtgaccgagaacgtgaacgagggaacaaacgtgaacgtgaacgagaacgatcgaacgaatgtgaacgtgaatgagaacgagcgaacgaacgtgaacgagaacgaacgtgaacgagaacgtgaacgaacatgtttcttgtatcaacagatggctgatcgcgatgaggaacagatattgtacgatacaatcgcggagggaagcagccagcactggaatgaagaagaggggaacgaggatccaaaccagtacttgaacgaggaagggaacatggagagggatgcggaggggaaccagcaggggcacgtggaaagggatgtggtggggaaccaggaggaggaggctagtggaagtcaaccctccattggacagaagagggcacgcgggcaacgaggtgcagcgaagaagcttgagggtcggcacatcataacggaagtggaagaagatggacgtcctagtgccccggccgaagccgccaaaaactatgtacgtcacagcggttgggttgtgcgggataacgtgcctgtcagtacggtgtactggcgaagaacaagggcacacggagatcatgagagctttgtcctagattcggagaaagagatgctgtggaccacaatgctcgagacattcacccttcctgcgggtacagaggacaaagtgaaaaggtggactctgaagaaaatggcagaacagtttcagagcttcaagggagatctgtaccagaagtatatcctgaaggggcagacaccgaacttccacacattcctaaagttaagggatcactgggacaagttcgttgcatataagacaggtgaacaagggcaagtgatgatggaaagaaacaaagaaaatgccgccaagaagaagtaccatcaccacttggggtcaggaggctatagcgtcgcgatgccgaagtgggaggagatggaggctagcttgcttgagaggggtatcgaaccggcaaccgctaattggccggaacgatcgaagttctggtactatgctcacggtggaacgctcaacccagctgatggctcactggtcttcgccgatcagatacgagaggctgcgcgacgactaacagatgcagtggaagcctcctctcagggcacattccgaccggacagagatagggacgagctgacacttgccctgcagactccagagcatccaggacgaacacgagggaaaggggtgattccttggaagattggtttcaaggaggacatccacatgtacaggagtcggatgaggagcaagagagataccgagacgaagattgcagatctagagttccgggtatcgagctacgagctcggcatgcaagaggaggtggcaaggaaggttgatgaatgcatggccgcacatcggtcccatgatccccagccgaccattcctcctgcaatggtgagcccgtcaggaaaccgtagcagctgcgcctcaacggggcaggtaggatcacagagcatggacgccatgcaaacccaggacgaatcgacctgtcccgttgatgacatcactcagcggacaccatgtgagctgcatattcctttcaagaacttatcaataaagcgttgggcatggccatcccaacggacccttctggtacttaacactgcaggccgattccagcaagatactcgaaggtcgaagttgagttggtcgaaggcgcgtatgaggacctcgagctggattaccctgaaggagacggatcctgcactgtctcctcctcatgctccgctagcaccgtctccacctcaggctccagcaccgactcctcctcaggctcctgcaccgactcctcctcgggctcctacacctactcctccgcaagctcctcttccggcaccttcaaagtcaagggcccccccagctccaccgcctgcccacacaagggcaacgaagaaggcgaaagttgatgccgccaagaacaaggacccgggaagtcaagagacaattcaagccttgaagtccagaaaagaagattgctatagacccgagtgtcaggaacttcttcaggggtatgtctgcacctgtcaagaggccatcaagctatcggactatgagcgaacgctgaagaaagcatcttctgcaaagtccaaaccagtccctcagcttggagagcaaccaaaccaggagatcgagccgttggtgaacggtgaagacatgacgatagaagaatttattactgacaccggtctaactacggatcaattgctaggagtcgaaccaatagaaaaggcggaagtgaaatacatgtacgaactcggtaaaccgcttgtcaagcccgagctggtgcagtccctacccacacaaatgtacaagttccatcagctatacatagagatgagcaccaccggtagagagatgattggagcgaggatcagggacccagacttcttgcaaggagatgacattctctggatcaatttcaagggaatctacgaactatacgagctggacgccctcgacgtctctattatgagttgctggattttaatggagattcaaagggcccgacggcggagggtttttgatactggattcatcgaccctcggaaagtaaacgtcgcaatgctcgaccaatatccgcaagccacagaggacaatctcgtccatctccttcaggcgcagcattacaagacattccactgggtgcttttactcttcgacctgtcggcctgcaccatcaacgtatatgactcaatggataaaaaagagtctacgtttgacaaggttttcgaacttatagacagggcttggtattggttccgtcatttggtccacggcaactggagagaaagacttaggcggaagttcaaatttccttgcgcaaagcaaaagcagggaactaacttgtgcggctactacgtgtacgagtattgccactgccttgcagaccaaatcatcaccacaagagagctcgattttattcgcatgagggataacctgaccacacacaaggaatttatcgcggcggttcaagaacaactcatgggattcatcaacgaagaaatccttgatcccaagggtgaattctactacgacggaaacacaattcatagatccttagcttctgagctagcgactactactacgtcgaaatcgtag

SEQ ID NO: 93077 - DNA, 3225 bp, Oryza sativa
  Clone ID: PAT_MRT4530_91497C.1
atgagcactagttgtagcagtagcggtgcccttcgcgccgccgccaccaaagcgctgctactcgtcgtcttcgtctcgctgtcgcgtccatttccgtgcacggcgcgcgacagtctcctccggggcgcctccatcgccgtcgaggaccacgccaccgacgtcctgctctccccggacggcaccttcgcctgcggcttctacggcgtctcgcccaccgtcttcaccttctccgtctggttcgcgcgcgccgccgaccgcgccgtcgtctggtccgccaaccgcgcccgccccgtccacagcaagcgctcccgtctcaaactcagcggccgccgcggcgcgctcgtcctcaccgactacgacggcgaggtggtctggaactccaccagcttcgaccaccccaccgacacactactgcccacgcagcgcatcgccgccggcgaggcgatggtctcggcagacaagatcctcgccgccggcttctacagcttccgcttcagcgactacgccatgctgtcgctggtgtacgacaaccatgagatgtgcagcatctactggcccaacccctactacagctactggcagaacagtcgcaagatctacaacttcacccgggaagctttcttcgacgcctccggccatttctcgtccagcgacaacgccaccttcggcgccgccgatctgggcaagaatgtcgccgttaggaggaggctgacgctggacacggacggcaacctcaggctgtacagccttgacgaggtcgccgggacatggttggtgtcgtggatggcgttcagcaacccgtgcatcatccacggcgtgtgcggcgccaacgccgtctgcctctactcgccggcgccggtgtgcgtctgcgcgccggggtacgcgcgcgccgacccgagcgactggagcagaggctgccggccaacgttcaactccggtgacggcggcggccggccgcgggcgatgaagctggtggcgctgccgcacaccgacttctggggcttcgacatcaacagcagcgagaacctgtcgctggacgagtgctcgacacggtgcatgagcgagccgtcgtgcgtggttttccagtacaagcagggcaaaggtgagtgctacccaaaaagcctcatgttcaatggcagaacgttccccggcctgcctgggacggcctatctcaaggtcccggctgatctcgacatgccagaaattcacatccaccaatggcaaaaggacggcgatcgccacgccattgccattcaggaagacattgtcggatgcggtggcatgagctcaccggagttcttgctcaatgtctcgaatgcgtcatcgagcaaaagtaatcagggcaagtcgatatggttctacttctacggatttctgactgcattttttgtcattgagagtgagatcggccgtggtgggtcaggtgttgtgtacaaaggaattctagatgatgagaggacggtggccgtcaaggtgctacaagatgtgaagcagggtgaggatgtgttccaggctgagttgagtgttattggtagaatttatcatatgaatcttgttagaatgtggggtttttgctcagaaggaatacataggattttagtctatgagtacattgagaatggatcattggccaaagtactatttcaagggagggattctggtatgtttcttggatggaagcaaaggttcaacattgctctaggtgttgccaaggggctggcatatcttcacaatgagtgccttgagtggatcatccattgcgacatgaagccagagaacatactattggatgaagatatggagcctaagatcactgactttggcttgtccaagttgttgaatagagacgggtctggttctgacatgtcatggattcgggggacaagaggatatatggctcctgagtgggtttctagccttccaatcacagagaaagttgatgtgtacagttatggagtggtgcttcttgaactggtgaaaggggtgaggatttcagattgggtgttggatgggaaagaggaactagaagccgaattgagaagtgtggttaagatggttgtcagcaaacttgagagcaacatagaatccttggttgcggatttgatggatgatcggttgcatgatgctaggatgattgctgattatgctcactttggtgatgtcatcaccttcgacactacattcgggacaaacaaagaaagtagaccttttgggatgcgaagcccacaattaagtgaaagtttgaatagtaacttgaaaggtcatttgaaatcagatcttgacatcggcaggttccttaatcgtgtagagcgtgttgttgaagaaaagagagagaaggaattgcaatctgaatatgagtcaagaaaaaagttgccaagaattatgatgatgacacctatgttggtacaggcaagtaagctttacacacctgctttatttgaagtcttccaagctgaatatgagaaatccatggctacctatacgaaaggatcaaatggaagtaatgatttcataattgcaattggctcacttgatgatcagttcatacttgaagatgagcacaaggtgactgccaacccttttgatcagaccgtgtcgtgtagttgtccaatgtttgagagaataggtctactgtgtagacatgccttgaaagctcttgatttagtgaacattaaattgctgcctgaaaaatatgtattgaagcgttggactcgagaagcaaaatgtggagctattcaagatatgcatggcagacaaatagtggaagaccccaagctgagtactactcttaggtacagatatctgtaccaacaatttcttcctttggcttccagagctgtagactttgaagaatgttacttgcttgtggaagaagcacttcatgccgttagtaaaaaagttgaggacaaaataaaacaaacttacagtgatggcattgcaaagtcgaatgatcagtcaacatcccagttagctcagaacttggcacatgtctctggtctgaagaaaaaggagagccggaaacgtgtaacaaaacggaaaacaaattggattgataaactgcagaaaacaaaaaagagaaagcctgaagaaaaggcagaggaggaaaacttgcaaactgatgtggaagaacatcaagaatgtgaagcaattagcagctatgcccaacttctactggaactaactgcgcaggttaccatgttccgtagagtccgtacacatagttaa

SEQ ID NO: 93078 - DNA, 5809 bp, Oryza sativa
  Clone ID: PAT_MRT4530_91498C.1
atggatcagcaatggatgtacgctgaccggcggtccaaagagtttattgacggcgtgcactattttttgagagtggccgaagctaacaggcaaaggggttttatttgttgtccatgcaataagtgtaagaatcagaaggagtattctgtatccaggactattcatttccacttgtttaagtcggggttcatgccaagctataattgttggacatcccacggagagcaaggtgttgaaatggaagaagatgaagtggaagacgacaatattccggactttgctcagtatgttggatttgaaggaaatcaaacgggcgaggaggaaatagctgctgatggtaacgacgttgcggatgatcttggtcagatgttgcaggacgtcagggaggactgcgaaagtaaaaaggaggcccataaattggacaagatgttggaggaccacagaacttcgttgtacccaggttgcgagcaggggcacaaaaagttggataccactctggagttgttgcaatagaaggcaaaaaaatggggttagtgacaaggcatttggcgatttattgaaactcgtcaagaacattcttctggggggaaacaaattgcccgagacaacgtacgaggctaagaagatagtggcaatttcatatgttaattagagtttttaacatttaatttactatcattcatatgctaattataattgactggagaatttttaaaagtattaaatttaatatatttttaaaactatcattcatatattagagtttttcacaatttaatttactatctttcatatgctacttatatatgactattcgaatttttaaaaggtttaaatcatgcatgtggcatttacatatgttaattagagtttttagcatttaatttaatataattcctatgctaagtacatatgatgattacaatttttattaattttaaatcatgcagtatgtacatacatatcttaattagagtttttaccaatataataatatcattcatatatatgctaagtatatatgattattggaatttttattaattatatttgcttattacgatttatccacttaatttattacagacaaaaataatttttcgaagtaattgtcattaatctttgtactttaaataatgttaatgcattaacttctattttataaacacatatgtaagcgaaaatcatatgcagtgctataatctttagtcccggttcttaaccctaaccgggtttaaaaagaatttcgaaatagcgggaaaagatatctttactcccggttgttctcaacaaccgggagtaaagatccgggcgtatatatattcccggtgcgccctcgtcttcttcaccaacacttagacgttttcggccgatcgatctctctcggcctctctccttcgccacgccgccgctgctttcgccgccgcgcgcgcaatgccgccgccgccacgccacgccgccgccgccgtcgccacgccgccgccgccaccgccgccgcgccaaccgccgccccgatgccgccacaccgccgttaacgaacgagaacaagaacgatcgaacgaacgagagtgagaacgaacatgtcaacgtacgttgccgcgagaacgtgaactagaacgagaacgatcgaacgaacgagagcgagaacgaacacgtcaacgtacgttgccgcgagaacgtgaacgagaacgagaacgatcgaacgaacgagagcgagaacgagaacgatcgaacgaagacaagcgagaacgtgaatgagaacgagcgaacgaacgaggacgaacgttaacgtgaaatgcaatatatatatatatatatatatatatatatatatatatatatatatacatatatatatatatttgttacttcgcatttatccaaatacatctttttgtatcttgcaaaaaagacgtgttgtcggagtcgtccgtcaagcctgagtggaagagctagccctagaaggaattggagcaggcaagtgacgtaataatataaatgattgttatatttgtaatgcaattaattaagattattagacctgtaattagacttatcatataagattgtgtagtgttctaatattatttgagttttaatataagattattttattgcaaattagacttagtatgacattattgactacggaattggtgcgactcctatcaattgactattgtagtcttaattagacttagcatatacgcacgaaacacttagcatacatgactattttagtcttaacatgtaatattatttgagttttaatataagattactttatttgtaattagacttagtatgtaattattgactacggaattggtgcgacaagtagcaattgactattgtagtcttaattagacttagcatatacgcacgaaacacttagcatatacatgactattttagtcttagcatgcatgtaatattatttgagttttaatataagattattttatttgtaattagacttagtatataattatttactagctagggttgtataatatacgtcacctagacttagcttatatcatgatttgtaattagacttagcacgtaaggttgtgtagggttctaatgtacgacatttacacttagcatacatgacttagattgttaaaacataaatgtctcgtaacttagcagatgtttcttgtatcaacagatggctgaccgcgatgaggaacagatattgtacgatacaatcgcggagggaagcagccagtactggaatgaagaagaggggaacgaggatccaaaccagtacttgaacgaggaagggaacgtggagagggatgcggaggggaaccagcaggggcacgtggaaagggatgtggaggggaaccaggaggaggaggctagtggtagtcaaccctccgttggacagaacagggcacgcgggcaacgaggtgcagcgaagaagcttgagggtcagcacatcataacggaagtggaagaagatggacgtcctagtgccccggccgaagccgccaagaactatgtacgtcacagcggttgggttgtgcgggataacgtgcctgtcagtacggtgtactggtgaagaacaagggcacgcggagatcatgagagctttgtcccagattcggagaaagagatgctgtggaccacaatgctcgagacattcacccttcctgcgggtacagaggacaaagtgaaaaggtggactctgaagaaaatggcagaacagtttcagagcttcaaggagatctgtaccggaagtatatactgaaggggcagacaccgaacttcgacacattcccaaagctaagggatcactgggacgagttcgttgcatataagacaggtgaacaagggcaggcgatgatggaaagaaacaaagaaaatgccgccagaagaagtaccatcaccacttggggtcaggaggctatagcgtcgcgatgcagcccgtgggagcagatggaggctagcttgattgagaggggtatcgaaccggcaacagccaattggccggaacgatcgaagttctggtactatgctcacggtggaacgctcaacccagctgatggctcactggtcttcggcgatcagatacgagaggctgcgcgacgactaacagatgcagtggaagcctcctctcagggcacgttccgaccagacagagatagggacgagctgacactcgccctgcagactccagagcatccaggacgaacacgagggaaaggggtgattccttggaagattggtttcaaggaggacatccacacgtacaggagtcggatgaggagcaagagagataccgaggcgaagattgcagacctagagttccgggtatcgagctacgaactcaacatgcaagaggaggtggcaaggaaggttgatgaacgcatggccgcacatcggtcccatgatccccagccgaccattcctcctgcaatggtgagcccgtcaggaaaccgtagcagctgcgcctcaacggggcaggtaggatcacagagcatggacgccatgcaaacacaggacgaatcgacctgtcccgttgatgacatcactcagcggacaccatgtgagctgcatattcctttcaagaacttatcaataaaggtggcgtcgggcatggccatcccaacggacccttcaggtacttaccactgcaggccgattccagcaggatactcgaaggtcgaagttgagttggtcgaaggcgcgtacgaggacctcgagctggattaccctggaggagacggtgagacgcatctacgagacacatgccatgccattattctatggcgcaggcggtacatcatcctccctgggcgacaagcggcgtctcgtgccccatctcctccggctccgccatctcctcctcaggatcctgcaccgtctcctcctcatgctccgccagcaccgtctccacctcaggctccagcatcgactcctcctcaggatcctgcaccgactcctcctcgtgctcctacacctactcccctgcaagctcctcttccggcaccttcaaagtcaagggcccccccagctccaccgcctgcccacacaagggcaacgaagaaggcgaaagttgacgccgccaagaacaaggacccggggtacgattgcacgcaagaggagcttgacgcttacgttgcatcagaagtcaagagacaattcaagcctcgaagtctagaaaagaagattcctatagaccccagtgtcaggaacttcttcaggggtatgtttgcatctgtcaaggaggccatcaagctatcggactatgagcgaacgctgaagaaagcatcttctggaaagtccaaaccagtccctcagcttggagagcaaccaaaccaggagatcgagccgttggtgaccggtgaagaaatgacgatagaacaatttattactgacaccggtctaactacggatcaattgctaggagtcgcaccaatcgaaaaggcggaagtgaaatacatgtacgaactcggtaaaccgcttgtcaagcctgagctgctgcagtccctacccacacaaatgtacaagttccatcagctgtacatggagatgagcaccaccagtagagagatgatcggagcgaggatcagggacacggacttcttgcaaggagatgacattctctggatcaatttcaggggaatctacgaactataccagctggacgccctcgacgtctctagtatgagttgctggattttaatggagattcaaagggcccgatggcggagggttttcgatactggattcatcgaccctcggaaagtaaacgtcgcaatgctcgaccaatatccacaagaaacagaggacaatctcgtccatctcctgaaggcgcagcattacaagacgttcatactgttgccatacaacacagaattccactgggtgcttttactcttcgacctggatgcctgcaccgtcaacgtatatgactcaatggataaaaaagagtctacgtttgacaaggttttcgaacttatagatagggcttggtatcggttccgtcatttggtccgcggcaaatggagagaaagacttaggcggaagttcaaatttccttttattcgcatgagggataacctgaccacacacaaggaatttatcgcggcggttcaagaacaactcatgggattcatcaacgaagaaatccttgatcccaagggtgaattctactacgacggaaacacaattcaccggtccttagcttctgagctagcagcgagtactactacgtcgaaatcttaaactactactcaactacacttatgtcgccgccgctcgcgggtatccatctcttctcttttagttgaaccaa

SEQ ID NO: 93079 - DNA, 6204 bp, Oryza sativa
  Clone ID: PAT_MRT4530_91499C.1
atggatcggcaatggatgtacgctgaccggcggtccaaagagtttattgacggcgtgcattattttttgagagtggccgaagctaacaggcataagggttttatttgttgtccatgcaataagtgtaagaatcagaaggagtattctgcatccaggactattcatttccacttgtttgagtcggggttcatgccaagctataattgttggacataccacagagagcaaggtgttgaaatggaagaagatgaagtgtaagacgacaatattctggactttgctcagtacgttggatttaaaggaaatcaaacgggtgaggaggaaagggatgctgatggtaacgacgttgcggatgatcttggtcagatgttgcaggacgccaaggaggactgcgaaagtgaaaaggaggcccataaattggacaagatgttagaggaccacagaacgtcgttgtacccaggttgcgagcaggggcacaaaaagttggataccactatggagttcttgcaatggaaggcaaaaaattgtgttagtgacaaggcatttggcaatttattaaaactcgttaagaacattcttccggagggaaacaaattgcccgagacaacgtacgaggctaagaagatagtctgccatctaggactggaagttcagaagattcacgcatgtccgaaagattgtatcctatatcgcggtgaggagtacgagaacctagaagcatgccatgtttgcaaagcactacgatacaagattagacgagacgatccaggagaagttgatgggcagctagcaaagaagataattcctgctaaggtgatgtggtatttccctataataccacggctaaggcgtttgttcaggaacaaggggaatgctagaatgatgcgatggcacgctgcagagcgtcaacaagacgggatgctgagacaccccgccgatggttcgcagtggcgaaacatcgacagaaaatttaaagactttggaaaggacgcacgaaacatacggtttggtttgagtacggatggcatgaatccttttggagagatgagcagcggccatagcacttggcccgttacgatgtgtatctacaaccgtacgaagcctaaacatcgcagcggaaaaacagtgtttgctatggttaaagatcttaaagtagtgttcagaaaggggcctggaagccagcctatagagagcgaagatggtcacgccgcgatgtggaaaaagaactctatattttgagaattaccctattgggaattcttggacgtccgccacgcaatcgacgtgatgcacctcactaagaacctttgcatagacctttttggcttcctaggtgtatatggaaagtcgaaagatacactggaagcacgtaatgatctgaagcatatggaacaacgcggcgaccttcacctggaaccaaaggagaaaggaagccattacttgagtccagccagctacactcttagcaaggcagagaaggaaaatatgtttgaatgcttggagtgcataaaggtaccgtctggatactccacgaatatcaagcgaataataagcatgaaggagaagaagttcacaaacctaaagtctcatgactgtcacgtgttgatgacacaactgctaccagttgtaataaggggtatccttctagacaatgtccgggcaacaataacaaagctatgtgcattcatgaacgcaatttcgcagaaggtcatcgatccggatagattagaagcccttcagaatgatgtggtgcaatgtctcgtcaattttaagttgatattccaccttcatttttcaatataatgacgcatctgctttgtcaccttgtcaaagagatccgtattctcgggcctgtgtacctacacaacatgtttcctctcgagaggtacatggacgttctgaagaagtatgttcgtaaccgtgctcgtccagaggcaagcatcgccaagggttatggaatagaggaggtcatcgaattttgcgtagaatttatcgaagaccttcgcccaatcggggtacctgaatcactccatgaagggagactacggggaaagggaactctcgaaaggaaagcaataatgagggtagacaacaatttattccgtaaagcccatttcactgttctgcaacactcttcattggtagctccttacatcgaggagcacttggctctagttcgcgccaggaacatcggtaagtccgatgcatggattacacggcatcacattgatactttccccacgtggctacgacaacatctcatgggtaacgagtcgatcaaccaacaacttgccttccaggcgaggggaccgtctgggtcgatcgcgacattccagggatatgagatcaatgggtacacattctacacgagagcccaagacatgaagagcacgaaccaaaacagcgttgttcttgtcgatgccatgggacatgatggaacaactgccacgtattacggtgccatcgaggatatatgggaacttgactatggtcctctcaaggttcctctattccggtaccaatgggttaggttgactggtggaggcgtaatgattgatgacagtggtatgacaactgttgaccttaacaaggttggatactcggacgaaccttttatccttgccaatgatgtaacgcaagtctttttcgtgaaggacatgtctagcaaaggaaagaagggcagagggcctaaagagcctaagcgtcaagtggttctcccagcgcgccctcgtcttctccaccaacacttaacgttttcggccgatcgatctctctcggcctctctccttcgccgccactgcctagggcaaatccccgcgtcgacgccgccgtatctcgctgtcgtctcgagctcatcgtcctcgccgccgcctccgcctcctccgccgccgccgcctctcccagatgtttcttgtatcaacagatggctgaccgcgatgaggaacagatattgtacgatacaatcgcggagggaagcagccagtactggaatgaagaagaggggaacgcggatccaaaccagtacttgaacgaggaagggaacgtggagagggatgcggaggggaaccagcaggggcacgtgaaaagggatgtggaggggaaccaggaggaggaggctagtggtagtcaaccctccgttggacagaagagggcacgcaggcaatgaggtgcagcgaagaagcttgagagtcggcacatcataacggaagtggaagaagatggacgtcctattgccccggccgaagccaccaagaactatttacgtcacagcggttgggttgtgcgggataacgtgcctgttagtacggtgtactggcaaagaacaagggcacgtggagatcatgagagctttgtctcagattcggagaaagagatgctgtggaccacaatgctcgagacattcacccttcccgcgggtacagaggacaaagtgaaaaggtggactctgaagaaaatggcagaacagtttcagagcttcaagggagagctgtacaagaaatatatcctgaagaggcagacaccgaacttcgacacatttccaaagctaagggatcactgggacgagttcgttgcatataagacaggtgaacaagggcaggcgatgatggaaagaaacaaagaaaatgccgccaagaagaagtaccatcaccacttggggtcaggaggctatagcgtcgcgatgccgaagtgggaggagatggaggctagcttgattgagaggggtatcgaaccggcaaccgccaattggccagaacgatcgaagttctggtactatgctcacggtggaacgctcaacctagctgatggctcactggtcttcggcgatcagatacgagaggctgcgcgacgactaacagatacagtggaagcctcgtctcagggcacgttccgaccaaacagagatagggacgagctgacactcgccctgaagactccagagcttccaggacgaacacgagggaaaggggtgattccttggaagattggtttcaaggtggacatccacacgtacaggagtcggatgaggagtaagagagataccgaggcgaagattgcagatctagagttccgggtatcgagctacgaactcagcatgcaagaggaggtggcaaggaaggttgatgaacgcatggccgcacatcggtcccatgatccccagccgaccattcctcctgcaatggtgagcccgtcaggaaaccgtagcagctgcgcctcaacagggcaggtaggatcatagagcatggacgctatgcaaacacaggacgaatcgacctgtcccgttgatgacatcactcagcggacaccatgtgagctgcatattccttacaagaacttatcaataaaggtggcgtcgggcatggccatcccaacggacccttcaggtacttaccactgcaggccgattccagcaggatactcgaaggtcaaagttgagttggtcgaaggcgcgtacgaggacctccagctggattaccctggaggagacggtgagacgcatctacgagacacaagccatgccattattctatggcgcaggcggtacatcatcatcccttggcgacaagcggcgtctcgtgcaccatctcctccggctccaccatcaactcctcaggatcctgcaccgtctcctcctcattatccgccagcaccgtctccacctcaggctccagcaccgactcctcctcagtatcctgcaccgactcctcctcgggctcctacacctactcctccgcaagctcctcttttggcaccttcaaagtcaagggccctcccagctccaccgcctgcccccacaagggcaacgaagaaggcgaaagttgacgccgccaagaacaaggacccggggtatgattgcacgcaagaggagcttgacgctcatgtggcatcagaagtcaggagacaattgaagcctcgaagtccagaaaaaaagattcctatagacccgagtgtcaggaacttcttcaggggtatgtctgcacctgccaaggaggccataaagctattgaactatgagcgaaccctcaagaaagcatcttctggaaagtccaaaccagtccctcagcttggagagcaaccaaaccaggagatcgagccgttggtgaccggtaaagaaatgacgatagaacaatttattactgacaccggtctaactacggatcaattgctaggagtcgcaccaatcgaaaaggcggaagtgaaatacatgtacgaactcggtaaaccgcttgtcaagcctgagctgctgcagtccttacccacacaaatgtacaagttccatcagctttacatggagatgagcgccaccggtagagagatgatcgaagcgaggatcagggacacggacttcttgcaaggagatgacattctctggatcaatttcaggggaatctacgaactataccagctggacgccctcgacatctctattatgagttgctggattttaatggagattcaaagggcccgacggcggagggttttcgatactggattcatcgacactcggagagtaaacgtcgcaatgctcgaccaatatccacaagaaacagtggacaatctcgtccatctcctgaaggtgcagcattccaagacgttcatactgttgccgtacaacacagaattccactgggtgcttttactcttcgacctgtcggcctgcaccgtcaacgtatatgactcaatggataaaaaagagtctacgtttgacaaggtttatgaacttatagatagtgcttggtatcggttccgtcatttggtccgcggcaaatggagagaaagacttaggcggaagttcaaatttccttttattcgcatgagggataacctgactacacacaaggaatttatcgcggcggttcaagaacaactcatgggattcatcaacgaagaaatacttgatcccaagggtgaattctactacgacggaaacacaattcaccggtccttagcttctgagctagcagcgagtacaagttccaatgaaccaacactggagaatgtatcgcataaactgaagggcatggaaagttggtatgaagagttgatgcgtaatagtaaatcatacaaggaaagcatagataaacatttaaaaaccttaagtgaaagcctggctagaatttctaggttctatggaggtcttaatagagagattcgggatatttttgaatataaagaatacaataccgtgaatagattattccattt

SEQ ID NO: 93080 - DNA, 1542 bp, Oryza sativa
  Clone ID: PAT_MRT4530_9149C.1
atggcgacggtgacgcggctgtgcgtgacgaagagcgtccccacggtgaacggccagttcccggggccgaagctcgtcgtgcgggagggcgacaccctcgtgatcagggtcaccaacaacatcaacaacaacgtcaccttccactggcacgggattcggcaggtgcggagcgggtgggcggacgggccggcgtacatcacgcagtgtccgatccgctccgggggaagctacgtgtacaggttcaccgtgacggggcagcgggggacgctgtggtggcacgcgcacttctcctggctccgcgccacgctctacggcccgctcgtcatcctcccgccccgcggcgtcgcctacccgttccccaagccccatcgcgaggtgcccctcctgctcggtgagtggttcaacgccgacccggaggccgtgatcaagcaggccctgcagacgggaggagggcccaacgtctccgacgcctacacgttcaacggcctccctggcccaacctacaactgctcctcctccaacgacacgttcaagctgagggtgaggcccgggaagacgtacctgctgcggctgatcaacgcggcgctcaacgacgagctcttcttcggggtggccaaccacacgctgatggtggtgcaggcggacgccagctacgtcaagccgttcgccgccacggcgctcgtcatctcgccggggcagaccatggacgtgctcctcactgcggcggccaacaacccgccgtcccgctccttcgccatcgccgtcgcgccgtacaccaacaccgtcggcacgttcgacaacaccaccgccgtcgccgtgctcgagtactacggcgccgcgacgtccgccgccgcgctccggagcctcccgctgccgtccctcccggcgtacaacgacaccggcgcggtggccaacttctcggcgagcttccggagcctcgcgagcgcgcagtacccggcgcgggtgccgcggacggtggacaggcacttcttcttcgccgtcgggctcggcgccgacccgtgccagagcccggtgaacgggacgtgccaggggcccaacaacaccaggttcgcggcgtccatgaacaacgtgtcgttcgtgatgcccaggacgtcgctcctccaggcgcactaccagcggcggtacaacggtgtgctcgcggccaacttcccggcggcgccgcggacgccgttcaactacaccggcacgccgccgaacaacacgttcgtgacccacggcaccagggtggtgccgctcagtttcaacacaaccgtggaggtggtgctgcaggacaccagcatcctcggcgccgagagccacccgctgcacctgcacggctacgacttctacgtcgtcggcaccgggttcggcaactacgacgccagcaatgacaccgccaagtacaacctcgtcgaccccgtgcagcggaacaccatcagcgtgcccaccgccggctgggtcgccatccgcttcgtcgccgacaaccccggttggttacccgctctatacttataccttcatttaaaaagggaatttttatga

SEQ ID NO: 93081 - DNA, 483 bp, Oryza sativa
  Clone ID: PAT_MRT4530_914C.1
atggaccatttgatttttcctcggaacgtcaagaaccgttggatcttttaattggagaaatatcttcctagttcttcaagaaccttattctgtaaaagaatccttctatgtccgtctcacggaggaggctgcagggacccccaacccaaggcaccgctcatgcctgtcaccgcgtcgactccgcatctgccgctgtgcctccccatcgccgcttccttccttccgccttgctgccaccaccgggccgtcctcctccccatgccaagcaccaccgctggaccatcttcttcccatgccaagcgccaatgcaatctcttccttcccatctccagtggcgagacgctctcggatcccaaacgatggcagcgaatcttctcctcatccacatccctactgccacctccttggctccatgctcccataccaacctccagagccatcacatccatcaccccagatccatcactcccgcaccgccttatt

SEQ ID NO: 93082 - DNA, 1035 bp, Oryza sativa
  unsure (1)..(1035): unsure at all n locations
  Clone ID: PAT_MRT4530_91500C.1
agcgctcttggtggtcagntntagctttgaccagccgagctccccggggcgccctctagactagtgggtccnccggctgcaggaattcggcacgaggtccagtgaagttagaagaagggcattatctgccctcaagggtgctgcaaaggaaaaccccgcagccattatggggcaagcttcaatttttggtcctgcattggctgattgtctgaaggatggaagtacccctgtcaggcttgctgctgaacgatgtgctttgcattcgttccagttggcaaaggggacagaaaatgttcaagcagcccaaaagtatatcacaggtttggatgctagacgactagctaaatatcccgaagagagtgatggtgaagatagtgaagataatgctagtggctgaagacgtactcacttgtttacttctttgcggattgctcacaagttttgagacgaggattgttaaagttttgagaagaggattgttagagttgcagctaacttgatgctcattgcgacgacatataaatcatactactcctacattgtaggtgaatatttataccgaacatacacgttggatgccatatttcgtagcaatggggtctttcttcggaactgtagatagaaattaaagagaatattggtcgctgggaggcccccaaatatcagttctcttgtatttccttctattactggagacagggaaagtggatgtactaaaagataatccttgtttcacatagagatgtgatgtgtgcgcaattgatgatcaataactctcatagactagttactatccagtgaaaaaaaaaaaaaaaaacaaaaaaaaaactaggtgggccgtcccattcgctatagcggtacaccgcctccggcggctcgcgcgccacaccgaccccgcagcctgccaatctctcccacctcgcccgccgcacctgaaggcaagcgtcctaccatctccactgctggcctcgtagagcccccctctgcttccacacctctccccgccgccactgggtctccgatcgctgtcgcccg

SEQ ID NO: 93083 - DNA, 1807 bp, Oryza sativa
  Clone ID: PAT_MRT4530_91501C.1
gcagaaataagggcaatgccgccgacgcgagagccagcccatccgcctcaccacctcccgtccctcttccggtccaaatccaaccctcccctcggccgctccgcctgcgccgccgccgccgccgcccccaccggagcgacggcgagggagggagtgggggagaagcaggaggaaaccccaaaccgtcccggtcgcggcctcggccacccggcgcccgctgttccccccggtcgtccgtccggcgtccgcccgccccgcccgacctacccttgcccccgccgtgcctcggctccgttccgggtggttccttggctccggtgtccgctgagctctagattcttaaggctgcatgtgcagtacgtacctgatatgtgtttgtgtcaggtaaggcttttcctgtcagaggattccccctctcaagctggattaagaccgcaggataatctccaagcaaaaggctcatggttactgcatgcagctggcccaagctcagatgattccttgcctccaggctttgagtcattgccgccaagcaatgacctcaaaattgacatgtctcaaatccccctaattaggtggaaatgccccccacatatagtattggagcaggattggcatattgttgctggagaagaaagtagggagattgaaattcaaaatgagagaataaatggagcgcttgaggcaatttacccacgtccatcgaacattccgccaaacccatttctttctcttgatgtgaaagatgcccattatgacgattccaaaaccctgttggttcctttgatccctcttgaagatgatgatgcatctgatcaattggaaggaccaacccttgatctaccaagccattacaacataacaggacctcaggctgcagtctcagcaacagtcactgcaattatgcaaaccatacagagtaatcaaaatgggagcatggctgaccaaaacgggagcacgattgaccaggaactactcttcaaaatactaagtgatccttcacagcttcagaggttaatgaaagaatgtggcccagtcagacatgaacaatcagctagtagttctgttgttgccccatctaccctgccgcctccaccaccaatgatgaatcggccaccttcaaccattccttcagttgctatgaatcatccaccaagttcaagcccagcaatgaactttggaagtgccctgccaagttcaagcccatcagtgaactttggaagtgttccagggaggggtgtcggctattataaaaccctcatccatcagcatggaggggagagactggaacaaccatttgagcagcatggaatgcagtttggtatgtaccgccaacctggtcctccacaaaatggcggtattgatgccatgaacggtgctgctgctatggtgagcagagatggcaaggtgaggccgatgaaaccgtgtgcatactttaacagcccgaagggttgtcgaaatggtgctagttgcacattcctacatgatgcgtcagccccaacaagaaaagatcatcagaagcaaaagggatcaaaaaggataaaattagacaacacaatgggcggtcgaaattgagctgaagccgccatttaatttttgactgttctttggttcatctatcatggatcagtaaatattactccgttagctcttccattagcctccttttttatgttcgtcgaggagaggagatgttctgaaagaaagcaaaatatttcatgattgattggtgctcaaatttttactgaatcaagttcgagctcgatatcttgttctgaattcaaaaaaaaaaaaaaaaaaaaaaaaa

SEQ ID NO: 93084 - DNA, 5460 bp, Oryza sativa
  Clone ID: PAT_MRT4530_91502C.1
tatggcctaagtaccagtgttttagcgcctactgtacgatttttttttcatttcatgtagatggatcggcaatggatgtacgctgaccggcggtccgaagagtttattgacggcgtgcattattttttgagagtggccgaagctaacaagcagaagggttttatttgttgtccatgcaataagtgtaaaaattagaaggagtattctgcatccaggactattcatttccacttgtttgagtcggggttcatgccaagctataattgttggacatcccacggagagcaaggggttgaaatggaagaagatgaagtggaagacgacaatattccagactttgctcagtacgctggatttgaaggaaatcaaacgggcgaggaggacagagatgctgattataacgacgttgcggatgatcttggtcagatgttgcaggatgccaaggaggactgtgaaagtgaaaagggggcccataaattggacaagatgttagaggaccacagaacgtcgttgtacccaggttgcgagcaggggcacaaaaagttggataccactctggagttcttgcaatggaaggcaaaaaatggtgttagtgacaaggcatttggcgatttattgaaactcgtcaaaaacattcttccggagggaaacaaattgcccgagacaacgtacgaggctaagaagatagtctgccctctaggactggaagttcagaagattcacgcatgtctgaatgattgtatcctatatcacagtgaggagtacgagaacctagaagcatgccctatttgtaaagcactacgatacaagattagacgagatgatccaggtgaggttgacgggcagctaacgaagaagagaattcctgctaaggtgatgtggtatttccctatattaacacggctaaggcatttgtttaggaacaaggggaatgctagaatgatgcgttggcacgctgaagaacgtcaacaggacgggatgctgagacaccccgcagatggttcgcagtggcgaaacatcgacagaaaatttaaaggctttggaaaggacgcacgaaacatacggtttggtttaagtacggatggcatgaatccttttggagagatgagcagcggccatagcacttggcccgttacaatgtgtatctacaacctccccccttggctatgcatgaagaggaagtacataatgatgccgattattattcaaggccccaagcaacctggtaacgacatcggtgtgttcctaataccactggtcgaagatcttaaactgttgtggaagaaggaaggtgtccccgtgtgggacgaggacaaacaggaggagtttaacctacgagcgctgctgttcgtaaccatcaacgattggcctgcacttagcaacctatccgggcagtccaacaaggggtacaaggcttgcactcactgtatggatgaaacagaaagtgtatatggaaagtcgaaagatacactggaagcacgtaatgatctgaagcatatggaacaacgcggcaaccttcacccggaaccacaggagaaaggcagccattacttgagtccagccagctacactcttagcaaggcagagaaggaaagtatgtttcaatgcttggagagcatcaaggtaccgtctggatactccacgaatataaagcgaataataagcacgaaggagaagaagttcacaaacctaaagtctcatgactgtcacgtgttgatgacacagctgctaccagttataataaggggtatcctcccagacaatgtccgggcaacaataacaaggctatgttctttcatgaacgcaatttcgcagaaggtcattgatccagataggttagaagcccttcagaatgatgtgaggtacatgggcgttctgaagaagtatgttcgtaaccgtgctcgtccagaggcaagcatcgccaaggggtatggaacagaggaggtcattgaattctgcgtagaatttattgaagaccttcgcccaatcggggtacctgaatcacgccatgaagggagactacggggaaaggggactctcggaaggaaagcaataatgacggtagacaacaatttattccgtaaagcccatttcacggttttacaacaatcttcattggtggctccttacatcgaggagcacttggctctagttcgcgccagaaacatcggtaagtccgatgcatggattacacggcatcacattgatactttccccgcatggctgcgacaacatctcatgggtaacgagacgattaactagcaactggccttcctggcgaggggtccatctggctcgatcgcgacattccagggatatgagatcaatgggtacacattctacacaagagcccaagacatgaagagcacgaaccagaacagtgctgttcgtatcgatgccatgggacacgatggtacaactggcacgtattacggtgccatcgaggagatatgggaacttgactatggacctctcaaggtccctctgttctggtgccaatgggttaggttgactggtggaggcgtaacgattgatgacagtgggatgacaacggttgaccttaacaacgttggatactcggacgaaccttttgtccttgccaatgatgtaacgcaagttttttacgtgaaggacatgtctagcaaaggaaagaagggcaaagggcctgacgagccgaagcgccacgtggttctcccaggcaaaagaaaaatcatcggagtagaggacaagactgacgaggattacgatcagtttgatgggcaaccccctttcacggtgacggttgaccctagcatcctcctatcaaacgaagacaccccttactcacgtagcgatcacaaggaaggaacaacatacttgaacgaggaggggaacgcggagagggatgcagaggggaatgaggaggggaacgtggagagggatgcggaggggaacgaggaggaggctagtggaagtcatccctccgctggacagaagagggcacgcggacaacgaggtgccgcgaagaagatagagggtcggcacatcataactgaggtggacgcagacggccgacctagtgccccggcacaaacagccaagaattttgtacgccacagcggttgggttgtgagggataacgtgcctgtcagcaaggtgtactggcgcagaacaagtgcacgcggggatgatgacagctttgtcccggaatcagagaaagagatgctgtggaccacaatgctcgagacgttcacgctcccttcgggtatagagaacatagtgaaacagtggactcttaagaaaatggcagaacagttccagaccttcaagggagatctgtaccggaaatacatcctgaaggggcagacaccgaacttcgacgtattcccgaagctaagggatcactgggacgagtttgttgcttacaagacaggtcaacaagggcaggcgatgatggaaagaaacaaagaaaatgccgccaagaagaagtaccatcaccacttggggtcaggcggctatagcgtcgcgatgccgaagtggaaggagatggaggcaagcttgcttgagaggggtatcgaaccggccaccgctaagtggcctgatcgatcgaagttctggtactatgctcacggtggaacgctcagcccagttgatggctccttggtcttcagcgatcagatacgcgaggctgcgaatcgactaacggacgcagtggaagcctcttctcagggcacgttccgacccgacagagagaaggacgagctgagtcggatgaggagcaagagagataccgaggcgaagattgcagatcttgagtacagggtatcgagctacgagctcagcatgcaagaggaggtggcccgaaaggtggatgaacgcatggcagcacatcggtcacacgatccccagccgtacatacctcctccaatggtcagcccatcaggcaatcgtagcagctgcgcctcaacggggcaggtggcgtcgggaatggccatcccaacggacatttcagggacttaccactgcaggccgattccagcaggatactcgagggtcgaagttgagctggtggaagccgtgtacgaggacctcgagttggactatccaggaggagacggtgagacgcatctacgagacacaagccacgccattatactatggcgcaagcggtacatcatcctccctgggcgacaagcggcgtctcgtgcaccatctcctccggctccgccgccacctcctcctgcaccatctcctccggctcctccggctcctccgcctcctcctccaccgtgtccgcttgcacctcccaagacaaggtctcgccaagctccacctcctgccagcacaagggcaacgaagaaggccaaagttgagaccaccaaaaacaaggagccgccgtacggttgcagtcaagaggagcttgacacttatgtggcaggagaagtgaagaggcaactcaagcctcggagtcctgaaaagaagatacctattgacccgagcgtgaagaatttcttcaagggaatgtccatcgcaaacaaggaggccttaaagctatcggactatgaccgaacacttaggaaagcctattacaagaagtccaaactagttcctcagcttggagaacaaccacaccaagtgaccggcgaagactttggcataacggatttcatttcggacaccggtctaaccatggctcagttggttggaggcgcaccaatcccgaaggcggaagtggcatacaagtttgaactcggtaaaccgcttgtcaggcctgagcagctgcagtccctaccgacacaaatgtacaaattccatgaacggtacatggaaatgagcgccaatggtagagagatatttggagcgaggatcagaaaccccgacttcttgcaaggagaagatgttctatggatccatttcaacgatgtcttcgatctgtaccatcgggacgccctcgacgtctctcttctgagcgcatggattttaatggagattcaaagggcccgacggcggagggtttacaatactgggttcatcgaccctcggaaaatcaacaccgaaatgctcgacaagtacgagaaagacacagaggacaatctcgtccatctcctaacgcagcagcattacaagacgttcatactattgccgtacaacacagaagtcactgtatacgactcaatgaataaagaggagaaggtttttgacaaggtcttccaactgatagacatggcttgggatcggttccgtcaattggtccgcgggacttggaaagaaaaacttggacggaggtttcattttccacatattcacatgagggaaaaactcccacacaaggattttatcatggctgttcaagaacaactgatggggttcatcaacgaagaagtccttaatcccgatggtgaattctactacgacggatcgacaattcgtaacgtcggtccttcctcttctgacgtaacgcaggcgtcgaagtcgtagcta

SEQ ID NO: 93085 - DNA, 253 bp, Oryza sativa
  Clone ID: PAT_MRT4530_91503C.1
atgtctttcgtgattagtctcatacttctcaccataataaatgatgctgtaattgataataacttgtttagctcctggtttggaatggtatattcctggtttggagataaaactgtgcagccgggaatggttgctcggaatggttgggcctatgcaacgggtatgttgtatagcgttggattaatattgtttaattaaatactttactgttttattaaattctgaagtatttgttaaatgccatttatgcaaa

SEQ ID NO: 93086 - DNA, 438 bp, Oryza sativa
  Clone ID: PAT_MRT4530_91504C.1
cggacgcgtgggcagcaacagtcactgcaattatgcaaaccatacagagtaatcaaaatgggagcatggctgaccaaaacgggagcacgattgaccaggaactactcttcaaaatactaagtgatccttcacagcttcagaggttaatgaaagaatgtggcccagtcagacatgaacaatcagctagtagttctgttgttgccccattggtatcaatcccaccaccccaaataactgcaagctctcctgcccccttctctgatcatgtcggaacctttcatggcatgaatcctaccctgccgcctccaccaccaatgatgaatcggccaccttcaaccattccttcagttgctatgaatcatccaccaagttcaagcccagcaatgaactttggaagtgccctgccaagttcaagcccatcagtgaactttggaagtg

SEQ ID NO: 93087 - DNA, 6400 bp, Oryza sativa
  Clone ID: PAT_MRT4530_91505C.1
atggatcggcaatggatgtacgctgaccggcggtccaaagagtttattgacagtgtgcattattttttgagagtggccgaagctaacaggcaaaagggttttatttgttgtccatgcaataagtgtaagaatcagaaggagtattccgcatccaggactattcatttccacttgtttgagtcggggttcatgccaagctataattgttggacatcccacggagagcaaggtgttgaaatggaagaagatgaagtggaagacgacaatattccggactttgctcaatacgctggatttgaaggaaatcaaacgggcgaggaggaaagggatgctgatggtaacaacattgcggatgatcttggtcagatgttgcaggacgccaaggaggattgcgaaagtgaaaagggggcccataaattggacaagatgttagaggaccacagaacgtcgttgtacccaggttgcgagcaggggcacaaaaagttggataccactctggagttcttgcaatggaaggaaaaaaatggtgttagtgacaaggcatttggcgatttattgaaactcgtcaagaacattcttccggagggaaacaagttgcccgagacaacgtacgaggctaagaagatagtgtgctctctaggactggaagttcagaagattcacgcatgtccgaatgattgtatcctatatcgcggtgaggagtacgagaacctagaagcatgccctgtttgcaaagcgctacgatacaagattagacgagatgatccaggagaagttgacgggcagctaacgaagaagagaattcctgctaaggtgatgtggtatttccctataataccgcagctaaggcgtttgttcaggaacaaggggaacgctagaatgatgtggtggcacgctgaagagcgtcaacaggacgggatgctgagacaccccgccgatggttcgcagtggcgaaacattgacagaaaatttaaagagtttggaaaggacgcatgaaacatacggtttggtttaagtacggatggcatgaatccttttggagagatgagcagcggccatagcacttggcccattacgatgtgtatctacaacctccccccgtggctatgcatgaagaggaagtacataatgatgctgattataattcaaggccccaagcaacctggtaatgacatcgatgtgtacctaaaaccactggtcgaagatcttaaactgttgtggaagaaggaaggtgtccccgtgtgggatgaggacaaacaggaggagtttaacctacgagcgctgctgttcgtaaccatcaacgattggtctgcacttagcaacctatccgggcagtccaacaaggggtacaaggcttgcactcactgtatggatgaaacagaaagtacgtatcttaagcactgtaggaaggttgtgtacatgggtcattgtcgattccttgcagcaaaccacccggtacggaagaaaggcaagcactttgaacataaggcggaccaccgcatgaagcctaaacatcatagcgggaaaacagtgtttgctatggttaagaacttaaagtagtgtttggaaaggggcctggcagccagcctatagagagcgaagatggtcacgcggcgatgtggaaaaagaactctatattttgggagttaccctattgggaattcttggatgtccgccatgcaatcgacgtgatgcacctcactaagaatctttgcgtaaaccttcttagcttcctaggtgtatatggaaagtcgaaagatacactgaaagcacgtaatgatttgaagcatatggaacaacgcggtgaccttcacccggaaccaaaggagaaaggaaaccattacttgagtccagccagctacactcttagcaaggcagagaaggaaagtatgtttgaatgcttggagagcatcaaggtaccgtctgtatactccacgaatataaagcgaataataagcacgaaggagaagaagttcacaactctaaagtctcatgactgtcacgtgttgatgacacagctgctaccagttgtaataaggggtatcctcccagataatgtccgggcaacaataacaaagctatgtgctttcatgaacgcaatttcgtagaaggtcatcgatcctgatagattagaagccctgcagaatgatgtggtgcaatgtcttgtcagcttttagttgatatttccaccttcatttttcaatataatgacgcatctgctttgtcaccttgtcaaagagatcggtattctcggtcttgtgtacctacacaacatgtttcctttcgagaggtacatgggcgttctgaagaagtatattcgtaaccgtgctcgtccagaggcaagcatcgccaaggggtatgaaacagaggaggtcattgaattctgcgtagaatttatcgaagcccttcgcccaatcggggtacctgaatcacgccatgaagggagactacggggaaaggggactctcggaaggaaagcaataatgacggtagacaacaatttattccgtaaagcccatttcacggttctgcaacaatcttcattggtggctccctacatcgaagagcacttggctctagttcgcgccaaaaacatcggtaagtccgatgcatggattacaaggcatcacattgatactttctccacgtggctgcgacaacatctcatgggtaacgagacgattaacaaacaactggccttcctggcgaggggaccatctggctcgatcgcgacattccagggatatgaaatcaatgggtacacattctacacgagggcccaagacatgaagagcaggaaccagaacagtgctgttcgtatcgatgccatgggacacgatggtatgactggcacgtattacggtgccatcgaagacatatgggaacttgactatggacctctcaaggtccctctgttccggtaccaatgggttaggttgactggtggaggcgtaacgattgatgacagtgggatgacaacggttgacgttaacaaggttggatactcggacgaaccttttgtccttgccaatgatgtaacccaagttttttacgtcaaggacatgtctagcaaaggaaaaaaaggcaaagtgactgacgagccgaagcgccacgtggttctcccggcgcgccctcgtcttctccaccaacacatagccgattttcgatctcgatcggctcctccttcgccgccgcgccacgcctagggcaatcccgcgccgacaccgccgtcgtctctcgccgtcgctcggtggtcctcgccgcctccgccgcagacgccgccgccgcacttcttgctaacaaatattttatgtatgcacagatggctgatcgcgatgaggaacatatactatacgatacaatcgcagagggaagcagccagtactggaacgaagaagaggggaacgaggatccaaaccagtacttgaacaaggaggggaacgtgcatagggatgcgcaggggaacgaggaggggaatgatgcggaggaggctagtggaagtcagccctctgctggacagaagagggcacgcggacaacgaggtgccgcgaagaagatagagggtcggcacatcattactgaggtggacgaagacggccgacctagtgcaccggcagaagcagccaagaattttgtatgccacagcggttgggttgtgagggacaacgtgcctgtcagcacggtgtactggcgcaaaacaagggcacgcggggatgatgacagctttgtcccggactcagagaaagagatgttgtggaccacaatgctcgagacgttcacgctacccgcgggtacggaaaacttagtgaaacagtggactctgacgaaaatggcagaacagttccagagcttcaagggagatctctacaagaaatacatcctgaagggactaacaccgaacttcgacgtattcccaaagctaaggaatcattgggacgagttcgttgcttacaagacagggcaacaagggcaaacgaagatggctagaaacaaagaaaatgccgccaagaagaagtaccatcaccacttggggtcaggcggatatagcgtcgcgaagctgaagtgggagaagatggaggctagcttgcttgagaggggtatcgaaccggccaccgctaattggccggatcgatcgaagttctggtactatgctcacggtggaacgcttaacccagttgatggctcccttgtcttcagcgatcagatacgcgaggctgccagtcgactaatggacgcagtggtagcctcttctcagggcacattccgacccgacagagagaaggatgagctgtcactcgccctacagactcccgagcatccaggacgaacacgagggaaaggcgtgattccctggaagattggatttaaggaggacatccacacgtacaggagtcagatgaggagcaagagggataccgaggcgaagattgcagatctggagtacagggtatcgagctacgagcttagcatgcaagaggaggtggcaaggaaggtggatgaacgtatggccgcacatcggtctcaggatccccagccgtacatttatcctgcaatggttagcccatcaggcaatcgtagcagctgcgcctcaacggggcaggtcgaatcacagagcatggacgccatgcaaacccaggacgaaacctcctgccccgttgatgagatcacgcagcggacaccatgtgagctgcatattcccttcaagaacttatcaatcaaggtggcgtcgggaatggccatcccaatggacccttccgggacttaccactgcaggccgattccagcaggatactcgagggtcgaagttgagctggtggaagccgcgtacgaggacctcgagttggactacctaggaggggatggtgagacgcatctacgagacacaagccacgccatcatactatggcgcaagcggtacatcatccttcctgggcgacaagcggcatttcgtgcaccatctcctccggctccgccatctcctcctgcaccatctcctccggctcctccgccacctcctgctgcaccatctcctccggctccgccatctcctcctgcaccatctcctccggctcctccaccacctcctgctgcaccatctcctccagctcctccgcctcctccgcctccaccgtgtccgcctgcacctcccaagataaggtctcgccaagctccaccgcctgcccgcacaagggcaacaaagaaggcaaaagttgacgccaccaaaaacaaggagccaccgtacgattgcagtcaagaggagctcgatgcttatgtggcaggagaggtgaagaggcaactcaagcctcggagtcctgaaaagaagatacctattgacccgagcgtgaagaacttcttcaaggcaatgtccaaaacaaacaaggaggcgttacagatatcggactatgaccgaacacttcagagagcctatcacaaaaagtccaaaccagtccctcagcttggagaacaaccaaaccaagaggtcgagccgttggtgaccagcgaagattttgacataacggatttcattgcagacaccggtctatctgtggatcagttggttggagccgcaccaatcccgaaggcggaagtggcatacaagtttgaactcgataaaccgcttgtcaaacctgaacagctggagtccctaccgacacagatgtacaaattccatgaacggtacatggaaatgagcaccaacggtagagagatgttcggggcgaggatcagaaactccgacttcttgcaaggagacgatgttctctggatccatttcaaggatctcttcgatctgtaccagttggacgccctcgacgtctctctcctgagcgcatggattttaatggagattcaaagggcccgacggcggagggtctacgatactgggttcatcgaccctcggaaaatcaactccgaaatggtcgacaagtacgagaaaggcatagaggacaatctcgtccatctcctaacgcagcagcatttcaagacgtacatattactgccgtacaacacagaatttcactgggtcctgttattcttcgacttggatgcatgcagagtcactgtgtacgactcaatgaataaagagaagaagatttttgacaacatcttcaaactgatagacagggcttgggatcggttccgtcaattggtccgcgggacttggaaagaaaaacttggacggaggtttcatttcgcacgtattcacatgagggataatctcccacacaaggattttatcacggctgttcaagaacaactgatgggattcatcaacgaagaagtccttaatcccgacggtgaattctactacgacggatcaacaatacataacgtcggtccttcctcttctgacataacgtcggcgtcgaagtcgaagtcgtagtatagctatagctaccga

SEQ ID NO: 93088 - DNA, 527 bp, Oryza sativa
  Clone ID: PAT_MRT4530_91506C.1
ttttccacctcccgtccctcttccgctccaaatccaaccctcccctcggccgctccgcctgcgccgccgccgccgccgccgccaccggagcgacggcgagggagggagtgggggagaagcaggaggaaaccccaaaccgtcccgatctcggggtcgggaacccgccgccggcttttccgctcgttcgaggcgatccaggcgcgtttcatgggcctccggaggcaatctctgcaaggtaaggcttttcctgtcagaggattccccctctcaagctggattaagaccgcaggataatctccaagcaaaaggctcatggttactgcatgcagctggcccaagctcagatgattccttgcctccaggctttgagtcattgccaccaagcaatgacctcaaaattgacatgtctcaaatccccctaattaggtggaaatgccccccaatatagtattggagcaggattggcatattgttgctggagagaaagtagggagattgaaattaaaatgagagaataaatggagcgc

SEQ ID NO: 93089 - DNA, 7435 bp, Oryza sativa
  Clone ID: PAT_MRT4530_91507C.1
atggatcggcaatggatgtacgctgaccggcggtccaaagagtttattgacggcgtgcactattttttgagagtggccgaagctaacaggcaaaggggttttatttgttgtccatgcaataagtgtaagaatcagaaggagtattctgcatccaggactattcatttccacttgtttgagtcggggttcatgccaagctataattgttggacatcccacggagagcaaggtgttgaaatggaagaagatgaagtggaagacgacaatattccggactttgctcagtatgttggatttgaaggaaatcaaacgggcgaggaggaaatagctgctgatggtaacgacgttgcggatgatcttggtcagatgttgcaggacgccagggaggactgcgaaagtgaaaaggaggcccataaattggacaagatgttggaggaccacagaacttcgttgtacccaggttgcgagcaggggcacaaaaagttggataccactctggagttgttgcaatggaaggcaaaaaatggggttagtgacaaggcatttggcgatttattgaaactcgtcaagaacattcttccggggggaaacaaattgcccgagacaacgtacgaggctaagaagatagtctgcccgttaggactggaagttcataagattcacgcatgtccgaacgattgtatcctatatcgcggtgaggagtatgagaacctagaagcatgccctgtttgcaaagcactacgatacaagattagacgggacgatccaggagaagttgacgggcagctaacaaagaagagaattcctgctaaggtgatgtggtatttccctataataccacggctaaggcgtttgttcaggaacaaggggaatgctagaatgttgcgatggcacgctgaagagcgtcaacaggacgggatgctgagacaccccgccgatggttcgcagtggcaaaacatcgacagaaaatttaaagaatttggaaaggacgcacgaaacatacggtttggtttgagtacggatggcatgaatccttttggagagatgagcagcggccatagcacttggcccgttacgatgtgtatctacaacctcccccctggctatgcatgaagaggaagtacataatgataccgattattattcaaggccccaagcaacctggtaacgacatcgacgtgtacctaagaccactggtcgaagatcttacatagttgtggaagaaggaagatgtccccgtgtgggacgaggacaaacaggaggagtttaacctacgagcgctgctgttcgtaaccatcaacgattggcctgcacttagcaacctatccggacagtccaacaaggggtacaaggcttgcactcactgtatggatgaaacagaaagtacgtatcttaagcactgtaggaaggttgtatacatgggtcatcgtcgattccttgctgcaaaccacccggtacggaagaaaggcaagcactttgaacataaggccgaccaccgtacgaagcctaaacatcgcagcgggaaaacagtgtttgctatggttaaagatcttaaagtagtgtttggaaaggggcctagaagccagcctatagagagcgaagatggtcacgcggcgatgtggaaaaagaactctatattttgggagttaccctattgggaattcttgaacgtacgccacgcaatcgatgtgatgcacctcactaagaacctttgcgtaaaccttcttggcttcctaggtgtatatggaaagtcgaaagatacactggaagcacataatgatctgaagcatatggaacaacgcggcgaccttcacccggaaccaaaggagaaaggaagccattacttgagtccagccagctacactcttagcaaggcagagaaggaaagtatgtttgaatgcttagagagcataaaggtaccatctggatactccacgaatatcaagcgaataataagcacgaaggagaagaagttcacaaatctaaagtctcatgactgtcacgtgttaatgacacaactgctaccagttgtaataaggggtatccttccagacaatgtccgggcaacaataacaaagatatgtgcattcatgaacgcaatttcgcagaaggtcatcgatccggatagattagaagcccttcagaatgaagtggtgcaatgtctcgtcagttttgagttgatatttccaccttcatttttcaatataataacgcatctgctttgtcaccttgtgaaagagatccgtattctcgggcctatgtacctacacaacatgtttcctttcgagaggtacatgggcgttctgaagaagtatgttcgtaaccgtgctcgtccagaggcaagcatcgccaagggttatggaacagaggaggtcatcgaattttgcgtagaatttatcgaagaccttcgcccaatcggggtacctgaatcacgccatgaagggagactacggggaaagggaactctcgggaggaaagcaataatgacggtagacaacaatttattccgtaaagcccatttcactgttctgcaacactcttcattggtagctccttacatcgaggagcacttggctctagttcgcgccaggaacatcggtaagtccgatgcatggattacacggcatcacattgatactttccccgcgtggctacaacaacatctcatgggtaacgagacgatcaaccaacaacttgccttcctggcgaggggaccgtctgggtcgatcgcgacattccagggatgtgagatcaatgggtacacattctacacgagagcccaagacatgaagagcacgaaccaaaacagtgctgttcgtatcgatgccatgggacacgatggaacaactggcacgtattacggtgccatcgaggatatatgggaacttgactatggtcctcccaaggtccctctgttccggtgccaatgggttaggttgactggtggaggcgtaatgattgatgacagtgggatgacaacggttgaccttaacaaggttggatactcggacgaaccttttgtccttgccaatgatgtaacgcaagtcttttacatgaaggacatgtctagcaaaggaaagaagggcagagggcctgacgagccgaagcatcacgtggttctcccagcgcgccctcatcttctccaccaacacttagaagttttttccccgatcgatctcccttggcttctccttcgccgccactacctagggcatccccgcgccgacgccgccgtcgtatctcgccgtcgtctccgccgccgccgcatctctggggtgagagccgccaccgcctccccctctctctctctctgtttcttgtatgaacagatggttgatcgcgatgaggaacagataatgtacgatacaatcgcggatggaagcaaccagtactagaacgaagaagaggggaacgaggatccaaaccagtacttgaacgaggaagggaatgtggagagggatgcggaggggaaccaggaggggaacgtggagagggatgtggaatggaaccaggtagaggaggctagtggaagtcaaccctccgctggacagaagagggcacgtgggcaacgaggtgccgcgaagaagctagagggtcggcacatcataacgaaagtggacaaagacggctaacctagtgccccggcggaagcagccaagaactacgtacgacacagcggttgggttgtgcgggataacgtgcctgtcagtttgatacaattcagagttcaacaagcggaagcgtaaatagttaattattacatgggcagcgaaggcccggcacacacaaagacaaacgagaaacagcggaagactagggcgacgaccacaggcgcttgacggcaggcacgagctagacaccaaaaccttcatcttccagagactcctcttctgggtttgggaaaaaattgagcaagactgagtacaacccccgtactcaacaagacacacccacaagtgcataataaatgcaagggagtacaagggaggtataacataaagggttaagggtgcagtaaacagcatttaaagatacttagttgctcaaagctattttgtaaacacgattctagaactatacaatattatttatcaaggccgtgaacccacacgaacctgccttaacccaaggcctacgatgattcagaccgaaccggcaacccgaccctggcccacaagacacatcttcctcacgtgcaaccacgtgccacataccaccacggtatacggatggaagacgtgacatagttcccaacccatcctagccataaacaagagtaccgacccaaccccacctacggccggaacccccgggacaggtaggcaggactgagcccccagcagcaggacaccggccctgtgccatgatatctcgactaccgggccgcagctcgtgtagccttcatttgtcctagagatgtccatcgacccccgacttcgtccatctccatccgtgtacttttgtttataaccagtctgagctacaaactaagccttacccactagacatgtggaagtacggtagtgctttgcaacagaggcccgaagaccggtccttatatggccgaggtgctactatcaaaaccatgcaccccgagcccagcctaaaaccatttttggggattttgaatagagggggcggtgtgaatccaattccacaatactccaacaattccaaaatgcaataattttaaagcaacataattttataaactgggattcaatatgttcaaggatgatgtgacttgccttgctcactttcccaaacgccggcttcaacttccacgaagagcggatcttccgaagctgcagcgtctacacgaccaacggaaaagaaaaggcttttacactaagaaactccatataacaagcagaaacaaagcacaaaaatgggttcttgacttcttaaggaaaaattagagacttgaacggtccaattccgagttcaaatggccaagttatggccatttgaagtttatatgctctttaaatgaatatttgcgaatttcttcatttaaattttaatttaaaatggatttattgcgtcagccgaggggaggggcgcgcggaccgggtccactggggtggggcccacgcggcagccccacggcccacggtggaccgggcgcacccgggctcgcacctgccggcgccgtgggtcccacgcccccacacggcagccgcggggcgcgcccgaaggcggccacgccggcacagccgacgggaggcggcgcgcccgcgcccctatggtcgccggcggcggccataggtacggcggagcggcggccgagaaaggggagggaagggggaaacgaatcggcggtccacggctcaccccgggtcgacggcgacgacgggaacggcgaccggagcggagcaaagcggcggcgcggctcgggtggacggggtcgacggtgctccggcggtcggcgagcgaaacggaggggtggacgaggtcgccggggatgcggtgaagccgaaggtggcgacgccgatgcgggaggtggtccggggcgacgccggcggcggaccggagctcggcggtgacggcggagagagagagcgacggcgcgagctcgattccgacggggagacaggtcggcgagtggcgcaaccggtgaagggaggcacggggaaggtttatatagggttgggaggggaagagagcggccggacgagggggaaacgggcgcggaagatccgcccgccattgatggcgccggcgaggttaggggaggggtttccaaacgaatccgagggagagagagagggaaaaatggggggaaagagggagggaatcacggggaatatttcccccctcttgattgcacgcggggcggacgggggcggcgggattcgcggcggcggcggcggcgctagggcgcgggcggggcggcgggagcgacgggaggaaggggatgacgggtgggccccacctcacattttaattgttggaggctttcacacggattttaattattctaggcataatttcgaggatgtattttagagtcgttttgggacgcgacataatgcatcccacgcacattgcagattccactgggtctttttactcttcgacctggaggcctgcaccgtcaacgtatatgactcaatcgataaagaagagtcgatgtttgacaaggtttttgaacttatagacagggcttggtatcggttccgtcatttggtccgcggcaaatggagagaaagacttaggcggaagttcaattttccttttattcgcatgagggataacctgatcacacacaaggaatttatcgcggcggttcaagaacaactcatgggattcatcaacgaacaaatccttgatcccaagggtgaattctactacgacggaaatacaattcataggtcctggcccgagggtgacgtggccacccctccctctgtctccccgaggggtcgggccgctcccgtttcggccccgagggctggggcgccccgagttgtctatattctcactaagctcatattcattaattctttctttaggctcaagattgggtacttctaagttgtcgagtttgggggagactccaccacgctttcgtacctctgagatatatggaacattattttgatatgggataaaagtaattccttgctcatgtattactgtggtttgtactgattgttgaaggaaccttaggccaattattatgtcatcattaatcattgacaaatctcttattgtaatctcatctattatatatttagttgcattaatgtaaacctccatattataagctaactgattatgaattttctttattccggacatgtctgtggaaacttctgccttattgtcgtcaattgtgtgaactatttcaggacatcttatgaaatatttgtcatgaataatattctttttacacccggtgtctactagtgctaatattttataagatactttgggtgtcaattttattttaacagggattcttatacctaatatttctttgaaaggcaatcttactatatatttttttccaaaattagttatggcctctcttagttgaattattttagcagtattactgtcttttaatgttatcaattgctctttaaattcggtgttttgtatgtccttattctctggtaatgccttaatatcgcaattattttttaggttctctaattctacttctagtttatttagtctattttctaacactcgtactctactagataaagtcttttcatctgattctaattctatttcttttctccatttttgtttatttgcttttatacattcagcacaagcttgttttagacatatactacaagtcactctattttcttgactagggtaatatatgcaaaaagcacatttgatattatagtcaccctttcctctaatccaatcatgtttacaatttaattgatccatcatttcaacctttagacct

SEQ ID NO: 93090 - DNA, 554 bp, Oryza sativa
  Clone ID: PAT_MRT4530_91508C.1
aaaaaagggtcaggccctttaaaagaaagggaaaaccctactcctggtgggggatttgaatcccccgagtatgtattgatctgacaaaaaggggggctcatgcccctaaaggggccccctgccctccttatataggggggggggcaggggtacaaaaaaaaaaccttaaccaaaacgggatggggttcctaaaattactttaaaattttttaaaaccaagactttaggccggtccataatatacagggaaacggaatacccaaggcatgatcgggtacatattccaaaaataaaaggtatcccctatagccaggcaaaaaactatgccatggaggggtgggggacccataatctccacaaatggggaaacatgggatggggcaccaaaggggctcccacctccgggaaaaaacccacgtttgcacgggctgccaccccgggaggaaccacatgaaggggggaaagaagtcatttgggaacaaacttaacctggctcctggggttatgaccaccacatggatccttgtggagccccccatcgcacgtgggggggc

SEQ ID NO: 93091 - DNA, 428 bp, Oryza sativa
  Clone ID: PAT_MRT4530_91509C.1
ggattgcagctctagctagccgccacagctccgcttcacccgtcataacccttgcaacttccgcccaaaaaatccctgagaagtttgtgcagcaacacctgactgaaacctacacaaacaaccaccagaatgccattattgtttgccctcttggcaagttctggcgagtcgaactacaacgggagcaaccggacgtgctactgcgagacggctgggcgccatttctggctgctcatgatctctccgaaggcaacatcctgctgttccggtatgaaggtaacatggtgttcacggttgaggtgttcctacagaacggctgcctgaaggagtacaaaacggcagcgctgtacttaactgatggtgcagcaaaagttggagtttcacctgtcaagcggaaaaggacgcgaagaattgaggcctacttgtga

SEQ ID NO: 93092 - DNA, 349 bp, Oryza sativa
  Clone ID: PAT_MRT4530_9150C.1
tttgtttgattcactttttcaccactcaactacgggggggcaagtaaaagtaaggcggcgtggttcgatgcaccgataggcatcgccttcttatcttgcgtttagagccacaccctagtaccttgagatccgagacgagtggtctctgaacctggaggcgcctatggttggcaatccgggactagatctaccggtgctcttcccacaccatgtacacagcgtttctccgcatggtgtgctgtccagaatgtacattaacaccacttaaagattctctactccaacactctatgcaaccagaacatgctgcaagtgcagcacaatcggactcaccctctgcgaggagggc

SEQ ID NO: 93093 - DNA, 2661 bp, Oryza sativa
  unsure (1)..(2661): unsure at all n locations
  Clone ID: PAT_MRT4530_91510C.1
atgcccgacgggaaccaggagaggcacgttgaaagggatgtggaggggaaccaggaggaggaggatantgcgaggcaacccaccgctggacagaagagggcgcgcgggcaacgaggtgccgcgaagaagctagagggtcggcacatcataacggaagtggacgaagacggccgacctagtgccccggcagaagccgccaagaactatgtacgtcatagcagttgggttgtgcgggataacgtgcctgtcagtacggtatactggcgcagaacaagggcacgcgcagatcatgagagctttgtcccagattcggagaaagagatgctgtggaccacaatgctcgagacattcacccttcccgcgggtacagaagacaaagtgaaaaggtggactctgaagaaaatggcagaacagtttcagagcttcaagggagagttgtacaagaaatatatcctgaaggggcagacaccgaacttcgacacattcccaaagctaagggatcactgggacgagttcgttgcatataagataggtgaacaagggcagtcaatgatggaaaaaaacaaagaaaatgccgccaagaagaagtaccatcaccacttggggtcatgcggctatagcgtcgcgatgccgaagtgggaggagatggaggctaggttgcttgagaggggtatcgaaccggccaccgctaattggccggaacgatcgaagttctggtactatgctcacggtggaacgctcaacccagctgatggctcactgactccagagcatctaggacgaacacgagggaaaggggtgattccttggaagattgggttcaaggaggatatccacacgtacaggagtcgtatgaggagcaagagagatactgaggcgaagattgaagatcttgagttcagggtatcgagctacgagctcagcatgcaagaggaggtggcaaagaaggttgatgaacgcatggccgcacatcggtccaatgatccccagccgaccattcctcctgcaatggtgagcccgtcaggaaaccatagcagctatgcctcaacggggcaggttggaccgcagagcatggacgccatgcaaacccaggacgaatccacctgccccgttgatgacatcactcagcggacaccatgtgagctgcatattccttttaagaacttatcaataaaggtagcgtcgggcatggccatcctaacggacccttcaggtacttaccactgcaggccgattccagcaggatactccaaggttgaagttgagttggtcgaaggcgcgtacgtggacctcgagctagattaccctggaggagacgcatcgtctccatctcaggctcctgcaccgactcctcctcaggctcctgcaccgactcctccgcaagctcctcttccggcaccttcaaagtcaagggccccccaagctccaccgcctgcccacagaagggcaacgaagaaggcgaaaattgacgccgccaagaacaaggacccggggtacgattgcacgcaagaggagcttgacgcttacgtggcatcagaagtcaagagacaattcaagcctcgaagtccagaaaagaagattcctatagacccgagtgtcatgaacttcttcaggggtatgtctgcacctgtcaaggaggccattaagctatcggactatgagcgaacactgaagaaagcatcttctggaaagtccaaaccagtccctcagcttggagagcaaccaaaccaggagatcgagccgttggtgaccggtaaagaaatgacgatagaagaatttattactgacaccgatctaactacggaccaattgctaggagtcgcaccaatcgaaaaggagcaagtgaaatacatgtacgaactcggtaaaccgcttgtcaagcctgagctgctgcagtccctacccacacaaatgtacaagttccatcagctgtacatggagatgagcgccaccggtagagagatgatcggagcgaggatcagcgacacagacttcttgcaaggagatgacattctctggatcaatttcaagggaatctacgaactataccagctggacgccctcgacatctctattatgagttgctggattttaatggagattcaaagggcccgacggcggggggttttcgatactggattcatcgaccctcggaaagtaaacgtcgcaatgctcgaccaatatccgcaagccacagaggacaatttcgtccatctcctgaaggcgcagcattacaagacgttcatactgttgccgtacaacacagaattccactgggtgcttttactcttcgacctgtcggcctgcaccgtcaacgaggtgaccaaccgcggcgaggcgaggaagaaggtacaactgccattgattcagtgccctttatgcaaggagaacaccgtcgtggtgcgcacatcgaggacccctactaatctggggcgcattttctacacttgccctgatcacgagaaagatggctctggttgcaacttctggtattgggaggaagggtacatgaagtacttgaagaggaatggcttcattgatggagaagaggctacagaggtgaagaaggctgcagagctgaagaatgcatctaagttcgatggcgatgtagttttgaggcaagacgatgaactgaagaaggcactgacagatgtgtggtaa

SEQ ID NO: 93094 - DNA, 1611 bp, Oryza sativa
  Clone ID: PAT_MRT4530_91511C.1
ggacaagtaaagagatcagtactacgtatttcagtacatgatacgtctactggcgtaccaacattcaacaaaaccattgttcagacttatctaactgggctaccgatatatacagctggttttcagtgatatgttctaccacatattttcaaacctacaactgggattggcattgctaggcaaagtagtgggactattttttcgcgttcttcattttttgtgctagcaatgcacaataacaacatgccagaccgttgtttcaatggcgttgaaggtgaggcgatcaccttcttttacctcattttccaggcaaaattttctccaacctggtccatttatgtagccataggtgttcgctgttttgaaagccactcgccaagatccttttttcttcatggatatcttcagtgtgatcgcacaggcttctagcagaccaatttgagagcaaaaggtgcctctcacagaaagtaggctatgaatactataggccgtcatttcctttgtgaatgaattctgtgacacaatgctgacatgtttcttatgtggttcaaccttcacggaaattggggaagccctagatttcctgtttggtccctctaagcatgtaccctcaattcttcgcgtccttttccgcttgacaggtgaaactccaacttttgctgcactttgttgaggcgcattgctcggtccttcggtaccatcagttaagtacagcgctgccgttttgtactccttcaggcagccgttctgtaggaacacctcaaccgtgaacaccatgttaccttcataccggaacagcaggatgttgccttcggagagatcatgagcagccagaaatggcgcccagccgtctcgcagtagcacgtccggttgctcccgttgtagttcgactcgccagaacttgccaagagggcaaacaataatggcattctggtggttgtttgtgtaggtttcagtcaggtgttgctgcacaaacttctcagggattttcatcttttccaggtcttcctgttggagcagcttgatgaagcgaggcctgtccttggttctcatacctgcgtgaggagtgcagaagcgcgcgaggcagaagcccgggtcgaacaccctgagcgaggccaccccgcgccgctccagcctcagcaccacgccccacccctcgccgagcccgtgcgccgccgcgagctccgaccatccgccgcccagccacgcctcgccgtcgccggccggcgagcggcgcagctccacgcgccagaccttgccgagcgggcccaccacgagcaccgccgccgcccgtcggccactctcctcctcctcctcctccccgaccccggcggcgtcgtcgtcgtccagcctcgccgcgaactcgcccgggacgctcagccggtggaggcaggccggcgagagcagcggcgcggcgaacttgggccgccgccgcagtgagccggcggagagtggcatgctcggtggagagtgggagaagcgcgcgacagccacgatgtcgcaggtagctgagctagccgtgtgagtgagtgtgaacgcggcgagaaggctgcctgcctgggcgtggtggttggagtggagtggtggctcctcggagatggtgtggatggg

SEQ ID NO: 93095 - DNA, 2604 bp, Oryza sativa
  Clone ID: PAT_MRT4530_91512C.1
atggatcggcaatggatgtacgctgaccggcggtccaaagagtttattgacagcatgcattattttttgagagtggccgaagctaacaggcaaaagggttttatttgttgtccatgcaataagtgtaagaatcagaaggagtattctgcatccaggactattcatttccacttgtttgagtcggggtttatgccaagctataattgttggacatcccacggagagcaaggtgttgaaatggaagaaaatgaagtggaagacgacaatattctggactttgctcagtacgctagatttgaaagaaatcaaacgggcgaggaggaaagggatgctgatggtaacgacgttgtggatgatcttggtcagatgttgcaggacgccaaggaggactgcgaaagtgaaaagggggcccataatttggacaagatgttagaggaccacagaacatcgttgtacccaggttgcgagcaggggcacaaaaagttggataccactctggaattcttgcaatggaaggcaaaaaatggtgttagtgagaaggcatttggcgatttattgaaactcatcgagaacattcttccggagggaaacaaattgcccgagacaacgtacgaggctaagaagatagtctgccctctaggactggaagtttagaagattcatgcatgtccgaatgattgtatcctatatcgcggtgaggagtacgagaacctagaagcatgccctgtttgcaaagcactacgatacaagattagacgagatgatccaggagaagttgacgggcagctaacgaagaagagaattcctgctaaggtgatgtggtatttccctatattaccacggctaaggcgtttgttcaggaacaaggggaatgctagaatgatgcgatggcacgctgaagagcgtcaacaggacgggatgctgagacaccccgccgatggttcgcagtggcgaaacatcgacagaaaatttaaagacattggaaagaacgcacgaaacatacggtttggtttaagtacggatggcatgaatccttttggagagatgagcagcggccatagcacttggcccgttacgatgtgtatctacaacctcccccctcggctatgcatgaagaggaagtacataatgataccgattattattcaaggccccaagcaacctggtaacgacatcgatgtgtaccgaagaccactggtcgaagatcttaaactgttgtggaagaagaaaggtgtccccgtgtgggacgaggacaaacaggaggagtttaacctacaagtgctactgttcgtaaccatcaacgattggcctgcacttagcaacctatccgggcagtccaacaaggggtacaaggcttgcactcactgtatggatgaaacagaaagtacgtatcttaagcactgtaggaaggttgtgtacatgggtcatcgtcgattccttgcagcaaaccactcggtacagaagaaaggcaagcactttgaacataaggtggaccactgtacaaagcctaaacatcgcagcgggaaaacagtgtttgtatggttaaagatcttaaagtagtgtttgaaaggggcctggcagccagcctatagagagcgaagatggtcacgcggcgatgtggaaaaagaactctatattttgggagttactctattgggaattcttggacgtccgccacgcaatcgacgtgatgtacctcactaagaacctttgcgtaaacctttttggcttcctaggtgtatatggaaagttgaaagatacactggaagcacgtaatgatctaaagcatatggaacaacgcggtgaccttcacccggaaccaaaggagaaaggaagccattacttgagtccagccagctacactcttagcaaggcagagaaggaaagtatgtttgaatgcttgtaaagcatcaaggtaccgtctagatactccacgaatataaagcgaataataagcatgaaggagaaaaagttcacaaatctaaagtctcatgactgtcacgtgttgatgacacagctgctaccaattgtaaaaaggggtatcctcccaaacaatgtccgggcaacaataacaaagctatgtgctttcatgaacgcaatttcgcagaaggtcatcgatccgaatagattagaagccctgcagaatgatgtggtgcaatgtcttgtcagttttgagttgatatttccaccttcatttttcaatataatgacgcatctgctttgtcaccttgtcaaagagatcggtattctcgatcctgtgtaccaacacaacatgtttcctttcgagaggtacatgggcgttctgaagaagtatgttcgtaaccgtgctcgtccagaggcaagcatcgccaaggggtatggaacagaggaggtcattgaattctgcgtagaatttattgaagaccttcacccaatcggggtacctgaatcatgccatgaagggagactacggggaaaggggactctcggaaggaaagcaataatgacggtagacaacaatttattccgtaaagcccatttcacggttctgcaacaatcttcattcctttcttgagatcccatattttaggagttcgtacacaccatagtcaaaaatccgacaga

SEQ ID NO: 93096 - DNA, 6346 bp, Oryza sativa
  unsure (1)..(6346): unsure at all n locations
  Clone ID: PAT_MRT4530_91513C.1
atggatcggcaatggatgtacgctgaccggcggtccaaagagtttattgatggcgtgcattattttttgagagtggccgaagctaacaggcaaaagggttttatttgttgtccatgcaataagtgtaagaatcagaaggagtattctgcatccaggactattcatttccacttgtntgagtcggggttcatgccaagctataattgttggacatcccacggagagcaaggtgttgaaatggaagaagatgaagtggaagacgccaatattccggactttgctcagtacgctagatttgaaggaaatcaaacgggcgaggaggaaagggatgctgatggtaacgacgttgcggatgattttggtcaaatgttgcaggatgcaaggaggattgcgaaagtgaaaagggggcccataaattggagaagatgttagaggaccacaaaacgtcgttgtacccaggttgcgagcaggggcacaaaaagttggatatcactctggagttcttgcaatggaaggcaaaaaatggtgttagtgacaaggcatttggcgatttattgaaactcgtcaagaacattcttccggagggaaacaaattgcccgagacaacgtacgaggctaagaagatagtctgccctctaggactggaagttcagaagattcacgcatgtccgaatgattgtatcctatatcgcggtgaggagtacgagaacctagaagcatgccctgtttgcaaagcactacgatacaagattagacaagatgatccaggagaagttgatgggcagctaacgaagaagagaattcctgctaaggtgatgtggtatttccctataataccacggctaaggcgtttgttcaggaacaagaagaatgctagaatgatgcgatggcacgctgaagagcgtcaacaggacgggatgctgagacaccccgccgatggttcgcagtggcgaaacatcgacagaaaatttaaagactttgaaaaggacgcacaaaacatacggtttggtttaagtacggatgacatgaatccttttggagagatgagcagcggccatagcacttggcccgttacgatgtgtatctacaacctccccccttggctatgcatgaagaggaaatatataatgatgccgattataattcaaggccccaagcaacctggtaacgacatcgatgtgtacctaagaccactggtcgaagatcttaaactgttgtggaagaaggaaggtgtccccgtgtgggacgaggacaaacaggaggagtttaacctacgagcgctgctgttcgtaaccatcaacgattggcttgcacttagcaagctatccgggcagtccaacaaggggtacaaggcttgcactcactgtatggatgaaacagaaagtacgtatcttaagcactgtaggaaggttgtgtacatgggacatcgtcgattccttgcagcaaacgacccggtacggaagaaaggcaagcactttaaacataaggcggaccatcgtacgaagcctaaacatcacagcgggaaaacagtgtttgctatggttaaagatcttaaagtagtgtttggaaaggggcctggcagccagcctatagagagcgaagatggtcaagcggcgatatggaaaaagaactctatattttggaagttaccctattgggaattcttggatgtccgccacgcaatcgacgtgatgcacctcactaagaacctttgcataaaccttcttggcttcctaggtgtatatggaaagtcgaaagatacactggaagcacgtaatgatctaaagcatatggaacaacgcggtgaccttcacccggaaccaaaggagaaaggaagccattacttgagtccagccagctacactcttagcaaggcagagaaggaaaatatgtttgaatgcttggagagcatcaaggtaccgtttggatactccacgaatataaagcgaataataagcacgaaggagaagaagttcacaaatctaaagtctcatgactgtcacgtgttgatgacacagctgctaccagttgtaataaggggtatcctcccagacaatgtccgggcaacaataacaaagctatatgctttcatgaacgcaatttcgcagaaggtcatcgatccttatagattagaagccctgcagaatgatgtggtgcaatgtcttatcagctttgagttgatatttccaccttcatttttcaatataatgacgcatctgctttgtcaccttgtcaaagagatcggtattctcggtcatgtgtacctacacaacatgtttcctttcgagaggtacatgggcgttctgaagaagtatgttcgtaaccgtgctcgtccagaggcaagcatcgccaaggggtatggaacagaggaggtcattgaattctgcgtagaatttatcgaagaccttcgcccaatcggggtacctgaatcacgccatgaagggagactacgaggaaaggggactctcggaaggaaagcaataatgacggtagacaacaatttattccgtaaagcccatttcacggttctgcaacaatcttcattggtggctccctacatcgaggagcacttggctctagttcgcgccagaaacatcggtaagtccgatgcttggattacacggcatcacattgatactttctccatgtggctgcaacaacatctcatgggtaacaagacgattaaccaacaactggccttcctggcgaggggaccatttggctcgatcgcgacattccagggatatgaaatcaatgggtacacattctacacgagggcccaagacatgaagagcacgaaccagaacagtgctgttcgtatcgatgccatgggacacgatggtactactggcacgtattacggtgccatcgaggacatatgggaacttgactatggacctctcaaggtccctctgttccggtgccaatgggttaggttgactggtggaggcgtaacgattgatgacagtgggatgacaattgttgaccttaacaaggttggatactcggacgaaccttttgtccttgccaatgatgtaacgcaagttttttacgtcaaggacatgtctagcaacggaaaaaagggaaaagggcctgacgagccaaagcgccacgtggttctcccagtgcgccctcgtcttctccaccaacacttagacgttttttcccgtcctcttccgtgctccgtagctccgtcgccaccgccgccaagcaaaccgccgccgccggccatctccggtgccgccgcgccgccgtctccatctgacagtggtcctcgccgcctccgccgcagacgccgccgccacatctcttgggtgttttttgtatgcacagatggctgatcgcgatgaggaacaggtactatacgatacaattgcagagggaagcagccagtgctggaacgaagaagagggaaacgaggatccaaaccagtacttaaacgaggaggggaacgtggagagggatgcggaggggaatgatgaggggaacaatgaggaggaggctagtggaagtcatccctccgctggacagaagagggcacgcggacaacgaggtgccgcgaagaagatagagggtcggcacatcataactgaggtggacgaaaacggccgacctagtgccccggcagaagcagccaagaattttgtacgccacagcggctgggttgtgagggacaacgtgcctgtcagcacggtgtactggcgcagaacaagggcacgcagggataatgacagctttgtcccggactcagagaaagagatgctgtggaccacaatgctcgagacgttcacgctacccgcgggtacgaagaacatagtgaaacggtggactctgaagaaaatggcagaacaattccagagcttcaagggagatctctacaagaaatacatcctgaagggactaacaccgaacttcgacgtattcccaaagctaagggatcaatgggacgagttcgttgcttacaagacagggcaacaagggcaagcgatgatggccagaaacaaagaaaatgccgccaagaagatgtaccatcaccacttggggtcaggcggatatagtgtcgcaatgccgaagtgggaggagatggaggcaagtttgattgagaggggtatcgaaccggccaccgctaaatggccggatcgatcgaagttttggtactatgctcacggtggaacgcttaacccagttgatggctcccttgtcttcagcgatcagatacgcgaggctgccagtcgactaacggacgcagtggtagcctcttctcagggcacattccgacccgacagagagaaggatgagctgtcactcgccctacagactcccgagcatccaggacgaacacgagggaaaggcgtgattccctggaagattggatttaaggaggacatccacacatacaggagtcggatgaggagcaagagagataccgaggcgaagattgcagatcttgagtacagggtatcgagctacgagctcagcatgcaagaggaggtggcaaggaatgtggatgaacgtatggccacacatcggtcccaggatccccagccatacattcatccagcaatggtcagcccatcaagcaatcgtagcagctgcgcctcaacggggcaggtcggatcacagagcatggacgccatgcaaacccaggacgaaaccacctgccccattgatgagatcacgcagcggacaccatgtgagctgcatattctcttcaagaacttatcaatcaaggtggcgtcgggaatggccatcccaacggtcccttccgggacttaccactgcaggccgattccagcaggatactcgagggtcgaagttgagctggtggaagccgcgtacgaggacctcgagttggactacccaggaggagacggtgagacgcatctacgagatacaagccatgccattatactatggcgcaagcggtacatcatcctccctgggcgacaagcggcgtctcgtgcaccatctcctccggctctgccatctcctcctgcaccatctcctccggttcctccgccacgtcctcctgcaccatctcctccggctcctccgcctcctccacctccaccgtgtccgcctgcacctcccaagacaaggtctcgccaagctccatcgcctgcccgcacaagggcaacgaagaaggcgaaagttgacgccaccaaaaacaaggagccaccgtacgattgcagtcaagaggagcttgatgcttatgtggcaggagaagtgaagaggcaactcaagcctcggagtcttgaaaagaagatacctattgacccgagcgtgaagaacttcttcaagggaatgtccgcaacaaacaaggaggcattacagatatcggactatgaccgaacacttcagagagcctatcacaagaagtccaaaccagtccctcagcttggagaacaaccaaaccaagaggtcgagccgttggtgaccggcgaagattttggcataacggaattcatttcagacaccggtctaactgtggatcagttggttggaggcgcaccaatcccgaaggcagaagtggcatacaagtttgaactcggttaaccgcttgtcaaacctgaacaactgcagtccctaccgacacagatgtacaaattccatgaacggtacatggaaatgagcgccaagggtagagagatgttcggagcgaggatcagaaaccccgacttcttgcaaggagaagatgttctctggatccatttcaaggatctcttcgagctgtaccagctggacgccctcgacgtctctcttctgagcgcatggattttattggagattcaaagggcccgatggcgaagggtctacgatactgggttcatcgatcctcggaaaatcaacaccgaaatgatcgataagtacgagaaagacacagaggacaatctcgtccatctcctaacgcagcagcatttcaagacgtacatactattgccgtacaacacagaattccactgggtcctgttattcttcgacttggacgcatgcagagtcactgtgtacgactcaatgaataaagagaagatttttgacaaggtcttcaaattgatagacagggcttgggatcggttccgtcaattggtccgcgggaattggaaagaaaaacttggacggaggtttcattttccacgtattcacatgagggataatctcccacacaaggattttatcacggttgttcaagatcaactgatgggattcatcaacgaaaaaatccttaatcccgatggtgaattctactacgacggatcgacaattcataacttatggcctagcggcagcccattagcgttctcttcgaagccacctagacctctaaaatatatcaactttcaatctt

SEQ ID NO: 93097 - DNA, 565 bp, Oryza sativa
  Clone ID: PAT_MRT4530_91514C.1
atccccctccctcctcctctctctccacctcaacgcccgttaccacctcatccaccctctccgcccccacaccaccaacccgacctccaccccgcccccccacgcaaacacccctaatgaccctcactccccccctccttccacacccccaccccccgccccccactcctctgctccccccccaccacccatctcccttcaccccatccgcctacgcaccgccctccctcccacctccctctccgtacccccccgctccgcttctaccccctccacccctccccccccccctcgcccctgccccccccctgcaccccccccccgcgaccgctccctccccccgcctgagcgactccaccccccacccgccccaaccccggccctgccccacccgctcccacccctccccagcactcactcccacggacagccccccaactccttcggccgccgggcccccacccggggcggcctccccttgccgcggggcaattcccatacgggccactcaagcagccgcctgtagccctcccgaagctttgctgcgtgtgtcacaagggtatgg

SEQ ID NO: 93098 - DNA, 6319 bp, Oryza sativa
  Clone ID: PAT_MRT4530_91515C.1
atggatcggcaatggatgtacgctgaccggcggtccaaagagtttattgacggcgtgcattattttttgagagtggccgaagctaataggtaaaagggttttatttgttgtccatgcaataagtgtaagaatcagaaggagtattctgtatccaggactattcatttccacttgtttgagtcagggttcatgccaagctataattgttggacatcccacggagagcaaggtgttgaaatggaagaagatgaagtggaagacgacaatattccggactttgctcagtacgctggatttgaaggaaatcaaacgggcgaggaggaaagggatgctgatggtaacaacgttgcggatgatcttggtcagatgttgcaggacgccaaggaggattgagaaagtgaaaagggggcccataaattggacaagatgttagaggaccacagaatgtcgttgtacccaggttgcgagtaggggcacaaaaagttggataccactctggagttcttgcaatggaaggcaaaaaatggtgtcagtgacaagacatttggcgatttattgaaactcgtcaagagcattcttccggagggaaacaagttgcccgagacaacgtacgaggctaagaagatagtctgccctctaggactggaagttcagaagattcacgcatgtccgaatgattgtatcctatatcgcggtgaggagtacgaaaacctagaagcatgccctgtttgcaaagcactacgatacaagattagacgagatgatccaggagaagttgacaggcaactaacgaagaagagaattcctgctaaggtgatgtggtatttctctataataccacggctaaggtgtttgttcaggaacaaggggaatgctagaatgatgcgatggcacgctgaagagcgtcaacaggacgggatgctgagacaccccgccgatggttcgtagtggcgaaacatcgatagaaaatttaaagactttggaaaggacgcacgaaacatatggtttggtttaagtacggatggcatgaatccttttggagagatgagcagcggccatagcacttggcccgttacgatgtgtatctacaacctccccccatggctatgcatgaagaggaagtacataatgatgccgattataattcaaggccccaagcaacctggtaacgacatcaatgtgtacctaagaccattggtcgaagatcttaaactgttgtggaagaaggaaggtgtccccatgtgggatgaggacaaacaggaggagtttaacctacgagcgctgctgttcgtaaccatcaacgattggcctgtacttagcaacctatccgggcagtctaacaaggggtacaaggcttgcactcactgtatggatgaaatagaaagtacgtatcttaagcactgtaggaaggttgtgtacacgggtcatcgtcgatttcttgcagcaaatcacccgatacggaagaaaggcaagcactttgaacataaggcggaccaccgtatgaagcctaaacatcgcagcgggaaaacagtgtttgctatggttaaagatcttaaaatagtgtttggaaaggggcctagcagccagcctatagagagcgaagatggtcacgcggcgatgtggaaaaagaactctatatttgggagttaccctattgggaattcttggatgtccgccacgcaatcgacgtgatgcacctcactaagaatctttgcgtaaaccttcttggcttcctaggtgtatatggaaagtcaaaagatacactggaagcacgtaatgatctgaagcatatggaacaacgcggtgaccttcacccggaaccaaaggagaaaggaagccattacttgagtctagccagctacactcttagcaaggcagagaaggaaagtatgtttgaatgcttggagagcatcaaggtaccgtttggatactccacgaatataaagcgaataataagcacgaaggagaagaagttaacaaatctaaagtttcatgactgtcacgtgttgatgacacagctgctaccagttgtaataaggggtatcctcccagacaatgtccgggcaacaataacaaagctatgtgctttcatgaacgcaatttcgcagaaggtcatcgatcctgatagattagaagccctgcagaatgatgtggtgcaatgtcttgacagctttgagttgatatttccaccttcatttttcaatataatgacgcatctgctttgtcaccgtgtcaaagagatcggtactctcggtcctgtgtacctacacaacatgtttcctttcgagaggtacatgggcattctaaagaagtatgttcgtaactgtgctcgtccagaggcaagcatcaccaaggggtatagaacagaggaggtcattgaattctgcgtaaaatttatcgaagacctttgcctaatcggggtacctgaattacgccatgaagggagactacggggaaaggagactctcggaaggaaagcaataatgacagtagacaacaatttattccgtaaagcccatttcatggtgctgcaacaatcttcattggtggctccctacatcgaggagtacttggctctagttcgcgccagaaacatcggtaagtccgatgcatggattacaaggcatcacattaatactttctccacatggctgcgacaacatctcatgggtaacgagacgattaaccaacaactggccttcctggcgaggggaccatctggctcgatcgcgacattctagggatatgaaatcaatgggtacacattctacacgagggcccaagacatgaagagcacgaatcagaatagtgctgttcgtatcgatgccatgggacacgatggtacaactggcacgtattacggtgccatcgaggacatatgggaacttgactatggacctctcaaggtccctctgttccggtgccaatgggttaggttgactggtggaggcgtaacgattgatgacagtgggatgacaacggttgaccttaacaaggttggatactcggacgaaccttttgtccttgccaatgatgtaacccaagttttttacgtcaaggacatgtctagcaaaggaaaaaagggcaaagggcctgacgagccgaagcgccacgtggttctcccagtgcgccctcgtcttctccaccaacacttagacgtttttcgatcttggcttctccttcgccgccaccgtgcctagggcaaccccgcgccgacaccgccgtcgtctctcgccgtcgcttggcggtcctcgccgcctccgccgcagacgccgccgccgcatcacttgggtgttttttgtatgcacagatggctgatcgcgatgaggaacagatactatacgatacaatcgcagagggaagcagccagtactggaatgaaggagaggggaacgaggatccaaaccagtacttgaacgaggaggggaacgtggagagggatgcggaggggaacgaggaggggaacgatgaggaggagactagtggaagtcatccctccgctagacagaagagggcacgtggacaacaaggtgccgcgaagaagacagagggtcggcacatcataactgaggtggacgaagacggccgacctagtgccccggcagaagcagccaagaattttgtacgccacagcggttgggttgtgagggacaacgtgcctgttagcacggtgtactggcgcagaacaagggcacgcggggataatgacagctttggtcccgcgactcagagtaaatgagcatgttgtggaccacaatggctcgagacgttcacgctacccgcgggtacggagaacatagtgaaacagtggactatgaagaaaatggcagaacagttccagagcttcaagggagatctctacaagaaatacatcctgaagggactaacactgaacttcgacgtattcccaaagctaagggatcattgggacgagttcgctgcttacaagacagggcaacaagggcaagcgatgatggccagaaacaaagacaatgccgccaagaagaagtaccatcaccacttggggtcaggcggatatagcgtcgcaatgccaaagtgggaggagatggaggcaagtttgattgagaggggtatcgaaccggccaccgctaaatggccggatagatcgaagttttggtactatgctcacggtggaacgcttaacccagttgatggctcccttgtcttcagcgatcagatacgcgaggctgccagtcgactaacggacgcagtggtagcctcttctcagggtacattctgacccgacagagagaaggatgagctgtcactcgccctacagactcccgagcatccaggatgaacacgagggaaaggcgtgattccctggaagattggatttaaggaggacatccacacgtacaggagtcggatgaggagcaagagagataccgaggcgaagattgcagatcttgagtacagggtatcgagctacgagctcagcatgcaagaggaggtgtcaaggaaggtggatgaacgtatggccgcacatcggtcccaggatccccagccgtaaattcatcctgcaatggtcagcccatcaggcaatcgtagcagctgcgcctcaacggggcaggtcggatcacagagcatggacgccatgcaaacccatgacgaaaccacctaccccgttgatgagatcatgcagcggacaccatgtgagctgcatatttccttcaagaacttatcaatcaaggtggcgtcgggaatggccatcccaacggacccttccgggacttaccactgcaggccgattccagcaggatactcgagggtcgaagttgagctggtggaagccgcgtacgaggacctcgagttggactacccaggaggagacggtgagacgtatctacgagacacaagccacgccatcatactatggcgcaagcggtacatcatccttcctgggagacaagcggcgtctcgtgcaccatctcctctggctccgccatctcctcctgcaccatctcctccgattcctccaccacgtcctcctgcaccatctcctccggctcctctggctcctccgcctcctccgcctccaccgtgtctgcctgcacctcccaagacaaggtctcgccaagctccaccacctgctcgcacaagggcaacgaaaaaggcgaaagttgacgccaccaaaaacaaggagccaccgtacgattgcagtcaagaggagcttgatgcttatgtggcaggagaggtgaagaggcaactcaagcctcggagtcctgaaaagaagatacctattgacccgagcgtgaagaacttcttcaagggaatgtccacaacaaacaaggaggcgttacagatatcggactatgaccgaacacttcagagagcctatcacaagaagtccaaaccagtccctcagcttggagaacaaccaaaccaagaggtcgagccgttggtgaccggcgaagattttggcataacggaattcattgcagacaccggtctaactgtggatcagttggttcgaggcgcaccaatcccgaaggcggaagtgacatacaagtttgaactcggtaaaccgcttgtcaaacctaaaaaactgcagtccctaccgacacagatgtacaaattccatgaacggtgcatggaaatgagcgccaaatgtagagagatgttcggagcgaggatcagaaaccccgacatcttgcaaggagaagatgttctctggatccatttcaaggatctcttcgatctataccagttggacgccctcgacgtctctcttttgagcgcatggattttaatggagattcaaagggcccgacagaggagggtctacgatactaggttcatcgaccctcggaaaatcaacatcgaaatgatcgacaagtacgagaaagacacagaggacaatcttgtccatctcctaacgcagcagcatttcaagacgtacatactactgccgtacaacacagaattccactgggtcctgttattctttgacttggacgcatgcagagtcactgtgtatgactcaatgaataaagaggagaagatttttgacaaggtcttcaaactgatagatagggcttgggatcggttccgtcaattggtccgcggaacttggaaagaaaaacttggacggaggtttcattttccacgtattcacatgagtgataatctcccacacaaggattttatcacggcttttcaagaataactgatgggattcatcaacgaaggagtctttaatcccgacggtgaattctactacgacggatcgacaattcataacgtcggtcctccaactattacctatgatcattcttatcttcttccttctcatctt

SEQ ID NO: 93099 - DNA, 565 bp, Oryza sativa
  Clone ID: PAT_MRT4530_91516C.1
gcggttgtggtccgagcgctgttcccatcgatgacgttgatggcatgctgagtgagcgtgaaatccctggtgaacatgacccactgtgtaaaacgaagaacgagctgctggtgaactgggatgctctacgaccaacagacaaggaccgtggctcagtactcgctgctcctaataggccatttgaccttgatgaggctgctgctaggaggcttcctaggcggctgaaggtgaatctgccggatgcatcatatagaaaaaaacactcttagcgtgcttctagctaaagaacatctggcacatgatggccatcttgaagctgtacctagcttgcctgaaggctactctggcagagatcgcaaagaactatgtattactgctgctcatgatcctattacagatcttcttgagacggctatgaaggataacgctctacccgattgccaagataggcctctggcccaatgcttgtcaagtagcgatgtccgtgccttacgactatgtgagttcatacgtgctcaccatcaggtctgagcaactgtgtcttccgactcatctaacatggatg

SEQ ID NO: 93100 - DNA, 1825 bp, Oryza sativa
  Clone ID: PAT_MRT4530_91517C.1
tcaaggcgcgtccttgaggaggccgaacttgtaggagtcacggtcgagcgggttgtggaggaagagatcggcgtgcgggtactgcggcgctagcacattccacgcaatagacggtccggtgagctcgaaccgctgtgccgctccgacgaggcagaccgctatccgcccctccacgacatttgtgccacctgctgcagctgctagcttcctgtggtctaacttgggcggtttctcgttgattttgaccaagggaggaggagaggaggatgaggaagaagaaggccgcggccaagaggagggtgatggtgagaccatggtgatcccccttgtgcaccactagccacaagtagagctgtagctccagctcgtatagctgactgtcgtcttcaacctcttgattttctacaatattatcatcatcggaataccattcaaagttattttccgccggtgcatcatcatttggagaatgaaaatgagagggatcatagttcccattgtataactcccactctccacactgctccggccggcacagcctctgagcgctagccacggttccggctgcatccccttctctagagaatgatctctcctcccatcgccctgtcgccgatgagaagacatggaggacgagcggcgatggtggccattctgatttcttcaagacgggatccatcgtttttacgttgtaccatccgacgtcaacaaattggatgttaaaaacctcatagtgcggcgataaggtagtgtcgaagacgatgaattctttgtcaaagaacccagattccagcttggcgaaggtgcggggcaatggtggcaagcgcgcccaccttcgagtggccgggtttaccacaaggagagagaaaagcaaaaggaggccgttgcagtggtccccgatgtcggggctttgttcttcgggtggcaggaagtcgagcatgccccttacggttgtcggtgacgaagatggacgagagaagaactccgggaacgtgagggcgttgaagtggatgaaaatgccggcgagcgacagcgggagggcgtagcagccggcgggagtcgatggcggagcgccagtccgtgcagacgcagcgcgacgcagcgaggcttcgcgggggcaagcggcggaggatctcggcgagcacgtcctccggtagctccacctcgcgatcgtcgtcgcctcccgcgccttggcgcaccgtcgcccgtccgacgccctcagcccaccgccgccgcaccaatcttgacgacgacaaagccgggacgacgaccgccgcaagaaatcgccgctcgacgccgtgcgcgcccgtccaaagaattcaaaccattcacccctgagccagccgttttcaccctcgccgccgccgcgcgtcgcgcccggattagcgccctcacgtcgccagctttgcctcatccaaatcccaagctcatccatggcgatgacggtgtccgagctcatccgctcctccccatcaaccaccatccctcgtcggtcgaacaccttgtgcgcgatcgactccacccctctccatccatcctccgccccgagcaccgccgcccccgcgctgctctgttcttcaccgccgcgaagtttttcatgctcccctctaagctgccgatgtgagcacggccgccgcctatggaggcgctcgtcggcaactattctccgcaccttgccaaaggtcggcaagctgccggaatccctcaccgccgccctagtcgccaacccatccacataccaaattagctcctccgccgccgatcgccgtcgccggagatacctagctccctcccctcttcggccgcaaccactttccccctccat

SEQ ID NO: 93101 - DNA, 1014 bp, Oryza sativa
  Clone ID: PAT_MRT4530_91518C.1
atgctggctactgagtcagcaccttacttggtggaccagacagtgacacagccacctgccccggagattctgcacactccactgatctctacaccttctccgcagctgggttccagtttagagacttcgatccaggtcgactccgagacagaggggaccgacactgagccagagatcaagccagacatcactgattcttcagaggatgagacccctgttccccacatcaccttcctcggtggccctcgcaccctcagcactgcccacaagagcacccgacccccgggcaagaagcccaagccagatccagaggccactacttccgagccatggggactcagatggtttttgatagtatgcgagacacacccccccttacctagattgacgagtagtttgatgatggcaagccaacgtcgggcgtcaaccagcaatgaagaaactcagacacctgacctaaccaccctggccggagttatggccactcaaacccaacttctacaagccattgtaaacaaccaaggcaaccgcggaggatcaagctttggagagtttatgaggaccaagccacccacgttcgccacagctgaagaacgtatggatgccgaggattggttaaggattattgagaagaagctgacccttgttcgagtacgtgaagccgataaagtgatcttcgcagcaaaccaactggaaggaccagccggagactggtgggacacttacaaagaagcccgagaagaagatgctggagaaccaaactgggaggagttcactacggccttccgtgacaacttcgtgcctgccgccgtgatgcgaataaagaagaatgaattcaggaggatacgacaagggaacaccactatacaagagtacctaaaccgtctcactcaactggcgtgttacgcaactggagacctagccgacgaggaggaaaagatcgataagtttatcgaaggcctgaacgatgagttgcgtgggcccatgattggacaggaccatgatagtttctag

SEQ ID NO: 93102 - DNA, 1068 bp, Oryza sativa
  Clone ID: PAT_MRT4530_91519C.1
cgtggctttctttgcctcatcctccccttcacgcgcaccgcccgagcatccgacttagccacgcgccgtgtcgccgcgcgtcggcctcagggccgcttgcgcgtgcctgaccgccttggcgcaccgtcgcccgtccgacgccctcagcccaccgccgccgcaccaatcttgacgacgacaaagccgggacgacgaccgccgcaagaaatcgccgctcgacgccgtgcgcgcccgtccaaagctgccgccgagtacgatttcgcttctacccagggtgaatcgcgccaattcttgccgcacggttagattgaagatagacggtggtatctcctctcacaattcaaaccattcacccctgagccagccgttttcaccctcgccgccgccgcgcgtcgcgcccggattagcgccctcacgtcgccagctgattccaaccgcggtcaagtcaatacttcatcgcatagtaagccctaaccgaagctctgcgtcgagttttacctcgccgcaccaacccgagcaccgccgcccccgcgctgctctgttcttcaccgccgcgaagtttttctggccgcaatccgtcgtttcaaccgatctcgtcgccaacccatccacataccaaattagctcctccgccgccgatcgccgtcgccggagatacctagctccctcccctcttcggccgcaaccactttccccctccatcgccgccgtaatcccaaaccctagcaccgccggctgcatttggggaaacggcctatacttagatcgggacagtacgtaagatttggctgatttccgggtggctagtactgtctcaatcaatataagttttaccagatacttatgttgaacgaacgactacgaccgcagtttctacactagggacacccttagtattgtaagactttttaacatatgcaatgaagaaccggttatattgtatgtatcaatatttactgatccagggattgattcattaatctcagtcggattcaagttattagttttgggctccgacaccatatgtgcctttttcctctataattattccatcgcaacacagggctt

SEQ ID NO: 93103 - DNA, 320 bp, Oryza sativa
  Clone ID: PAT_MRT4530_9151C.1
ggggggccccaaaaaaaaacccatttttaggaaaataaataaccgcccccggttgggaaccccaaagcaaaatttagccccatgcattggaggcttgggaaagggaaaaaaaatcgcaaaaaaaaaaccgaaccgccccaaaaacccgatgttcaaaagggaaaaaaaaaaagccgggcccaaaggcccaagggggcccttccctgcaaagggtttgccggggggaaaaaaaagggaccccccttaagccaccccccccaatttggtttcgccgggggcttccctaagggggggaatgtttgggtcggccccccccggtt

SEQ ID NO: 93104 - DNA, 267 bp, Oryza sativa
  Clone ID: PAT_MRT4530_91520C.1
taactccaggctgccgaagtggagtaggacaaggaaagatattaaacagcggcgtaagtggcggcggcggccatggcggcagagggggggatggctttcttcacgaacgccatgctgagggcggacctatgcaccggccagctgatttaccacgttatcttggcagcgtcagcggtcatgtcaccacaacattttcctccgctcgtggtggtattatccttgatgggcccatggtattcctctctacccagtcctttcccttcacgg

SEQ ID NO: 93105 - DNA, 380 bp, Oryza sativa
  Clone ID: PAT_MRT4530_91521C.1
cactatgtgaaagctggtccccctgcaggatagccgcgccggaagtatactgccggcgaccacacgcgtcctctcggacccatatataccacccatcagagaggggcggtatgtccagacaggactgtttgcaaaggagccacatctggcatggacaagcccggctccccgctggcaagcaccgcgtcagcctccaagaagcacaaggcagacgccctccgacgacgccgggggctcctcccacccgccttatttccagatgatcaaggacgcgatcacggtgcttaacgagaggaccgggatccagcgctcactccatcaccaagtacatggtaggacaagcacggcaccggcgttggcggccaactacaagaagatgc

SEQ ID NO: 93106 - DNA, 471 bp, Oryza sativa
  Clone ID: PAT_MRT4530_91522C.1
ggcacaaacacggatgagctattttcaggacaaaatttcgcagaaaggagggtcttctgggaacacaagtaacagagtggatattttgcgaggaagtgtcatggagaaaaaatgcttaggcatggcagagaagccgcttcattcaaaggacttacaagaagctcttagggttgtaagttcaaacaaagatttgtttctgaaatttcttgaagaacctaactcaattttctcaagacagttggtagggtctcacaccaatctagcaccacctcagaaaaaacggattacggtactaaagccacttggttcttttgagagtgatggcacaagacaaactggaactgagcaaattcaagagcaaaatggagcagcaatgagagagttccatcagagttctaattttaaggaagaaaatccctccttgccaagtagaatagtactcctgaggcctactccagggaagccgagttt

SEQ ID NO: 93107 - DNA, 256 bp, Oryza sativa
  Clone ID: PAT_MRT4530_91523C.1
agatgaaccccatggtgtaaagcgagcactacgatgcactatgagattattgagcagaataatcgcgccccgaatatgatgcatatatacaggactctctcatgccgacgaactatcacattacaccaccgtgaatatcatatcacacgacacataagattactagcgcgtaacacgaagcactactcggattgtttctttgtaccattggactgatgaagcaccagcagaccaggttagattagatcaaatcttg

SEQ ID NO: 93108 - DNA, 900 bp, Oryza sativa
  Clone ID: PAT_MRT4530_91524C.1
atgtctggcgatggagtgtacacgccgcccggccgccgcagtagcagtagcggcaatggcaccgacggcagcggcaccgatggcaggaacgatagtcgtgagcttgttgtgcagcaagtaaaggaggccggggtgacattgcgctatcccgtgctcacaagcagcaactacatcgagtggtcactcttgatgaaggtaaacatgcaagctcaaggtgtttgggatgctgttgagctcggcaacactgagcaccggatcgacaggatggcattggcggccatcctccaagcggtgccgtcggaaatgttggcaacattggcgtcgaaggacaccgcgaaggaggcgtgggaggccgtgcgcacgatgcgcatgggcgttgagcgtgtgcgcgaggcgaaggcgcagtccctacgcaaggagttcgagctgatccgcatgaaggaaggagagtctgtagacgacttcgccatgcggctaacgggcctcgtcaacaacatccataccttgggtgcaatgatggaagaagagatggtggtcaagaagtttcttcgtgtggttccatccaagtacacccaagtggccatctccatcgagcagctgatcgatctgaagacgctgtccgttgaggaacttaccggccgtctcaagtccgtggaagaaaggtatgaaatcgatggcaatggaagtgaagcatatggccgtttactgctcacggaagagcagtggatggaacgcatgaagagcaagaagaagaaggacacctttgacaaggcaaaggtgcgctgctacaagtgccaagggtacgggcattattcatgggaggagaagtgtgctggtctgaaggagaagcaggcgttgcttgcagtcgcgagcgccgacaacgagccaacgctactttga

SEQ ID NO: 93109 - DNA, 373 bp, Oryza sativa
  Clone ID: PAT_MRT4530_91525C.1
gcgtagcagaggaaaattcctttctaaaaccttccatggtaactgaaagatcagcacttcaggagagctttaccacaaacaagcgtcggagctttcaagaaactcctgttctaagaagtatgaaagctacaacttcgacatgggagaaagaaacactgacgattgatggcatctctaaacaagctactagaatggctcctggcactggaccccagcaggttcacaatttcaattctctttcagatgacttccaaataccaattagaaatcttggtggagagggaacaggaaaaagcgtcggcaaatggtgcaagggcgtagctacccctggatctctcaacacaaatgcaaataaaaggaatctgatcgccgt

SEQ ID NO: 93110 - DNA, 519 bp, Oryza sativa
  Clone ID: PAT_MRT4530_91526C.1
atggtgctcgcgcagctgggcgggagcatctcccgcgcgctggcgcagatgagcaacgcgacggtgatcgacgacaaggcgttcgccgactgcctccacgagatcgcgcgcgcgctcctgcagtccgacgtgcagatcaggatggtctccgacatgcgcgccaacatccggagggccgtcaaccttgacgccctccccgccggcaccaacaagcgccgcatcatacagcaggccgtcttcgcggagctctgcaacatgcttgatccggggaagccgtccttcacccccaccaaggggaagcccagtgtggtcatgttcgtcggcttgcaaggttctgggaaaaccactacctgtaccaaatatgctcactatcatcagctgaagggctttaaaccttcattggtttgtgctgatacattcagagctggtgcctttgatcagttaaaacagaatgctacaaaggccaagattccttactatggaaggttggttctctacatccacacctttacatattag

SEQ ID NO: 93111 - DNA, 1736 bp, Oryza sativa
  Clone ID: PAT_MRT4530_91527C.1
cccccgggcggcccccaagctcccgaagcgatttccatttcaactgctcttcctcccttcgcagcacgcacgtcgccgtagccacatggccgacccttccagatcctcccccaccgcggccgccgccggcgacgccctcctggcggcggcggcggcgcccggtgacgcgccggacgcgaccgccctcgccgtggcggccgatgcggacgcggagttcgggttccagcgcgcggagctcgggacggagaagctggccggcacggtgcagttccacgagcgccacgtcttcctctgctacaaggggcccgaggtgtggccgtcccacgtcgaggccgcggagtctgaccgcctcccccgcctcctcgccgccgccatcaagacccacaagtcggacttgaagaagaaaaccaaattgaccatttgtgaaggagaagatggcactgagtcatccaatggagacgtgttgatctttccagatatgatcagatacagagggctgacccactttgatgttgacaactttgttcaagaagtgcttgtgaaagatactgaatggcttcctggatctcctgaggctataaaaggttcctatgtttttgtttgctgccatgcaagcagggataagaggtgtggtgtctgtggacctgctttgattaagaggttcaaggaagagataggtgtacaaggccttgctgatcaggtgtcagtcagtgcatgctcacatgtgggaggccataagtatgcaggaaatgtcattgttttcagtgcagatgccaagggagaagtgactggtcattggtatggttatgtttctcctgatgatgtgcctgtcttgctacataaacatattggacaaggagagatcgtggaccatctatggaggggtcagatgggtttgtctgaagaagagcagaggaaagccctggagtctaaacacgtgacaaatggtgtgaccgaggatggtgcccatgaatcccctgaagaaactaccaacggttctgcttgcaaccctgtcgctgcaggtggttgctgccagggcaatggaggctttacctgctgccagagtgatctgccaaaggaggataagagcatcacagctgagcagaaccagaagagctccgagaagggggctgacaaagagtgtgctgctggcagcaagaagaggcacatgaagatgtgttccatgccaacctggtttgagacatgggaaacggctgacacctatgctgctcttggtattgttgcagctgctgcatcggtgttcgtcgctttcaggatctacaagaacctcaattgagaatcctcagaacagggctaggttttgtgcactaaggacagtctactgctgtaaaacagtctgctgtgagaataatatactacgtgtgcatagtaatgcaagattagaactttaaagtagctaatctgaagaaagtgaccaaagttgttttgggtaatgtcgtcctcatgtgaaactctgcttaatctccaagttttcccacgccttgcctatttgtttaccttcgcaaggcagtgaccctgctgttcgacatgacgatgttatctttattttgaactggaggtgttcttcagcatgtggatgcatgctattcagaaaatggtcagcttgtatttttgtcgctggttgctgctcctgttgttgaatgttttgagcactccatttatatggtaataaatatttcattttcaaaaaaaaaaaaaaaaaaaaaaaaaaaaaa

SEQ ID NO: 93112 - DNA, 216 bp, Oryza sativa
  Clone ID: PAT_MRT4530_91528C.1
atggcaacggggcggggcggggccgggttggacaggaacggccctgcccccgacccccgactttatcctccgcccccggccccgcagtcggagacgcagcgaaagtgcaacggccggcgacccgcggccgagacggaggcgcagcagccggcctgggcagaggcgcagcctcgcagggagctgacgaggcgcagcagcttgcaacgactgcggtag

SEQ ID NO: 93113 - DNA, 291 bp, Oryza sativa
  Clone ID: PAT_MRT4530_91529C.1
atggcaacggggcggggcggggccgggttggacaggaacggccctggccccgacccccgactttatcctccgcccccggccccggtaccatcttcggaagccggcgacgcgcgacgaagacaaaggcgaagcagccggcgacacgcggcggagttgcagcagtcggagacgcagcgaaagtgcaacggccggcgacccgcggccgagacggaggcgcagcagccggcctgggcagaggcgcagcctcgcagggagctgacgaggcgcagcagcttgcaacgactgcggtag

SEQ ID NO: 93114 - DNA, 484 bp, Oryza sativa
  unsure (1)..(484): unsure at all n locations
  Clone ID: PAT_MRT4530_9152C.1
ggccgccccttttttttttttttttttgctaaaaaacaaaatctcaacctcaattcaaataccaaatcggaatcatccaaaatatcaagagatgatcagagatggaggggtgagcgggagcaacaacaacatcatcacatgaaaatcccaaaataatcacaacaacaacatcatcaacacataaaacaatacaaacaacacatacacaatcaacaacatcggccgatccaaccaaggggacgtcggcggcggaaggcatatcccctcggccggatccgcccgcgggtgccgccgacgtcgttgtcgccgccggatcaaagggagaagccgccgccgccgccgcccaatccaagggagaagcttggggtggatggggagggggtagaggaccactagatccgaccaccggaaacgccgttgcctccacctccgncggatctgcccgacagatcgccgttgccacccgcgccgtcgcaggagaagc

SEQ ID NO: 93115 - DNA, 487 bp, Oryza sativa
  Clone ID: PAT_MRT4530_91531C.1
aactagggggctcgaggagtcggagctattggcgctggctgcgaacaaggatctgcagttcaactacaccaagaaaccagaactggttcctagcggagatgccgcagctgcccaggaattggatcgtggaagcacaaagctttctccacccgcaaaaccattggtcaagcagggctctgaagagaggtccttggtctcatcaggcagatgagatgaaatgagatgagatgctggtctgtatgatcgcatccctcaattctgtacagtttcttgattgttcttgatgtgtacaggttgtgccttatggttgagtgcaggctaatattttttattgtgaagcctgcccgttcatctgcatgtagcgtagcagcaagcagtagtatcagcaagtgttgtagccttgtaggcatgtagcaatgccagggatttgtatgggtagctgtatgaattcatctatattttgcctaaaaagttgtgtgacctttgg

SEQ ID NO: 93116 - DNA, 2043 bp, Oryza sativa
  Clone ID: PAT_MRT4530_91532C.1
ctctttactgatggcgaagtgtcgcacgagccgagtgactgatatttccctgtggagccttgtcggaagcgagagtaccagtgctactagtgagtgatgtaacgcggcatctcgcatggtccgtaagtttgacgggcgatcgacacgacgcagccgggattgcgtttgcatgcccttgcagccctggaggagggagtgcgtgtgcgccgcggattgggccggagccattgcgtggtttcgtaccagcggcaaaggaaacgtacctgacctgcagcgacgtaccacgtacctatcgcttgccgttgctgcgtgtcgctgctgatctctctctgcgtttattcttttggggttcgtttccgttcgtgattgatgtgatgtttgtttgttcgtttgtttttggagcagggtgtcgggcgaggagcgatttgtttttgatactgacttgcaccaatgtgtgtcaggttcgtagttacgatcgtgtttcacttccccttctttctttccctgcctttctctccttctcatggtccctccttgtcgccgtcggggagccagagcaagagtctggtcatggaaggacggaaagagagcttgaaaggaggcttgttggccaacttttcgtccgtggagctcaatttctcttgccctcgccagcgacaccttccaccccttgcccctctcactcatcgccctcacggacgccggtgacgggagagagagggagagagagaggccagcagcggtagcggcgagggagagggagagaggtgagagtctggagacgatgccgacgacgacctgcgtgacctcctccgccggtgccgcgacctcctcctcgatgcggcgtggccggcgtcgctccattcgatctagccgcgagggggccagatccgcacacgacggcgccaaatatgctgcctccgaccgccggcggtgacggaaccgaggtcggcaacggcggcggggcgaggtgtgagctagagtatcttcatccagttttttcggattttgaggaacccatctagttgtggcctttattgagagacgagtgtccatatgagtgtcttcagtcagagaggacaccctgtgtcttccattgtacatgccctgaaggaaccccctgaaccacaaaaccggacattcttcacctcgaactacacaacccggacgaattactcccctcgacccaatctgcggtggttttggtctacgtggcatacgcgtggtagtccagtcagcgttgcgcacagcggcgaggacggggggccggaggcggcgtcgaggatagcggcacgcacgcacgtgaccggggaccggaggcggcagcgaggacggcagcacgccccgcgtgctccgtcgacctccgggccacgctttccttccttccccttcaccttcccctccatcagatcggtaccgccgccgcaggagctccatcacgcggcccgacgactgacacctccacctgaagccatcggtgaccacgacggcacgagctttggagtacagggaggagatcctcagagcgctgcgccgctgcctccggggcctgtccgcgtgcgtgcgcgccgccgcgccatgcgtgcgcgccgccgcgccatgcgtgccgccgtgcacgtctcggccatgccgccgtcctcgccgccacctccggcccccgtccgcgtgcgtgcgcgccgccgcgttgtgtgtgccgccgtcctcgccgccgtgcgcgtctcggccctgccgccgtcctcgccaccgcctccggcccccggccgcgtgcgtgcacgccgctgtcctcgatgccgcctccgaccccccatcctcgccgtggactgccacgcgtacgccacgtagaccaaaaccaccgtggattgggtcgaggggggtaattcgtctggtttgcattgttgagggtgaggaatgtccggttttgtggttcaggggggtaattcggccgaccgcgatagttcgagggggtaattcgtactttttcttgtctcgggtgtcatataagtccaaacgggctctaaaccgctccgtgtgctgatgtggcat

SEQ ID NO: 93117 - DNA, 325 bp, Oryza sativa
  Clone ID: PAT_MRT4530_91533C.1
cgcactgtgtgtgctatgggaacagatgtttggatggatagtggagcgaggatatctcgggggatatgtaatgacacactggcccctcggagtgccccaacaagggagccccacgtggtgtttgaggactgttgtgaggatgccggtgaacactgtgtgtgggccactggagatatgatgtgtgtctggaaacttgggtgtgtgtgccacactctgtggtgtctggaacgtgtgagtgaatgtgagcctgctgtggccctctgtgcacacgaaatgtaaatgtagccacacgagtgtgatgggctgagtgtgggatgacctgtaa

SEQ ID NO: 93118 - DNA, 1458 bp, Oryza sativa
  Clone ID: PAT_MRT4530_91534C.1
atgagcctcctcactgccatgttcttgtcccttgccatcaccaccaccaccaccacggtactgttgctactgacaccggcagcggccacggcgttgcaagtgatgatgacgcaactccggcggccgtccggctccggcggctgcttcccaggcgagatggacgcgctgttggagttcaaggaaggcatcgccgacgacacgacaggcctcctcgcgtcatggcggccggaagatggccaagactgctgccggtggacaggcgtccgttgcagcgaccgcacggggcatatcgtcaagcttaaccttggcagcagggaaagcatcaacccgtttgcaatgagattgttcggcgagataagccactctctgctttctcttcaccatcttcagcacctcgatctcagccacaactcacttgaagggccaaccggcgatatgccggagtttctgggctctctgaaaagcttgagatatcttaatctctctgggatccctttccatggtctggtgcctcctcacctcggtaatctttccaacctgcgagttcttgacctctcttacacagcaaatagttactcaccagatatatcatgggtaacacgcctacgacgattacggtatctcaacatgggagacgtcaaccttagcatggcggactaccgcacatctgcttcaagattcgcacgtacctatacgaggcggaatgtatatagtgttctgaggaggcgccaacgagccggaacacccagtcggaacgtacctgaagtatggggggcgactagcaggagttcaccaaagcatgctgctgagttgattggcaaatttgacaaagagaagtctgatctggtacgcagtattgggtttggcggattgcttgaactcccacagataaatggcatcgacagaagattcaccagatggctactaagcagagtaaattgcgacagcaggactctaagggtggggaacaaccttgatgtggaattaagtccaaggaatgtgcatagggttcttgggataccattcgagggcatggaggtgtgtccaatgccggataactcgaaagatgaaaaggattcttttgtacagcactacattggggctccagggtttgaggccagcgctttgaagggtgcagaggaagtcatcaggaggacattccccgatgggatgaactcatggttcagaaccgcttttgtggtttggattgttggcacgtttcttgcgccaaagacgtctcataaggctctactcagaaaatccaaatatgtacgaaggcaacaatggtctttgtgggcctcctcttcggaaaaactgttccagcggcgaacaagcctattattcaagaaagcatggagagttgctttcttcgacctctgtgacaagctatatgacaagacatatgttttggtggccgtttcatgggcaagattcacaagaaaggcagccgcaaattaa

SEQ ID NO: 93119 - DNA, 5416 bp, Oryza sativa
  Clone ID: PAT_MRT4530_91535C.1
atggatcggcaatggatgtacgttgaccggcggtccaaagagtttattgacggcgtgcactattttttgagagtggccgaagctagcaggcaaaggggttttatttgttgtccatgcaataagtgtaagaatcagaaggagtattctgcatccaggactattcatttccacttgtttgagtcggggttcatgccaagctataattgttggacatcccacggatagcaaggtgttgaaatggaagaagatgaagtggaagacgacaatattccggactttgctcagtacgttggatttgaaggaaatcaaacgggcgaggaggaaatagctgctgatggtaacgacgttgcggatgatcttggtcagatgttgcaggacgccaaggaggactgcgaaagtgaaaagggggcccataaattggacaagatgttagaggaccacagaacttcgttgtacccaggttgtgagcaggggcacaaaaagttagataccactctggagttcttgcaatggaaggcaaaaaatggggttagtgacaaggcatttggcgatttattgaagctcgtcaagaacattcttccggagggaaacaaattgcccgagacaacgtacgaggctaagaagatagtctgtccgctaggacttgaagtttaaaagattcacgcatgtccgaatgattgtatcctatatcgcggtgaggagtatgagaacctagaagcttgccctgtttgcaaagcactacgacacaagattagacgagacgatccaagagaagttgacgggcagctaacaaagaagagaattcctgctaaggtgatgtggtatttccctataataccatggctaaggcgtttgttcaggaacaaggggaatgctagaatgatgtgatggcacgctgaagagcgtcaataggacgggatgctgagacaccccgccgatggttcgtagtggcgaaacattgacagaaaatttaaagaatttggaaaggacgcacgaaacatacggtttggtttgagtacggatggcatgaatccttttggagagatgagcagcggccatagcacttggcccgttacgatgtgtatctacaacctccccccctggctatgcatgaagaggaagtacataatgatgccgattattattcaaggccccaagcaacctggtaacgacatcgatgtgtacctaagaccactagtcgaagatcttaaactgttgtggaagaaggaaggtgtccccgtgtaggacgaggacaaacaggaggagtttaacctacgagcactgctgttcgtaaccatcaacgattggcttgtacttagcaacctatccggacagtccaacaaggggtacaaggcttgcactcactgtatggatgaaatagaaagtgtatacggaaagttgaaagatacactggaagcacgtaatgatctgaagcatatggaacaacgcggcgaccttcacccggaaccaaaggagaaaggaagccattacttgagtccagccagctacactcttagcaaggcagagaaggaaagtatgtttgaatgcttggagagcataaaggtaccgtctggatactccacgaatatcaagcgaataataagcacgaaggagaagaagttcacaaatctaaagtctcatgactgtcacgtgttgatgacacaactgctaccagttgtaataaggggtatccttccagacaatgtccgggcaacaataacaaagctatgtgtattcatgaatgcaatttcgcagaaggtcatcgatccggatagattagaagcccttcagaatgaagtgaggtacatgggcgttctgaagaagtatgttcgtaaccgtactcgtccaaaggcaagcatcgctaagggttgtggaacagaggaggtcatagaattttgcgtagaatttatcgaagatcttcgcccaatcggggtacctgaatcacgccatgaagggagattacggggaaagggaactctcggaaggaaagcaataatgacggtagacaacaatttattccgtaaagcccatttcactgttctgcaacactcttcattggtagctcctttcatcgaggagcacttggctctagttcgcgccaggaacatcgataagttcgatgcatggattacacggcatcacattgatactttccccgcgtggctacgacaacatctcatgggtaacgagtcgatcaaccaacaacttgccttcctggcgaggggaccgtctgggtcgatcgcgacattccagggatatgagatcaatgggtatacattctacatgagagcctaagacatgaagagcacgaaccaaaacagcgctgttcgtgtcgatgccatgggacacgatggaacaactgccacgtattacggtgccatcgaagacatatgggaatttgactatggtcctctcaaggtccctctgtttcggtgccaatgggttaggttgactggtggaggcgtaatgattgatgacagtgggatgacaacggttgatcttaacaaggttggatactcggacgaaccttttgtccttgccaatgatgtaacgcaagtctttttcatgaaggacatgtctagcaaaggaaagaagggcagagggcctgacgagcctaagcgtcacgtggttctcccaggcaaaagaaaaatcgtcggagttgaggacaagactgacgaggattacgatcagttggatgggcaaccccctttcacggtgacgattgaccctagcatccccctatcaaatgaagacaccccttactcacgtagcgatcacaaggagggaacaatatatttgaacgaggaagggaacgtggagagggatgcggaggggaaccagcaggggcacgtggaaagggatgtggaggggaaccaggaggaggaggctagtggaagtcaaccctccgttggacagaagagggcacgcgggcaatgaggtgcagcgaagaagcttgagggtcggcacatcataacggaagtggaagaagatggacgacctagtgccctggcagaagccgccaagaactatgtacgtcacagcggttgggttgtgcgggataacgtgcctgtcagtatggtgtactggcaaagaacaagggcatgcgaagatcatgagagctttgtcccagattcggagaaagagatgctgtggaccacaatgctcgagacattcacccttcccacgggtacagaggacaaagtgaaaaggtggactctgaagaaaatgacagaacagtttcagagcttcaagggagatctgtaccagaagtatatcctgaaggggcagacatcgaacttcgacacattcccaaagctaagggatcactaggacgagttcgttgcatataagacaggtgaacaagggcaggcgatgatggaaagaaacaaagaaaatgccgccaagaagaagtaccatcaccacttggggtcaggaggctatagcgtcgctgtgccgaagtgggaggagatggaggctagcttgcttgagaagggtatcaaaccggccaccgctaattggccggaacgatcgaagttttggtactatgctcacggtggaacgctcaacccagctgatagctcactggtcttcggcgaccagatacgagaggctgcgcgacgactaacagacgcagtggaagcctcctctcagggcacgttccgaccggacagagagagggacgagctgagtcggatgaggagcaagagataccgaggcgaagattgcagatctagagttccgggtatcgagctacgagctcagcatgcaagaggaggtggctaggaaggttgatgaacgcatggccgcacatcggtcccatgatccccagccgaccattcctactgcaatggtgagcccgtcaggaaaccgtagcagctgcacctcaacggggcaggtggcgtcgggcatggccatcccaacggacccttcaggtacttaccactgcaggccgattccagcaggatactccaaggtcgaagttgagttggtcgaaggcgcgtacgaggacctcgagctggattaccctggaggagacggtgagacgcatctacgagacacaagccatgccattattctatggcacaggcggtacatcatcctccctgggcgacaagcggcgtctcgtgcaccatctcctccggctccgccacctcaggctcctgcaccgactcctcctcgggctcctacaccgactcctccgcaagctcctcttccggcaccttcaaagtcaagggcctcccaagctccaccgcctgcccacacaagggcaacgaagaaggcgaaagttgacgccgccaagaacaaggacccggggtacgattgcacgcaagaggagcttgacgcttacgtggcatcagaagtcaagagacaattcaagcctcgatgtctagaaaagaagattcctatagacccgagtgtcaggaacttcttcaggggtatgtctgcacctgccaaggaggccatcaagctatcggactatgagcgaacgctgaagaaagcatcttttggaaagtccaaaccagtccctcagcttggagagcaaccaaactaggagatcgagccgttggtgaccggtgaagaaatgacgatagaagaatttattactgacactggtctaactacggatcaattgctaggagtcgcaccaatcgaaaaggcggaagtgaaatacatgtacgaactcggtaaaccgcttgtcaagcctgagctggtgcagtccctacccacacaaatatacaagttccatcagctgtacatggagatgagcgccaccggtagagagatgatcggagcgaggatcagggacacggacttcttgcaaggagatgacattcaatggatcaatttcaagggaatctacgaacaataccagctggacgccctcgacgtctctattatgagttgctggattttaatggagattcaaagggcccgacggcggggggttttcgatactggattcatcgaccctcgaaaagtaaacgtcgcaatgctcgaccaatatccgcaagccacagaggacaatctcgtccatctcctgaaggcgcagcattacaagacgttcatactgttgccgtacatactcaccgtcaacgtatatgactcaatggataaaaaagagtctacgtttgacaaggttttcgaacttatagacagggcttggtatcggttccgtcatttggtccgcgacaactggagagaaagacttaggcggaagttcaaatttccttttattcgcatgagggataacctgaccacacacaaggaatttatcccggcggttcaagaacaactaatgggattcatcaatgaacaaatccttgatcccaagggtgaattctaatacgacggaaacacaattcataggtccttagcttctgagctagcgactactacgtcgaaatcgtagctagct

SEQ ID NO: 93120 - DNA, 308 bp, Oryza sativa
  Clone ID: PAT_MRT4530_91536C.1
ccggccgggattgccagccatcctccttcgtagcctcgcgtcgcactccaggctgcggctgccgcccggccgactccctcgccgtgacaatcgctctcctgtcatggcttacgacagtgacaaccctttcctgaaccatccaaaggatttcctcagctcaaacaactctgtcaaggccaagaagcaaggccatcctgcgaactccttctgtaatagaattgaccttgatttccatacccccagaaaagaattgaacgtagatacattgacaacaagtgtcgattctctgaaactgcttctatcaaagg

SEQ ID NO: 93121 - DNA, 6302 bp, Oryza sativa
  Clone ID: PAT_MRT4530_91537C.1
atggatcggcaatggatgtacgctgaccggcggtacaaagagtttattgacggcgtgcattattttttgagagtggccggagctaataggcaaaagggttttatttgttgtccatgcaatgtgtaagaatcagaaggagtattctgcatccaggactattcatttccacttgtttgagtcggggttcataccaagctataattgttggacatctcacggagagcaaggtgttgaaatggaagaagatgaagtggaagacgacaatattccggactttgctcagtacgctggatttgaagaaaatcaaacgagcgagtaggaaagggatgctgatggtaacaacgttgcggatgatgttggtcagatgttgcaggacgccaaggaggattgcgaaagtgaaaaggaggcccataaattggacaagatgttagaggatcacagaacgtcgttgtacccaggttgtgagcaggggcacaaaaagttggataccactctggagttcttgcaatggaaggcaaaaaatggtgttagtgacaaggcatttggcgatttattgaaactcgtcaagaacaatcttccggagggaaacaaattgcccaagacaacgtacgaggataagaagatagtctgccctctaggactggaagttcagaagattcacgcatgtccgaatgattgtatcctatatcgcagtgaggagtacgagaacctagaagcatgccctatttgcaaagcactacgatacaagattagacgagatgatccaggagaagttgacgggcagctaacgaagaagagaattcctgctaaggtgatgtggtatttccctataataccacggctaaggcgtttgttcaggaacaaggggaatgctagaatgatgcgatggcacactgaagagcgtcaacaggacgggatgctgagacaccccgccgatggttcgcagtggcgaaacatcgacagaaaatttaaagactttggaaaggatgcacgaaacatacggtttgttttaagtacggatggcatgaatccttttggagagatgagcagcggccatagcacttggcccgttacgatgtgtatctacaacctccccctgtggctatgcatgaagaggaagtacataatgatgtcgattataattcaaggccccaagcaacctggtaacgacatcgatgtgtacctaagaccactggtcgaagatcttaaactattgtggaagaaggaaggtgtccccgtgtgggatgaggacaaacaggaggagtttaacctacgagcgctgctgttcgtaaccatcaacgattgtcctgcacttagcaacctatccgggcagtccaacaaggggtacaaggcttgcactcactgtatggatgaaacagaaagtacgtatcttaagcactgtaggaaagttgtctacatgggtcatcgtcgattccttgcagcaaaccacccggtacggaagaaaggcaagcactttgaacataacgcggaccactgtacgaagcctaaacatcgcagcgggaaaacattgtttgctatggttaaagatcttaaagtagtgtttggaaaggggcctggcagccagcttatattgagcgaagatggtcacgtggcgatgtggaaaaagaactctatattttgggagttaccctattgggaattcttggacgtccaccacgcaatcgacgtgatgcacctcactaaaaatctttgcgtaaaccttcttggcttcctaggtatatatggaaagtcgaaagatacactggaagcacgtaatgatctgaagcatatggaacaacgcggtgaccttcacccggaaccaaaggagaaaggaagccattacttaagtccagccagctacactcttagcaaggcagagaaggaaagtatgtttgaatgcttggagagcatcaaggtaccgtctggatactccacgaatataaagcgaataataagcacgaaggagaagaagttcacaaatctaaagtctcatgactgtcacgtgttgatgacatagctgctactagttgtaataaggggtatcctcccagacaatgtccgggcaacaataacaaagctatgtgctttcatgaacacaatttcgcagaaggtcatcgatcctgatagattagaagccctgcagaatgatgtggtgcaatgtcttgtcagctttgaattgatatttccaccttcatttttcaatataatgacgcatctgctttgtcaccttgtcaaagagatcggtattctcggtcctgtgtacctacacaacatgtttcctttcgagaggtacatgggcgttctgaagaagtatgttcgtaaccgtgctcgtccagaggcaagcatcgccaaggggtatggaacagaggaggtcattgaattctgtgtagaatttatcgaagaccttcgcccaatcggggtacctgaatcacgccatgaagggagactacggggaaaggggactctcggaaggaaagcaataatgacggtagacaacaatttattccgtaaagcccatttcacggttctgcaacaatcttcattggtggctccctacatcgaggagcactaggctctagttcgcgccagaaacatcggtaagtccgatgcatggattacaaggcatcacattgatactttctccacgtggctgcgacaacatctcatgggtaacgagacgattaaccaacaactggccttcctggtgaggggaccatctggctcgatcgcgacattccagggatatgaaatcaatgggtacacattctacacgagggcccaagacatgaagagcacgaaccagaatagtgctgttcgtatcgatgccatgggacacgatggtacaactggcacatattacggtgccatcgaggacatatggaaacttgactatggacctctcaaggtccctctgttccggtgccaatgggttaggttgactgatggaggcataacgattgatgacaatgggatgacaacggttgactttaacaaggttggatactcggacgaaccttttgtccttgccaatgatgttacccaacttttttacgtcaaggacatgtctagcaaaggaaaaaagggcaaagggcctgacgagccgaagcgccacgtggttctcccggtgcgccctcatcttctccaccaacacttagacgtttttcgatctcggcttctccttcgccgccaccgtgcctagggcaaccccgcgccgacaccgccgtcgtctctcgccgtcgcttgacggtcctcgacgcctccgccgtagacgccgccgctgcatctcttgggtgttttttgtatgcacagatggctgatcgcgatgaggaacagatactatacgatacaatcgcagagggaagcagctagtactggaacgaagaagaggggaacgaggaccaaaaccagtacttgaacgaggaggggaacgtggagagggatgcggaggggaacgatgaggaggaggctagtggaagtcatccctccgctggacagaagagggcacgcggacaacgaggtgccgcgaagaagatagagggtcggcacatcataactgaggtggacgaagacggccgacctagtgccccggcagaagcagccaagaattttgtacgccacagcggttgggttgtgagggacaacgtgcctgtcagcacggtgtactggcgcagaacaagggcacgcggggataatgacagctttgtcccggactcagagaaagagatgttgtggaccacaatgctcgagacattcacgctacccgcaggtacggagaacatagtgaaacagtggactctgaagaaaatggcagaatagttccagagcttcaagagagatctctacaagaaatacatcctgaagggactaacaccgaacttcgacgtattcccaaagctaagggatcattgggacgagttcgttgcttacaagatagggcaacaagggcaagcgatgatggccagaaacaaagacaatgccaccaagaagaagtaccatcaccacttggggtcaggcggatatagcgtcgcaatgcataagtgggaggagatggaggcaagtttgatcgagaggggtatcgaaccggccaccgctaaatggccggatcgatcgaagttctggtactatgctcacggtggatagcttaacccagttgatggctcccttgtcttcagcgatcagatacgcgaggctgccagtcgactaacggacgcagtggtagcctcttctcagggcacattcctacccgacagagagaaggatgagctgtcactcgccctacagactcccgagcatccaggacgaacacgagggaaaggcgtgattccctggaagattggatttaaggaggacatccacacgtacaggagtcggatgaggagcaagagagataccgaggtgaagattgcagatcttgagtacagggtatcgagctacgagctcagtatgcaagaggaggtggcaaggaaggtggatgaacgtatggccgcacatcggtcccaggatccccagccgtacattcatcctgcaatggtcagcccatcaggaaatcgtagcagctgcgcctcaatggggcaggtcggatcacagagcatggacgccatgcaaacccaggacgaaaccacctgccccgttgatgagatcctgcagcggacatcatgtgagctgcatattcccttcaagaacttatcaatcaaggtggcgtcgagaatgaccatcccaacggacccttccgagacttaccactacagaccgattccagcaggatactcgagggtcgaagttgagctggtggaagccgcgtacgaggacctcgagttggactacccaggaggagacggtgagacgcatctacgagacacaagccacgccatcatactatggcgcaagcggtacatcatccttcctgggcaacaagcggcatctcgtgcaccatctcctccggctccgccatctcctcctgcaccatctcctccggttcctccggcacgtcctcctgcaccatctcctccagctcctccgccacctcctgctgcaccatctcctccggctcctccgcctccaccatgtccgcctgcacctcccaagacaaggtctcgccaagctccgtcgcctgcccgcacaagagaaacgaagaaggcaaaagttgacgccaccaaaaacaaggagccaccgtacgattgcagtcaagaggagcttgatgcttatgtggcaggagaggtgaagaggcaactcaagcctcggagtcctgaaaagaagatacctattgacccgagcgtgaagaacttcttcaagggaatgtccacaacaaacaaggaggcgttacagatatcagactatgaccgaacacttcagagagcctatcacaagaagtccaaactagtccctcagcttggagaacaaccaaaccaagaggtcgagccgttggtgaccggcgaagattttggcataacggaatttatttcagacaccggtctaactgtggatcagttggttggaggcgcaccaatcccgaaggcggaagtggcatacaagtttgaactcagtaaaccacttgtcaaacctgaatagttgtagtccctaccgacacatatgtacaaattccatgaatggtacatggaaatgagcggcaagggtagagagatgttcggagcgaggatcagaaaccccgacttcttgcaaggagaagatgttctctggatccatttcaaggatctcttcgatctgtaccagctggactccctcgacgtctctcttctgagcgcatggattttaatggagattcaaagggtccgacggcggagggtctatgatactgggttcatcgaccctcggaaaatcaacaccgaaatgatcgacaagtacgagaaagacacagaggacaatctcgtccatctcttaacgcagcagcatttcaagacgtacatactactgccgtacaacacagaattccactgggtcctgttattcttcgacttggacgcatgcagagtcactgtatatgactcaatgaataaagaggagaagatttttgacaaggtcttcaaactaatagacagggcttgggatcggttccgtcaattggtccgcaggacttggaaagaaaaacttggacggaggtttcattttccacgtattcacatgagggataatctcccacacaaggattttatcactgctgttcaagaacaactgatgggattcatcaacgaaaaagtccttaatcccgacggtgaattctactacgacggatcgacaattcataacgtcagtccttcctcttctgacataacgccggcgtcgaa

SEQ ID NO: 93122 - DNA, 624 bp, Oryza sativa
  Clone ID: PAT_MRT4530_91538C.1
gaaaggcgtagactttttcatgaatggggaacaatcatatggtacatataaataacaaggcttcatgagccagctgccccaaaatgccacataaattaatcagcacacccttgtcgatggatgggtcggtaagccataagcaccccacaaacttaatctaacggcaccgacacacgcacgtgggctccatcgaggatgcacatatgcttacacatggaccaatattcacaatgtccgcgtatatacgtgcgaatacatacgctaaaccatacggcagacatgacgaataaacactccgaaaccaggagagcgggctgtcgaaccggtccacggggaacggctaggcctcgacagggtgcaagtggtttcaatcctgccgcggatgctccacgtcaaatgtacttccaggatgatgacaggactgagccgaatttatcgcgaatacttatgccaacctgcactgcctgaccaagaaaattcaactgggaagcaggttccaatttttccgtcaagggtatctccttgtccccaactctagctgaactttccccatctgggaacattcaacaaaccaaaattgctttaattggccccatggtttttacgaagccccaaaaattttcc

SEQ ID NO: 93123 - DNA, 5862 bp, Oryza sativa
  Clone ID: PAT_MRT4530_91539C.1
atggatcagcaatggatgtacgctgaccggcggtccaaagagtttattgacggcgtgcactattttttgagagtggccgaagctaacaggcaaaggggttttatttgttgtccatgcaataagtgtaagaatcagaaggagtattctgtatccaggactattcatttccacttgtttaagtcggggttcatgccaagctataattgttggacatcccacggagagcaaggtgttgaaatggaagaagatgaagtggaagacgacaatattccggactttgctcagtatgttggatttgaaggaaatcaaacgggcgaggaggaaatagctgctgatggtaacgacgttgcggatgatcttggtcagatgttgcaggacgtcagggaggactgcgaaagtaaaaaggaggcccataaattggacaagatgttggaggaccacagaacttcgttgtacccaggttgcgagcaggggcacaaaaagttggataccactctggagttgttgcaatagaaggcaaaaaaatggggttagtgacaaggcatttggcgatttattgaaactcgtcaagaacattcttctggggggaaacaaattgcccgagacaacgtacgaggctaagaagatagtggcaatttcatatgttaattagagtttttaacatttaatttactatcattcatatgctaattataattgactggagaatttttaaaagtattaaatttaatatatttttaaaactatcattcatatattagagtttttcacaatttaatttactatctttcatatgctacttatatatgactattcgaatttttaaaaggtttaaatcatgcatgtggcatttacatatgttaattagagtttttagcatttaatttaatataattcctatgctaagtacatatgatgattacaatttttattaattttaaatcatgcagtatgtacatacatatcttaattagagtttttaccaatataataatatcattcatatatatgctaagtatatatgattattggaatttttattaattatatttgcttattacgatttatccacttaatttattacagacaaaaataatttttcgaagtaattgtcattaatctttgtactttaaataatgttaatgcattaacttctattttataaacacatatgtaagcgaaaatcatatgcagtgctataatctttagtcccggttcttaaccctaaccgggtttaaaaagaatttcgaaatagcgggaaaagatatttactcccggttgttaagaaaaaccgggactaaagatatctgtagtcccggttgttctcaacaaccgggagtaaatatcttttctttactcccggttgttctcaacaaccgggactaaagatatctttagtcccggttgttctcaacaaccgggagtaaagatccgggcgtatatatattcccggtgcgccctcgtcttcttcaccaacacttagacgttttcggccgatcgatctctctcggcctctctccttcgccacgccgccgctgctttcgccgccgcgcgcgcaatgccgccgccgccacgccacgccgccgccgccgtcgccacgccgccgccgccaccgccgccgcgccaaccgccgccccgatgccgccacaccgccgttaacgaacgagaacaagaacgatcgaacgaacgagagtgagaacgaacatgtcaacgtacgttgccgcgagaacgtgaactagaacgagaacgatcgaacgaacgagagcgagaacgaacacgtcaacgtacgttgccgcgagaacgtgaacgagaacgagaacgatcgaacgaacgagagcgagaacgagaacgatcgaacgaagacaagcgagaacgtgaatgagaacgagcgaacgaacgaggacgaacgttaacgtgaaatgcaatatatatatatatatatatatatatatatatatatatatatttgttacttcgcatttatccaaatacatctttttgtatcttgcaaaaaagacgtgttgtcggagtcgtccgtcaagcctgagtggaagagctagccctagaaggaattggagcaggcaagtgacgtaataatataaatgattgttatatttgtaatgcaattaattaagattattagacctgtaattagacttatcatataagattgtgtagtgttctaatattatttgagttttaatataagattattttattgcaaattagacttagtatgacattattgactacggaattggtgcgactcctatcaattgactattgtagtcttaattagacttagcatatacgcacgaaacacttagcatacatgactattttagtcttaacatgtaatattatttgagttttaatataagattactttatttgtaattagacttagtatgtaattattgactacggaattggtgcgacaagtagcaattgactattgtagtcttaattagacttagcatatacgcacgaaacacttagcatatacatgactattttagtcttagcatgcatgtaatattatttgagttttaatataagattattttatttgtaattagacttagtatataattatttactagctagggttgtataatatacgtcacctagacttagcttatatcatgatttgtaattagacttagcacgtaaggttgtgtagggttctaatgtacgacatttacacttagcatacatgacttagattgttaaaacataaatgtctcgtaacttagcagatgtttcttgtatcaacagatggctgaccgcgatgaggaacagatattgtacgatacaatcgcggagggaagcagccagtactggaatgaagaagaggggaacgaggatccaaaccagtacttgaacgaggaagggaacgtggagagggatgcggaggggaaccagcaggggcacgtggaaagggatgtggaggggaaccaggaggaggaggctagtggtagtcaaccctccgttggacagaacagggcacgcgggcaacgaggtgcagcgaagaagcttgagggtcagcacatcataacggaagtggaagaagatggacgtcctagtgccccggccgaagccgccaagaactatgtacgtcacagcggttgggttgtgcgggataacgtgcctgtcagtacggtgtactggtgaagaacaagggcacgcggagatcatgagagctttgtcccagattcggagaaagagatgctgtggaccacaatgctcgagacattcacccttcctgcgggtacagaggacaaagtgaaaaggtggactctgaagaaaatggcagaacagtttcagagcttcaagggagatctgtaccggaagtatatactgaaggggcagacaccgaacttcgacacattcccaaagctaagggatcactgggacgagttcgttgcatataagacaggtgaacaagggcaggcgatgatggaaagaaacaaagaaaatgccgccaagaagaagtaccatcaccacttggggtcaggaggctatagcgtcgcgatgccgaagtgggagcagatggaggctagcttgattgagaggggtatcgaaccggcaacagccaattggccggaacgatcgaagttctggtactatgctcacggtggaacgctcaacccagctgatggctcactggtcttcggcgatcagatacgagaggctgcgcgacgactaacagatgcagtggaagcctcctctcagggcacgttccgaccagacagagatagggacgagctgacactcgccctgcagactccagagcatccaggacgaacacgagggaaaggggtgattccttggaagattggtttcaaggaggacatccacacgtacaggagtcggatgaggagcaagagagataccgaggcgaagattgcagacctagagttccgggtatcgagctacgaactcaacatgcaagaggaggtggcaaggaaggttgatgaacgcatggccgcacatcggtcccatgatccccagccgaccattcctcctgcaatggtgagcccgtcaggaaaccgtagcagctgcgcctcaacggggcaggtaggatcacagagcatggacgccatgcaaacacaggacgaatcgacctgtcccgttgatgacatcactcagcggacaccatgtgagctgcatattcctttcaagaacttatcaataaaggtggcgtcgggcatggccatcccaacggacccttcaggtacttaccactgcaggccgattccagcaggatactcgaaggtcgaagttgagttggtcgaaggcgcgtacgaggacctcgagctggattaccctggaggagacggtgagacgcatctacgagacacatgccatgccattattctatggcgcaggcggtacatcatcctccctgggcgacaagcggcgtctcgtgccccatctcctccggctccgccatctcctcctcaggatcctgcaccgtctcctcctcatgctccgccagcaccgtctccacctcaggctccagcatcgactcctcctcaggatcctgcaccgactcctcctcgtgctcctacacctactcccctgcaagctcctcttccggcaccttcaaagtcaagggcccccccagctccaccgcctgcccacacaagggcaacgaagaaggcgaaagttgacgccgccaagaacaaggacccggggtacgattgcacgcaagaggagcttgacgcttacgttgcatcagaagtcaagagacaattcaagcctcgaagtctagaaaagaagattcctatagaccccagtgtcaggaacttcttcaggggtatgtttgcatctgtcaaggaggccatcaagctatcggactatgagcgaacgctgaagaaagcatcttctggaaagtccaaaccagtccctcagcttggagagcaaccaaaccaggagatcgagccgttggtgaccggtgaagaaatgacgatagaacaatttattactgacaccggtctaactacggatcaattgctaggagtcgcaccaatcgaaaaggcggaagtgaaatacatgtacgaactcggtaaaccgcttgtcaagcctgagctgctgcagtccctacccacacaaatgtacaagttccatcagctgtacatggagatgagcaccaccagtagagagatgatcggagcgaggatcagggacacggacttcttgcaaggagatgacattctctggatcaatttcaggggaatctacgaactataccagctggacgccctcgacgtctctagtatgagttgctggattttaatggagattcaaagggcccgatggcggagggttttcgatactggattcatcgaccctcggaaagtaaacgtcgcaatgctcgaccaatatccacaagaaacagaggacaatctcgtccatctcctgaaggcgcagcattacaagacgttcatactgttgccatacaacacagaattccactgggtgcttttactcttcgacctggatgcctgcaccgtcaacgtatatgactcaatggataaaaaagagtctacgtttgacaaggttttcgaacttatagatagggcttggtatcggttccgtcatttggtccgcggcaaatggagagaaagacttaggcggaagttcaaatttccttttattcgcatgagggataacctgaccacacacaaggaatttatcgcggcggttcaagaacaactcatgggattcatcaacgaagaaatccttgatcccaagggtgaattctactacgacggaaacacaattcaccggtccttagcttctgagctagcagcaagtactaatatacacttttcaattctaggtttttaacactat

SEQ ID NO: 93124 - DNA, 377 bp, Oryza sativa
  Clone ID: PAT_MRT4530_9153C.1
gaggacgtgaagaaagaacaggcggcggaggaggcgacacgcgccgacaggatcgacggcaactcgggaggggtctatcgactggcgaagctgaagtaccccactttcagcgggacggtcccgcgcctgaggatcaccaagagcacgcgctacatcgagtactacggcatgccaatgaagatgggggagtccagggctacgatgcacatggaggggatggctgagctgtggatgacgacctatgaaaagcgccatgagcgagataggggacggaactgggaagccgtggaggagagattcgggccctatgatcacaagcagaagctcacgggactcttggaactgaggcaggaagggatcatgacagtgagccgaga

SEQ ID NO: 93125 - DNA, 618 bp, Oryza sativa
  Clone ID: PAT_MRT4530_91540C.1
atgcgcgctcgtccaaagccgccgctgagtccgattttgattctacccggggtgaatcgcgccaattcttgccgcacggttggattgaagatagacggtggtatcccctctcacaattcaaaccattcacccctgaatcggccgttttcaccctcgccgccgccgcgcgtcgcgcccggattggtgccaacacatcgctagccgaattcacacgcggtcaagccaaaccttcgccgtatactaagccctaactgaagctctgcgtcaagttttatctcgccgcgccaagccgagcaccgccgcccccgcgctgctctgttcttcgccgccaagaagtttttccggccgcaatccttcatctcggccaccctagccaccaacccatccacacatcaaattaatccctccgccgccgcttgccgtcgtggagaaccgtaactccctcccctcttcggccgcaaccactttccccctccatcgccgcctttggggaacggccgaaggtagaagaagagaagagagagagagagactgacaggtcttgaggattcttctgactcaatagataatatcaatcaatctcaggacatcgagcaaggcaagttaccatatactttt

SEQ ID NO: 93126 - DNA, 913 bp, Oryza sativa
  Clone ID: PAT_MRT4530_91541C.1
attccataaggtgtgcttcagagattgggttactattagttacctttttttagcaatgatgaccggaaaacaaaatacagactacgtacgaaaacatctgttgaccaaaagaccaagacgaactagatgtccaaaatcatgatatcaaaatagatgcatattaagcaaatagatttcctagatggctaatggtgaacgcatatcgcaagatctttcgtgaaataattacttagagggtaatcctccttttggtatgtccagcaaatcacgaatttttcaatttcgtaactgtttaatgaaagtgaaagaccattttttcaagtatgggtcttttagtatgtggcaattagactaaaataatattttggaaaaacacgtggttgggatagctctcaaagatcaacattcttctttatataatgtagttcgaaagaaagaatttaccgtggcataggttacgagcaaaaccccgttgatcatatttcttttaagcgagctattgttgaccaaaaactaatcgaatggaacaatttgaaccttaggttagctaatataaccctatcaaatgagaaaatgattactttgtatggtcaattcgtaaaaaaaacaattttctgttaactataggtacatcgtgatcatgaactccaatattagaattcgcaagaggattctatgaaatttaaaggtaccattaaaatgtcaatgttttatgtggtttcataataatgtaatcttaatgaaggataacatggctaaaagagaggggggtgagacaaaaaaatgtgttgatgttattgcataaaagacaatccaacagttttctttgagggtcactatttggagagcaggatgtcacattctgctgagggtttacgtatcaaataagttatctaaaaggattgtattgtca

SEQ ID NO: 93127 - DNA, 6504 bp, Oryza sativa
  Clone ID: PAT_MRT4530_91542C.1
atggatcggcaatggatgtacgctgaccggtggtccaaagagtttattgacggcgtgcattattttttgagagtggccgaagctaacaggcataagggttttatttgttgtccatgcaataagtgtaagaatcagaaggagtattctgcatctaggactattcatttccacttgtttgagtcggggttcatgctaagctataactgttggacatcccacggagagtaaggggttgaaatggaagaagatgaagtggaagacgacaatattccggactttggtcagtacgctggatttgaaggaaatcaaacgggcgaggaggaaagggatgctgatggtaacgacgttgcagatgatcttggtcagatgttgcaggacgccaaggaggactgcgaaagtgaaaagggggcccataaattggacaagatgttagaggaccacagaacgtcgttgtacccaggttgcgagcaggggcacaaaaagttggataccactctggagttcttgcaatggaaggcaaaaaatggtgttagtgacaaggcatttggcgatttattgaaactcatcaagagcattcttccagagggaaacaaattgcctgagacaatgtacgaggctaagaagatagtgtaccctttaggactggaagttcagaagattcacgcatgtctggatgattgtatcctatatcgcagtgaggagtacgagaacctagaagcatgccctgtttgcaaagcactacgatacaagattagacgagacgatccaggagaagttgacggacaactaacaaagaagagaattcctgctaaggtgatgtggtatttccctataataccacggctaaggcatttgttcaggaacaaggggaatgctagaatgatgcgatggcatgctgaagagcgtcaacaggacgggatgctgagacaccccgccgatggttcgcagtggcaaaacatcgacagaaaatttaaagactttggaaaggacgcacgaaacatacggtttggtttaagtacagatggcatgaatccttttggagagatgagcagcggccatagcacttggcccgttacgatgtgtatctacaacctcccccctggctatgcatgaagaggaagtacataatgatgccgattattattcaaggccccaagcaacctggtaacgacattgatgtgtacctaagatcactagtcgaagatcttaaactgttgtggaaaaaggaaggtgtcccagtgtgggacgaggacaaacaggaggagtttaacctacgagcgctgctgttcgtaaccatcaacgattggcctgcacttagcaacctttccggtcagtccaacaaggggtacaaggcttgcactcactgtatggatgaaacagaaagtacgtatcttaagcactgtaggaaggttgtgtacatgtgtcatcgtcgattccttgctgcaaaccacccggtacggaagaaaggcaagcactttgaacataaggcggaccaccgtacgaagcctaaacatcgcagcgggaaaacagtgtttgctatggttaaagatcttaaagtagtgtttggaaaggggcctagaagccagcctatagagagcgaagatggtcacgcggcgatgtggaaaaagaactctatattttgggagttaccctattgggaattcttgaacgtccgccacgcaatcgatgtgatgcacctcactaagaacctttgcgtaaaccttcttggcttcctaggtgtatatggaaagtcgaaagatacactggaagcacataatgatctgaagcatatggaacaacgcggcgaccttcacccggaaccaaaggagaaaggaagccattacttgagtccagccagctacactcttagcaaggcagagaaggaaagtatgtttgaatgcttagagagcataaaggtaccatctggatactccacgaatatcaagcgaataataagcacgaaggagaagaagttcacaaatctaaagtctcatgactgtcacgtgttaatgacacaactgctaccagttgtaataaggggtatccttctagacaatgtccgggaaacaataacaaagctatgtgcattcatgaacgcaatttcgcagaaggtcatcgatccggatatattagaagcccttcagaatgatgtggtgtaatgtcttgtcagttttgagttgatatttccaccttcatttttcaatataatgacgcatctgctttgtcaccttgtcaaagagatcagtattctcgggcctgtgtacctacacaacatgtttccttttgagaggtacatgggcgttctgaagaagtatgttcgtaaccgtgctcgtctagaggcaagcatcgccaaggggtatggaacagaggaggtcatcgaattttgcgtagaatttattgaagaccttcgcccaatcggggtacctgaatcacgccatgaagggagactacggggaaagggaactctcgggaggaaagcaataatgacggtagacaacaatttattccgtaaggcccatttcacggttttgcaacaatcttcattggtagctccttacatcaaggagcacttggctctagttcgcgccagaaacatcggtaagtccgatgcatggattacacggcatcacattgatactttccccgcgtggctacaacaacatctcatgggtaacgagacgatcaaccaacaactggccttcctggcgaggggaccatctgggtcgatcgcgacattccagggatgtgagatcaatgggtacacattctacacgagagcccaagacatgaagagcacgaaccaaaacagtgctgttcgtatcgatgccatgggacacgatggaacaactggcacgtattacggtgccatcgaggatatatgggaacttgactatggtcctcccaaggtccctctgttccggtgccaatgggttaggttgactggtggaggcgtaatgattgatgacagtgggatgacaacggttgaccttaacaaggttggatactcggacgaaccttttgtccttgccaatgatgtaacgcaagtcttttacatgaaggacatgtctagcaaaggaaagaagggcagagggcctgacgagccgaagcatcacgtggttctcccagcgcgccctcatcttctccaccaacacttagaagttttttccccgatcgatctcccttggcttctccttcgccgccactacctagggcatccccgcgccgacgccgccgtcgtatctcgccgtcgtctccgccgccgccgcatctctggggtgagagccgccaccgcctccccctctctctctctctgtttcttgtatgaacagatggttgatcgcgatgaggaacagataatgtacgatacaatcgcggatggaagcaaccagtactagaacgaagaagaggggaacgaggatccaaaccagtacttgaacgaggaagggaatgtggagagggatgcggaggggaaccaggaggggaacgtggagagggatgtggaatggaaccaggtagaggaggctagtggaagtcaaccctccgctggacagaagagggcacgtgggcaacgaggtgccgcgaagaagctagagggtcggcacatcataacgaaagtggacaaagacggctaacctagtgccccggcggaagcagccaagaactacgtacgacacagcggttgggttgtgcgggataacgtgcctgtcagtttgatacaattcagagttcaacaagcggaagcgtaaatagttaattattacatgggcagcgaaggcccggcacacacaaagacaaacgagaaacagcggaagactagggcgacgaccacaggcgcttgacggcaggcacgagctagacaccaaaaccttcatcttccagagactcctcttctgggtttgggaaaaaattgagcaagactgagtacaaccaccgtactcaacaagacacacccacaagtgcataataaatgcaagggagtacaagggagttataacataaagggttagggttgcagtaaacagcatttaaagatacttagttgctcaaagctattttgtaaacacgattctagaactatacaatattatttatcaaggccgtgaacccacacgaacctgccttaacccaaggcctacgatgattcagaccgaaccggcaacccgaccctggcccacaagacacatcttcctcacgtgcaaccacgtgccacataccaccacggtatacggatggaagacgtgacatagttcccaacccatcctagccataaacaagagtaccgacccaaccccacctacggccggaacccccgggacaggtaggcaggactgagcccccagcagcaggacaccggccctgtgccatgatatctcgactaccgggccgcagctcgtgtagccttcatttgtcctagagatgtccatcgacccccgacttcgtccatctccatccgtgtacttttgtttataaccagtctgagctacaaactaagccttacccactagacatgtggaagtacggtagtgctttgcaacagaggcccgaagaccggtccttatatggccgaggtgctactatcaaaaccatgcaccccgagcccagcctaaaaccatttttggggattttgaatagagggggcggtgtgaatccaattccacaatactccaacaattccaaaatgcaataattttaaagcaacataattttataaactgggattcaatatgttcaaggatgatgtgacttgccttgctcactttcccaaacgccggcttcaacttccacgaagagcggatcttccgaagctgcagcgtctacacgaccaacggaaaagaaaaggcttttacactaagaaactccatataacaagcagaaacaaagcacaaaaatgggttcttgacttcttaaggaaaaattagagacttgaacggtccaattccgagttcaaatggccaagttatggccatttgaagtttatatgctctttaaatgaatatttgcgaatttcttcatttaaattttaatttaaaatggatttattgcgtcagccgaggggaggggcgcgcggaccgggtccactggggtggggcccacgcggcagccccacggcccacggtggaccgggcgcacccgggctcgcacctgccggcgccgtgggtcccacgcccccacacggcagccgcggggcgcgcccgaaggcggccacgccggcacagccgacgggaggcggcgcgcccgcgcccctatggtcgccggcggcggccataggtacggcggagcggcggccgagaaaggggagggaagggggaaacgaatcggcggtccacggctcaccccgggtcgacggcgacgacgggaacggcgaccggagcggaggaaggcggcggcgcggctcgggtggacggggtcgacggtgctccggcggtcggcgagcgaaacggaggggtggacgaggtcgccggggatgcggtgaagccgaaggtggcgacgccgatgcgggaggtggtccggggcgacgccggcggcggaccggagctcggcggtgacggcggagagagagagcgacggcgcgagctcgattccgacggggagagagggcggcgagtggcggaaacggtggagggaggcacggggaaggtttatatagggttgggaggggaagagagcggccggacgagggggaaacgggcgcggaagatccggccgccattgatggcgccggcgaggttaggggaggggtttccaaacgaatccgagggagagagagagggaaaaatggagggggagggagctggccggaccggcccaagagggagagagggagggaaagggaactttttagggtttttctttttataaaacctttttaactttgtttatttcttcttaattattatttgtgctctgaaaattccactaaaatttatttacgccttttaggcttttaggaaatatacaaaaatcctccaagccttatttgacttttaactttgcacattttaattgttggaggctttcacacggattttaattattctaggcataatttcgaggatgtattttagagtcgttttgggacgcgacataatgcatcccacgcacattgcagattccactgggtctttttactcttcgacctggaggcctgcaccgtcaacgtatatgactcaatcgataaagaagagtcgatgtttgacaaggtttttgaacttatagacagggcttggtatcggttccgtcatttggtccgcggcaaatggagagaaagacttaggcggaagttcaattttccttttattcgcatgagggataacctgatcacacacaaggaatttatcgcggcggttcaagaacaactcatgggattcatcaacgaacaaatccttgatcccaagggtgaattctactacgacggaaatacaattcataggtccttagcttctgagataacgactactactacgtcgaaatctccccgaggggtcgggccgctcccgtttcggc

SEQ ID NO: 93128 - DNA, 5389 bp, Oryza sativa
  Clone ID: PAT_MRT4530_91543C.1
atggatcggcaatggatgtacgctgaccgacggtccaaagagtttattgacggcgtgcactattttttgagagtggccgaagctaacaggcaaaggggttttatttgttgtccatgcaataagtgtaagaatcagaaggagtattctgcatccaggactattcatttccacttgtttgagtcagggttcatgccaagctataattattggacatcccacggagagcaaggtgttgaaatggaagaagatgaaatggaagacgacaatattccggattttgctcagtacgttggatttgaaggaaatcaaacgggcgaggaggaaagggatgctgatggtaacgacgttgcggatgatcttggtcagatgttgcaggacgccaagaaggactgcgaaagtgaaaagggagcccataaattggacaagatgttagaggaccacagaactttgttgtacctaggttgcgagcaggggcacaaaaagttggataccactctggagttcttgcaatggaaggcaaaaaatggggttagtgacaaggcatttggcgatttattgaaactcgtcaagaacattcttccggagggaaacaaattgcccgagtacgaggctaagaagatagtctgcccgctaggactggaagttcagaagattcacgcatgtccgaatgattgtatcctatatcgcggtgagtatgagaacctagaagcatgccctgtttgcaaagcactacaatacaagattagacgagacgatccaggagaagttgacgggcagctaacaaagaagagaattcctgctaaggtgatgtggtatttccctataataccacagataaggcatttgttcaggaacaaggggaatgctagaatgatacgatggcacgctgaagagcgtcaacaggatgggatgctaagacaccccgccgatggttcgcagtggcgaaacatagacagaaaatttaaagaatttggaaaggacgcacgaaacatacggtttggtttgagtacggatggcatgaatccttttggagagatgagcagcggccatagcacttggcccattacgatgtgtatctacaacctcccccctggctatgcatgaagaggaagtacataatgatgccgattattattcaaggcctcaagcaacttggtaacgacatcgatgtgtacctaagaccactggtcgaagatcttaagctgttgtggaagaaggaaggtgtccccgtgtgggacgaggacaaacaggaggagtttaacatacgagcgctgctgttcgtaaccatcaacgattggcctgcacttagcaacctatccggacaatccaacaaggggtacaaggcttgcactcactgtatggatgaaacagaaagtgtatacggaaagtcgaaagatacactggaagcacataatgatctgaagcatatggaacaacgcggcgaccttcacccggaaccaaagaagaaaggaagccattacttgagtctagccagctacactcttagcaaggcagagaaggaaagcatgtttgaatgcttggagagcataaaggtaccgtctggatactccacgaatatcaaacgaataataagcatgaaggagaagaagttcacaaacctaaagtctcatgactgtcacgtgttgatgacacaactgctaccagttgtaataaggggtatccttccagacaatgtccgggcaacaataacaaagctatgtgcattcatgaacgtaatttcgcagaaggtcatcgatccggatatattagaagcccttcagaatgatgtgaggtacatgggcgttctgaagaagtatgttcgtaaccgtgctcgtccagaggcaagcatcgccaagggttatggaacagaggaggtcatcgaattttgcgtagaatttatcgaagatcttcgcccaatcggggtacctgaatcacgccatgaagggagactacggggaaagggaactctcggaaggaaagcaataatgacggtagacaacaatttatttcgtaaagcccattccacagttctgcaacaatcttcattggtagctccttacatcgaggagcacttggctctagttcgcgccaggaacatcggtaagtccgatgcatggattacacggcatcacattgatactttccccgcgtggatacgacaacatctcatgggtaatgagtcgatcaaccaacaacttgccttcctagcgaggggatcgtctgggtcgatcgcgacattccagggatatgagatcaatgggtacacattctacacgagagcccaagacatgatgagtacgaaccaaaacagcgctattcgtgtcggtgccatgggacacgatggaacaactggcacgtattacggtgccatcgaggacatatgggaacttgactatggtcctctcaaggtccctctgttccggtgccaatgggttaggttgactggtggaggcgtaatgattgatgacagtgggatgacaacggttgaccttaacaaggttggatactcggacgaaccttttgtccttgccaatgatgtaacgtaagtctttttcgtgaaggacatgtctagcaaaggaaagaagggcagagggcctgacgagtctaagcgtcacgtggttctcccaggcaaaagaaaaatcatcagagttgaggacaagactgacgaggattacgattagttggatgggcaaccccctttcacggtgacaattgaccctagcatcctcctatcaaatgaagacaccccttactcacgtagcgatcacaaggagggaacaataactttaaataattgtaatgcattatcttctattttagaaaaacatatgtaatggaaaataatattcagtgcgcttatcagtagtcccggttcttaaccctaaccaagtttaaaaagaatttagaaatagcgggaaaatatctttagtcccggtcgatgagaacaaccgggagtaaagatatctttactcccggttgttgagaagaaccgggagtaaagatcttttttttagtcccggttgttctcaacaaccgggagtaaagatatctaatctttactcccgcttgttctcatcaaccgggactaaagatctagggctatatatattcccgatgcgcgccctcgtcatctccaccaacacttagaagtttttgcccgatcgatctctctcggcttctccttcgccgccactgcctagggcatccccacgccgacgccgccgccgtatctcgccgtcgtctcgcgctcgtcgtcgtcgccgccgcctccgcctccttcgccgctgccgcatctctggggtgagagccgccgcgcgccgcctccctctcgatctctctctccgatctcgatctctctctctctccctctcgagtttcagacgccgacgccgacctcgtcacgacacgacgccgcgccacgccgatgccgcgcgcggcgccacgccgccgtgccacgcgccggcccgatgccgcgcgcggcgccacgccgccgccgcgccgccccgccgccgctccgctgccgccacaccgagaacgtgaacgagcgaacgaacgtgaacgagaacaaggtgaatgaacgtgaatgagaacgagcgaacgaacgtgaacgagccaacgaacgtgaatgagaacgagcgaacgaacgtgaacgagaacaaggtgaatgaacgtgaacgagaatgagcgaacgaacgtgaacgagccaacgaacgtgaatgagaacgagagaatgaacgtgaacgagaacaagagattatttgatgaacgcatggccgcacatcggtccaatgatccccagccgaccattcctcctgcaatggtgagcccgtcaggaaaccgtagcagctacgcctcaacggggcaggtggcgtcgggcatggccatcccaacggacccttcaggtatttaccactgcaggccgattccagcaggatactccaaggtcgaagttgagttggtcgaaggcgcgtacgaggacctcgagctggattaccctggaggagacggtgagacgcatctacgagacacaagccatgccattattctatggcgcaggcggtacatcatcttccctgggcgacaagcggcgtctcatgcaccatctcctccggctccgccatctcctccttaggatcctgcaccgtctcctcctcatgctccagcaccgtctccacctcaggctcctccggcaccttcaaagtcaagggccccccaagctccactgcctgcccacacaagggcaacgaagaagggaaaagttgacgccgccaagaacaaggatccagagtacgattgcacgcaagaggagcttgacgcttacgtggcattagaagtcaagagacaattcaagcctcgaagtccagaaaagaagattcctatagacccgagtgtcatgaacttcttcaggggtatgtctgcacctgccaaggaggccattaagctatcggactatgagcgaacgctgaagaaagcatcttctggaaagtccaaaccagtccctcagcttggagagcaaccaaaccaggagatcgagccgttggtgaccggtaaagaaatgatgatagaagaatttattactgacaccggtctaactacggatcaattgctaggagtcgcaccaatcgaaaaggcggaagtgaaatacatgtacgaactcggtaaaccgcttgtcaagcctgagctgttgcagtccctacccacacaaatgtacaagttccatcagctgtacatggagatgagcgccaccggtagagagatgatcggagcgaggatcagggacacggacttcttgcaaggagatgacattctctggatcaatttcaagggaatctacgaactataccagctggacgccctcgacgtctctattatgagttgctggattttaatggagattcaaagggcccgacagcggggggttttcgatactggattcatcgaccctcggaaagtaaacgtcgcaatgctcgaccaatatccgcaagccacagaggacaatctcgtccatctcctgaaggcgcagcattacaagacgttcatactgttgccgtacaacacagagttaaacgtatatgacttaatggataaaaaggagtctacatttgacaaggttttcgaacttatagacagggcttggtatcggttccgtcatttggtccgcggcaaatggagagaaagacttaggcggaatttcaaatttccttttattcgcatgagggataacctgaccacacccaaggaatttatcgcggcggttcaagaacaactcatggaattcatcaacgaacaaattcttgatcccaagggtgaattctactacgacggaaacacaattcataggtccttagcttctgagctagcgactactactacgtcgaaatcatagcta

SEQ ID NO: 93129 - DNA, 1115 bp, Oryza sativa
  Clone ID: PAT_MRT4530_91544C.1
gcacgagatttctcccagtctctaacggtctctccttgactctcccgccccacgccccactcacccagaccaaacaactctctccctcagtccctcctccctcctgccctctcactcactggatccccatggctttcctcctcataggacttggatttgggcatcctgcggctctccagcgaaatgatcggtggtggctgttttggtgatggcggcatcggcggcgacgggaggggcggatccagcgacctcttcccctccctcacatatcccatcgtctgttcgctcccctctcgcgcggatccgccgtcggcggcgatgggaggggcggatccggtgacctcttctcctccctcacatatcccatcgcttgttcaccccctcttgcgcggatccaccgtcggcggcgatgggaggggcggatacagcaacctcttcccctcccgcgctgatcccgtcgtctgttcgcccccctcccccccccctctcgcgcggatccgccgtcggcgattatgggaggggcggatccggcgacctcttcccctcccacgctgatcccgtcatctctccgcccccctctcgcatggatcagccatcggcagctacgggagcgtcggatcttgtgaccacttcccctcccgcatggatcccgtcatctctccgccccctctcgcgcagatttgccagtagctgtccggctggtcggagagaaggtttcaagatggcggacgaaggttgacctgtggttctgctgatgaggaggccatggccgtcggatcctgtgagagcggactccccgttagctgttcggctggctggagaggagctttcaagatggtggaccgaggagagcgcggctgagtggtgccattgaagatagtgggcgtttcttcatgatttcatgtgcgttatcggttgattttgtttgtgtatgttcatgtgggggtccggggcatatggatgtgtgttctttgcttgttgggagttctgaccagcgatggttttggtagctgtaagagctgcaattcttcaaataaatgtaactgtaccacttattcaattaaagatgctatgcaatctcctttctttggtgataataaagtagtgttattgtc

SEQ ID NO: 93130 - DNA, 1269 bp, Oryza sativa
  Clone ID: PAT_MRT4530_91545C.1
atggcgaaggctatggagcaagaacggcgtgaggtgaagagtcgtgcgagtgccttgccaggccagaggcgtctcaggcgaagggtgcaaggcgaagactatctaccgaaggaagacaacttcgccttggcaagttcgcccccgcaagggccgaagaagcctttccggcccatcaagcctgggggcaatagggtcggcgatcgccagacggcccatcaggggcccatgagcccctatgtcatcatgtacccctgtaaatgttcctttcataagggtaatcatatggatcggcaatggatgtacgctgactggcggtccaaagagtttatcgagggtgtgcattattttttgagagtggccgaagctaacaagcgtaacggttttacttgttgtccatgcaataagtgtaagaaccagaaggagtattctgtatctaggactattcatttccacttgtttgagtcagggttcatgccaagctataattgttggacatcccacggtgagcaaggggttgaaatggaagaaggtgaagtggaggacaacaaccttcccgactgggctcagtacgctggatttgaaggaaatcaaacgggcgaggtggatagggatgctggcgataacgacgctgcggatgatcttggtcagatgttgcaggacgcaaaggaggactgtgaaagttgcaagcaggggcacaaaaagttagataccactctggagttcttgcaatggaaggcaaaaaatggtgttagtgacaaggcatttggcgatttattgaaactcgtcaacaacattcttccagagggaaacaaattgcccaagacaacgtacgaggctaagaagatagtctgccccctaggactggaagttcagaagattcacgcatgcccgaatgattgtatcctatatcgcggtgaggagtatgagaacctagaagcatgccctgtttgtaaagcactacgatacaagattagacgagatgatccaggagaagttgacgggcagctaacgaagaagagaattcctgctaaggtaatgtggtatttccctataataccatggctaaggcgtttgttcaggaacaaagggaatgctagaatgatgcgttggcacgctaaagagcgtcaacaggacgggatgctgagacaccccgccgatggttcgccgtggcgaaacatcgacagaaaatttaaagactttggaaaggacgcacgaaacatatggtttggtttaagtatggacggcatgaattgtcacgaccggaaataa

SEQ ID NO: 93131 - DNA, 535 bp, Oryza sativa
  Clone ID: PAT_MRT4530_91546C.1
tcaaaacgctaaccctagcttgttgccttcgcgcgagctctcctccatagagaaccccaggccacaggcccctgcggggacccctcccatggctcccctccccgtgcccccaccccggccattgctgccgtcgcctccacctccgcggcggcaggaggtgggggcggcggtgaggctaactacgaggtttccgatgactaccgcgccaagtgggagcgccacgagcgcgctgtgtaggagctgctccagcgctgccgcgccttcaccatggccgtgcgcaccaacgactccgccgtgcgggcgcgcctccaccgcctggaaaaacgggagcggctgggacgacaggttggcacgaaagatggagactgccaacgtcggtgttggcggcgcggatggcgtggagcgcaaccacggggtcatcgggtgggggcggggaggaaggggagcgcaggtggaggccgatgaggcgagcacggcagaggcgagctggcggggcatccgtcctcatgtccttgtcagaggtggaagaaggtag

SEQ ID NO: 93132 - DNA, 6286 bp, Oryza sativa
  Clone ID: PAT_MRT4530_91547C.1
atggatcggcaatagatgtacgctgaccggcggtccaaagagtttattgacggcgtgcactattttttgagagtggccgaagctaacaggcaaaggggttttattttttgtccatgcaataagtgtaagaatcagaaggagtattctgcatccaggattattcatttccacttgtttgagtcggggttcatgccaagctataattgttggacatcccacagagagcaaggtgttgaaatggaagaagatgaagtggaagatgacaatattccggactttgctcagtatgttggatttgaagaaaatcaaacgggcgaggaggaaatagctgctgatggtaacgacgttgcggatgatcttggtcagatgttgcaggacgccagggaggtctgcgaaagtgaaaaggaggcccataaattggacaagatgttggaggaccacagaacttccttgtacccaggttgcgagcaggggcacaaaaagttggataccactctggagttcttgcaatggaaggcaaaaaatggggttagtgacaagacatttggcgatttattgaaactcgtcaagaacattcttccggggggggaaacaaattgcccgagacaacgtacgaggctaagaagattgtctgcccgttaggactggaagttcataagattcacgcatgtttgaacgattgtatcctatatcgcggtgaggagtatgagaacatagaagcatgccctgtttgcaaagcactacgatacaagattagacgagacgatccaggagaagttgacgggcagctaacaaagaagagaattcctgctaaggtgatgtggtatttccctataataccacggctaaggcgtttgttcaggaacaaggggaatgccagaatgttgcaatggcacgctgaatagcgtcaacaggacgggatgctgagacaccccgccgatggttcgcagtggcgaaacatcgacagaaaatttaaagaatttggaaaggacgcacgaaacatacggtttggtttgagtacggatggcatgaatccttttggagagatgagcagcggccatagcacttggcccgttacgatgtgtatctacaaccacccccctggctatgcatgaagaggaagtacataatgatgccgattattattcaaggccccaagcaacctggtaacgacatcgatgtctacctaagaccactggtcgaagatcttaaacagttgtggaagaaggaaggtgtccccgtgtgggacaaggacaaacaggaggagtttaacctacgagcgctgctgttcgtaaccatcaacgattggcctgcacttagcaacctatccggacagtccaacaaggggtacaaggcttgcactcactatatggatgaaacagaaagtacgtatcttaagcactgtaggaaggttgtatacatgggtcatcgtcgattccttgcaacaaaccacccggtacggaagaaaggcaagcacttcgaacataaggccgaccaccgtacgaagcctaaacatcgcagtgggaaaacagtgtttgctatggttaaagatcttaaagtagtgttcggaaaagggcctggaagccagcctatagagagcgaagatggtcatgcggtgatgtggaaaaagaactctatattttgggagttaccatattaggaattcttagacgtacgccacgcaatcgacgtgatgcacctcactaagaacctttgcgtaaaccttcttggcttcctaggtgtatacggaaagtcgaaagatacactggaagcacgtaatgatctgaagcatatggaacaatgcggcgaccttcacccagaaccgggagtaaagatccgggggtatatattttcccgaacgttttcggccgatcgatctctctcggcctctctccttcgccgccactgcctagggcaaattcccgcgctgacgccgccgtatctcgccgtcgtctcgagctcgtcgtcctcgccgccgccgcatctctggggtgagagcctccgccgcctttcccttcatcgatctccgatctcgatctctctctccgtcgcgccgcctgccacgagacgccacgccacgacgacaccgcgccacgccgccgccggcacgccacgccgccgccttcgccactgcgcgcgccacgccgctgccgccacgccacgccgccgccttcgccgccgcgcaacgccgccgccgcatgcaacgacacgccgccgccgccgtcgccacgccgccgccgccgcgccaagcgccggcccgatgccgccacaccgccattaacgaacacgtcaacgtacgttgccgcgagaacgtgtacgagaacgagaacgatcgaacgaacgagagcgagaacgaacacgtcaacgtaagttgccacgagaacgtgaatgagaatgagcgaacgaacatgaacgagctagggaacgtgaacgagcgaacgaacgtgaacgagctagggaacgtgaacgagcgaacgaacatgaacgaacgtgaacgtgaaatgcaatatatatatgttacacggcatttatcctaatacatattttttgtatcttgcagaaaagacgtgttgtcggagtcgtccctcaagccggagtggaagagctagccctagaaggaattcgtgcaggcaagtgatgtaataatataaatgattgttatatttgtaatgcaattaagaatattagacttgtaattagacttagcatataagattgtgtagtgttctaatattatttgagttttaatataagattattttattgtaaattagacttattatgtaataattgactacggaattggtgcgactcctagcaattgactattgtagtcttaattagacttagcatatacgcacgaaacacttagcatacatgactattttagtcttagcatgtaatattatttgatttttaatataagattattttatttgtaattagacttactatataattattgactacggaattggtgtgactcctagcaattgacaattttagtcttaattagacttagcatatacgacagttacacttagcatacatgactctttcagtcttagcatgtaatattatttgagttttaatataagattactttatttgtaattagacttagtatgtaattattgactacggaattggtgcgactcctagcaattgactattgtagtcttaattagatttagcatatacgcacgaaacacttagcatatacatgactattttagtcttagcattaaaacataaatgtcgtgtgaccagatgtttcttgtatcaacagatggctgaccgcgatgaggaacagatattgtacgatacaatcgcggagggaagcagccagtactggaatgaagaagaggggaacgaggatccaaaccagtacttgaacgaggaagggaacgtggagagggatgcggaggggaaccagcaggggcacgtggaaagggatgtggaggggaaccaggaggaggaggctagtggtagtcaatcctccgttggacagaagagggcacgccggcaacgaggtgcagcgaagaagcttgagggtcggcacatcataacggaagtggaagaagatggacgtcctagtgccccggctgaagccgccaagaactatgtacgtcacagcggttgggttgtgcgggataacgtgcctgtcagtacggtgtaagagatcatgagagctttgtcccagattcggagaaagagatgctgtggaccacaatgctcaagacattcacccttcctgcgggtacagaggacaaagtgaaaaggtggactctgaagaaaatggcagaacaatttcagagcttcaagggagatctgtaccagaagtatatcctgaaggggcagacaccgaacttcgacacattcccaaagctaagggatcactgggacaaggtcgttgcatataagacaggtgaacaagggcaggcgatgatggaaagaaacaaagaaaatgccaccaagaggaagtaccatcaccacttggggtcagaaggctatagcatcgcgatgccgaagtggaaggaaatggaggctagcttgattgagaggggtatcgaaccggcaaccgccaattggtcggaacgatcgaagttctggtactatgctcacggtggaacgctcaacccagctgatggctcactggtcttcggcgatcagatacgagaggctgcgcgacgactaacagatgcagtggaagcctcctctcagggcacgttccgaccggacagagatagggacgagctgacactcgccctgcagactccagagcatccaggatgaacacgagggaaaggggtgattccttggaagattggtttcaaggaggacatccacacgtacaggagtcagatgaggagcaagagagataccgaggcgaaggttgcagatctggagttctgggtatcgagctatgaactcagcatgcaagaggaggtggaaggttggttgatgaacgcatggccgcacatcggtcccatgatccccagccgaccatttctcctgcaatggggagcccgtcagaaaaccgtagcagctgcgtccaacggggcaggtaggatcacagagcatggacgccatgcaaacacaggacgaatcgacctgtcccgttgatgacatcactcagcggacaccatgtgagctgcatattccttacaagaacttatcaataaaggtggcgtcgggcatggccatcccaacggacccttcaggtacttaccactgcaggccgattccagcaggatactcgaaggtcgaagttgagttggtcgaaggcgcgtacgaggaccacgagctggattaccctggaggagacggtgagacgcatctacgagacacaagccatgccattattctatggcgcaggcggtacatcatcctccctgggcgacaagcggcgtctcgtgcaccatctcctccggctccgccatctcctcctcaggatcctgcaccgactcctccttatgctccgccagcaccgtctccacctcaggctccagccctgactcctcctcaggatcctgcaccgactcctcctcgggctcctacacctactcctccgcaagctcctcttccggcaccttcaaagtcaagggccccaccagctccaccgcctgcccacacaagggcaacgaagaaggcgaaagttgacaccgccaagaacaaggacccggggtacgattgcacgcaagaggagcttgacgcttacgttgcatcagaagtcaagagacaattcaagcctcgaagtccagaaaagaagattcctatagaccccagtgtcaggaacttcctcaggggtatgtctgcacctgtcaaggaggccatcaagcaatcggactatgagcgaacgctgaagaaagcatcttctggaaagtccaaaccagtccctcagcttggagagcaaccaaaccagaagatcgagccgttggtcaccgggaaagacatgacgatagaagaatttattattgacaccggtctaactacgaatcaattgctaggagttgaaccaatagaaaagaaggaattgaaatacatgtacgaactcggtaaaccgcttgtcaagcctgggctggtgcagtccctacccacacaaatgtacaagttccatcagctgtacatggagatgagcgccaccggtagagagatgatcggagcgaggatcagggacccggacttcttgcaaggagatgatattctctggatcaatttcaagggaatctatgaagtataccagctggacgccctcgacgtctctattatgagttgctggattttaatggagattcaaagggcccgatgacggagggttttcgatactggattcatcgaccctcggagagtaaacatcgcaatgctcgaccaatattcacaagaaacagaggacaatctcgtccatctcctgaaggcgcagcattacaagacgttcatactgttgccgtacaacatagaattccactgggtgcttttacttttcgacctgtcggcctgcaccgtcaacgtatatgactcaatggataaaaaagagtctacgtttgacaaggtttttgaacttatagacagggcttggtatcggttccgtcatttggtccgcggcaactggagagaaagacttaggcggaggttcaaatttccttttattcgcatgatggataacctgaccacacacaaggaatttatcgcggcggttcaagaacaactcatgggattcatcaacgaagaaatccttgatcccaagggtgaattctactacgacggaaacacaattcaccggtcc

SEQ ID NO: 93133 - DNA, 5528 bp, Oryza sativa
  Clone ID: PAT_MRT4530_91548C.1
acatttatatagtggcttttggttaaataattactcaatagtattccttgttcttggctctgcatgcagacaggcccaacaagcccagcatgcgcggaaaatcgagcagatcatggatcggcaatggatgtacgctgaccggcggtccaaagagtttattgacggcgtgcactattttttgagagtggccgaagctaacaggcaaaggggttttatttgttgtccatgcaataattgtaagaatcagaaggagtattctgtatccaggactattcatttccacttgtttgggtcggtgttcatgccaagctataattgttggacatcccacggagagcaaggtgttgaaatggaagaagatgaagtggaagacgacaatattccggactttgctcagtatgttggatttgaagaaaatcaaacgggcgaggaggaaatagctgctgatggtaacgacgttgcggatgatcttggtcagatgttgcaggacgccagggaggactgcgaaagtgaaaaggaggcccataaattggacaagatgttggaggaccacagaacttcgttgtacccaggttgcgagcagaggcacaaaaagttggataccactctggagttcttgtaatggaaggcaaaaaatggggttagtgacaaggcatttggtgatttattgaaactcgtcaagaacattcttccggggggaaacaaattgcccgagacaacgtacgaggctaataaaatagtctgcccgttaggactggaagttcataagattcacgcatgtccgaacgattgtatcctatatcgtggtgaggagtatgagaacctagaagcatgccttgtttgcaaagcactacgatacaagattagacgagatgatccaggagaagttgatgggcagctaacaaagaagagaattcctgctaaggtgatgtggtatttccctataataccacggctaaggcgtttgtttaggaacaaggggaatgctagaatgttgcgatggcacgctgaagagcatcaacaggacgggatgctgagacaccccgccgatggttcgcagtggcgaaacatcgacagaaaatttaaagaatttggaaaggacgcacgaaacatacggtttggtttgagtacggatggcatgaatccttttggagagatgagcagcggccatagcacttggcccgttacgatgtgtatctacaacctcccccctggctatgcatgaagagaaagtacataatgatgccgattattattcaaggccccaagcaacctggtaacgacatcgatgtgtacctaagaccactgatcgaagatcttaaacaattgtggaagaaggaaggtgtccccgtgtgggacgaggacaaacaggaggagtttaacctacgagcgctgctgttcgtaaccatcaacgattggtctgcacttagcaacctatccggacagtccaacaaggggtacaaggcttgcactcattgtatggatgaaacagaaagtgtatacggaaagtcgaaagatacactggaagcacgtaatgatctgaagcatatggaacaacgcggcgaccttcacccggaaccaaaggagaaaggaagccattacttgagtccagccagctacactcttagcaaggcagagaaggaaagtatgtttgaatgcttggagagcataaaggtaccgtctggatactccacgaatatcaagcgaataataagcacgaaggagaagaagttcacaaacctaaagtctcatgactgtcacgtgttgatgacacaactgctaccagttgtaataaggggtatccttccagacaatgtccgggcaacaataacaaagctatgtgcattcatgaacgcaatttcgcagaaggtcatcgatccggatagattagaagcccttcagaatgaagtgaggtacatgggcgttctaaagaagtatgttcgtaaccatgctcgtccagaggcaagcatcgccaagggttatggaacagaggaggtcatcgaattttgcgtagaatttatcgaagaccttcgtctaatcggggtacctgaatcacgccatgaagggagactacggggaaagggaactctcggaaggaaagcaataatgatggtagacaacaatttattccgtaaagcccatttcactgttctgcaacactcttcattggtagctccttacatcgaggagcacttggctctagttcgcgccaggaacatcggtaagtccgatgcatggattacacggcatcacattgatactttccccacgtggctacgacaacatctcatgggtaacgagtcgatcaaccaacaacttgccttcctggcgaggggaccgtctgggtcgatcgcgacattccagggatatgagatcaatgggtacacattctacacgagagcccaagacatgaagagcacaaaccaaaacagcgctgttcgtgtcgataccatgggacacgatggaacaactgccacgtattacggtgccatcgaggatatatgggaacttgactatggtcctctcaaggttcctctgttccggtgccaatgggttaggttgactggtggaggcgtaatgattgatgacagtggtatgacaactgttgacctaaacaaggttggatactcggacgaaccttttgtccttgccaatgatgtaatgcaagtctttttcatgaaggacatgtctagcaaaggaaagaagggcagagggcctgatgagcctaagcgtcaagtggttctcccaggcaaaagaaaaatcgtcgaagttgaagacaagactgacgaggattacgatcaattggatgggcaaccccttttcacggtgacgattgaccctagcatcctcctatcaaatgaagacaccccttactcacgcagcgatcacaaggagggaacaatatacttgaacgaggaagggaacgtggagagggatgcggaggggaaccagcaggggcacgtgaaaagggatgtggaggggaaccaggaggaggaggctagtggtagtcaaccctccgttggacagaagagggcacacgggcaacgaggtgcagcaaagaagcttgagggtcggcacatcataacggaagtggaagaagatggacgtcctagtgcctcggccgaagccgccaagaactatgtacgtcacagcggttgggttgtgcgggataacgtgcctatcagtacggtgtactggcgaagaacaagggcacgcggagatcatgagagctttgtcccagattcggagaaagagatgctgtggaccacaatgctcgagacattcacccttcctacgggtacagaggacaaagtgaaaaggtagactctgaagaaaatggcagaatagtttcagagcttcaagggagatctgtaccagaagtatatcctgaaggggcagacaccgaacttcgacacattctcaaagctaagggatcactgggacgagttcgttgcatataagacaggtgaacaagggcaggcgatgatggaaagaaacaaagaaaatgccgccaagaagaagtaccatcaccacttggggtcaggaggctatagcgtcgcgatgccgaagtgggaggagatggaggctagcttgattgagaggggtatcgaaccggcaaccgccaattggccggaacgatcgaagttctggtactatgctcacggtggaacgctcaacccagctgatggctcactggtcttcggcgatcagatacgagaggctgcgcgacgactaacagatgcagtggaagcctcctctcagggcacgttccgaccggacagagatagggacgagctgagtcggatgaggagcaagagagataccgaggcgaagattgcagatctagagttccgggtatcgagctatgaactcagaatgcaagaggaggtggcaaggaaggttgatgaacgcatggccgcacatcggtcccatgatccccagccgaccattcctcctgcaatggtgagcccgtcaggaaaccgtagcagctgcgcctcaacggggcaggtggcgtcgggcatggccatcccaacggacccttcaggtacttaccactgcaggccgattccagcaggatactcgaaggttaaagttgagttggtcgaaggcgcgtacgaggatctcgagctggattaccctggaggagacggtgaggcgcatctacgagacacaagccatgccattattctatggcgcaggcggtacatcatcttccctgggcgacaagcggcgtcttgtgcaccatctcctccggctccgccacctcaggatcctacaccgactcctcctcgggctcctacacctactcctccgcaagctcctcttccggcaccttcaaagtcaagggccccccagctccaccgcctgcccacacaagggcaacgaagaaggcgaaagttgacgctgccaagaacaaggacccaaggtacgattgcacgcaagaggagcttgacgcttacgttgcatcagaagtcaagagacaattcaagcctcgaagtccagaaaagaagattcctatagaccccagtgtcaggaacttcttcaggggtatgtctgcacctgtcaaggaggccatcaagctatcggactatgagcgaacgctgaagaaagcatcttttggaaagtccaaaccagtccctcagcttggagagcaaccaaaccaggagatcgagccgttggtgaccggggatgacatgacgatagaagaatttgttattgacaccggtctatctacggatcaattgctaggagttgaaccaatagaaaaggcggaattgaaatacatgtatgaactcggtaaaccgcttgtcaagcccgagctggtgcagtccctacccacacaaatgtacaagttccgtcagctgtacatggagatgagcgccaccggtagagagatgatcggagcgaggatcagggacctggacttcttgcaaggagatgatattctctagatcaatttcaagggaatctacgaagtataccagctggacgcccttgacgtctctattatgagttgctggattttaatggagattcaaagggcccgacggcggagggttttcgatactggattcatcgaccctcggagagtaaacgtcgcaatgctcgaccaatatccacaagaaacagaggacaatctcgtccatctcctgaaggcgcagcattacaagacgttcatactgttgccgtacaacacagagttaaacgtatatgactcaatggataaaaaagaatttacgtttgataaggtttttgaacttatagacagggcttggtatcggttccgtcatttggtccgtgacaaccggagagaaagacttaggtggaggttcaaatttccttttattcgcatgagggataacctgaccacacacaaggaatttatcgcggcggttcaagaacaactcatgggattcatcaacgaagaaatccttgatcctaagggtgaattctactacgacggaaacacaattcatcggtctttagtttctgagctagcagcgagtactactactacgtcgaaatcg

SEQ ID NO: 93134 - DNA, 6353 bp, Oryza sativa
  Clone ID: PAT_MRT4530_91549C.1
atggatcgacaatggatgtacgctaactggcggtccaaagagtttattgacggcgtgtactattttttgagagtggccgaagctaacaggcaaaggggttttatttgttatccatgcaataagtgtaagaatcagaaggagtattctgcatccaggactattcatttccacttgtttgagtcggggttcatgccaagctataactattggacatcccacgaagagcaaggtgttgaaatggaagaagatgaagtggaagacgacaatattccggactatactcagtacgttggatttgaaggaaatcaaacgggcgaggaggaaagggatgctgatggtaacgacgttgcggatgatcttggtcagatgctgcaggacgccaagaaggactgcgaaagtgaaaagggggcccataaattggacaagatgttagaggaccacataacttcgttgtacccaggttgcgagcaggggcacaaaaagttggataccactctggagttcttgcaatggaaggcaaaaaatagggttagtgacaaggcatttggcgatttattgaaactcgtcaagaatattcttccggagggaaacaaattgcccgagacaacgtacgaggctaagaagatagtctgcccgctaggactggaagttcaaaagattcacgcatgtccgaattattgtagcctatatcgcggtgagaagtatgagaacctagaagcatgccctgtttgcaaagcactacgatacaagattagacgagacgatccaggagaagttgacgggcagctaacaaagaagagaattcctgctaaggtgatgtggtatttccctataataccatggctaaggcgtttgttcaggaacaaggggaatgctagaataatgcgatggcatgctgaagagcgtcaacaggacgggatgctgagacaccccgccgatggttcgcagtggcgaaacatcgacagaaaatttaaagaatttggaaaggacgcacgaaacatacggtttggtttgagtacggatggcatgaatccttttggagagatgagcagcggccatagcacttggcccgttacgatgtgtatctacaacctcccccctggctatgcatgaagaggaagtacataatgatgccgattattattcaaggccccaagcaacctggtaacgacatcgatgtgtacctaaaaccactggtcgaagatcttaagctgttgtggaagaaggaaggtgtccccgtgtgggacgaggacaaacatgaggagtttaacatacgggcgctgctgtttgtaaccatcaacgattggcctgcacttagcaacctatccagacagtccaacaaggggtacaaggcttgcactcactgtatggatgaaacagaaagtacgtatcttaagcactgtaggaaggttatatacatgggtcatcgtcgattccttgcagcaaaccacccggtacggaagaaaggcaagcacttcgaacataaggctgaccaccgtacgaagcctaaacatcgcagcgggaaaacagtgtttgctatggttaaagatcttaaagtagtgttcggaaaggggcctggaagccagcctatagagagcgaagatggtcacacggcgatgtggaaaaagaactctatattttgagagtgaccctattgggaattcttggacgtacaccacgcaatcgacgtgatgcacctcactaagaacctttgcgtaaaccttcttggcttcctaggtgtatacggaaagtcgaaagatacactggaatcacgtaatgatctgaagcatatggaaaaacgcggcgacctacacccggaaccaaatgagaaaggaagccattacttgagtccagccagctacactcttagcaaggcagagaaggaaagtatgtttgaatgcttggagagcataaaggtatcgtctggatactccacgaatatcaagcgaataataagcacgaaggagaagaagttcacaaacctaaagtctcatgattgtcacgtgttgatgacacaactgctaccagttgtaataaggggtatccttccagacaatgtccgggcaacaataacaaagctatgtgcattcatgtacgcaattccgcagaaggtcatcgatccggatagattagaagcccttcagaatgatgtggtgcaatgtctcgttagttttgagttgatatttccaccttcatttttcaatataatgacgcatctgctttgtcaccttgtgaaagagatcagtattctcgggcctgtgtacctacacaacatgtttcctttcgagaggtacatgggcgttctgaagaagtatgttcgtaaccgtgctcgtccagaggcaagcatcgccaagggttatggaacagaggaggtcatcgaattttgcgtagaatttattgaagaccttcgcccaatcggggtacctgaatcacgccatgaagtgagactacggggaaagggaactctcggaaggaaagcaataataacagtagacaacaatttattccgtaaagcccatttcatggttctgcaacaatcttcattggtagctccttacatcgaggagcacttggctctagttcgcgccaggaacatcggtaagtccgatgcatggattacacggcatcacattgatactttccccgcgtggatacgacaacatctcatgggtaacgagtcgatcaaccaacaacttgccttcctagcgaggggaccgtctgggtcgatcgcgacattccagggatatgagatcaatgggtacacattctacacgagagcccaagacatgaagagcacgaaccaaaacagcgctgttcgtgtcgatgccatgggacacgatggaacaactggcacgtattatggtgccatcgaggacatatgggaacttgactatggtcctctcaaggtccctctgttctggtgccaatgggttaggttgactggtagaggcgtaatgtttgatgacagtgggatgacaacggttgaccttaacaaggttggatactcggacgaaccttttgtccttgccaatgatgtaacgcaagtctttttcgtgaaggacaggtctagcaaaggaaagaagggcagagggccttacgagcctaagcgtcacgtgattcccgatgcgcgccctcgtcttctccaccaacacttagaagtttttgcccgatcgatctctctcggcttctccttcgccgccactgcctagggcatccccgcgccgacgccgccgctgtatctcgccgttgtctcgcgctcgtcgtcgtcactgccgagccgccgccgcctccctctctcgatctctcagatgtttcctgtatgaacagatggctgatcgcgatgaggaacagatattgtacgatacaatcgcggagggaagtagccagtactggaacgaagaagaggggaacgaggattcaaaccagtatttgaacgaggaagggaacgtggagagggatgcggaggggaaccaggaggggcacgtggaaagggatgtggaggggaaccaggaggaggaggctagtggaagtcaaccctccgttggacagaagagggcacgcgggcaacgaggtgccgcgaagaagcttgagggtcggcacatcataacggaagtggaagaagatggacgacctagtgccccgacagaagccgccaagaactatgtacgtcacagcggttgggttgtgcgggataacgtgcctgtcagtacagtgtactggcgaagaacaagggcacgcggagatcatgagagctttgtcccagattcggagaaagagatgctgtggaccacaatgctcgagacattaacccttcccgctggtacagaggacaaagtgaaaaggtggactctgaagaaaatggcagaacagtttcagagcttcaagggagatctgtaccagaaatatatcctgaagggccagacaccgaacttcgacacattcccaaagctaagggatcactgggacgagttcgttgcatataagacaggtgaacaagggcaggcgatgatggaaagaaacaaagaaaatgccgccaagaagaagtaccatcaccacttggggtcaggcggctatagcgtcgcgatgccgaagtgggaggagatggaggctagcttgcttgagaggggtatcgaaccggccaccgctaattggccggaacgatcgaagttctggtactatgctcagggtggaacgctcaacccagctgatggctcactagtcttcggcgatcagatacgagaggctgcgcgttgactaacagacgcagtggaagcctcttctcagggcacgttccgactggacagagagagggacgagctgtcactcgctctgcagactccagagcatccaggacgaacacgagggaaaggggtgattccatggaaattgggttctaggaggacatccacacgtacaggagtcggatgaggcgcaagagagataccgaggcgaagattgcagatctagagttcatggtatcaagctacgagcgcagcatgcaagaggaggtggcaaggaaggttgatgaacgcatggccgcacatcggtcccatgatccccagccgaccattcctcctacaatggtgagcccgtcaggaaaccgtagcagctgcgcctcaacggggcaggtaggatcacagagcatggacgctatgcaaacccaggacgaatccacctgccccgttgatgacatcactcagcggacaccatgtgagctgcatattcctttcaagaacttatcaataaaggtggcgtcgggcatggccatcccaacggacccttcaggtacttaccactgcaggccgattccagcaggatactccaaggtcgaagttgagttggtcgaaggcgcgtacgaggacctcgagctggattaccctggaagagacggtgagacgcatctacgagacacaagccatgccattattctatggcgcaggcggtacatcatcctccctgggcgacaagtggcgtctcgtgcaccatctcctccggctctgccatctcctcctcaggatcctgcatcgtctcctcctcatgctccagcaccgtctccacctcaggctcctgcaccgactcttcctcaggctcctgcaccgactcctcctcaagctcctcttccggcaccttcaaagtcaagggccccccaagctccaccgcctgcccacacaagggcaacgaagaaggtgaaagttgacaccgccaagaacaaggacccggggtacgattgcatgcaagagtagcttgacgcttacgtggcatcagaagtcaagagacaattcaagcctcgaagtccagaaaagaagattcctatagacccgagtgtcatgaacttcttcaggggtatgtcttcacctgccaaggaggccattaagctatcggactatgagcgaacgctgaagaaagcatcttctggaaagtccaaaccagtccctcagcttggagagcaaccaaaccaggagatcgagccattggtgaccggtaaagaaatgacgatagaagaatttattactgacaccggtctaactacggatcaattgctaggagtcgcaccaatcgaaaaggcagaagtgaaatacatgtacgaactcagtaaaccgcttgtcaagcctgagctgctgcagtccctacccacataaatgtacaagttccatcagctgtacatggagatgagcgccaccggtagagagatgatcggagcgaggatcaaggatatagacttcttgcaaggagatgacattctctggatcaatttcaagggaatctacgaaatataccagttggacgccctcgacgtctctattatgagttgctggattttaatggagattcaaagggcccgatggcggggggttttcgatactggattcatcgaccctcggaaagtaaacgtcgcaatgcttgaccaatatccgtaagccacagaggacaatctcgtccatctcctgaaggcgcagcattacaagacgttcatactgttgccgtacaacacagaattccactagatgcctttactcttcgacctgtcgacctgcactgtcaacgtatatgactcaatggataaaaaagagtctacgtttgacaaggttttcgaacttatagacagggcttggtatcggttccgtcatttggtccgcggcaaatggagagaaagagttaggcggaagttcaaatttccttttattcacatgagggataacctgaccacacacaaggaatttatcgcggcggttcaagaacaactcatgggattcatcaacgaacaaatccttgatactaagcccgcattgtattacgcggccaacacaattcatagcgcgccttagccaggtttccagcacactggcgccgta

SEQ ID NO: 93135 - DNA, 282 bp, Oryza sativa
  Clone ID: PAT_MRT4530_9154C.1
atggcgaaaatgggagtggggaggagaaaggtggtggggcccatggggtttaaggcacagaggaggagcgcgccagctatgctggcgccatggtatgaggggcggcgccagtgtggctgggcgccctttctgcccagtcagcacctccacgacagccctagtgccacggtggcacgggcacggcgccagtgtgctggcgccgccatgttgggacctggagttgaggacgacacggtggtgcttggcagtggcatggctactgggcgggctatatgtccatag

SEQ ID NO: 93136 - DNA, 3354 bp, Oryza sativa
  Clone ID: PAT_MRT4530_91550C.1
atggctgaccgcgatgaggaacagatattgtacgatacaatcgcggagggaagcagccagtactggaatgaagaagaggggaacgaggatccaaaccagtacttgaacgaggaagggaacgtggagagggatgcggaggggaaccagcaggggcacaagagggcacgcgggcaacgaggtgcagcgaagaagcttgagggtcggcacatcataacggaagtggaagaagatggacgtcctagtgccccggccgaagccgccaagaactatgtacgtcacagcggttgggttgtgcgggataacgtgcctgtcagtacggtgtactggcgaagaacaagggcacgcggagatcatgagagctttgtcccagattcggagaaagagatgctgtggaccacaatgctcgagacattcacccttcctgcgggtacagaggacaaagtgaaaaggtggactctgaagaaaatggcagaacaatttcagagcttcaagggagatctgtaccagaagtatatactgaaggggcagacaccgaacttcgacacattcccaaagctaagggatcactgggacgagttcgttgcatataagacaggtgaacaagggaaggcgatgatggaaagaaacaaagaaaatgccgccaagaagaagtaccatcaccacttggggtcaggaggctatagcgtcgcgatgccgaagtgggagcagatggaggctagcttgattgagaggggtatcgaaccggcaacagccaattggccggaacgatcgaagttctggtactatgctcacggtggaacgctcaacccagctgatggctcactggtcttcggctatcagatacaagaggctgcgcgacgactaacagatgcagtggaagcctcctctcagggcacgttccgaccagacagagatagggacgagctgacactcgccctgcagactccagagcatccaggacgaactcgagggaaaggggtgattccttggaagattggtttcaaggaggacatccacacgtacaggagtcggatgaggagcaagagagataccgaggcgaagattgcagacctagagttccgggtatcgagctacgaactcaacatgcaagaggaggtggcaaggaaggttgatgaacgcatggccgcacatcggtcccatgatccccagccgaccattcctcctgcaatggtgagcccgtcaggaaaccgtagcagctgcgcctcaacggggcaggtaggatcacagagcatggacgccatgcaaacacaggacgaatcgacctgtcccgttgatgacatcactcagcggacaccatgtgagctgcatattcctttgaagaacttatcaataaaggtggcgtcgggcatggccatcccaacggacccttcaggtacttaccactgcaggccgattccagcaggatactccaaggtcgaagttgagttggtcgaaggcgcgtacgaggacctcgagctggattaccctggaggagacggtgagacgcatctacgagacacatgccatgccattattctatggcgcaggcggtacatcatcctccctgggcgacaagcggcgtctcgtgcaccatctcctccggctccgccatctcctcctcaggatcctgcaccgtctcctcctcatgctccgccagcaccgtctccacctcaggctccagcatcgactcctcaggatcctgcaccgactcctcctcgtgctcctacacctactcccccgcaagctcctcttccggcaccttcaaagtcaagggcccccccagctccaccgcttgcccacacaagggcaacaaagaaggcgaaagttgacgccgccaagatcaaggacccggggtacgattgcacgcaagaggagcttgacgcttacgttgcatcagaagtcaagagacaattcaagcctcgaagtccagaaaagaagattcctatagaccccagtgtcaggaacttcttcaggggtatgtctgcatctgtcaaggaggccatcaagctatcggactatgagcgaacactgaagaaagcatcttctggaaagtccaaaccagtccctcagcttggagagcaaccaaaccaggagatcgagccgttggtgaccggtaaagaaatgacgatagaacaatttattactgacaccggtctaactacggatcaattgctaggagtcacaccaatcgaaaaggcggaagtgaaatacatgtacgaactcggtaaaccgcttgtcaagcctgagctgctgcagtccctacccacacaaatgtacaagttccatcagctgtacatggagatgagcgccaccggtagagagatgatcggagcgaggatcagggacacggacttcttgcaaggagatgacattctctggatcaatttcaggggaatctacgaactataccagctggacgccctcgacgtctctattatgagttgctggattttaatggagattcaaagggcccgacggcggagggttttcgatactggattcatcgaccctcggaaagtaaacgtcgcaatgctcgaccaatatccacaagaaacagaggacaatctcgtccatctcctgaaggcgcagcattacaagacgttcatactgttgccatacaacacagaattccactgggtgcttttactcatcgacctggaggcctgcaccgtcaacgtatatgactcaatggataaaaaagagtctacgtttgacaaggttttcgaacttatagacagggcttggtatcggttccgtcatttggtccgcagcaaatggagagaaagacttaggcggaagttcaaatttccttgcgcaaagcaaaagcagggaactaacttgtgcggctattacgtgtgcgagtattgccactgccttgcagaccaaatcatcaccacaagagagctcgattttattcgcatgagggataacctgaccacacacaaggaatttatcgcggcggttcaagaacaactcatgggattcatcaacgaagaaatccttgatcccaaggcggtcgcatcgctcctctcctttcccacatctcgctgcttcaccggccccacgcgcataaacccctctctcccgcatcgctcctctcctctccccttgcacgctcgcatcgattccctctcctgcatctcgctccgccgcccccttcgtatcaatctcgccgtgatcctctccatctcccgcatcgtgctcgcccgtaccggcgctggcatgtcatccgcctcccgtgccacacggaagcaaaatgagggtgtggcgctttccccttccgtcgcccccatggcggctcgtgcgctgcttcccccttcctcttccatgtctaaaggttgttcgcccctttag

SEQ ID NO: 93137 - DNA, 1368 bp, Oryza sativa
  Clone ID: PAT_MRT4530_91551C.1
atggcgtctcagccgcccgccctcgatatcctagtgcgcgagccggatggattcagcgtgtggtcgggcccgccttacccgacgggctccgccccgccggtgaggctcccgaagacggcgtgcagcgccacctacttctcgagcgacgggtcccgcctcctcgccacggtggcctcggcctcggccacggtctacgactgccggacgctctccgtcgtcaggtcgttcgagctcccgggcctcctcgccgccgcgctgtcgcccgcggggacgttcctgcagaccttccagaagtcgtcctcgccgcaggagaagaatgtcaccgtttggcatgtcgacaccgccaccgcgctctaccagcactaccagaagaatatgtctaaggccacgtggccaatggttcaattttctgcggatgagtcagttgcttgccgcatgatgactaatgagatacaattctttgatccaaaagatttcacaaaaggttttgtgtacaagctaagaatgcctggtatagctgctatgcagctagcaagtgcaccgggatctcatgttgctggatttgttcctgaggcaaagggtgttccagctagtgttcagatcttttcttgtgacaaggatgcacagggccaagctgttgcgcgtaggagtttttttcgctgttctactgttcaatttcactggaataaggggtccactgggcttctagttgttgctcaagctgatgtggataaaactaaccagagttactatggtgaaaccaagttgaactatttaacaactgatagggcctttgaaggaattgttcctctcaaaaagaaattggtaggaaaaacaaaggctgaatgttctgttacgagtgaatggtcccctgatggtcgccattttatgactgctacaacagctccgagactccaaatagacaacgggattaaaatatttgaccacaatggatctctgcagttcaagaagatgtttgaaaagctgtatcaggctgactggaagccagaagcgcctgaaaaatttagtgacattgccgacctcacgatatcgttgggtagcataaaaattgaagaaacgaaaaaacaaggttctttacactttcttatattccatgttatttcagcacagggttctaaatcagcacaaccatcaagcaaggcccctgcaaatatagcagcgaaacctacagcatatcgaccacctcattcaaagaattctgcagatgttcaggataagctttttggtgggcttgcttctacgggaggagagatgagcaaaaatgcactgagaaataagaagcgcagagagaaacagaaggagaagaaggctgctgaaggatccggagcctctgctgatgacaattaa

SEQ ID NO: 93138 - DNA, 375 bp, Oryza sativa
  Clone ID: PAT_MRT4530_91552C.1
atggcgttgtctggcaagcacggaccaacatggcttgcggatagggttggcgtacatgacgagcttgtggagccagcgtcctgcgttcgcaccatggctgaccagcctgacctcgtgtcgacgttcggcggcagctgcggcgacccgacgacgagcttctccagcgacggcgacgtggtgggacggcgaggtggggcaatagcctggacgcagtgggaggaaggtgaaggccggagatggaaggggcgaccagatccggtcttcctggatctggctgtcatcggggtggggagtgatggcggcggggtgaagtgggggagaatggagttggatgcgcacgaggccggcggaggcggtcggcgagtaagacggtag

SEQ ID NO: 93139 - DNA, 404 bp, Oryza sativa
  Clone ID: PAT_MRT4530_91553C.1
tttgagcacgagcggatggaggcgcgctggttccagatctaagcgccatccctccatcccctgcgccggcgggagcaacggcacgccgcacgcgccgatcgaccggacccatccctccatcccctgcactggttccagaggggaaaatccctatgtgtgcgccaacaaatcgtagagaaaggaaagaaaacaaatcagggagaaaggaaagagatgcctcggtgcgacagaaaggaaagagatggctcgatctgatcccggcgaaaatcagagaccccttctccctcgatacgcgaaattaccccccccccccccccctgtacgcgcgtgggaccccgcttccaattcaaccttagccgtgggagatcgacgtggacttgcttgttgctcttgaacacttttac

SEQ ID NO: 93140 - DNA, 406 bp, Oryza sativa
  Clone ID: PAT_MRT4530_91554C.1
atgggcttgaggcggccaggagggatgcacatcatggctaagacactatcaggcaatacgacaacgctagacgtgtgctgttgagtacactatatacactacaagcgcccagatcgagaggagggtggtcataactaagctccaaccaagcatcatgctggcggattggtacctataggactactgtgcacttgctgactgcaatatgtagaatgtgtatcaacatcaaataggctatatattatgattggacatgcatggctatgtgccatctcaaacggctatgaccttaacacatatggaagagtcttttgcttccatgtacaggcggaggcattgttcgagtactacgattatagttgggtgaggatatgtgaaaacatagctgctgctatgtacacacaag

SEQ ID NO: 93141 - DNA, 1611 bp, Oryza sativa
  Clone ID: PAT_MRT4530_91555C.1
gaggggaccaaaagtgaacttatttctctttagccgtcagaattgactacggcccaatagacccaatagcccaacaggaaacacattctgaacagcccgttaacccctaacccttccacgctgtcttttccactcccaccggcggcctcccaacccgccgccggcgacgattccggcgagatacctggtcggcggacaccggctcccgcgggtacgagccttctctagacgggctgcgtctctggccatctcttcttcttctccaacatgaggcccctcgcgatacggcggcgggaggcgcggctcctcccacccctcgccgtcctcgtccggtccatggcgtacgtggacgtgaagatgcgatggaagaaggacgcctccttcgacgccgtccccgtgctgtcccaggcgcgggacctccgcccgctcgtgtccctcgccggcctcctctcgccgtcgccgacccccgtctccgcggtctccaagcttcgcatcccgctcgaggtccccgaccgccgcgtcatctccttcctgcggcggttccccgccgccttcgtggagtccgtcgggccggagcacaaccacccctggttccgcctctcgggctccgccgccggcctcctgcaggaggagcgggaggtcttcgccgcgcggcgcgcggacatcacctcccgcctcggccgcctcctcctcatggccccgcgccgccgcctcccgctccgcgccgcgcagggcatgctctggcacctcggcctcccggaggactacttcagatgccgggactatgacatcgcgcaagacggattccggattctcaccattggagacagtgtttgccgtgaggaggaggaggatgatgggagggagcttgtgctcattgataatggggaacaccaagaaatgccaaaatcagtgctccaaatggatgccataaggagatttgggtccatggagacggtgccgatccccctcttccagtcaaaggggctccggctgaagcagaagatcgaggcatggctggaggggtttcagaagctgccttatgtctctccctatgaggatttcagcggcatttatcgcgacagcgatgtttcggagaagcgggtggtcggggtgcttcatgagcttcttagtctgttcgtgacatgctctgccgagaggaggcggttactttgcctcaggcagcacctggggctgccacagaagtttcaccgtgtgtttgagcggcatccgcatgttttctacttgttgttgaaggagaaaacatgctttgttgtcctcaaagaggcatacctggctcggggagacactgcaattgaagaacatcccatgctggtggtgcggaggaagtatgcagggttgatggaggagtcgcgggagatcataaggtgccggcggagtgggaaaccttttccgtcgaagcataaagatcatgagcagattgaggattctgagggtgcaaattctgctccaattttgtcatagaaagctagaactttgcctggtcagaaaaaatgagggcatatgcagtatgattttcgtgataataccaagggggattctactcttggaagtatatggcgggaggtgtagtagtattagagtgataat

SEQ ID NO: 93142 - DNA, 551 bp, Oryza sativa
  unsure (1)..(551): unsure at all n locations
  Clone ID: PAT_MRT4530_91556C.1
gattcggccgagtcctctcctcgagctcgagatctcttcctcctcctcgatcgcgtccatccatggcggcggccaanaaanganaangangaagaagaagaagcgtctaaactccanctgaaaccggcggggancaaagtgttctccaactgctgtccacggganancgccccccccggggcccgtccttcaaggtgttctaccgggtctcctcccncngggctccgtgcccttcctgttgggaatccacccgggcacccccaaaaacccatgtccnaaccntgttgccgccgctcanccgccgccgtcctactacacccccggcaaggttccccccgcggcggcggcgcggagaagaagaattttggaacncggctcccngttnttctnctgcccaaaatctgctccgaaaagcggccggccggtntcnggctcccaantctcctgcncccccccacctcntctcncntcntcggcncnttctantctctatcnctgtcnttcangaacccccnnttccccnacttgttcntcaantaaagaaacccncc

SEQ ID NO: 93143 - DNA, 1465 bp, Oryza sativa
  Clone ID: PAT_MRT4530_91557C.1
cacggggccatctctctaccgccggatgcactcaaggacaacgcccccgctgcccctaccgtcgacaagctcggccgcgcgcccgtcggcggccggcgcggttgggctccatgccacgggaagctcgaccaccaccatggccccggcacatcgccacacggcttgctgcgctctgcggtcgacaccggccgccatgttatggggcatctcgtacgtcttggtgaagcagttgcccggcgttgaggagaagtctccatctagcaccacgctcgacggccacgacctcgcgccgacgtcgtggtcgtcggaggtcagcaaggccctggaggacatcaagcctacgctcaactccaacacgacggagaacgccaagagcccgcatggcaggcggtggagacgtggcgccgaggtcgtgtcggcggcaggaggatcccccgtcgtcgtggacggcggagaggaggccgacgcgatggcgttgagggacgtccggtatctggttttgcggttgggggatgatttcgtaaccgggaatgctacataccggaatcccgtccgaacgggacctttgcttattcaaagaggagtaataccagaccatgcacgtcccgagcagcagcagcagcctgtgcaggacacggtgccgctccagcacgcacgcatggctgacatgggcggcggcgctacggcgcccatgcccgcaccgtcgacgcactaccctgcgcgcgaccgcgagctccttgccggcagctccggtgccggcgcaagagaggaggagcccagcatggacgcaacggcagatgaggaagtagagcgtgaaggtgctgccctcgccgcgtcgttggcgtggagcacgacgagcatgcacttggctagctcgttgaggcggcggaggaagcggccgcccgcgataagctccgacgtggcgtggacggtggaggatgtgactgtcagcgacgagctctagcgtgggacatggatgacgaaggacacgcccgtcggcgacgagctccgtcgtgggatgtggatgacgaaggacgcggccaccggtgacgagctccgacgtggcgtcgacggtggaggatgcggccgtcggcgacgagctccggcgtggggcgtggatgacggaggacgcggccgccggcgacgagctccgacgtggcgcggacggtggaggatgtggccgccggcgacgagctccggcgcgggacgtggacggtgggaccaccggcgacgacgctttagtgcccgactcctgatcctgatacatcgcaagcatcacccaccgcgtggtaagaatcgcatggtacctgataggtatcatctgatacatcacaagtatcacctgacggccggagacggccgcggtggtgtcccccctccctgcgccggagtcgacgacgacgccgcctctgcggctgcctttgccaccattagtaggaagaacagtaacatttctagtccccat

SEQ ID NO: 93144 - DNA, 1105 bp, Oryza sativa
  Clone ID: PAT_MRT4530_91558C.1
atgcagaacccgccgagccaccccgttgacctgccgctggcggcggcgccgccgccggtgaaggcgccgaccccgcgcccccccacgccggcgtcgctgcagccggagtccccgggggtgttcttcacggccgccgcggcggccgccccggtcgggtcctcgcaccgccgcatcgccatcgccgttgacctctccgacgagtccgcgtacgccgtccgctgggccgtcgccaactacctccgccccggggacgccgttatactgctgcacgtccgccccacctccgtgctctacggcgccgactggggctccgtcgacctctccctccccgccgccaaccctaaccctagcggcgacccgccgtcggccgaggacgacgctgaggccgcggcccgcaagatggaggacgacttcgacgccttcaccgcgtccaaggccgacgacctggccaagccgctcaaggacgccgggatcccctacaagatccacatcgtcaaggatcacgacatgaaggagaggctctgcctcgaggtggagaggcttgggctcagcgcggtcatcatggggagcaagggcttcggcgcctccaggcggaccagcaaggggaggcttggaagcgtcagcgattactgcgtgcaccactgtgtgtgccccgtggtggtggtgcgtttccccgacgatggtgtggcggagggcggagaggccggtggcgcatcggagttggcggtgggcgaggaagtgctgcaccctgtgccagaggaggatgccgagtaccatgacgccactgaagagcacaagggtaattgaggtaatgcatctggagcgcaaggaaaacgtgagaggcttgcccgaggcgatctgtgtatttgaacaatgcaactactgtttagctgttggcctgttgcttctgtatctactggatatcataaactggcttgaccagcaagctgcttttcattttgcgtgaagtattggactctttagatcaggggagtttgttggtttactttgtaaactgatacagtccagtatccccgtgggtggtggagaaaggagctgtgtatgggatgttttcgttggtcacgaatccatgttgtttcatacc

SEQ ID NO: 93145 - DNA, 167 bp, Oryza sativa
  Clone ID: PAT_MRT4530_91559C.1
ctccgagtacattgacagctccgacgttggatacacctgtaccaacacaaacatggtcatgggctctggtgagatcactgccaaaggtaacgttcactatgagaagagaggcaaggagacatgccctagcacagatcttatgctatgtgctgtgtggataaatgcta

SEQ ID NO: 93146 - DNA, 263 bp, Oryza sativa
  Clone ID: PAT_MRT4530_9155C.1
gaagcaaaagttaggtatctctcccaacaaagcagaatgatgacagaccgcaaggacacaatattaagatgtccatgagcgaatagacacaacagcaaattctagggaaaccaaacactacagtgccacaacaagaactgcaaggtcagagaaagcaaacaacaaaaggacacatgataccaatgggtagaaccctaaccaagaataggaggaagataatgaccacaaatgaaacttaacgagcttccagaggtgaaaagtga

SEQ ID NO: 93147 - DNA, 532 bp, Oryza sativa
  Clone ID: PAT_MRT4530_91560C.1
ctgttggtaccaaatgtccttccacaagggaaaactcttacatggtgtcgtacagcaattctacagacacaagaccatagcccataggcagctttattatgttgtagaacaaaagaataagaaacatttgaagtacacagcctgctcggttgaattgatatcacaatttagaaacagtgacattttggggctaggagctgatttatatacctccagcccacggccaaccactttggtgaaccatataaatttcttcttgcaatttcaccttgtgacatgtactgttgcgcatacatcgtaatgaaaatatcatgcccaggactaggcagcaggcaccaagtcatacctccaattctgtgaatgctttggaagatgaagatcggctagtgacgaagtgagatcttctctcgattgggatctccgactttggagtgttgtttgacctggcttccacattccactagaaaactgcatttgacctaagcttccaacagaatagctgtgatagacgccaatgactgcctggaggact

SEQ ID NO: 93148 - DNA, 1714 bp, Oryza sativa
  Clone ID: PAT_MRT4530_91561C.1
ctaggtaatggcagcctcgccggagtcgtctccgtcgtcggccaactccaccaccccgtcagcaccgtcgccgtcttcgtcgttgtcaaaatcaccctcacctccctccccatcatcgccgccgccaccagcatcgacgaacgcgccaccaaaatcagctggcggcgtttcatcttccacgcaagcgcaaccatcgtcggaatcatcgtcggagtctacgactacgccttcggcgccagcggagaggaagagcggcgggtcctctcgaggagagtccgggcggtatcgcggtgatgtgaccgccggcgtgtttgtggggttatttgtggtggcgatggttgcggtgttggcgggtgtggtggccatcgtggtgtgctgctgtataaagataacgaagaagaagaagcggccgccgccgccgaacatgcccttcttcaccgacgagaagggcaacgtgtactacgccacaggcggcctgcctcccatgtggcagcagcacggcagcagcaactacagcatcccacctccgccgccgcccggctggcacatgtcatcgtcggcggggggtttcagcggcgagatggggatggggtactcgtcgggaccgtacggtccggcgctgccgccgccgtcgccgaacgtggcgctgggtttctccaagagctccttctcgtacgaggagctggcggcggcgacgtcggggttctcggcggcgaacctgctggggcagggagggttcgggtacgtgtacaagggggtgctcgccgggaacgggaaggaggtggcggtgaagcagctcaagtccgggagcgggcagggggagcgggagttccaggcggaggtggacatcatcagccgcgtccaccaccgccacctcgtgtctctggtgggatactgcatcgccgccaaccagcgcatgctcgtctacgagttcgtccccaacggcaccctcgagcaccacctctatagaggcggcaatggcgatcgagttctagactggtcggcgcggcacaggatcgcgctggggtcggccaagggtctcgcctacctccacgaagactgccacccgcggatcatccaccgcgacatcaaggcggccaacatcctcctggacgccaactacgaggccatggtcgccgacttcggcctcgccaagctcaccaccgacaccaacacccacgtctccacccgcgtcatgggcaccttcggctacctggcccccgagtacgcctccaccggcaagctcaccgagaagtccgacgtcttctccttcggcgtcatgctgctggagctcctcaccgggcggcggcccgtcgacacctccaactacatggaggacagcctcgtggactgggcgaggccggtgctggcgcgcttgctggtcgccggcggcgaggaaggaggattaatccgggagctggtggactcgcggctgggcggggagtactcggcggtggaggtggagaggatggcggcgtgcgcggcggcgagcatccggcactcggcgcggcagcggcccaagatgagccagatcgtgagggcgctggagggggacgcctcgctctcgctggaccaccaccacgacgacgacttctccgcctcatcggagatctcgcggcatcggcaggtggccttcgacagcggcgactacaccgacgactactccaccacctccacctccacccactcctcccgcctcccacccaagcgctaa

SEQ ID NO: 93149 - DNA, 676 bp, Oryza sativa
  Clone ID: PAT_MRT4530_91562C.1
cttaggtcagatgcagttttctagtggaatgtggaagccaggtcaaacaacactccaaagtcggagatcccaatcgagagaagatctcacttcgtcactagccgatcttcatcttccaaaggtgtagccttacatttcagaatgacatgactagtatgagaataccatcccataacaaaccttgtgtaaataatagctccggactatttgatttcttctctaatcaaaagtcaaattttgtcggtatactgacacttcagtgagatctagcattcacagaattggaggtatgacttggtgcctgctgcctagtcctgggcatgatattttcattacgatgtatgcgcaacagtacatgtcacaaggtgaaattgcaagaagaaatttatatggttcaccaaagtggttggccgtgggctggaggtatataaatcagctcctagccccaaaatgtcactgtttctaaattgtgatatcaattcaaccgagcaggctgtgtacttcaaatgtttcttattcttttgttctacaacataataaagctgcctatgggctatggtcttgtgtctgtagaattgctgtacgacaccatgtaagagttttcccttgtggaaggacatttggtaccaacagaaaacatgaattattagtaattccagtgctcttatgtttactc

SEQ ID NO: 93150 - DNA, 474 bp, Oryza sativa
  unsure (1)..(474): unsure at all n locations
  Clone ID: PAT_MRT4530_91563C.1
ccggccggaaaccctgggcactatctggactgcactctctctactatccatccanttgtgtctatatgtatgcattctctgcacgtgctgctgcaagtaaggtctattattctgagcaacaaagggaaggaatggagcaaactttggacgtacctagatcgctgaggctaccgacaccaaaggctcaacaacaaatggatgaattctgcagggaccgacacaaagagattgagacaacaaaggactttagcgagcatgcgatccctatgggccccttgaagaagatcgcatcttctcaaaaggtgaacatgatgatgtcctttgacatgccagcattcttatcggagaagagagagcctcttggacaaaaacttgatgagcgagcatgaccatttgctcaatcccataaccgttgcatgcgactagacacggaaatttggtgaagccattgcccccacagagccttatgacttt

SEQ ID NO: 93151 - DNA, 375 bp, Oryza sativa
  Clone ID: PAT_MRT4530_91564C.1
atggccgccgccggagaagcccggaacctcgccgtcgtgagcaacagtgcaaagattgccgactggtatcgattccctggagttagggttatccttaccagcctagagataagagatagttacatcaatgtcactgtcggagtagctactcggccgagaggatcaatccataaccgaatgaacgtcgtggcgtttctgaaggcgattgagaatgacaggttgcatgtttggttcagtctccgggcaacaactgtcggctacattctattcgaggtcgtgcccgagagctctggccatcatcagggccggcgtgagagctgcggtggcgcaggagcctcgcatgggggcgtcactgctcaggcttcacttccatga

SEQ ID NO: 93152 - DNA, 2367 bp, Oryza sativa
  Clone ID: PAT_MRT4530_91565C.1
atgccgaagtgggaggagatggaggctagcttgattgagaggggtatcgaaccggcaacagccaattggccggaacgatcgaagttctggtactatgctcacggtggaacgctcaacccagctgatggctcactggtattcggcgttcagatacgagaggctgcgcaacgactaacagatgcagtggaagcctcctctcagggcacgttccgacccgacagagatagggacgagctgacactcgccctgcagactccagagcatccaggacgaacacgagggaaaggggtgattccttggaagattggtttcaaggaggacatccacacgtacaggagtcggatgaggagcaagagagataccgaggcgaagattgcagacctagagttccgggtatcgagctacgaactcaacatgcaagaggaggtggcaaggaaggttgatgaacgcatggccgcacatcggtcccatgatccccagccgaccattcctcctgcaatggtgagcccgtcaggaaaccgtagcagctgcgcctcaacggggcaggtaggatcgcagagcatggacgccatgcaaacacaggacgaatcgacctgtcccgttgatgacatcactcagcggacaccatgtggcgtcggcatggccatcccaacggacccttcaggtacttaccactgcaggccgattccagcaggatactcgaaggtcgaagttgagttggtcgaaggcgcgtacgaggacctcgagctggattaccctggaggagacggtgagacgcatctacgagacacaagccatgccattattctatggcgcaggcggtacatcatcctccctgggcgacaagcggcgtctcgtgcaccatctcctccggctccgccatctcctcctcatgatcctgcaccgtctcctcctcatgctccgccagcaccgtctccacctcaggctccagcatcgactcctcctcaggatcctgcactgactcctcctcgtgctcctacacctactcccccgcaagctcctcttccggcaccttcaaagtcaagggcccccccagctgcaccgcctgcccacacaagggcaacgaagaaggcgaaagttgacgccgacaagaacaaggacccggggtacgattgcacgcaagaggagcttgacgcttacgttgcatcagaagtcaagagacaattcaagcctcgaagtccagaaaagaagattcctatagaccccagtgtcaggaacttcttcaggggtatgtctgcatctgccaaggaggccatcaagctatcgaactatgagcgaacgctgaagaaagcatcttctggaaagtccaaaccagtccctcagcttggagagcaaccaaaacaggagatcgagccgttggttaccggtaaagaaatgacgatagaacaatttattactgacaccggtctaactacggatcaattgctaggagtcgcaccaatcgaaaaggcggaagtgaaatacatgtacgaactcggtaaaccgcttgtcaagcctgagctgctgcagtccctacccacacaaatgtacaaattccatcagctgtacatggagatgagcgccgccggtagagagatgatcggagcgaggatcagggacacggacttcttgcaaggagatgacattctctggatcaatttcaagggaatctacgaactataccagctggacgccctcgacgtctctattatgagttgctggattttaatggagattcaaagggcccgacggcggagggttttcgatactggattcatcgaccctcggagagtaaacgtcgcattgctcgaccaatatccacaagaaacagaggacaatctcgtccatctcctgaaggcgcagcattacaagacgttcatactgttgccatacaacacagaattccactgggtgcttttactcttcgacctggaggcctgcaccgtcaacgtatatgactcaatggataaaaaagagtctacgtttgacaaggttttcgaacttatagacagggcttggtatcggttccgtcatttggtccgcggcaaatggagagaaagacttaggcggaagttcaaatttccttgcgcaaagcaaaagcagggaaataacttgtgcggctattacgtgtgcgagtattgccactgccttgcaaaccaaatcatcaccacaagagagctcgattttattcgcatgagggataacctgaccacacacaaggaatttatcacggcggttcaagaacaactcatgggattcatcaacgaagaaatccttaatcccaagggtgaattctactacgacggaaacacaattcaccggtccttagcttctgagctagcagcgagtactactacgtcgaaatga

SEQ ID NO: 93153 - DNA, 5541 bp, Oryza sativa
  Clone ID: PAT_MRT4530_91566C.1
atggatcggcaatggatgtacgctgaccggcggtccaaagagtttattgacggcgtgcactattttttgagagtggccgaagctaacaggcaaaggggttttatttgttgtccatgcaataagtgtaagaatcagaaggagtattctgcatccaggactattcatttccacttgtttgagtcggggttcatgccaagctataattgttggacatcccacggagagcaaggtgttgaaatggaagaagatgaagtggaagacgacaatattccggactttgctcagtatgttggatttgaaggaaatcaaacgggcgaggaggaaatagctgttgatggtaacgacgttgcggatgatcttggtcagatgttggaggacgccagggaggactgcgaaagtgaaaaggaggcccataaattggacaagatgttggaggaccacagaacttcgttgtacccaggttgcgagcaggggcacaaaaagttggataccactctagagttgttgcaatggaaggcaaaaaatggggttagtgacaaggcatttggcgatttattgaaactcgtcaagaacattcttccggggggaaacaaattgcccgagacaacgtacgaggctaagaagatagtctgcccgttaggactggaagttcataagattcacgcatgtccgaacgattgtatcctatatcgcggtgaggagtatgagaacctagaagcatgccctgtttgcaaagcactacgatacaagattagacgggacgatccaggagaagttgacgggcagctaacaaagaagagaattcctgctaaggtgatgtggtatttccctataataccacggctaaggcgtttgttcaggaacaaggggaatgctagaatgttgcgatggcacgctgaagagcgtcaacaggacgggatgctgagaccccccgccgatggttcgcagtggcgaaacatcgacagaaaatttaaagaatttggaaaggacgcacgaaacatacggtttggtttgagtacggatggcatgaatccttttggagagatgagcagcggccatagcacttggcccgttacgatgtgtatctacaacctccccccctggctatgcatgaagaggaaatacataatgatgccgattattattcaaggccccaagcaacctggtaacgacatcgacgtgtacctaagaccactggtcgaagatcttaaacagttgtggaagaaggaaggtgtccccgtgtgggacgaggacaaacaggaggagtttaacctacgagcgctgctgttcgtaaccatcaacgattggcctgcacttagcaacctatccggacagtccaacaaggggtacaaggcttgcactcactgtatggatgaaacagaaagtacgtatcttaagcactgtaagaaggttgtatacatgggtcatcgtcgattccttgcagcaaaccacccggtatggaagaaaggcaagcacttcgaacataaggccgaccaccgtacgaagcctaaacatcgcagcgggaaaacagtgtttgctatggttaaagatcttaaagtagtgttcggaaaggggcctggaagccagcatatagagagcgaagatggtcacgcggcgatgtggaaaaagaactctatattttgggagttaccatattgggaattcttggacgtacgccatgcaatcgacgtgatgcacctcactaagaacctttgcgtaaaccttcttggcttcctaggtgtatacggaaagtcgaaagatacactggaagcacgtaatgatctgaagcatatggaacaacgcggcgaccttcacccggaaccaaaggagaaaggaagccattacttgagtccagccagctacactcttagcaaggcagagaaggaaagtatgtttgaatgcttggagagcataaaggtaccgtctggatactccacgaatatcaagcgaataataagcacgaaggagaagaagttcacaaacctaaagtctcatgactgtcacgtgttgatgacacaactgctaccagttgtaataaggggtatccttccagacaatgtccgggcaacaataacaaagctatgtgcattcatgaacgcaatttcgcagaaggtcatcgatccggatagattagaagcccttcagaataaagtggtgcaatgtctcgtcagttttgagttgatatttccaccttcatttttcaatataatgacgcatctgctttgtcaccttgtgaaagagatccgtattctcgggcctatgtacctacacaacatgtttcctttcgagatgtacatgggcgttctgaagaagtatgttcgtaaccgtgctcgtccagaggcaagcatcgccaagggttatggaacagaggaggtcatcgaattttgcgtagaatttatcgaagaccttcgcccaatcggggtacctgaatcacgccatgaagggagactacggggaaagggaactctcggaaggaaagcaataacgacggtagacaacaatttattccgtaaagcccatttcactgttctgcaacactcttcattggtagctccttacatcgaggagcacttggctctagttcgcgccaggaacatcggtaagtccgatgcatggattacacggcatcacattgatactttccccgcgtggctacgacaacatctcatgggtaacgagtcgatcaaccaacaacttgccttcctggcgaggggaccgtctgggtcgatcgcgacattccagggatatgagatcaatgggtacacattctacacgagagcccaagacatgaagagcacgaaccaaaacagcgctgttcgtgtcgatgccatgggacacgatggaacaactgccacgtattacggtgccatcgaggaaacaaagaaaatgccgccaagaagaaccaattggccggaacgatcgaagttctggtactatacttacggtggaacgctcaacccagctgatggctcactggtcttcggcgatcagatacgagaggctgcgcgacgactaacagatgcagtggaagcctcctctcagggcacgttccaaccagacagagatagggacgagctgacactcgccctgcagactccagagcatccaggacgaacacgagggaaaggggtgattccttggaagattggtttcaaggaggacatccacacgtacaggagtcggatgaggagcaagagagataccgaggcgaagattgcagacctagagttccgggtatcgagctacgaactcaacatgcaagaggagttggcaaggaaggttgatgaacgcatggccgcacatcggtcccatgatccccagccgaccattcctcctgcaatggtgagcccgtcaggaaaccgtagcagctgcgcctcaacggggcaggtaggatcacagagcatggacgccatgcaaacacaggacgaatcgacctgtcccgttgatgacatcactcagcggacaccatgtgagctgcatattcctttcaagaacttatcaataaaggtggcgtcgggcatggccatcccaacggacccttcaggtacttaccactgcaggccgattccagcaggatactcgaaggtcgaagttgagttggtcgaaggcgcgtacgaggacctcgagctggattaccctggaggagacgcaccgactcctcctcaggatcctgcaccgactcctcctcgggctcctacacctactcctccgcaagctcctcttccggcaccttcaaagtcaagggcccccccagctccaccgcctgtccacacaagggcaacgaagaaggcgaaagttgacgccgccaagaacaaggacccggggtacgattgcacgcaagaggagcttgacgcttacgttgcatcagaagtcaagagacaattcaagcctcgaagtccagaaaagaagattcctatagaccccagtgtcaggaacttcttcaggggtatgtctgcatctgtcaaggaggccatcaagctatcggactatgagcgaacgctgaagaaagcatcttctggaaagtccaaaccagtccctcagcttggagagcaaccaaatcaggagatcgagccgttggtgaccggtaaagaaatgacgatagaacaatttattactgacactggtctaactacggatcaattgctaggagtcgcaccaatcgaaaaggcggaagtgaaatacatgtacgaactcggtaaaccgcttatcaagcctgagctgctgcagtccctacccacacaaatgtacaagttccatcagctgtacatggagatgagcgccaccggtagagaaatgatcggagcgaggatcagggacacggacttcttgcaaggagatgacattctctggatcaatttcaggggaatctacgaactataccagctggacgccctcgacgtctctattatgagttgctggattttaatggagattcaaagggcccgacggcggagggttttcgatactggattcatcgaccctcggaaagtaaacgtcgcaatgctcgaccaatatccacaagaaacagaggacaatctcgtccatctcctgaaggcgcagcattacaagacgttcatactgttgccatacaacacagaattccactgggtgcttttactcatcgacctggaggcctgcaccgtcaacgtatatgactcaatggataaaaaagagtctacgtttgacaaggttttcgaacttatagacagggcttggtatcggttccgtcatttggtccgcggcaaatggagagaaagacttaggcggaagttcaaatttccttgcgcaaagcaaaagcagggaactaacttgtgcggctattacgtgtgcgagtattgccactgccttgcagaccaaatcatcaccacaagagagctcgattttattcgcatgagggataacctgaccacacacaaggaatttatcgcggcggttcaagaacaactcatgggattcatcaacgaagaaatccttgatcccaagggtgaattctactacgacggaaacacaattcaccggcttccttcaggcgacgacaccagcaacaagagatcatcagtgcagatggcgacgacgctggcgaaggttgggcctttcggtgcgggtggcacccctgtcgacattgaccacaccttgccgccagatcacctcaagagtatcaaaatctggtacgacgaagatggaatcaacggcttaaagttcagctacctccacgccgccaacaaaagaaagctcaccaccactcgcgtttggggcgacgatagcggtagtagcgatgagattaatattgaagatgatgatgattacgtgaataagctggagggcaggactgacggccgtacaaaaatcaagtctctcagaatcacgacgaaaaacaataataatcccgattggctcggggacaaaaccaaggagggcgattatttcagcgtgccggtggaggatggccagatcgtggcgttcttcggccgcaccgaccagtacatcaacgctctgggcgtctacatccttggtaccccttaccagcaatccaccccctag

SEQ ID NO: 93154 - DNA, 162 bp, Oryza sativa
  Clone ID: PAT_MRT4530_91567C.1
ataatgaacatttttaaaaattcatattcaaactggacgaacctatacacgtccattcaagacattattacaaaatgttcaaacatactactatcagataaccgcaaaaagaatttaaacataactgagaggtccagcacagatgtcgtaccgctggctgag

SEQ ID NO: 93155 - DNA, 3048 bp, Oryza sativa
  Clone ID: PAT_MRT4530_91568C.1
atggatcggcaatggatgtacgctgaccggcggtccaaagagtttattgacggcgtgcattattttttgagagtggccaaagctaacaggcataagggttttatttgttgtccatacaataagtgtaagaatcagaaggagtattctgcatccaggattattcatttctacttgtttgagtcggggttcatgccaagctataactgttggacatcccatagagagcaaggggttgaaatggaagaagatgaagtggaagacgacaatattacggactttgctcagtacgctggattttaaggaaatcaaatggatgaggaggaaagggatgctgatggtaacgacattgtggatgatcttggtcagatgttgcaggacgccaaggaggattgcgaaagtgaaaagggggcccataaattggacaagatgttagaggaccatagaacgtcgttgtacccaggttgcgagcaggggcacaaaaagttggataccactctggagttcttgcaatggaaggcaaaaaatggtgttagtgacaaggcatttggcgatttattgaaactcgttaagaacattcttccggagggaaacaagttgcccgagacaacgtacgaggctaagaagatagtgtgccctctaggactgaaagttcagaagattcacgcatgtccgaatgattgtattctatatcgcggtgaggagaacaaggggaacgctagaatgatgcggtggcacgctgaagagcgtcaacaggacgggatgctgagacaccccgccgatggtttgcagtggcgaaacatcgatagaaaatttaaagactttggaaaggacgcacgaaacatacagtttggtttaagtacggatggcatgaatccttttggagagatgagcagcggccacagcacttggcccgttacgatatgtatctacaacctccccccgtggctatgcatgaagaggaagtacataatgatgccgattataattcaagggcccaagcaacctggtaacgacatcgatgtgtacctaagaccactggtcgaagatcttaaactgttgtggaagaaggaaggtgtccccgtgtgggatgaggacaaacagaaggagtttaacctacgagcgctgctgttcgtaaccatcaacgattggcctgcacttagcaacctatccgggcagtccaacaaggggtacaaggcttgcactcactgtatggatgaaacagaaagtacgtatcttaagtactgtaggaaggttgtgtacatgggtcatcgtcgattccttgcagcaaaccatccggttcggaagaaaggcaagcactttgaacataaggcggaccaccgtacgaagcctaaacatcgcagcggaaaaacagtgtttgctatggttaaagatcttaaagtagtgtttggaaaggggcgtggcagccagcctatagagagcgaagatggtcacgcggcgatgtggaaaaagaactctatattttgggagttatcctattgggaattcttggacgtccgccacgcaatcgacgtgatgcacctcactaacaatctttgcgtaaaccttcttggcttcctaggtgtatatggaaagtcgaaagatacactggaagcacgtaatgatctaaagcatatggaacaacgcggtgaccttcacccagaaccaaaggagaaaggaagccattacttgagtctagccagctacactcttagcaaggcagagaaggaaagtacgtttgaatgcttggagagcatcaaggtaccgtctggatactccacgaatataaagcgaataataagcacgaaggagaagaagttcacaaacctaaagtctcatgactgtcacgtgttgatgacacagctgctaccagttgtaataaggggtatcctcccagacaatgtccgggcaataataacaaagctatgtgctttcatgaacgcaatttcgcagaaggtcatcgatcctcatagattagaagccctgcaaaatgatgtggtgcaatgtcttgtcagctttgagttgatatttccaccttcatttttcaatataatgacgcatctgctttgtcaccttgtcaaagagatcggtattctcggtcctgtgtacctacacaacatgtttcctttcgagaggtacatgggcgttctgaagaagtatgttcgtaaccgtgctcgtccagaggcaagcatcgccaaggggtatggaacagaggaggtcatcgaattctgcgtagaatttatcgaagaccttcgcccaatcgggatacctgaatcacgccatgaagggagactacggggaaaggggactctcggaaagaaagcaataatgacgttagacaacaatttattccgtaaagcccatttcacggttctgcaacaatcttcattggtggctctctacatcgaggagcacttggctctagtttgcaccaaaaacatcggtaagtccgatgcatggattacaaggcatcacattgatactttctccacatggctgcgacaacatctcatgggtaatgagacgattaaccaacaactggccttcctggcgaggggaccatctggctcgatcgcgacattccaggtatatgaaatcaatgggtacacattctacacgagggcccaagacatgaagagcacgaaccagaacagtgctgttcgtatcgatgccatgggacacgatggtacaactggcacgtattacggtgccatcgaggacatatgggaacttgactatggacctctcaaggtccctttgttccggtgccaatgggttaggttgactggtggaggcgtaacgattgatgacagtgggatgacaacggttgaccttaacaaggttggatactcggacgaaccttttgtccttgccaatgatgtaacccaagttttttacgtcaaggacatgtctagcaaagaaaaaaagggcaaagtgactgacgagccgaagcgccacgtggttctcccaggaaaaagaaaaatcgtcggattagaggacaagactgacgaggattacgatcagtttgatgggcaacccctttcacgatga

SEQ ID NO: 93156 - DNA, 224 bp, Oryza sativa
  Clone ID: PAT_MRT4530_91569C.1
tgaggagatgatgcatgatgtgcatgaggggaggggctgcttgtgtgtgtgtgttaagagttggtgttggacacaatgttggccctgacctggtgtgtgtgattgggagcaccaggtttgggtgtgttgtgatggctgctggtgacaaagttggtgactatgcatgccaattgcttgaagaccacccccctgccactttgcggtgctcaaaaaaaaaaaaaaaa

SEQ ID NO: 93157 - DNA, 186 bp, Oryza sativa
  unsure (1)..(186): unsure at all n locations
  Clone ID: PAT_MRT4530_9156C.1
actacaccccgctccactctcaggcaggcaatcagcggcgaggcaccagcccaccggtcggcaatggcgtncacctcctgcttcttcacagtccacggccgcgtcgccggccgcgtgctcccgtcccggggaccgaccacctcctgttgcggccagaacagacacccacttcgcgcggctgctgtg

SEQ ID NO: 93158 - DNA, 3426 bp, Oryza sativa
  Clone ID: PAT_MRT4530_91570C.1
atgcccaagggaagcttagaaacacagctacactctgaaggtggagagcaactgggattccttcagagactggacattctgttggatgtgtccatggcaatggagtatcttcactatcatcactgtgaggtagtcctacactgcgacttgaagccaagcaatgttctattcgaccaagacatggttgcattggtggccgatttcgggattgcaaaactgttacgtggtgacgataactctgttatttctgcaagtatgcctggaacaattggttatatggcaccagagtatgggtcagttgggaaagcatcacggaaaagcgatgcattcagctacggtattatgcttctggagttattcactggaaagaggccaactgatcccatgtttgttggagaactatctctaaggcagtgggttactagtgcatttccatcaaatgtcatggatgtggtggataaccggttactggtgcaagattcctctagttcattgaataactttatagtcccagtttttgagttgggtttacaatgctcacatgaattaccagaccaaagaatgacaatgagcgaagtggttatggatcggcaatggatgtacgctgaccggcggtccaaagagtttattgacggcgtgcattattttttgagagtggccgaagctaacaggcaaaagggttttatttgttgtccatgcaataagtgtaagaatcagaaggagtattctgcatccaggactattcatttccacttgtttgagtcggggttcatgccaagctataattgttggacatcccacggagagcaaggtgttgaaatggaagaagatgaagtggaagacgataatattccggactttgctcagtacgctggatttgaagaaaatcaaacgggtgaggaggaaagggatgctgatggtaacaacgttgcggatgatcttggtcagatgttgcaggacgccaaggaggattgcgaaagtgaaaagggggcccataaattggacaagatgttagaggacaacagaacgtcgttgtacccaggttgcgagcaggggcacaaaaagttggataccactctagagttcttgcaatggaaggcaaataatggtgttagtgacaaggcatttggcgatttattgaaactcgtcaagaacattcttccggagggaaacaagttgcccgagacaacgtacgaggcaaagaagatagtgtgccctctaggactggaagttcagaagattcacgcatgtccgaatgattgtatcctatatcgcggtgaggagtacgagaacctaaaagcatgccctgtttgcaaagcactacgatacaagattagacgagatgatccaggagaagttgacgggcagctaacgaagaagagaattcctgctaaggtgatgtggtatttccctataataccacggctaaggcgtttgttcaggaacaaggggaacgctagaatgatgcggtggcacgctgaagagcgtcaacaggacgggatgctgagacaccccgccgatggttcgcagtggcgaaacatcgacagaaaatttaaagactttggaaaggacgcacgaaacatacggtttggtttaagtacggatggcatgaatccttttggtgagatgtgcagcggccatagcacttggcccgttacgatgtgtatctacaacctccccccgtggctatgcatgaagaggaagtacataatgatgccgattataattcaagggcccaagcaacctgttaacgacatcgatgtgtacctaagaccactggtcgaagattttaaactgttgtggaagaaggaaggtgtccccatgtgggacgaggacaaacaggaggagtttaacctacgagcgctactgttcgtaaccatcaacgattggcctgcacttagcaacctatccggacagtccaataaggggtacaaggcttgcactcactgtatggatgaaatagaaagtgtatatggaaagttgaaagatacactggaagcacgtaatgatctgaagcatatggaacaacgcggtgaccttcatccggaaccaaagaagaaaggaagccattacttgagtccagccagctacactcttagcaaggcagagaaggaaagtatgtttgaatgcttggagagcatcaaggtaccgtctggatactccatgaatataaagcgaataataagcacgaagaagaagaagttcacaaatctaaagtctcatgactgtcacgtgttgatgacacagctgctaccagttgtaataaggggtatcctcccagacaatgtccggacaacaataacaaagctatgtgttttcatgaacgcaatttcgcagaaggtcatcgatcctgatagattagaagccctgcagaatgatgtgaggtacatgggcgttctgaagaagtatgttcataaccgtgctcgtccagaggcaagcatcgccaaggggtatggaacagaggaggtcattgaattctgcgtagaatttatcgaagaccttcgcccaatcggggtacctgaatcacgccatgaagggagactacggggaaaggggactctcgaaaggaaagcaataatgacggcagacaactatttattccgtaaagcccatttcactgttctgcaacaatcttcattggtggctccctacatcgaggagcacttggctctagttcgcgccaaaaacatcggtaagtccgatgcatggattacaaggtatcacattgatactttctccacgtggctgcgacaacatctcatgggtagcaagacgattaaccaacaactggcctttctggcgtggggaccatctggctcgatcgcgacattccagggatatgaaatcaatgggtacacattctacacgagggcccaagacatgaagagtacaaaccagaacagtgctgttcgtatcgatgccatgggacacgatggtacaactggcacatattacggtgccatcgaggacatatgggaacttgactatggacctctcaaggtccctctgttccggtgccaatggattaggttgactggtggaggcgtaacgattgatgacagtgggatgacaacggttgaccttaacaaggttggatactcggacgaaccttttgtccttgtcgatgatgtaacccaagttttttacgtcaaggacatgtctagcaaaggaaaaaagggcaaagtgactgacgagccgaagcgccacgtggttctcccaagaaaaagaaaaatcgtcggagtagaggacaagactgatgaggattacgatcagtttgatgggcaaccccctttcacggtgacaattgaccctagcatcctcctatcaaatgaagacaccccttactcacgtagcgatcacaaggaaggaacaatagtgaggagaaagtacgtccggtcaaccgtcaccgccgatgtattgccgtaa

SEQ ID NO: 93159 - DNA, 993 bp, Oryza sativa
  Clone ID: PAT_MRT4530_91571C.1
atggcatctacatcctccggctcctcttcaacctctgctgccaacgtcggagattctaccggcgtgattttcgccaacccgtatgccacagtcaatgtcaagacccacgtacccataaccctggagctcaagaaccctaatttcaacaagtggaagacgttcttcacttctatgtgtggcaagtttggtcttcttcctcacatcgacggcaccgccccttctcgacccgacgattcggcttgggctcaagctgattgttgcgttagaggtttgctcttcggcttcatctcagattcaatcctcaacatcgtcatggaacccgaccaaacagctcgcgatctctggctcgtcatcgatgatctctttcaagcaaacaaagaacctcacgccatctacctcagccatgagttccactcgatgacgcagggtgatttgtcaatcgccgactaccgccagaaggtgaagactgctgctgatgccctccgtgacatggtttatttatttctcagcgacagtatgctgttgacttattatggcgagccgtatcttactctcacgcggcttgagatagcttatgcagttcagcaggtatgcttgtttatgcatgatcctcgtgagcctcatcttgctcttgttaaaaggattttgcgttacatcaaggaggccaatccggagtcatggtcgcacagtcgtgaaggaatccggcgagccgacatcgacgacgatatgggtgagacagtgggtctggcggaagggcagaccaccctggtgccgtcgggggcaatcccgggcggggctccgacggaaggggggaaccacctcggcggggctccggcgggggcaacggtggagtgccacggcggtggaagaagggggacgaccttggctccgcctccggcaaatggggaatccatggctccagcggcggcggcagtacatgcgaggaggagggaggaggagcgactcgcgttggcgggggcagctgtggagtga

SEQ ID NO: 93160 - DNA, 6339 bp, Oryza sativa
  Clone ID: PAT_MRT4530_91572C.1
atggatcggcaatggatgtacgctgaccggcggtccaaagagtttattgacggcgtgcattattttttgagagtggccgaagctaacaggcaaaagggttttatttgttgtccatgcaataagtgtaagaatcagaaggagtattctgcatccaggactattcatttctacttgtttgagtcggagttcatgccaagctataattgttggacatcccacggagagcaaggtgttgaaatagaagaagatgaagtggaagacgacaatattccggactttgctcagtatgttggatttgaaggaaatcaaacgggcgaggaggaaagggatgctgatggtaacgacgttgcggatgatcttggtcagatgttgcaggacgccaaagaggagtgcgaaagtgaaaagggggcccataaattggataagatgttagaggaccacagaacgtcgttgtacccaggttgcgagcaggggcacaaaaagttggatatcactctggagttcttgcaatggaaggcaaaaaatggggttagtgacaaggcatttggcgatttattgaaactcatcaagaacattcttccgaagggaaacaaattgccggagacaatgtacgaggctaagaagatagtctgccctctaggactggaagttcagaagattcacgcatgtccgaatgattgtatcctatatcgcggtgaggagtaggagaacctagaagcatgccctatttgcaaagcactacgatacaagattagacgagacgatccaggagaagttgacgggcagctaacaaagaagagaattcctgctaaggtgatgtggtatttccctataataccacggctaaggcgtttattcaggaacaagagaaatgctagaatgatgcgatggcacgctgaagagcgtcaacaggacgggatgttgagacaccccgccgatggttcgcagtggcgaaacattgacagaaaatttaaagactttggaaaggacgcacgaaacatacagtttagtttgagtacggatgtcataaatccttttagagagatgagcagcggccatagcacttggcccgttacgatgtgtatctacaacctcccccctggctatgcatgaagaggaagtacataatgatgccgattattattcaaggccccaagcaacctggtaacgacatcgatgtgtacctaagaccactggtcgaagatcttaaactgttgtggaagaaggaaggtgtccccgtgtgtgacaaggacaaacaggaggagtttaacctacgagcgctgctgttcgtaaccatcaacgattggcctgcacttagcaacctatccggatagtccaacaaggggtacaagggttgcactcactgtatggatgaaacagaaagtacgtatcttaagcactgtaggaaggttgtatatatgggtcatcgtcgattccttgcagcaaaccacccggtgtggaagaaaggcaagcacttcgaacataaggctgaccaccgtacaaagcctaaacatcgcagcgggaaaacagtgtttgctatggttaaagatcttaaagtagtgttcggaaaggggcctggaagccagcctatagagagcgaagatggtcatgcggcgatgtggaaaaagaactctatattttgggagttaccctattgggaattcttggacgtccgccacgcaatcgacgtgatgcacctcactaagaacctttgcgtaaaccttcttggcttcctaggtgtatacggaaagtcgaaagatacactggaagcacgtaatgatctgaagcatatggaacaacgcggcgaccttcacccggaaccaaaggagaaaggaagccattacttgagtccagctagctacactcttagcaaggcagagaaggaaagtatatttgaatgcttggagagcataaaggtaccgtctggatactccacgaatatcaagcgaataataagcacgaaggagaagaagttcacaaacctaaagtctcataactgtcacgtgttgatgacacaactgctaccagttgtaataaggggtatccatccagacaatgtctgggcaacaattacaaagctatgtgcattcatgaacgcaattttgtagaaggtcatcgatccggatagattagaagcccttcagaatgatgtggtgtaatgtctcgtcagttttgagttgatatttccaccttcatttttcaatataatgacgcatctgctttgtcaccttgtcaaagagatcagtattctcgggcctatgtacctacacaacatgtttcctttcgagaggtacatgggcgttctgaagaagtatgttcgtaaccatgctcgtccagaggcaagcatcgccaagggttatggaacagaggaggtcattgaattttgcgtagaatttattgaagaccttcgcccaatcggggtacctgaatcacgccatgaagggagactacggggaaagggaactctcggaaggaaagcaataatgacggtacacaacaatttattccgtaaagcccatttcacggttctgcaacaatcttcattggtagctccttacatcgaggagcacttggctctagttcgcgccaggaacatcggtaagtccgatgcatggattacacggcatcacattgatactttcccagcgtgggtacgacaacatctcatgggtaacgagtcgatcaaccaacaacttgccttattggcgaggggaccgtctgggtcgatcgcgacattccagggatatgagatcaatgggtacacattctacacgagagcccaagacatgaagagcacgaaccaaaacagtgctgttcgtgtcgatgccatggcacacgatagaacaactggcacgtattacggtgccatcgaggacatatgggaacttgactatggtcctctcaaggtccctctgttccggtgccaatgggttaggttgacaagtggaggcgtaatgattgatgacagtgggatgacaacggttgaccttaacaaggttggatactcggacgaatcttttgtccttgccaatgatgtaacgcaagtcttttacgtgaaggacatgtcgagcaaaggaaagaagggcagagggcctgacgagcctaagcgtcacgtggttctcccagcgcgccctcgtcttctctaccaacacttagaagtttttgcccgatcgatctctctcggctagggcatccccgcgccgacgccgccgtcgtatctcgccgtcgtctcgcgctcgtcgtcgtcgccgcctccgcctcctccgccgccgctgcatctctgggctgtttcctgtatgaacagatggctgatcgcgatgaggaacagatattgtacgatacaatcgcggagggaagtagccaatactggaacaaagaagaggggaacgaggacacaaaccagtatttaaacgaggaagggaacgtggagagggatgcggaggggaactaggaggggcacgtggagagggatgtggaggggaaccaagaggaggaggctagtggaagtcaaccctccgctggacagaagagggcacgcgggcaacgagatgccgcgaagaagcttgagggtcggcacatcataacggaagtggacgaagacggccgacctagtgcctcggtagaagccgccaagaactatgtacgtcacagcggttaggttgtgcgggataacgtgcctgtcagtacagtgtactggtgcagaacaagggcacgcggagatcatgagagatttgtcccagattcggagaaagagatgctgtggaccacaatgctcgagacattcacccttcccgcgggtacagaggacaaagtgaaaacgtggactctgaagaaaatggcagaacagtttcagagcttcaagggagatctgtatcagaaatatatcatgaaggggcagacaccgaacttcgacacattcccaaagctaatggatcactgggacgagttcgttgcatataagacaggtgaacaagagcaggcgatgatggaaagaaacaaagaaaatgccgccaagaagtagtaccatcaccacttggggtcaggcggctatagcgtcgcgatgtcgaagtgggaggagatggaggctagcttgcttgagaggggtatcgaaccggccaccgctaattggccggaacgatcgaagttctggtactatgctcacagtgaacgctcaacccagctgatggctccctagtcttcggcgatcagatacgcgaggctgcgcgtcgactaacagacgcattgaaagcctcttctcagggcacgttccgaccggacagagagaaggacgagctgtcactcgccctgcagactccagagcatctaggacaaacacgagggaaaggggtgattccttggaagattgggttcaaggaggacaaccacacgtacaggagtcggatgaggattaagagagataccgaggcaaagattgcagatcttgagttcagggtatcgagctacgagctcagcttgcaagaggaggtggcaaggaaggttgatgaacacatggccgtacatcggtcccatgatccctagccgaccattcctcctgcaatggtgagcccgtcaggaaatcgtagcagctgcgcctcaacggggcaggtaggatcacagagcatggacgccatgcaaacccaggacgaaaccacctaccctgttgatgacatcactcagcggacaccatgtgagctgtatattcccttcaagaacttatcaataaaggtggcgtcgggcatggccatcccaacggaccctttaggtacttaccactgcaggccgattccagcaggatactccaaggtcgaagttgagttggtcgaaggcgcgtatgaggacctcgagctggattaccctagaggagacggtgagacgcatctacatgacacaagccacgccattattctatggcgcaagtggtacatcatcctcccttggcgacaagcggcgtctcgtgcaccatctcctcctcagtctcctgcatagtctcctcctcatgctcctgcaccgactccttctcaggctcctgcactgactcctcctcaggctcctacaccgactcctcctcaggctcctcttccggcaccttccaagtcaagggcccccaaggctcctccgcctacccctacaagggcaacgaagaaggcgaaagttgatgccgccaagaataaggacccggggtacgattgcacgcaagaggagcttgacgcttacgtggcatcagaagtcaggagacaattcaagcctcgtagtctagaaaagaagattcctatagacccgagtgtcaggaacttcttcaggggtatgtctgcacctgccaaggaggccataaagctatcggactatgagcgaacactcaagaaagcatcttctggaaagtccaaactagtccctcagcttggagagcaaccaaaccaggagatcgagccgttggtgaccggtgaagtttttggaatacaagactttattaatgacatcgggctaactacagatcaattgctacgagatgcaccaatcgaaaaggcggaagtgaaatacatgtacgaactcggtaaaccgcttctcaagcctgagctgctgcagtccctacccacacaaatgtacaagttccatcagctgtacatggagatgagcgccaccggtagagagatgatcggagcgaggatcagggacacggacttcttgcaaggagatgacattctcttgatcaatttcaagggaatctacgaactataccagctggacgccctcgacgtctctattatgagttgctggattttaatggagattcaaagggcccaacggcggggggtttttgattctggattcatcgaccctcggaaagtaaacgtcgcaatgctcgaccaatatccgcaagccacagaggacaatctcgtccatctcctgaaggcgcagcattacaagacgttcatactgttgccgtacaacacagaattccactgggtgcttttactcttcgacctggaggcctgcaccttcaacgtatatgactcaatggataaaaaagagtctacgtttgacaaggttttcgaacttatagacagggcttggtatcggttccgtcatttggtccgcggcaaatggagagaaagacttaggcagaagttcaaatttccttttattcgcatgagggataacctgatcacacacaaggaatttatcgcggcggttcaagaacaactcatgagattcatcaacgaacaaatccttgatcccaagggtgaattctactacgacggaaatacaattcatatgtccttagcttctgagatagcgactactactacgtcaaaatcgtagctagctaggacatataat

SEQ ID NO: 93161 - DNA, 6369 bp, Oryza sativa
  Clone ID: PAT_MRT4530_91573C.1
atggatcggcaatggatgtacgctgatcggcggtccaaagagtttattgatggcgtgcatgattttttgagagtggccgaagctaacaggcataagggttttatttgttgtccatgcaataagtgtaagaatcagaaggagtattctgcatccaggactattcatttccacttgtttgagtcggggttcatgccaagctataattgttggacatcccacggagagcaaggtgttgaaatggaagaagatgaagtggaagacgacaatattctggactttgctcagtacgttggatttgaaggaaatcaaacgggcgaggaggaaagggatgctgatggtaacgacgttgcggatgatcttggtcagatgttgcaggacgccaaggaggactgcgaaagagaaaagggggcccataaattggacaagatgttagaggaccacagaacgtcgttgtacccaggttgcgagcaggggcacaaaaagttggataccactctggagttcttgcaatggaaggcaaaaaatggtgttagtgacaaggcatttggcaatttattgaaactcgtcaagaacattctttcggagggaaacaaattgcccgagacaatgtacgaggctaagaagatagtctgccctctaggactggaagttcagaagattcacgcatgtccgaatgattgtatcctatatcgcggtaagaagtacgagaacctagaagcatgccctgtttgcaaagcactatgatacatgattagacgagacaatccaggagaagttgatgggcagctaacaaagaagagaattcctgctaaggtgatgtggtatttccctataataccacgtctaaggcatttgttcaggaacaaggggaatgctagaatgatgcgatggcacactgaagagcgtcaacaggacgggatgctgagacacctcgccgatggttcgcagtggcgaaacatcgacagaaaatttaaagactttggaaaggacgcacgaaacatacggtttggtttgagtacgaatggcatgaatccttttagagagatgagcagcggccatagcacttggcccattacgatgtgtatctacaacctcctcccttggctatgcatgaagaggaagtacataatgatgccgattattattcaaggccccaagcaacctagtaacgacatcgatgtgtacctaagaccgctggtcgaagatcttaaactgttgtggaagaaggaaggtgtccccgtgtaggacgaggacaaacaggaggagtttaacctacgagtgctactgttcgtaaccatcaacgattggcctgcacttagcaacccatccggacagtccaacaagggggacaaggcttgcactcactgtatggatgaaacagaaagtacgtatcttaagcactgtaggaaggttgtgtacatggtcatcgtcgattccttgcagcaaaccacccggtacggaagagaggcaagcacattgaacataaggcggaccaccgtacgaagcctaaacatcgcagcgggaaaacagtgtttgctgtggttaaagatcttaaagtagtgttcggaaagggggcctggaagccagcctatagagagcgaagatggtcacgcggcgatgtggaaaaagaactctatattttgggagttaccctatagggaattcttggacgtccgccacgcaatcgatgtgatgcacctcactaagaacctttgcgtaaaccttcttggcttcctaggtgtatatggaaagtcaaaagatacactggaagcacgtaatgatctgaagcgtatggaacaacgcggcgaccttcacccggaaccaaaggagaaaggaagccattacttgagtccagccagctacactcttagcaaggcagagaaggaaagtatgtttgaatgcttggagagcataaatgtaccgtctggatactccacgaatatcaatcgaataataagcacgaaggagaagaagttcacaaacctaaagtcttatgactgtcacgtgttgatgacacaactgctaccagttgtaataaggggtatccttccagacaatgtccgggcaacaataacaaagctatgtgcattcatgaacgcaatttcgcagaaggtcaccgatccggatagattagaagcccttctgaatgatgtggagttttgagttgatatttccaccttcatttttcaatataatgacgcatctgctttgtcaccttgtcaaagagatcagtattctcgggcctgtgtacctacacaacatgtttcctttcgagaggtacatgggcgttctgaagaagtatgttcgtaaccatgctcgtccagaggcaagcatcgccaaggggtatggaacagaggaggtcatcgaatttcgcgtagaatttattgaagaccttcgcccaatcggggtacctgaatcacgccatgaagggagactacggggaaagggaactctcggaaggaaagcaataatgacgatagacaacaatttattccgtaaagcccatttcacgtttctgcaacaatcttcattggtagctccttacatcaaggagcacttggctctagttcacgccagaaacatcggtaagtccgatgcatggattacacggcatcacattgatactttccccgcgtggctatgacaacatctcatgggtaacgagacgatcaaccaacaactggccttcctggtgaggggaccatctgggtcgatcgcgacattccagggatatgagatcaatgggtacacattctatacgagagcccaagacatgaagagcacgaaccaaaacagcgttgttcgtatcgatgcaatgggacacgatggaacaactggcacgtattacggtgccatcgaggacatatgggaacttgactatggtcctctcaaggtccctctgttccggtgccaatgggttaggttgactggtggaggcgtaatgattgatgatagtgggatgacaacggttgaccttaacaaggttggatactcggacgaaccttttgtccttgccaataatgtaacgcaagtcttttacgtgaaggaaatgtctagcaaaggaaagaagggcagagggcctgacgagccgaagcgtcatgtggttctctcagtgcgccctcgtcttctctaccaacacttagaaatttttgccccgatcgatctctctcggcttctccttcgcagccactgcctagggcatccccgcaccgacgccgccgtcgtatctcgacgccgtcttgcgcgtgtcgtcatcgccgcctccgctgccgcctccgaccccgacctcgatgcgaactatttcttgtatgaacagatagctgatcgcgatgaggaacatatattgtaagatacaattgcggagggaagcagccagtacttgaacgaagaagaggggaacgaggatccaaaccagtacttgaaccaggaagggaatgtggagagggatgcggaggggaaccaggaggggcacgtatagagggatgtggaggggaaccaggaggaggaggctagtggaagtcaaccctccgctggacagaagagggcacgcgggcaacgaggtgccgcgaagaagcttgagggttggcacatcataacggaagtggacgaagacggccgacctagtgcctaggcggaagccaccaagaactacatacgtcacagcggttgggttgtgtgggataacgtgcctgtcagtacggtgtactggcgcagaacaagggcacacggagatcatgagagctttgtcccatattcggagaaagagatgttgtggaccacaatgctcgagacattcacccttcccacaggtacagaggacaaagtgaaaaggtggactctaaataaaatggcagaacagtttcagagcttcaagggagatctgtaccagaaatatatcctgaaggggcagacaccgaacttcgacacattcccaaagctaagggatcactgggacgagttcgttgcacataagacatgtgaacaagggcaggcgatgatggaaagaaacaaagaaaatgccgccaagaagaagtaccatcaccacttggggtcaggaggctatagcgtcgcgatgccgaagtgggaggagatggaggctagcttacttgagaggggtatcgaaccggccaccgctaattaaccggaacgatcgaagttctggtactatgctcactttggaacgctcaacccagttgatggctccctggtcttcagcgatcagatacgcgaggctacgcgtcgactaacggacgcagtggaagcctcttctcagggtacgttccgacccgacagagagaaggacgagctgtcactcgccctgcagactccagagcatccaggatgaacacgagggaaaggggtgattccttggaagattgggttcaaggaggacatccacacgtacaggagtcggatgaggagcaagagagataccgaggcgaagattgcagatcttgagttcagggtatcgagctacgagctcagcatgcaagaggaggtggcaaggaaggttgatgaacgcatggccgcacattggtccaatgatccccagccaaccattcctcctgcaattgtgagcccttcaggaaatcgtagcaactgcgcctcaacggggcagggaggatcacagagcatggacgccatgcaaacccaggacaaaaccacctgccccgttgatgacatcactcagcggacaccatctgagctgcatattcccttcaaaaacttatcaataaaggtggcgtcgggcatggccatcacaacggaccctttaggtacttaccactgtaggacgattccagcaggatactccaaggtcgaagttgagttggtcgaaggcgcgtacgaggacctcgagttggattaccctggaggagacggtgagacgcatctacgagacacaagccacgccattatactatggcgcaagcgatacatcatcctcccagggcgacaagcggcgtctcgtgcaccatctcctccggctccgccatctcctcctcaggctcctgcaccgtctcctcatgctccagcaccgtctccacctcaggctcctgcaccaactcctcctcaggctcctgcaccgactcctcctcaggctcctacaccgactcctccgcaggctcctcgttcagcaccttccaagtcaagggccccccaagctccaccgcctgcccccacaagggcaacgaagaaggcgaaagttcacaccgccaagaacaaggatctagggtacgattgcacgcaagaggagcttgacgcttatgtggcatcagaagtcaggagacaattgaagcctcgaagtccagaaaagaagattcctatagactcgagtgttaagaacttcttcaggggtatgtctgcacctgccaagaaggccataaagctatcggactatgagcgaacactcgagaaagcatcttctggaaagtccaaaccagtccctcagcttggagagcaagcaagccaggagatcgagccgttggtgaccggtgaagattttggaatacaagaatttattgatgacaccgggctaactacggatcaattgatatgaggtgcaccaatcgaaaaggcgaaagtgaaatacatgtacgaactcgataaaccgcttatcaagcctgagcagctgcagttcctacccactcaaatgtacaagttccatcaactgtacatggagatgagcgccaccggtagagagatgatcagagcgaggatcagggacacggacttcttgcaaggagatgacattctctggatcaatttcaagggtatctacgaactataccagctggacgccctcgacgtttctattatgagttgctgcattttaatggagattcaaagggcccgacggtggggggttttcgatactggattcatcgaccctcggaaagtaaacgtcacagtgctcgaccggtatctgcaagacacagaggacaatctcgtccatctcctgaaggcgcagcattacaagacgttcatactgttgccgtacaacacagaattccactgggtgcttttactcttcgacctggaggcctgcaccgtcaacgtatatgactcaatggataaaaaagagtctacgtttgacaaggttttcgaacttataaacagggcttggtatcggttccatcatttggtccgcggaaaaatgagagaaagacttaggcggaagttcaattttccttttattcgtatgagggataacctgatcacacacaaggaatttatcacggtggttcaagaacaactcatgggattcatcaacgaacaaatccttgatgccaagggtgaattctactacgacggaaatacaattcataggtccttagcttctgagatagcgactactactacgtcgaaata

SEQ ID NO: 93162 - DNA, 744 bp, Oryza sativa
  Clone ID: PAT_MRT4530_91574C.1
atgaatgttgcacctgtgcaccatgcacagtaccctttttcttcttgttcacatacatcatgtccgattgtgccaaaaggaatgccaattgttcggagaacatacatcttagctgctggattattgcttggcatcagggctgtgggaatcactgactacctggagataacgattcctctggcatatttatctgtggcatggcttcagccagttgtatcaattgcgtcagaacatgggaatgctgaatgctcgaataccaccaaggaaactagtttccaatcgggcatgagcagaatatgttcagcaacctctataattcaatggaacaagcagatgtcatcgatgcgttgtcaatacatactggcacgtctgggtggtccggggcgggaaagtggcctggaatctggaatctccgcgctccacctcttattcctcaattatatcgtccatttgcagaatctgaatatttgcacgaaggcgagggcggacatgacgccccaaaagcgcgatggcgtcgatgatgctttcactctccctgccgtgcccaatggcagagcaaatgctggaaaggagcgcaccaccgccagtactggcactttcctccacctcgcacgaacaaaagtcgctggagcacaacacaaagcggcagtagcaccggtgccactctacacacaccccgtaccgcgtgatggtcaccgttgccatctcccagggaggagaagggccaaaagaatattaaagtaa

SEQ ID NO: 93163 - DNA, 4806 bp, Oryza sativa
  Clone ID: PAT_MRT4530_91575C.1
atggatcggcaatggatgtacgctgaccggcggtccaaagagtttattgacgacgtgcactattttttgagtgtggccaaagctaacaggcaaaggggttttatttgttgtccatgcaataagtgtaagaatcagaaggagtattctgcatccaggactattcatttccacttgtttgagtcggggttcatgccaagctataattgttggaaatcccacggagagcaaggtgttgaaatggaagaagatgaagtggaagacgacaatattccggactttgctaagtacgttggatttgaaggaaatcaaatgggcgaggaggaaagggatgctgatggtaacgacgttgcggaagatcttggtcagatgttgcaggacaccaaggaggactgcgaaagtgaaaagggagcccataaattggacaagatgttagaggaccacagaacttcgttgtacccaggttgcgtgcaagggcacaaaaagttggataccactctggagttcttgcaatggaaggcaaaaaatggggttagtgacaaggcatttgacgatttattgaaactcgtcaagaacattcttccggagggaaacaaattgcccgagacaacgtacgaggctaagaagatagtctgcccgctaggactggaagttcagaagattcacgcatgtccgaatgattgtattctatatcgcggtgaggagtatgagaacctagaagcatgccctgtttgcaaagcactacgatacaagattagacgagacgatccaggacaagttgacgggcagctaacaaagaagagaattcctgctaagtccaacaaggggtacaaggcttgcactcactgtatggatgaaatagaaagtacgtatcttaagcactataggaaggttgtatgcatgggtcatcgtcgattccttgcagcaaaccacccggtacggaagaaaggcaagcacttcgaacataaggctgaccaccgtacgaagcctaaacatcgcaacgggaaaacagtgtttgctatggttaaagatctaaaagtagtgttcggaaaggggcctggaagccagcctatacagagcgaagatggtcacgtggcgatgtggaaaaagaactctatattttgggagttaccctattgggaattcttggacgtacgccatgcaatcgacgtgatgcacctcactaagaacctttgcgtaaaccttcttggcttcctaggtctatacggaaagtcgaaagatacactggaagcatgtaatgatctgaagcatatggaacaacgcggcgaccttcactcgaaaccaaaagagaaaggaagccattacttgagtccagccagctacactcttagcaaggcagagaaggaaattgtaataaggggtatccttccacacaatgtccgggcaacaataacaaagctatgtgcattcatgaatgcaatttcgcagaaggtcattgatccggatagattagaagcccttcagaatgatatggtgcaatgtctcgtcagttttgagttgatatttacaccttcatttttcaatataatgacgcatctactttgtcaccttgtgaaagagatcagtattctcgggcctgtgtacctacacaacatatttcctttcgagaggtacataggcgttctgaagaagtatgttcgtaaccgtgctcgtccagagaatttatcgaagatcttcgcccaatcggggtacctgaatcacgccatgaagggagactacgggaaagggaactctcggaaggaaagcaataatgacgctccttacatcgaggagcacttggctctagttcgcgccaggaacatcggtaagtccgatgcatggattacacggcatcacattgatactttcctcgcgtggatacgacaacatctcatgggtaacgagtcgatcaaccaacaacttgccttcctggcgaggggaccgtctgggtcgatcacgacattccaaggatatgagatcaatgggtacacattctacacgagagcccaagacatgaagagcacgaaccaaaacagcgctgttcgtgtcgatgccatgggacacgatggaacaactggcacgtattccggtgccatcgaggacatatgggaacttgactatggtcctctcaaggtccctctgttctgtgggatgacaacggttgaccttaacaaggttggatactcggacgaaccttttgtccatgccaatgatgtaacacaagtctttttagtgaaggacatgtctagcaaaggaaagaagggcagagggcctgacgagcctaagcgtcacgtggttctcccaggcaaaagaaaaatcgtcggagttgaggacaagactgacgaggattacgatcagttggatgggcaaccccctttcacggtgacgattgaccctagcatcctcctatcaaatgaagacaccccttactcacatagcgatcacaaggagggaacaataggagagctgtacaagaaatatatcctgaaggggcagacaccgaacttcgacacattcccaaagctaagggatcactgggacgagttcgttgcatataagacaggtgaacaagagcaggagatgatggaaagaaacaaagaaaatgccgccaagaagaagtaccatcaccacttggggtcaggcggctatagcgtcacgatgccgaagtgggaggagatggaggctagcttgcttgagaggggtatcgaaccggccaccgctaattggccggaacgatcgaagttctggtactatgctcacggtggaacgcttaacccagctaatggctcactggtcttcagcgatcagatacgagaggctgcgcgtcgactaacagacgaagtggaagcctcttctcagggcacgttccgaccggatagagagagggacgagctgtcactcgccctgcagactccagagcattcaggacgaacacgagggaaaggggtgattccttggaagattgggttcaaggaggacatccacacgtataggagtcggatgaggagcaagagagataccgaggcgaagattgcagatcttgagttcagggtatcgagctacgagctcagcatgcaagaggaggtggcaaggaaggttgatgaaagcatggccgcacatcggtccaatgatccccagccgaccattcctcctgcaatggtgagcccgttaggaaaccgtagcagctgtgcctcaacggggcaggtaggatcacagagcatggacgccatgcaaacccaggacgaatccacctgccccgttgatgacatcactcagcggacaccatgtgagctgcatattcctttcaagaacttatcaataaaggtggcgtcgggcatggccatcccaacggatccttcaggtacttaccactgtaggccgattccagcaggatactccaaggtcgaagttgagttggtcgaaggcgcgtacgaggacctcgagctggattaccctggaggagacgcaccatctccacctcaggctcctgcaccgactcctcctcaagctcctgcaccgactcctcctcggtctcctacactgactcctctgcaagctcctcttccggcaccttcaaagtcaagggccccccaagctccaccgcctgcccacagaagggcaacgaagaaggtgaaaattgacgccgccaagaacaaggatccggggtacgattgcacgcaagaggagcttgacgcttacgtggcatcggaagtcaagagacaattcaagcctcgaagtccagaaaagaagattcctatagacccgagtgtcatgaacttcttcaggggtatgtctgcacctaccaaggaggccattaagctatcggactatgagcgaacgctgaagaaagcatcttctggaaagtccaaaccagtccctcagcttggagagcaaccaaaccaggagatcgagccgttggtgaccggtaaagaaatgatgatacaagaatttattactgacaccggtctaactacggatcaattgctaggagtcgcaccaatcgaaaaggcggaagtgaaatacatgtacgaacttggtaaaccgcttgtcaagcctgagctgctgcagtccctacccacacaaatatacaagttccatcagctgtacatggagatgagcgccaccggtagagagatgatcggagtgaggatcagggacacggacttcttaatggagattcaaagggcccgacggcggggggttttcgatactggattcatcgaccctcagaaagtaaacgtcgcaatgctcgaccaatatccgcaagccacagaggacaatctcgtccatctcctgaaggcgcagcattacaagacgtttatactgttgccgtacaacacagaattccactgtgtgcttttactcttcgacctgtcggcctgcaccgtcaacgtatatgactcaatggataaaaaagagtctatgtttgacaaggttttcgaacttatagacagggcttggtatcggttccgtcatttggtccgtggcaaatggagagaaagacttaggcggaagttcaaatttccttgcgcaaagcaaaagaagggaactaacttgtgcggctattacgtgtgcgagtattgccactgccttgcagaccaaatcatcaccacaagagagctcaattatattcgtatgagggataacctgaccacgcacaaggaatttatcacggcggttcaagaacaactcatgggattcatcagcgaacaaatccttgatcccaagggtgaattctactacgacggaaacacaattcatagatccttagcttctgagctagcgactactactacgtcgaaatcatag

SEQ ID NO: 93164 - DNA, 3311 bp, Oryza sativa
  Clone ID: PAT_MRT4530_91576C.1
cgccgccgtcgccgccgccgccacgccgccgcgccaagcgccggcccgatgccgccacaccgccgttaacgaacacgtgaacgagaacgaacacgtcaacgtacgttggcgcgagaacgtgaacgagaacgagacgatcgaacgaacgagagcgagaatgaacacgtcaacgtacgttgccgtgagaacgtgaacgagaacgagcgaacgaacgtgaacgagagaacgaacgtgaacgtgaaatgcaatatatatatgttacacggcatttatatggctgaccgcgatgaggaacagatattgtacgatacaatcgcggagggaagcagccagtactggaatgaagaagaggggaacgaggatccaaatcagtacttgaacgaggaagggaacgtggagagggatgcggagaggaaccagcaggggcacgtggaaaggaatgtggaggggaaccaggaggaggaggctagtggtagtcaaccctccgttggacagaagagggcacgcggacaacgaggtgcagcgaagaagcttgagggtcggcacatcataacggaagtggaagaagatggacgtcctagtgccccggccgaagccgccaagaactatgtacgtcacagcggttgggttgtgcgggataacgtgcctgtcagtacagtgtactggcgaagaacaagggcacgcggagatcatgagagctttgtcccagattcggagaaagagatgctgtggaccacaatgctcgagacattcacccttcctgcgggtagagaggacaaagtgaaaaggtggactctgaagaaaatggcagaacagtttcagagcttcaagggagatctgtaccagaagtatatcctgaaggggcagacaccgaacttcgacacattcccaaagctaagggatcactgggatgagtttgttgcatataagacaggtgaacaagggcaggcgatgatggaaagaaacaaagaaaatgccgccaagaagaagtaccatcaccacttggggtcagaaggctatagcgtcgcgatgccaaagtgggaggtgatggaggctagcttgattgagaggggtatcgaaccggcaaccgccaattggccggaacgatcgaagttctggtactatgctcacggtggaacgctcaacccagctgatggctcactggtcttcggcgatcagatacgagaggctgcgcgacgactaacagatgcagtggaagcctcctctcagggcacgttccgaccggacagagatagggacgagctgacactcgccctacaaactccagagcatccaggatgaatacgagggaaaggggtgattccttggaagattggtttcaaggaggacatccacacgtacaggagtcggatgaggagcaagagagataccgaggcgaagattgcagatctagagttccgggtatcgagctacgaactcagcatgcaagaggaggtggcaaggaaggttgatgaacgcatggccgcacatcggtcccatgatccccagccgaccattcctcctgcaatggtgagcccgttaggaaaaccgtagcagctgcgcctcaacggggcaggtaggatcacagagcatggacgccatgcaaacacaggacgaatcgacctgtcccattgatgacatcactcagcggacaccatgtgagctgcatattccttacaagaacttatcaataaaggtggcgtcgggcatggccatcccaacggacccttcaggtacttaccactgcaggccgattccagcaggatactcgaaggtcgaagttgagttggtcgaaggcgcgtacgaggacctcgagctggattaccctggaggagacagatcctgcaccgtctcctcctcatgctccgccagcaccgtctccacctcaggctccagcactgactcctcctcaggatcctgcactgactcctcctcgggctcctacacctactcctccgtaagctcctcttccggcaccttcaaagtcaagggcccccccagctccaccgcctgcccacacaagggcaacgaagaaggcgaaagttgacgccgccaagaacaaggacccggggtacgattgcacgcaagaggagcttgacgcttacgttgcatcagaagtcaagagacaattcaagcctcgaagtccagaaaagaagattcctatagaccccaatgtcaggaacttcttcaggggtatgtctgcacctgtcaaggaggccatcaagctatcggactatgagcgaacgctgaagaaagcatcttctggaaagtccaaaccagtccctcagcttggagagcaaccaaaccaggagatcgagccgttggtgatcggggaagacatgacgatagaagaatttattattgacaccggtctaactacggatcaattgctaggagttgaaccaatagaaaaggcggaattgaaatacatgtacgaactcgataaaccgcttgtcaagcccgagctggtgcagtccctacccacacaaatgtacaagttccatcagctgtacatggagatgagcgccaccggtagagagatgatcggagcgaggatcagggacccggacttcttgcaaggagatgatattctctagatcaatttcaagggaatctatgaagtataccagctggacgccctcgacgtctctattatgagttgctggattttaatggagattcaaagggcccgacggcggagggttttcaatactggattcatcgaccctcggagagtaaatgtcgcaatgctcgaccaatatccacaagaaacagaggacaatctcgtccatctcctgaaggcgcaacattacaagacgttcatactgttgccgtacaacacagaattccactgggtgcttttactcttcgacctgtcggcctgcactatcaacgtatatgactcaatggataaaaacgagtctacgtttgacaaggttttcgaacttatagacatggcttggtatcggttccatcatttggtccgtggcaactggagagaaagacttaggcggaggttcaaattttcttgcgcaaagcaaaagcagggaactaacttgtgcggctactacgtgtgcgagtattgccactgccttgctgaccaaatcatcaccacaagagagctcgattttattcgcatgagggataacctgaccacacacaaggaatttatcgcggcggttcaagaacaactcatgggattcatcaacaaagaaatccttgatcccaagggtgaattctactacgacggaaacacaattcaccggtccttagcttctgagctagcagcgagtactactactacgtcgaaa

SEQ ID NO: 93165 - DNA, 1310 bp, Oryza sativa
  Clone ID: PAT_MRT4530_91577C.1
gcgcggaaatccccttctcccatttttcctctccacgcttccaatccccttctcccatttttcctctcctcgcttctcgccgcagccgccgccgcctcctcctcctctcgccatggccgccgctgctccccccgcgggccccgggctctactccgacatcggcaagaaggctagagatctcctgtatagggattaccacacggaccagaagttcacgctcaccacctacgccgcgaacggagctgcaatcactgttgctggcacgaagaaaaatgagtccatcttctctgaaatccagagccaggtgaagaacaacaatgtgtccgtggatgtgaaagcaacttcagactcaaaattgataactacattcacagttcatgatctgggcactccagggcctgaagggaattctatccattccttttaccctaccagaagtttgcaaacgggttaagatccagtactttggatccacatgctggcctgaatgctattgttggcctgaatgcaaatcctcttgttagcttttctggtgtgtttggaactggggcttttgctgttggtactgatgttgcatttgatactgcaactggggacttcaccaagtacaatgcgggactgagccacactactccagatctcactgcagcactgcttctgaacaacaagggagacagccttgctgcttcctactaccacaaggtgagcaaaacaagtgctgttggagcagagctggctcacagcttctcgagcaacgagaacactctcaccttcgggacacagcatgccctggatgaactcactactgtgaaggcgcgcttcaacaactttggcatggccagtgcgctcatccagcacgagttcaggcccaagtcgctcgtcaccatctccactgaggttgataccaaggccatcgacaagagctccaaggttgggctgtccctggtcctcaagccttgaaggtcgcctgctttttctggtttggtttaggatgctagcttttgatatcagcagctcattgaacaaaacttgtaatcggcttaactttggttgcctctagcctgttctagactacatgagggtttctgttaccagtcaatctgtctcggtttctttttggtcatttgcgggcatattgatgggaaaacatgtcccggaatctgagtgtcaaaactcttgggtgaaattggtcacgtacttcaaagttcaccctctgaatccagctgcagatacttctgtttgattcaaaaccaaaaaaaaaaaaaaacaaaaaaactaaaaaataaaaaaatccaaaaaaaaaaaaaaaa

SEQ ID NO: 93166 - DNA, 1020 bp, Oryza sativa
  Clone ID: PAT_MRT4530_91578C.1
atggggaggaggtgtgggcataagacggtgatggggacgccgctcggcgcggtgctgtgtaagatagccggtgtggtggtgctggtgcatggattgagcgatgtcctgccaatcgaggacaggagttgccacttgttcgtggccacgcacgtacgccgctacaatctcccgcgcactgccgcggccagctcggttccccactcggttcctcccaagcctcgcccttggctgcttccaccaggagaacgacgtcggccgctgcgcgtgggggcggaagtggctcgcggcttcgagctcgcggcagccgcgcttctttccggcggcatccgcctcgcggttcctaggcccgttctagctcccggacggcgaggccttgctgctcgactacgcccagccagtggcgtcccgcaaggccgcaacggccgcgctactacagtactacgcgtgtgcgcaatactcaccggtgacgacctcgacacgccgccatcgcgctccttcttccgcctgctcatcatctacaaccgccccggcttcacggctatgcggtgctactcgtctgacgacagtagctggggcccggaacgaaggaaaccatactgcgcccggctaggccatgccttggcggcggcgtggcctactggcccttccactgggaggcgttcgtcggcgcgcgctatcggactcagccatggacacctcaggccggcgaggacgaccccgatcgagctccggtggttcggtgagaagagcggtacggtggtgtacaccgttggggaggccaatggcggtcttcgcggtgaacatggcggatgggacagtccagaagctagcagacggtggcggctacaacacatgcaggaatatttaagcaccaagctggagacggactccgtctcggactcgccttgcactcgcactcgcagggtagccgggatggatggcgccgaacgcgtcacaacagcctccgcatccgcctctggctcctccctcgcctataaattgagcaagcgcgccagctaa

SEQ ID NO: 93167 - DNA, 5284 bp, Oryza sativa
  Clone ID: PAT_MRT4530_91579C.1
atggatcggcaatggatgtacgctgaccggcggtccaaagagtttattgacggcgtgcactattttttgagagtggccgaagctaacaggcaaaggggttttatttgttgtccatgcaataagtgtaagaatcagaaggagtattctgcattcaggactattcatttctacttgtttgagtcggggttcatgccaagctataattagttggacatcccacggagagcaaggggttgaaatggaagaagatgaagtggaagacgacaatatttcagactattgcttagtacgaaagaattgaaggaaatcaaacgggcgaggaggacatagatgcagattataacgatgttgcggatgatcttggtcagatgatgcaggatgccaaggaggactgcgaaagtgaaaagggggcccataaattggacaagatgttagaggaccacagaacgtcgttgtacccaggttacgagcaggggcacaaaaagttggataccactctggagttcttgcaatggaaggcaaaaaatggtgttagtgaacaaggcatttggcgatttattgaaactcgtcaagaacattcttccggagggaaacaaattgcccgagacaacgtatgaggctaagaagatagtctgtcctctaggactggaagttcagaagattcacgcatgtccgaatgattgtatcctatatcacggtgaggagtacgagaacctagaagcatgccctgtttgtaaagcactacgatacaagattagacgagatgatctaggtgaggttgacaggcagctaacgaagaagagaattcctgctaaggtgatgtggtatttccctataataccacggctaaggcgtttgttcaggaacaaggggaatgctagaatgatgtgttggcacgctgaagaacgtcaacaggacgggatgctgagacaccccgcagatggttcgcagtggcgaaacatcgacagaaaatttaaagactttggaaaggacgcacgaaacatacggtttggtttaagtacggatggcatgaatccttttggagagatgagcaacggccatagcacttggcccgttacgatgtgtatctacaaccttcccccttggctatgcatgaagaggaagtacataatgataccgattattattcaaggccccaagcaacctggtaacgacatcgatgtgtttctaagacaactggtcaaagatcttaaactgttgtggaagaaggaaggtgtccccgtgtgggacgaggacaaacaggaggagtttaacctatgagcgctgctgttcgtaaccatcaacgattggcctacacttagcaacctatccgggcagtccaacaaggggtacaaggcttgcactcgctgtatggatgaaacagaaagtatgtatcttaagcactgtaggaaggttgtgtacataggtcatcgtcgattccttacagcaaaccactcggtacggaagaaaggcaagcactttgaacatacagcggaccaccgtacaaagcctaaacatcgcagcgggaaaacagtgtttgctatggttaaagatcttaaagtagtgtttggaaagggacctagcagccagcctatagagagcgaagatggtcacgcggcgatgtggaaaaaaaactccatattttgggagttaccctattgggaattcttggacgtccgccacgcaatcgacgtgatgcacctcactaagaacctttgtgtaaaccttcttggcttcctaggtgtatatggaaagtcgaaagatacactggaagcacgtaatgatctgaagcatatggaacaacgcggcgaccttcacccggtaccacaggagaaaggcagccattacttgagtccagccagctacactcttagcaaggcagagaaggaaagtatgtttcaatgcttggagagcatcaaggtaccgtctggatactccacgaatataaagcgaataataagcacgaaggagaagaagttcacaaacctaaagtctcatgactgtcacgtgttgataacacagttgctaccagttataataaggggtatcctcccagacaatgtccggacaacaataacaaagctatgttctttgatgaacgcaatttcgcagaaggtcatcgatccggataggttagaagcccttcagaatgatgtggtgcaatgtcttgtcagctttgtgttgatattttcaccttcatttttcaatataatgacgcatctgctttgtcacctagtgaaagagattggtattcccgggcctgtgttcctacacaacatgtttcctttcgagaggtacatgggcgttctgaagaagtatgttcgtaacatgctcgtccagaggcaagcatcgccaaggggtatggaacagaggaggtcattgaattttgcatagaatttattgaagaccttcgcacaatcggggtacctgaatcacgccatgaagggagactacggggaaaggggactctcggaaggaaagcaattatgacggtagacaacaatttattccgtaaagcccatttcacggttttacaataatcttcattggtggctccttacatcgaggagcacttggctctagttcgcgccagaaacatcggtaactccgatgcatggattacacggcatcacattgatactttccccgcgtggctgcgacaacatctcatgggtaacgagacgattaaccaacaactggccttcctggcgaagggtccatctggctcgatcgcgacattccagggatattagatcaatgggtacacattctacacaagagcccaagacatgaagagcacgaaccagaatagtgctgttcgtatcgatgccatgggacacgatggtacaactggcacgtattacggtgtcatcaaggagatatgggaacttgactatggacctctcaaggtccctctgttccggtgccaatgggttaggttgactggtggaggcgtaacgattgatgacagtgggatgacaacggttgaccttaacaaggttggatactcggacgaaccttttgtccttgccaatgatgtaacacaagttttttacgtgaaggacatgtctagcaaaggaaagaagggcaaagggcctgacgagccgaagcgccatgtggttctcccaggcaaaagaaaaatcgtcggaatccggaggtatatatattcccggtgcgccctcgtcttctccttcgccgccactgcctagggcaacccctcgccgaagccgccgtcgtctctcaccgtcgcctagcggtcctcgccgcctccgccgcagacgccgccgccgcgtctcttgggtgtttcttctatgaacagatggctgatcgcgatgaggaacagatactgtacgatacaatcgcatcgggaagcagccagtactggaacgaagaagaggggaacgaggatccaaaccagtacttgaacgaggagagggatgcagaggggaacaaggagggaaacgtggagagagatgcggaggggaatgaggaggaggatagtggaagtcatccctccgctggacagaagagggcacgcggacaacgaggtgccgcgaagaagatagagggtcggcacatcataactgaggtggacgcagacagccgacctagtgccccggcacaagcagccaagaattttgtacgccacagcggttgggttgtgagggataacgtgcctgtcagcaaggtgtactagcgcagaacaagggcacgcggggataatgacagctttgtcccgaaatcagagaaagagatgctgtgaaccacaatgctcgagacgttcacgctccctgcgggtacggagaacatagtgaaacagtggactcttaagaaaatggcagaacagttccagaccttcaagggagatctgtaccggaaatacatcctgaaggggcagacaccgaacttcgacgtattcccgaagctaagggatcactaggacgagttcgttgcttacaagacaggtcaacaagggcaggcgatgatggaaagaaacaaagaaaatgccgccaagaagaagtaccatcaccacttggggtcaggcggctatagcgtcgcgatgccgaagtgggaggagatggaggcaagcttgcttgagaggggtatcgaaccggccaccgctaaatggcctgatcgatcgaagttctggtactatgctcatggtgtaacgctcaacccagttgatggctccttggtcttcagcgatcagatacgcgaggctgcgagtcgactaatggacgcagtggaagcctcttctcagggcacgttccgacccgacagagagaaggacgagctgtcactcgccctacagactcccgagcatccaggacgaacacgagggaaaggcgtgattccctggaagatgggattcaaggaggacatccacacgtataggagtcggatgaggagcaagagagataccgaggcgaagattgcagatcttgagtacagggtatcgagctacgaggcaagaggaggtggcaaggaaggcaatcgtagcagctgcgcctcaacggggcaggtaggatcacagagcatggacgccatgcaaactcaggatgaaaccacctgccccgttgatgagatcacgcagcggacaccatgtgagctgcatattcccttcaagaacttatcaatcaaggtggcgttggaaatggccatcccaacggacccttcagggacttaccactgtaggccggttccagcaggatactcaagggtcgaagttgagctggtggaagccgcgtacgaggacctcgagttggactaccctggaggagacggtgagacgcatctacgagacacaagccacgccattatactatggcgcaagcggtacatcatcctccctaggcgacaagcggcgtctcgtgcaccatctcctccggctccgccatctcctccgccacctcctcctgcaccatctccttcggctcctccggctcctccacctccactgtgtccacctgcacctctcaagacaaggtctcgccaagctccaccgcctgcccgcacaagggcaacgaagaaggcgaaagttgacgccaccaaaaacaaggagtcgccgtacgattgcagtcaagaggagcttaatgcttatgtggcaggagaagtgaagaggcaactcaagcctcggagtcctgaaaagaagatacctgttgacccgagcgtgaagaacttattcaagaaaatgtccacaacaaacaaggaggtcttaaagctatcggactatgaccgaacacttaagaaagcctattacaagaagtccaaactagtcccttag

SEQ ID NO: 93168 - DNA, 996 bp, Oryza sativa
  Clone ID: PAT_MRT4530_9157C.1
atggccaccgtctccggcaccgaccgcctccgtgacctccacgccttcgacgacaccaaggccggcgtcaagggcctcgtcgacgccggcgtcaccaccgtcccctacttcttccgccaccaccccgaccccctccccgtcgccgcgccgtcggaggccgcctcggccatcccgctcatcgacctcgccaaggccgacgtcgaccggggacgggtggtcgccgaggtgaggacggccgccgagacggtcggcttcttccaggtggtcaaccatggcgtcgccggggagctcatggacgagatgctcgcggcggtgcggcgcttcaacgaggagcccctggaggcgaaggtgccctactacaccagggacgtcgccagcaaggtccggttcaactccaacttcgacctcttccgttcgccggcggccaactggcgggacacgatgttcgtcgagatgttcccggaggtgccctcgccggaggagatacccgccgccgtgcaagggcgtgctggaggagtaccccgcggcggtgcggcggctcggggaacggctgttcgagctgctgtcggaggcgctgggcctccctgcggggacgagtccggcgggctccaggcggtgctcccgcggcccccggaggagcggtgggtggatgtgcccccggtggccggcgcgctggtggtgaacgtcggcgacctcctccagctggtgtcgaacgagaggctccggagcgtggagcaccgggtgctgcccaccggcgccgccgggccggctcgcgtgtcggtggcgtgcttcttccgcctcgcgtactcgtcgacgaggccgtgcgtcccggtcgtcggcggcggcagcggggcgcgggcggcggcggtgtacaggagcacgacggcgggggagttcctggcgcactacaacgggaaggggctcgacgggcggtcggcgctggaccacttcaggattccggcggcggcggcgtctcctcctcctccaccacagtag

SEQ ID NO: 93169 - DNA, 273 bp, Oryza sativa
  Clone ID: PAT_MRT4530_91580C.1
catactacaatactagtattgcatttgtaggctaaaatgcgttctgcatgccaaagacaacatgaaagggttaacacaataagatagtatatgttgctaataggaaaccgtaagcactcaatcagcacttgatgcaacgcagagcagaatgatgagataaactagatatatattcgatttccacgcttgctgtaaaagcgcagtgcacagttataagttcatcagcaaccataaactgatagtactccatataatacggaactggttcaggtt

SEQ ID NO: 93170 - DNA, 3842 bp, Oryza sativa
  Clone ID: PAT_MRT4530_91581C.1
atggatcggcaatggatgtacgctgaccggcggtccaaagagtttatcgagggcgtgcattattttttgagagtggccgaagctaacaagcgtaacggttttatttgttgtccatgcaataagtgtaagaaccagaaggagtattatgcatccaggactattcatttccacctgtttgagtcggggttcatgccaagctataattgttggacatcccacgatgagcaaggggttgaaatgaaagaagatgaagcggaggacaagaacattcccgactgggctcagtacgctagatttgaaggaaatcaaacgagcgaggtggacagggatgctggcgataacaacgctgcggataatcttggtttgatgttgcatgaagcaaaggaggattgtgaaagtgaaaaggaggcccataaattggagcggatgttagaggaccacagaacgtcgttgtacccaggttgcgagtaggggcacaaaaagttggataccactctggagttcttgcaacggaaggcaaaaaatggtgttagtgacaaggcatttggcaatttattgaaactcgtcaagaacattcttccggagggaaacaaattgcccgagacaacgtacgaggctaagaagatagtctgccctctaggactggaagttcagaagattcacgcatgtccgaatgattgtatcctatatcgcggtgaggagtacgagaacctagaagcatgccctgtttgcaaagcactacgatacaagattagacgagaggattcaggtgaagttgacgggcagccaacaaagaagagaatttctgctaaggtgatgttgtatttcgctataataccacagctaaggcgtttgttcaggaacaaggggaatgctagaatgatgcgatggcacgctgaagaacgtcaacaggacgggatgctgagacaccccgccgatggttcgcagtggtgaaacatcgacagaaaatttaaagactttggaaaggacgcacgaaacatacggtttggtttaagtacggatggcatgaatccttttggagagatgagcagcggccatagcacttggcccgttacgatgtgtatctacaacctccctccttggctatgcatgaagaggaagtacataatgatgccgattattcttcaaggccccaagcaacctgataacgacatcgatgtgtacctaagaccactggtcgaagatcttaaactgttgtggaaaaaggaaggtgtccctgtgtgggacgaggacaaacaggaggagtttaatctactagcgctggtgtttgtaaccatcaacgattggcctgcacttagcaacctttctggacagtccaacaaggggtacaaggcttgcactcactgtatggatgaaacagaaagtacgtatcttaagcactgttggaaggttgtgtacatgggtcatcgtcgattccttgctgtaaaccacccggtacagaagaaaggcaagcactttgaacataaggtggaccatcgtatgaagcctaaacatcgcaacgagaaaacaatgtttgctatggttaatgatctcaaagtagtgcttggaaaggggcctggaagccagcctatagagagcgaagatggtcacgcggcgatgtggaaaaagaactctatattttgggagttaccctattgggaattcttggatatccgccatgcaatcgacgtgatgcacctcactaagaacctttgcgtaaaccttcttggcttcctagatgtatatggaaagtcgaaagatacactggaagcacgtaatgatctgaagcatatagaacaacgcggcgaccttcacccagaaccaaaggagaaaggaagccgtttcttgagtccagccagctacactcttatcaaggcagagaagggaagtatgtttgaatgcttggagagcataaaggtaccgtctggatactccacgaatataaagcgaataataagcacgaaggagaagaagttcacaagcctaaagtctcatgactgtcacgtgttgatgacacaactgctaccagttgtaataaggggtatccttccaaataatgtccaggcaacaataacaaagctatgtgctttcatgaacgcaatttcgcagaaggtcatcgatccggatagattagaagcccttcagaatgatgtggtgcaatgtcttgtcacttttgagttgatatttccaccttcatttttcaatatattgacgcatctgctttgtcaccttgtcaaagagatcggtattctcgggcctgtgtacctacacaacatgtttcctttcgagaggtacatgggtattctgaagaagtatgttcgtaaccgtgctcgtccagaggcaagcatcgccaaggggtatggaacggaggaggtcattgaattctgcatagaatttattgaagaccttcgcacaatcggggtacctgaatcacgccatgaagagagactacgaggaaaggggactctcggaaggaaagcaataatgacggtagacaacaatttattccgtaaagcccatttcacggttctgcaacaatcttcattggtggctccttacatcgaggagcacttggccctagttcgcgccagaaacatcggtaagtccgatgcatggattacacggcatcacattgatactttccttgcgtggctacgacaacatctcatgggtaacgagacgattaaccaacaactggccttcctggcaaggggaccatctggctcgatcgcgacattccaaggatatgagatcaatgggtacacattctacacgagagcccaagacatgaagagcacgaaccaaaacagcgttgtttgtatcgatgccatgggacacgatggtataactggcacgtattacggtgctatcgaggacatatgagaacttgactatggtcctctcaagatccctttgttccggtgccaatgggttaggttgactggtggaggtgtaacgattgataacagtgggatgacaacggttgaccttaacaaggttggatactcggacgaaccttttgtctttgccaatgatgtaacgcaagtcttttacgtgaaggacatgtctagcaaaggaaagaagggcaaagggcctgacgagccgaagcgccacgtggttctcccaggcaaacctcgtcctctctaccaacacttagaaattttttccccgatcgatctcggcttctccttcgccgccactgcctagggcatccccgcgccgacgccgccgtcgtatcttgccatcgtctcgcgggcgtcgtcgtcgccgcctccgccgccgccacatctctgggtagacttagcaaatatttcttgtataaacagatggctgatcgcgatgaggaacagatactgtacgatacaatcgcatagggaaacagccagtactggaatgaagaagaggggaacgaggatccaaaccagtacttgaacgaggaagggaatgtggagagggatgcggaggggaaccaggaggggaacatggagagggatgcggaggggaatgaggaggaggaggcaagtggaagtcaaccctccgctggacagaagagggcacgcagacaacaaggtgccgcgaagaagctagagggtcagcacatcataacggaagtggacgaagacggccgacctagtgccccggcagaagcagtcaagaactatgtacgagacagcggttgggttgtgcgggataacatgcctgtcagtacggtgtactggcgcagaacaagggcacgcggagatcatgagagctttgtcccagattcggagaaagagatgctgtggaccacaatgctcgagacattcacccttccctcgggtacagagaccaaatttgacaat

SEQ ID NO: 93171 - DNA, 316 bp, Oryza sativa
  Clone ID: PAT_MRT4530_91582C.1
agtgacactatagaatactcaagcttgcatgcctgcagtgagttttggaatccagttcggcctctagagagagcactgaattcaaactgacctagcgccttcatgccaactctgattttggtgaacttggacttgatggaaagcttatttcgtcacttttcaatctcatctaatctcatatctaaatttatctcgagtcaacgggaatcgccaaaacaagacaatgctattgctgaaaccgaacttgggccttgggccttgtaatagaatagggccatgttggaagtgtctccctccacctccacgaattagcact

SEQ ID NO: 93172 - DNA, 1040 bp, Oryza sativa
  Clone ID: PAT_MRT4530_91583C.1
tgcccgtcccacgagagagagagagagagagagagaaggggggaagaatggcgtcgcgcctcctcgcccgatccaaagccctagcgctcgccctgtcccgcgccgacgcggcggcgccggggcccgccgccggagtgcagtggctccgcacgctgtcctccctcccccgcgatccggccgccgccgcctcccccgcccccgcgccgcgccaacccgccgtggggtcccctctcggcctctccaagattccaggatatgaacagacatctcgactcagtggtacacaagtattgcctcgttggttttctactggaacatcaaatggatcttctgctcagcaggagggagccaccagaaaggtaatggcattcagcccattagaagcaagcatcgccaaacccagaaaaggtccattgacatctgaaagctggaaagtgaagcagacagagctactaacacgatctacgtattacatgatcccaactctgcttcttgtatcaaagaacagcatcagtacgtctcttctggtcgcatcagtattccatcaagtctacatgttctacaaggagatccttctggactatgtccatcacgatatcaccaggaagtgggttttcatatacttcaagattctcctgataatcatggccaaggaaacagttgtctacttcgatttattttaagttcatggtagtttcttgagagacgtgttaggcacccatctgtacactgaaaataatcaagatggacaaatgcctgctgctggtttcctctgttctgcagttccaacttgctatctttttctgattttggctgaactgatttaaggccaactaaggcaccaaacaatgtatttcttcaagcaacgatcagtttgtccctaaaaccttagattgaaaaagtctcctgattttgtaataatggtatatatcaaccttgagttctgttaatttctcgtcttctggaatcgctcccagttgtcgtgttttgcagtaatatatgagctactgttagtctaaaccaaaaaaaaaaaaaaaaaa

SEQ ID NO: 93173 - DNA, 798 bp, Oryza sativa
  unsure (1)..(798): unsure at all n locations
  Clone ID: PAT_MRT4530_91584C.1
ggtccggaattcccggngtcgacccacgcgtccgcaaacccaccgccggagagcaccttttgttttcttattttcttatttgtctgccctatcaagtagcacgccatttcaatactctttattcttccagcagtgcacattattgtgccatttcatatgttagctctaaattcacatgtgttagctctaaattgacattattatacaacttccagcagtatatgtcttgctctgaatttgcatgtgttagctctaaatttaagatgcttgatatagattgtccttatgatgctagctgcaatgaccccattatttcaatgtaaaggggggggggggggcactttactattattgttttttgatgtatttaagacgatcaaatcctgtgcactgaatgttagggtcattcagtattattctttatcttggtgataatctgaaattccgaactgtgatcttctcccaaacaatatgcttacatgttccctcactttcatttggcactatgcttaaattattatatcgtctcaaacatgatctaataaatcattgcatttagcattcgatcagaatgaaagttcttgattaacttgcatgtttgatcgatgaagccaacaagctggtgaacaatttgatccttcgtcaaattgatgcgagggcccaaccaataaacccactaaagctaactctccgattgtgtaagagacttacaaagaaacttatggagcgntatgtgnttcccagtaaacaccataaacttatgggagcgtatgcgagggccacagcttacagcacccc

SEQ ID NO: 93174 - DNA, 313 bp, Oryza sativa
  Clone ID: PAT_MRT4530_91585C.1
tgtgccactactgcgaggagccgacgtcgagccgatcaaccaggtaaaactggaagacggaatcacggactcacggagacttgcctccttgctgcagtgcgcagcctttctttccacgtcagacgtgtacgcctactacaggttcaacagcgaggtcgcgctccttttccgcgccgcgactcacgtttgtttgcctgcagcgcgcatgatccatgtggaccagagccaaacgtgcacctatgcatgggccctctcgcacggggcccgctacgaggctgtcactgcaggccgggccccgcaaaacgccaagtga

SEQ ID NO: 93175 - DNA, 613 bp, Oryza sativa
  Clone ID: PAT_MRT4530_91586C.1
atatgttagggccttacaccctttatttgtttgaattgttagttcattcctttaatcttctttcacaaacaggcatgcgcggccccataccacgaattgatttcagccaaggctgaaaaaaaacccccgaaaccaaaaccggggggcccaccagggggcaagcggaaaagaggccccaacaaggggggaaatcaaaaaacaaaccttcccacccacaaaaaaagaccaatacaaggggcgccccaaggacggagaaaaagcaaacaaaagggggggagaaaaaaaaaaaaagccccaaacacccacccacgggggaaaaacccaaaacccccggccggggcccagttcaaaaaaaaaaaaaaacccaaggggagaaccccaaaaaccaaaaaaacccctggtcattttgagaggaggggcccaaaacaaatggggggggaactattctctcaaaaaacccccccacaaaaaggccgacaaagggcgggggagccgcccaccccccccacaagggggggaggccccccccccggggggaggcaaaaaaacccccccccccccccgggggggagagggggcccccccccccacggggggaaaacccccccccccc

SEQ ID NO: 93176 - DNA, 349 bp, Oryza sativa
  Clone ID: PAT_MRT4530_91587C.1
tgaacacacccagcaggcaccttttttaggagggaaaatattcaaacattttaatttctacacaaacaacaccaaattaaatcaacttaacaaagtgcctagtaaaaaaacagataggaagagcctagtaagcgtcttcctcctaaacaaactcatatcaattgccgaatccagcaaaaagtcaacttccacggtctgctcggcttcaccttgaacatccacccgtctctttaaagtattttatttatctattttatattttctaataatattttaattttatcattatccttcatttgattatattaatttctattatcatatcatattattatattattttatcatt

SEQ ID NO: 93177 - DNA, 288 bp, Oryza sativa
  Clone ID: PAT_MRT4530_91588C.1
atggggaagacctcagcttggcggtggaaggggatgacctcggctccgacggcggcggcggaaggggacgaccttggctccgacggcggcagcggaaggggaagaactcggctccggcgagggcaacggtcgcacgaggcggccgcggcgggtgatggaagccaccgctgtggctcgtcctccggcagggcggcagcaaagtctgcactctgcacttatgcagcaaggcggcgggaggcggcctctgttgaaggtagcagtggcagaagggtggcggcgggatggtag

SEQ ID NO: 93178 - DNA, 2130 bp, Oryza sativa
  Clone ID: PAT_MRT4530_91589C.1
gcacaatggccagtgtcgatattgaacgtgcctccacccttccgacgtggatgcgcatcgatatatcccctctgccgcccctctgtcgagccccttggtggccatcgccagcttcgtccgcggcggccacgcacctccgatttcacccgcgccaccgccgctgccacccacgacgacgcgcgctcctccgacgccacgtcggcgggagaggagggagcggcgcgcggagatgtcggcggtagaggagggagcggcccctcctcacctgcttcctctccaacctcctcatcatccccggccgccgcctcctcccttcctagttcctccgggctccggccccctcatcttgagcctcgtcctcctgctcttcccttcgccggacgccgtcgacctcgctttcctggtgccgatacacgcctccgcccgcgcgagccaacccgacgctgctactcctcgatgggacatggaagcatgccaaggagatgcaggccgccagcctcccgttcttgtcctccttcgtctcgtccccgtgtgccgcggtgaccgccttctggcggaacgccggccacgctcacggccaccgatggcgccggtgaatctggtctcgtcactccaaaaactgcaggctcggccggcaccacttgcgccatcctcgtccagcccttgacgacgacactcttcatctcatcatccttcccctcctcccagtcggcgagcttgccaccaccgcggcagcaacctccgccgccgtcgacaccgcatccgcaccctcccgtcaccgccgccggcaccctcatctccatcgatcaacaaccacacaccacctgctccgcccgtactctctccctacctcagcccccttcctcaaccgtgtcacctctccccaccgccacctctccctgtcaggtgttcctagcctgccacccccatgcacgtaggccgctatcccctgaacccaccgctcccccctcttccccatcttctacccctctctctctcttctctactgcatagcttgctccatagccgttcccgccgctgcttgctccgtcaccgttcccgccgccgcgcgcacagcttgctgctccgccaccgtagttgcttgctccgccgtcgtccccaccaccgcgcgcgccgcttgctccgccgtcgccgcagttgctcgcgccgccgtccccgccgccacgcaccgcagcttgctccgccgccgccgcagatgctcgctccgccgccgccctcgctgttgctcgctcccccgccgtccccgccgctcctcctgctgttgctcacgctgcagcttgctccgccgatgccgcagttgctcgcgccgccgtccccaccgccgtgcaccgcagcttgctccggcgccgccacagttgctcgctctgccgccgtccccgtcgctcctgctgctgctgctcatgctgcagcttgctctcccgccgccgccctcgctgccgccgcccgctgctactcgcgtcgccgtccccgcttctcctgcccgtactcgctgtgctgctccaccatcgcttattccacaaaaagacatgtccccctcaccactcccccccccctccccccttccccctcaaccgaggaaagttaaagcagctcgaccgggctcgccggcctcctcttccctctctaccgcctggcctcgccgccgccgccgcctcctccgccgcaccccgccgccgctcgcctcttccaccgccgccgcctcgcctcctccgcgagcagtgcgagctcccgccgctgctcgcctcctccgccgccctgccccgccgctcgcctcccggcgctcgctgcctccaccgccgcctcgcctcgccgccgccgctgcctccgtcgtggcccccgcctgcctctctgtcatggccctgcctcgcccctgccattcgccagccactcgccacctagctcctgcctccacctccgcgtctcgcgtcaccgcccacctcccaccctgtctcgcgcgagcgtccgccgcctcgtctcggtgaagaatcgccgcctcccaccctctgcgagcgccgccgccctccccaactccggcgacgactattcccaaggttggtgtactcaccccccatcccgtaccctcccatcgccgtcattggatgaaatact

SEQ ID NO: 93179 - DNA, 1351 bp, Oryza sativa
  Clone ID: PAT_MRT4530_9158C.1
atggccaccgtctccggcaccgaccgcctccgcgacctccacgccttcgacgacaccaaggccggcgtcaagggcctcgtcgacgccggcgtcaccaccgtcccctacttcttccgccacccgcccgagccactccccgtcgcctcgccgtccgaggccgccgcggccatcccgctcatcgacctcgccaaggccgacgtcgaccgtggccacgtcgtctcacaggtgaggtccgccgccgagacggccggcttcttccaggttgtcaaccatggcgtcgccggggagctgatggacgcgatgctcgcggcggcgcggcgcttcaacgaggagcccctggaggcgaaggtgccctactacaccagggacgtcgccagcaaggtccggttcagctccaacttcgacctcttccgtaacgggttccgttcgccggcggccaactggcgcgacacgttggtgatcgagatgtggccggagccgccgtcgccggaggagatcccgccgccgtgcaggggcgtgttggaggagtacgccgcggcggcgcggcggctcggggaacggctgctcgagctgctgtcggaggggctgggcctccccgcggggtacctcggccgcgaagccgggtgcacggacgggctgagcctgagcgtggcggcgaactactacccggcgtgcccggagccggaggcgacgatgggcgcgaccaagcacgccgaccccagcttcctcaccgtgctgctgcaggacacctccggcggcctgcaggcgctgctggaccagccgcggcgtcggtgggtggacgtgcccccggtggccggcgcgctggtggtgaacgtcggcgacttcctccagctggtgtcgaacgaccggctccggagcgtggagcaccgggtgctgcccaccggcgctgccgggccggctcgcgtgtcggtggcgtgcttcttccgcgtcgagtacgcgtcgacgaggccgtacgtcccggtcgtcgtcggcggcggcggggcgcgggcggcggcggtgtacaggagcacgacggcgggggagttcctggcgcacttcaacggcaaggggctcgacgggcggtcggcgctggaccacttcaggattccggcggcggcgtcgtctcctcctcctccactgttgctggctggaagcatccggagcttaatggtcgtacgtcgtacgtggcgatttggcaaaccattcaacatttacgtcaatgcttaattattggttggttggatgatcgtacatactatgccctatatggcatgttaaaattagtgatttttgtactgtaataaatgtttcgatccccgtaaaaaaacccccaaaaaaaaaaaaacaacaa

SEQ ID NO: 93180 - DNA, 1800 bp, Oryza sativa
  Clone ID: PAT_MRT4530_91590C.1
cggaattcccgcgtcgacccacgcgtccgcgattcgtctcccccctccggcgcccctcgagttcttggattccctcttctttttcttcttcttcttgcgttggacaacaatccgtcgagagctccgtggcgtggattggattaattctctctcgccgaggaagaaagaaaaaaaaaaacgagacggaggcatcgaggtggccgtctcccctccgccgctataacaacaagccgccgccgccgccgccgttgtcgccgctttgctctctccgctactccggcgaccggtgagagggtagttgcatgatcggcaacatcaatctgaagaatggctctaaaatcaccagtggattttgctggctcaatcacttcaggccagaaggacccgtgttgttttggtgtgcccggctgcaatccgcgatgtgttagatacaataagaaatcaagaacatgccgattggttactagagccatatccgtcgatcgcccgcagctagacttctcaaactcagactggaagaagcagttccaggaggatctcgataggcggcacagtttgcctcacctgaaagatgtaatcgacgtggaaccgaggccaacaacgttttccctcaagagagggacccctcagaagaatggaaatggtaatctgcagggatcatggaacggctaagtaagagttgatgatgtagcacatttcaagtttattgagtttgcgtctttaacctgtgctggacctcattgccttttcattgattgcggctaagacgaacaaaagatgcaccgtgttgaccagagtgattaaatatatttggatactaattaagtattgactggaattgtcaccgaaggaggactttgccctggtcgcaatgatgttgtttggcacacgttgcaaatactggaacaatattgaacgaaaaacattgttggaatccagcatgatttcgatggctttgttgaggatcaattagcagaagtgccagcccggaggcttgacatgctctttgttctaggtggaaatggaactcatgctggagctaaccttatacatgaggagtgccgcaagagaaaactgaaagtatcaattgtgggcgttccaaaaaccattgataatgacatactactgatggacaagacatttggatttgatacagcagttgaagcagcacagagagctataaactctgcatatattgaggcacattctgcatttcatggcattggattggtcaagctgatgggaagaagcagtggctttatcacaatgcatgcttccctgtctagtggccaagtagatatctgcctgatacctgaggtaccgttcactcttgatgggccaaatggagttcttcaacaccttgagcacttgatagaaaccaagggatttgctctgatttgtgtagccgaaggagcgggacaggaacatctgcaacagtcaaacgcaactgatgcatcagggaacatgatccttggtgatatcggcgtgcaccttcatcagaagatcaaggcccatttcaaggaaataggagtacattctgatgtgaagtacattgatcctacatacatggtccgtgctgtgcgtgccaatgcatccgatgccatcctatgcactgtgcttggtcagaatgctgttcatggtgcatttgcagggttcagtggcatcacaaccggcatatgcaacacgcacaacgtctacttgccaatctcagaagtcatcaagtccacaaggttcgtcgatccaaacagcaggatgtggcaccggtgtttgacatcaacagggcaaccagacttccactga

SEQ ID NO: 93181 - DNA, 221 bp, Oryza sativa
  Clone ID: PAT_MRT4530_91591C.1
gcacgagctcgtgccgaattcggcacgaggacaggttggtgaggccgtccaggatctggaccgccgtgcgacaccggtggtgaaggaggcgccgggcctggcccgctcggcggcggcggatgtgcaagcactgcggtggctcgtctgcacggtgactgatgctggccaagtatgcgatcgcccgccccgaccccatggcgcgggacctctacacccggtac

SEQ ID NO: 93182 - DNA, 1039 bp, Oryza sativa
  Clone ID: PAT_MRT4530_91592C.1
cgggtcggcctcacgcccacccccccttgctttttgtactcttccatctcacaatctctctatctctctctctcttccttacgcggcaaaacacaccgtcgtccatggacagttctaataacaacaacaacaacaagagggcgcgcgacgccgaggatgaggccgacgaggccaagaggctgcgggcggaggacctgctcgacatgctcgacgatgataccgacgccgggggcgccgccggcgacctggcgtccgtcatgcggagcttcgaggaggagattgttgctggggatgtcgccggggacgttgcccccacgacgcagcccgagctcgggttccttctcgaggcctccgacgacgagctcggcctgccgcccgccaccgcgtcctcgtcggaggaggaggccggggctggggagcccgaggatgccatcgggttcggcggacagatctgggggttcgaggacgagattggcggaggcggctacgctggcttcgccctcacctcgccggaggcggtcgccgccgccgccgccgcggcggagtgggacgacgacggcttcgacgccggcttgttcggcttcggcgacgaggtctcggcgcttcgccacgagaccatgccggccgtctgatgggcctgggccgaagtggattagtttttttttattttcctcgttttttttaaatttggctaaccttagctctacccttgtttaaccttggatgtaaagtttctagtagaaggttaaaaaaacagaggggaggaaacttggaaaaaagtttcatggatggagaggagaaaaaaaaaacagatgtaggcatggttaaaagaaaaaatctgatgacaatgcctcacttaaaaaaacagagagaaagaaacttggaaaaaacttccatacaaggaaaagaaaaaaaaaaaacagatgtaggcatggttaaaagaaaaaataaaaaaaaaatgcctcacgaacaaaaatgagaagaatggcttcatgccttcataccaaaaaaaaaaaaaaaaaaaaaaaaaaaaaaaaaa

SEQ ID NO: 93183 - DNA, 779 bp, Oryza sativa
  Clone ID: PAT_MRT4530_91593C.1
ggagaccgatcgacatggcggtggagatgacgagaacaaacggcgaaaaagaaaaaaaaacagaacgttaaaagagaaaaaaacaacgggtgaaaaaaaaggaaaaaagaagcgaagaaaaaaaatggaggaacggtaaaaaggaaaaaaaagatgaaaataaaaaaaaagtgacggacaaaaaaacagaaaccttacgtattttaacaatatactagaaaaaatgcccgtgcgttgcaacggtgttcggccccgcgacgaaaaaaacatggcacaaatccttatcgcgtgtggaaaaatacaactaaaaaaacagcaatgaagaaaaacatatgaaaaaacccggaaaaaaggcctagaaaaaaagtaaaaagccgatggaaaaagagcagaaaaaagacggacaaaaaaagacgaaaaaaacagaaaaaaaaagaaaaaagaaaaagggtgaaaaaggacggaaagaaaaaaaagccgaaaaaacatggcacaaatccttaccgcgtgcggaaaaatacaactaaaaaacagcaacgaagaaaaacatatgaaaataaccggaaaaaaggcccagaaaaaaaattaaaaagcacatggaaaaagagcagaaaaaaagacggacaaaaaaaagactaaaaaacagaaaaaagaaaaaagaaaaagggtgaaaaaggactgagaaaaaaaagaaaacggacgaaaaaaatttgcaaaaaaggacgaaaaagaaaaaaaagacggacggaattttttttacgaaaccttacgtatttttt

SEQ ID NO: 93184 - DNA, 156 bp, Oryza sativa
  Clone ID: PAT_MRT4530_91594C.1
atggtcctcctcatcttcttctacctctggcggttcttctccgggaagcgggtcgctgtcattgtcaacgggcgtggcggaaaggcggtggcaggatgcccgatatacattgtggagtttcacgacggcgacggagcatggctcctccagctgtga

SEQ ID NO: 93185 - DNA, 484 bp, Oryza sativa
  Clone ID: PAT_MRT4530_91595C.1
gcacgaggcgtacatacaccaacaggcgtggacaccccggcgttgctcccgttggcgcttgctctcgttgccattccaatcgccatcctcctcttcaaccggatccgccgcggcaggctgccccccgggccccgggcgtggccggtggtgggcaacctgttcgacatccatgcgagtgcggtgccgatgcttcatggagtgggcggggaagtacgggcccatcataacggtgtggctgggcacgtcgccgacggtggtggtgtcgacgtcggagctagccagggaggtgctcaagaacaacgaccagcagctcgcggaccgcccgcggaaccgctcgtcggagcggttcagccgcggcggcgtggacctcatctgggcagactacggtccgcactacatcaaggtgcgtaagctgtgcaacctgaagctctttgcgccgagtcggatggaggctctcaggcccatccgtgaggacgaggtcact

SEQ ID NO: 93186 - DNA, 351 bp, Oryza sativa
  Clone ID: PAT_MRT4530_91596C.1
cttctgaaggttgatatccacaatcattatggtggccagggaaagggaaccgttaattttttggggcccaaacagccaccccagggccttttttttttgggggcaactgggggggtttttaggctatgaaacccagtgacaaccccccgccatgcccatgggaaagggaaacatggaaaaccgccggggggcgccccgcccccttttaaatggaacattccgggatgctggggaccacctcccccagggctggccttttaggggaggcacgggtcctttggtctttcaaaacaaaattggggtttaggggggggaccacacaaaggctactgtcaggggcggtaagctgcc

SEQ ID NO: 93187 - DNA, 7376 bp, Oryza sativa
  Clone ID: PAT_MRT4530_91597C.1
atgcagtgcttctatgtttcacggggcaaacgaagtgaaccacctctttctcctgaggaagaggctaagttcgaggcttcggattgcttgttccgtggagcattgatcagtgtactcgctgacaacatagtggacgtgtacatgcacatgccttctgggaaggacatgtgggatgcacttgaggccaagttcggagtttctgacgccggcagtgagctgtatgttatggagcagttctatgactacaagatggtcgatgaccgttctgtagttgaacaagctcatgagattcagatgctggctaaggaacttgagaacaacaactgtgagttgccggacaagtttgtggcaggtggcattattgccaaactaccaccttcttggtcggactttgccacttctctaaagcacaagagacaagagttcagtgttcctgatctcattggctctttgggtgttgaggagaaggcgagggcaaaggacgtccggggcaaaaaggttgagggaggttctagtgccaatatggtacagaagaagaaccctcatgcatcccacaacaacaagaaagtcaagcctgatgtcaaacccaaggctgcaaccaattttaagaagaaaagcaagggaaaggcaaagggagactgctttgtgtgtggcaagtctgggcattgggccaaggactgtcctgagcgcaaagacaggaagtctgccaacatgatcattagcgagggcggaggaacatcgggagatgctacattctttgagaatgaatttcctatgaaatatacacctagcacttctagtaaagaaactgtcatgccccatgagcactttgcaccgatagaacacaatgatcaaacgcctgaggaaaatcctgaggaggacaacattgtagatactcgcaagagtaagagacaaagggttgcaaaatcctttggagatgactacattgtatacctcgtggatgacaccccaagaaccatagaagaggcatattcatctcctgacgctgactactggaaggaagcagtacgcagtgaaatggactcgattatgtctaatggtacttgggaagtcgttgagcgtccatatgggtgcaagcccgtaggatgcaaatgggttttcaagaaaaagcttaggcctgatggtacaatcgaaaagtacaaggcaaggcttgtggccaagggttatacccaaaaggaaggcgaggacttcttcgacacatactcaccagttgctcgcttgaccacgattcgagtactacttgctctggcagcctctcatggtcttctcatccatcagatggacgttaagacagctttcctaaacggagagctggaggaggagatctatatggatcaaccagacgggtatgtactagaaggtcaggagggaatggtgtgtaaactattgaaatccttgtatggcctcaagcaagcacctaagcaatggcatgagaagtttgacaccacgcttacatctgcaggctttgttgtgaacgaagctgacaaatgtgtatactatcgctatggtgggggagaaggggtgatcttgtgcttatatgtcgatgacatactgatctttgggaccagccttaatgtgattgaggaggtcaaagactatctgtccaagagttttgaaatgaaagatttgggagaggctgatgttattcttaacatcaaactacaaagaggagatgaggacgggcgggcgatcaggtttttggggagcgcaaggcgcgactactcactgttcgtcaatatctacttcatcttcaccaacatgtcgaacactggagacaaggagaaggagactcccgtcaacaccaacggaggcaatactacctcaaactccagcggaggaccattcttggggactattcatttccacttgtttgagtcggggttcatgccaagctataattgttggacatcccacggagagcaaggtgttgaaatggaagaggatgaagtggaagacgacaatattccggactttgctcagtatgttggatttgaaggaaatcaaacgggcgaggaggaaatagctgctgatggtaacgacgttgcggatgatcttggtcagatgttgcaggacgccagggaagacagcgaaagtgaaaaggaggcccataaattggacaagatgttggaggaccacagaacttcgttgtacccaggttgcgagcaggggcacaaaaagttggataccactctggatttgttgcaatggaaggcaaaaaatggggacgggatcctgagacaccccgccgatggttcgcagtggcgaaacatcgacagaaaatttaaagaatttggaaaggacgcacgaaacatacggtttggccccaagcaacctggtaacgacatcgacgtgtacctaagaccactggtcgaagatcttaaacagttgtggaagaaggaaggtgtccccgtgtgggacgaggacaaacaggaggagtttaacctacgagcgctgctgttcgtaaccatcaacgattggcctgcacttagcaacctatccggacagtccaacaagggttacaaggcttgcactcactgtatggatgaaacagaaagtacgtatcttaagcactgtaggaaggttgtatacatgggtcatcgtcgattccttgcagcaaaccacccggtacggaagaaagacaagcacttcgaacataaggccgaccaccgtacgaagcctaaacatcgcagcgggaaaacagtgtttgctatggttaaagatcttaaagtagtgttcggaaaggggcctggaagccagcatatagagagcgaagatggtcacgcggcgatgtggaaaaagaactctatattttgggagttaccatattgggaattcttggacgtacgccacgcaatcgacgtgatgcacctcactaagaacctttgcgtaaaccttcttggcttcctaggtgtatacggaaagtcgaaagatacactggaagcacgtaatgatctgaagcatatggaacaacgtagcgaccttcacccggaaccaaaggagaaaggaagccattacttgagtccagccagctacactcttagcaaggcagagaaggaaagtatgtttgaatgcttggagagcataaaggtaccgtctggatactccacgaatatcaagcgaataataagcacgaaggagaagaagttcacaaacctaaagtctcatgactgtcacgtgttgatgacacaactgctaccagttgtaataaggggtatccttccagacaatgtccgggcaacaataacaaagctatgtgcattcatgaacgcaatttcgcagaaggtcatcgatccggatagattagaagcccttcagaatgaagtggtgcaatgtctcgtcagttttgagttgatatttccaccttcatttttcaatataatgacgcatctgctttgtcaccttgtgaaagagatccgtattctcggacctatgtacctacacaacatgtttcctttcgagaggtacatgggcgttctgaagaagtatgttcgtaaccgtgctcgtccagaggcaagcatcgccaagggttatggaacagaggaggtcatcgaattttgcgtagaatttatcgaagaccttcgcccaatcggggtacctaaatcacgccatgaagggagactacagggaaagggaactctcggaaggaaagcaataacgacggtagacaacaatttattccgtaaagcccatttcactgttctgcaacactcttcattggtagctccttacatcgaggagcacttggctctagttcgcgcaaggaacatcggtaagtccgatgcatggattacacggcatcacattgatactttccccgcgtggctacgacaacatctcatgggtaacgagtcgatcaaccaacaacttgccttcctggcgtggggaccgtctgggtcgatcgcgacattccagggatatgagatcaatgggtacacattctacacgagagcccaagacatgaagagcacgaaccaaaacagcgctgttcgtgtcgatgccatgggacacgatggaacaactgccacgtattacggttccatcgaggacatatgggaacttgactatggtcctctcaaggttcctctgttccggtgccaatgggttaggttgactggtggaggcgtaatgattgatgacagtgggatgacaactgttgaccttaacaaggttggatactcggacgaaccttttgtccttgccaatgatgtaacgcaagtctttttcgtgaaggacatgtctagcaaaggaaagaagggcagagggcctgatgagcctaagcgtcaagtggttctcccaggcaaaagaaaaatcgtcggagttgaggacaagactgacgaggattacgatcagttggatgggcaaccccctttcacggtgacgattgaccctagcatcctcctatcaaatgaagacaccccttactcacgcagcgatcacaaggagggaacaataggggcatccccgcgccgacgccgccgccatatctcgccgtcgtctcgcgctcgtcgtcgtcgccgcctcctccgccatcgccgcatctctggggtgagagccgccgcacgccgcctccctctcgatctctctctccgatctcgatctctctctctctctcggttgccgccagccgccgagtttcagacgccgacgctgacctcgtcacgacacgacgccgcgccacgacgacgccgcgccacgagacgccacgacgccgcacgccgccgccgcgccacgccgatgccgcgcgcggcgccacgccgccgccgccccgccccgccgccgctccgctgccgccacaccgagaacgtgaacgagcgaacgaacgtgaacgagaacaaggtgaatgaatgtgaacgagaacgagcgaatgaacgtgaacgagccaacgaacgtgaatgagaacgagcgaacgaacgtgaacgagaacaaggtgaatgaacgtgaacaagaacgagcgaacgaacgtgaacgagccaacgaacgtgaatgagaacgagagaacgaatgtgaacgagaacaaggtgaatgaacgtgaacgagaacgttgtcggacaaacgtgaacgagccaacgaacgtgaacgtgaaatgcaattataggcaggtggctgatcgcgatgaggaacagatattgtacgattcaatcgcggagggaagcagccagtactggaacgaagaagaggggaacgaggatccaaaccagtatttgaacgaggaagggaacgtggagagggatgcggaggggaaccaggaggggcacgtggaaagggatgtggaggggaaacaggaggaggaggctagtggaagtcaaccctccgttggacagaagagggcacgcgggcaacgaggtgccgcgaagaagcttgagggttggcacatcataacggaagtggaagaagatggacgacctagtgccccggcagaagccgccaagaactatagcttcaagggagagctgtacaagaaatatatcctgaaggggcagacaccgaacttcgacacattcccaaagctaagggatcaccgggacgagttcgttgcatataagacaggtgaacaagggcaggcgatgatggaaagaaacaaagaaaatgccaccaagaagaagtaccatcaccacttggggtcaggcggctatagcgtcgcgatgccgaagtgggaggagatggaggctagcttgcttgagagggagcatccaggacgaacacgaggcaaaggggtgattccttggaagattgggttcaaggaggacatccacacgtacaggagtcggatgaggagcaagagagataccgaggcgaagattgcagatcttgagttcagggtatcgagctacgagctcagcatgcaagaggaggtggcaaggaaggttgatgaacgcatggccgcacatcggtccactgatccccagccgaccattcctcctgcaatggacgaatccacctgccccgttgatgacatcactcaacggacaccatgtgagctacatattcctttcaagaacttatcaataaaggtggtgtcgggcatggccatcccaacggaaccttcaggtacttaccactgcaggccgattccagcaggatactcgaaggtcgaagttgagttggtcaaaggcgcgtacgaggacctcgagctggattaccctagaggagacgcaccgtctccacctcaagctcctgcaccgactcctcctcgggctcctgcaccgactcctccgcaagctcctcttccgacaccttcaaagtcaagggccccccaagctccaccacctgcccacacaagggcaacgaagaaggcgaaagttgacgccgccaagaacaaggacccggggtacgattgcacgcaagaggagcttgacgcttacgtggcatcagaagtcaagagacaattcaagcctcgaagaccagaaaagaagattcctatagacccgagtgtcatgaacttcttcaggggtatgtctgcacctgccaaggaggccattaagctatcggactatgagcgaacgctgaagaaagcatcttctggaaagtccaaaacagtccctcagcttggagagcaaccaaaccaggacatcgagccgttggtgaccggtaaagaaatgacgatagaagaatttattactgacaccggtctaactacggatcaattgctaggagtcgcaccaatcgaaaaggcagaagtgaaatacatgtacgaactcggtaaaccgcttgtcaaccctgagcttctgcagtccctacccacacaaatgtacaagttccatcagctgtacatggagatgagcgccaccggtagagagatgatcggagcgaggatcagggacacggacttcttgcaaggagatgacattctctggatcaatttcaagggaatctacgaactataccagctggacgccctcaacgtctctattatgagttgctggattttaatggagattcaaagggcccgacggcggggggttttcgatactggattcatcgaccctcggaaagtaaacgtcgcaatgctcgaccaatatccgcaagccacagaggacaatatcgtccatctcctgaaggcgcagcattacaagacgttcatactgttgccgtacaacacagagtggctggatggtgggcctgtttatggctctttggtaaactcctcggtgacaggagggctgcgcccattaagggagcggcacagattcccgagggcgcctgctattacccgggtaaaggcgtgctgcggggctgttgaggccctagcttcttctggagcccttgtacagctccggaggacctggaaggctttgaagtccttggacagctccggagtccacggacagctccggaggccttggacacccccgtag

SEQ ID NO: 93188 - DNA, 210 bp, Oryza sativa
  unsure (1)..(210): unsure at all n locations
  Clone ID: PAT_MRT4530_91598C.1
cgtgantntgacttcgggaagcacaaggggcagatgctgggcacgntcccgccgtcctacctgcggtgggtcgtcgccgagctcgactacggggacaccgcggcatgngngagcctcgngcgggaggtgctcgangacccggtctangtcgaccncntcgangtgggagcacnagcanngattncttcgnggggacaccgagctacgacg

SEQ ID NO: 93189 - DNA, 558 bp, Oryza sativa
  Clone ID: PAT_MRT4530_91599C.1
atgagccagtcgagcaggcggggcccacgcaaggacataagaccacgcgaggagataaggatcgatctcaatccatccagccgcctcctcccttcccctctctcagccgacgcttcccttccccagccctccacccctctgccccctctcccagcctatgcttccctcccccggtcctccgtgcccctctcccagccgaccagccacttccctccccctccaccccctcttccagtcggccgtctgtttccctctggcgagcagcaacacatgcgaccggcggcctccccacgggtgacggggaggcgcagatccgcccccctcttcctctccctctccgtcggcctcaccggaggcagccagatctggggagggggtagttggggtagtgggttggcagcggcaatggtggccaagggaggcggcgggcgacctcttcctatccctctccgtcgggctcccaccggtgccgtgcagatccggtcggggtgggttggcggaggtggccaagggaggggacggcggcagaggtgggtggccaagggaccatggcggtag

SEQ ID NO: 93190 - DNA, 222 bp, Oryza sativa
  Clone ID: PAT_MRT4530_9159C.1
atgccccgtgaagaatggctcgctctcgctccacgtgaagtgaagccgcgcaagaatgggcaagagacagaaggaaagcacatggggcgccccatggcaaatgctacgtcgtgcgagcggcatcattctcttcacccaagcagaattactgagctggcacccctcaatcatatggtagaaaagcctcttagccagctcgacgggaaagcgttcctggggtag

SEQ ID NO: 93191 - DNA, 650 bp, Oryza sativa
  Clone ID: PAT_MRT4530_915C.1
tttttttttttttttttttttttttttttttttttttttttttttttttttttttttttttttttttttttttttttttttttttttttttttggaaggcggggggaaataatataaaaaacccgggcccccagggggggagggggcgggagaccaggaggaaacccccaggaggaaagaggacccacccaagctggggggggacccacccaaaatggggggacacccccccccccggaaaacaaaaacgagggttttattaaggggaaaaaaaaaaagggagggcccgccaaaaaaaaaggggggaccaaaggcaagaaaataaaggccccaaaaaaagcttggaccgacgggagcaccatccaaacaaaaaatccttaggcagccggggaaaaaaaaaaaaaaattcatttgcgggaacaaaaggaacaccccttgaaatggggcccacacttgcagggggggaaaccgaaacccccgttttcgccgttttcccccgccatttccattcctccaaaaccccccttgggggagggaccaacgaggaaaaaggtttggggggggggtggggcccccaataagggaaaattttgaatccgccgaaacccccccccaaatggaagccgttgccgaacccgaatttgcccccc

SEQ ID NO: 93192 - DNA, 1011 bp, Oryza sativa
  Clone ID: PAT_MRT4530_91600C.1
atgagtagcgtgagactaatcacgaaaaacattgcccaactcacgcataaccgcgggcacggctattctaatagttttactctgatcagaggtgtaccattgtacccacaagatacaatcccacaacatgttaccatgcgccttagtaccaccacggtacctcggaaagaaactgtgacattaccccttgcacaacaccactcaccacagtgcaccgtccctggatcataatctccccctcaaaaccagaggcaatggactccccagcgacccccacggacttctcgccgcttcacagtctggcacactataatgaatcatgctatacaaaagataaagccggcgacctcgccggagattggatggttggccgggattttggaggacatgtacacgtagaggacgacgagacgaacccaacggtactcaccctcgagccaaacgacgaacgacgacggccggcgacgagatgaacggcggcggcggctccggtcggcggtggcgggtaggctccggtggtcggcggcaacgggggacgggcggccgggcttcccctcaccttggcgcacctattggcggcggcggcaagcggcggcgacgacgaaggcggcggcacggcgctaccggagatggccggcggcggtggcgagctaggcggcggtggcggcggagctacggagcacgggaaggcttgggagacggggcaaacgaaagaggaggactaggggatcctatttatagccttggattgaagagatcggactcctcccgcaagaaatcaatccgggaaatcaaaaactcggttttagagataaactcgaaaacgagttcgattcggataaaatactcaacgattagctccgatttttcggggtaaagatagaggaggatgagaggatcaaaatcccacaaacaatcggactcggggaggccggattcgatgcggatttggaggggaaagggggcggctcgggtggcatggctgggctcggccgggcgactgctagaggt

SEQ ID NO: 93193 - DNA, 3942 bp, Oryza sativa
  Clone ID: PAT_MRT4530_91601C.1
atgtggaaaaagaactctatattttgggagttaccatatcgggaattcttggacgtacgccacgcaatcgacgtgatgcacctcactaagaacctttgcgtaaaccttcttggcttcctaggtgtatacggaaagtcaaaagatacactggaagcacgtaatgatctgaagcatatggaacaacgcggcgaccttcacccggaaccaaaggagaaaggaagccattacttgagtccagccagctacactctaagcaaggcagagaaggaaagtatatttgaatacttggagagcataaaggtaccgtctggatactccacgaatatcaagcgaataataagcatgaaggagaagaagttcacaaacctaaaatctcatgactgtcacgtgttgatgacacaactgctaccagttgtaataaggggtatccttccagaaaatgtccgggcaacaataacaaagctatgtgcattcatgaacgcaatttcgcagaaggtcatcgatccggatagattagaagcccttcagaatgaagtggtgcaatgtctcggcaagtttgagttgatatttctaccttcatttttcaatataatgacgcatctgctttgtcaccttgtgaaagagatccgtattctcaggcctgtgtacctacacaacatgtttcctttcgagaggtacatgggcgttctgaaaagtatgttcgtaaccgtgctcgtccagaggcaagcatcgccaagggttatggaacagaggaggtcatcgaattttgcgcagaatttatcgaagaccttcgcccaatcggggtacctgaatcacgccatgaagggagactacggggaaagggaactctcggaaggaaaagcaataatgacggtagacaacaatttattccgtaaagcccatttcactgttctgcaacactcttcattggtagctccttacatcgaggagcacttggctctagttcgcgccaggaacatcggtaagtccgatgcatggattacatggcatcacattgatactttccccacgtggctacgacaacatctcatgggtaacgagtcaatcaaccaacaacttgccttcctggcgaggggaccgtctgggtcgatcgcgacattccagggatatgagatcaatgggtacacattctacacgagagcccaagacatgaagagcacgaaccaaaacagcgctgttcgtgtcgatgccatgggacacgatgcaacaactgccacgtattacggtgccatcgaggatatatgggaacttgactatggtcctctcaaggttcctttgttctggtgccaacgggttaggttgactggtggaggcataatgattgatgacagtggtatgacaactgttgaccttaacaaggttggatactcggacgaaccttttgtccttgccaatgatgtaacgcaagtctttttcgtgaaggacatgtctagcaaaggaaagaagggcagagggcctaatgagcctaagcgtcaagtggttctcccaggcaaaagaaaaatcgtcggagctgaggacaagactgacgaggattacgatcagttggataggcaaccccctttcacggtgacgattgaccctagcatcctcctatcaaatgaagacaccccttactcacgcagcgatcacaaggagggaacaatagtaaggagaaaaaacacatatatggctgaccgcgatgaggaacagatattgtacgatacaatcgcggagggaagcagccagtactggaatgaagaagaggggaacgaggatccaaatcagtacttgaacgagaaagggaacgtggagagggatgcggaggggaaccagcaggggcacgtggaaagggatgtggaggggaaccaggaggaggaggctagtggtagtcaaccctccgttggacagaagagggcacgcgggcaacgaggtgcagcgaagaagcttgagggtcggcacatcataatggaagtggaagaagatggacgtcctagtgccccggccgtagccgccaagaactatgtacgtcacagcggttgggttgtgcgggataacgtgcctgtcagtacggtgtactggcgaagaacaaggacacgcggagatcatgagagctttgtcctagattcggagaaagagatgctgtggaccataatgctcgagacattcacccttcccgcgggtacagaggacaaagtgaaaaggtggactctgaagaaaatggcagaacagtttcagagcttcaagggagagctgtacaagaaatatatcctgaaggggcagacaccgaacttcgacacattcccaaagctaagggatcactgggacgagttcgttgcatataagacaggtgaacaagggcaggcgatgatggaaagaaacaaagaaaatgccgccaagaagaagtaccatcactacttggggtcaggaggctatagcgtcacgatgccgaagtgggaggagatggaggctatcttgattgagaggggtatcgaaccggcaaccgccaattggccggaacgatcgaagttctggtactatgctcatggtggaacgctcaacccagctgatggctcactggtcttcggcgatcagatacgagaggctgcgcgacgactaacagatgcagtggaagcctcctctcagggcacgttccgatcggacagatatagggacgagctgacactcgccctgagtcggatgaggagtaagagagataccgaggcgaagattgcagatctagagttccgggtatcgagctacgaactcagcatgcaagaggaggtgacaaggaaggttgatgaacgcatagccgcacatcggtcccatgatccccagccgaccattcctcctgcaatgatgagcccgtcaggaaaccgtagcagctgtgccttaacggggcaggtaggattacagagcatggacgccattcaaacacaggacgaatcgacctgtcccgttgatgacatcactcagcagacaccatctgagctgcatattccttacaagaacttatcaataaaggtggcgtcgggcatggccatcccaacggacccttcaggtacttaccactgcaggccgattccagcaggatactcgaaggtcgaagttgagttggtcgaaggcgcatacgaggacctcgagctggattaccctggaggagacggctccagcaccgactcctcctcaggatcctgcaccgactcctcctcgggctcctacacctactcctccgcaagctcctcttccggcaccttcaaagtcaagggcccccccccagctccaccgcctgcccacacaagggcaacgaagaaggcgaaagttgacgccgccaagaacaaggacccggggtacgattgcacgcaagaggagcttgacgcttacgttgcatcagaagtcaagagacaattcaagcctcgaagtccagaaaagaagattcctatagaccctagtgtcaggaacttcttcaggggtatgtctgcatctgtcaaggaggccatcaagctatcggactatgagcgaacgctgaagaaagcatcttctggaaagtccaaaccagtccctcagcttggagagcgaccaaaccaggagatcgagccgttggtgaccggtaaagaaatgatgatagaacaatttattactgacaccggtctaactacggatcaattgctaggagtcgcaccaatcgaaaagacggaagtgaaatacatgtacgaactcggtaaaccgcttgtcaagcctgagctgctgcagtccctacccacacaaatgtacaagttccatcagctgtacatggagatgagcgccaccggtagagagatgatcggagcgaggatcagggacacggacttcttgcaaggagatgacattctctggatcaatttcaggggaatcaacgaactataccagctggacgccctcgacatctctattatgagttgctaa

SEQ ID NO: 93194 - DNA, 3123 bp, Oryza sativa
  Clone ID: PAT_MRT4530_91602C.1
atgccacgccgccgcgccaaccgccgccctgatgccgccacaccgccgttaacgaacgagaacgagaacgatcgaacgaacgagagcgagaacgaacacgtcaacgtacgttgccgcgagaacgtgaacgagaacgagaacgatcgaacgaacgagagcgagaacgaacacgtcaacgtacgttgccgcgagaacgtgaatgagaacgagaacgatcgaacgaacgagagcgagaacgagaacgatcgaacgaagataagcgagaacgagggaacgaacgtgaatgagaacaagcgaacgaactacttgaacgaggaagggaacgtggagagggatgcggaggggaaccagcaagggcacgtggaaagggatgtggaggggaaccaggaggaggaggctagtggtagtcaaccctccattggacagaagagggcacgtgggcaacgaggtgcagcgaagaagcttgagggtcggcacatcataacggaagtggaagaagatggacgtcctagtgccccggccgaagccgccaagaactatgtacgtcacagcggttgggttgtgcgggataacgtgcctgtcagtacggtgtactggcgaagaacaagggcacgcggagatcatgagagctttgtcccagattcggagaaagagatgctgtggaccacaatgctcgagacattcacccttcctgcgggtacagaggacaaagtgaaaaggtggactctgaagaaaatggcagaacagtttcagagcttcaagggagatctgtaccagaagtatatactgaaggggcagacaccgaacttcgacacattcccaaagctaagggatcactgggatgagttcgttgcatataagacaggtgaacaagggcaggcgatgatggaaagaaacaaagaaaatgccgccaagaagaagtaccatcaccacttgggttcaggaggctatagtgtcgcgatgccgaagtgggagcagatggaggctagcttgattgagaggggtatcgaaccggcaacagccaattggccgaaacgatcgaagttctggtactatgctcacggtggaacgctcaacccagctgatggctcactggtcttcggcgatcagatacgagaggctgcgcgacgactaacagatgcagtggaagcctcctctcagggcacgttccgaccagacagagatagggacgagctgacactcgccctgcagactccagagcatccaggacgaacacgagggaaaggggtgattccttggaagattggtttcaaggaggacatccacacgtacaggagtcggatgaggagcaagagagataccgaggcgaagattgcagacctagagttccgggtatcgaggtacgaactcaacatgcaagaggaggtggcaaggaaggttgatgaacgcatggccgcacatcggtcccatgatccccagccgaccattcctcctgcaatggtgagcccgtcaggaaaccgtagcagctgcgcctcaacggggcaggtaggatcacagagcatggacgccatgcaaacacaggacgaatcgacctgtcccgttgatgacatcactcagcggacaccatgtgagctgcatattcctttcaagaacttatcaataaaggtggcgtcgggcatggccatcccaacggacccttcaggtacttaccactgcaggccgattccaacaggatactcgaaggtcgaagttgagttggtcgaaggcgcgtacgaggacctcgagctggattaccctggaggagacggatcctgcaccgtctcctcctcatgctccgccagcaccgtctccacctcaggctccagcatcgactcctcctcaggatcctgcaccgactcctcctcgtgctcctacacctactcccccgcaagctcctcttccggcaccttcaaagtcaggggccccccagctccaccgcctgcccacataagggcaacgaagaaggcgaaagttgacgccgccaagaacaaggacccggggggtatgtctgcacctgtcaaggaggccatcaagctatcggactatgagcgaacgctgaagaaagcatcttctggaaattccaaatcagtccctcagcttagagagcaactaaaccaggagatcgagccgttggtgatcggggaagacatgacgatagaagaatttattattgacaccggtctaactacggatcaattgctaggagttgaaccaatagaaaaggcggaattgaaatacatgtacgaactcggtaaaccgcttgtcaagcccgagctggtgcagtccctacccacaaaaatgtacaagttccatcagctgtacatggagatgagcgccaccggtagagagatgatcggagcgaggatcagggacccagacttcttgcaaggagatgatattctctggatcaatttcaagggaatctacgaagtataccagctggatgccctcgacgtctctattatgagttgctggattttaatggtgattcaaagggcccgacagcggagggttttcgatactggattcatcgactctcggagagtaaacgtcgcaatgctcgaccaatatccgcaggaaacagaggacaatctcgtccatctcctgaaggcgcagcattacaagacgttcatactgttgctgtacaacacagaattccactgggtgcttttactcttcgacctgtcggcctgcaccgtcaacgtatatgactcaatggataaaaaagagtctacgttttacaaggttttcgaacttatagatagggcttggtatcggttccgtcatttcgtccacggcaactggagtgaaagacttaggcggaggttcaaatttccttgcgcaaagcaaaagcagggaactaacttgtgcggctactacgtgtgtgagtattgccactgccttgcagaccaaatcatcaccacaagagagctcgattttattcgcatgagggataacctgatcacacacaaggaatttatcgcggcggttcaagaacaactcatgggattcatcaacgaagaaatccttgatcccaagggtgaattctactacgacagaaacacaattcaccggtccttagcttctgagctagcagcgactactactacgtcgaaatcgtag

SEQ ID NO: 93195 - DNA, 354 bp, Oryza sativa
  Clone ID: PAT_MRT4530_91603C.1
atgttaagtaagctgatattcgacttgtattacagtgaaggcaacattagatatggtcagaatgaggtagatatgttcgagttcaagagtatgactaagggcattgatagagttgtcgaaaggagttccgggggtgtatgcaactggctgatgagaggctttaaaatcaatccacagacccatggccttatagtactttatgttttggttaaccgtcaacttgtaggttatttttgggagcttatgcctatggattgcactgatacatggagaagatatgttgagatggcatgcgaacgttgttggccactttccattcttgttcaggtgtacgagaaggagagcacattggat

SEQ ID NO: 93196 - DNA, 3900 bp, Oryza sativa
  Clone ID: PAT_MRT4530_91604C.1
atggatcggcaatggatgtacgctgaccggcggtccaaagagtttattgacggcatgcactattttttgagagtggccgaagctaacaggcaaaggggttttatttgttgtccatgcaataagtgtaagaatcagaaggagtattctgcatccaggactattcatttccacttgtttgagtcggggttcatgccaagctataattgttggacatcccacggagagcaaggtgttgaaatggaagaagatgaagtggaagacgacaatattccggactttgctcagtacgttggatttgaaggaaatcaaacgggcgaggaggaaatagctgctgatggtaacgacgttgcggatgatcttggtcagatgttgcaggacgccaaggaggactacgaaagtgaaaaggaggcccataaattggacaagatgttggaggaccacagaacttcgttgtacccaggttgcgagcaggggcacaaaaagttggataccactctggagttcttgcaatggaaggcaaaaaatggggttagtgacaaggcatttggcaatttattgaaactcgtcaagaacattcttccggagggaaacaaattgcccgagacaacgtacgaggctaagaagatagtctgcccgctaggactggaagttcagaagattcacgcatgtccgaatgattgtatcctatatcgcggtgaggagtatgagaacctagaagcatgccctgtttgtaaagcactacgatacaagattagacgagacgatccaggagaagttgacgggcagctaacaaagaagagaattcctgctaaggtgatgtggtatttccctataataccacgggtaaggcgtttgttcaggaacaaggggaatgctagaatgatgcgatggcacgctgaagagcgtcaacaggacgggatgctgagacaccccgccgatagttcgcagtggcgaaacatcgacagaaaatttaaagaatttggaaaggacgcacgaaacatacggtttggtttgagtacggatggcatgaatccttttggagagatgagcagcggccatagcacttggcccgttacgatatgtatctacaacctcccccctggctatgcaagaagaggaagtgtccccgtgtgggacgaggacaaacaggaggagtttaacctacgagcgctaccgttcgtaaccatcaacgattggcctgcacttagcaacctatccggacagtccaacaaggggtacaaggcttgcactcactgtatggatgaaacagaaagtacgtatcttaagcactataggaaggttgtatacatgggtcatcgtcgattccttgcagcaaaccactcggtacggaagaaaggcaagcactttgaacataaggccgaccaccgtgtatacggaaagttgaaagatacactggaagcacgtaatgatctgaagcatatggaacaacgcggcgaccttcacccggaaccaaaggagaaaggaagccattacttgagtccagccagctacactcttagcaaggcagagaaggaaagtatgtttgaatgcttggagagcataaaggtaccgtctggatactccatgaatatcaagcgaataataagcacgaaggagaagaagttcacaaacctaaagtctcatgactgtcacgtgttgatgacacaactgctactagttgtaataaggggtatccttccagacaatgtccgggcaacaataacaaagctatgtgcattcatgaacgcaatttcgcagaaggtcatcgatccggaaagattagaagcccttcagaatgaagtagtgcaatgtctcgtcagttttgagttgatatttccaccttcatttttcaatataatgacgcatctgctttgtcaccttgtgaaagagatcagtattctcgggcctgtgtacctacacaacatgtttcctttcgagaggtacatgggcgttctgaagaagtatgttcgtaaccgtgctcgtccagaggcaagcatcgccaagtgttatggaacagaggaggtcatcgaattttgcgtagaatttatcgaagaccttcgcccaatcgggatacctgaatcacgccatgaagggagactacggggaaagggaactctcggaaggaaagcaataatgatggtagacaacaatttattccgtaaagcccatttcactgttctgcaacactcttcattggtagctccttacatcgaggagcacttggctctagttcgcgctaggaacatcggtaagtccgatgcatggattacacggcatcacattgatactttccccgcgtggctacgacaacatctcatgggtaacgagtcgatcaaccaacaacttgccttcctggcaaggggaccgtctgggtcgatcgcgacattccagggatatgagatcaatgagtacacattctacacgagagcccaagacatgaagagcacgaaccaaaacagcgttgttcatgtcgatgccatgggacacgatggaacaactgccacgtattacggtgccatcgaggacatatgggaacttgactatggtcctctcaaggttcctctgttccgtgggatgacaacagttgaccttaacaaggttggatactcggacgaaccttttgtccttgccaatgatgtaacgcaagtctttttcatgaaggacatgtctagcaaaggaaagaagggcagagggcctgacgagcctaagcgtcacgtggttctcccaggcaaaagaaaaatcgtcggagttgaggacaagactgacgaggattacgatcagttggatgggcaaccccctttcacggtgacgattgaccctagcatcctcctatcaaatgaagacaccccttactcacgtagcgatcacaaggagggaacaatagtgaggagaaaaaaagacgttgtcgttgtcgtccctcaagccggagtgatggctgatcgcgatgaggaacatatattatacgatacaatcgcggagggaagcagccagtactggaacgaagaagaggggaacgaggatccaaaccagtacttgaacgaggaagggaacgtggagagggatgcggaggggaaccaggaggggcacatggagagggatgtggaggggaaccaggaggaggaggctagtggaagtcaaccctccgctggacagaagagggcatgcgggcaacgaggtgccgcgaagaagcttgagggtgggcacatcataacggaagtggacgaagacagccgacctagtgccccggcggaagcagccaagaactacgtacgtcacagcggttgggttgtgcgggataacgtgcttgtcagtatggtatattggcacagaacaagggcacgcggagatcatgagagctttgtcccagattccgagaaagagatgttgtggaccacaatgcttgagacattcacccttcccgcgggtacagaggacaaagtgaaaaggtggactctaaagaaaatggcagaacagtttcagagcttcaagagagatctataccagaaatatatcctggaggggcaaacaccgaacttcgacacattcccaaagctaagggatcactgggatgagttcgttgcatataagacaggtcaacaagggcaggcaatgatggaaagaaacaaagaaaatgccgccaagaagaagtaccatcaccacttggggtcaggcggctatagtatcgcgatgtcgaagtgggaggagatggaggcaagcttgcttgagaggggtatcgaaccggccaccactaattggccggatcgatcgaagttctggtactatgctcacggtggaacgctcaacccagctgatggctccctagtcttcagcgatcagatacgcgaggctgcgcgtcgactaacggacgcagtggaagcctcttctcagggcacgttctga

SEQ ID NO: 93197 - DNA, 2483 bp, Oryza sativa
  Clone ID: PAT_MRT4530_91605C.1
caaagcactcgaatacaagattagacgggacgatccaggagaagttgacgggcagctaacaaagaagagaattcctgctaaggtgatgtggtatttccctataataccacggctaaggcgtttgttcaggaacaaggggaatgctagaatgttgcgatggcacgctgaagagcgtcaacaggacgggatgctgagacaccccgccgatggttcgcagtggcgaaacatcgacagaaaatttaaagaatttggaaaggacgcacgaaacatacggtttggtttgagtacggatggcatgaatccttttgaagagatgagcagcggccatagcacttggcccgttacgatgtgtatctacaacctccccctggctatgcatgaagagaaagtacataatgatgccgattattattcaaggccccaagcaacctggtaacgacatcgacgtgtacctaagaccactggtcgaagatcttaaacagttgtggaagaaggaaggtgtccccatgtgggacgaggacaaacaggagtttaacctacgagcgctgctgttcgtaaccatcaacgattggcctgcacttagcaacctatccggacagtccaacaaggggtacaaggcttgcactcactgtatggatgaaacagaaagtacgtatcttaagcactgtaggaaggttgtgtatatgggtcatcgtcgattccttgctgcaaaccacccggtacggaagaaaggcaagcactttgaacataaggcggaccaccgtacgaagcctaaacatcacagcgggaaaacggtgtttgttatggttaaagatcttaaagtagtgttcggaaaggagcctggaagccagcctatagagagcgaagatggtcacgcggcgatgtggaaaaagaactctatattttgggagttaccctattgggaattcttggacgtccgccacgcaatcgacgtgatgcacctcactaagaacctttgcgtaaaccttcttggcttcctaggtgtatatggaaagtcgaaagatacactggaagcacgtaatgatctgaagtatatggaacaacgcagcgaccttcacccggaacgaaaggagaaaggaagccattacttgagtccagctagctacactcttagcaaggcagagaatgaaagtatgtttgaatgcttggagagtataaaggtaccgtctggatactccacgaatatcaagcgaataataagcacgaaggagaagaagttcacaaacctaaagtctcatgactgtcacgtgttgatgacacaactgctaccagttgtaataaggggtatccttccagacaatgtccgggcaacaataacaaagctatgtgctttcatgaacgcaatttcacagaaggtcatcgatccggatagattagaagcccttcagaatgatgtggtacaatgtcttgtcagttttgagttgatatttccaccttcatttttcaatataatgacacatctgctttgtcaccttgtcaaagagatcagtattctcgggcctgtatacctacacaacatgtttcctttcgagaggtacatgggcgttctgaagaagtacgttcgtaaccgtgctcgtccagaggcaagcatcgccaaagggtatggaacagaggaggtcatcgaattttgcgtagaatttattgaagaccttcgcccaatcggggtacctgaatcacgccatgaagggagactacggggaaagggaactctcggaaggaaagcaataatgacgtccgatgcgtggattacacggcatcacattgatactttccccgcgtggctacaacaacatctcatgggtaacgagacgatcaaccaacaactggccttcctggcgaggggaccatctgggtcgatcgccacattccagggatatgagatcaatgggtacacattctacacgagagcccaagacacgaagagcacgaaccaaaacagcgttgttcgtatcgatgccatgggacacgatggaacaactggcacgtattacggtgccatcgaggacatatgggaacttgactatggtcctctcaaggtccctctattccggtgccaatgggttaggttgactggtggaggcgtaatgattgatgacagtgggatgacaacggttgaccttaacaaggttggatactcggacgaaccttttgtccttgccaatgatgtaacgcaagtcttttacgtgaaggacatgtctagcaaaggaaagaagggcaaagggcctgacgagccgaagcgttacgtggttctccaaggcaaaagaaaaatcatcggagttgaggacaagactgacgaggattacgatcaattggatgggcaaccccctttcacggtgacgattgaccttagcatcctcctatcaaatgaagacaccccttactcacgtagcgatcacaaggagggaacaatagtgaggagaaagtacgtgcggtcaaccgtcaccgctgatgtattgacgtaa

SEQ ID NO: 93198 - DNA, 6399 bp, Oryza sativa
  Clone ID: PAT_MRT4530_91606C.1
atggatcagcaatggatgtacgctgaccgacggtccaaagagtttattgacgacgtgcattattttttgagagtggccgaagctaacagacaaaggggttttatttgttgtccatgcaataagtgtaagaatcaaaaggagtattctgcatccaggaatattcatttccacttgtttgagtcggggttcatgccaagctataattgttggacatcccacggagagcaaggtgttgaaatggaagaagatgaagtggaagacgacaatattccggactttgctcagtacgttggatttgaaggaaatcaaacgagcgaggaggaaagggatgctgatggtaacgacgttgcggatgatcttgatcagatgttgcaggacgccaaggaggactgcgaaagtgaaaagggggcccataaattggacaagatgttagaggaccacagaacgtcgttgtacccaggttgcgagcaggggcacaaaaagttggataccactctggagttcttgcaatggaaggcaaaaaatgggattagtgataagacatttggcgatttattgaaactcgtcaagaacattctttcggagggaaacaaattgctcgagacaacgtacgaggctaagaagatagtctgccctctaggactggaagttcagaagattcacgcatgtccgaataattgtatcctatatcgcggtgaggactagaagcatgccctgtttgcaaagcactacgatccaagattagacgagacgatccaggagaagttgacgggcagctaacaaagaagagaattcctgctaaggtgatgtggtatttccctataataccacggctaaggcgtgtgttcaggaacaaggggaatgctagaatgatgcgatggcacactgaagagcatcaacaggacgggatgctgagacaccccgccgatggtttgcagtggcgaaacatcgacagaaaatttaaagactttggaaatgacgcacgaaacatacggtttggtttgagtatggatggcatgaatccttttggagagatgagagcggccatagcacttggcccgttacgatgtgtatctacaacctcccccctggctatgcatgaagaggaagtatataatgatgccgattattattcaaggccccaagcaacctggtaacgacatcgatgtgtacctaagaccactggtcgaagatcttaaactgttgtggaagaaggaagatgtcccggtgtgggacgaggacaaacaggaggagtttaacctacgagcgctgctgttcgtagccatcaacgattggcctgcacttagcaacgtatccggacagtccaacaaggggtacaaggcttgcactcactgtatggatgaaacagaaagtacgtatcttaagcactgtaggaaggttgtatacatgggtcatcgtcgattccttgcagcaaaccacccggtacggaagaaaggcaagcatttctaacataaggctgaccaccgtacgaggcctaaacatcgcagcgggaaaacagtgtttgctatggttaaagatcttaaaatagtgttcgtaaaggggcctggaagccagcctatagagagcgaagatggtcacgcggcgatgtgaaaaaagaactctatattttgggagttaccctattgggaattcttggacgtccgccacgcaatcgacgtgatgcacctcactaagaacctttgcgtaaaccttcttggcttcctaggtgtatatggaaagtcgaaagatacactggaagcacgtaataatctgaagcatatggaacaacgcgacgaccttcacctggaaccaaaggagaaaggaagcaattacttgagtccagccagctacactcttagcaaggcagagaaggaaagtacgtttgaatgcttggagagcataaaggtaccgtatggatactccacgaaatcaagcgaataataagcacgaaggagaagcagttcacaaacctaaagtctcatgactgtcacgtgttgatgacacaactgctaccagttgtaataaggggtatccttccaaacaatgtccggacaacaataacaaagctatgtgcattcatgaacgcaatttcgcagaaggtcatcgatccggatagattagaagcccttcagaatgatgtggtgcaatgtcttgtcagttttgagttgatatttccaccttcatttttcaatataatgacgcatctgctttgtcaccttgtcaaagagatcagtattctcgggcctgtgtacctacacaacatgtttattttagagagctacatgggcgttctgaagaagtatgtttgtaaccgtgctcgtccagaggcaagcatcgccaagggttatggaacagaggaggtcatcgaattttgcgtagaatttattgaagaccttcgcccaatcgggatacccgaatcacgcattgaagggagactacggagaaagggaactcttggaaggaaagcaataatgacgatagacaacaatttattccgtaaaacccatttcacggttctgcaacaatcttcattggtagctccttacatcgaggagcacttggctctagttcgcgccaggaacattggtaagtccgatgcatggattacacggcatcacaatgatactttccccgcgtggctacgacaacatctcatgggtaacgagtcgatcaactaacaacttgccttcctggcgaggggaccgtctgggtcgatcgcgacattccagggatatgagatcaatgggtacacattctacacgagagcccaagacataaagagcacgaaccaaaacagtgctgttcgtgtcgatgccatgggacacaatggaacaactggcatgtattacggtgccatcgaggacatatgggaacttgactatggtcctctcaaggttcctctattccggtgccaatgggttaggttgactggtggaggcgtaatggttgatgacagtgggatgacaacggttgaccttaacaaggttggatactcggacgaaccttttgtccttgccaatgatgtaacgcaagtcttttacgtgaaggacatgtctagcaaaggaaagaagggtagagggcctgacgagcctaagcgtcacgtggttctcccagcgcgccctcgtcttctccaccaacacttagaagtttttgcccgatcgatctctctcggcttctccttcgccgccactacctagggcatccccatgccgacgccaccgtcgtatctcgccatcgtctcgcgctcgtcgtcgtcgtcgccgcctccgcctcctccgccgccgccgccgcatctcgctgtttcctgtatgaacagatggctgatcgcaatgaggaacagatattgtatgatacaatcgcggagggaagcagccagtactggaacaaagaagaggggaacgaggatccaaaccagtatttgaacgaggaagggaacgtggagagggatgcggaggggaaccaggaggggcacgtggaaagggatgtggaggggaaccaggaggaggaggctagtggaagtcaaccctccgctggacagaagagggcacgcgggcaacgaggtgccacgaagaagcttgagggttggcacatcataacggaagtggacgaagacggccgacctagtgccccggtagaagccgccaagaactatgtacgtcacagcggttgggttgtgcgggataacgtgaatgtcagtacggtgtactggcacagaaaagggcacgcggagatcatgagagctttgtcccagattcggagaaagagatgatgtggaccacaatgctcgagacattcacccttcccgcgggtacagaggacaaagtgaaaaggtggactctgaagaaaatggcagaacagtttcagagcttcaagagagatctgtaccagaaatatatcctgaaggggcagacaccgaacttcgacacattcccaaagctaagggatcactgggacgagttcgttgcatataagacaggtgaacaagggcaggcgatgatggaaagaaacaaagaaaatgccgccaagaagaagtaccatcaccacttggggtcaggcggctatagcgtcgcgatgccgaagtgggaggagatagaggctagcttgcttgagaggggtatcgaatcggccaccgctaattggccggaacgatcgaagttctggtactatactcacggtggaacgctcaacccagctgatggctccctggtcttcggcgatcagatacgcgaggctgcgcgtcgactaacagacacagtggaagcctcttctcagggcatgttccgaccggacaaagggaaggacgagctgtcactcgccctgcagactccagagtatccaggacgaacacgagggaaaggggtgattccttggaagattgggttcaaggaggacatccacacgtacaggagtcggatggggagcaaaagagataccgaggcgaagattgcagatcttgagttcagggtatcgaactacgagctcagcatgcaagaggaggtggcaaggaagggtgatgaacgcatgaccacacatcggtccaatgatccctagccgaccattcctcctgcaatggtgagcccgtcaggaaattgtagcagctgcgcctcaacggggcaggtaggatcacagagcatggacgtcatgcaaacccaggacgaaaccacctgccccgttgatgacatcactcagcggacaccatgtgagctgcatatccccttcaggaacttatcaataaaggtggcgtcgggcatggccatcccaacggacccttcaggtacttaccactgtaggccgattccagcaagatactccaaggtcgaagttgagttggtcgaaggcgcgtacgaggacctcgagctagattaccctagaggagacggtgagacacatctacgagacacaagccacgccattattctatggcgcaagcggtacatcatcctccctaggcgacaagcggcgtctcgtgcaccatctcctccggctctgccatctcctcctcatgctcctgcaccatctcctcctcatgctccagcaccgtctccacctcaggctcctgcaccgactcctcctcaggctcctgcaccgactcctccttaggctcctcttccggcaccttccaagtcaagggccccccaagctccaccgcctgcccccacaagggcaacgaagaaggcgaaagttgacgccgccaagaacaaggacccggggtacgattgcatgcaagaggagcttgacgcttacatggcatcagaagtcaggagacaattcaagcctcgaagtccagaaaagaagattcctatagacccgagtgtcaggaacttcttcaggggtatgtctgcacctgccaaggaggccataaagctatcggactatgagcgaacactcaagaaagcatcttctagaaagtccaaaccagtcccccagcttggagagcaaccaaaccaggagatcgagccattggtgaccggtgaagattttggaatacaagactttattaatgacaccgggctaactatggatcaattgctagaagacgcaccaatcgaaaaggcggaagtgaaatacatgtacgaactcggtaaaccgcttgtcaagcctgagctgctgcagtccctacccacacaaatgtacaagttccatcagctgtacatggagatgagcgccaccggtagagagatgatcggagcgaggatcagggacaaggacttcttgcaaggagatgacattctctggatcaatttcaagggaatctacgaactataccagctggacgccctcgacgtctctattatgagttgctggattttaatggagatccaaagggcccgacggcagggggttttcgatactggattcatcgaccctcggaaagtaaacgttgcaatgctcgaccaatatccgcaagccacagaggacaatctcgtccatctcctgaaggcgcaacattacaagacgttcatactgttgccgtacaacacagaattccactatgtgcttttactcttcgacctggaggcctgcaccgtcaacgtatatgactcaatggataaaaaagagtctacatttgacaaggttttcgaacttatagacagggcttggtatcggttccgtcatttggtccgcggcaaatggagagaaagacttaggcggaagttcaaatttccttttattggcatgagggataacctgatcacacacaaggaatttatcgcggcggttcaagaacaactcatgggattcatcaacgaacaaatccttgatcctaagagtgaattctactacgacggaaacacaattcataagtccttctggcccggcggccatggcgcatggcggcgcggcgcgcatgcggcggtggcgcgagacggcgaccgacggcggagagcggcgtcgtgg

SEQ ID NO: 93199 - DNA, 4905 bp, Oryza sativa
  Clone ID: PAT_MRT4530_91607C.1
atggatcggcaatggatgtacgctgaccggcagtccaaagagtttattgacggcgtgcactattttttgagagtggccgaagcttacaggcaaaggggttttatttgttgtccatgcaataagtgtaaaaatcagaaggagtattctgcatccaggactattcatttccacttgtttgagtcggggttcatgccaagctataaatgttggacatcccacggagagcaaggtgttgaaatggaagaagatgaagtggaagacgacaatattccggactttgctcagtatgttggatttgaaggaaatcaaacgggcgaggagaaaatagctgctgatggtaacgacgttgcggatgatcttgatcagatgttgcaggacgctagggaggactgcgaaagtgaaaaggaggcccataaattggacaagatgttggaggaccacagaacttcgttgtacccaggttgcgagcaggggcacaaaaagttggataccactctggagttcttgcaatggaaggcaaaaaatggggttagtgacaaggcatttggcgatttattgaaactcgtcaagaacattcttccggggggaaacaaattgcccgagacaacgtacgaggctaagaagatagtctgcccgctaggactggaagttcataagattcacgcatgtccgaacgattgtatcctatatcgcggtgaggagtatgagaacctagaagcatgccctgtttgcaaagcactacgatacaagattagacgagacgatccaggagaagttgacgggcagctaacaaagaagagaattcctgctaaggtgatgtggtatttccctataataccacggctaaggcgtttgttcaggaacaaggggaatgctagaatgatgcgatggcatgctgaagagcgtcaacaggacgggatgctgagacaccctgccgatggttcacagtggcgaaacatcgacagaaaatttaaagaatttggaaaggacgcacgaaacatacggtttggccccaagcaacctggtaacgacatcgatgtgtacctaagaccactggtcgaagatcttaaactgttgtggaagaaggaaggtgtccctgtgtgggacgaggacaaacatgaggagtttaacctacgagcgttgctgttcataaccatcaacgattggcctgcacttagcaacctatccggacagtccaacaaggggtacaaggcttgcactcactgtatggatgaaacagaaagtacgtatcttaagcactgtaggaaggttgtatacatgggtcatcgtcgattccttgcagcaaaccatccggtacggaagaaaggcaagcacttcgaacataaggccgaccaccgtacgaagcctaaacatcgcagcgggaaaacagtgtttgctatggttaaagatcttaaagtagtgttcggaaaggggcctggaagccagcctatagagagcgaagatggtcacgcggcgatgtggaaaaagaactttatattttgggagttaccatattgggaattcttggacgtacgccacgcaatcgacgtgatgcacctcactaagaacctttgcgtaaaccttcttggcttcctaggtgtatacggaaagtcgaaagatacactggaagcacgtaatgatctgaagcatatggaacaacgcggcgaccttcacccggaaccaaaggagaaaggaagccattacttgagtccagccagctacactcttagcaaggcagagaaggaaagtatatttgaatgcttggagagcataaaggtaccgtctggatacttcacgaataccaggcgaataataagcacgaaggagaagaatttcacaaacctaaagtctcatgactgtcacgtgttgatgacacaactgctaccagttgtaataaggggtaaccttccaaacaatgtccgggcaacaataacaaagctatgtgcattcatgaacgcaatttcgcagaaggtcatcgatccggatagattagaagcccttcagaatgaagtggtacaatgtctcgtcagttttgagttgatatttccaccttcatttttgaatataatgacgcatctgctttgtcaccttgtgaaagagatcagtattctcgggcctgtgtacctacacaacatgtttcttttcgagaggtacatgggcgttctgaagaagtatgttcgtaaccgtgctcgtctagaggcaagcatcgccaagggttatggaacagaggaggtcatcgaattttgtgtagaatttatcgaagaccttcgcccaatcggggtacctgaatcacgccatgaagggagactacggggaaagggaactctcggaagaaaagcaataatgacggtagacaacaatttattccgtaaagcccatttcactgttctgcaacacttttcattggtagctccttacatcgaggagcacttggctctagttcgcgccaggaacatcggtaagtccgatgcatggattacacggcatcacattgatactttccccgcgtggctacgacaacatctcatgggtaacgagtcgatcaaccaacaacttgccttcctggcgaggggaccgtctgggtcgatcgcgacattccagggatatgagatcgatgggtacacattctacacgagagcccaagacatgaagagcacgaaccaaaacagcgctgttcgtgtcgatgccatgggacacgatggaacaactgccacgtattacggtgccatcgaggacatatgggaacttgactatggtcctctcaaggttcctctgttccggtgccaatgggttaggttgactagtggaggcgtaatgattgatgacagtgggatgacaactgttgaccttaacaaggttggatactcggacgaaccttttgtccttgccaatgatgtaaccaaaggaaagaagggcagagggcctgacgagcctaagcgtcaagtggttctcccaggcaaaagaaaaatcgtcggagttgacgacaagactgacgagcattacgatcagttggatgagcaaccccctttcatggtgacgattgaccctagcatcctcctatcaaatgaagacaccccttactcacgcagcgatcacaaggagggaacaatagtgaggagaaaaaacacatatatggctgaccgcgatgaggaacagatattgtacgatacaatcgcggagggaagcagccagtactggaatgaagaagaggggaacgaggatccaaaccagtacttgaacgaggaagggaacgtggagagggatgcggaggggaaccaccaggggcacgtggaaagggatgtggaggggaaccaggaggaggaggctagtggaagtcaaccctccgttggacagaagagggcacgcgggcaacgaggtgcagcgaagaagcttgagggtcggcacatcataacggaagtggaagaagatggacgtcctagtgccccggccgaagccgccaagaactatgtacgtcacagcggttgggttgtgcgggataacgtgcctgtcagtacggtgtactggcgaagaacaagggcacgcggagatcatgagagctttgtcccagattcggagaaagagatgctgtggaccacaatgctcgagacattcacccttcctgcgggtacagaggacaaagtgaaaaggtggactctgaagaaaatggcagaacagtttcagagcttcaagggagatctgtaccagaagtatatcctgaaggggcagacaccgaacttcgacacattcccaaagctaagggatcactgggacgagttcgttgcatataagacaggtgaacaagggcaggcgatgatggaaagaaacaaagaaaatgcccccaagaagaagtatcatcaccacttggggtcaggaggctatagcgtcgcgatgccgaagtgggaggagatggaggctagcttgcttgagaggggtatcgaaccggcaaccgccaattggccggaacgatcgaagttctggtactatgcttacggtggaacgctcaacctagctgatggctcactagtcttcggcgatcagatacgagaggctgcgcgacgactaacagatgcagtggaagcctcctctcagggcacgttccgaccggacagagatagggacgagctgacactcgccctgcagactccagagcatccaggacgaacacgagggaaatgggtgattccttggaagattggttttaaggaggacatccacacgtacaggagtcagatgaggagcaagagagataccgaggcgaagattgcagatctagagttccgggtatcgagctacgagctcagcatgcaagaggaggtggcagggaaggttgatgaatgcatggccgcacatcagtcccatgatccccagccgaccattcctcctgcaatggtgagcccgtcaggaaaccgtagcagctgcgcctcaacgggacaggtaggatcacagagcatggacgccatgcaaacacaggacgaatcgacctgtcccgttgatgacatcactcagcggacaccatgtgagctgcatattcctttcaagaacttatcaataaaggtggcgtcgggcatggccatcccaacgaacccttcaggtacttaccactgcaggccgagtccagcaggatactcgaaggtcgaagttgagttggtcgaaggcgcgtacgaggacctcgagctggattaccctggaggagatggatcctgcaccgtctcctcctcatgctccgccagcaccgtctccacctcaggctccagcaccgactcctcctcaggatcctgcaccgactcctcctcgggctcctacacctactcctccgcaagctcctcttccgacaccttcaaagtcaagggcccccccagctccaccgcctgcccacgcaagggcaacgaagaaggcgaaagttga

SEQ ID NO: 93200 - DNA, 2973 bp, Oryza sativa
  Clone ID: PAT_MRT4530_91608C.1
ccgccgcagccccacgcgcgccgggccaccggccgccccgacgccgccacccccccgttcccgagcgagagcgagatcgatcgcgcgagcgagagcgagagcgcacacgtcaccgtgcgttgccgtgagagcgtgagcgagagcgagagcgctctcgcgagcgagagcgagagcgagcgcgtcagcgtgcgttgccgcgagagcgtgagcgagagcgagagcgctcgcgcgagcgagagcgatagcgagcgcgctcgcgcgaagacaagtgagagcgagggagcgcacatggctgaccgcgatgaggaacagatattgtacgatacaatcgcggagggaagcagccagtactggaatgaagaagaggggaacgaggatccaaaccagtacttgaacgaggaagggaacgtggagagggatgcggaggggaaccagcaggggcacgtggaaagggatgtggaggggaaccaggaggaggaggctagtggtagtcaaccctccgttggacagaagagggcatgcgggcaacgaggtgcagcgaagaagcttgagggtcggcacatcataacggaagtggaagaagatggacgtcctagtgccccggccgaagccgccaagaactatgtacgtcacagcggttgggttgtgcgggataacgtgcctgtcagtagggtgtactggcgaagaacaagggcacgcggagatcatgagagctttgtcccagattcggagaaagagatgctgtggaccacaatgctcgagacattcacccttcctgcgggtacagaggacaaagtgaaaaggtggactctgaagaaaatggcagaacagtttcagagcttcaagggagatctgtaccagaagtatatactgaaggggcagacaccgaacttcgacacattcccaaagctaagggatcactgggacgagttcgttgcatataagacaggtgaacaagggcaggcgatgatggaaagaaacaaagaaaatgccgccaagaagaagtaccatcaccacttggggtcaggaggctatagcgtcgcgatgccgaagtgggaggagatggaggctagcttgattgagaggggtatcgaaccggcaacagccaattggccggaacgatcgaagttctggtactatgctcacggtggaacgctcaacccagctgatggctcactgattggtttcaaggaggacatccacacgtacaggagtcggatgaggagcaagagagataccgaggcgaagattgcagacctagagttccgggtatcgagctacgaactcaacatgcaagaggaggtggcaaggaaggttgatgaacgcatggccgcacatcggtcccatgatccccagccgaccattcctcctgcaatggtgagcccgtcaggaaaccgtagcagctgcgcctcaacggggcaggtggcgtcgggcatggccatcccaacggacccttcaggtacttaccactgcaggccgattccagcaggatactcgaaggtcgaagttgacttggtcgaaggcgcgtacgaggacctcgagctggattaccctggaggagacggcggtacatcatcctccctgggcgacaagcggcgtctcgtgcaccatctcctccggctccgccatctcctcctcaagatcctgcaccgtctcctcctcatgctccgccagcaccgactcctcctcaggatcctgcaccgactcctcctcgggctcctacacctactcctccgcaagctcctcttccggcaccttcaaagtcaagggccccccccagctccatcgcctgcccacacaagggcaacgaagaaggcgaaagttgacgccgccaagaacaaggacccagggtacgattgcacgcaagaggagcttgacgcttacgttgcatcagaagtcaagagacaattcaagcctcgaagtccagaaaagaagattcctatagaccccagtgtcaggaacttcttcaggggtatgtctgcatctgtcaaggaggccatcaagctatcggactatgagcgaacgctgaagaaagcatcttctggaaagtccaaaccagtccctcagcttggagagcaaccaaaccaggagatcgagccgttggtgaccggtaaagaaatgacgatagaacaatttattactgacaccggtctaactacggatcaattgctaggagtcgcaccaatcgaaaaggcggaagtgaaatacatgtacgaactcggtaaaccgcttgtcaagcctgagctgctgcagtccctacccacacaaatgtacaagttccatcagctgtacatggagatgagcgccaccggagaggaggagggcggcgccacgccggcgacaacggtggcagcggtggagacgacgggggagaaggaagggagctcagggtcagagaggcccgggaggcaggagaaggaggcggcgtcctcgcctgtgacgaacccccgagcgcgaccgagccacacaagcgccgcctccacaaccacctcctcctccgccactaaagccgccatcgtcgtcgtcttcatccacccccaaaccgtcgtcacgcctagatgggtgctgtcgtttagccaccctttcccctcgggcgccgactatcgcgccgcactgatgtgcccggccatcgcccaagcgacaccgacgccactgttggccgccccctccaattggcgcccggacctcctcctcctggcgccactcccttccctaccacctctgctcggcgccgctccgattcctcctctctacaccgctccaggcaacgctgccgagctgccgcgccgtgcagcctctctccccctacgcgcgaccgcgctgccatgctctcccccttccatgttgccgtcttccccaccgccgctggccatcacctgcgttgccggcgccctccctctgctactcgcgcatcatcagctcgagtttccaggagactttgttcgtgtgaatgaacgggttgcttttgattaa

SEQ ID NO: 93201 - DNA, 419 bp, Oryza sativa
  Clone ID: PAT_MRT4530_91609C.1
agaaatgctgggtttcattatcaaagtttagtttggggaaaaaccggcttcataagaaaaaatgctaaaaaaaggggccacacccaggggaggcgggggaaccccccccaagggagaggagaaaaaaccccccgacaggtgttcaaaaagcccacccacaaaaaaaatggccccgaaaaaaggaggaacaatgtgaaaaatattcccgggggggccgggaaaaggggggaggagggggggcgttttctaaaggaagggcgcctgggggccctaaaaaaaaaaagttcccgaacacctttcgggggaaccctctttttaattatgccgggggggggccccccccagggcggggtaatttctcgggggccccggaaaggggaccagggaattcagggggttcaggggggcggggggggggg

SEQ ID NO: 93202 - DNA, 1184 bp, Oryza sativa
  Clone ID: PAT_MRT4530_9160C.1
aattactaagcttgcccagattcgtaatcttatattatgagcagtcaattcagaacattatcaagctttgtaaaagtacaaactgcaggagaaaactgtagaaaactcgagaaaaataatccaagaccgcaaagtaggtgggagcttctttgtgcgcttgtagtagcggacgaggcggtggatcctgctctcaacaagaataagcctgaaacttgagtccttgtccttcctgttcctctccaaatgcttcctaatagcaacagccttcttgatcaggaagtacaggtcttccaggatcttcggtgcaagaccgtgggccttgaggatgtgaagaatcttgctactggcgatgctcttgacgagggggattccgtgctggtgacggagcacaacgccaatctgcgacgacatctgacccatcttcgcggccttcatgatcatctcctccacctcgccgtagtttggccggcggcggcacctcgtgttgaggaaatcgtgcgttaccacgggctcttggcagtagcggctgccggagggcgaccggagttggaatccagtagccggcgtgaggaagcgcggtggcgttggcgccacaccggccacgatgccgccggagaaggaggcggcgttgacgcggccgccgtgccgtgctccatgccggggaggcgacggtgacatcaccaccactgcaccccactccttgccttccctcgccatccttacttcgcgtggccggcctctccccgctagctctgacgggcggcagtggcgcggtgcccgtgtgcggccggatgcgcagccgccacaagccccattgccggcgggtggggtggggggagaacaagtggggagggaggtgttgcggggaaggcggatgatggtgccgcacccgtcggcctccgccgcttcgtcgtccgaagctatcgcggccatcgccacgagccgcgccgtcgcacggcctgcaaggagaggcaacggatagcgaggggaggacggacgacgtcggcggcggcgggtggagggcggacgacgacggaggtgactgggggagggcggatggaggcggggggagtcccgcgccggcgccggcgccgagcacggggcgcggggcgtgggtggggcggcggccgcgcggtgggggagtggggaacagcccgtggttagggtctggggtatatgtggtc

SEQ ID NO: 93203 - DNA, 2622 bp, Oryza sativa
  Clone ID: PAT_MRT4530_91610C.1
atggctgatcgtgatgaggaaaagatattgtacgatacaatcgcggagggaagcagccagtactggaacgaagaagaggggaacgaggatccaaaccagtatttgaacgaggaagggaacgtggagagggatgcggaggagaaccaggaggggcacgtggaaagggatgtggaggggaaccaggaggaggaggctagtggaagtcaaccctccgttggacagaagagggcacgcgggcaacgaggtgccaagaagaagcttgaggaagccgccaagaactatgtacgtcacagcggttgggttgtgcgggataacgtgcctgtcagtacggtgtactggcgaagaacaagggcacgcggagatcatgaaagctttgtcccagattcgaagaaagagatgctgtggaccacaatgctcgagacattcacccttcccgcgggtacagaggacaaaaaatatatcctgaagggcaagacacagaacttcgacacattcccaaagctaagggatctctgggacgagttcgttgcatataagacaggtgtacaagggcaggcgatgatggaaagaatcaaagaacatgccgccaagaagaagtaccatcaccacttggggtcaggcggctatagcgtcgcgatgccgaagtgggaggagatggaggctagcttgcttgagaggggtatcgaaccggccaccgctaattggctggaacgatcgaagttcttgtactatgctcatggtggaacgctcaacccagctgatggctcactgggcacgttccgaccggacagagagagggacgagctgtcactcgccctgcagactctagagcatccaggacgaacacaagggaaaggggtgattccttggaagattgggttcaaggaggacatccacacgtacaggagtcggatgaggcgcaagagagataccaaggcgaaaattgcagatctagagttcagggtatcgagctacgagcgcagcatgcaaaaggaggtgacaaggaaggttgatgaacgcatggccgcacatcggtcccatgatccccagccgaccattcctcctgcaatggtggcgtcgggcatggccatcccaatggacccttcaggtacttaccactgcaggccgattccagcaggatactccaaggtcgaagttgagttggtcgaaggcgcgtacgaggacctcgagctggattaccctggaggagacggtgagacgcatctacgagacacaagccacgccattattctatggtgcaagcggtacatcatcctccctgggcgacaagcggcgtctcgtgcaccatctcctccggctccgccatctcctcctcaggctcctgcaccgtctcctcctcatgctccagcaccgtctccacctcaggctcctacaccgactcctcctcaggctcctacaccgactcctctgcaagctcctcttctggcaccttccaagtcaagggccccccaagctccaccgcctgcccccacaagggcaacgaagaaggcgaaagttgacggggaagtcaggagacaattcaagcctcgaagtctagaaaagaagattcctatagacgcgagtgtcaggaacttcttcaggggtatgtctgcacctgccaaggaggccataaagctatcggactatgagcgaacactcaagaaagcatcttctggaaagtccaaaccagtccctcagcttggagagcaaccaaaccaggagatcgagccgttggtgaccggtgaagattttggaatacaagactttattaatgacaccgggctaactacgtatcaattgctacgagacgcaccaatcgaaaatgcggaagtgaaatacatgtacgaactcggtaaaccgcttgtcaagcctgagctgctgcagtccctacccacacaaatgtacaagttccatcagctgtacatggagatgagcgccaccggtagagagatgatcggatcgaggatcagggacacggacttcttgcaaggagatgacattctctggatcaatttcaagggaatctacgaactataccagctggatgccctcgacgtctctattatgagttgctggattttaatggagattcaaagggcccgacggcggggggttttcgatactggattcatcgaccctcggaaagtaaacgtcgcaatgctcgaccaatatccacaagccacagaggacaatctcgtccatctcctgaaggcgcagcattacaagacgttcatactgttgccgtacaacacagaattccactgggtgcttttactcttcgacctggaggcctgcaccgtcaacgtatatgactcaatggataaaaaagagtctatgtttgacaaggttttcgaacttatagacagggcttggtatcggttccgtcatttggtccgcggcaaatggagagaaagacttaggcggaagttcaaatttccttttattcgcatgagggataacctgatcacacacaaggaatttatcgcggcggttcacgaacaactcatgggattcatcaacgaacaaatccttgatcccaagggtgaattctactacgacggaaatacaattcataggtccttagcttctgagatatcgactactactacgtcgaaatcgtag

SEQ ID NO: 93204 - DNA, 456 bp, Oryza sativa
  Clone ID: PAT_MRT4530_91611C.1
gaaacataaatttagttctctctactgactaatacacccatctttcatttaggcagaaaaataataaccgatagttagccagcaagcctactggctaccaacagagccttcagttaaattattcagatttcagaatatgcagaggaacgaggcctccccgttttggttcatttaaacgacggaggagaggaatttatccagctgttaaccaacgcgaaagcatcaacactgtcatcgctgacattctcgtccatattcattagtccagtcaagttattgcctccagaagtagtttcagctattactggtagagcctgagatgattgagcaatacagtacccaatagcagtcatgtcgatctgtctcatagtacctgcttgattaccttgatagccattgaagaatgatggatcaacaggaatttgttctgatcctataatgaacccacaagcacta

SEQ ID NO: 93205 - DNA, 719 bp, Oryza sativa
  unsure (1)..(719): unsure at all n locations
  Clone ID: PAT_MRT4530_91612C.1
ccggccggggttgtgaaagtggcagattttggtgtagctcgttttcaggatcaaggaggtaacatgacagctgaaactggaacatacagatggatggcaccagaggtcataaatcatcaaccctatgataacaaagctgatgtgttcagttttgctattgtgctttgggagctcataacgtccaagatcccttataataccatgacccctctccaagcagctgtaggtgtgagacagggattgcgcccagggctcccagaaaatgctcatccccagctattagacttgatgcggagatgttgggaaggcattccatccaaccgacctcctttctcagatatattagccgaactagaggatcttcttgcacgtgttcagggaacttcaggagaggccagccaacgacaagatgactcaggagccaaagattgatcccctgcatatattacctgacgtttgtctcgttcgttcaccgatgtgcttgtttaggatgtgtgcctcactaatgttgagaggagtagagcgtaatcatttttggcttggttttgcatttttatatgcattttgagcaatcatcttgnggcctaattttttcggtctcagttctcattgttcttacatagaggaaattggatcggcctagcttgatatatcaacgacctgctactcagaatttaccgccgtgcccgtctattatatgaagatnggatgttttgggc

SEQ ID NO: 93206 - DNA, 6343 bp, Oryza sativa
  Clone ID: PAT_MRT4530_91613C.1
atggatcggcaatggatgtatgctgaccggcggtccaaagagtttattgacggtatgcactgttttttgagagtggccaaagctaacaggcaaaggagttttatttgttgtccatgcaataagtgtaagaatcagaagaagtattctgcatctagaactattcatttccacttgtttgagtcggggttcatgccaagctataattgttagacatcccacaaagagcaaggtgttgaaatggaataaaatgaagtggaagacgacaatattccagactttgctcagtacattggatttgaaggaaatcaaacgggcgaggaggaaagggatgctgatggtaacgacgttgcggatgatcttggtcagatgttgcaggacgccaaggaggactgcgaaagtgaaaagggggcccataaattggacaagatgttagaggaccacagaacatcgttgtactcaggttgcgagcaggggcacaaaaagttggataccactctggagttcttgcaatggaaggcaaaaaatggggttagtgacaaggcatttggcgatttattgaaactcgttaagaacattcttccggagggatacaaattgcccgagacaacgtacgaggctaagaagatagtctgcccgctaggactggaagttcagaagattcacgcatgtccgaatgattgtttcctatatcgcggtgaggagtacgagaacctagaagcatgccctgtttgcaaagcactacgatacaagattagacgagacgatccaggagaagttgacgggcagctaacaaagaagagaatttctgctaaggtgatgtggtatttccctataataccacggctaaggcgtttgttcaggaacaaggggaatgctagaatgatgcgatggcatgctgaagagcgtcaacaggacgggatgctgagacaccccgccgatggttcgcagtggcgaaacatcgacagaaaatttaaagaatttggaaaggacgcacgaaacatacggtttggtttgagtatggatggcatgaatccttttggagagatgagcagcgaccatagcacttggcccgttacgatgtgtatctacaacctccccctggctatgcatgaagaggaagtacataatgatgccgattattattcaaggccccaagcaacctggttacaacatcgatgtgtacctaagaccactggtcgaagatcttaaactgttgtggaagaaggaaggtgtccccgtgtgggacgaggacaaacaggaggagtttaacctacaagcactgctgttcgtaaccatcaatgattggcctgcacttagcaacctatccggacagtccaacaaggggtacaaggcttgcactcactgtatggatgaaacagaaagtacgtatcttaagcactataggaaggttgtatacatgggtcatcgtcgattccttacagcaaaccacccggtacggaagaaaggcaagcacttcgaacataaggttgaccaccgtacgaagcctaaacatcgcagcgggaaaacagtgtttgctatggttaaagatcttaaagtagtgttcggaaaggggcctgaaagccagcctatagagagcgaagatggtcacacggcgatgtggaaaaagaactctatattttgggagttaccctattgggaattcttggacgtccaccacgcaatcgacgtgatgcacctcactaagaacctttgcgtaaaccttcttggcttcctaggtgtatacggaaagtcgaaagatacactggaagcacgtaatgatctgaagcatatggaacaacgcggcgaccttcacccagaaccaaaggagaaaggaagccattacttgagtccagccagctacactcttagcaaggcagagaaggaaagtatgtttgaatgcttggaaagcataaaggtactgtctggatactccacgaatatcaagcgaataataagcacgaaggagaaaaagttcacaaacctaaagtctcatgactgtcacgtgttgatgacacaactgctaccagttgtaataaggggtatccttccagacaatgtccaggcaacaataacaaagctatgtgcattcatgaacgcaatttcgcagaaggtcatcgatccggatagattagaagccgttcagaatgatttggtgcaatgtctcgtcagttttaagttgatatttccaccttcatttttcaatataatgacgcatttgctttgtcaccttgtcaaagagatcagtattctcgggtctgtgtacatacacaacatgtttcgtttcgagaggtacatgggcgttctgaagaagtacgtaaccgtgctcgtccagaggcaagcatcgccaagggttatggaacagaggaggtcatcgaattttgcgtagaatttaccgaagaccttcgcccaatcagggtacctgaatcacgccatgaagggagactacggggaaagggaactctcagaaggaaagcaataatgaaggtagacaataatttattccgtaaagcccatttcacggttctgcaacaatcttcattggtagctccttacatcgaggagcacttggctctagttcgcgccaggaacatcggtaagtccgatgcatggattacacggcatcacattgatactttccccgcgtggctacaacaatatctcatgggtaacgagtcgatcaaccaacaacttgccttcctggcgagaggaccgtctgggtcgatcgcgacattccagggatatgagatcaatgggtatacattctacacgagagcccaagacatgaagagcacgaaccaaaacagcgatgtttgtgtcgatgccatgggacacgatggaacaactggcacgtattacggtgccatcgaggatatatgagaacttgactatggtcctctcaaggtctctctgttctggtaccaatgggttaggttgactagtggaggcgtaatgattgatgacagtgggatgacaacggttgaccttaacaaggttggatactcggacgaaccttttatccttgccaatgatgtaatgcaagtcttttacgtgaaggacatgtctagcaaaggaaagaagggcagagggcctgacgagcctaagcgtcacgtgattctcccagctcgccctcgtcttctccaccaacacttagaagtttttgcccgatcgatctctctcgacttctccttcgccacaactgcgtagggcatccctgcgccgacgccgccgccgtatctcgccgtcgtctcgcgctcgtcgtcgtcgccgcctcctccgccgccgcctccctctcatcagctatcagatgtttcctgtatgaacagatggctgatcgcgatgaggaacagatattgtacaatacaatcgcggagggaagtagccagtactggaacgaagaagaggggaacgaggatccaaaccagtatttgaatgaggaagggaacgtggagagggatgcggaggggaaccaggaggggcacgtggaaagggatgtggaggggaactaggaggaggaggttagtggaagtcaaccccccgttggacagaggagggcacgcgggcaacgaggtgccgcgaagaagcttgagggtcggcacatcataacggaaatggatgaagacggccgacctagtgccccggcagaagccgccaagaactatatacgtcatagcggttgggttgtgtgggataacgtgcctgtcagtacggtgtactggcgcagaacaagggcacgcggagatcatgagagctttgtcccagattcggagaaagagatgctgtggaccacaatgctcgagacattcacccttcccgcgggtacagaggacaaagtgaaaaagtggactctaaagaaaatggcacaacagtttcagagcttcaagggagatgtgtaccagaaatatatcatgaaggggcagacaccgaacttcgacacattctcaaagctaagagatcactaggacgagttcgttgcatataagacaggtgaacaagggcaggcgatgatggaaagaaacaaagaaaatgccgccaagaagaagtaccatcaccacttggggtcaggcagctatagcgtcgtgatgccgaagtgggaggagatggaggctagcttgcttgagaggggtatcgaaccggccaccgctaattggccggaacgatcgaagttctggtactatgctcacggtggaacgctcaacccagctgatggctccctagtcttcggcgatcagatacgcgaggctgcgcgtcgactaacagacgcagtggaagcctcttctcagggcacgttccgaccggacagagagaaggacgagctgtcactcgccctgcagactgcattatccaggacgaacacgagggaaaggggtgattccttggaagattgggttcaaggaggacatccacacgtacaggagtcggataagaagcaagagagataccgaggcgaagattgcagatctagagttcagggtatcgagctacgagctcagcatgcaagaggaggtggcaaggaaggttgatgaacgcatggccgcacatcggtcccatgatccccagccgaccattccttctgcaatggtgagcccgtcaggaaaccgtagcagctgcgcctcaacggggcaggtaggatcacagagcatggacgccatgcaaacccaggacgaatccacctgccccgttgatgacatcactcagcagacaccatgtgagctgtatattcctttcaagaacttatcaataaaggtggcgtcgggcatggccatcccaacagacctttcaggtacttaccactgcaggccgattccagcaggatactccaaggtcgaacttgagttggtcgaaggcgcgtacgaggacctcaagctggattaccctagaggagacggtgagacgcatctacgagacacaagccacgccattattctatggcgcaagcggtacatcatcctccctgggcgacaagcggcgtctcgtgcaccatctcctccggctccgccatctcctcctcaggctcctgcaccgactcctcctcaggctcctgcaccgactcctccgcaagttcctcttccggcaccttccaagtcaagggcctcccaagctccaccgcctgcccccacaagggcaacgaagaaggcgaaagttgacgccgccaagaacaaggacccggggtacgattgcacgcaagaggagcttgacgcttacgtggcatcagaagtcaagagacaattcaagcctcgaagtctagtaaagaagattcctttagacccgagtgtcaggaacttcttcaggggtatgtctgcacctgccaaggaggccataaagctatcggactatgagcgaacgcttaagaaagcatcttctggaagtccaaaccagtccctcagcttggagagcaaccaaaccaggagatcgagctgttggtgaccggtgaagattttggaatacaagaatttattaatgacaccgggctaactacggatcaattgctaggagacgcaccaatcgaaaaggcggaagtgaaatacatctacgaactcggtaaaccgcttgtcaagcctgagctgctgcagtccctacccacacaaatgtacaagttccatcagctgtacatggagatgagcgccaccggtagagagatgatcggagcgaggatcagggacacggacttcttgcaaggatatgacattctctggatcaatttcaagggaatctacgaactatactagctggacgccctcgacgtctctattatgagttgctggattttaatggagattcaaagggcccgacggcggggggttttcgatactggattcatcgaccctcggaaagtaaaagtcgcaatgctcgacgaatatccgcaagccacagaggacaatctcgtccatctcctgaaggcgtagcattacaagacgttcatactgttgccgtacaacacagaattccactgggtgcttttacacttcgacctggaggcctgcaccgtcaacgtatatgactcaatggataaaaaagagtctacgtttgataaggttttcgaacttatagacagagcttggtatcggttccgtcatttagtccgcggcaactggagagaaagacttaggcggaagtttaaatttccttttattcgcatgagggataacctgatcacacacaaggaatttatcgcggtggttcaagaacaactcatgggattcatcaacgaacaaatccttaatcccaagggtgaattctactaggacggaaacacaattcataggcaatggcggccacgtagtgggagacaccaacaacaaggccttccgggaggtggcgcacgacggtgagcgccgccgtcttg

SEQ ID NO: 93207 - DNA, 2087 bp, Oryza sativa
  Clone ID: PAT_MRT4530_91614C.1
ccggccgggacatcaattagcttaagtttccattagcatatacagaaagctatggcaactactgtttcctctcagttttctatatgcttttgtgtacttctcttggtccatgattctatggcccaactattttatccaagaacaaacccatggcatagtcctcatcaaggaagttttagtgagtatagatttgatagattacaagcatttgagtcacttcagaaagtgagatcagaaggtggtgtgactgagtatgttgatgagaggaatgaattattccagcacactggtacgtttgtcatccgacgtatcattcagcctcaaggtcttttggtacctcgatacaccaacactctcagcatggtctacatcatccaagggagaggtactatgggcttaactttcctcggttgcccagcaacttaccaacaacaattccaacaattttcgcctcaatggcaaagtgaaagccaaaagtttaggggcgagcaccaaaagatctatcaatttagacaaggagatattattccactcccagctggtgttgcacattggttctacaatgatgctgctaacaacaatagagttcaacaagtatatggtagctcaattgagcaacaccctaggcaaaatatattcaacagaatcggtgttgagcaactaagtgaggctttaggcatcaacacagtagcagcaaagaggccgcagagtcaaaatgaccaaagaggagagatcattgttgacgggttatacccgaccgcggtatttaagggacgtaaggtacgactgataccaaggaatacgcgagagtggaataagagagcatgggacaaggatttttatactggttcaggccctcaagatcttcccgaggacatggtgaagagcagcaccaagaaggtggtgatagacaagccaagcatggctagagacatcccgacctcgttgtgcgacctgccccaagctgtcagggatgggattgtaaatgaagtcgcggccacaaaagacgtggtggagatggagatagggtcctctaccgccgagaaggtggctaacatggcctctcaacctgggtctagtggtaccgttggatccaagaagaggaaatggggcttcggagtggaccccacgggtggtgtcctgacaaagggtacccattccttgacctcctcacccgataatgcccccactagtggaaggctcaaaccaatgagatttatgtcgaagagcaaggccaaggccgcccctaccatctccaatcagaacatggggaaacatgacgaggctagttcccaaccagccacccacatcatcgtctccccctccacagcccccctcccctccgttgctgcagttgtcttgccgcctccaggaacggcgttcaaccatctagctagtgcctgccaagaggtactcttttcagctaaggcagccagcacagaagtcaaccggctcatcgccgagctcactgctaccaacgagaagttaagcaaactcaaggaggagttgaccacggcgaacaccaacaacgaaagcctgcgccttctcattaaagagaattcggaaatgcaccaagagggtcagaaggccctagcggaggagaagagcaaaagggaggccctttatgccgggctgaaggagaacttctttgccttcaatgaggtggcgaagcaacttggtcgtggggtgcagccgccaccgcacttcgatgatgtctcgctactagcgtccattggcgagctagttggcgagatggagaaggtccccgctgacatcatccagaaagctgactgggacacccgcatcgccctcaagactggagcctgccacacccttgcttgtatctcgtccaagcatccagagctggacctcaacaaggaggtccacgagggtgtggctgaggaggagagggaaaagctcatggatcaacttgagaagactggcgaggcggtggctagcttctatctcgactagtaattttaggcaatcttttaaaagtcgctttctagtgctgtagtgacttaaatataatcagatgcattaatatctcctttatcgatattatataatcagatttttttccatgt

SEQ ID NO: 93208 - DNA, 1782 bp, Oryza sativa
  Clone ID: PAT_MRT4530_91615C.1
atggctgcggcggcggcggagggcggcggtggtggcggcgtggaggagggcgtgggggagagctcgtccccgccgcgtgaccccgcggcggcgcccgcggcgtcgggcataaatcgtggtgcctatgataacaaagctgatgtgttcagttttgctattgtgctttgggagctcataacgtccaagatcccttataataccatgacccctctccaagcagctgtaggtgtgagacagggattgcgcccagggctcccagaaaatgctcatccccagctattagacttgatgcggagatgttgggaaggcattccatccaaccgacctcctttctcagatatattagccgaactagaggatcttcttgcacgtgttcagggaacttcaggagaggccagccaacgacaagatgactcaggagccaaagattgatcccctgcatatattacctgacgtttgtctcgttcgttcaccgatgtgcttgtttaggatgtgtgcctcactaatgttgagaggagtagagcgtaatcatttttggcttggttttgcatttttatatgcattttgagcaatcatcttggggcctaattttttcggtctcagttctcattgttcttacatagaggaaattggatcggcctagcttgatatatcaacgacctgctactcagaatttaccgccgtgcccgtctattataatgaagattggatgttttgggttccattttaaggaataagggatcatggtcaggttcatctcactcatcagctgcagaaagaacactgccattccaagtaaaaggtggtgaatgggaaattgacaaacgactgctgaagatgggagggatgattgcttctggatcttgtggggatttgtatcatgggacttatctcggtgaggatgttgctgttaaaattctaagatctgagcatttgaataagaatgtttggaatgagttcacacaggaagtatatattctaagggaagttcagcatactaatgttgtgcgattcattggtgcatgcacaaaaccaccacaattttgcataattactgaatacatgtctggaggaagcctgtatgactttgtgcacaagcagcataatgtcttggaccttccaactctgctgaagtttgcagttgatgtatgcagagggatgtgttacttgcatcagaggggtattatccatagagatttaaagagtgcaaaccttctaatggacaaagatcatgttgtgaaagtggcagattttggtgtagctcgttttcaggatcaaggaggtaacatgacagctgaaactggaacatacagatggatggcaccagagcattttttcagtccttgttcccttggtgagagaatgaattgggataaagaggagatagtcataaatcatcaaccctatgataacaaagctgatgtgttcagttttgctattgtgctttgggagctcataacgtccaagatcccttataataccatgacccctctccaagcagctgtaggtgtgagacagggattgcgcccagggctcccagaaaatgctcatccccagctattagacttgatgcggagatgttgggaaggcattccatccaaccgacctcctttctcagatatattagccgaactagaggatcttcttgcacgtgttcaggaacaacaggaacacagtaatcaaatgaaagaacacaatagttcatcaaatctcaagcttagtaatgctggcatgcttggttcaaactacatccaagatgggaacatggaccttgatttctga

SEQ ID NO: 93209 - DNA, 1260 bp, Oryza sativa
  Clone ID: PAT_MRT4530_91616C.1
aaaaaaacttcttttttattccccatccactcgtagcgggaaagagaagagaggggctctcccggcgctcggagcgcagaagcagcgagccgcttcccgaagggagcaagaaaattcgcgcccagtttggtcggcatgggcgcgaacggccacccgccgccggcgagcgccgccgcgcagaacgggtcccattccagtggcggcggcggaggaggagatggtggaggagggggagcaaaccctagccccggcggcacggtggcggcgctccggcacgaccccggcctggcgcgggagtggtcgccggaagagcagtccaccctcgacgagttgctcgtcaagtatgcatctgatgctcctgtaattcgttatgcaaagatagccatgaagttgccagacaaaacagttcgagacgtggccttgcgttgtagatggatgaataaaaaggaaagtggaaagagaaagaaagaggaccacagctcctcgaagaaaagcaaagataaaaaggagaaggtttcagattcttcgttgaaaccacctgttcatatagctggaaggcctaatgttcctccgtacccccttccagctctgcccattgacgatgatgaaatttcttccaaagcaattggaggtccaacaggagaaatccttgaaactaatgcccaagttttgagtcaaatttcaaccaacctcagcactatgcagatacaggataacatctctctactgtgccaaactagagacaatatactcagggtcttgaaagagataaatgatgctccagatatcatgaagcagatgccaccgctaccagtgaagataaacgaggagctagtcaactcaatgctccccaggccaactgtacctatgcagtagtgaactagtgatagtgaatgaacatatatcctcagtagtctcaagagctctttagaatagacagctaaaataaaaatgccagccttgttctgttcgttcattgtgtagctcctctggtccttgatctaatctgttcctttcagcatgttccgtctagtactctagattgttgaccttccaaccgttctccaaatcagccggttggaacatgtaccatactgccatgggacatggtttccttctacagcagtgtcaccttcaaactctggcatgttttgtaatctatagctgtttagcctaatatgatggaatattggaatgggaagccaagatttaccctctgcggttctcttaaatgaggcacagtgtatgcattgttttgcc

SEQ ID NO: 93210 - DNA, 206 bp, Oryza sativa
  Clone ID: PAT_MRT4530_91617C.1
aggcacccttatccatgcgattcactccacatccatatctacatcacacaccaccatccaagtggcgtggtggcaccaatcatcacccattttggtgcaccacacccagggcgcacaccactcacacacccaggtgctcccacggcatcccagggcacagcacaccattcattatggggtgatccaccaatctccatctgtgtccc

SEQ ID NO: 93211 - DNA, 381 bp, Oryza sativa
  Clone ID: PAT_MRT4530_91618C.1
tgctgcgcctgctggtgccgccgcggcgttactgccgggaccgacgcctcctaccatgcattggatggtgcaggagcgggaggtgaaacgactatcggtgaataagctgtataccagttaaaggctatgcttagagacagcttgtatggaaagacataatcgggtctagagcggaactaacacatgggggatgcgtcaaaaaagctgtaccacgtgccaaactacaacctattatttactctggatgaagcacatcaccaaaggctgggtgtctgtagatagtggacatgtttggaccattgtgccaagactgcaagaagtatatacacatgctgaagatggccatattagaactcagtttgacacaagtagaagactagg

SEQ ID NO: 93212 - DNA, 570 bp, Oryza sativa
  Clone ID: PAT_MRT4530_91619C.1
aaacccaaaatcggaggtagctacagccgaatcccccaacagttgtgtgcaatttcttgcttgcttggttttcttttccccccactcggatcgatctcgttgttgtgtgaggttttttgagctttggtcgatggcgtcgatcgtgctgctgctgtcggagctgctcggcggcgagagcaccagcgtaatggcggctgactggtacatgagcggacacagcctccgggagttccggcccgtggcggctgctccggcggcggcggcggcggtggccaagtgcgagcggccggcggccgaggcagcgggggagaagaagaaggaggagtcgttcgaggatctcgccgccgtgtcccggatcgcggtcgacgtgatgtggccttagagcatccgtcgccgccatctcgccggagaagaagaaaaagaaaattctattcttgagttttttttctctatttttctccttttttttggttgccaacgaggcatgtgttgtgtactgttctttttgagatcagatttgtaaatatacgaagtgattcttggatgtttttcaaaaaaaaaggggggccg

SEQ ID NO: 93213 - DNA, 249 bp, Oryza sativa
  Clone ID: PAT_MRT4530_9161C.1
atgccccgtgaagaatggctcgctctcgctccacgtgaagtgaagccgcgcaagaatgggccaagagacagaaggaaagcacatggggcgccccatggcaaatgctacggtacactagcacgcatccacctcaggtcgtgcgagcggcatcattctcttcacccaagcagaattactgagctggcacccctcaatcatatggcagaaaagcctcttagccagctcgacgggaaagcgttcctggggtag

SEQ ID NO: 93214 - DNA, 159 bp, Oryza sativa
  Clone ID: PAT_MRT4530_91620C.1
atgacaaatgaagccgagctgtggtggctagctagggcagcgattcccgccttggttgttcctgtagttggaacgggtacgatcagttcgtctgtgtcaccgctcctttcgttctggcgtgcacccaactccggcggcagggcccactccggcaagtga

SEQ ID NO: 93215 - DNA, 1100 bp, Oryza sativa
  Clone ID: PAT_MRT4530_91621C.1
ccacgcgtccgatcgccacaaattcccccgcgccgcgccagccacacccacacgcgcgcgccggccagcctacgcttttcccctccccccctcccccgcaacgagccgcggcggaaggaaggatggggagccttggcggggaggagggggcgaggccggctgcggcggcggagggggcgcggaggccgaggttcctgtgcctgcacgggttccggacgagcggggagatcatgcggaagcaggtggtggggaagtggcccgccgacgtcacggcgcgcctcgacctcgtcttcgccgacgcgccgttccccgccgaggggaagtccgacgtcgagggcatcttcgacccgccctactacgagtggttccagttcgacaagaattttacagagtacaggaatttcgacgaatgcctgaactacatcgaggaattgatgattaaagaagggccttttgatggactgatgggtttctctcagggctcgattctatctggcgcccttccgggcctccaagaacaagggttggccctgactagagttcctaagatcaagtacctcataatcataggaggcgccaagtttcagtcgccgacggttgccgagaaggcgtacgccaataacatcaaatgcccctcggttcacttcctcggtgacactgactttctgaaaacccatggcgaaaagcttatagaatcatatgtggatccattcatcatacgtcatccaaagggccacactgttccaaggcttgatgagaagagtctggaaatcatgctccgtttcctcgataagattgagaaggagacagcgctcgagcattcatccactgatgttgacgaaaaggaaatgtacttgtgaagggtagaagattagtgtccagtccagatacacaccaaattcatactatagacaagcatactgttgtacttgtatcctccttatttatgtggtggtacaaagagttgaaaactattgaataatcacgcaaaagaatggatgtgtactctttaatttgaaaaaaaaaaaaaaaaaaaaaaaaaaaaaaaaaaacaagaaaaaaaaaaaaaaaaaatattataaaaaataaaattatttatg

SEQ ID NO: 93216 - DNA, 320 bp, Oryza sativa
  Clone ID: PAT_MRT4530_91622C.1
gtgggggaagtagcacgcagggggaaacagaggggaggcgacgggacggggggagcacacgacaaagggccaccaccggaggcaaaagaatccccaaatggctccaaaaaaaaaaaaggtaatgcctaaacagaacggggccacacggtgtgggacagggtggttaagaaaaaacccggggagcaaattgtgaaaggggggcagggtaacagcgcgccagattcagacagagacgcgcatcggcgtacaccgagctagcttagctgaaggcgatgcgtcgccatggcagcacggaggcggaggggctcacttggcgggga

SEQ ID NO: 93217 - DNA, 732 bp, Oryza sativa
  Clone ID: PAT_MRT4530_91623C.1
ggccgccctttttttttttttttttagataacaaccttgcattttttttttttttttttttttttggaagaacaaaagggcaaaagcattggccaaattcattacatgggtgaagggcaggtaggtgctcagagtgcttcctattgtttgtacccccagaaataaacgtcccaggtaacttacagattacatttcagtagcatcatagtagcaaattatttcgcgctccaaaatgcacctcggaaagtaacagccaacatggcaataatcgttgcggaacaaaaaattttctagccaaactgtaacaaaatagacagcacaatagggactctcaccccagtgcagaaggtagatagatatagagagtggtctcaggctcttagcctatgaggagcttgttctcctccaagaaactgtaggtagggacctccaggttgaatggagcggggcccttgcgaatcctgccagagatgtcgtagtgggagccatggcacgggcagaaccaacctccgaaatctccagcattggggagaggaatgcaaccaaggtgggtgcagacgccaatgaccactagccactctgggttcttcacacgctctgcgtcctgctggggatggcgcagggacccaacgtccacgctattgccaggcgctatgtcgtcctctgtcctccttctgatgagaactggcttcccacgccacttcaccgtcactgtggtaccaggctcaatgc

SEQ ID NO: 93218 - DNA, 614 bp, Oryza sativa
  Clone ID: PAT_MRT4530_91624C.1
ccggccgggatgcgccaagcctgctttgtttacttgagccttggaggtgtcttttaaatgggcctattgctcttctgtctggtctgaatcctcgaccattgagtttagtggcacatttctttgctgtcgctatctatggtgtcggtcgcctaatgcttcccctcccttcacctaaacgcatgtggatcggcgtaagactgatttccagtgcatgtggtataattttccccatcatcaaagctgaaggtgtgaggcatatgttcttccccgccactgtccctgcctattatcgtgctcctcgtccaatggagtaaggggggaaaatgaaaggagaagcgaagagaaaatccctgccactgtcctgatcggcggatgtttttcgtggatggcaattttcctgtgtaattggtagtagtcgtcaggccgtgaggttgtgtgtgctgttgttctaatggaacgaggggacctgtatacaccgtcacattccctgtacacttgccactttcgttgttccgtcagggatgcatgtcgactgctaatccttaagctgtatatcccccatgaattcatcatgattgcgtctttgctttaaaaaaaaaaaaaaaaaagcggcc

SEQ ID NO: 93219 - DNA, 1803 bp, Oryza sativa
  Clone ID: PAT_MRT4530_91625C.1
atggccgtcgccagcgaggccgcttgtcgtcgggcggctagctgcttctttgagggcctagtgatgcggatgcatcagtatggaaagttgcgaggccatgatggttgtgttaatactgtcagcttcaatcctgctggtaacctccttgtgtctggttcggacgacatggacatcatattatgggattggcttgctaaaacacaaaggctcatttacccttctggccatcaagaaaatgttttccatgctcgtgtaatgccatttacagatgatagcgccattgtaactgttgctgctgatggtcaggttagagtgggacaactgaacgagggtggtgaagtcacaaccaaacaaattggggtgcacgatgatcgtgcacataagttggccattgaaccaggaagtccttacatattttacagttgcggggaagatggtttggtacaacattttgacttgcggaatgattcaccaatgaagctcttcagctgctattcattctcaaatagcaggcgtcgtgtaaggcttaataccattgccattgacccttggaaccctaattatctttcaattggtggttctgatgagtatgtgcgggtatatgatttgaggagaatccagttgggtgcttcaaatgacatgaaccaacctgtagataccttctgccctaagcaccttatgggtgggaaggtccacataactggtattgcatactcctacgcaagggagatacttgtctcttacaatgatgaacatatctatttattccaaaacaatatgggtcttggtccaaatcctgaatcagcgcaagcagagttcttggacaggcttgagcagccacaggcatacacaggccacagaaatttccgaactgttaagggagtcagtttttttggaccgaacgatgaatatgtcttgagtggatcggattgtgggaatgtatttgtatggagaaagaagggaggtgaactattgaggatgatgcatggtgacaaaagtgtagttaattgcattgaaccccatccacattttccgttcctagctactagtgggattgacaaaactgtcaagatttggacaccttcagcaaataaagtgatgtcgctgcctaaaaacgcaaagcaaataatagcttccaacaagcgggcgagagaaattgatgcatctcgaccggagctgacgctttcatccgacctcatcatgcatgttttgaggttgcagaggagacagtctgaattgtacagggagcatgaaccagctactgcagatttggcaagtgatgatgatgagtctttcttcgctgggtttgatgatgccaataggaatggcttagcaaacgatgcaacaagaggaacacagatactcatgatacgtgccggcaagattaaacggttaggacttaagagtgtgacgacctaccttgatagtgttgtaaaccaggagtgttactgggtgttttcatctcatgtcggttttgtccggagccggattcaaagtctcaaagatcgtgaatccaaaatggataatgccaaatgtcacctgcaagatcatctccaaggatttgctgatgcggttttgggtaatgggtttggcttcccagaaaaaacccatgatcatctcccaagaagtggctatataccagctaaaattaatactcgtcggttgctggcgacgtgccagttgccacaacgccgcggcctccccgatggcatccaacaaggtttggcaaaggcgtacacggcgttctgggtgggcaccgccgtgggtgaaatacgttgccgccttgccgcgtggatcacatga

SEQ ID NO: 93220 - DNA, 720 bp, Oryza sativa
  unsure (1)..(720): unsure at all n locations
  Clone ID: PAT_MRT4530_91626C.1
actcctatgggcgattgggaccctcgaggccggccgggaaatccccttccgctttgtctcgtttcctcctcctgccccctcggcactgcaccgccgcagcttccaccatggccgtcgccagcgaggccgcttgtcgtcgggcggctagctgcttctttgaggtcggcaggcaagagatcggctcctccaccccgcgcgcctcctcgcgccgaatcagcggctccgagggcctagtgatgcggatgcatcagtatggaaagttgcgaggccatgatggttgtgttaatactgtcagcttcaatcctgctggtaacctccttgtgtctggttcggacgacatggacatcatattatgggattggcttgctaaaacacaaaggctcatttacccttctggccatcaagaaaatgttttccatgctcgtgtaatgccatttacagatgatagcgccattgtaactgttgctgctgatggtcaggtcagagtgggacaactgaacgagggtggtgaagtcacaaccaaacaaattggggtgcacgatgatcgtgcacataagttggccattgaaccaggaagtccttacatattttacagttgcggggaagatggtttggtacaacattttgacttgcggaatgattcaccaatgnaagctctcagctgctattcatttctcaatagcaggcgtcgtgtaaggcttaataccattgccattgacc

SEQ ID NO: 93221 - DNA, 405 bp, Oryza sativa
  Clone ID: PAT_MRT4530_91627C.1
atgaagccccagaagctatctgcgcgtcggctgctgcgtggggcccatcagatcatgcggggggagccacgtggttttgagggcgacctcctccctctagctgggagggggcagccgccgctccaccccgggctcgatccccctcggggagaaccacgtgggtttgagggcggcctcctccctctagctggaagggggcagccaccgctccaccacgggctcgatccccctcgggaggagccacgtgggtttgagggcggcctcctccctctagctgggagggggcagccaccgctccatcccgggttcgatccccctctggagaagccacgtgggtttgagggtggcctcctccctctagacatgatacccccgggctcatatcaccgacaaatacttaattaa

SEQ ID NO: 93222 - DNA, 213 bp, Oryza sativa
  Clone ID: PAT_MRT4530_91628C.1
atggcggtttgctttgaaggaacagtagtgaccaacatcatttttagagcctttttcacataccttgaacttcaaatgcatccagggaaagctacaccagtcttcaacatcatcactctactaggcgtggaaactagacctagggggatgtacaccagaggcaatggcggcgacaaaattggggatgggcagaagtggcctaggcaggcgtag

SEQ ID NO: 93223 - DNA, 494 bp, Oryza sativa
  unsure (1)..(494): unsure at all n locations
  Clone ID: PAT_MRT4530_91629C.1
tttttttttttttaaccaaaaaaagggcggccgcccttttgttttggggtttttttgggnnttttttttttttttttttttttttttttttttttttttttttttttttttttgggaacaaaacagggggggcatttttttaggggttaataaacttaaaacaaaaccgccccaaagtttcacattcttgggggtttttttttttgatcccccttttctttttctattagccatcactttaggggctcgttttccgactcatttaaaaagcctgggtgggttttttgttgttttttagggggggggggcccgagcttttttccccttttttttttaagggttggggcttggtcccttgattggggggaaggttttgggatcacattccctggggtggggcggaattttgggtttttccctggagggggggtcaccctggggtttgcattggtcttgaaagaaatggatgggcacccttcagggcttggtttttt

SEQ ID NO: 93224 - DNA, 988 bp, Oryza sativa
  Clone ID: PAT_MRT4530_9162C.1
cggtggtgcaccgagtgcaccgcaggatgcgccgaggggcatatcggtaaatccacgcgcccctgggaacgcgcgtccacttccgcggccggggggtaccccacctcctttccccctctcccaccccccccgacccccctttttttctcacccctaacgccattttttttttttccccccccccaaccatcccccatctcccaccccccctccccttctcccctcccccctacccctttattcaaccctccctctccccccctcctctctcctccccctcctatcatttcccacttcccttcctccccctttccctctcctcccccctttctctttttccaccacccccccttcttcccccccccccctctatcttttccctctcccccccccccccctctattctctctcccttttttcccccccacttattttcccctccttccgcccctccctttcccattcactcgttcctcttccccccacccctcctacccacccaccccacgtctctttttttttccccccctctctttatcccccccccctcttctcccttccttttccctctgttcatccgttttcccccttctttacttactctaactccctccgaccccccccctgctacacctaccatcttcctttctctctcccttcctcctctatcacctctatcccattcttcctcctcactctccacttactcccccctcttcccccacatcctccctactcacatccctttcctcacttttctctcctctccccccttctttacaacactcccttccttctataactgggtacccggctttccctccgagtctaacgtatcgataagcttgatgctcagcccaacccacgcgcggcgcgcgccaccccttccctctccctgaacgtgggccccgcacccacccacccacccccacgcacaacacaaatggcgccaacgccgtcgtcgtcctcttcctcctcgctctccatg

SEQ ID NO: 93225 - DNA, 412 bp, Oryza sativa
  unsure (1)..(412): unsure at all n locations
  Clone ID: PAT_MRT4530_91630C.1
atttttacgattgttgatttgaggggntgcggaagagcacctgcacaacggcgtggagggggaggcgattgatctgcacggggtacatggtcgaatccgacgacaggtgattggagttgatcaaaccgaaaagtctcttattctcaacataagataaacaccggatgctctttgagatacatgtatatggcgcgggatagcccgtacagcacggaccgagttgagaggggaaccatatcagtgagggcgatgaacttcgagagagggaggaagggggacttagcaatctgagccagataccaatcaaccaggttagtgatagatagcttgaatctgcgggagacaccattgaaggagtcaacatgaccatccatggattactgatcatcatcgtctggtagcttggaagcat

SEQ ID NO: 93226 - DNA, 1684 bp, Oryza sativa
  Clone ID: PAT_MRT4530_91631C.1
ctaacctaagttctcccgaagaagcgtggtcggacttgggccaggcgaagtgacgacttcagctgcgttcacagctatcatggcgttctcgtttacatccggactggatgcttgcggagatgcaaccggagcgaactcgggtgaatcaggacgtccactctgctggacgtcctcaacatcaagacattcttcgtaaaaagagaggattaactcccctaaatccgccacctccgacatcacgtcctcgcgtgtgtcatcagctcctcccttcgccatggcctgctccaggtcgacctcaggatgagcgatcttcacgcaggcgaggacatggcaggcgcccgtgcgaactctggtacaagtctcctcagcgaccttcgcggcgtgttttgcaggcgctgcctccatcgccttgacgaggtcttgtagaccgaacgtcaaggaggtttcgtcggggtgctgcggaatcgaggagtagattccgagttcaccagcaacctggtgtaatcgggtgaagtccttgcgaagggattccctgattgtcgtcaggtggtcctccagctcagacgacttctcccgcaggcctcggaattgcctctcagaccaggatgatggggccgcgggggtcgacggaggcagcggtggagcgatggtgccgatcctcggggaaactgcggcggctgaagaggtccgagtcgcgaccactgttggcacgtcgctggtggccacctggtccccgctttgcgccgaggacggtggagaagccttgcgggaaacacctcccttcagcagccgcttctttggagttggtgggagatcgcttccaccgtcggagccgctcgcctgacgacgagtcttgcctccgcaagaagtgacggcccatttcctcttctttgcggtgccgctgttctcggcgagggcgatggcggcagtggtctcctcggagacattggacttcaacgaggctgaggcctggtgatcgacgagtggaccaatggcgtccgtcaggggcaaggcattgatagcgacggctttgtctgcgtcctcgaggttgcagactaggatggggatctcggcagctgtagatggcgagctcaccagtacttggcctacttgatgagccaccatgttgttgttcagaccccgcaatgagatccgtgtcacatctttcgcccccgtgtagtcgaacgccggatgtgcacgggcttggagcggctggatgcgacgacttacgaagtcttgagcgacgtcatacccagttagtccccgttctcgcagatcatcgctgatcccgacaaatgtctcaagggaaagggtcaatggcggtttggaggtccaatccgaagaccgttctggttggtcttcaggcacaacaagaacgggattggggttcttgatttcgagaaagaaccacctctgtctccatttgctccgggataaatgacattggaaagggatgtatcttgcccgcatatgatcgcggaggcagaatccgcaacaaccggatatcctccccatgcgaccaaggggaggattaggttcagtacttccttcatctcgctccagaacttcacggccgagaagtaatccctccacctgcagctccttcattgcggcggtgtcggtgattgtcttgccaagatccatggtcaccggaagttcgccggagaaggaggaagaaagctag

SEQ ID NO: 93227 - DNA, 5946 bp, Oryza sativa
  Clone ID: PAT_MRT4530_91632C.1
atggatcggcaatggatgtacgctgaccggcggtccaaagagtttattgacggcgtgcactattttttgagagtggccgaagctaacaggcaaaggggttttatttgttgtccatgcaataagtgtaagaatcagaaggagtattctgcatccaggactattcatttccacttgtttgagtcggggttcatgccaagctataattgttggacatcccacggagagcaaggtattgaaatggaagaagatgaagtggaagacgacaatattccggactttgctcagtatgttggatttgaaggaaatcaaacgggcgaggaggaaatagctgctgatggtaacgacgttgcggatgatcttggtcagatgttgcaggacgccagggagaactgcgaaagtgaaaaggaggcccataaattggacaagatgttggaggaccacagaacttcgttgtacccaggttgcgagcaggggcacaaaaatgacaaggcatttggcgatttattgaaactcgtcaagaacattcttccggggggaaacaaattgcccgagacaacgtacgaggctaagaagatagtctgcccgttaggactggaagttcataagattcacgcatgtccgaacgattgtatcctatatcgcggtgaggagtatgagaacatagaagcatgccctgtttgcaaagcactacgatacaagattagacgggacgatccaggagaagttgacgggcagctaacaaagaagagaattcctgctaaggtgatgtggtatttccctataataccacggctaaggcgtttgttcaggaacaaggggaatgctagaatgttgcgatggcacgctgaagagcgtcaacaggacgggatgctgagacaccccgccgatggttcgcagtggcgaaacatcgacagaaaatttaaagaatttggaaaggacgcacgaaacatacggtttggccccaagcaacctggtaacgacatcgacgtgtacctaagaccactggtcgatgatcttaaacagttgtggaagaaggaaggtgtccccgtgtgggacgaggacaaacaggaggagtttaacctacgagcgctgctgttcgtaaccatcaacgattggcctgcacttagcaacctatccggacagtccaacaaggggtacaaggcttgcactcactgtatggatgaaacagaaagtacgtatcttaagcactgtaggaaggttgtatacatgggtcatcgtcgattccttgcagcaaaccacccggtacggaagaaaggcaagcacttcgaacataaggccgaccaccgtacgaagcctaaacatcgcagcgggaaaacagtgtttgctatggttaaagatcttaaagtagtgttcggaaaggggcctgcaagccagcatatagagagcgaagatggtcacgcggcgatgtggaaaaagaactctatattttgggagttaccatattgggaattcttggacgtacgccacgcaatcgacgtgatgcaactcactaagaacctttgcgtaaaccttcttggcttcctaggtgtatacggaaagtcgaaagatacactggaagcacgtaatgatctgaagcatatggaacaatgcggcgaccttcacctggaaccaaaggagaaaggaagccattacttgagtccagccagctacactcttagcaagacagagaaggaaagtatgtttgaatgcttggagagcataaaggtaccgtctggatactccacgaatatcaagcgaataataagcacgaagaagaagaagttcacaaacctaaagtctcatgactgtcacgtgttgatgacacaactgctaccagttgtaataaggggtatccttccagacaatgtccaggcaacaataacaaagctatgtgcattcatgaacgcaatttcgcagaaggtcatcaatccggatatattagaagcccttcagaatgaagtggtgcaatgtctcgtcagttttgagttgatatttccaccttcatttttcaatataatgacgcatctgctttgtcaccttgtgaaagagatccgtattctcgggcctgtgtacctacacaacatgtttcctttcgagagctacatgggcgttctgaagaagtatgttcgtaaccgtgctcatccagaggcaagcatcgccaagggttatggaacagaggaggtcatcgaattttgcgtagaatttatcgaagaccttcgcccaatcggggtacctgaatcacgccatgaagggagactatggggaaagggaactctcggaaggaaagcaataatgacggtagacaacaatttattccgtaaagcccatttcactgttctgcaacactcttcattggtagctccttacatcgaggagcacttggctctagttcgcgccaggaacatcggtaagtccgatgcatggattacacggcatcacattgatactttccccacgtggctacgacaacatctcatgggtaacgagtcgatcaaccaacaacttgccttcctggcgaggggaccgtctgggtcgatcgcgacattccagggatatgagattaatgggtacgcattctacacgagagcccaagacatgaagagcacgaaccaaaacagcgctgttcgtgtcgatgccatgggacacgatggaacaactgccacgtattacggtgccatcgaggatatatgggaacttgactatggtcctctcaaggttcctctattccggtgccaatgggttaggttgactggtggaggcgtaatgattgatgacagtggtatgacaactgttgaccttaacaaggttggatactcggacgaaccttttgtccttgccaatgatataacgcaagtctttttcgtgaaggacatgtctagcaaaggaaataagggcagagggcctgacgagactaagcgtcaagtggttctcccaggcaaaagaaaaatcgttggagttgaggacaagactgacgaggattacgatcagttggatgggcaaccccctttcacggtgacgattgaccctagcatcctcctatcaaatgaagacaccccttactcacgcagcgatcacaaggagggaacaatagtgaggagaaaaaacatatattacttgaacgaggaagggaacgtggagagggatgcggaggggaaccagcaggggcacgtggaaagggatgtggaggggaaccaggaggaggaggctagtggtagtcaaccctccgttggacagaagagggcacgcgggcaacgaggtgcagcgaagaagcttgagggtcggcacatcataacggaagtggaagaagatggacgtcctagtgccccggccgaagccgccaagaactatgtacgtcacagcgattcggagaaagagatgctgtggaccacaatgctcgagacattcacccttcccgcgggtacagaggacaaagtgaaaaggtggactctgaagaaaatggcagaacagtttcagagcttcaagggagagctgtacaagaaatatatcctgaaggggcagacaccgaacttcgacacattcccaaagctaagggatcactgggatgagttcgttgcatataagacaggtgaacaagggcaggtgatgatggaaagaaacaaagaaaatgccgccaagaagaagtaccatcaccacttggggtcaggaggctatagcgtcgcgatgccgaagtgggaggagttggaggctagcttgattgagagggtggaagcctcctctcagggcacgttccaaccggacagagatagggacgagctgacactcgccctgcagactccagagcatccaggacgaacacgagggaaaggggtgattccttggaagattggtttcaaggaggacatccacacgtacaggagtcggatgaggagtaagagagataccgaggcgaagattgcagatctagagttctgggtatcgagctacgaacttagcatgcaagaggaggtggcaaggaaggttgatgaacgcatagccgcacatcggtcccatgatccccagccgaccattcctcctgcaatggtgagcccgtcaggaaaccgtagcagctgcgcctcaacggggcaggtggcgtcgggcatggccatcccaacggacccttcaggtacttaccactgcaggccgattccagcaggatactcaaaggtcgaagttgagttggtcgaaggcgcgtacgaggacctcgagctggattatcctggaggagatgcaccgactcctcctcaggatcctgcaccgactcctcctcgggctcctacacctactcctccgcaagctcctcttccggcaccttcaaagtcaagggccgccccagctccaccgcctgcccacacaagggcaacgaagaaggcgaaagttgacgccgccaagaacaaggacccggggtacgattgcacgcaagaggagcttgacgcttacgttgcatcagaagtcaagagacaattcaagcctcgaagtccagaaaagaagattcctatagaccccagtgtcaggaacttctttaggggtatgtctgcatctgtcaaggaggccatcaagctatcgaactatgagcgaacgctgaagaaagcatcttctggaaagtccaaaccagtccctcagcttggagagcaaccaaaccaggagatcgagccgttggtgaccggtaaagaaatgacgatagaacaatttattactgacaccggtctaactacggatcaattgctaggagtcgcaccaatcgaaaaggcggaagtgaaatacatgtacgaactcggtaaaccgcttgtcaagcctgagctgctgcagtccctacccacacaaatgtacaagttccatcagctgtacatggagatgaccgccaccggtagagagatgatcggagcgaggatcagggacacggacttcttgcaaggagatgacattctctggatcaatttcaggggaatctacgaactataccagctggacgccctcgacgtctctattatgagttgctggattttaatggagattcaaagggcccgacggcggagggttttcgatactggattcatcaaccctcagagagtaaacgtcgcaatgctcgaccaatatccacaagaaacagaggacaatctcgtccatctcctgaaggcgcagcattacaagacgttcatactgttgccgtacaacacagacgccgaggagcacctcggccgccgcttttcacggccaggatcccgccgggacacggttcccctcgcgccggtccttccagccgccgtccgccggttcccgctcgcggaacgccgccgggccgctgttccgccttcgtcccgaggagcaccgacgccgagctccccgcctttccccgcccctcgtcgccgcgtccttggtgagctcctcgtctccctccttgcctccctcctctgtctcccgtgcgcgctgccgcgccggtggccgccgccggtgaccacctggccgtgcgccgccgccccgctcgcctgggccacccggaccctccttgtcgcgccgcgtcgatctcgtgcgccgccgccgcccatgcgtgccgcctctcccgcgccgcccgtcggtcgccgtctccggagaccgcgctaccgccgcgccatggctcagctaggccggctttgtgccgtgctgtgccccagccgcgccgcccctggccgcccgatcggcttgggccgatccggaccatcggttctcgtggaccggtggtggaccgcctcggtggtcccgttcccgtcgtttcggaagatcgcgttcgcagggataagagttcagaagatccaagtgaagaagcaaggcaagtcacacattccccttgagcatgcaagggtgggcgtgatggagcggggcgggccctgggacggcctctgtcgcttccggattcacctaggcacgagaggggactgcccgttgcccgctggggatgggggtgaaacctga

SEQ ID NO: 93228 - DNA, 181 bp, Oryza sativa
  Clone ID: PAT_MRT4530_91633C.1
atgtttggatctgacccacttctgtatagggagaggagggataggaatgaacatatggagattactgaagataataagctgcagttgttacctggggagggaggctgaagagcttgtgaaagctgttcttgctgacgggaaggcgaagagcagcagatatgtggtggggaggtgcaagtag

SEQ ID NO: 93229 - DNA, 1767 bp, Oryza sativa
  Clone ID: PAT_MRT4530_91634C.1
atggctgcggcggcgaggaaggggacggcgacgccgctgggcgcggtgttctcgccggaggagacgaggagggccgtggcgcgggttgccgaggccgtcgccgaccgccgcgccgagctcggccgcctccagggcttctccgccgacaacgccgccctcgtctccctcgtccagaggctccccgacgaggtctcccacgacatcatggttcccttcggtggcgcggcatttttccccggccgtttaatccacacgaatgaactactggtgcttctaggggaggggtactatgtggagagatccgccaagcagaccaccgagatattgcacaggagggggatggagctggaagctcaagtggaagcgatgaaggcaactatctctgaccttgaagctgaggcgaagttcttcgaatcaactgccgccgaggcttctgcagtggaaggtcttattgaaataagggaagaatatgatgaagatacagaaataaattcatcaacattggatgcttcaagttctgcttcaggcatgccagacaaagacagggaatatactcaaatcatggcaaggttagatgaacttgaaatggaagaaaatgatgctggtagtacttctgaagaagatggagaagatgatgaggatgacgaagatgatgaggaagatgctggaccaagtgaggatgataaggaagatgaggaagaagagaatattctaattgatgacaatgatcatcataatgctagtttgggtgcctcattttctggaagtggtggtaatgatcagagtcatgaaagtgcgcagctgaagagtgctctgaagaagccaggaggaagggaaatactgaaaagcgcttcttttgcaccctcagccagcacacctcactcggtttttccaggacagacttctacaataaaccctggaattcagcttcctcttaaaaaagctgtttcttttcaagatgataacaggcatacagttggtccatccaagtctcttccattgccacagggtccaaaacactcgagtccaatacttcaggtttcttcagataaccctacatctcatgatcggaagataatgtcaagtggacaaaaggccttcacagggtctattattgaacatgatgataatatttcaacccttcaaccttcaaagagtgctgctttgcagaatcctgctagttcatcttcaagacctgtatctagattcaagatgcagaagggagggcgttgagaccatatcgttaacactaggatgagtgcgaaaccgtcaacttagatctttggtaacatctgcattgtcaacaactgctataagcgaaagctgcattgtcaacaactgctataagcgaaagcgacaggtgtggtatcaagaccacagttctaagatgagaccttggagctagcttgtctgtgcgcggatgagaaaattctttatacccagagtgtagggctgtaggcactagttttggtctgaggattcagacatttagggaaagttcctgtaattcttgttctagtttacattgatgccaacagcccaacgcattgatgggtgttacttgtgatagctctgtgcaagcattttgtgatttgtgtagcactacatacagtgacctcatctggtccttgcatttgcctttatggaatgcaacttgagtggaattgtatgtgacacctgacatgcatcaaaaaaaaaaaaaaaaaaaaaaaaaactcgagactagttctctctctctctcctgcagcccggggatccactagttta

SEQ ID NO: 93230 - DNA, 6317 bp, Oryza sativa
  Clone ID: PAT_MRT4530_91635C.1
atggatcggcaatggatgtacgctgaccggcggtacaaagagtttattgacggcgtgcattattttttgagagtggccgaagctaacaggtaaaagggttttatttgttgtccatgcaataagtgtaagaatcagaaggagtattctgcatccagaactattcatttccacttgtttgagtcagggttcatgccaagctataattgttggacatcccatggagagcaaggtgttgaaatggaagaagatgaagtggaagacgacaatattccggactatgctcagtacgctggatttgaaggaaatcaaatgggcgaggaggaaagggatgctgatggtaacaacgttgcggatgatcttggtcagatgttgcaggacgccaaggaggattgcaaaagtgaaaagggggccaataaattggacaagatgtcagaggatcacagaacgtcgttgtacctaggttgcgagcaggggcacaaaaagttggttaccactctggagttcttgcaatggaaggcaaaaaatggtgttagtgacaaggcatttggcgatttattgaaactcgtcaagaacattcttccggagggaaacaagttgcccgagacaacgtacgaggctaagaagatagtctgccctctaggactggaagttcagaagattgacgcatgtccgaatgattgtatcctatatcacggtgaggagtacgagaacctagaagcatgtcctgtttgcaaagcactacgatacaagattagacgagatgatccaggagaagttgacgggcagctaacgaagaagagaattcctgctaaggtgatgtgatatttccctataataccacggctaaggcgtttgtttaggaacaaggagaatgctagaatgatgcgatggcacgctgaagagcgtcaacaggacgggatgctgagacaccccgccgatggttcgcagtggcgaaacatcgacagaaaatttaaagactttggaaaggacacacgaaacatacggtttggtttaagtacggatggcatgaatccttttggagagatgagcagcggccatagcacttggcccgttacgatgtgtatctacaacctccccccgtggctatgcatgaagaggaagtacataataatgccgattataattcaaggccccaagcaacctggtaatgacatcgatgtgtacctaagaccactggtcgaagatcttaaactgttgtggaagaaggaaggtgtccccgtgtgggatgaggacaaacaggaggagtttaacttacgagcgctgctgttcgtaaccatcaacgattggcctgcacttagcaacctatccgggcagtgcaacaaggggtacaaggcttgcacccactgtatggatgaaacagaaagtacgtatcttaagcactgtaggaaggttatttacatgggtcatcgtcgattccttgcagcaaaccactcggtacggaagaaaggcaagcactttgaacataaggcggaccaccgtacgaatcctaaacattgcagcaggaaaatagtgtttgctatggttaaagatcttaaagtagtgtttggaaaggggcctggcagccaacctatagagagcgaagatggtcatgcggcgatgtggaaaaataattctatattttgggagttaccctattgggaattcttggacgtccgccacgcaatcgacgtgatgcacctcactaagaatctttgcgtaaaccttcttggcttcctaggtgtatatagaaagtcgaaagatacactggaagcacgtaatgatctgaagtatatggaacaacgcggtgaccttcacccggaaacaaaggagaaaggaagccattacttgagtccagccagctacactcttagcaaggcagagaaggaaagtatgtttgaatgcttggagagcatcaaggtaccgtttggatactccacgaatataaagcgaataataagcacgaaggagaagaagttcacaaatctaaagtctcatgactgtcacgtgttgatgacacagctgctaccagttgtaataaggggtatcctcccaaacaatgtctaggcaacaataacaaagctatgtgctttcatgaacgcaatttcgcagaaggtcatcgatcctgatagattagaagccctgcagaatgatgtggtgcaatgtcttgtcagctttgagttgatatttccatcttcatttttcaatataatgacgcatctgctttgtcaccttgtcaaagagatcggtattctcggtcctgtgtacctacacaacatgtttcctttcgagaggtacatgggcgttctgaagaagtacgttcgtaaccgtgctcgtccagaggcaagcatcgccaaggggtatggaacagaggaggtcattgaattctgcgtagaatttatcgaagaccttcgcccaatcggggtacctgaatcacgccataaagggagactacggggaaaggggactctcggaaggaaagcaataatgacggtagacaacaatttattccgtaaaacccatttcacggttctgcaacaatcttcattggtggctccctacatcgaggagcacttggctctagttcgcgtcagaaacatcagtaagtccgatgcatggattacaaggcataacattgatactttctccacgtggctgcgacaacatctcatgggtaacgagacgattaaccaacaactggccttcctggcgaggggaccatctggctcgatcgcgacattccagggatataaaatcaatgggtacacattctacacgagggcccaagacatgaaaagcacgaaccagaacaatgttgttcgtatcgatgccatgggacacgatggtataactggcacgtattacggtgcaatcgaagacatatggggaacttgactatggacctctcaaggtccctctgttccggtgctaatgggttaggttgactggtggatacataacgattgatgacagtgggatgaaaacggttgaccttaacaaggttggatactcggacgaaccttttgtccttgccaatgatgtaacccaagttttttacgtcaatgacatgtctagcaaaggaaaaaagggcaaagggcctgacgagccgaagcgccacgtggttctcccagtgcgccctcgtcttctccaccaacacttagacgtttttcgatctcggcttctccttcgccgccaccgtgcctagggcaaccccgcgccgacaccgccgtcgtttctcgccgtcgcttggcggtcctcgccgcctccgccgcagacgccgccgccgcatcaattgggtgttttttgtatgtacagatggctgatcgcgatgaggaacatatactatacgatacaatcgcagagggaagcagccagtactggaatgaaggagagggaaacgaggatccaaaccagtacttgaacgaggaggggaacgtggagagggatgcggaggggaacgaggaggggaatgatgaggaggaggctagtggaagtcatccctccgctggatagaagagggcacgtggacaacgtggtgccgcgaagaagatagagggtcggcacatcataactaaggtggatgaagacggccgacctagtgccccggcagaagcagccaagaattttgtacgccacagcagttgggttgtgagggacaacgtgcctgtcagcacggtgtactggcgcagaacaagggcacgcagggataatgacagctttgtcccggactcagagaaagagatgttgtggaccacaatgctcgagacgttcacgctacccgcgggtacggagaacatagtgaaacagtggactctgaagaaaatggcagaacagttccagagcttcaagggagatctctataagaaatacatcctgaagggactaacaccgaacttcgacgtattcccaaagctaagggatcattaggacgagttcgttgcttacaagacagggcaacaagggcaagcgatgatggcaagaaacaaagacaatgccgccaagaagaagtaccatcaccacttggggtcaggcggatatagcgtcgcaatgccgaagtgggaggagatggaggcaagtttgattgagaggggtatcgaaccggccaccgctaaatggccggatagatcgaagttttggtactatgctcacggtggaatgcttaacccagttgatggatcccttgtcttcagcgatcagatacgcgaggctgccagtcgactaacggacgcagtggtagcctcttctcagggcacattccgacccgacagagagaaggatgagctgtcactcgccctacagactcccgagcatccaggacgaacacgagggaaaggcgtgattccctggaagattggatttaaggaggacatccacacgtacaggagtcggatgaggagcaagagagataccgaggcgaagattgcagatcttgagtacagggtatcgagctacgagctcagcatgtaagaggaggtggcaaagaaggtggatgaacgtatggccgtacatcggtcccaagatccccagtcgtacattcatcctgcaatggtcagcccatcagacaatcgtagcagctgcgcctcaacggggcaggtcggatcacagagcatggacgccatgcaaacccatgacgaaaccacctgccccgttgatgagatcacgcagcggacaccatgtgagctgcatattcccttcaagaacttatcaatcaaggtggcgttgggaatggccatcccaacggacccttccgggacttaccactgcaggccgattccagcaggatactcgagggtcgaagttgagctggtggaagccgcgtacgaggacctcgagttggactacccaggagaagacggtgagacgcatctacgagacacaagccacgccatcatactatggcgcaagcggtacatcatccttcctgggcgacaagcggcgtctcgtgcaccatctcctccggctccgccatctcctcctgcaccatctcctccggttcctccgccacgtcctcctgcaccatctcctccggctcctctgccacctcctgctgcaccatctcctccggctcctccggctcctccaactcctccgcctccaccgtgtccgcctgcacctcccaagacaaggtctcgccaagctccaccacctgcccgcacaagggcaatgaagaaggcgaaaattgatgccaccaaaaacaaggagccaccgtacgattgcagtcaagaggagcttgatgcttatgtggcaggagaggtgaagagtcaactcaagcctcggagtcctgaaaagaagatacctattgacccgagcgtgaagaacttcttcaagggaatgttcacaacaaacaaggaggcgttacagatatcggactatgaccgaacacttcagagagcctatcacaagaagtccaaaccagtccctcagcttggagaacaaccaaaccaagaggtcgagctgttggtgaccggcgaagattttggcataacggaattcattgcagacaccggtctaactgtggatcagttggttcgaggcgcaccaatcccgaaggcagaagtggcatacaagtttgaactcggtaaaccgcttgtcaaacctgaacagctgcagtccctaccgacatagatgtacaaattccatgaacggtacatggaaatgagtgccaagggtagagaagatgttctcatgatccatttcaaggatctcttcgatctgtaccagttggacgccctcgacgtctctcttctgagcgcatggattttaatggagattcaaagggcccgacggcggagggtctacgatactaggttcatcgaccctcggaaaatcaacaccgaaatgatcgacaagtatgagaaagacatagaggacaatctcgtccatctcctaacgcagcagcatttcaagacgtacatactactgccgtacaacacaggattccactgggtcctgttattcttcgacttggacgcatgcagagtcactgtgtacgactcaatgaataaagaggagaagatttttgacaaggtcttcaaactgatagacagggcttgggatcggttccgtcaattggtccgcgggacttggaaagaaaaacttggacggaggtttcattttccacgtattcacatgagggataatctcccacacaaggattttatcacggctgttcaagaacaacttatgggattcatcaacgaagaagtccttaatcccgacggtgaattctactacgacggatcgacaattcataacgtcggtccttcctcttatgacataacgccggcgtcgaagtcgtagctatatatagctaccgagca

SEQ ID NO: 93231 - DNA, 5738 bp, Oryza sativa
  Clone ID: PAT_MRT4530_91636C.1
atggatcggcaatggatgtacgctgaccggcggtccaaagagtttattgatggcgtgcattattttttgagagtggccgaagctaacaagcagaagggttttatttgttgtccatgcaataagtgtaagaatcagaaggagtattctgcatccaggactattcatttccacttgtttgagtcggggttcatgccaagctataattgttggacatcccacggagagcaaggggttgaaatggaagaagatgaagtggaagacgacaatattccagactttgctcagtacgctggatttgaaggaaatcaaacgggcgaggaggatagagatgctgattataacgacattgcggatgatcttggtcagatgttgcaggataccaaggaggactgcgaaagtgaaaagagggcccataaattggacaagatgttagaggaccacagaacatcgttgtactcaggttgcgagtaggggcacaaaaagttggataccactctggagttcttgcaatggaaggcaaaaaatggtgttagtgacaaggcatttggcgatttattgaaactcgtcaagaacattcttccggagggaaacaaattgcccgagacaacgtacgaggctaagaagatagtctgccctctaggactagaagttcagaagattcacgcatgtcctaatgattgtatcctatatcgcggtgaggagtacgagaacctagaagcatgccctgtttgtaaagcactataatacaagattagacgagatgatctaggtgaggttgacgggcagctaacgaagaagagaattcctgctaaggtgatgtggtatttccctataataccacggctaaggcgtttgtttaggaacaaggggaatgctagaatgatgcgttggcacgctgaagaacgtcaataggacgggatgctgagacaccccgcagatggttcgtagtggcgaaacatcgacagaaaatttaaagacttggaaagcacgcacgaaacatatggtttggtttaagtacggatggcatgaatccttttggagagatgaccagtggccatagcacttggcccgttacgatgtgtatctacaacctccccctttggctatgcatgaagaggaagtacataatgatgccgattattattcaaggccccaagcaacctggtaacgacatcgatgtgttcctaagaccactggtcgaagatcttaaactgttgtggaagaaggaaggtgtccccgtgtgggacgaggacaaacaagaggggtttaacctatgagcgctgctgttcgtaaccatcaacgattggcctgcacttagcaacctatccgggcagtcaaacaagggttacaaggcttgcactgactgtatggatgaaacagaaagtacgtatcttaagcactgtaggaaggttgtgtacacgggtcatcgtcgatttcttgctgcaaaccacctagtacggaagaaaggcaagcactttgaacataaggcggaccaccgtacgaagcctaaacatcacagcgggaaaacagtgtttgctatggtgaaagatcttaaagtagtgtttggaaaggggcctggcagccagcctatagactgcgaagatggtcacgcggcgatgtggaaaaaaaactccatattttgggagttaccctattgggaattcttggacgtccgccacgcgatcgacgtgatgcacctcactaagaacctttgcgtaaaccttcttggcttcctaggtatatatggaaagtcgaaagatacactggaagcacgtaatgatctgaagcatatggaacagcgcagcgaccttcacccggaaccaaaggagaaaggcagccattacttaagtccagccagctacactcttagcaaggcagagaaggaaagtatgtttcaatgcttggagagcatcaaggtaccatctggatactccacgaatataaagcgaataataagcacgaaggagaagaagttcacaaacctaaagtctcatgactgtcacgtgttgatgacacagcttctaccaattataataaggggtatcctcccagacaatgtccgggcaacaataacaaagctatgttctttcatgaacgcaatttcgcagaaggtcatcgatccggataggttagaagcccttcagaatgatgtggtgcaatgtcttgtcagctatgagttgatatttccaccttcatttttcaatataatgatgcatctgctttgtcacctagtgaaagagatcggtattctcgggcctgtgttcctacacaacatgtttcctttcgagaggtacatgggcgttctgaagaagtatgttcgtaaccgtactcgtccagaggcaagcatcgccaaggggtatggaacagaggaggtcattgaattctgcgtagaatttattgaagaccttcgcccaatcagggtacctgaatcacaccatgaagggagactatggagaaaggggactctcggaaggaaagcaataatgacggtagacaacaatttattccgtaaagcccatttcactgttttacaacaatcttcattggtggctccttacatcgaggagcacttggctctagttcgcgccagaaacatcggtaagtccgatgcatggattacacgacatcacattgatactttccccgcatggctgcgacaacatctcatgggtaacgagacgattaaccagcaactggccttcctggcgaggggtccatctggctcgatcgcgacattccagggatatgagatcaatgggtacacattctacacacgagcccaagacataaagagcacgaaccagaacagtgatgttcgtatcgatgccatgggacacgatggtacaactggcacatattacggtgccatcgaggagatatgggaacttgactatggacctctcaaggtccctctgttccggtgccaatgggttaggttgactggtggaggcgtaacgattgatgacagtgggatgacaacggttgaccttaacaaggttggatactcggacgaaccttttgtccttgccaatgatgtaacgcaagttttttacgtgaaggacatgtctagcaaaggaaagaagggcaaagggcctgacgagccgaagcgccacgtggttctcccagtgcgccctcgtcttctctaccaacacttagacgtttttcctccgatcggcttctagctccttcgccgccactgcctaggcatccccgtaccgacaccgccgtcgtctctcgccatcgtctcgcggtcctcgccgcctccgccgccgacgccgccgccgccgcatctctcgggtgtttcttctatgaacagatagctgatcgcgatgaggaacagatactgtacgaaacaatcgtagagggaagcagccagtactggaacgaaaaaaaggggaacgaggatccaaactagtacttgaatgaggaggagaacatggagagggatgaagaggggaacgaggaggggaacgtggagagggatgcggaggggaacgacgaggacgctagtggaagtcatccctccgctggacagaagagggcacgcggacaacaaggtgccgcgaagaagatagagggtcagcacatcataactgaggtggacgcagacggccgacctagtgccccggcaaaagcagcgaagaattttgtacgccacatcggttgggttgtgagggataacgtgcctgtcagcaaggtgtactggcgcagaacaagggcacgcggggataatgacagctttgtcccggaatcagagaaagagatgctatggaccacaatgctcgagacgttcacgctccctgcgggtacggagaacatagtgaaacagtggactcttaagaaaatggcagaagagttccagaccttcaagggagatctgtaccagaaatacatcctgaaggggcagacaccgaacttcgacgtattcccgaagctaagggatcactgggatgagtacattgcttacaagacaggtcaacaagggcaggcgatgatgaaaagaaacaaagaaaataccgccaagaagaagtaccatcaccacttgaggtcaggcggctatagcgtcgcgatgccgaagtgggaggagatggaggcaagcttgcttgagaggggtatcaaaccggccaccgctaaatggcctgatcgatcgaagttctggtactatgctcatggtggaacgctcaacccaattgatggctccttggtctttagcgatcagatacgcgaggctgcgaatcgactaacggacgcagtggaagcctcttctcagggcacattccgacccgacagagagaaggacgagctgtcactcgccctacagactcccgagcatccaagacgaacacgagggaaaggcgtgattccctggaagatgggattcaaggaggacatccacacgtacaggagtcggatgaggagcaagagagataccgaggcgaagattgcagatcttgagtacagggtatcgagctaagagctcagcatgcaagaggaggtggcccggaaggtggatgaacgcatggcagcacatcggtcacacgatccccagccgtacatacctcctccaatggtcagcccatcaggcaatcgtagcagctgcgcctcaacagggcaggtaggatcacatagcatggacgccatgcaaacccaggacgaaaccacctgccccgttgatgagatcacgcaacggacaccatgtgagctgcatattcccttcaagaacttatcaatcaaggtggtgtcaggaatggccatcccaacagacatttcagggacttaccactgtaggccgattccagcaggatactcgatggtcgaagttgagctggtggaagccgtgtacgaggacctcgagttggactacccaggaggagacggtgagacgcatctacgagacacaagccacgccattatactatggcgcaagcggtacatcatcctccctaggcgacaagcggcgtctcgtgcaccatctcctccggctctgccgtctcctcctgcaccatctcctccggttcctccgccacgtcctcctgcaccatctcctccggctcctccgccacctcctcctgcaccatctcctccggctcctctgcctcctccacctccaccgtgtccgcctgcacctcccaagacaaggtctcgccaagctccacctcctgccagcacaagggcaacgaagaaggccaaagttgacaccaccaaaaacaaggagccgccatacggttgcagtcaagaggagcttgacgcttatgtggcaggagaagtgaagaggcaactcaagcctcggagtcctgaaaagaagatagctattgacccgagtgtgaagaatttcttcaagggaatgtccaccacaaacaaggaggccttaaagctatcggattatgaccgaacacttaggaaagcctattacaagaagtccaaaccagttcctcagcttggagaacaaccacaccaagtgttcgagccgttggtgaccggcgaacactttggcataacggatttcatttcggacaccggtctaaccatggctcagttggttggaggcgcaccaatcccgaaggtggaagtggcatacaagtttgaactcggtaaaccgcttgtcaggcctaagcagctgcagtatatacatatatgtgtgtacatatatatgtgtatatatatatatatatatagtacaccggtgaacgacataggagcggcggttgccgacgaaataatgcaaacggagggcaccg

SEQ ID NO: 93232 - DNA, 214 bp, Oryza sativa
  Clone ID: PAT_MRT4530_91637C.1
taccgtgacgagccgcccttttttttttttttggatagtgatacaccatcaggagacgtgttacgagcctacatctcgagggaagtcacatttccccactagcccgtggagttccatgtattcgccatctccagttgagtcagttctcccaccagtgaagtccttttcaatcttacgcaccggttttttaactatctaccaccaaacatagttt

SEQ ID NO: 93233 - DNA, 2889 bp, Oryza sativa
  Clone ID: PAT_MRT4530_91638C.1
atgttgcagagcaagaccttcgtgaagaagacgagggcaggccgcgtccagaaggtggtcagggagcactacctccgcgacgacatctcctgcggcgccgcctcctgctccacctgtggcgcggtcgagcacccgctctccgccgacgcggccgccatcctcgtcgtcgacaccaacgtcgtgctccaccagatcgatttgctggagaatccagcgattgacgatgttgtcctactatcggttgtgttggatgaggtgaagaataaaaacctcgcagtgttcaacaggatcaaggccctgtgttctaacaaggcaaggaggttcttcgtgttcaccaatgagcaccacagggatacatatgtcaaagagatggttggagagagcccgaatgatcgcaacgatagagctattcgtgtggctactcgttggtaccaaagtcatcttggtgagaatgtgaaagttttgctgatcacaaatgatagagataacaaacggaaagctattgaagaaggcattaatgctgagacagtggaatcatatgtacgatctcttgcacagcctggtttgctcgatttagtggttgtttcaactagtggagatgtcacaatggaagatgtagaagatcttagaccgtccaaaaagaaagtaatttacagtgagcacaaacctatgtcagaaattacagctggcctgcggtgtggaatttatcatcaagggaagctccgagttaatcgttacaatccatttgaagcttacgttggaagtgagagcattggtgatgagattgttattcatggccgttcaaacatgaatagggcttttgatggagacatagttgctgttgagctcttgccacaagatcaatggcatgaatcgaagtcatttattgcagacgacgatgaagatgatgaagaagacgtccatttggctccaaatagtgctgatgatgctccacggaaagccaatcccacacaatcaacagctgcatcatcagctgattctgtctctagtcgcccagttggacgtgttgttggtataatcaagcgaaattggaattcgtattgtgggtccttggagccaatgcccatgcctgctggtagtggaggcgttgctcatgctctatttgtgtctaaagatcgacgaatcccaaagattcgaattcaaactagacagcttggcaatcttctggacaaaaggattattgttgcagttgattcatgggatgtcttgtctcgatacccatcaggacattatgttgtcttaatagagaatgatatcaacacaagacctttctctacacaagtccttgcttgtttgccaccattgccatggacattatcacctgaagatcttgctaatcctaatagacaagatttacgccatgtgagagtctttagtgtggatccgcctgatattgctgacgtcactaactttgttcatcctggtactcctcttgatgaggaggcctcacaaaggggcacttctgtatatcttgttggacagcgaattgacatgcttccaaagcctcttactgaagatgtttgttctcttcgtgctgatgttgagagattggcgttctctgtcatttgggaaatgacacctcatgctgatatcatatccacaagatatacaaagagtgttatcaagtcttgcgctgcaatgtcttatgtggaagctcaagcaagaatggatgacagccgtttggtcgatcccctaactgtagacctgcggaacttaaactcgttagcaaagattatgaggcatcggcgttgtgaaagaggggctctaacacttgcttcagcagaagtcaaattcgaaattgatagtgaaacccatgatccgcttgacataggaatatatcaaattcgtgaggcaaatcaaatgattgaagagtttatgttggctgcaaatatctctgtcgctgagaagattttgaagcacttccccttgtgttcattgctaaggcgccatcctagcccaacaaaggagatgcttgagccattactccgaactgcgtcttctgtggggctaaatctggatgtgtcatcctcaaaagcattagcagaatcacttgataatgcaaagaatgatgacccatacttcaacaagcttatcaggattttggcaactagatgcatgacacaggcagtttatttctgtagcggagacttgaccttttctgagtattaccattatggccttgctgcttctctttacacacatttcacctcccctattcgcagatatgcagatgttattgttcataggttgttagctgctgccctagaaattgccaaacttccacccctctttcaggatggtccacaacttacaggcgtagctgacaacttgaattatagacatcgaaatgcccagatggcaagcagagcatcagttgagcttcataccctcatatatttcaggacaaggcggatggacactgaagctagaattgtaaagatcaaggcaaatggtttcatagtatttgtcccaaagtttggcatagaagggcccatctaccttactccaaagggagacaaggggggtgattgggtagtagatgaggtgcaccagagagtaaccaagcccgggacaaacgtcagttacgctgtcctgcagaccgttatgattcatatggaggtggttgagcctcagcctcaccgcccaaagttgcaactcaccctgatatgaaaatgtgcaagtgaactgtataattattgtgtttatctttttccatatagtgtagtagctgggtcaattctttaattcagaattggggattgatgatctgtagcattttagccagatggacaaaccagcaaagtgatgaaatcgttgagtggaatttctggtaagagtgtagtcaatccaatttataggtttaaaaag

SEQ ID NO: 93234 - DNA, 453 bp, Oryza sativa
  Clone ID: PAT_MRT4530_91639C.1
ggacgagatggagttcaccgaggcagagagcaacatgaacgatctcgtcgcggagtaccagcagtaccaggacgccacagccgatgaagagtacgaagacgaagaggaagaagctgaggccgaatagcattgagccccatttgcccttcacaggttgttttgccagtgaagagttttgtgtctttgtgatgctgtgctcttttttctttctctgacgtgcgtagcaggctgcagtcccgttttgtaagacgtctctggtggtcagtagctgaaggcttgaaaagtgttttgagtgccctccttgagctaaatcacctgtaagttctgacatgtattggtagtggttttctcatctctgtgaagcttctgtgtagtctgttactatatccagtttctctgtatatcgatcgtagtgtcatcttgcttggctgaaaaaaaaaaaaaaaaaaaaaa

SEQ ID NO: 93235 - DNA, 276 bp, Oryza sativa
  Clone ID: PAT_MRT4530_9163C.1
atggatgttggctgtgtgcaattgtgcagagtgtttgattacgagtcaactttgttcagttcagatcatatttcactggtggagaaaccatctttagtcggtccaccagatttcacaatagtcccgattgtattaaaaaccgggactaaaaacatatttagtcccggtttgaaagctctgaggaattttttaccaaccgggactaaagatctatttatagtcccggttagtaacaccaaccgggaaaaaagatcggttgatgttatcaaccgggac

SEQ ID NO: 93236 - DNA, 6012 bp, Oryza sativa
  Clone ID: PAT_MRT4530_91640C.1
atattggtcagatattgcaggatgcaaaggagaacgatgaaagtgaaaaggaggcccataaattggagcggatgttagaggaccacagaacgtcgttgtatccaggttgtgagcaggggcacaaaaagttggatactactctggagttcttgcaatggaaggcaaaaaatggtgttagtgacaaggaatttggtgatttattgaaactcgtcaagaacattcttccggagggaaacaaattgcccgagacaacgtacgaggctaagaagatagtctaccctctaggactggaagttcagaagattcacgcttgtccgaatgattgtattctatatcgtggtgaggagtacgaaaacctagaagcatgcactgtttgaaaagcactacgatacaagattagacgagaggatttaggtgaagttgatggccagccaacaaagaagagaatttctactaaggtgatgtggtatttccctataataccacggctaaggtgtttgttcaggaacaaggggaatgctagaatgatgcgatggcacgctgaagaacgtcaacaggacgggatactgagacaccccgctgatggttcgcagtggcgaaacatcgacagaaaatttaaagactttggaaaggacgcacgaaacatacagtttggtttaagtacggatggcatgaatacttttggagagatgagcagcagccatagcacttggtccgttatgatgtgtatctacaacctccccccttagctatgcatgaagaggaagtacataatgatgctgattattattcaaggccccaagcaacctgataacgacatcgatgtgtacctaagaccactggttgaagatcttaaactgttgtggaaaaaggaaggtgtccccgtgtgggacgaggacaaacaggaggagttaaacctatgagtgctgctattcgtaaccatcaacgattggcctacacttagcaacctttccgggtagtccaacaaggggtataaggcttgcactcactgtatggatgaaacaaaaagtacgtatcttaagcactgtaggaagtttgtgtacatgggtcatcgtcgattccttgttgcaaaccacctggtacggaagaaaggcaagcactttgaacataaggcggaccaccgtacgaagcctaaacatcgcagcgggaaaacagtgtttgctatggttaaagatcttaaagtagtgtttggaaaggggcctggaagccagcctatagagagcgaagatggtcacgcggcgatgtggaaaaagaactttatattttgggagttacccaattgggaattcttggatgtccgccatgcaatcgacgtgatgcacctcactaagaacctttgcgtaaaccttcttggcttcctaggtgtatatggaaagtcgaaagatacactggaagcacgtaatgatctgaagcatatggaacaacttggcgactttcacccggaaccaaaggagaaaggaagctattacttgagtccagccagctacactcttagcaaggcagagaaggaaagtatgtttgaatgcttggagagcataaaggtaccgtctggatactccacgaatataaagcgaatagtaagcacgaaggagaataagttcacaaacctaaagtgtcatgactgtcacgtgttgatgacacaactgctactagttgtaagaaggggtatccttccagacaatgtccgggcaataataacaaagttatgtgctttcatgaacgcaatttcgcagaaggtcatcgatccgaatagattagaagcccttcagaatgatgtggtgcaatgtgttgtcagttttgagttgatatttccaccttcatttttgaatataatgacgcatctgctttcaatacatgtttcctttcgagaggtacatgggcgttctgaagaagtatgttcgtaaccgtgctcgtccagaggcaagcatcgccaaggggtatggaacagaggaggtcatcgaattctgcgtagaatttattgaagaccttcgcccaatcggggtacctgaatcacgccatgaagggagactatggggaaaggggactctcggaaggaaagcaataatgacggtagacaataatttattccgtaaagcccatttcacggttatgcaacaatcttcattggtggctccttacatcgaggagcacttggctctagttcacgccagaaacatcggtaagtccgatgcatggattacacggcatcacattgatacttttcccgcgtggctatgacaacatctcatgggtaacgagacgattaaccaacaactggccttcctagtgaggggaccatctggctcgatcgcgacattccaaggaaatgagatcaatgggtacacattctacacgagagcccaagacatgaagagcacgaaccaaaacagcgctgtttgtatcgatgccatgggacacgatggaacaactggcacgtattacggtgccatcgaggacatatgggaacttgactatggtcctctcaaggtccctctgttcttgtgccaatgggttaggttgactggttgaggcgtaacgattgatgacagtgggatgacaacggttgaccttaacaaggttggatactcggacgaaccttttgtccttgccaatgatgtaacgcaagtcttttacatgaaggacatgtctagcaaaggaaagaagggcaaagggcttgacgagccgaagcgccacgtggttctggatgcgcgcccccgtcttctccatcaacacttagaaggtttttccctgatctcggcttctccttcgccgccactgcctaaggcatccccgcgccgacgccgccgtcgtatctcgccgtcgtctcgcgggcgtcgtcgtcgcttcctccgtcgcctctgccgccgccgcatctctagggtgtttcttgtatgaacagatggctgattgcgatgaggaacagatattgtacgatacaatcgcagagggaagcagccagtactggaacaaagaagaggggaacgaggatccaaaccagtacttgaacgaggaatggaacatggagagggatgcggagaggaaccaggaggggaacgtggagagggatgtggaggggaacgaggaggaggaggctagtggaagtcaaccctccgctgacagaagagggcacgcggacaacaaggtgccgcgaagaagctagagggtcaacacatcataacggaagtggacgaagacggccgacctagtgccccggcagaagcagccaagaactacgtacgacacaacggttgggttgtgcaggataacgtgtctgtcagtacggtgtactggcgcagaataagggcacgcggagatcatgagagctttgtcccagattcggagaaagagatgctgtggaccacaatgctcgagacattcacccttcccgcgggtatagagaacatagtgaaaaggtgaactctaaagaaaatggcagaacagtttcatagcatcaagggagatctgtaccagaaatatatcgtgaaggggcagacaccgaacttcaacacattcccgaagctaagggatcactgggacgagttcgttgcttacaagataggtcaacaagggtaggcgatgatggaaagaaacaaagaaaataccgccaagaagaagtaccatcaccacttggggtcaggcagctatagcatcgcgatgccgaagtgggaggagatggaggcaagcttgcttgagaggggtatcgaaccggccaccgctaaatggccggatcaatcgaagttctggtactatgctcacggtggaacgctcaacccagttgatggctccctggtcttcagcgatcagatacgcgaggctgcaagtcgactaacggacgcagtggaagcctcttctcagggcacgttccgacccgacagagagaaggacgagctgtcactcgccctgcagactcccaagcatccaggacaaacacgagggaaaggggtgattccttggaagattggattcaaggaggacatccacacgtacaggagtcgaatgaggagcaagagagataccgaggcgaagattgcagatcttgagtacagggtatcgagctacgagcttagcatgcaagaggaggtggcaaggaaggtggatgaacgcatggccacacatcggtccctagatccccagccgtacattcctcctgcaatggtcagcccttcaggcaatcgtagcagctgcgcctcaacggggcaggtaggatcacagagcatggacgccatgcaaatacaggacgaaaccacctgccccgttaatgtcatcactcggtggacaccatgtgagctgcatattccctttgagaacttatcaataaaggtggcgtcgggcatggccatcccaacggacccttcagggacttaccactgcaggcttattccagcaggatactccaaggtcgaagttgagttggtggaagccgcgtacgaggacctcgagttggactaccttggaggagacggtgagacgcatctacgagacacaagccacgccactatactatggcgcaagcggtacatcatcctccttgggcgacaagcggcgtctcgtgcaccatcttctccggctccgccatctcctccacaggctcctgcaccgtctcctcctcatgctccagcactgtctccacctcaggctcctgcaccgactcctcctcaggctcctacaccaactcctccgcaagctcctcgtccggcaccttccaagtcaagggccccccaagctccactgcctgcccccacaagggcaacgaagaaggcgaaagttgacgcctccaaaaacaaggacccggggtacgattgcacacaagaggagcttgacgcttatgtggcttcagaagtcaggagacaattgaagcctcaaagtccagaaaagaagattcttatagacccgagtgtcaggaacttcttcaggggtatgtcttcacctgccaaggaggccataaagctatcggactatgagcgaacacttaagaaagcatcttctggaaagtccaaactagtccctcagcttggagagcaaccaaaccaggagatcgagccgttggtgaccggtgaagaatttggaatacaagattttattaataacaccgggctaactacggatcagttgctacgagatccaccaatcgaaaaggcggaagtgaaatacttgtacgaactcggtaaaccgcttgtcaagcctgagtagctgcagtccctaccgatacaaatgtacaaattccatcaactgtacatggagatgaacgccaccggtagagagatgatcggagcgaggatcagggacacggacttcttgcaaggagaagatattctctagatcaatttcaagggtatctacgaactataccagctggacgccctcgacgtgtctattatgagttgttggactttaatggagattcaaagggcccgacggcggggggttttcgatactggattcatcgaccctcggaaagtaaacgtcgcaatgctcgaccaatatccacaagccacagaggacaatctcgtccatctcctgaaggcgcagcattacaagacgttcatactgttgccgtacaacatagaattccactgggtgcttttactcttcgacctgtcggcctgcaccgtcaacgtatatgactcaatggataaaaaagagtctacgtttgacaaggttttcgaacttatagacagggcttggtatcggttccgtcatttggtccggtgcgcaaagcaaaagaagggaactaacttgtgcggctattacgtgtgcgagtattgccactgccttgcagaccaaatcatcaccataagaaagctcaattttattcgcatgagggataacctgaccacgcacaaggaatttatcgcggcggttcaagaacaactcatgggattcatcaacgaacaaatccttgatcccaagggtgaattctactacgacggaaacacaattcataggtccttagcttctgagctagcgactactactacgtcgaaatcgtag

SEQ ID NO: 93237 - DNA, 453 bp, Oryza sativa
  Clone ID: PAT_MRT4530_91641C.1
acgagatggagttcaccgaggcagagagcaacatgaacgatctcgtcgcggagtaccagcagtaccaggacgccacagccgatgaagagtacgaagacgaagaggaagaagctgaggccgaatagcattgagccccatttgcccttcacaggttgttttgccagtgaagagttttgtgtctttgtgatgctgtgctcttttttctttctctgacgtgcgtgatggatgtatgggtgaggtttgcgtccgtgcttcgttttgtcacctgtgctgcgtagcaggctgcagtcccgtctactacaacgaggcgagcggcgggaggtacgtggacgcgacggggcggtacgcgggggactccgacctgcagctggagcggatcaacgtctggtggtcagtagctgaaggcttgaaaagtgttttgagtgccctccttgagctaaaaaaaaaaaaaaa

SEQ ID NO: 93238 - DNA, 4971 bp, Oryza sativa
  Clone ID: PAT_MRT4530_91642C.1
atggccatggcggagaggcggctggaagcgtcggcaaggggaggtagaggggatggggggagtggaggtggatggggaggtggaggaaatggaggggcgggccggcggtcggagcacacggcggtggccatggcggagaggtgggcggcggcgctcgccatcatggcgatggcagaggtccgcgggaggcagccacgcgatggcctccgcctccattgccaaccactcggtccgtctccgccgccgcgagctctgcctcagccgaccgcgcgggcgagctccgcttcctgccgcctccacctgccgtccacgccgaccgcccgaccgcccgcccccatccccgcgccggcatgtgcgcagcgcgccatctcacgtcgatcagatatccggaggcgggcagtgggagaagaggcgccggtggcggggagatccgccatgctcgccgcccgcggtggccttccagtcgccgccccccgcgccctcgccaccgccgccggctgccgcgtccccgtcacacccgccgcccgctgcacgccgcacccatcgccggttgctcccgacgccagggaagactgcgaaagtgaaaaggaggcccataaattggacaagatgttggaggaccacagaacttcgttgtacccaggccccaagcaacctggtaacgacatcgacgtgtacctaagaccactggtcgaagatcttaaacagttgtggaagaaggaaggtgtccccgtgtgggacgaggacaaacaggaggagtttaacctacgagcgctgctgttcgtaaccatcaacgattggcctgcacttagcaacctatccggacagtccaacaaggggtataaggcttgcactcactgtatggatgaaacagaaagtacgtatcttaagcactgtaggaaggttgtatacatgggtcatcgtcgattccttgcagcaaaccacccggtacggaagaaaggcaagcacttcgaacataaggccgaccaccgtacgaagcctaaacatcgcagcgggaaaacagtgtttgctatggttaaagatcttaaagtagtgttcggaaaggggcctggaagccagcatatagagagcgaagatggtcacgcggcgatgtggaaaaagaactctatattttgggagttaccatattgggaattcttggacgtacgccacgcaatcgacgtgatgcacctcactaagaacctttgcgtaaaccttcttggcttcctaggtgtatacggaaagtcgaaagatacactggaagcacgtaatgatctgaagcatatggaacaacgcggcgaccttcacccggaaccaaaggagaaaggaagccattacttgagtccagccagctacactcttagcaaggcagagaaggaaagtatgtttgaatgcttggagagcataaaggtaccgtttggatactccacgaatatcaagcgaataataagcacgaaggagaagaagttcacaaacctaaagtctcatgactgtcacgtgttgatgacacaactgctaccagttgtaataaggggtatccttccagacaatgtccaggcaacaataacaaagctatgtgcattcatgaacgcaatttcgcagaaggtcatcgatccggatagattagaagcccttcagaatgaagtggtgcaatgtctcgtcagttttgagttgatatttccaccttcatttttcaatataatgacgcatctgctttgtcaccttgtgaaagagatccgtattctcgggcctatgtacctacacaacatgtttcctttcgagaggtacatgggcgttctgaagaagtatgttcgtaaccgtgctcgtccagaggcaagcatcgccaagggttatggaacagaggaggtcatcgaattttgcgtagaatttatcgaagaccttcgcccaatcggggtacctgaatcacgccatgaagggagactacggggaaagggaactctcggaaggaaagcaataatgacggtagacaacaatttattccgtaaagcccatttcactgttctgcaacactcttcattggtagctccttacatcgaggagcacttggctctagttcgcgccaggaacatcggtaagtccgatgcatggattacacggcatcacattgatactttccccgcgtggctacgacaacatctcatgggtaacgagtcgatcaaccaacaacttgccttcctggcgaggggaccgtctgggtcgatcgcgacattccagggatatgagatcaatgggtacacattctacatgagagcccaagacatgaagagcacgaaccaaaacagcgctgttcgtgtcgatgccatgggacacgatggaacaactaccacgtattacggtgccatcgaggacatatgggaacttgactatggtcctctcaaggttcctctgttccggtgccaatgggttaggttgactggtggaggcgtaatgattgatgacagtgggatgacaactgttgaccttaacaaggttggatactcggacgaaccttttgtccttgccaatgatgtaacgcaagtctttttcgtgaaggacatgtctagcaaaggaaagaagggcagagggcctgatgagcctaagcgtcaagtggttctcccaggcaaaagaaaaatcgtcggagttgaggacaagactgacgaggattacgatcagttggatgggggtatatatattcccgggcaaatccccgctccgacgccgccgtatctcgccgtcgtctcgagctcgtcgtcctcgccgccgcctccgcctcctccgctgccgccgcatctctggggtgagagccgccgcatctcccttcatgcatctcgatctctccgatctcgatctctctccgtcgccttcgacgccgccgccttcgatgccgcgcaacgccgccgccgcatgccaacgccacgccgccgccgccgtcgccacgccgccgccgccttcaccgccgcgcgcgcaaatgccgccgccgccacgccacgccgccgccgccacgccacgccacgccaccgccgccacgccacgccgccgccgccacggccccacaacgccacgccgccgccacgccgccgcgccaaccgccgccccgatgccgccacaccgccgttaacgaacgagaacgagaacgatcgaacgaacgagagcgagaacgaacacgtcaacgtacgttgccgcgacaacgtgaacgagaacgagaacgatcgaacgaacgtgaacgagctagggaacatggctgaccgcgatgaggaacagatattgtacgatacaatcgcgaagggaagcagccagtactggaatgaagaagaggggaacgaggatccaaaccagtacttgaacgaggaagggaacgtggagagggatgcggaggggaaccagcaggggcacgtggaaagggatgtggaggggaaccaggaggaggaggctagtgattcggagaaagagatgctgtggaccacaatgctcgagacattcacccttcctgcgggtacagaggacaaagtgaaaaggtggactctgaagaaaatggcagaacagtttcagagcttcaagggagatctgtaccagaagtatatactgaaggggcagacaccgaacttcgacacattcccaaagctaagggatcactgggacgagttcgttgcatataagacaggtgaacaagggaaggcgatgatggaaagaaacaaagaaaatgccgccaagaagaagtaccatcaccacttggggtcaggaggctatagcgtcgcgatgccgaagtgggagcagatggaggctagcttgattgagaggggtatcgaaccggcaacagccaatggccggaacgatcgaagttctgtggaagcctcctctcagggcacgttccgaccagacagagatagggacgagctgacactcgccctacagactccagagcatccaggacgaactcgagggaaaggggtgattccttggaagattggtttcaaggaggacatccacacgtacaggagtcggatgaggagcaagagagataccgaggcgaagattgcagacctagagttccgggtatcgagctacgaactcaacatgcaagaggaggtggcaaggaaggttgatgaacgcatggccgcacatcggtcccatgatccccagccgaccattcctcctgcaatggtgagcccgtcaggaaaccgtagcagctgcgcctcaacggggcaggtggcgtcgggcatggccatcccaacggacccttcaggtacttaccactgcaggccgattccagcaggatactccaaggtcgaagttgagttgttcgaaggcgcgtacgaggacctcgagctggattaccctggaggagacggcggtacatcatcctccctgggcgacaagcggcgtctcgtgcaccatctcctccggctccgccatctcctcctcaggatcctgcaccgtctcctcctcatgctccgccagcaccgtctccacctcaggctccagcatcgactcctcaggatcctgcaccgactcctcctcgtgctcctacacctactcccccgcaagctcctcttccggcaccttcaaagtcaagggccccccccagctccaccgcttgcccacataagggcaacaaagaaggcgaaagttgacgccgccaagaacaaggacccggggtacgattgcacgcaagaggagcttgacgcttacgttgcatcagaagtcaagagacaattcaagcctcgaagtccagaaaagaagattcctatagaccccagtgtcaggaacttcttcaggggtatgtctgcatctgtcaaggaggccatcaagctatcggactatgagcgaacgctgaagaaagcatcttctggaaagtccaaaccagtccctcagcttggagagcaaccaaaccaggagatcgagccgttggtgaccggtaaagaaatgacgatagaacaatttattactgacaccggtctaactacggattaa

SEQ ID NO: 93239 - DNA, 714 bp, Oryza sativa
  Clone ID: PAT_MRT4530_91643C.1
atgggtggcgacggcaagcgcaccaagttgccgtggctgggcgtggcgagagacgtggatgatgatggagggcccttcacaaactgttcttcggatctccacatatttgatgacgatgacgatgaggcaacaacactcaagactaaaggatctactgtcggcagtggccgcaacgacgagcggcggcaacaggcagtggcatgtggagaccgcgacgagtggcaggcagccatcaggatggtgctccggccggtggagctggacctgtcggtggccagctgcgcggtgtccgtggagcggccggagtcgccgtcggccgcgtcgctggtcaagtacaagcaggagtcgcacttcgtcaccaagtccgcgttcctgaacgcctccgcgctgccggcctcgctcgccgcgaggctctacgacggcgagaccgaccaggtggtggtgcaggccgtggcgtcgctcagcttcaccatcggcggcgcgcgcggcgtgagcgccggcaagcgcggccacaacttcaccttgatccactgctggccggtgtccatctccagctactacgaggtgtccggcggcaaggcgtcgtgcagccaggacaccaccgaggcggcggtcgccggcctgacccacgaccgctacatcggcggcccttgcccggagacgtacaagaactccggtaagtgctccaggaatagcaccggcatcaaggggtga

SEQ ID NO: 93240 - DNA, 2066 bp, Oryza sativa
  Clone ID: PAT_MRT4530_91644C.1
gttctctctgcctgcgctgcggctgcacccttccccaagtcggatttccattgcattctcgattccattccttccccctccccctctttcttcgacttggacttggccttccttcttcctcctcaacctcgacctcgatctaggtctacgctccgccctccggtttccggcgagcggcggcgcgatcccgggcggcgaaggagggggaagccatgagggagatcctccacatccagggcgggcagtgcgggaaccagatcggggccaagttctgggaggtgatctgcgacgagcatggcgtggacgcgacggggcggtacgcgggggactccgacctgcagctggagcggatcaacgtctactacaacgaggcgagcggcgggaggtacgtgccccgcgccgtgctcatggacctcgagcccgggaccatggactccgtgcgctccggccccttcggccagatcttccgccccgacaacttcgtcttcgggcagtccggcgccggaaacaactgggccaaggggcactacaccgagggcgccgagctcatcgactccgtcctcgacgtcgtccgcaaggaggccgagaactgcgactgcttacaaggattccaagtttgccattcattgggaggaggcactggatctggcatgggaacccttcttatttctaagattagggaggagtacccggatagaatgatgttgacattttccgtcttcccatcaccaaaggtctcggatactgttgtggagccttacaatgctaccctttctgttcaccaacttgttgagaatgctgatgaatgtatggtgcttgacaatgaagctctctacgacatatgcttccgcacactaaagcttgctacccctacctttggtgacctcaatcatcttatctctgcaaccatgagtggtgttacatgctgcttgaggttccctggtcagctcaactctgatctgcgcaaacttgctgtgaatctcatccctttcccccgtctccacttcttcatggttggctttgcgccattgacttcacgcggatcacagcagtaccgtgctctcaccgttcctgagctgacacagcaaatgtgggatgcgaagaacatgatgtgcgctgctgatccccgccatggccgctacctcacagcttctgccatgttccgtgggaagatgagcaccaaggaggtggacgagcagatgctcaatgttcagaacaagaactcctcatactttgtcgagtggattcccaacaacgtcaaatccagtgtctgtgacattccgcccagggggctgaagatggcggcgaccttcgtcgggaactccacctccatccaagagatgttccgccgggtcagcgagcagttcactgccatgttcaggaggaaggctttcttgcactggtacacaggcgagggaatggacgagatggagttcaccgaggcagagagcaacatgaacgatctcgtcgcggagtaccagcagtaccaggacgccacagccgatgaagagtacgaagacgaagaggaagaagctgaggccgaatagcattgagccccatttgcccttcacaggttgttttgccagtgaagagttttgtgtctttgtgatgctgtgctcttttttctttctctgacgtgcgtgatggatgtatgggtgaggtttgcgtccgtgcttcgttttgtcacctgtgctgcgtagcaggctggcagtcccgttttgtaagacgtctctggtggtcagtagctgaaggcttgaaaagtgttttgagtgccctccttgagctaaatcacctgtaagttctgacatgtattggtagtggttttctcatctctgtgaagcttctgtgtagtctgttactatatccagtttctctgtatatcgatcgtagtgtcatcttgcttggctgaaacgttttaaagatcactctggagtacgctgttaaccacctcgctgaatggtagctgcatcatgagctcgatcatagcggaggacctgtcattctctgaattttctgcatctctaaacatgcctctgaacacttcgagttaaaaaaaaaaaaaaaaa

SEQ ID NO: 93241 - DNA, 2781 bp, Oryza sativa
  Clone ID: PAT_MRT4530_91645C.1
atggctgatcgcgatgaggaacagatattgtacgatacaattgcggagggaagcagccagtactggaacgaagaagaggggaacgaggatccaaaccagtatttgaacgaggaagggaacgtggagagggatgcggaggggaacccggaggggaaccaggaggggcacgggaaaagggatgtggaggggaaccaggaggaggaggctagtggaagtcaaccctccgttggacagaagagggcacgcgggcaacgaggtgccgcgaagaagcttgagggtcggcacatcataacggaagtggacgaagatggccgacctagtgccccggcagaagccgccaagaactatgtacgtcacagcagttgggttgtgcgggataacgtgcctgtcaatacggtgtactggcgcagaacaagggcatgcggagatcatgagagctttgtcccagattcggagaaagagatgttgtggaccacaatgctcgagacattcacccttcccgcgggtacagaggacaaagggcagacaccgaacttcgacacattcccaaagctaagggatcattgggacgagttcgttgcatataagacaggtgaacaagggcaggcgatgatggaaagaaacaaagaaaatgccgccaagaagaagtaccatcaccacttggggtcaagcggctatagcgtcgcgatgccgaagtgggaggagatggaggctagcttgcttgagaggggtattgaaccggccactgctaattggccggaacgatcgaagttctggtactatgctcacggtggaacgctcaacccagctgatggctccctggtcttcggcgatcagatacgcgaggctgcgcgtcgactaacagacgaattggaagcctcttctcagggcgcgttccgaccggacagagagaaggacgagctgtcactcgccctgcagactccagagcatccaggacgaacacgagggaaaggggtgattccttcgaagattgggttcaaggaggacatccacacatacaggagtcggatgaggagcaagagagataccgaggcgaagattgcatatctagagtttagggtatcgagctacgagctcagcatgcaagaggaggtggcaagaaaggttgatgaacgaatggccgcacatcggtcccatgatccccagccgaccattcctcctgcaatggtgagcccgtcaggaaaccgtagcagctacgcctcaacggggcaggtaggatcacagagcatggacgccatgcaaacccaggatgaatccacctgccccgttgatgacatcactcagcggacaccatgtgagctgcatattcctttcaagaacttatcaataaaggtggcgtcgggcatggccatcccaacggacacttcaggtacttaccactgcaggtcgattccagcaggatactccaaggtcgaagttgagtttgtcgaaggcgcgtatgaggacctcgagctggattaccctggaggagacggtgagacgcatctacgagacacaagccacgccattattctatggcgcaagcggtacatcatcctccctgggcaacaagcggcgtctcgtgcaccatctcctccggctccgccatctcctcctcaggctccagcaccgtctcctcctcatgctccagcaccgtctccacctcaggctcctgcaccgactcctcctcaggctcctacaccgactcctccgcaagctcctcttccggcaccttccaagtcaagggccccccaagctccaccgcctgcccccacaagggcaacgaagaagacgaaagttgacgccgccaagaacaaggacccggggtacgattgcacgggtatgtctgcacctgccaaggaggccataaagctatcggactatgagcgaacgctcaagaaagcatcttctggaaagtccaaaccagtccctcagcttggagagcaaccaaaccaggagatcgagccattggtgaccagtgaagattttgtaatacaagaatttatttatgacaccgggctaactacggatcaatttctaggagacgcaccaatcgaaaaggcggaactgtacatggagatgagcgccaccggtagagagatgatcggagcgaggatcagggacacggacttcttgcaaggagatgacattctctggatcaatttcaagggaatctacgaactataccagctggacgccctcgacgtctctattatgagttgctggattttaatagagattcaaagggcccgacggcgggtggttttcgatactggattcatcgaccctcggaaagtaaacgtcgcaatgctcgaccaatatccgcaagccacagaggacaatctcgtccatctcctgaaggcgcagcattacaagacgttcatactgttgtcatacaacacagaattccactgggtgcttttactcttcgacctggaggcctgcaccgtcaacgtatatgtctcaatggataaaaaagagtctacgtttgacaaggttttcgaacttatagacagtgcttggtatcggttccgtcatttggtccgcggcaactggagagaaagacttaggcggaagttcaaatttccttgcgcaaagcaaaagcagggaactaacttgtgcggctactacatgtgcaagtattgccactgccttgcagaccaaatcatcaccataagagagctcgattttatttgcatgagggataacctgatcacacaaggaatttatcgcggcggttcaagaacaactcatgggatttatcaacgaacaaatccttga

SEQ ID NO: 93242 - DNA, 209 bp, Oryza sativa
  unsure (1)..(209): unsure at all n locations
  Clone ID: PAT_MRT4530_91646C.1
ctctctccgacgaaaccccaaaattttctnagggaagcaagcggcggcgcacggagtcccctccctccccaatctgcaacgaactcgaagggcggcggcggnggcgtacgcgntgnaatcaggttccngcggcggactgnntccacccncgnnctcccatgagcgatctccgcgaactcngcatnnggcgggagctccgagggctgagg

SEQ ID NO: 93243 - DNA, 6550 bp, Oryza sativa
  Clone ID: PAT_MRT4530_91647C.1
atggatcggcaatggttgtacgctgaccggtggtccaaagagtttatcgagggcgtgcattattttttgagagtggccgaagctaataagcgtaacggttttatttgttgtccatgcaataagtgtaagaaccagaaggagtattctgcatccaggactattcatttccacttgttttgagtcggggttcatgccaagctataattgttggacatcccacggtgagcaaggggttgaaatggaagaagatgaagcggaggacgagaacattcccgactgggcgcagtacgctggatttgaaggaaatcaaacgggcgaggtggacagggatgctggcgataacgacgctgtggatgatcttggtcagatgttgcaggacgcaaaggaggactgtgaaagtgaaaaggaggcccataaattggagcggatgttagaggaccacagaacgtcgttgtacccaggttgcgagcaggggcacaaaaagttggataccactctggagttcttgtaatggaaggcaaaaaatggtgttagtgacaaggcatttggcgatttattaaaactcgtcaagaacattcttccggagggaaacaaattgcccgagacaacgtacgaggccaagaagatagtctgccctctaggacttgaagttcagaagattcacgcatgtccgaatgattgtatcctatatcgcagtgaggagtatgagaacctagaagcatgccctgtttgtaaagcactacgatacaatattaaacgagaggatccaggtgaagttgacgggcagccaacaaagaagagaattcctgctaaggtgatgtggtatttccccataataccacggctaaggcgtttgtttaggaacaaggggaatgctagaatgatgcgttggcacgctgaagaacgtcaacaggacgggatgctgagacaccccgccgatggttcgcagtggcgaaacatcgacagaaaatttaaagactttggaaaggacgcacgaaacatacggtttggtttaagtacggatggcatgaatctttttggagagatgagcagcggccatagcacttggcccgttacgatgtgtatctacaacctcctcccttggctatgtatgaagaggaagtacataatgatgccgattattatttaaggccccaagcaaccaggtaacgacatcgatgtgtacctaagaccactggttgaagatcttaaactgttgtggaaaaaggaaggtgtccccgagtgggacgaggacaaactggaggagtttaacctatgagcgctgctgttcgtaaccatcaacgattggcctgcacttagcaacctttccgggcaatccaacaaggggtacaaggcttgcactcactgtatggatgaaacaaaaagtacgtatcttaagcactgtaggaaggttgtgtacatgggtcatcgtcgattccatgctgtaaaccacccggtacggaagaaaggcaagcactttgaatataaggcggaccactgtacgaagcctaaacatcgcagcgggaaaacagtgtttgctatggttaaagatcttaaagtagtgtttggaaaggggcctggaagccagcctatatagagcgaagatggtcacgcggtgatgtggaaaaagaactctatattttggcagttaccctattgggaattcttggacgtccaccacgcaatcgacgtgatgcacctcactaagaacctttgcgtaaaccttcttggcttcctaggtgtatatggaaagtcgaaagatacattggaagcacgtaatgatctgaagcatatggaacaacgcggcgaccttcacctagaaccaaaggagaaaggaagccattacttgagtccagctagctacactcttagcaaggcagagaaggaaagtatgtttgaatgcttggagagcataaaggtaccgtctggatactccacgaatataaagcgaataataagcacgaaggagaagaagttcacaaacctaaagtctcatgactgtcacgtgttgatgacacaactgctaccagttttaataaggggtatccttccagacaatgtccgggcaacaataacaaagctatgtgctttcatgagcgcaatttcgcagaaggtcatcgatccggatagattagaagcccttgagaatgatttggtacaatgtcttgtcagttttgagttgatatttccaccttcatttttcaatataatgacgcatctgctttgtcaccttgtcaaagagatcggtattctcgggcctgtgtacctacacaacatgtttcctttcgagaggtacatgggcgttctgaagaagtatgttcataaccgtgctcgtccagaggcaagcatcgccaaggggtatggaacagaggaggtcatcgaattctgcgtagaatttattgaagaccttcgcccaatcgaggtacctgaatcacgccatgaagggagactacggggaaaggggactctcgaaggaaagcaataatgacggtagacaacaatttattccgtaaagcccatttcacggttctgcaacaatcttcattgctggctccttacatcgaggagcacttggctctagttcgcactagaaacatcggtaagtccgatgcatagattacacggcatcacattgatactttccccgcgtggctacgacaacatctcatgggtaacgagacgattaaccaacaactggccttcctggtgaggggaccatctggctcgatcgcgacattccagggatatgagatcaatgggtacacattctacacgagagcccaagacatgaagaacacgaaccaaaacaatgctgttcgtatccatgccatgggacacgatggaacaactggcacgtattacggtgccatcgaggacatatgggaacttgactatggtcctctcaaggtccctctgttccggtgccaatgggttaggttgactggtggagacgtaacgattgatgacagtgggatgacaacggttgaccttaacaaggttggatactcggacgaaccttttgtccttgccaatgatgtaacgcaagtattttacatgaaggacatgtctagcaaaggaaagaagggcaaagggcctgacgagccgaagcgccacgtggttctctcagcgcgcccacgtcttctccaccaacacttagatgtttttttccccgatctcggcttctccttcgccgccactgcctagggcatccccgcaccgacgccgccgtcgtatctcgtcgtcgtctcgcgggtgtcgtcgtcgccacctccgccgccaccgcatctctaggacttagcaaatatttcttgtatgaacaggcggctgatcacgatgaggaacagatactatacgatacaatcgcagagggaagcagccagtactggaacgaagaagaggggaacaaggatccaaaccagtacttgaacgaggaagggaatgtggagagggatgtggaggggaacgaggaggggaacgtggaaagagaaggatgaggctagtgggagtcaaccctccgctggacagaagagggcacgcggacaacgaggtgccgcgaagaagctagagggtcgacacatcataacggaagtggacgaagacggccgacctagtgccccggctgaagcagccaagaactacgtacgacacaacggttgggttgtgcgggataacgtgcctgtcagtacggtgtactggcgcagaacaagggcatgcggagatcatgagagctttgtcccagattcggagaaagagatactgtgaaccacaatgctcgagacattcacccttcccgtgggtacagagaacatagtgaaaaggtggactctaaataaaatggcaaaacagttttagagcttcaagggagatctgtaccagaaatacatcctgaaggggcagacaccgaacttcaacacattcccgaagctaagggatcactgggacgagtttattgcttacaagacaggtcaacaagggcaggcaatgatggaaagaaacaaagaaaataccgccaagaagaaataccatcaccacttggggtcaggcggctatagcgtcgcgatgctgaagtgggaggagatggaggcaagcttgcttgagaggggtatcgaaccggccaccgctaaatggccggatcgatcgaagttctggtactatgctcacggtggaacgctcaacccagttgatggctccctggtcttcatagatcagatacgcgaggctgcgagtcgactaacggacgcagtggaagcctcttctcagggcacgttccgacccaatagagagaaggacgagctgtcactcgccctgcagactcccgagcatccaggacgaacacgagggaaaggggtgattccttggaagattggattcaaggaggacatccacacgtacaggagtcggatgaggagcaagagagataccgagacgaagattgcagatcttgagtacatggtatcgagctacgagctcaacatgcaagagtaggtggcaaggaaggtggatgaacgcatggccgcacatcggtcccaagatccccagccgtacattcctcctgcaatggtcagcccttcaggcaatcgtagcagctgcgcctcaacggggcaggtaggatcacagagcatggacgccatgcaaacccgggacgaaaccacctgccccgttgatgacatcactcagcggacacaccatgtgagctgcatattcccttcaagaacttatcaataaaggtggcgtcgggcatggccatcccaacggacccttcaaggacttaccactgcaggccgattccagtaggatactccaaggtcgaagttgagttggtggaagccgcgcacgagaacctcgagttggactaccctggagcagacggtgagacgcatctacgagacacaagccacaccattatattatggcgcaagcggtacatcatcctccctgggcgacaagcggcgtctcgtgcaccatctcctctggctccgccatctcctcctcaggctcctgcaccgtctcctccacatgctccagcaccgtctccacctcaggctcctgcaccgactcctcctcaggctcctgcaccgactcttcctcaggctcctgcaccgactcctcctcaagctcctcgtccggcaccttccaagtcaagggccccccaagctccaccgcctgccctcacaagggcaacgaagaaggcgaaagttgacgccgccaaaaacaaggacctggggtacgattgcatgcaagaggagcttgacgcttatgtggcatcagaagtcaggagacaattgaagcctcgaagtccagaaaagaagattcctatagacccgagtgtcaggaacttcttcaggggtatgtctgcacctgccaaggaggccataaagctatcagactatgagcgaacacttaagaaagcatcttctggaaagtccaaaccagtccctcagcttggagagtaaccaaaccaggagatcgagccgttggtgaccagtgaagaatttggaatacaagattttattaatgacaccaggctaactacggatcaattgctacgaggcgcactaatcgaaaaggcggaagtgaaatacatgtacgaactcggtaaaccgtttgtcaagcctgagcagctgcagtccctaccgacacaaatgtacaaattctatcaactgtacatggagatgagcgccaccggtatagagatgatcggagcgaggatcagggacacggacttcttgcaaggagaagatattctctggatcaattttaagggtatctacgaactataccagctggacgccctcgacgtctctattatgagttgttggactttaatggagattcaaaggtcccgacggcggggggttttcgatactggattcatcgaccctcggaaagtaaacgtcgaaatgatcaccaagtatctgcaagccatagaggacaatctcgtccatctcctgaaggcgcagcattataagacgttcatactattgccgtacaacacagaattccactgggttcttttactcttcgacttggaggcctgcgtagtcaatgtatatgactcaatggataaaaaagagtctacgtttgaccaggtttttgaacttatagacagggcttggtatcggttccgtcatttggtccgcggcaaatggagagaaagacttaggcggaagtttaaatttcatgttattcgcatgagggataacctcacacacaaggaatttatcgtggcggttcaagaataactcatgggattcatcaacgaacaaatccttgatcctgagggtgaattctactacgacggaaatacaattcataggtcgttagcttctgagataacgactactactacacgacgccggccaaggacaaatccgccacgcccaaacacgtcgagggtggacgcggcgcgacgcaatcgcaagcggtggcggaaggagcacctcagtgtatcggccttcttcttcgagcgcctggtacagtggctcatggagcaccaagagagcctccaccgctagtcatgcctacctctctctctatctctctctctctc

SEQ ID NO: 93244 - DNA, 6567 bp, Oryza sativa
  Clone ID: PAT_MRT4530_91648C.1
atggcggccgcgacggcaagcgggaagcccctcgtggccttcccttggcgtagtagggcgttgcgttgtcgggcattgctggcggcggtgactggccaggagcccatcgtggcctccctaggcatgggggagggaggaggagggaggaggcagcggggattcgtggcggcggagtcatcgcgcgggcagaaagtgcggtggaggaatcggatggatcggcaatggatgtacgctgaccggcggtccaaagagtttattgacggcgtgcattattttttgagagtggccgaagctaacaggcaaaagggttttatttgttgtccatgcaataagtgtaagaatcagaaggagtattctgcatccagaactattcatttccacttgtttgagtcggggttcatgccaagctataattgttggacatcccacgaagagcaaggtgttgaaatggaagaagatgaagtggaagacgacaatattccggactttgctcagtacgttggatttgaaggaaatcaaacgggcgagaaggaaagggatgctgatggtaacgacgttgcggatgatcttggtcagatgttgcaggatgccaaggaggactgcgaaagtgaaaagggggcccataaattggacaagatgttagaggaccatagaacgtcgttgtacccaggttgcgagcaggggcacaaaaagttggataccactctggagttcttgcaatggaaggcaaaaaatggggttagtgacaaggcatttggcgatttattgaaactcgtcaagaacattcttccggagggaaacaaattgcctgagacaacgtacgaggctaagaagatagtctaccctctaggactggaagtttagaagattcacgcatgtccgaatgattgtatcctatatcgcggtgaggagtacgagaacctagaagcatgccctgtttgcaaagcactacgatacaagattagacgagacgatccaggagaagttgacgggcagctaacaaagaagagaattcctgctaaagtgatgtggtattttcctataataccacggctaaggcgtttgttcaggaacaaggggaatgctagaatgatgcgatggcacgctgaagagcgtcaacaggacgtgatgctgagacaccccgccgatggttcgcagtggcgaaacatcgatagaaaatttaaatactttggaaaggacgcacgaaacatacggtttggtttgagtacggatggcataaatccttttggagagatgagcagcggccatagcactaggcccgttacgatgtgtatctacaacctccccctagctatgcatgaagaggaagtacataatgatgccgattattattcagggccccaagcaacctggtaacgacatcgatgtgtacctaagaccactggtcgaagattttaaactgttgtggaagaaggaaggtgtccccatgtgggacgaggacaaacaggaggagtttaacctacaagcgctgctgttcgtaaccatcaacgattggcctgcacttagcaacctatccggacagtccaacaaggggtacaaggcttgcactcactgtatgtatgaaacagaaagtacgtatcttaagcactgtaggaaggttgtatacatgggtcatcgtcgattccttgcagcaaactacccggtatgaaagaaaggcaagcactttgaatataaggcggaccatcgtacgaagcctaaacatcgcagcgggaaaacagtgtttgctatggttaaagatcttaaagtagtgtttggaaaggggcctggaagccagcctatagagagcgaagatggtcacgcggcgatatggaaaaagaactctatattttgggagttaccctattgggaattcttggacgtccgccacgcaatcggtgtgatgcacctcactaagaacctttgcgtaaaccttcttggcttcctaggtgtatacggaaagtcgaaagatactctggaagcacgtaatgatctgaagcatatggaacaacgcgtcgaccttcacccggaaccaaaggagaaaggaagccattacttgagtccagccagctacactcttagcaaggcagagaaggaaagtatgtttgaatgcttggagagcataaaggtaccatctggatactccacgaatatcaagcgaataataagcacgaaggagaagaagttcacaaacctaaagtctcatgactgtcacgtattgatgacacaactgctaccagttgtaataaggggtatccttccagacaatgtccgggcaacaataacaaagctatgtgcatacatgaacgcaatttcgcagaaggtcatcgatccggatagattagaagcccttcagaatgatgtggtgcaatgtgtcgtcagttttgagttgatatttccaccttcatttttcaatataatgacgcatctgctttgtcaccttgtcaaagagatcagtattttcgggcctgtgttcctacacaacatgtttcctttcgagaggtacatgggcgttctgaagaagtatgttcgtaaccgtgctcgtccagaggcaagtatcgccaagggttatggaacagaagaagtcatcgaattttgcgttgaatttatcgaagaccttcgcccaatcgaggtacctgaatcacgccatgaagggagactacggggaaagggaactctcggaaggaaagcaataatgacggtagacaacaatttattccgtaaagcccatttcacggttctacaacaatcttcattggtaactccttacatcgaggagcacttggctctagttcgcgccaggaacatcggcaagtccgatgcatggattacacggcatcacattgatactttccccgcgtggctacgacaacatctcatgggtaacgagtcgatcaaccaacaacttgccttcctagcgaggggaccgtctgggtcgatcgcgacattccagggatataagatcaatgggtacacattctacacgagagcccaagacatgaagagcacgaaccaaaacagcgctgttcgtgtcgatgccatgggacacaattgaacaactgacacgtattacggtgccatcgaggacatatgggaacttgactatgatcctctcaaggtccatctgttccggtgccaatgggttaggttgactggtgaaggcgtaatgattaatgacagtgggatgacaacggttgaccttaacaaggttggatactcggacgaaccttttgtccttgccaatgatgtaacgcaagtcttttacgtgaaggacatgtctagcaaaggaaagaagggcagagggcctgatgagcctaagcgtcacgtggttctcccaggcaaaagaaaaatcgtgtatctctcctctcttcttttctcctcttcgttaccactttccttctcgttcttacctccgatccccttctctttctcacgcgcgcgcgcccgagcaggagagagcgaggcgcggtgaggggcactagggaacggcggccggcgtaacggcgacggaggccggcgagaccagctgtttcctgtatgaacagatggctgatcgcgatgaggaacaaatattgtacgatacaatcgcggagggaagcagccagtactggaatgaagaagaggggaacgaggatccaaaccagtatttgaactaggaagggaacgtggagagggatgtggaggggaaccaggaggggcacgtggagagggatgtggaggggaaccaggaggaggaggctagtggaagtcaaccctccgctggacagaagagggcacgcaggcaacgaggtgccgcgaagaagcttgagggccggcacatcataacggaagtggacgaagacggctgacctagtgccctggcagaagccgccaagaactatgtacgtcatagtggttgggttgtgcgggataacgtgcctgtcagcacggtgtactggcgcagaataagggcacgcggagatcatgagagctttgtcccaaattcagtgaaagagatgctgtggaccacaatgctagagacattcacccttcccgcgggtacagaggacaaagtgaaaaggtggactctgaagaaaatggcagaacaatttcaaagcttcaagggagatctgtaccagaaatatatccggaaggggcagacaccgaactttgacacatttccaaagctaagggatcactgggacgagttcgttgcatataagacaggtgaacaagggcaggcgatgatggaaagaaacaaagaaaatgccgccaagaagaagtaccatcaccacttagggtcagacggctatagcgtcgcgatgccgaagtgggaggagatggaggctagcttggttgagacgggtatcgaaccagccaccactaattggccggaacgatcgaagttctggtactatgctcacggtggaacgctcaacccagctgatggctccctggtcttcggcgatcagatacatgaggctgcgcgtcgactaacagacgcagtggaagcctcttctcagggcacgttccgactggacagagagagggacgagctgtcacttgccctgcagactccagagcatccaggacgaacacgagggaaatgggtgattccttggaagattgggttcaaggaggacatccacacatacaggagtcggatgaggagcaagagagataccgaggtgaagattgcagatcttgagttcagggtatcgagctacgagctcagcatgcaagaggaggtggcaaggaaggttgatgaacgcatggccgcacatcggtcccatgatccccagccgaccattcctcctgcaatgctgagcccatcaggaaatcgtaggagctgcgcctcaacggggcaggtaggatcacagagcatggacaccatgcaaaccctggacgaaaccacctgccccgttgatgacatcactcagcggacaccatgtgagctgcatattctcccttcaagaacttatcaataaaggtggcgtcgggcatggccatcccaacggacccttcagatacttaccactgcaggccgattccagcaggatactccaaggtcgaagttgagttggtcgaaggcgcgtacgaggacctcgagctggattaccctggaggagacggtgagacgcatctacgagacacaagccacgccattattctatggtgcaagcggtacatcatcctccctgggcgacaagcggcgtctcgtgcaccatctcctccggctccgccatctcctcctcaggctcctgcaccgtctcctcctcatgctccagcaccgtctccacctcaggctcctacaccgactcctcctcaggctcctacaccgactcctctgcaagctcctcttctggcaccttccaagtcaagggccccccaagctccaccgcctgcccccacaagggcaacgaagaaggcgaaagttgacgggggtacgactgcacgcaagaggagcttgacgcttacgtggcatcagaagtcaggagacaattcaagcctcgaagtctagaaaagaagattcctatagacgcgagtgtcaggaacttcttcaggggtatgtctgcacctgccaaggaggccataaagctatcggactatgagcgaacactcaagaaagcatcttctggaaagtccaaaccagtccctcagcttggagagcaaccaaaccaggagatcgagccgttggtgaccggtgaagattttggaatacaagactttattaatgacaccgggctaactacgtatcaattgctacgagacgcaccaatcgaaaatgcggaagtgaaatacatgtacgaactcggtaaaccgcttgtcaagcctgagctgctgcagtccctacccacacaaatgtacaagttccatcagctgtacatggagatgagcgccaccggtagagagatgatcggatcgaggatcagggacacggacttcttgcaaggagatgacattctctggatcaatttcaagggaatctacgaactataccagctggatgccctcgacgtctctattatgagttgctggattttaatggagattcaaagggcccgacggcggggggttttcgatactggattcatcgaccctcggaaagtaaacgtcgcaatgctcgaccaatatccacaagccacagaggacaatctcgtccatctcctgaaggcgcagcattacaagacgttcatactgttgccgtacaacacagaattccactgggtgcttttactcttcgacctggaggcctgcaccgtcaacgtatatgactcaatggataaaaaagagtctatgtttgacaaggttttcgaacttatagacagggcttggtatcggttccgtcatttggtccgcggcaaatggagagaaagacttaggcggaagttcaaatttccttttattcgcatgagggataacctgatcacacacaaggaatttatcgcggcggttcacgaacaactcatgggattcatcaacgaacaaatccttgatcccaagggtgaattctactacgacggaaatacaattcataggtccttagcttctgagatatcgactactactacgtcgaaatcgtagctagct

SEQ ID NO: 93245 - DNA, 5413 bp, Oryza sativa
  Clone ID: PAT_MRT4530_91649C.1
tgaagatggatcggcaatggatgtacgctgaccggcggtccaaagagtttattgacggcgtgcattattttttgagagtggccgaagctaacaagcagaagggttttatttgttgtccacgcaataagtgtaagaatcagaaggagtattctgcatccaggactattcatttccacttgtttgagtcggggttcatgccaagctataattgttggacatcccacggagagcaaggggttgaaacggaagaagatgaagtggaagacgacaatattccagactttgctcagtacgctagatttgaaggaaatcaaacgggcgaggaggacatagatgctgattataacgacgttgcggatgatcttggtcagatgttgcaggatgccaaggaggactgcgaaagtgaaaagggggcccataaattggacaagatgttagaggaccacagaacgtcgttgtacccaggttgcgagcagaggcacaaaaagttggataccactctggagttcttgcaatggaaggcaaaaaatggtgttagtgacaaggcatttggcgatttattgaaactcgtcaagaacattcttccggagggaaacaaattgcccgagacaacgtacgaggctaagaagatagtctgccctctaggactggaagttcagaagattcacgcatgtccgaatgattgtatcctatatcacagtgaggagtacgagaacctagaagcatgccctgtttgtaaagcactacgatacaagattagacgagatgatccaggtgaggttgacgggcagctaacgaagaagagaattcctgctaaggtgatgtggtatttccctataataccacggctaaggcgtttgttcaggaacaaggggaatgctagaatgatgcgttggcacgctgaagaacgtcaacaggacggaatgctgagacaccccgcagatggttcgcagtggcaaaacatcgacagaaaatttaaagactttggaaaggacgcacgaaacatacggtttggtttaagtacggatggcatgaatccttttggagagatgagcagcggctatagcacttggcccgttacgatgtgtatctacaacctccccccttggctatgcatgaagagaaagtacataatgatgccgattattattcaaggccccaagcaacctggtaacgacatcgatgtgttcctaagaccactggtcgaagatcttaaactgttgtggaagaaggaaggtgtccccgtgtgggacgaggacaaacaggaggagtttaacctacgagcgctgctgttcgtaaccatcaacgattggcctgcacttagcaacctatctgggcagtccaacaaggggtacaaggcttgcactcactgtatggatgaaacagaatgagtatatggaaagtcgaaagatacactggaagcacgtaatgatctgaagcatatggaacaacgcggcgaccttcacccggaaccacaggagaaaggcagccattacttgagtccagccagctacactcttagcaaggcagagaaggaaagtatgtttcaatgcttggagagcatcaaggtaccgtctggatactccacgaatataaagcgaataataagtacgaaggagaagaaattcacaaacctaaagtctctatgacatgtcacgtgttgatgacacagctgctaccagttataataaggggtatcctcccagacaatgtccgggcaacaataacaaagctatgttctttcatgaacgcaatttcgcataaggtcatcgatccggataggttagaagcccttcagaatgatgtgaggtacatgggcgttctgaagaagtatgttcgtaaccgtgctcgtccagaggcaagcatcgccaatgggtatggaacagaggaggtcattgaattctgcatagaatttattgaagacctttgcccaatcggggtacctgaatcacgccatgaagggagactacggggaaaggggactctcagaagaaaagcaataatgacggtatacaataatttattccgtaaaacccatttcacggttttacaacaatcttcattggtggctccttacatcgaggagcacttggctctagttcgcgccagaaacatcggtaagtccgatgcatggattacacggcatcacattgatactttccccacatggctgcgacaacatctcatgggtaacgagacgattaaccagcaactggccttcttggcgaggggtccatctggctcgatcgcgacattccagggatatgagatcaatgggtatacattctacacaagagcccaagacatgaagagcacgaaccagaacagtgctgttcgtatcgatgccatgggacacgatggtacaattggcacgtattacggtgccatcgaggagatatgggaacttgactatggacctctcaaggtccctctgttccggtgccaatgggttaggttgactggtggaggcgtaacgattgatgacagtgggatgacaacggttgaccttaacaacgttggatactcggacgaaccttttgtccttgccaatgatgtaacgcaagttttttacgtgaaggacatgtctagcaaaggaaagaagggcaaagggcctgactagccgaagcgccatgtggttctcccaggcaaaagaaaaatcgtcggagtagaggacaagactgacgaggattacgatcagtttgataggcaaccccctttcacggtgacggttgaccctagcatcctcctatcaaacgaagacaccctttactcacgtagcgatcacaaggaaggaacaatatacttgaacgagaaggggaacgcggagagggatgcagaggggaacgaggaggggaacgtggagagggatgcggaggggaacgaggaggaggctagtggaagtcatccctccgctggacagaagaggacacgcggacaatgaggtgtcgcgaagaagatacagggttggcacatcataactgaggtggacgcagacggccgacctagtgctccggcacaagcagccaagaattttgtacgccacagcggttgggttgtgagggataacgtgcctgtcagcaaggtgtactggcgcagaacaagggcacgcgggggtgatgacagctttgtcccggaatcagagaaagagatgctgtggaccacaatgctcgagacgttcacgctccctgcgggtacagagaacatagtgaaacagtggactcttaacaaaatggcagaacagttcgagaccttcaagggagatctgtaccggaaatacatcctcaaggggcagacaccgaacttcgacgtattcccgaagctaagggatcactgggacgagttcgttgcttacaagacaggtcaacaagggcaggcgatgatggaaagaaacaaagaaaatgccaccaagaagaagtaccatcaccacttggggtcaggcggctatagcgtcgcgatgccgaaatgggaggagatggaggcaagcttgcttgagaggggtatcgaaccggccatcgctaaatggcctgatcgatcgaagttctggtactatgctcacggtggaacgctcaacccagttgatggctccttggtcttcagcgatcagatacgcgaggctgcgaatcgactaacggatgcagtggaagcctcttctcaaggcacattccgacccgacagagagaaggacgagctgagtcggatgaggagcaagagagataccgaggcgaagattgcagatcttgagtacagggtatcaagctatgagctcagcatgcaagaggagatggcccggaaggtggatgaacgcatggcagcacatcggtcacacgatccccagccgtacatacctcctccaatggtcagcccatcagacaatcgtagcagctgtgcctcaacggggcaagtggtgtcgggaatggccatcccaacgtacatttcagggacttaccactgcaggccaattccagcaggatactcgagggtcgaagttgagctggtggaagccgtgtacgaggacctcgagttggactacccaggaggagatggtgagacgcatctacgagacacaagccacgccattatactatggcgcaagcggtacatcatcctccctaggcgacaagcggcgtctcgtgcaccatctcctccggctccgccgccacctcctcctgcaccatctcctccggctcctccgcctcctcctccaccgtgtccgcctgcacctcccaagacaaggtctcgacatgctccacctcctgccagcacaagggcaacgaagaaggccaaagttgacaccaccaaaaacaaggagccgccgtacggttgcagtcaagaggagcttgacgcttatgtggcaggagaagtgaagaggcaactcaagcctcggagtcctgaaaagaagatacctattgacccgagcgtgaagaatttcttcaagggaatgtccaccgcaaacaaggaggccttaaagctatcggactatgaccgaacacttaggaaagcctattacaagaagtccaaaccagttcctcagcttggagaacaaccacaccaagtggtcgagccgttggtgaccagcgaagactttggcataacggatttcatttcggacaccggtctaaccatggctcagttggttggaggcgcaccaatcccgaaggcggaagtggcatacatgtttgaactcggtaaaccgcttgtcaggcctgagcagctgcagtccctaccgacacaaatgtacaaattccatgaacggtacatggaaatgagcgccaatggtagagagatgttcggagcgaggatcagaaaccccgacttcttgcaaggagaagatgttctatggatccatttcaaggatgtcttcgatctgtaccatctggacgccctcgacgtctctcttctgagcgcatggattttaatggagattcaaagggtccgacggcggagggtttacgatactgggttcatcgaccctcggaaaatcaacaccgaaatgctcgacaagtacgagaaagacacagaggacaatctagtccatctcctaacgcagcagcatttcaagacgttcatactattgccgtacaacacagaagtcattgtgtacgactgaatgaataaagaggagaaggtttttgacaaggtcttccaactgatagacagggcttgggatcggttccgtcaattggtccacgggacttggaaagaaaaacttggatggaggtttcattttccacgtattcacatgagggaaaaactcccacacaaggattttatcacggctgttcaaaaacaacagatggggttcatcaacgaagaagtccttaatcccgatggtgaattctactacgacggatcgacaatttgtaacgtcggtccttcctcttctgacgtaccgcaggcgtcgaaattatagcta

SEQ ID NO: 93246 - DNA, 430 bp, Oryza sativa
  Clone ID: PAT_MRT4530_9164C.1
ccccctcctccccttcccctctctgtcgctcgccggcgggctgtggcgcggcagcggatggcaggcaacggtggcagcgggcgcgggctacgtcctcgatctcgtcaagaagcacctccagtgcgtgctatctctttcttttcttttttcggcttcaacatctatgggttgatcttgtcacttctctagttgaggggtctaaagattattcgtggaagtgaagatgttgattacttgattagtggacatgcttcatgtggatcgtgttttgttaattgcgttgctcctgatctatcgattttgtataggggatcgattattgatgaccactttgtggatgattttgtgatgtcatttgtgaatgatttttaaatatttttgtgaatttgaggatgattttgttgtcgagtaaaaaaaaaaaaaaaaaaaa

SEQ ID NO: 93247 - DNA, 242 bp, Oryza sativa
  Clone ID: PAT_MRT4530_91650C.1
cgagctcggtacccggggatccttaatggataagtaacctccggtctacttaaatcaatctggttcaaataggcattggacgggggggcaaaacccaaatccaggaatgtttgctttaaaggtgtatggcaatggcgacatttcataaactcagacctaaaaaggtggaatctagtaaggggtgattttggtctcgctgggataattcggtaattgcttggggccactcaatccctaggcga

SEQ ID NO: 93248 - DNA, 5190 bp, Oryza sativa
  Clone ID: PAT_MRT4530_91651C.1
atggaagaagatgaagtggaagacgacaatattccggactttgctcagtatgttggatttgaaggaaatcaaacgggcgaggaggaaatagctgctgatggtaacgacgttgcggatgatcttggtcagatgttgcaggacgccaatgaggactgcgaaagtgaaaaggaggcccataaattggacaagatgttggaggaccacacaacttcgttgtacccagattgcgagcaggggcacaaaaagttggataccactctggagttcttgcaatggaaggcaaaaaatggggttagtgacaaggcttttggcgatttattgaaactcgtcaagaacattcttccggagggaaacaaattgcccaagacaacgtacgaggctaagaagatagtctgcccgctaggactggaagttcagaagattcacgcatgtccgaatgattgtatcctatatcgcggtgaggagtatgagaacctagaagcatgccctgtttgcatagcactacgatacaagattagacgagacgatccaggagaagttgacgggcagctaacaaagaagagaattcctgctaaggtgatgtggtatttccctataataccacggctaaggcgtttgttcaggaacaaggggaatactagaatgatgcgatggcacgctgaagagcgtcaacaggacaggatgctgagacaccccgccgatggttcgcagtggcgaaacatcgacagaaaatttaaagaatttggaaaggacgcacgaaacatacggtttgatcttaaactgttgtggaataaggaatgtgtccccgtgtgggacgaggacaaacaggaggagtttaacctacgagcgctgctgttcgtaaccatcaacgattggcctgcacttagcaacctatccggacagtccaacaaggggtacaaggcttgcactcactgtatggatgaaacagaaagtacgtatcttaagcactgtaggaaggtcgtatacatgggtcatcgtcgattccttgcagcaaaccacccggtacggaagaaaggcaagcacttcgaacataaggccgaccaccgtacgaagcctaaacatcgcagcgggaaaacagtgtttgctatggttaaagatcttaaagtagtgttcggaaaggggcctggaagccagcctatagagagcgaagatggtcacgcggcgatgtggaaaaagaactctatattttgggagttaccatattgggaattcttggacatacgccacacaatcgacgtgatgcacctcactaagaacctttgcgtaaaccttcttggcttcctaggtgtatacggaaagttgaaagatacactggaagcacgtaatgatctgaaacatatggaacaatgcggcgaccttcacccggaaccaaaggagaaaggaagccattacttgagtccagccagctacactcttagcaaggcagagaaggaaagtatgtttgaatgcttggagagcataaagaaggtcatcgatccggatagattagaagcccttcagaatgaagtggtgcaatgtctcgtcagttttgagttgatatttctaccttcatttttcaatataatgacgcatctgctttgtcaccttgtgaaagagatcagtattctcgggcctgtgtacctacacaacatgtttcctttcgagaggtacataggcgttctgaagaagtatgttcgtaaccgtgctcgtccagaggcaagcatcgccaagggttatggaacagaggaggccatcgaattttgcgtagaatttatcgaagaccttcgcccaatcggggtacctgaatcacgccatgaagggagactacggggagagggaactctcggaaggaaagcaataatgacggtagacaacaatttattccgtaaagcccatttcactgttctgcaacactcttcattggtagctccttacatcgaggagcaattggctctagttcacgccaggaacatcggtaagtccgatgcatggattacacggcatcacattgatacttttcccgcgtggctacgacaacatctcatgggtaacgagtcgatcaaccaacaacttgccttcctggcgaggggaccgtctggatcgatcgcgacattccagggatatgagatcaatgggtacacattctacacgagagcccaagacatgaagagcacgaaccaaaacagcgctgttcgtgtcgatgccatgggacacgatggaacaactggcacgttttacggtgccatcgaggacatatgggaacttgactatggtcctctcaaggttcctctgttccggtgccaatgggttaggttgactggtggagacgtaatgattgatgacagtgggatgacaactgttgaccttaacaaggttggatactcggacgaaccttttgtccttgccaatgatgtaacgcaagtctttttcgtgaaggacatgtctagcaaaggaaagaagggcagagggcctgacgagcctaagcgtcaagtggttctcctaggcaaaagaaaaatcgtcggagttgaggacaagactgacgaggattacgatcagttggataggcaaccccctttcacggtgacgattgaccctagcatcctcctatcaaatgaagacaccccttactcacgtagcgatcacaaggagggaacaatagtgaggagaaaaaacacatatacgtcgcgccacgacgacgccgcgccatgccgccgccttcgccgccacgccaacgccgccgccttcgccgccgcgcaacgccacgccacgccgccgcgccacgcgccggcccgatgccgccacaccgccgtgaacgaacacgtgaacgagaacgaacacgtcaacgtgaccgagaacgtgaacgagggaacgaacgtgatcgagaacgtgaacgagggaacgaatgtgaccgagaacgagaacgatcgaacgaacgtgaacgagaacgagaacgagcgaacgaacgtgaatgagaacgagcgaacgaacgtgaacgagaacgaacgtgaacgagaacgtgaacgagtgaatgaacgtgaacgcaaacgagcgaacgagaacgagggaacgaacgtgaacgtgaaccaggacgagggaacgaacatggctgatcacgatgaggaacagatattgtacgatacaatcgcggagggaagcagccagtactggaatgaagaagaggggaacgaggatccaaaccagtacttgaatgaggaagggaacgtggagagggatgcggaggggaaccagcaggggcacacggaaagggatgtggaggggaaccaggaggaggaggctagtggaagtcaaccctccgttggacagaagagggcacgcgggcaacgagaggacaaagtgaaaaagtggactctgaagaaaatggcagaacagtttcagagcttcaagggagatctgtaccagaagtatatcttgaaggggcagacaccgaacttcgacacattcccaaagctaagggatcactgggacgagttcgttgcatataagacaggtgaacaagggcaggcgatgatggaaagaaacaaagaaaatgccgccaagaagaagtaccatcaccacttggggtcaggaggctatagcgtcgcgatgccgaatggaatgctcaacccagctgatggctcactggtcttcgacgatcagatacgagaggctacgcgacgactaacagatgcagtggaagcctcctctcagggcacgttccgaccggacagagatagggatgagctgacactcgccctgcagactccagagcatccaggacgaacacgagggaaaggggtgattccttggaagattggtttcaaggaggacatccacacgtacaggagtcggatgaggagcaagagagataccgaggcgaagattgcagatctagagttccgggtatcgagctacgagctcagcatgcaagaggaggtggcaaggaaggttgatgaacgcatggccgcacatcggtcccatgatctccagccgaccattcctcctgcaatggtgagcccgtcaggaaaccgtagcagctgcgcctcaacggggcaggtaggatcacagagcatggacgccatgcaaacccaggacgaatcgacctgtcccgttgatgacatcactcagcggacaccatgtgagctgcatattcctttcaagaacttatcaataaaggtggcatcgggcatggccatcccaacggacccttcaggtacttaccactgcaggccgattccagcaggatactcgaaggttgaagttgagttggtcgaaggcgcgtacgaggacctcgagttggattaccctggaggagacggtgagacgcatctacgagacacaagccatgccattattctatggtgcaggcggtacatcatcctccctgggcgacaagcggcgtctcgtgcaccatctcatccggctccgccatctcctcctcaggatcctgcaccgtctcctcctcatgctccgccagcaccgtctccacctcaggctccagcaccgactcctccccaggctcctgcactgactcctccttgggctcctacacctactcctccgcaagctcctcttccaacaccttcaaagtcaagggcccccccagctccaccgcctgcccacacaagggcaacgaagaaggcgaaagttgacgccgccaagaacaaggacccggggggtatgtctgcacctgtcaaggaggccatcaagctatcggactatgagcgaacgctgaagaaagcatcttctggaaagtccaaaccagtccctcagcttggagagcaaccaaaccaggagatcgagccgttggtgaccggtgaagacatgacgatagaagaatttattactgacaccggtctaactacggatcaattgctaggagtcgaaccaatagaaaaggcggaagtgaaatacatgtacgaactcggtaaaccgcttgtcaagcccgagctggtgcagtccctacccacacaaatgtacaagttccatcagctgtacatggagatgagcgccaccggtagagagatgatcggagtgaggatcagggacctggacttcttgcaaggagatgacattctctggatcaatttcaatgtagtaaatttgtttggtgctccatggtgcccgggcaccattgttgaaattgagtatatacccaattcaaatgagtatgaaactttttcatttacttag

SEQ ID NO: 93249 - DNA, 744 bp, Oryza sativa
  Clone ID: PAT_MRT4530_91652C.1
cccgggctgcaggcccataacaggaaaagaagtcagaacaggttggaaggacctggactttcagtttctcaaaaggtttgtattgtattagcactgttggtggccaatatatatggtcccgcttgcagtctttttctgctttccgtcgatggggtgattctgaacagagaccactagcacgtcgcgcttggggcttggtgcagcatgctgaaggcttatacagagcttcttcattctttaaccttttgttatttctttatggtgcaagatataaaactattgttgaaaggattctgaaagcatgacttgtttatgagagccccaacatgaatagggcagtaagctttgagtacatgaaccggcaactggtttggaatgaattttcggaaatgttgcttttgcttcttcccctcttaaactcatcctcagtaaagaagtttcttctacctttctccaaagataaatcagcaagttcttctggcgatgaagcagactgccctatatgtcgctccagtcctagcattcccttcgaagctctcccatgtcaacacaggtattgctattactgcctgcaaacacgttgtgcagccacaaactcgtatagatgtgcaaggtgtaatgagattgttgttgcaattcaaagacaaggatcaagttagtttagagttgaatccatatacatacagtgtaacaaaagccaatacagcttactggattcgcgacatctcacatgattttttccca

SEQ ID NO: 93250 - DNA, 1929 bp, Oryza sativa
  Clone ID: PAT_MRT4530_91653C.1
atggcgtcctacgttccttgttccagttcctcaacccatcgatccaggaacttttgtgacttagttttggtctatgctataattggttccatgcattcttcaatgacactattttcagtctgcaagatactgtctttatatgtagacatgtgttttgttgactattcgaaggaagttcattcttatctaaagtactgcaaagatgtggtttttactggaatgacattttcactagaagaggagcatttaatagatatcttttgggatatgtacaaagggaaagaggatgagaatgcaaaattgtgtcaggaaaagttgagaactacaaatggagtgaataaacgctgccgagatggaagttcaaattattctctgcagaacaaaggcatcctgattttccatatcattccggactatcatcccgaaaatccatggaacgtgcttcacccttcgaacaaacgttttgaagagagaaaaagctgcactgatgcaggtatgctacccggtccccttctcccacttccgccgccgccaccaccggagctcgtagtgtatccctctgtgccgagcctgccaccttcagccacgccgccgtcatcgtcgtcgtccataggctccagcattgccattgtcgtcctcgtcgtcattaccacggccatcgtgactgtcgccattgttgtcattcgacgcagctaccgccgtgggcgccgcctgtcctgctcatcgttctccccacgccgcagcttatccccaagggctttgtcatcttcgccatcagcaatgtctcagatgtggcgcgcggcagttgcagctgtcggttcttcaccgagggccagtgctgccagtgccaggtcctggccggaaatggccgcgccctcttcagctccaggcgatcccggcagaggccctccagtggcattgtcgagctctgcacaaggggcagtgcaggggacggctggattgatggcgtcctcggctacctcagctgctgcgatggcgccgccgccgtctgcgccgtctctgccggaggtggagcgggtgatattggagctgctctcgctgccaccttcgccgttgcagccggcgatgagcggcagcacggcgacctgcttcatctgcaacaaactgcttctcccaactgatctgcacctcgtccttccggtgtgctcccacatgttccaccagcgctgcctcgtcgcctggctccgcagccgcgtcacgccgctgctatgctgccccgagtgccatgctcccatcaccacccgctgccgcaccgacaagagaagcctcgttccaaccttctgctcaggggagtacgacatcgagtcgcagattctggcggtgcccgcgccgccagccgagaaggtggcggaggcagtggggggatctcgtgggtggctgcgctcctcgctggacaggctctccggcagctggagggcgtgctccggcagccgcgccgtcgcagcggtggcggcgccggggtgctcctcgtcgcgccgcaccaccggaagctggagccctggcactggcagcacgagcggccgccacctccacctcggcgctgactcgcgtggcgttcagacggaggtgcagctgcagctgcagctgccggtgctgcctctcgctgatgaagaggtggctgcagccgacgatgatgctgggggatctcgcggctggctccgctcttctctggccacactctctgggagctgggccgtgttccccaccaccagccgctccaccgcaatggagctaccagtgtcctcctcgcggcgcacggcagctgggagcaccgactcgtggtcggggagctgggatcctgaggcgttgagggtgtcggagccgcaaccacgagagagaccatcggtgctcgactacgccagatgggtgttcagaaactcaggcaagtatacaaaacatcggcactga

SEQ ID NO: 93251 - DNA, 285 bp, Oryza sativa
  Clone ID: PAT_MRT4530_91654C.1
atggccaccgtccaatccacaaaacaatatctcgccggtcgccggcgccggcgagatcggtcggctacggagtactgtagtagagtacagtacagccgctgctgctgcttcttcgcaagctgccggctgggccgcattcatcactcgccgcagaaaaagtcgcggccacggccggcgaatttacaggcttcaccaataattttgacccttcaggatggcacaacagtgtgtgattcagatactgctgtttcctactgcgagtacatgctgtgtatctgcttgtag

SEQ ID NO: 93252 - DNA, 369 bp, Oryza sativa
  Clone ID: PAT_MRT4530_91655C.1
atgaggaagcaacggggatcttcttctgctgtctccatttggaaggcgctcctgattctcctggctctcatctgcgccctgcgcccagctcaaggagggagaggtgtgtccgtgggatatccaggtcctcgttccaacaaggccagcagttactccaggggcggcgtgggatgcagcagtatcgacgagtgcgacgcccctccagctccagggagagcaggagcagcagatgcaattggtaggaacggagcgctgaatccaccacggtacccggtgcccaggattcccggcgaaccttacacacgcccgggacggggatgcaccgttgcatacggatgctatggaggtcctccagctgccaaaccatga

SEQ ID NO: 93253 - DNA, 1733 bp, Oryza sativa
  unsure (1)..(1733): unsure at all n locations
  Clone ID: PAT_MRT4530_91656C.1
atggccgtggaggagtcgccgccgccgccgccgtcgtccccgccgccgccgccgtcgtccccgcagccagcggcggaggtcggcgcggggggacggcgcgcggacaagagcgggcgccgcctcgaggtgtacagcgaggtactcgcccgcctccggggcctcggcgccgccgcccccgtcgagatctcgccggcctacgaggacgcgctctgggcccacttccaccgcctccccgcccggtacgcgctggatgtgcacgcggatagggcggaggacgtggtgacgcaccaccggttgctggaggaggcgcgcgatccggaccggcggcccgccttgtcggtgcgcgtcgtccaggtttctaggattcttgatggtgatatggatgattgttctgagcttgggatggagccggttcataccaaccacttggcaagacaaatggttcatccccctcctgcctttggttcttgctccaacttagaggcacttgcgctcgaggcgagtgaggctaatctaaggagcagtaacaatgatgaagatagcagtgttcatctcatttccaggccaatgcatgagataacttttgcaacaactgataagccaaaggtccttagtcagctgacttgcttgcttagtgagcttggtcttgacatccaagaagcgcatgcattttcaacaagtgatggttactcattggatgtatttgttgtcactggttggcaccttgggggtactgagcagctaaaagaaaagttgctggagaagtttcatgacattgagacacaagcttggccaacatcaaactcatcgtcacaatcattggaaggtccgtcaggtggagagagtatgccatctaccagtgtggaaataccaacagatgggacggatgtttgggagatagatctcaagcttctcaagtttggaaccaaggttgcttctggatcaaatggcgatctgttccgtggatcatactgcagtcaggatgtagctattaaagtagtgagacctgaacgcattagtgcagatatgtaccgtgattttgcacaggaagtctacattatgagagtgtgcagagtgatatttgctcctgtcattgaacttctaaatgagagcgatcatatttttcaggtcgtaaaggttgcagattttggtgttgcacgtgtcaaagatcaatccggagtgatgactgcagagactggaacttatcgttggatggcacctgaggtcattgaacataagccctatgatcataaagcagatgtttttagctttggtattgttctatgggagctgctaactggcaagataccctatgagtacctaacaccactacaagcagccataggtgttgttcagaagggccttagaccaacaattccgaaagatacgcaccccaagctgtctgagctgcttcagaaatgctggcatagagatcctgctgaaaggcctgacttctcccagatactggagattcttcagagactccccaaagaggtgagagctgataccgagggtcgccagaaatcaaaggcaggatttctttcagcattgaagagaaaccactgaaagtagcttatatacnatgttggtgcatcattcaattgtagcatcccacaacaagagggaagcgcatagtggtgtacagtggttaaaaaaaaagtatttcttacgttgttgcagctttgttttttttgcttatttagtattttttttcagctttttggtttcttttg

SEQ ID NO: 93254 - DNA, 468 bp, Oryza sativa
  Clone ID: PAT_MRT4530_91657C.1
cggacgcgtgggcggacgcgtgggcaactggcaaaacaatcagcgtgacaagtgacagcggactgcatacatcctacagtaacttgttatattttagtcggagggaaatgatatatacatatgaatgtacatgtgtatcctcttactcggggaaataattggcttaaggtacatatatgtttaactcgaattgaacaattactcctatattaattacttaaaaaaaaaaaaaaaaaaaaaaaaaaaaaaaaaaaaaaaaaaaaaaaaaaaaaaaaaaaaaaaaaaaaaaaaaaaaaaaaaaaaaaaaaaaaaaaaaaaaaaaaaaaaggggggggcccttttaaagaaccaaattttacttcccggggttggaaaagtaatattttttttttggggcccccaaaataaaataacggggccgggttttaaaaccgtgggaatgggaaaacccttgggttccccaaatta

SEQ ID NO: 93255 - DNA, 740 bp, Oryza sativa
  Clone ID: PAT_MRT4530_91658C.1
tgaacctggcagcgccttcacctcgtgtagatcaaaaggcactagctggcaatgcgactgataaagtagatacagctgacggtagaacagaatcacatcactgttcgacccaggaaagacgacctattttatcagaagaacaagatactgaagatacaattgagtttgacaccaagttgtcgacttcagagggtgcatcaagtatagagaggattaagtcagtgggtaaatcaagaacaaataccataagtaaagatcatctaaaaaacttggtaccgtttacagaagaatggcttgctgtcatggaagcttttggagaggaagttttggaacagaagacgggcgctgtgcaaaattctcctaccgacaaagctgctccagaacctagtccatggtcaccggttaaacggaaagctcaagatgttgggccattcgactgtaccaagtattccaagaacgtcagaacaagtgactgatgataccccttgacagcaatcaaatcgttggccttggacttgtcttgaggtcagagcacaacacgaagccttgctcgcaacaagttggtcctgttgttccatgtaattggctaaccttgtacatgagacattcacaagccttgccactgcgcttacttgcgctcattttgctgttatttggttgccaaatttgtagaacatcgttcggaccacgtcccaggcaaacgcttggctaacaaatcaataaagggaaactcttgttcc
